United States Patent Application Publication US 2023/0026259 A1 - sequence listing, part 15

SEQ ID NO: 67786 - protein, 389 aa, Homo sapiens
  Payload ID: 13527
  Gene Symbol: PSMD6
  Gene Name: proteasome 26S subunit, non-ATPase 6
  Uniprot ID: Q15008
  ENSP ID: ENSP00000295901
MPLENLEEEGLPKNPDLRIAQLRFLLSLPEHRGDAAVRDELMAAVRDNNMAPYYEALCKSLDWQIDVDLLNKMKKANEDELKRLDEELEDAEKNLGESEIRDAMMAKAEYLCRIGDKEGALTAFRKTYDKTVALGHRLDIVFYLLRIGLFYMDNDLITRNTEKAKSLIEEGGDWDRRNRLKVYQGLYCVAIRDFKQAAELFLDTVSTFTSYELMDYKTFVTYTVYVSMIALERPDLREKVIKGAEILEVLHSLPAVRQYLFSLYECRYSVFFQSLAVVEQEMKKDWLFAPHYRYYVREMRIHAYSQLLESYRSLTLGYMAEAFGVGVEFIDQELSRFIAAGRLHCKIDKVNEIVETNRPDSKNWQYQETIKKGDLLLNRVQKLSRVINM

SEQ ID NO: 67787 - protein, 351 aa, Homo sapiens
  Payload ID: 13527
  Gene Symbol: PSMD6
  Gene Name: proteasome 26S subunit, non-ATPase 6
  Uniprot ID: Q15008
  ENSP ID: ENSP00000377952
MNESNDSTNYDMAPYYEALCKSLDWQIDVDLLNKMKKANEDELKRLDEELEDAEKNLGESEIRDAMMAKAEYLCRIGDKEGALTAFRKTYDKTVALGHRLDIVFYLLRIGLFYMDNDLITRNTEKAKSLIEEGGDWDRRNRLKVYQGLYCVAIRDFKQAAELFLDTVSTFTSYELMDYKTFVTYTVYVSMIALERPDLREKVIKGAEILEVLHSLPAVRQYLFSLYECRYSVFFQSLAVVEQEMKKDWLFAPHYRYYVREMRIHAYSQLLESYRSLTLGYMAEAFGVGVEFIDQELSRFIAAGRLHCKIDKVNEIVETNRPDSKNWQYQETIKKGDLLLNRVQKLSRVINM

SEQ ID NO: 67788 - protein, 144 aa, Homo sapiens
  Payload ID: 13527
  Gene Symbol: PSMD6
  Gene Name: proteasome 26S subunit, non-ATPase 6
  ENSP ID: ENSP00000418303
MPLENLEEEGLPKNPDLRIAQLRFLLSLPEHRGDAAVRDELMAAVRDNNFWNRIRQEQTEDCPPSSPSRDMAPYYEALCKSLDWQIDVDLLNKMKKANEDELKRLDEELEDAEKNLGESEIRDAMMAKAEYLCRIGDKEGALTA

SEQ ID NO: 67789 - protein, 442 aa, Homo sapiens
  Payload ID: 13527
  Gene Symbol: PSMD6
  Gene Name: proteasome 26S subunit, non-ATPase 6
  Uniprot ID: Q15008
  ENSP ID: ENSP00000418695
MPLENLEEEGLPKNPDLRIAQLRFLLSLPEHRGDAAVRDELMAAVRDNNFWNRIRQEQTEDCPPSSPSRGWHCQDWPSRKPPTSIRLCFAKPIIKRHRMPSYMAPYYEALCKSLDWQIDVDLLNKMKKANEDELKRLDEELEDAEKNLGESEIRDAMMAKAEYLCRIGDKEGALTAFRKTYDKTVALGHRLDIVFYLLRIGLFYMDNDLITRNTEKAKSLIEEGGDWDRRNRLKVYQGLYCVAIRDFKQAAELFLDTVSTFTSYELMDYKTFVTYTVYVSMIALERPDLREKVIKGAEILEVLHSLPAVRQYLFSLYECRYSVFFQSLAVVEQEMKKDWLFAPHYRYYVREMRIHAYSQLLESYRSLTLGYMAEAFGVGVEFIDQELSRFIAAGRLHCKIDKVNEIVETNRPDSKNWQYQETIKKGDLLLNRVQKLSRVINM

SEQ ID NO: 67790 - protein, 138 aa, Homo sapiens
  Payload ID: 13527
  Gene Symbol: PSMD6
  Gene Name: proteasome 26S subunit, non-ATPase 6
  ENSP ID: ENSP00000418843
  MOD_RES (1)..(1): Any amino acid
XNDLITRNTEKAKSLIEEGGDWDRRNRLKVYQGLYCVAIRDFKQAAELFLDTVSTFTSYELMDYKTFVTYTVYVSMIALERPDLREKVIKGAEILEVLHSLPAVRQYLFSLYECRYSVFFQSLGNCPGLLLPGDYTAK

SEQ ID NO: 67791 - protein, 226 aa, Homo sapiens
  Payload ID: 13527
  Gene Symbol: PSMD6
  Gene Name: proteasome 26S subunit, non-ATPase 6
  ENSP ID: ENSP00000418887
MPLENLEEEDFWNRIRQEQTEDCPPSSPSRGWHCQDWPSRKPPTSIRLCFAKPIIKRHRMPSYMAPYYEALCKSLDWQIDVDLLNKMKKANEDELKRLDEELEDAEKNLGESEIRDAMMAKAEYLCRIGDKEGALTAFRKTYDKTVALGHRLDIVFYLLRIGLFYMDNDLITRNTEKAKSLIEEGGDWDRRNRLKVYQGLYCVAIRDFKQAAELFLDTVSTFTSYE

SEQ ID NO: 67792 - protein, 350 aa, Homo sapiens
  Payload ID: 13527
  Gene Symbol: PSMD6
  Gene Name: proteasome 26S subunit, non-ATPase 6
  Uniprot ID: Q15008
  ENSP ID: ENSP00000419227
MPLENLEEEDMAPYYEALCKSLDWQIDVDLLNKMKKANEDELKRLDEELEDAEKNLGESEIRDAMMAKAEYLCRIGDKEGALTAFRKTYDKTVALGHRLDIVFYLLRIGLFYMDNDLITRNTEKAKSLIEEGGDWDRRNRLKVYQGLYCVAIRDFKQAAELFLDTVSTFTSYELMDYKTFVTYTVYVSMIALERPDLREKVIKGAEILEVLHSLPAVRQYLFSLYECRYSVFFQSLAVVEQEMKKDWLFAPHYRYYVREMRIHAYSQLLESYRSLTLGYMAEAFGVGVEFIDQELSRFIAAGRLHCKIDKVNEIVETNRPDSKNWQYQETIKKGDLLLNRVQKLSRVINM

SEQ ID NO: 67793 - protein, 324 aa, Homo sapiens
  Payload ID: 13528
  Gene Symbol: PSMD7
  Gene Name: proteasome 26S subunit, non-ATPase 7
  Uniprot ID: P51665
  ENSP ID: ENSP00000219313
MPELAVQKVVVHPLVLLSVVDHFNRIGKVGNQKRVVGVLLGSWQKKVLDVSNSFAVPFDEDDKDDSVWFLDHDYLENMYGMFKKVNARERIVGWYHTGPKLHKNDIAINELMKRYCPNSVLVIIDVKPKDLGLPTEAYISVEEVHDDGTPTSKTFEHVTSEIGAEEAEEVGVEHLLRDIKDTTVGTLSQRITNQVHGLKGLNSKLLDIRSYLEKVATGKLPINHQIIYQLQDVFNLLPDVSLQEFVKAFYLKTNDQMVVVYLASLIRSVVALHNLINNKIANRDAEKKEGQEKEESKKDRKEDKEKDKDKEKSDVKKEEKKEKK

SEQ ID NO: 67794 - protein, 177 aa, Homo sapiens
  Payload ID: 13528
  Gene Symbol: PSMD7
  Gene Name: proteasome 26S subunit, non-ATPase 7
  ENSP ID: ENSP00000454999
MPELAVQKVVVHPLVLLSVVDHFNRIGKVGNQKRVVGVLLGSWQKKVLDVSNSFAVPFDEDDKDDSVWFLDHDYLENMYGMFKKVNARERIVGWYHTGPKLHKNDIAINELMKRYCPNSVLVIIDVKPKDLGLPTEAYISVEEVHDDGTPTSKTFEHVTSEIGAEEAEEVGVEHLLR

SEQ ID NO: 67795 - protein, 43 aa, Homo sapiens
  Payload ID: 13528
  Gene Symbol: PSMD7
  Gene Name: proteasome 26S subunit, non-ATPase 7
  ENSP ID: ENSP00000455953
MPELAVQKVVVHPLVLLSVVDHFNRVSPCCPRCPCSSQTPELK

SEQ ID NO: 67796 - protein, 198 aa, Homo sapiens
  Payload ID: 13528
  Gene Symbol: PSMD7
  Gene Name: proteasome 26S subunit, non-ATPase 7
  ENSP ID: ENSP00000457244
MPELAVQKVVVHPLVLLSVVDHFNRIGKVGNQKRVVGVLLGSWQKKVLDVSNSFAVPFDEDDKDDSVWFLDHDYLENMYGMFKKVNARERIVGWYHTGPKLHKNDIAINELMKRYCPNSVLVIIDVKPKDLGLPTEAYISVEEVHDDGTPTSKTFEHVTSEIGAEEAEEVGVEHLLRCRTSSTCCQMSACRSSSRPFT

SEQ ID NO: 67797 - protein, 350 aa, Homo sapiens
  Payload ID: 13529
  Gene Symbol: PSMD8
  Gene Name: proteasome 26S subunit, non-ATPase 8
  Uniprot ID: P48556
  ENSP ID: ENSP00000215071
MFIKGRAPRAPPRERRRATRGGLRQVVAPPRALGSTSRPHFRRASVCRRRCRKSGGLLAASRKMAAAAVNGAAGFSSSGPAATSGAVLQAATGMYEQLKGEWNRKSPNLSKCGEELGRLKLVLLELNFLPTTGTKLTKQQLILARDILEIGAQWSILRKDIPSFERYMAQLKCYYFDYKEQLPESAYMHQLLGLNLLFLLSQNRVAEFHTELERLPAKDIQTNVYIKHPVSLEQYLMEGSYNKVFLAKGNIPAESYTFFIDILLDTIRDEIAGCIEKAYEKILFTEATRILFFNTPKKMTDYAKKRGWVLGPNNYYSFASQQQKPEDTTIPSTELAKQVIEYARQLEMIV

SEQ ID NO: 67798 - protein, 172 aa, Homo sapiens
  Payload ID: 13529
  Gene Symbol: PSMD8
  Gene Name: proteasome 26S subunit, non-ATPase 8
  ENSP ID: ENSP00000465107
MAQLKCYYFDYKEQLPESAYMHQLLGLNLLFLLSQNRVAEFHTELERLPAKDIQTNVYIKHPVSLEQYLMEGSYNKVFLAKGNIPAESYTFFIDILLDTIRDEIAGCIEKAYEKILFTEATRILFFNTPKKMTDYAKKVAGVQGKGPWDQGVKSLTTVWGGLEGHWNKTAQV

SEQ ID NO: 67799 - protein, 250 aa, Homo sapiens
  Payload ID: 13529
  Gene Symbol: PSMD8
  Gene Name: proteasome 26S subunit, non-ATPase 8
  ENSP ID: ENSP00000465287
MAAAAVNGAAGFSSSGPAATSGAVLQAATGMYEQLKGEWNRKSPNLSKCGEELGRLKLVLLELNFLPTTGTKLTKQQLILARDILEIGAQWSILRKDIPSFERYMAQLKCYYFDYKEQLPESAYMHQLLGLNLLFLLSQNRVAEFHTELERLPAKDIQTNVYIKHPVSLEQYLMEGSYNKVFLAKGNIPAESYTFFIDILLDTIRDEIAGCIEKAYEKILFTEATRILFFNTPKKMTDYAKKVAGVQGKG

SEQ ID NO: 67800 - protein, 63 aa, Homo sapiens
  Payload ID: 13529
  Gene Symbol: PSMD8
  Gene Name: proteasome 26S subunit, non-ATPase 8
  ENSP ID: ENSP00000465418
YLMEGSYNKVFLAKGNIPAESYTFFIDILLDTISELGLVMGLWITALISPPLAVDMCGHVCQT

SEQ ID NO: 67801 - protein, 129 aa, Homo sapiens
  Payload ID: 13529
  Gene Symbol: PSMD8
  Gene Name: proteasome 26S subunit, non-ATPase 8
  ENSP ID: ENSP00000467146
MAAAAVNGAAGFSSSGPAATSGAVLQAATGMYEQLKGEWNRKSPNLSKCGEELGRLKLVLLELNFLPTTGTKLTKQQLILARECHWGEIGLGAVAPAHQGGSSHLGSLWEAEVGGSPEVRSSRPAWSTW

SEQ ID NO: 67802 - protein, 67 aa, Homo sapiens
  Payload ID: 13529
  Gene Symbol: PSMD8
  Gene Name: proteasome 26S subunit, non-ATPase 8
  ENSP ID: ENSP00000468445
MAQLKCYYFDYKEQLPESAYMHQLLGLNLLFLLSQNRVAEFHTELERLPAKDIQTNVYIKHPVSLEQ

SEQ ID NO: 67803 - protein, 287 aa, Homo sapiens
  Payload ID: 13529
  Gene Symbol: PSMD8
  Gene Name: proteasome 26S subunit, non-ATPase 8
  ENSP ID: ENSP00000473312
MAAAAVNGAAGFSSSGPAATSGAVLQAATGMYEQLKGEWNRKSPNLSKCGEELGRLKLVLLELNFLPTTGTKLTKQQLILARDILEIGAQWSILRKDIPSFERYMAQLKCYYFDYKEQLPESAYMHQLLGLNLLFLLSQNRVAEFHTELERLPAKDIQTNVYIKHPVSLEQYLMEGSYNKVFLAKGNIPAESYTFFIDILLDTIRDEIAGCIEKAYEKILFTEATRILFFNTPKKMTDYAKKRGWVLGPNNYYSFASQQQKPEDTTIPSTELAKQVIEYARQLEMIV

SEQ ID NO: 67804 - protein, 350 aa, Homo sapiens; identical to SEQ ID NO: 67797
  Payload ID: 13529
  Gene Symbol: PSMD8
  Gene Name: proteasome 26S subunit, non-ATPase 8
  Uniprot ID: P48556
  ENSP ID: ENSP00000481136

SEQ ID NO: 67805 - protein, 222 aa, Homo sapiens
  Payload ID: 13530
  Gene Symbol: PSMD9
  Gene Name: proteasome 26S subunit, non-ATPase 9
  ENSP ID: ENSP00000261817
MSDEEARQSGGSSQAGVVTVSDVQELMRRKEEIEAQIKANYDVLESQKGIGMNEPLVDCEGYPRSDVDLYQVRTARHNIICLQNDHKAVMKQVEEALHQLHARDKEKQARDMAEAHKEAMSRKLGQSESQGPPRAFAKVNSISPGSPASIAGLQVDDEIVEFGSVNTQNFQSLHNIGSVVQHSEGPLNVTVIRRGEKHQLRLVPTRWAGKGLLGCNIIPLQR

SEQ ID NO: 67806 - protein, 223 aa, Homo sapiens
  Payload ID: 13530
  Gene Symbol: PSMD9
  Gene Name: proteasome 26S subunit, non-ATPase 9
  Uniprot ID: O00233
  ENSP ID: ENSP00000440485
MSDEEARQSGGSSQAGVVTVSDVQELMRRKEEIEAQIKANYDVLESQKGIGMNEPLVDCEGYPRSDVDLYQVRTARHNIICLQNDHKAVMKQVEEALHQLHARDKEKQARDMAEAHKEAMSRKLGQSESQGPPRAFAKVNSISPGSPASIAGLQVDDEIVEFGSVNTQNFQSLHNIGSVVQHSEGKPLNVTVIRRGEKHQLRLVPTRWAGKGLLGCNIIPLQR

SEQ ID NO: 67807 - protein, 179 aa, Homo sapiens
  Payload ID: 13530
  Gene Symbol: PSMD9
  Gene Name: proteasome 26S subunit, non-ATPase 9
  ENSP ID: ENSP00000440500
MSDEEARQSGGSSQAGVVTVSDVQELMRRKEEIEAQIKANYDVLESQKGIGMNEPLVDCEGYPRSDVDLYQVRTARHNIICLQNDHKAVMKQVEEALHQLHARDKEKQARDMAEAHKEAMSRKLGQSESQGPPRAFAKVNSISPGSPASIAVIQGLATQVHAQGTRVCKWMMRLWSSAL

SEQ ID NO: 67808 - protein, 85 aa, Homo sapiens
  Payload ID: 13530
  Gene Symbol: PSMD9
  Gene Name: proteasome 26S subunit, non-ATPase 9
  ENSP ID: ENSP00000442210
MSDEEARQSGGSSQAGVVTVSDVQELMRRKEEIEAQIKANYDVLESQKGIGMNEPLVDCEGYPRSDVDLYQVRTARHNIIWSASG

SEQ ID NO: 67809 - protein, 153 aa, Homo sapiens
  Payload ID: 13530
  Gene Symbol: PSMD9
  Gene Name: proteasome 26S subunit, non-ATPase 9
  ENSP ID: ENSP00000443081
MSDEEARQSGGSSQAGVVTVSDVQELMRRKEEIEAQIKANYDVLESQKGIGMNEPLVDCEGYPRSDVDLYQVRTARHNIICLQNDHKAVMKQVEEALHQLHARDKEKQARDMAEAHKEAMSRKLGQSESQGPPRAFAKVNSISPGSPASIAVI

SEQ ID NO: 67810 - protein, 118 aa, Homo sapiens
  Payload ID: 13530
  Gene Symbol: PSMD9
  Gene Name: proteasome 26S subunit, non-ATPase 9
  Uniprot ID: O00233
  ENSP ID: ENSP00000443772
MSDEEARQSGGSSQAGVVTVSDVQELMRRKEEIEAQIKANYDVLESGLQVDDEIVEFGSVNTQNFQSLHNIGSVVQHSEGKPLNVTVIRRGEKHQLRLVPTRWAGKGLLGCNIIPLQR

SEQ ID NO: 67811 - protein, 128 aa, Homo sapiens
  Payload ID: 13530
  Gene Symbol: PSMD9
  Gene Name: proteasome 26S subunit, non-ATPase 9
  ENSP ID: ENSP00000443968
MNEPLVDCEGYPRSDVDLYQVRTARHNIICLQNDHKAVMKQVEEALHQLHARDKEKQARDMAEAHKEAMSRKLGQSESQGPPRAFAKVNSISPGSPASIAVIQGLATQVHAQGTRVCKWMMRLWSSAL

SEQ ID NO: 67812 - protein, 209 aa, Homo sapiens
  Payload ID: 13530
  Gene Symbol: PSMD9
  Gene Name: proteasome 26S subunit, non-ATPase 9
  Uniprot ID: O00233
  ENSP ID: ENSP00000445058
MSDEEARQSGGSSQAGVVTVSDVQELMRRKEEIEAQIKANYDVLESQKGIGMNEPLVDCEGYPRSDVDLYQVRTARHNIICLQNDHKAVMKQVEEALHQLHARDKEKQARDMAEAHKEAMSRKLGQSESQGPPRAFAKVNSISPGSPASIAGLQVDDEIVEFGSVNTQNFQSLHNIGSVVQHSEGALAPTILLSVSMNLTTPGTSSRSP

SEQ ID NO: 67813 - protein, 249 aa, Homo sapiens
  Payload ID: 13531
  Gene Symbol: PSME1
  Gene Name: proteasome activator subunit 1
  Uniprot ID: Q06323
  ENSP ID: ENSP00000206451
MAMLRVQPEAQAKVDVFREDLCTKTENLLGSYFPKKISELDAFLKEPALNEANLSNLKAPLDIPVPDPVKEKEKEERKKQQEKEDKDEKKKGEDEDKGPPCGPVNCNEKIVVLLQRLKPEIKDVIEQLNLVTTWLQLQIPRIEDGNNFGVAVQEKVFELMTSLHTKLEGFHTQISKYFSERGDAVTKAAKQPHVGDYRQLVHELDEAEYRDIRLMVMEIRNAYAVLYDIILKNFEKLKKPRGETKGMIY

SEQ ID NO: 67814 - protein, 250 aa, Homo sapiens
  Payload ID: 13531
  Gene Symbol: PSME1
  Gene Name: proteasome activator subunit 1
  Uniprot ID: Q06323
  ENSP ID: ENSP00000372155
MAMLRVQPEAQAKVDVFREDLCTKTENLLGSYFPKKISELDAFLKEPALNEANLSNLKAPLDIPVPDPVKEKEKEERKKQQEKEDKDEKKKGEDEDKGPPCGPVNCNEKIVVLLQRLKPEIKDVIEQLNLVTTWLQLQIPRIEDGNNFGVAVQEKVFELMTSLHTKLEGFHTQISKYFSERGDAVTKAAKQPHVGDYRQLVHELDEAEYRDIRLMVMEIRNAYVRRQGQGRGGQRQLSQATHSLTLQARG

SEQ ID NO: 67815 - protein, 90 aa, Homo sapiens
  Payload ID: 13531
  Gene Symbol: PSME1
  Gene Name: proteasome activator subunit 1
  ENSP ID: ENSP00000452843
MTSLHTKLEGFHTQISKYFSERGDAVTKAAKQPHVGDYRQLVHELDEAEYRDIRLMVMEIRNAYAVLYDIILKNFEKLKKPRGETKGMIY

SEQ ID NO: 67816 - protein, 114 aa, Homo sapiens
  Payload ID: 13531
  Gene Symbol: PSME1
  Gene Name: proteasome activator subunit 1
  ENSP ID: ENSP00000453340
KEDKDEKKKGEDEDKGPPCGPVNCNEKIVVLLQRLKPEIKDVIEQLNLVTTWLQLQIPRIEDGNNFGVAVQEKVFELMTSLHTKLEGFHTQISKYFSERGDAVTKAAKQPHVVG

SEQ ID NO: 67817 - protein, 233 aa, Homo sapiens
  Payload ID: 13531
  Gene Symbol: PSME1
  Gene Name: proteasome activator subunit 1
  Uniprot ID: Q06323
  ENSP ID: ENSP00000453976
MAMLRVQPEAQAKVDVFREDLCTKTENLLGSYFPKKISELDAFLKEPALNEANLSNLKAPLDIPVPDPVKEKEKEERKKQQEKEDKDEKKKGEDEDKGPPCGPVNCNEKIVVLLQRLKPEIKDVIEQLNLVTTWLQLQIPRIEDGNNFGVAVQEKVFELMTSLHTKLEGFHTQISKYFSERGDAVTKAAKQPHVGDYRQLVHELDEAEYRDIRLMVMEIRNAYVRRLCYMTSS

SEQ ID NO: 67818 - protein, 239 aa, Homo sapiens
  Payload ID: 13532
  Gene Symbol: PSME2
  Gene Name: proteasome activator subunit 2
  Uniprot ID: Q9UL46
  ENSP ID: ENSP00000216802
MAKPCGVRLSGEARKQVEVFRQNLFQEAEEFLYRFLPQKIIYLNQLLQEDSLNVADLTSLRAPLDIPIPDPPPKDDEMETDKQEKKEVHKCGFLPGNEKVLSLLALVKPEVWTLKEKCILVITWIQHLIPKIEDGNDFGVAIQEKVLERVNAVKTKVEAFQTTISKYFSERGDAVAKASKETHVMDYRALVHERDEAAYGELRAMVLDLRAFYAELYHIISSNLEKIVNPKGEEKPSMY

SEQ ID NO: 67819 - protein, 85 aa, Homo sapiens
  Payload ID: 13532
  Gene Symbol: PSME2
  Gene Name: proteasome activator subunit 2
  ENSP ID: ENSP00000452940
METDKQEKKEVHKCGFLPGNEKVLSLLALVKPEVWTLKEKCILVITWIQHLIPKIEDGNDFGVAIQEKVLERVNAVKTKVEAFQT

SEQ ID NO: 67820 - protein, 48 aa, Homo sapiens
  Payload ID: 13532
  Gene Symbol: PSME2
  Gene Name: proteasome activator subunit 2
  ENSP ID: ENSP00000453161
MAKPCGVRLSGEARKQVEVFRQNLFQEILATENHIPESALARGLPQCG

SEQ ID NO: 67821 - protein, 39 aa, Homo sapiens
  Payload ID: 13532
  Gene Symbol: PSME2
  Gene Name: proteasome activator subunit 2
  ENSP ID: ENSP00000453195
MAKPCGVRLSGEARKQVEVFRQNLFQEVFSFLICKSWTQ

SEQ ID NO: 67822 - protein, 228 aa, Homo sapiens
  Payload ID: 13532
  Gene Symbol: PSME2
  Gene Name: proteasome activator subunit 2
  ENSP ID: ENSP00000453487
MAKPCGVRLSGEARKQAEEFLYRFLPQKIIYLNQLLQEDSLNVADLTSLRAPLDIPIPDPPPKDDEMETDKQEKKEVHKCGFLPGNEKVLSLLALVKPEVWTLKEKCILVITWIQHLIPKIEDGNDFGVAIQEKVLERVNAVKTKVEAFQTTISKYFSERGDAVAKASKETHVMDYRALVHERDEAAYGELRAMVLDLRAFYAELYHIISSNLEKIVNPKGEEKPSMY

SEQ ID NO: 67823 - protein, 254 aa, Homo sapiens
  Payload ID: 13532
  Gene Symbol: PSME2
  Gene Name: proteasome activator subunit 2
  ENSP ID: ENSP00000484569
MAKPCGVRLSGEARKQVEVFRQNLFQEAEEFLYRFLPQKIIYLNQLLQEDSLNVADLTSLRAPLDIPIPDPPPKDDEMETDKQEKKEGKRDKRKGLNPLFLTVHKCGFLPGNEKVLSLLALVKPEVWTLKEKCILVITWIQHLIPKIEDGNDFGVAIQEKVLERVNAVKTKVEAFQTTISKYFSERGDAVAKASKETHVMDYRALVHERDEAAYGELRAMVLDLRAFYAELYHIISSNLEKIVNPKGEEKPSMY

SEQ ID NO: 67824 - protein, 39 aa, Homo sapiens; identical to SEQ ID NO: 67821
  Payload ID: 13532
  Gene Symbol: PSME2
  Gene Name: proteasome activator subunit 2
  ENSP ID: ENSP00000485798

SEQ ID NO: 67825 - protein, 267 aa, Homo sapiens
  Payload ID: 13533
  Gene Symbol: PSME3
  Gene Name: proteasome activator subunit 3
  Uniprot ID: P61289
  ENSP ID: ENSP00000293362
MASLLKVDQEVKLKVDSFRERITSEAEDLVANFFPKKLLELDSFLKEPILNIHDLTQIHSDMNLPVPDPILLTNSHDGLDGPTYKKRRLDECEEAFQGTKVFVMPNGMLKSNQQLVDIIEKVKPEIRLLIEKCNTPSGKGPHICFDLQVKMWVQLLIPRIEDGNNFGVSIQEETVAELRTVESEAASYLDQISRYYITRAKLVSKIAKYPHVEDYRRTVTEIDEKEYISLRLIISELRNQYVTLHDMILKNIEKIKRPRSSNAETLY

SEQ ID NO: 67826 - protein, 265 aa, Homo sapiens
  Payload ID: 13533
  Gene Symbol: PSME3
  Gene Name: proteasome activator subunit 3
  Uniprot ID: P61289
  ENSP ID: ENSP00000409487
MEKWILKKIKYLQSGGLSASYYSYKVDSFRERITSEAEDLVANFFPKKLLELDSFLKEPILNIHDLTQIHSDMNLPVPDPILLTNSHDGLDGPTYKKRRLDECEEAFQGTKVFVMPNGMLKSNQQLVDIIEKVKPEIRLLIEKCNTVKMWVQLLIPRIEDGNNFGVSIQEETVAELRTVESEAASYLDQISRYYITRAKLVSKIAKYPHVEDYRRTVTEIDEKEYISLRLIISELRNQYVTLHDMILKNIEKIKRPRSSNAETLY

SEQ ID NO: 67827 - protein, 130 aa, Homo sapiens
  Payload ID: 13533
  Gene Symbol: PSME3
  Gene Name: proteasome activator subunit 3
  ENSP ID: ENSP00000437924
MASLLKVDQEVKLKVDSFRERITSEAEDLVANFFPKKLLELDSFLKEPILNIHDLTQIHSDMNLPVPDPILLTNSHDGLDGPTYKKRRLDECEEAFQGQNVGTAPDSQDRRWKQLWGVHSGGNSCRAKNC

SEQ ID NO: 67828 - protein, 231 aa, Homo sapiens
  Payload ID: 13533
  Gene Symbol: PSME3
  Gene Name: proteasome activator subunit 3
  ENSP ID: ENSP00000438237
MASLLKVDQEVKLKVDSFRERITSEAEDLVANFFPKKLLELDSFLKEPILNIHDLTQIHSDMNLPVPDPILLTNSHDGLDGPTYKKRRLDECEEAFQGTKVFVMPNGMLKSNQQLVDIIEKVKPEIRLLIEKCNTEETVAELRTVESEAASYLDQISRYYITRAKLVSKIAKYPHVEDYRRTVTEIDEKEYISLRLIISELRNQYVTLHDMILKNIEKIKRPRSSNAETLY

SEQ ID NO: 67829 - protein, 193 aa, Homo sapiens
  Payload ID: 13533
  Gene Symbol: PSME3
  Gene Name: proteasome activator subunit 3
  ENSP ID: ENSP00000441682
MNLPVPDPILLTNSHDGLDGPTYKKRRLDECEEAFQGTKVFVMPNGMLKSNQQLVDIIEKVKPEIRLLIEKCNTVKMWVQLLIPRIEDGNNFGVSIQEETVAELRTVESEAASYLDQISRYYITRAKLVSKIAKYPHVEDYRRTVTEIDEKEYISLRLIISELRNQYVTLHDMILKNIEKIKRPRSSNAETLY

SEQ ID NO: 67830 - protein, 42 aa, Homo sapiens
  Payload ID: 13533
  Gene Symbol: PSME3
  Gene Name: proteasome activator subunit 3
  ENSP ID: ENSP00000465155
MASLLKVDQEVKLKTASDTGGREGRGRTEETGRCCPQSPAFF

SEQ ID NO: 67831 - protein, 118 aa, Homo sapiens
  Payload ID: 13533
  Gene Symbol: PSME3
  Gene Name: proteasome activator subunit 3
  ENSP ID: ENSP00000465743
MNLPVPDPILLTNSHDGLDGPTYKKRRLDECEEAFQGTKVFVMPNGMLKSNQQLVDIIEKVKPEIRLLIEKCNTVKMWVQLLIPRIEDGNNFGVSIQEETVAELRTVESEAASYLDQI

SEQ ID NO: 67832 - protein, 96 aa, Homo sapiens
  Payload ID: 13533
  Gene Symbol: PSME3
  Gene Name: proteasome activator subunit 3
  ENSP ID: ENSP00000466451
MNLPVPDPILLTNSHDGLDGPTYKKRRLDECEEAFQGTKVFVMPNGMLKSNQQLVDIIEKVKPEIRLLIEKCNTVKMWVQLLIPRIEDGNNFGVSI

SEQ ID NO: 67833 - protein, 254 aa, Homo sapiens
  Payload ID: 13533
  Gene Symbol: PSME3
  Gene Name: proteasome activator subunit 3
  Uniprot ID: P61289
  ENSP ID: ENSP00000466794
MASLLKVDQEVKLKVDSFRERITSEAEDLVANFFPKKLLELDSFLKEPILNIHDLTQIHSDMNLPVPDPILLTNSHDGLDGPTYKKRRLDECEEAFQGTKVFVMPNGMLKSNQQLVDIIEKVKPEIRLLIEKCNTVKMWVQLLIPRIEDGNNFGVSIQEETVAELRTVESEAASYLDQISRYYITRAKLVSKIAKYPHVEDYRRTVTEIDEKEYISLRLIISELRNQYVTLHDMILKNIEKIKRPRSSNAETLY

SEQ ID NO: 67834 - protein, 179 aa, Homo sapiens
  Payload ID: 13533
  Gene Symbol: PSME3
  Gene Name: proteasome activator subunit 3
  ENSP ID: ENSP00000466945
MASLLKVDQEVKLKVDSFRERITSEAEDLVANFFPKKLLELDSFLKEPILNIHDLTQIHSDMNLPVPDPILLTNSHDGLDGPTYKKRRLDECEEAFQGTKVFVMPNGMLKSNQQLVDIIEKVKPEIRLLIEKCNTEETVAELRTVESEAASYLDQISRYYITRAKLVSKIAKYPHVEDY

SEQ ID NO: 67835 - protein, 110 aa, Homo sapiens
  Payload ID: 13533
  Gene Symbol: PSME3
  Gene Name: proteasome activator subunit 3
  ENSP ID: ENSP00000467580
MNLPVPDPILLTNSHDGLDGPTYKKRRLDECEEAFQGTKVFVMPNGMLKSNQQLVDIIEKVKPEIRLLIEKCNTVKMWVQLLIPRIEDGNNFGVSIQEETVAELRTVESE

SEQ ID NO: 67836 - protein, 198 aa, Homo sapiens
  Payload ID: 13533
  Gene Symbol: PSME3
  Gene Name: proteasome activator subunit 3
  ENSP ID: ENSP00000468702
MASLLKVDQEVKLKVDSFRERITSEPTYKKRRLDECEEAFQGTKVFVMPNGMLKSNQQLVDIIEKVKPEIRLLIEKCNTVKMWVQLLIPRIEDGNNFGVSIQEETVAELRTVESEAASYLDQISRYYITRAKLVSKIAKYPHVEDYRRTVTEIDEKEYISLRLIISELRNQYVTLHDMILKNIEKIKRPRSSNAETLY

SEQ ID NO: 67837 - protein, 170 aa, Homo sapiens
  Payload ID: 13533
  Gene Symbol: PSME3
  Gene Name: proteasome activator subunit 3
  ENSP ID: ENSP00000478159
MASLLKVDQEVKLKVDSFRERITSEAEDLVANFFPKKLLELDSFLKEPILNIHDLTQLLIPRIEDGNNFGVSIQEETVAELRTVESEAASYLDQISRYYITRAKLVSKIAKYPHVEDYRRTVTEIDEKEYISLRLIISELRNQYVTLHDMILKNIEKIKRPRSSNAETLY

SEQ ID NO: 67838 - protein, 571 aa, Homo sapiens
  Payload ID: 13534
  Gene Symbol: PSME4
  Gene Name: proteasome activator subunit 4
  ENSP ID: ENSP00000374643
MEPAERAGVGEPPEPGGRPEPGPRGFVPQKEIVYNKLLPYAERLDAESDLQLAQIKCNLGRAVQLQELWPGGLFWTRKLSTYIRLYGRKFSKEDHVLFIKLLYELVSIPKLEISMMQGFARLLINLLKKKELLSRADLELPWRPLYDMVERILYSKTEHLGLNWFPNSVENILKTLVKSCRPYFPADATAEMLEEWRPLMCPFDVTMQKAITYFEIFLPTSLPPELHHKGFKLWFDELIGLWVSVQNLPQWEGQLVNLFARLATDNIGYIDWDPYVPKIFTRILRSLNLPVGSSQVLVPRFLTNAYDIGHAVIWITAMMGGPSKLVQKHLAGLFNSITSFYHPSNNGRWLNKLMKLLQRLPNSVVRRLHRERYKKPSWLTPVPDSHKLTDQDVTDFVQCIIQPVLLAMFSKTGSLEAAQALQNLALMRPELVIPPVLERTYPALETLTEPHQLTATLSCVIGVARSLVSGGRWFPEGPTHMLPLLMRALPGVDPNDFSKCMITFQFIATFSTLVPLVDCSSVLQERNDLTEVERELCSATAEFEDFVLQFMDRWPFRRFLIFLLHIYLKQE

SEQ ID NO: 67839 - protein, 1843 aa, Homo sapiens
  Payload ID: 13534
  Gene Symbol: PSME4
  Gene Name: proteasome activator subunit 4
  Uniprot ID: Q14997
  ENSP ID: ENSP00000384211
MEPAERAGVGEPPEPGGRPEPGPRGFVPQKEIVYNKLLPYAERLDAESDLQLAQIKCNLGRAVQLQELWPGGLFWTRKLSTYIRLYGRKFSKEDHVLFIKLLYELVSIPKLEISMMQGFARLLINLLKKKELLSRADLELPWRPLYDMVERILYSKTEHLGLNWFPNSVENILKTLVKSCRPYFPADATAEMLEEWRPLMCPFDVTMQKAITYFEIFLPTSLPPELHHKGFKLWFDELIGLWVSVQNLPQWEGQLVNLFARLATDNIGYIDWDPYVPKIFTRILRSLNLPVGSSQVLVPRFLTNAYDIGHAVIWITAMMGGPSKLVQKHLAGLFNSITSFYHPSNNGRWLNKLMKLLQRLPNSVVRRLHRERYKKPSWLTPVPDSHKLTDQDVTDFVQCIIQPVLLAMFSKTGSLEAAQALQNLALMRPELVIPPVLERTYPALETLTEPHQLTATLSCVIGVARSLVSGGRWFPEGPTHMLPLLMRALPGVDPNDFSKCMITFQFIATFSTLVPLVDCSSVLQERNDLTEVERELCSATAEFEDFVLQFMDRCFGLIESSTLEQTREETETEKMTHLESLVELGLSSTFSTILTQCSKEIFMVALQKVFNFSTSHIFETRVAGRMVADMCRAAVKCCPEESLKLFVPHCCSVITQLTMNDDVLNDEELDKELLWNLQLLSEITRVDGRKLLLYREQLVKILQRTLHLTCKQGYTLSCNLLHHLLRSTTLIYPTEYCSVPGGFDKPPSEYFPIKDWGKPGDLWNLGIQWHVPSSEEVSFAFYLLDSFLQPELVKLQHCGDGKLEMSRDDILQSLTIVHNCLIGSGNLLPPLKGEPVTNLVPSMVSLEETKLYTGLEYDLSRENHREVIATVIRKLLNHILDNSEDDTKSLFLIIKIIGDLLQFQGSHKHEFDSRWKSFNLVKKSMENRLHGKKQHIRALLIDRVMLQHELRTLTVEGCEYKKIHQDMIRDLLRLSTSSYSQVRNKAQQTFFAALGAYNFCCRDIIPLVLEFLRPDRQGVTQQQFKGALYCLLGNHSGVCLANLHDWDCIVQTWPAIVSSGLSQAMSLEKPSIVRLFDDLAEKIHRQYETIGLDFTIPKSCVEIAELLQQSKNPSINQILLSPEKIKEGIKRQQEKNADALRNYENLVDTLLDGVEQRNLPWKFEHIGIGLLSLLLRDDRVLPLRAIRFFVENLNHDAIVVRKMAISAVAGILKQLKRTHKKLTINPCEISGCPKPTQIIAGDRPDNHWLHYDSKTIPRTKKEWESSCFVEKTHWGYYTWPKNMVVYAGVEEQPKLGRSREDMTEAEQIIFDHFSDPKFVEQLITFLSLEDRKGKDKFNPRRFCLFKGIFRNFDDAFLPVLKPHLEHLVADSHESTQRCVAEIIAGLIRGSKHWTFEKVEKLWELLCPLLRTALSNITVETYNDWGACIATSCESRDPRKLHWLFELLLESPLSGEGGSFVDACRLYVLQGGLAQQEWRVPELLHRLLKYLEPKLTQVYKNVRERIGSVLTYIFMIDVSLPNTTPTISPHVPEFTARILEKLKPLMDVDEEIQNHVMEENGIGEEDERTQGIKLLKTILKWLMASAGRSFSTAVTEQLQLLPLFFKIAPVENDNSYDELKRDAKLCLSLMSQGLLYPHQVPLVLQVLKQTARSSSWHARYTVLTYLQTMVFYNLFIFLNNEDAVKDIRWLVISLLEDEQLEVREMAATTLSGLLQCNFLTMDSPMQIHFEQLCKTKLPKKRKRDPGSVGDTIPSAELVKRHAGVLGLGACVLSSPYDVPTWMPQLLMNLSAHLNDPQPIEMTVKKTLSNFRRTHHDNWQEHKQQFTDDQLLVLTDLLVSPCYYA

SEQ ID NO: 67840 - protein, 263 aa, Homo sapiens
  Payload ID: 13535
  Gene Symbol: PSMF1
  Gene Name: proteasome inhibitor subunit 1
  ENSP ID: ENSP00000246015
MAGLEVLFASAAPAITCRQDALVCFLHWEVVTHGYFGLGVGDQPGPNDKKSELLPAGWNNNKDLYVLRYEYKDGSRKLLVKAITVESSMILNVLEYGSQQVADLTLNLDDYIDAEHLGDFHRTYKNSEELRSRIVSGIITPIHEQWEKANVSSPHREFPPATAREVDPLRIPPHHPHTSRQPPWCDPLGPFVVGGEDLDPFGPRRGGMIVDPLRSGFPRALIDPSSGLPNRLPPGAVPPGARFDPFGPIGTSPPGPRPDRRGQ

SEQ ID NO: 67841 - protein, 271 aa, Homo sapiens
  Payload ID: 13535
  Gene Symbol: PSMF1
  Gene Name: proteasome inhibitor subunit 1
  Uniprot ID: Q92530
  ENSP ID: ENSP00000327704
MAGLEVLFASAAPAITCRQDALVCFLHWEVVTHGYFGLGVGDQPGPNDKKSELLPAGWNNNKDLYVLRYEYKDGSRKLLVKAITVESSMILNVLEYGSQQVADLTLNLDDYIDAEHLGDFHRTYKNSEELRSRIVSGIITPIHEQWEKANVSSPHREFPPATAREVDPLRIPPHHPHTSRQPPWCDPLGPFVVGGEDLDPFGPRRGGMIVDPLRSGFPRALIDPSSGLPNRLPPGAVPPGARFDPFGPIGTSPPGPNPDHLPPPGYDDMYL

SEQ ID NO: 67842 - protein, 271 aa, Homo sapiens; identical to SEQ ID NO: 67841
  Payload ID: 13535
  Gene Symbol: PSMF1
  Gene Name: proteasome inhibitor subunit 1
  Uniprot ID: Q92530
  ENSP ID: ENSP00000338039

SEQ ID NO: 67843 - protein, 127 aa, Homo sapiens
  Payload ID: 13535
  Gene Symbol: PSMF1
  Gene Name: proteasome inhibitor subunit 1
  ENSP ID: ENSP00000371323
HPHTSRQPPWCDPLGPFVVGGEDLDPFGPRRGGMIVDPLRSGFPRALIDPSSGLPNRLPPGAVPPGARFDPFGPIGTSPPGAGVKMSPAKCLEYQIHGDVSSLGNTRQPQRQLWSESCRFREDTVTS

SEQ ID NO: 67844 - protein, 183 aa, Homo sapiens
  Payload ID: 13535
  Gene Symbol: PSMF1
  Gene Name: proteasome inhibitor subunit 1
  ENSP ID: ENSP00000371324
MAGLEVLFASAAPAITCRQDALVCFLHWEVVTHGYFGLGVGDQPGPNDKKSELLPAGWNNNKDLYVLRYEYKDGSRKLLVKAITVESSMILNVLEYGSQQVADLTLNLDDYIDAEHLGDFHRTYKNSEELRSRIVSGIITPIHEQWEKANVSSPHREFPPATAREVDPLRIPPHHPHTSRQPP

SEQ ID NO: 67845 - protein, 107 aa, Homo sapiens
  Payload ID: 13535
  Gene Symbol: PSMF1
  Gene Name: proteasome inhibitor subunit 1
  ENSP ID: ENSP00000396547
  MOD_RES (1)..(1): Any amino acid
XIHEQWEKANVSSPHREFPPATAREVDPLRIPPHHPHTSRQPPWPRRGGMIVDPLRSGFPRALIDPSSGLPNRLPPGAVPPGARFDPFGPIGTSPPGPNPDHLPPPG

SEQ ID NO: 67846 - protein, 141 aa, Homo sapiens
  Payload ID: 13536
  Gene Symbol: POMP
  Gene Name: proteasome maturation protein
  Uniprot ID: Q9Y244
  ENSP ID: ENSP00000370222
MNARGLGSELKDSIPVTELSASGPFESHDLLRKGFSCVKNELLPSHPLELSEKNFQLNQDKMNFSTLRNIQGLFAPLKLQMEFKAVQQVQRLPFLSSSNLSLDVLRGNDETIGFEDILNDPSQSEVMGEPHLMVEYKLGLL

SEQ ID NO: 67847 - protein, 263 aa, Homo sapiens
  Payload ID: 13537
  Gene Symbol: PSMA1
  Gene Name: proteasome subunit alpha 1
  Uniprot ID: P25786
  ENSP ID: ENSP00000379676
MFRNQYDNDVTVWSPQGRIHQIEYAMEAVKQGSATVGLKSKTHAVLVALKRAQSELAAHQKKILHVDNHIGISIAGLTADARLLCNFMRQECLDSRFVFDRPLPVSRLVSLIGSKTQIPTQRYGRRPYGVGLLIAGYDDMGPHIFQTCPSANYFDCRAMSIGARSQSARTYLERHMSEFMECNLNELVKHGLRALRETLPAEQDLTTKNVSIGIVGKDLEFTIYDDDDVSPFLEGLEERPQRKAQPAQPADEPAEKADEPMEH

SEQ ID NO: 67848 - protein, 269 aa, Homo sapiens
  Payload ID: 13537
  Gene Symbol: PSMA1
  Gene Name: proteasome subunit alpha 1
  Uniprot ID: P25786
  ENSP ID: ENSP00000414359
MQLSKVKFRNQYDNDVTVWSPQGRIHQIEYAMEAVKQGSATVGLKSKTHAVLVALKRAQSELAAHQKKILHVDNHIGISIAGLTADARLLCNFMRQECLDSRFVFDRPLPVSRLVSLIGSKTQIPTQRYGRRPYGVGLLIAGYDDMGPHIFQTCPSANYFDCRAMSIGARSQSARTYLERHMSEFMECNLNELVKHGLRALRETLPAEQDLTTKNVSIGIVGKDLEFTIYDDDDVSPFLEGLEERPQRKAQPAQPADEPAEKADEPMEH

SEQ ID NO: 67849 - protein, 2 aa, Homo sapiens
  Payload ID: 13537
  Gene Symbol: PSMA1
  Gene Name: proteasome subunit alpha 1
  ENSP ID: ENSP00000439080
ME

SEQ ID NO: 67850 - protein, 14 aa, Homo sapiens
  Payload ID: 13537
  Gene Symbol: PSMA1
  Gene Name: proteasome subunit alpha 1
  ENSP ID: ENSP00000439724
MEAVKQGSATVGLK

SEQ ID NO: 67851 - protein, 238 aa, Homo sapiens
  Payload ID: 13537
  Gene Symbol: PSMA1
  Gene Name: proteasome subunit alpha 1
  ENSP ID: ENSP00000441166
MEAVKQGSATVGLKSKTHAVLVALKRAQSELAAHQKKILHVDNHIGISIAGLTADARLLCNFMRQECLDSRFVFDRPLPVSRLVSLIGSKTQIPTQRYGRRPYGVGLLIAGYDDMGPHIFQTCPSANYFDCRAMSIGARSQSARTYLERHMSEFMECNLNELVKHGLRALRETLPAEQDLTTKNVSIGIVGKDLEFTIYDDDDVSPFLEGLEERPQRKAQPAQPADEPAEKADEPMEH

SEQ ID NO: 67852 - protein, 234 aa, Homo sapiens
  Payload ID: 13538
  Gene Symbol: PSMA2
  Gene Name: proteasome subunit alpha 2
  Uniprot ID: P25787
  ENSP ID: ENSP00000223321
MAERGYSFSLTTFSPSGKLVQIEYALAAVAGGAPSVGIKAANGVVLATEKKQKSILYDERSVHKVEPITKHIGLVYSGMGPDYRVLVHRARKLAQQYYLVYQEPIPTAQLVQRVASVMQEYTQSGGVRPFGVSLLICGWNEGRPYLFQSDPSGAYFAWKATAMGKNYVNGKTFLEKRYNEDLELEDAIHTAILTLKESFEGQMTEDNIEVGICNEAGFRRLTPTEVKDYLAAIA

SEQ ID NO: 67853 - protein, 22 aa, Homo sapiens
  Payload ID: 13538
  Gene Symbol: PSMA2
  Gene Name: proteasome subunit alpha 2
  ENSP ID: ENSP00000401954
MAERGYSFSLTTFSCKWCGISN

SEQ ID NO: 67854 - protein, 164 aa, Homo sapiens
  Payload ID: 13538
  Gene Symbol: PSMA2
  Gene Name: proteasome subunit alpha 2
  ENSP ID: ENSP00000404858
MAERGYSFSLTTFRVLVHRARKLAQQYYLVYQEPIPTAQLVQRVASVMQEYTQSGGVRPFGVSLLICGWNEGRPYLFQSDPSGAYFAWKATAMGKNYVNGKTFLEKRYNEDLELEDAIHTAILTLKESFEGQMTEDNIEVGICNEAGFRRLTPTEVKDYLAAIA

SEQ ID NO: 67855 - protein, 18 aa, Homo sapiens
  Payload ID: 13538
  Gene Symbol: PSMA2
  Gene Name: proteasome subunit alpha 2
  ENSP ID: ENSP00000410750
  MOD_RES (1)..(1): Any amino acid
XERGYSFSLTTFSFLQMN

SEQ ID NO: 67856 - protein, 36 aa, Homo sapiens
  Payload ID: 13538
  Gene Symbol: PSMA2
  Gene Name: proteasome subunit alpha 2
  ENSP ID: ENSP00000414832
LSPSGKLVQIEYALAAVAGGAPSVGIKECLCTELEN

SEQ ID NO: 67857 - protein, 255 aa, Homo sapiens
  Payload ID: 13539
  Gene Symbol: PSMA3
  Gene Name: proteasome subunit alpha 3
  Uniprot ID: P25788
  ENSP ID: ENSP00000216455
MSSIGTGYDLSASTFSPDGRVFQVEYAMKAVENSSTAIGIRCKDGVVFGVEKLVLSKLYEEGSNKRLFNVDRHVGMAVAGLLADARSLADIAREEASNFRSNFGYNIPLKHLADRVAMYVHAYTLYSAVRPFGCSFMLGSYSVNDGAQLYMIDPSGVSYGYWGCAIGKARQAAKTEIEKLQMKEMTCRDIVKEVAKIIYIVHDEVKDKAFELELSWVGELTNGRHEIVPKDIREEAEKYAKESLKEEDESDDDNM

SEQ ID NO: 67858 - protein, 248 aa, Homo sapiens
  Payload ID: 13539
  Gene Symbol: PSMA3
  Gene Name: proteasome subunit alpha 3
  Uniprot ID: P25788
  ENSP ID: ENSP00000390491
MSSIGTGYDLSASTFSPDGRVFQVEYAMKAVENSSTAIGIRCKDGVVFGVEKLVLSKLYEEGSNKRLFNVDRHVGMAVAGLLADARSLADIAREEASNFRSNFGYNIPLKHLADRVAMYVHAYTLYSAVRPFGCSVNDGAQLYMIDPSGVSYGYWGCAIGKARQAAKTEIEKLQMKEMTCRDIVKEVAKIIYIVHDEVKDKAFELELSWVGELTNGRHEIVPKDIREEAEKYAKESLKEEDESDDDNM

SEQ ID NO: 67859 - protein, 83 aa, Homo sapiens
  Payload ID: 13539
  Gene Symbol: PSMA3
  Gene Name: proteasome subunit alpha 3
  ENSP ID: ENSP00000450573
HLADRVAMYVHAYTLYSAVRPFGCRIYIVHDEVKDKAFELELSWVGELTNGRHEIVPKDIREEAEKYAKESLKEEDESDDDNM

SEQ ID NO: 67860 - protein, 36 aa, Homo sapiens
  Payload ID: 13539
  Gene Symbol: PSMA3
  Gene Name: proteasome subunit alpha 3
  ENSP ID: ENSP00000451461
MSSIGTGYDLSASTFSPDGRVFQVEYAMKAVENSRQ

SEQ ID NO: 67861 - protein, 180 aa, Homo sapiens
  Payload ID: 13539
  Gene Symbol: PSMA3
  Gene Name: proteasome subunit alpha 3
  ENSP ID: ENSP00000452056
MAVAGLLADARSLADIAREEASNFRSNFGYNIPLKHLADRVAMYVHAYTLYSAVRPFGCSFMLGSYSVNDGAQLYMIDPSGVSYGYWGCAIGKARQAAKTEIEKLQMKEMTCRDIVKEVAKIIYIVHDEVKDKAFELELSWVGELTNGRHEIVPKDIREEAEKYAKESLKEEDESDDDNM

SEQ ID NO: 67862 - protein, 54 aa, Homo sapiens
  Payload ID: 13539
  Gene Symbol: PSMA3
  Gene Name: proteasome subunit alpha 3
  ENSP ID: ENSP00000452437
MSSIGTGYDLSASTFSPDGRVFQVEYAMKAVENSSYWNQMQRWCCLWGRKISPF

SEQ ID NO: 67863 - protein, 261 aa, Homo sapiens
  Payload ID: 13540
  Gene Symbol: PSMA4
  Gene Name: proteasome subunit alpha 4
  Uniprot ID: P25789
  ENSP ID: ENSP00000044462
MSRRYDSRTTIFSPEGRLYQVEYAMEAIGHAGTCLGILANDGVLLAAERRNIHKLLDEVFFSEKIYKLNEDMACSVAGITSDANVLTNELRLIAQRYLLQYQEPIPCEQLVTALCDIKQAYTQFGGKRPFGVSLLYIGWDKHYGFQLYQSDPSGNYGGWKATCIGNNSAAAVSMLKQDYKEGEMTLKSALALAIKVLNKTMDVSKLSAEKVEIATLTRENGKTVIRVLKQKEVEQLIKKHEEEEAKAEREKKEKEQKEKDK

SEQ ID NO: 67864 - protein, 190 aa, Homo sapiens
  Payload ID: 13540
  Gene Symbol: PSMA4
  Gene Name: proteasome subunit alpha 4
  Uniprot ID: P25789
  ENSP ID: ENSP00000402118
MACSVAGITSDANVLTNELRLIAQRYLLQYQEPIPCEQLVTALCDIKQAYTQFGGKRPFGVSLLYIGWDKHYGFQLYQSDPSGNYGGWKATCIGNNSAAAVSMLKQDYKEGEMTLKSALALAIKVLNKTMDVSKLSAEKVEIATLTRENGKTVIRVLKQKEVEQLIKKHEEEEAKAEREKKEKEQKEKDK

SEQ ID NO: 67865 - protein, 122 aa, Homo sapiens
  Payload ID: 13540
  Gene Symbol: PSMA4
  Gene Name: proteasome subunit alpha 4
  ENSP ID: ENSP00000452917
MCPSLYPRYLLQYQEPIPCEQLVTALCDIKQAYTQFGGKRPFGVSLLYIGWDKHYGFQLYQSDPSGNYGGWKATCIGNNSAAAVSMLKQDYKEGEMTLKSALALAIKVLNKTMDVSKLSAEK

SEQ ID NO: 67866 - protein, 181 aa, Homo sapiens
  Payload ID: 13540
  Gene Symbol: PSMA4
  Gene Name: proteasome subunit alpha 4
  ENSP ID: ENSP00000452936
MEAIGHAGTCLGILANDGVLLAAERRNIHKLLDEVFFSEKIYKLNEDMACSVAGITSDANVLTNELRLIAQRYLLQYQEPIPCEQLVTALCDIKQAYTQFGGKRPFGVSLLYIGWDKHYGFQLYQSDPSGNYGGWKATCIGNNSAAAVSMLKQDYKEGEMTLKSALALAIKVLNKTMDVSK

SEQ ID NO: 67867 - protein, 236 aa, Homo sapiens
  Payload ID: 13540
  Gene Symbol: PSMA4
  Gene Name: proteasome subunit alpha 4
  ENSP ID: ENSP00000453080
MSRRYDSRTTIFSPEGRLYQVEYAMEAIGHAGTCLGILANDGVLLAAERRNIHKLLDEVFFSEKIYKLNEDMACSVAGITSDANVLTNELRLIAQRYLLQYQEPIPCEQLVTALCDIKQAYTQFGGKRPFGVSLLYIGWDKHYGFQLYQSDPSGNYGGWKATCIGNNSAAAVSMLKQDYKEGEMTLKSALALAIKVLNKTMDVSKLSAEKVEIATLTRENGKTVIRVLKQKEVEQL

SEQ ID NO: 67868 - protein, 174 aa, Homo sapiens
  Payload ID: 13540
  Gene Symbol: PSMA4
  Gene Name: proteasome subunit alpha 4
  ENSP ID: ENSP00000453145
MSRRYDSRTTIFSPEGRLYQVEYAMEAIGHAGTCLGILANDGVLLAAERRNIHKLLDEVFFSEKIYKLNEDMACSVAGITSDANVLTNELRLIAQRYLLQYQEPIPCEQLVTALCDIKQAYTQFGGKRPFGVSLLYIGWDKHYGFQLYQSDPSGNYGGWKATCIGNNSAWKLQH

SEQ ID NO: 67869 - protein, 125 aa, Homo sapiens
  Payload ID: 13540
  Gene Symbol: PSMA4
  Gene Name: proteasome subunit alpha 4
  ENSP ID: ENSP00000453323
MSRRYDSRTTIFSPEGRLYQVEYAMEAIGHAGTCLGILANDGVLLAAERRNIHKLLDEVFFSEKIYKLNEDMACSVAGITSDANVLTNELRLIAQSGNCNTNKREWKDSNQSSQTKRSGAVDQKT

SEQ ID NO: 67870 - protein, 209 aa, Homo sapiens
  Payload ID: 13540
  Gene Symbol: PSMA4
  Gene Name: proteasome subunit alpha 4
  ENSP ID: ENSP00000453523
MSRRYDSRTTIFSPEGRLYQVEYAMEAIGHAGTCLGILANDGVLLAAERRNIHKLLDEVFFSEKIYKLNEDMACSVAGITSDANVLTNELRLIAQRYLLQYQEPIPCEQLVTALCDIKQAYTQFGGKRPFGVSLLYIGWDKHYGFQLYQSDPSGNYGGWKATCIGNNSAAAVSMLKQDYKEGEMTLKSALALAIKVLNKTMDVSKLSAE

SEQ ID NO: 67871 - protein, 183 aa, Homo sapiens
  Payload ID: 13540
  Gene Symbol: PSMA4
  Gene Name: proteasome subunit alpha 4
  ENSP ID: ENSP00000453621
MSRRYDSRTTIFSPEGRLYQVEYAMEAIGHAGTCLGILANDGVLLAAERRNIHKLLDEVFFSEKIYKLNEYLLQYQEPIPCEQLVTALCDIKQAYTQFGGKRPFGVSLLYIGWDKHYGFQLYQSDPSGNYGGWKATCIGNNSAAAVSMLKQDYKEGEMTLKSALALAIKVLNKTMDVSKLSAE

SEQ ID NO: 67872 - protein, 86 aa, Homo sapiens
  Payload ID: 13540
  Gene Symbol: PSMA4
  Gene Name: proteasome subunit alpha 4
  ENSP ID: ENSP00000453758
MCPSLYPRYLLQYQEPIPCEQLVTALCDIKQAYTQFGGKRPFGVSLLYIGWDKHYGFQLYQSDPSGNYGGWKATCIGNNSAWKLQH

SEQ ID NO: 67873 - protein, 220 aa, Homo sapiens
  Payload ID: 13540
  Gene Symbol: PSMA4
  Gene Name: proteasome subunit alpha 4
  ENSP ID: ENSP00000453802
MSRRYDSRTTIFSPEGRLYQVEYAMEAIGHAGTCLGILANDGVLLAAERRNIHKLLDEVFFSEKIYKLNEDMACSVAGITSDANVLTNELRLIAQRYLLQYQEPIPCEQLVTALCDIKQAYTQFGGKRPFGVSLLYIGWDKHYGFQLYQSDPSGNYGGWKATCIGNNSAAAVSMLKQDYKEGEMTLKSALALAIKVLNKTMDVSKLSAEKVEIATLTREN

SEQ ID NO: 67874 - protein, 230 aa, Homo sapiens
  Payload ID: 13540
  Gene Symbol: PSMA4
  Gene Name: proteasome subunit alpha 4
  ENSP ID: ENSP00000453829
MSRRYDSRTTIFSPEAERRNIHKLLDEVFFSEKIYKLNEDMACSVAGITSDANVLTNELRLIAQRYLLQYQEPIPCEQLVTALCDIKQAYTQFGGKRPFGVSLLYIGWDKHYGFQLYQSDPSGNYGGWKATCIGNNSAAAVSMLKQDYKEGEMTLKSALALAIKVLNKTMDVSKLSAEKVEIATLTRENGKTVIRVLKQKEVEQLIKKHEEEEAKAEREKKEKEQKEKDK

SEQ ID NO: 67875 - protein, 261 aa, Homo sapiens; identical to SEQ ID NO: 67863
  Payload ID: 13540
  Gene Symbol: PSMA4
  Gene Name: proteasome subunit alpha 4
  Uniprot ID: P25789
  ENSP ID: ENSP00000453887

SEQ ID NO: 67876 - protein, 241 aa, Homo sapiens
  Payload ID: 13541
  Gene Symbol: PSMA5
  Gene Name: proteasome subunit alpha 5
  Uniprot ID: P28066
  ENSP ID: ENSP00000271308
MFLTRSEYDRGVNTFSPEGRLFQVEYAIEAIKLGSTAIGIQTSEGVCLAVEKRITSPLMEPSSIEKIVEIDAHIGCAMSGLIADAKTLIDKARVETQNHWFTYNETMTVESVTQAVSNLALQFGEEDADPGAMSRPFGVALLFGGVDEKGPQLFHMDPSGTFVQCDARAIGSASEGAQSSLQEVYHKSMTLKEAIKSSLIILKQVMEEKLNATNIELATVQPGQNFHMFTKEELEEVIKDI

SEQ ID NO: 67877 - protein, 183 aa, Homo sapiens
  Payload ID: 13541
  Gene Symbol: PSMA5
  Gene Name: proteasome subunit alpha 5
  Uniprot ID: P28066
  ENSP ID: ENSP00000440618
MEPSSIEKIVEIDAHIGCAMSGLIADAKTLIDKARVETQNHWFTYNETMTVESVTQAVSNLALQFGEEDADPGAMSRPFGVALLFGGVDEKGPQLFHMDPSGTFVQCDARAIGSASEGAQSSLQEVYHKSMTLKEAIKSSLIILKQVMEEKLNATNIELATVQPGQNFHMFTKEELEEVIKDI

SEQ ID NO: 67878 - protein, 246 aa, Homo sapiens
  Payload ID: 13542
  Gene Symbol: PSMA6
  Gene Name: proteasome subunit alpha 6
  Uniprot ID: P60900
  ENSP ID: ENSP00000261479
MSRGSSAGFDRHITIFSPEGRLYQVEYAFKAINQGGLTSVAVRGKDCAVIVTQKKVPDKLLDSSTVTHLFKITENIGCVMTGMTADSRSQVQRARYEAANWKYKYGYEIPVDMLCKRIADISQVYTQNAEMRPLGCCMILIGIDEEQGPQVYKCDPAGYYCGFKATAAGVKQTESTSFLEKKVKKKFDWTFEQTVETAITCLSTVLSIDFKPSEIEVGVVTVENPKFRILTEAEIDAHLVALAERD

SEQ ID NO: 67879 - protein, 227 aa, Homo sapiens
  Payload ID: 13542
  Gene Symbol: PSMA6
  Gene Name: proteasome subunit alpha 6
  Uniprot ID: P60900
  ENSP ID: ENSP00000444844
MAGLRREYAFKAINQGGLTSVAVRGKDCAVIVTQKKVPDKLLDSSTVTHLFKITENIGCVMTGMTADSRSQVQRARYEAANWKYKYGYEIPVDMLCKRIADISQVYTQNAEMRPLGCCMILIGIDEEQGPQVYKCDPAGYYCGFKATAAGVKQTESTSFLEKKVKKKFDWTFEQTVETAITCLSTVLSIDFKPSEIEVGVVTVENPKFRILTEAEIDAHLVALAERD

SEQ ID NO: 67880 - protein, 203 aa, Homo sapiens
  Payload ID: 13542
  Gene Symbol: PSMA6
  Gene Name: proteasome subunit alpha 6
  ENSP ID: ENSP00000450528
MSRGSSAGFDRHITIFSPEGRLYQVEYAFKAINQGGLTSVAVRGKDCAVIVTQKKVPDKLLDSSTVTHLFKITENIGCVMTGMTADSRSQVQRARYEAANWKYKYGYEIPVDMLCKRIADISQVYTQNAEMRPLGCCMILIGIDEEQGPQVYKCDPAGYYCGFKATAAGVKQTESTSFLEKKVKKKFDWTFEQTVEDSYRSRD

SEQ ID NO: 67881 - protein, 67 aa, Homo sapiens
  Payload ID: 13542
  Gene Symbol: PSMA6
  Gene Name: proteasome subunit alpha 6
  ENSP ID: ENSP00000450844
MSRGSSAGFDRHITIFSPEGRLYQVAWTSVVNSTQALEACYIPDTASPRRYKCECYTLFYTEAHSLE

SEQ ID NO: 67882 - protein, 85 aa, Homo sapiens
  Payload ID: 13542
  Gene Symbol: PSMA6
  Gene Name: proteasome subunit alpha 6
  ENSP ID: ENSP00000451171
  MOD_RES (1)..(1): Any amino acid
XRIADISQVYTQNAEMRPLGCCMILIGIDEEQGPQTAITCLSTVLSIDFKPSEIEVGVVTVENPKFRILTEAEIDAHLVALAERD

SEQ ID NO: 67883 - protein, 148 aa, Homo sapiens
  Payload ID: 13542
  Gene Symbol: PSMA6
  Gene Name: proteasome subunit alpha 6
  ENSP ID: ENSP00000451254
MSRGSSAGFDRHITIFSPEGRLYQVEYAFKAINQGGLTSVAVRGKDCAVIVTQKKVPDKLLDSSTVTHLFKITENIGCVMTGMTADSRSQVQRARYEAANWKYKYGYEIPVDMLCKRIADISQVYTQNAEMRPLGCYCNYMPVYCSIN

SEQ ID NO: 67884 - protein, 107 aa, Homo sapiens
  Payload ID: 13542
  Gene Symbol: PSMA6
  Gene Name: proteasome subunit alpha 6
  ENSP ID: ENSP00000451432
MSRGSSAGFDRHITIFSPEGRLYQVEYAFKAINQGGLTSVAVRGKDCAVIVTQKKVPDKLLDSSTVTHLFKITENIGCVMTGMTVSLCRPGCSASWVQAILVPQPPR

SEQ ID NO: 67885 - protein, 41 aa, Homo sapiens
  Payload ID: 13542
  Gene Symbol: PSMA6
  Gene Name: proteasome subunit alpha 6
  ENSP ID: ENSP00000451958
MSRGSSAGFDRHITIFSPEGRLYQVGQIIGFQHSDSLIQDN

SEQ ID NO: 67886 - protein, 167 aa, Homo sapiens
  Payload ID: 13542
  Gene Symbol: PSMA6
  Gene Name: proteasome subunit alpha 6
  Uniprot ID: P60900
  ENSP ID: ENSP00000452566
MTGMTADSRSQVQRARYEAANWKYKYGYEIPVDMLCKRIADISQVYTQNAEMRPLGCCMILIGIDEEQGPQVYKCDPAGYYCGFKATAAGVKQTESTSFLEKKVKKKFDWTFEQTVETAITCLSTVLSIDFKPSEIEVGVVTVENPKFRILTEAEIDAHLVALAERD

SEQ ID NO: 67887 - protein, 252 aa, Homo sapiens
  Payload ID: 13542
  Gene Symbol: PSMA6
  Gene Name: proteasome subunit alpha 6
  ENSP ID: ENSP00000452603
MSRGSSAGFDRHITIFSPEGRLYQVEYAFKAINQGGLTSVAVRGKDCAVIVTQKKVPDKLLDSSTVTHLFKITENIGCVMTGMTADSRSQVQRARYEAANWKYKYGYEIPVDMLCKRIADISQVYTQNAEMRPLGCWSFLFLGMILIGIDEEQGPQVYKCDPAGYYCGFKATAAGVKQTESTSFLEKKVKKKFDWTFEQTVETAITCLSTVLSIDFKPSEIEVGVVTVENPKFRILTEAEIDAHLVALAERD

SEQ ID NO: 67888 - protein, 167 aa, Homo sapiens; identical to SEQ ID NO: 67886
  Payload ID: 13542
  Gene Symbol: PSMA6
  Gene Name: proteasome subunit alpha 6
  Uniprot ID: P60900
  ENSP ID: ENSP00000479620

SEQ ID NO: 67889 - protein, 67 aa, Homo sapiens; identical to SEQ ID NO: 67881
  Payload ID: 13542
  Gene Symbol: PSMA6
  Gene Name: proteasome subunit alpha 6
  ENSP ID: ENSP00000485776

SEQ ID NO: 67890 - protein, 107 aa, Homo sapiens; identical to SEQ ID NO: 67884
  Payload ID: 13542
  Gene Symbol: PSMA6
  Gene Name: proteasome subunit alpha 6
  ENSP ID: ENSP00000485817

SEQ ID NO: 67891 - protein, 149 aa, Homo sapiens
  Payload ID: 13543
  Gene Symbol: PSMA7
  Gene Name: proteasome subunit alpha 7
  Uniprot ID: O14818
  ENSP ID: ENSP00000359895
MSYDRAITVFSPDGHLFQVEYAQEAVKKGSTAVGVRGRDIVVLGVEKKSVAKLQDERTVRKICALDDNVCMAFAGLTADARIVINRARVECQSHRLTVEDPVTVEYITRYIASLKQVGACPLACSPLAAGQSRLRHGGSCHVTSGESEN

SEQ ID NO: 67892 - protein, 178 aa, Homo sapiens
  Payload ID: 13543
  Gene Symbol: PSMA7
  Gene Name: proteasome subunit alpha 7
  Uniprot ID: O14818
  ENSP ID: ENSP00000359898
MAFAGLTADARIVINRARVECQSHRLTVEDPVTVEYITRYIASLKQRYTQSNGRRPFGISALIVGFDFDGTPRLYQTDPSGTYHAWKANAIGRGAKSVREFLEKNYTDEAIETDDLTIKLVIKALLEVVQSGGKNIELAVMRRDQSLKILNPEEIEKYVAEIEKEKEENEKKKQKKAS

SEQ ID NO: 67893 - protein, 248 aa, Homo sapiens
  Payload ID: 13543
  Gene Symbol: PSMA7
  Gene Name: proteasome subunit alpha 7
  Uniprot ID: O14818
  ENSP ID: ENSP00000359910
MSYDRAITVFSPDGHLFQVEYAQEAVKKGSTAVGVRGRDIVVLGVEKKSVAKLQDERTVRKICALDDNVCMAFAGLTADARIVINRARVECQSHRLTVEDPVTVEYITRYIASLKQRYTQSNGRRPFGISALIVGFDFDGTPRLYQTDPSGTYHAWKANAIGRGAKSVREFLEKNYTDEAIETDDLTIKLVIKALLEVVQSGGKNIELAVMRRDQSLKILNPEEIEKYVAEIEKEKEENEKKKQKKAS

SEQ ID NO: 67894 - protein, 187 aa, Homo sapiens
  Payload ID: 13543
  Gene Symbol: PSMA7
  Gene Name: proteasome subunit alpha 7
  ENSP ID: ENSP00000397047
  MOD_RES (1)..(1): Any amino acid
XLTADARIVINRARVECQSHRLTVEDPVTVEYITRYIASLKQRYTQSNGRRPFGISALIVGFDFDGTPRLYQTDPSGTYHAWKANAIGRGAKSVREFLEKNYTDEAIETDDLTIKLVIKALLEGKVVNAPVFCPFKVVQSGGKNIELAVMRRDQSLKILNPEEIEKYVAEIEKEKEENEKKKQKKAS

SEQ ID NO: 67895 - protein, 256 aa, Homo sapiens
  Payload ID: 13544
  Gene Symbol: PSMA8
  Gene Name: proteasome subunit alpha 8
  Uniprot ID: Q8TAA3
  ENSP ID: ENSP00000311121
MASRYDRAITVFSPDGHLFQVEYAQEAVKKGSTAVGIRGTNIVVLGVEKKSVAKLQDERTVRKICALDDHVCMAFAVLTIFIGLTADARVVINRARVECQSHKLTVEDPVTVEYITRFIATLKQKYTQSNGRRPFGISALIVGFDDDGISRLYQTDPSGTYHAWKANAIGRSAKTVREFLEKNYTEDAIASDSEAIKLAIKALLEVVQSGGKNIELAIIRRNQPLKMFSAKEVELYVTEIEKEKEEAEKKKSKKSV

SEQ ID NO: 67896 - protein, 212 aa, Homo sapiens
  Payload ID: 13544
  Gene Symbol: PSMA8
  Gene Name: proteasome subunit alpha 8
  Uniprot ID: Q8TAA3
  ENSP ID: ENSP00000345584
MASRYDRAITVFSPDGHLFQVEYAQEAVKKGSTAVGIRGLTADARVVINRARVECQSHKLTVEDPVTVEYITRFIATLKQKYTQSNGRRPFGISALIVGFDDDGISRLYQTDPSGTYHAWKANAIGRSAKTVREFLEKNYTEDAIASDSEAIKLAIKALLEVVQSGGKNIELAIIRRNQPLKMFSAKEVELYVTEIEKEKEEAEKKKSKKSV

SEQ ID NO: 67897 - protein, 250 aa, Homo sapiens
  Payload ID: 13544
  Gene Symbol: PSMA8
  Gene Name: proteasome subunit alpha 8
  Uniprot ID: Q8TAA3
  ENSP ID: ENSP00000409284
MASRYDRAITVFSPDGHLFQVEYAQEAVKKGSTAVGIRGTNIVVLGVEKKSVAKLQDERTVRKICALDDHVCMAFAGLTADARVVINRARVECQSHKLTVEDPVTVEYITRFIATLKQKYTQSNGRRPFGISALIVGFDDDGISRLYQTDPSGTYHAWKANAIGRSAKTVREFLEKNYTEDAIASDSEAIKLAIKALLEVVQSGGKNIELAIIRRNQPLKMFSAKEVELYVTEIEKEKEEAEKKKSKKSV

SEQ ID NO: 67898 - protein, 63 aa, Homo sapiens
  Payload ID: 13544
  Gene Symbol: PSMA8
  Gene Name: proteasome subunit alpha 8
  ENSP ID: ENSP00000440327
MASRYDRAITVFSPDGHLFQVEYAQEAVKKGSTAYHVSLIVHDSCGLAWMSAHLKKSEFEVPI

SEQ ID NO: 67899 - protein, 224 aa, Homo sapiens
  Payload ID: 13544
  Gene Symbol: PSMA8
  Gene Name: proteasome subunit alpha 8
  ENSP ID: ENSP00000482057
MDVCTFEKVGIRGTNIVVLGVEKKSVAKLQDERTVRKICALDDHVCMAFAGLTADARVVINRARVECQSHKLTVEDPVTVEYITRFIATLKQKYTQSNGRRPFGISALIVGFDDDGISRLYQTDPSGTYHAWKANAIGRSAKTVREFLEKNYTEDAIASDSEAIKLAIKALLEVVQSGGKNIELAIIRRNQPLKMFSAKEVELYVTEIEKEKEEAEKKKSKKSV

SEQ ID NO: 67900 - protein, 241 aa, Homo sapiens
  Payload ID: 13545
  Gene Symbol: PSMB1
  Gene Name: proteasome subunit beta 1
  Uniprot ID: P20618
  ENSP ID: ENSP00000262193
MLSSTAMYSAPGRDLGMEPHRAAGPLQLRFSPYVFNGGTILAIAGEDFAIVASDTRLSEGFSIHTRDSPKCYKLTDKTVIGCSGFHGDCLTLTKIIEARLKMYKHSNNKAMTTGAIAAMLSTILYSRRFFPYYVYNIIGGLDEEGKGAVYSFDPVGSYQRDSFKAGGSASAMLQPLLDNQVGFKNMQNVEHVPLSLDRAMRLVKDVFISAAERDVYTGDALRICIVTKEGIREETVSLRKD

SEQ ID NO: 67901 - protein, 273 aa, Homo sapiens
  Payload ID: 13546
  Gene Symbol: PSMB10
  Gene Name: proteasome subunit beta 10
  Uniprot ID: P40306
  ENSP ID: ENSP00000351314
MLKPALEPRGGFSFENCQRNASLERVLPGLKVPHARKTGTTIAGLVFQDGVILGADTRATNDSVVADKSCEKIHFIAPKIYCCGAGVAADAEMTTRMVASKMELHALSTGREPRVATVTRILRQTLFRYQGHVGASLIVGGVDLTGPQLYGVHPHGSYSRLPFTALGSGQDAALAVLEDRFQPNMTLEAAQGLLVEAVTAGILGDLGSGGNVDACVITKTGAKLLRTLSSPTEPVKRSGRYHFVPGTTAVLTQTVKPLTLELVEETVQAMEVE

SEQ ID NO: 67902 - protein, 138 aa, Homo sapiens
  Payload ID: 13546
  Gene Symbol: PSMB10
  Gene Name: proteasome subunit beta 10
  ENSP ID: ENSP00000463811
ILRQTLFRYQGHVGASLIVGGVDLTGPQLYGVHPHGSYSRLPFTALGSGQDAALAVLEDRFQPNMTLEAAQGLLVEAVTAGILGDLGSGGNVDACVITKTGAKLLRTLSSPTEPVKRGCPSSLPGLAATTLCLEPQLS

SEQ ID NO: 67903 - protein, 201 aa, Homo sapiens
  Payload ID: 13547
  Gene Symbol: PSMB2
  Gene Name: proteasome subunit beta 2
  Uniprot ID: P49721
  ENSP ID: ENSP00000362334
MEYLIGIQGPDYVLVASDRVAASNIVQMKDDHDKMFKMSEKILLLCVGEAGDTVQFAEYIQKNVQLYKMRNGYELSPTAAANFTRRNLADCLRSRTPYHVNLLLAGYDEHEGPALYYMDYLAALAKAPFAAHGYGAFLTLSILDRYYTPTISRERAVELLRKCLEELQKRFILNLPTFSVRIIDKNGIHDLDNISFPKQGS

SEQ ID NO: 67904 - protein, 84 aa, Homo sapiens
  Payload ID: 13547
  Gene Symbol: PSMB2
  Gene Name: proteasome subunit beta 2
  ENSP ID: ENSP00000479706
MDYLAALAKAPFAAHGYGAFLTLSILDRYYTPTISRERAVELLRKCLEELQKRFILNLPTFSVRIIDKNGIHDLDNISFPKQGS

SEQ ID NO: 67905 - protein, 145 aa, Homo sapiens
  Payload ID: 13548
  Gene Symbol: PSMB3
  Gene Name: proteasome subunit beta 3
  ENSP ID: ENSP00000478737
MSYNGGAVMAMKGKNCVAIAADRRFGIQAQMVTTDFQKIFPMGDRLYIGLAGLATDVQTVAQRLKFRLNLYELKEGRQIKPYTLMSMVANLLYEKRFGPYYTEPVIAGLDPKTFKPFICSLDLIGCPMVTDDFVVSGTCAEQMYG

SEQ ID NO: 67906 - protein, 107 aa, Homo sapiens
  Payload ID: 13548
  Gene Symbol: PSMB3
  Gene Name: proteasome subunit beta 3
  ENSP ID: ENSP00000481215
MSIMSYNGGAVMAMKGKNCVAIAADRRFGIQAQMVTTDFQKIFPMGDRLYIGLAGLATDVQTVAQRLKFRLNLYELKEGRQIKPYTLMSMVANLLYEKRPHRLPHGD

SEQ ID NO: 67907 - protein, 112 aa, Homo sapiens
  Payload ID: 13548
  Gene Symbol: PSMB3
  Gene Name: proteasome subunit beta 3
  ENSP ID: ENSP00000481442
MSIMSYNGGAVMAMKGKNCVAIAADRRFGIQAQMVTTDFQKIFPMGDRLYIGLAGLATDVQTVAQRLKFRLNLYELKEGRQIKPYTLMSMVANLLYEKRIRITCLKPSPKPC

SEQ ID NO: 67908 - protein, 205 aa, Homo sapiens
  Payload ID: 13548
  Gene Symbol: PSMB3
  Gene Name: proteasome subunit beta 3
  Uniprot ID: P49720
  ENSP ID: ENSP00000483688
MSIMSYNGGAVMAMKGKNCVAIAADRRFGIQAQMVTTDFQKIFPMGDRLYIGLAGLATDVQTVAQRLKFRLNLYELKEGRQIKPYTLMSMVANLLYEKRFGPYYTEPVIAGLDPKTFKPFICSLDLIGCPMVTDDFVVSGTCAEQMYGMCESLWEPNMDPDHLFETISQAMLNAVDRDAVSGMGVIVHIIEKDKITTRTLKARMD

SEQ ID NO: 67909 - protein, 205 aa, Homo sapiens; identical to SEQ ID NO: 67908
  Payload ID: 13548
  Gene Symbol: PSMB3
  Gene Name: proteasome subunit beta 3
  Uniprot ID: P49720
  ENSP ID: ENSP00000483956

SEQ ID NO: 67910 - protein, 145 aa, Homo sapiens; identical to SEQ ID NO: 67905
  Payload ID: 13548
  Gene Symbol: PSMB3
  Gene Name: proteasome subunit beta 3
  ENSP ID: ENSP00000487711

SEQ ID NO: 67911 - protein, 107 aa, Homo sapiens; identical to SEQ ID NO: 67906
  Payload ID: 13548
  Gene Symbol: PSMB3
  Gene Name: proteasome subunit beta 3
  ENSP ID: ENSP00000487856

SEQ ID NO: 67912 - protein, 112 aa, Homo sapiens; identical to SEQ ID NO: 67907
  Payload ID: 13548
  Gene Symbol: PSMB3
  Gene Name: proteasome subunit beta 3
  ENSP ID: ENSP00000488173

SEQ ID NO: 67913 - protein, 264 aa, Homo sapiens
  Payload ID: 13549
  Gene Symbol: PSMB4
  Gene Name: proteasome subunit beta 4
  Uniprot ID: P28070
  ENSP ID: ENSP00000290541
MEAFLGSRSGLWAGGPAPGQFYRIPSTPDSFMDPASALYRGPITRTQNPMVTGTSVLGVKFEGGVVIAADMLGSYGSLARFRNISRIMRVNNSTMLGASGDYADFQYLKQVLGQMVIDEELLGDGHSYSPRAIHSWLTRAMYSRRSKMNPLWNTMVIGGYADGESFLGYVDMLGVAYEAPSLATGYGAYLAQPLLREVLEKQPVLSQTEARDLVERCMRVLYYRDARSYNRFQIATVTEKGVEIEGPLSTETNWDIAHMISGFE

SEQ ID NO: 67914 - protein, 77 aa, Homo sapiens
  Payload ID: 13550
  Gene Symbol: PSMB5
  Gene Name: proteasome subunit beta 5
  ENSP ID: ENSP00000334973
MALASVLERPLPVNQRGFFGLGGRADLLDLGPGSLSDGLSLAAPGWGVPEEPGIEMLHGTTTLAFKVWSQPPCQAEY

SEQ ID NO: 67915 - protein, 263 aa, Homo sapiens
  Payload ID: 13550
  Gene Symbol: PSMB5
  Gene Name: proteasome subunit beta 5
  Uniprot ID: P28074
  ENSP ID: ENSP00000355325
MALASVLERPLPVNQRGFFGLGGRADLLDLGPGSLSDGLSLAAPGWGVPEEPGIEMLHGTTTLAFKFRHGVIVAADSRATAGAYIASQTVKKVIEINPYLLGTMAGGAADCSFWERLLARQCRIYELRNKERISVAAASKLLANMVYQYKGMGLSMGTMICGWDKRGPGLYYVDSEGNRISGATFSVGSGSVYAYGVMDRGYSYDLEVEQAYDLARRAIYQATYRDAYSGGAVNLYHVREDGWIRVSSDNVADLHEKYSGSTP

SEQ ID NO: 67916 - protein, 160 aa, Homo sapiens
  Payload ID: 13550
  Gene Symbol: PSMB5
  Gene Name: proteasome subunit beta 5
  Uniprot ID: P28074
  ENSP ID: ENSP00000395206
MAGGAADCSFWERLLARQCRIYELRNKERISVAAASKLLANMVYQYKGMGLSMGTMICGWDKRGPGLYYVDSEGNRISGATFSVGSGSVYAYGVMDRGYSYDLEVEQAYDLARRAIYQATYRDAYSGGAVNLYHVREDGWIRVSSDNVADLHEKYSGSTP

SEQ ID NO: 67917 - protein, 84 aa, Homo sapiens
  Payload ID: 13550
  Gene Symbol: PSMB5
  Gene Name: proteasome subunit beta 5
  ENSP ID: ENSP00000451286
MALASVLERPLPVNQRGFFGLGGRADLLDLGPGSLSDGLSLAAPGWGVPEEPGIEMLHGTTTLAFKASTTWTVKGTGFQGPPSL

SEQ ID NO: 67918 - protein, 118 aa, Homo sapiens
  Payload ID: 13550
  Gene Symbol: PSMB5
  Gene Name: proteasome subunit beta 5
  ENSP ID: ENSP00000451816
  MOD_RES (1)..(1): Any amino acid
XGIEMLHGTTTLAFKFRHGVIVAADSRATAGAYIASQTVKKVIEINPYLLGTMAGGAADCSFWERLLARQCRIYELRNKERISVAAASKLLANMVYQYKGMGLSMGTMICGWDKRGPG

SEQ ID NO: 67919 - protein, 203 aa, Homo sapiens
  Payload ID: 13550
  Gene Symbol: PSMB5
  Gene Name: proteasome subunit beta 5
  Uniprot ID: P28074
  ENSP ID: ENSP00000452424
MALASVLERPLPVNQRGFFGLGGRADLLDLGPGSLSDGLSLAAPGWGVPEEPGIEMLHGTTTLAFKFRHGVIVAADSRATAGAYIASQTVKKVIEINPYLLGTMAGGAADCSFWERLLARQCRIYELRNKERISVAAASKLLANMVYQYKGMGLSMGTMICGWDKRGPVSEVLCLKPKSFGMYLFCGCAERIGNMARPLLRGQ

SEQ ID NO: 67920 - protein, 239 aa, Homo sapiens
  Payload ID: 13551
  Gene Symbol: PSMB6
  Gene Name: proteasome subunit beta 6
  Uniprot ID: P28072
  ENSP ID: ENSP00000270586
MAATLLAARGAGPAPAWGPEAFTPDWESREVSTGTTIMAVQFDGGVVLGADSRTTTGSYIANRVTDKLTPIHDRIFCCRSGSAADTQAVADAVTYQLGFHSIELNEPPLVHTAASLFKEMCYRYREDLMAGIIIAGWDPQEGGQVYSVPMGGMMVRQSFAIGGSGSSYIYGYVDATYREGMTKEECLQFTANALALAMERDGSSGGVIRLAAIAESGVERQVLLGDQIPKFAVATLPPA

SEQ ID NO: 67921 - protein, 102 aa, Homo sapiens
  Payload ID: 13551
  Gene Symbol: PSMB6
  Gene Name: proteasome subunit beta 6
  ENSP ID: ENSP00000460811
TLLAARGAGPAPAWGPEAFTPDWESREVSTGTTIMAVQFDGGVVLGADSRTTTGSYIANRVTDKLTPIHDRIFCCRSGSAADTQAVADAVTYQLGFHSSQPL

SEQ ID NO: 67922 - protein, 213 aa, Homo sapiens
  Payload ID: 13551
  Gene Symbol: PSMB6
  Gene Name: proteasome subunit beta 6
  ENSP ID: ENSP00000485006
MAATLLAARGAGPAPAWGPEAFTPDWESREVSTGTTIMAVQFDGGVVLGADSRTTTGSYIANRVTDKLTPIHDRIFCCRSGSAADTQAVADAVTYQLGFHSIELNEPPLVHTAASLFKEMCYRYREDLMAGIIIAGWDPQEGGQVYSVPMGGMMVRQSFAIGGSGSSYIYGYVDATYREGMTKEECLQFTANAFFFYPQLSLWPWSGMAPVEE

SEQ ID NO: 67923 - protein, 277 aa, Homo sapiens
  Payload ID: 13552
  Gene Symbol: PSMB7
  Gene Name: proteasome subunit beta 7
  Uniprot ID: Q99436
  ENSP ID: ENSP00000259457
MAAVSVYAPPVGGFSFDNCRRNAVLEADFAKRGYKLPKVRKTGTTIAGVVYKDGIVLGADTRATEGMVVADKNCSKIHFISPNIYCCGAGTAADTDMTTQLISSNLELHSLSTGRLPRVVTANRMLKQMLFRYQGYIGAALVLGGVDVTGPHLYSIYPHGSTDKLPYVTMGSGSLAAMAVFEDKFRPDMEEEEAKNLVSEAIAAGIFNDLGSGSNIDLCVISKNKLDFLRPYTVPNKKGTRLGRYRCEKGTTAVLTEKITPLEIEVLEETVQTMDTS

SEQ ID NO: 67924 - protein, 210 aa, Homo sapiens
  Payload ID: 13552
  Gene Symbol: PSMB7
  Gene Name: proteasome subunit beta 7
  ENSP ID: ENSP00000393157
MAAVSVYAPPVGGFSFDNCRRNAVLEADFAKRGYKLPKVRKTGTTIAGVVYKDGIVLGADTRATEGMVVADKNCSKIHFISPNIYCCGAGTAADTDMTTQLISSNLELHSLSTGRLPRVVTANRMLKQMLFRYQGYIGAALVLGGVDVTGPHLYSIYPHGSTDKLPYVTMVHCEEELFTENLFFIRQAEVVSEEAWGPSFAISLAVFLVA

SEQ ID NO: 67925 - protein, 272 aa, Homo sapiens
  Payload ID: 13553
  Gene Symbol: PSMB8
  Gene Name: proteasome subunit beta 8
  Uniprot ID: P28062
  ENSP ID: ENSP00000364015
MLIGTPTPRDTTPSSWLTSSLLVEAAPLDDTTLPTPVSSGCPGLEPTEFFQSLGGDGERNVQIEMAHGTTTLAFKFQHGVIAAVDSRASAGSYISALRVNKVIEINPYLLGTMSGCAADCQYWERLLAKECRLYYLRNGERISVSAASKLLSNMMCQYRGMGLSMGSMICGWDKKGPGLYYVDEHGTRLSGNMFSTGSGNTYAYGVMDSGYRPNLSPEEAYDLGRRAIAYATHRDSYSGGVVNMYHMKEDGWVKVESTDVSDLLHQYREANQ

SEQ ID NO: 67926 - protein, 276 aa, Homo sapiens
  Payload ID: 13553
  Gene Symbol: PSMB8
  Gene Name: proteasome subunit beta 8
  Uniprot ID: P28062
  ENSP ID: ENSP00000364016
MALLDVCGAPRGQRPESALPVAGSGRRSDPGHYSFSMRSPELALPRGMQPTEFFQSLGGDGERNVQIEMAHGTTTLAFKFQHGVIAAVDSRASAGSYISALRVNKVIEINPYLLGTMSGCAADCQYWERLLAKECRLYYLRNGERISVSAASKLLSNMMCQYRGMGLSMGSMICGWDKKGPGLYYVDEHGTRLSGNMFSTGSGNTYAYGVMDSGYRPNLSPEEAYDLGRRAIAYATHRDSYSGGVVNMYHMKEDGWVKVESTDVSDLLHQYREANQ

SEQ ID NO: 67927 - protein, 276 aa, Homo sapiens; identical to SEQ ID NO: 67926
  Payload ID: 13553
  Gene Symbol: PSMB8
  Gene Name: proteasome subunit beta 8
  Uniprot ID: P28062
  ENSP ID: ENSP00000372723

SEQ ID NO: 67928 - protein, 272 aa, Homo sapiens; identical to SEQ ID NO: 67925
  Payload ID: 13553
  Gene Symbol: PSMB8
  Gene Name: proteasome subunit beta 8
  Uniprot ID: P28062
  ENSP ID: ENSP00000372725

SEQ ID NO: 67929 - protein, 252 aa, Homo sapiens
  Payload ID: 13553
  Gene Symbol: PSMB8
  Gene Name: proteasome subunit beta 8
  ENSP ID: ENSP00000378748
MALLDVCGAPRGQRPESALPVAGSGRRSDPGHYSFSMRSPELALPRGMQPTEFFQSLGGDGERNVQIEMAHGTTTLAFKFQHGVIAAVDSRASAGSYINCQYWERLLAKECRLYYLRNGERISVSAASKLLSNMMCQYRGMGLSMGSMICGWDKKGPGLYYVDEHGTRLSGNMFSTGSGNTYAYGVMDSGYRPNLSPEEAYDLGRRAIAYATHRDSYSGGVVNMYHMKEDGWVKVESTDVSDLLHQYREANQ

SEQ ID NO: 67930 - protein, 252 aa, Homo sapiens; identical to SEQ ID NO: 67929
  Payload ID: 13553
  Gene Symbol: PSMB8
  Gene Name: proteasome subunit beta 8
  ENSP ID: ENSP00000382538

SEQ ID NO: 67931 - protein, 272 aa, Homo sapiens; identical to SEQ ID NO: 67925
  Payload ID: 13553
  Gene Symbol: PSMB8
  Gene Name: proteasome subunit beta 8
  Uniprot ID: P28062
  ENSP ID: ENSP00000392693

SEQ ID NO: 67932 - protein, 252 aa, Homo sapiens; identical to SEQ ID NO: 67929
  Payload ID: 13553
  Gene Symbol: PSMB8
  Gene Name: proteasome subunit beta 8
  ENSP ID: ENSP00000394090

SEQ ID NO: 67933 - protein, 276 aa, Homo sapiens; identical to SEQ ID NO: 67926
  Payload ID: 13553
  Gene Symbol: PSMB8
  Gene Name: proteasome subunit beta 8
  Uniprot ID: P28062
  ENSP ID: ENSP00000394155

SEQ ID NO: 67934 - protein, 252 aa, Homo sapiens
  Payload ID: 13553
  Gene Symbol: PSMB8
  Gene Name: proteasome subunit beta 8
  ENSP ID: ENSP00000396430
MALLDVCGAPRGQRPESALPVAGSGRRSDPGHYSFSMRSPELALPRGMKPTEFFQSLGGDGERNVQIEMAHGTTTLAFKFQHGVIAAVDSRASAGSYINCQYWERLLAKECRLYYLRNGERISVSAASKLLSNMMCQYRGMGLSMGSMICGWDKKGPGLYYVDEHGTRLSGNMFSTGSGNTYAYGVMDSGYRPNLSPEEAYDLGRRAIAYATHRDSYSGGVVNMYHMKEDGWVKVESTDVSDLLHQYREANQ

SEQ ID NO: 67935 - protein, 272 aa, Homo sapiens; identical to SEQ ID NO: 67925
  Payload ID: 13553
  Gene Symbol: PSMB8
  Gene Name: proteasome subunit beta 8
  Uniprot ID: P28062
  ENSP ID: ENSP00000397057

SEQ ID NO: 67936 - protein, 252 aa, Homo sapiens; identical to SEQ ID NO: 67929
  Payload ID: 13553
  Gene Symbol: PSMB8
  Gene Name: proteasome subunit beta 8
  ENSP ID: ENSP00000401868

SEQ ID NO: 67937 - protein, 276 aa, Homo sapiens; identical to SEQ ID NO: 67926
  Payload ID: 13553
  Gene Symbol: PSMB8
  Gene Name: proteasome subunit beta 8
  Uniprot ID: P28062
  ENSP ID: ENSP00000402406

SEQ ID NO: 67938 - protein, 276 aa, Homo sapiens; identical to SEQ ID NO: 67926
  Payload ID: 13553
  Gene Symbol: PSMB8
  Gene Name: proteasome subunit beta 8
  Uniprot ID: P28062
  ENSP ID: ENSP00000404585

SEQ ID NO: 67939 - protein, 252 aa, Homo sapiens; identical to SEQ ID NO: 67929
  Payload ID: 13553
  Gene Symbol: PSMB8
  Gene Name: proteasome subunit beta 8
  ENSP ID: ENSP00000404615

SEQ ID NO: 67940 - protein, 276 aa, Homo sapiens; identical to SEQ ID NO: 67926
  Payload ID: 13553
  Gene Symbol: PSMB8
  Gene Name: proteasome subunit beta 8
  Uniprot ID: P28062
  ENSP ID: ENSP00000406797

SEQ ID NO: 67941 - protein, 276 aa, Homo sapiens
  Payload ID: 13553
  Gene Symbol: PSMB8
  Gene Name: proteasome subunit beta 8
  ENSP ID: ENSP00000406878
MALLDVCGAPRGQRPESALPVAGSGRRSDPGHYSFSMRSPELALPRGMKPTEFFQSLGGDGERNVQIEMAHGTTTLAFKFQHGVIAAVDSRASAGSYISALRVNKVIEINPYLLGTMSGCAADCQYWERLLAKECRLYYLRNGERISVSAASKLLSNMMCQYRGMGLSMGSMICGWDKKGPGLYYVDEHGTRLSGNMFSTGSGNTYAYGVMDSGYRPNLSPEEAYDLGRRAIAYATHRDSYSGGVVNMYHMKEDGWVKVESTDVSDLLHQYREANQ

SEQ ID NO: 67942 - protein, 252 aa, Homo sapiens; identical to SEQ ID NO: 67929
  Payload ID: 13553
  Gene Symbol: PSMB8
  Gene Name: proteasome subunit beta 8
  ENSP ID: ENSP00000406913

SEQ ID NO: 67943 - protein, 272 aa, Homo sapiens; identical to SEQ ID NO: 67925
  Payload ID: 13553
  Gene Symbol: PSMB8
  Gene Name: proteasome subunit beta 8
  Uniprot ID: P28062
  ENSP ID: ENSP00000407539

SEQ ID NO: 67944 - protein, 272 aa, Homo sapiens; identical to SEQ ID NO: 67925
  Payload ID: 13553
  Gene Symbol: PSMB8
  Gene Name: proteasome subunit beta 8
  Uniprot ID: P28062
  ENSP ID: ENSP00000408825

SEQ ID NO: 67945 - protein, 252 aa, Homo sapiens; identical to SEQ ID NO: 67929
  Payload ID: 13553
  Gene Symbol: PSMB8
  Gene Name: proteasome subunit beta 8
  ENSP ID: ENSP00000410205

SEQ ID NO: 67946 - protein, 272 aa, Homo sapiens; identical to SEQ ID NO: 67925
  Payload ID: 13553
  Gene Symbol: PSMB8
  Gene Name: proteasome subunit beta 8
  Uniprot ID: P28062
  ENSP ID: ENSP00000412618

SEQ ID NO: 67947 - protein, 272 aa, Homo sapiens; identical to SEQ ID NO: 67925
  Payload ID: 13553
  Gene Symbol: PSMB8
  Gene Name: proteasome subunit beta 8
  Uniprot ID: P28062
  ENSP ID: ENSP00000414731

SEQ ID NO: 67948 - protein, 276 aa, Homo sapiens; identical to SEQ ID NO: 67926
  Payload ID: 13553
  Gene Symbol: PSMB8
  Gene Name: proteasome subunit beta 8
  Uniprot ID: P28062
  ENSP ID: ENSP00000414770

SEQ ID NO: 67949 - protein, 219 aa, Homo sapiens
  Payload ID: 13554
  Gene Symbol: PSMB9
  Gene Name: proteasome subunit beta 9
  Uniprot ID: P28065
  ENSP ID: ENSP00000363993
MLRAGAPTGDLPRAGEVHTGTTIMAVEFDGGVVMGSDSRVSAGEAVVNRVFDKLSPLHERIYCALSGSAADAQAVADMAAYQLELHGIELEEPPLVLAAANVVRNISYKYREDLSAHLMVAGWDQREGGQVYGTLGGMLTRQPFAIGGSGSTFIYGYVDAAYKPGMSPEECRRFTTDAIALAMSRDGSSGGVIYLVTITAAGVDHRVILGNELPKFYDE

SEQ ID NO: 67950 - protein, 219 aa, Homo sapiens; identical to SEQ ID NO: 67949
  Payload ID: 13554
  Gene Symbol: PSMB9
  Gene Name: proteasome subunit beta 9
  Uniprot ID: P28065
  ENSP ID: ENSP00000372595

SEQ ID NO: 67951 - protein, 219 aa, Homo sapiens; identical to SEQ ID NO: 67949
  Payload ID: 13554
  Gene Symbol: PSMB9
  Gene Name: proteasome subunit beta 9
  Uniprot ID: P28065
  ENSP ID: ENSP00000372721

SEQ ID NO: 67952 - protein, 196 aa, Homo sapiens
  Payload ID: 13554
  Gene Symbol: PSMB9
  Gene Name: proteasome subunit beta 9
  ENSP ID: ENSP00000378739
MAVEFDGGVVMGSDSRVSAGEAVVNRVFDKLSPLHERIYCALSGSAADAQAVADMAAYQLELHGIELEEPPLVLAAANVVRNISYKYREDLSAHLMVAGWDQREGGQVYGTLGGMLTRQPFAIGGSGSTFIYGYVDAAYKPGMSPEECRRFTTDAIALAMSRDGSSGGVIYLVTITAAGVDHRVILGNELPKFYDE

SEQ ID NO: 67953 - protein, 196 aa, Homo sapiens; identical to SEQ ID NO: 67952
  Payload ID: 13554
  Gene Symbol: PSMB9
  Gene Name: proteasome subunit beta 9
  ENSP ID: ENSP00000382305

SEQ ID NO: 67954 - protein, 178 aa, Homo sapiens
  Payload ID: 13554
  Gene Symbol: PSMB9
  Gene Name: proteasome subunit beta 9
  ENSP ID: ENSP00000382313
MLRAGAPTGDLPRAGEVHTGTTIMAVEFDGGVVMGSDSRVSAGIELEEPPLVLAAANVVRNISYKYREDLSAHLMVAGWDQREGGQVYGTLGGMLTRQPFAIGGSGSTFIYGYVDAAYKPGMSPEECRRFTTDATSTKRRVCGYFLRTQKRENQNQRVHEYMCTGERSLSSSPLLSCS

SEQ ID NO: 67955 - protein, 196 aa, Homo sapiens; identical to SEQ ID NO: 67952
  Payload ID: 13554
  Gene Symbol: PSMB9
  Gene Name: proteasome subunit beta 9
  ENSP ID: ENSP00000382516

SEQ ID NO: 67956 - protein, 178 aa, Homo sapiens; identical to SEQ ID NO: 67954
  Payload ID: 13554
  Gene Symbol: PSMB9
  Gene Name: proteasome subunit beta 9
  ENSP ID: ENSP00000382528

SEQ ID NO: 67957 - protein, 178 aa, Homo sapiens; identical to SEQ ID NO: 67954
  Payload ID: 13554
  Gene Symbol: PSMB9
  Gene Name: proteasome subunit beta 9
  ENSP ID: ENSP00000389541

SEQ ID NO: 67958 - protein, 219 aa, Homo sapiens [sequence omitted]

SEQ ID NO: 67959 - protein, 131 aa, Homo sapiens
  Payload ID: 13554
  Gene Symbol: PSMB9
  Gene Name: proteasome subunit beta 9
  ENSP ID: ENSP00000394363
MAVEFDGGVVMGSDSRVSAGEAVVNRVFDKLSPLHERIYCALSGSAADAQAVADMAAYQLELHGIELEEPPLVLAAANVVRNISYKYREDLSAHLMVAGWDQREGGQVYGTLGGMLTRQPFAIGGSGSTFI

SEQ ID NO: 67960 - protein, 131 aa, Homo sapiens
  Payload ID: 13554
  Gene Symbol: PSMB9
  Gene Name: proteasome subunit beta 9
  ENSP ID: ENSP00000396311
MAVEFDGGVVMGSDSRVSAGEAVVNRVFDKLSPLHEHIYCALSGSAADAQAVADMAAYQLELHGIELEEPPLVLAAANVVRNISYKYREDLSAHLMVAGWDQREGGQVYGTLGGMLTRQPFAIGGSGSTFI

SEQ ID NO: 67961 - protein, 219 aa, Homo sapiens; identical to SEQ ID NO: 67949
  Payload ID: 13554
  Gene Symbol: PSMB9
  Gene Name: proteasome subunit beta 9
  Uniprot ID: P28065
  ENSP ID: ENSP00000396813

SEQ ID NO: 67962 - protein, 196 aa, Homo sapiens
  Payload ID: 13554
  Gene Symbol: PSMB9
  Gene Name: proteasome subunit beta 9
  ENSP ID: ENSP00000398642
MAVEFDGGVVMGSDSRVSAGEAVVNRVFDKLSPLHEHIYCALSGSAADAQAVADMAAYQLELHGIELEEPPLVLAAANVVRNISYKYREDLSAHLMVAGWDQREGGQVYGTLGGMLTRQPFAIGGSGSTFIYGYVDAAYKPGMSPEECRRFTTDAIALAMSRDGSSGGVIYLVTITAAGVDHRVILGNELPKFYDE

SEQ ID NO: 67963 - protein, 196 aa, Homo sapiens; identical to SEQ ID NO: 67952
  Payload ID: 13554
  Gene Symbol: PSMB9
  Gene Name: proteasome subunit beta 9
  ENSP ID: ENSP00000401221

SEQ ID NO: 67964 - protein, 131 aa, Homo sapiens; identical to SEQ ID NO: 67959
  Payload ID: 13554
  Gene Symbol: PSMB9
  Gene Name: proteasome subunit beta 9
  ENSP ID: ENSP00000401229

SEQ ID NO: 67965 - protein, 196 aa, Homo sapiens; identical to SEQ ID NO: 67962
  Payload ID: 13554
  Gene Symbol: PSMB9
  Gene Name: proteasome subunit beta 9
  ENSP ID: ENSP00000401624

SEQ ID NO: 67966 - protein, 178 aa, Homo sapiens
  Payload ID: 13554
  Gene Symbol: PSMB9
  Gene Name: proteasome subunit beta 9
  ENSP ID: ENSP00000403857
MLRAGAPTGDLPRAGEVHTGTTIMAVEFDGGVVMGSDSRVSAGIELEEPPLVLAAANVVRNISYKYREDLSAHLMVAGWDQREGGQVYGTLGGMLTRQPFAIGGSGSTFIYGYVDAAYKPGMSPEECRRFTTDATSTKRRVCGYFLRTQKRENQNQRVHEYMCTSERSLSSSPLLSCS

SEQ ID NO: 67967 - protein, 196 aa, Homo sapiens; identical to SEQ ID NO: 67952
  Payload ID: 13554
  Gene Symbol: PSMB9
  Gene Name: proteasome subunit beta 9
  ENSP ID: ENSP00000404847

SEQ ID NO: 67968 - protein, 131 aa, Homo sapiens; identical to SEQ ID NO: 67960
  Payload ID: 13554
  Gene Symbol: PSMB9
  Gene Name: proteasome subunit beta 9
  ENSP ID: ENSP00000406077

SEQ ID NO: 67969 - protein, 196 aa, Homo sapiens; identical to SEQ ID NO: 67962
  Payload ID: 13554
  Gene Symbol: PSMB9
  Gene Name: proteasome subunit beta 9
  ENSP ID: ENSP00000406380

SEQ ID NO: 67970 - protein, 131 aa, Homo sapiens; identical to SEQ ID NO: 67959
  Payload ID: 13554
  Gene Symbol: PSMB9
  Gene Name: proteasome subunit beta 9
  ENSP ID: ENSP00000406858

SEQ ID NO: 67971 - protein, 219 aa, Homo sapiens; identical to SEQ ID NO: 67949
  Payload ID: 13554
  Gene Symbol: PSMB9
  Gene Name: proteasome subunit beta 9
  Uniprot ID: P28065
  ENSP ID: ENSP00000407233

SEQ ID NO: 67972 - protein, 219 aa, Homo sapiens [sequence omitted]

SEQ ID NO: 67973 - protein, 178 aa, Homo sapiens; identical to SEQ ID NO: 67954
  Payload ID: 13554
  Gene Symbol: PSMB9
  Gene Name: proteasome subunit beta 9
  ENSP ID: ENSP00000408178

SEQ ID NO: 67974 - protein, 131 aa, Homo sapiens; identical to SEQ ID NO: 67959
  Payload ID: 13554
  Gene Symbol: PSMB9
  Gene Name: proteasome subunit beta 9
  ENSP ID: ENSP00000408447

SEQ ID NO: 67975 - protein, 178 aa, Homo sapiens; identical to SEQ ID NO: 67966
  Payload ID: 13554
  Gene Symbol: PSMB9
  Gene Name: proteasome subunit beta 9
  ENSP ID: ENSP00000409785

SEQ ID NO: 67976 - protein, 131 aa, Homo sapiens; identical to SEQ ID NO: 67960
  Payload ID: 13554
  Gene Symbol: PSMB9
  Gene Name: proteasome subunit beta 9
  ENSP ID: ENSP00000409850

SEQ ID NO: 67977 - protein, 131 aa, Homo sapiens; identical to SEQ ID NO: 67959
  Payload ID: 13554
  Gene Symbol: PSMB9
  Gene Name: proteasome subunit beta 9
  ENSP ID: ENSP00000411561

SEQ ID NO: 67978 - protein, 219 aa, Homo sapiens [sequence omitted]

SEQ ID NO: 67979 - protein, 178 aa, Homo sapiens; identical to SEQ ID NO: 67966
  Payload ID: 13554
  Gene Symbol: PSMB9
  Gene Name: proteasome subunit beta 9
  ENSP ID: ENSP00000413194

SEQ ID NO: 67980 - protein, 634 aa, Homo sapiens
  Payload ID: 13555
  Gene Symbol: POT1
  Gene Name: protection of telomeres 1
  Uniprot ID: Q9NUX5
  ENSP ID: ENSP00000350249
MSLVPATNYIYTPLNQLKGGTIVNVYGVVKFFKPPYLSKGTDYCSVVTIVDQTNVKLTCLLFSGNYEALPIIYKNGDIVRFHRLKIQVYKKETQGITSSGFASLTFEGTLGAPIIPRTSSKYFNFTTEDHKMVEALRVWASTHMSPSWTLLKLCDVQPMQYFDLTCQLLGKAEVDGASFLLKVWDGTRTPFPSWRVLIQDLVLEGDLSHIHRLQNLTIDILVYDNHVHVARSLKVGSFLRIYSLHTKLQSMNSENQTMLSLEFHLHGGTSYGRGIRVLPESNSDVDQLKKDLESANLTANQHSDVICQSEPDDSFPSSGSVSLYEVERCQQLSATILTDHQYLERTPLCAILKQKAPQQYRIRAKLRSYKPRRLFQSVKLHCPKCHLLQEVPHEGDLDIIFQDGATKTPDVKLQNTSLYDSKIWTTKNQKGRKVAVHFVKNNGILPLSNECLLLIEGGTLSEICKLSNKFNSVIPVRSGHEDLELLDLSAPFLIQGTIHHYGCKQCSSLRSIQNLNSLVDKTSWIPSSVAEALGIVPLQYVFVMTFTLDDGTGVLEAYLMDSDKFFQIPASEVLMDDDLQKSVDMIMDMFCPPGIKIDAYPWLECFIKSYNVTNGTDNQICYQIFDTTVAEDVI

SEQ ID NO: 67981 - protein, 503 aa, Homo sapiens
  Payload ID: 13555
  Gene Symbol: POT1
  Gene Name: protection of telomeres 1
  ENSP ID: ENSP00000377002
MVEALRVWASTHMSPSWTLLKLCDVQPMQYFDLTCQLLGKAEVDGASFLLKVWDGTRTPFPSWRVLIQDLVLEGDLSHIHRLQNLTIDILVYDNHVHVARSLKVGSFLRIYSLHTKLQSMNSENQTMLSLEFHLHGGTSYGRGIRVLPESNSDVDQLKKDLESANLTANQHSDVICQSEPDDSFPSSGSVSLYEVERCQQLSATILTDHQYLERTPLCAILKQKAPQQYRIRAKLRSYKPRRLFQSVKLHCPKCHLLQEVPHEGDLDIIFQDGATKTPDVKLQNTSLYDSKIWTTKNQKGRKVAVHFVKNNGILPLSNECLLLIEGGTLSEICKLSNKFNSVIPVRSGHEDLELLDLSAPFLIQGTIHHYGCKQCSSLRSIQNLNSLVDKTSWIPSSVAEALGIVPLQYVFVMTFTLDDGTGVLEAYLMDSDKFFQIPASEVLMDDDLQKSVDMIMDMFCPPGIKIDAYPWLECFIKSYNVTNGTDNQICYQIFDTTVAEDVI

SEQ ID NO: 67982 - protein, 82 aa, Homo sapiens
  Payload ID: 13555
  Gene Symbol: POT1
  Gene Name: protection of telomeres 1
  ENSP ID: ENSP00000388921
MSLVPATNYIYTPLNQLKGGTIVNVYGVVKFFKPPYLSKGTDYCSVVTIVDQTNVKLTCLLFSGNYEALPIIYKNGDIVRFH

SEQ ID NO: 67983 - protein, 85 aa, Homo sapiens
  Payload ID: 13555
  Gene Symbol: POT1
  Gene Name: protection of telomeres 1
  ENSP ID: ENSP00000397632
  MOD_RES (1)..(1): Any amino acid
XGTGVLEAYLMDSDKFFQIPASEVLMDDDLQKSVDMIMDMFCPPGIKIDAYPWLECFIKSYNVTNGTDNQICYQIFDTTVAEDVI

SEQ ID NO: 67984 - protein, 45 aa, Homo sapiens
  Payload ID: 13555
  Gene Symbol: POT1
  Gene Name: protection of telomeres 1
  ENSP ID: ENSP00000403088
MSLVPATNYIYTPLNQLKGGTIVNVYGVVKFFKPPYLSKGTDSSI

SEQ ID NO: 67985 - protein, 138 aa, Homo sapiens
  Payload ID: 13555
  Gene Symbol: POT1
  Gene Name: protection of telomeres 1
  ENSP ID: ENSP00000416820
  MOD_RES (1)..(1): Any amino acid
XCKQCSSLRSIQNLNSLVDKTSWIPSSVAEALGIVPLQYVFVMTFTLDDGTGVLEAYLMDSDKFFQIPASEVLMDDDLQKSVDMIMDMFCPPGIKIDAYPWLECFIKSYNVTNGTDNQICYQIFDTTVAEDEALNLEE

SEQ ID NO: 67986 - protein, 77 aa, Homo sapiens
  Payload ID: 13555
  Gene Symbol: POT1
  Gene Name: protection of telomeres 1
  ENSP ID: ENSP00000476290
KAEVDGASFLLKVWDGTRTPFPSWRVLIQDLVLEGDLSHIHRLQNLTIDILVYDNHVHVARSLKVMYSRKKCYFMFL

SEQ ID NO: 67987 - protein, 340 aa, Homo sapiens
  Payload ID: 13555
  Gene Symbol: POT1
  Gene Name: protection of telomeres 1
  ENSP ID: ENSP00000476371
MSLVPATNYIYTPLNQLKGGTIVNVYGVVKFFKPPYLSKGTDYCSVVTIVDQTNVKLTCLLFSGNYEALPIIYKNGDIVRFHRLKIQVYKKETQGITSSGFASLTFEGTLGAPIIPRTSSKYFNFTTEDHKMVEALRVWASTHMSPSWTLLKLCDVQPMQYFDLTCQLLGKAEVDGASFLLKVWDGTRTPFPSWRVLIQDLVLEGDLSHIHRLQNLTIDILVYDNHVHVARSLKVGSFLRIYSLHTKLQSMNSENQTMLSLEFHLHGGTSYGRGIRVLPESNSDVDQLKKDLESANLTANQHSDVICQSEPDDSFPNGVSLRPPGWSSVARSRLIAASTS

SEQ ID NO: 67988 - protein, 518 aa, Homo sapiens
  Payload ID: 13555
  Gene Symbol: POT1
  Gene Name: protection of telomeres 1
  ENSP ID: ENSP00000476506
MSLVPATNYIYTPLNQLKGGTIVNVYGVVKFFKPPYLSKGTDYCSVVTIVDQTNVKLTCLLFSGNYEALPIIYKNGDIVRFHRLKIQVYKKETQGITSSGFASLTFEGTLGAPIIPRTSSKYFNFTTEDHKMVEALRVWASTHMSPSWTLLKLCDVQPMQYFDLTCQLLGKAEVDGASFLLKVWDGTRTPFPSWRVLIQDLVLEGDLSHIHRLQNLTIDILVYDNHVHVARSLKVGSFLRIYSLHTKLQSMNSENQTMLSLEFHLHGGTSYGRGIRVLPESNSDVDQLKKDLESANLTANQHSDVICQSEPDDSFPSSGSVSLYEVERCQQLSATILTDHQYLERTPLCAILKQKAPQQYRIRAKLRSYKPRRLFQSVKLHCPKCHLLQEVPHEGDLDIIFQDGATKTPDVKLQNTSLYDSKIWTTKNQKGRKVAVHFVKNNGILPLSNECLLLIEGGTLSEICKLSNKFNSVIPVRSGHEDLELLDLSAPFLIQGTIHHYGTGYCTPPICVCYDLYT

SEQ ID NO: 67989 - protein, 119 aa, Homo sapiens
  Payload ID: 13555
  Gene Symbol: POT1
  Gene Name: protection of telomeres 1
  ENSP ID: ENSP00000476673
  MOD_RES (1)..(1): Any amino acid
XEGDLSHIHRLQNLTIDILVYDNHVHVARSLKVGSFLRIYSLHTKLQSMNSENQTMLSLEFHLHGGTSYGRGIRVLPESNSDVDQLKKDLESANLTANQHSDVICQSEPDDSFPSKDNL

SEQ ID NO: 67990 - protein, 580 aa, Homo sapiens
  Payload ID: 13555
  Gene Symbol: POT1
  Gene Name: protection of telomeres 1
  ENSP ID: ENSP00000476981
MSLVPATNYIYTPLNQLKGGTIVNVYGVVKFFKPPYLSKGTDYCSVVTIVDQTNVKLTCLLFSGNYEALPIIYKNGDIVRFHRLKIQVYKKETQGITSSGFASLTFEGTLGAPIIPRTSSKYFNFTTEDHKMVEALRVWASTHMSPSWTLLKLCDVQPMQYFDLTCQLLGKAEVDGASFLLKVWDGTRTPFPSWRVLIQDLVLEGDLSHIHRLQNLTIDILVYDNHVHVARSLKVGSFLRIYSLHTKLQSMNSENQTMLSLEFHLHGGTSYGRGIRVLPESNSDVDQLKKDLESANLTANQHSDVICQSEPDDSFPSSGSVSLYEVERCQQLSATILTDHQYLERTPLCAILKQKAPQQYRIRAKLRSYKPRRLFQSVKLHCPKCHLLQEVPHEGDLDIIFQDGATKTPDVKLQNTSLYDSKIWTTKNQKGRKVAVHFVKNNGILPLSNECLLLIEGGTLSEICKLSNKFNSVIPVRSGHEDLELLDLSAPFLIQGTIHHYGCKQCSSLRSIQNLNSLVDKTSWIPSSVAEALGIVPLQYVFVMTFTLDDGTGVLEAYLMDSVSIRGQILPDSSIRSSDG

SEQ ID NO: 67991 - protein, 73 aa, Homo sapiens
  Payload ID: 13555
  Gene Symbol: POT1
  Gene Name: protection of telomeres 1
  ENSP ID: ENSP00000477258
MSLVPATNYIYTPLNQLKGGTIVNVYGVVKFFKPPYLSKGTDYCSVVTIVDQTNVKLTCLLFSGNYEALPIIY

SEQ ID NO: 67992 - protein, 86 aa, Homo sapiens
  Payload ID: 13555
  Gene Symbol: POT1
  Gene Name: protection of telomeres 1
  ENSP ID: ENSP00000477320
LHCPKCHLLQEVPHEGDLDIIFQDGATKTPDVKLQNTSLYDSKIWTTKNQKGRKVAVHFVKNNGILPLSNECLLLIEGKIFKSLFC

SEQ ID NO: 67993 - protein, 353 aa, Homo sapiens
  Payload ID: 13556
  Gene Symbol: PRMT1
  Gene Name: protein arginine methyltransferase 1
  Uniprot ID: Q99873
  ENSP ID: ENSP00000375724
MAAAEAANCIMEVSCGQAESSEKPNAEDMTSKDYYFDSYAHFGIHEEMLKDEVRTLTYRNSMFHNRHLFKDKVVLDVGSGTGILCMFAAKAGARKVIGIECSSISDYAVKIVKANKLDHVVTIIKGKVEEVELPVEKVDIIISEWMGYCLFYESMLNTVLYARDKWLAPDGLIFPDRATLYVTAIEDRQYKDYKIHWWENVYGFDMSCIKDVAIKEPLVDVVDPKQLVTNACLIKEVDIYTVKVEDLTFTSPFCLQVKRNDYVHALVAYFNIEFTRCHKRTGFSTSPESPYTHWKQTVFYMEDYLTVKTGEEIFGTIGMRPNAKNNRDLDFTIDLDFKGQLCELSCSTDYRMR

SEQ ID NO: 67994 - protein, 371 aa, Homo sapiens
  Payload ID: 13556
  Gene Symbol: PRMT1
  Gene Name: protein arginine methyltransferase 1
  ENSP ID: ENSP00000406162
MAAAEAANCIMENFVATLANGMSLQPPLEEVSCGQAESSEKPNAEDMTSKDYYFDSYAHFGIHEEMLKDEVRTLTYRNSMFHNRHLFKDKVVLDVGSGTGILCMFAAKAGARKVIGIECSSISDYAVKIVKANKLDHVVTIIKGKVEEVELPVEKVDIIISEWMGYCLFYESMLNTVLYARDKWLAPDGLIFPDRATLYVTAIEDRQYKDYKIHWWENVYGFDMSCIKDVAIKEPLVDVVDPKQLVTNACLIKEVDIYTVKVEDLTFTSPFCLQVKRNDYVHALVAYFNIEFTRCHKRTGFSTSPESPYTHWKQTVFYMEDYLTVKTGEEIFGTIGMRPNAKNNRDLDFTIDLDFKGQLCELSCSTDYRMR

SEQ ID NO: 67995 - protein, 207 aa, Homo sapiens
  Payload ID: 13556
  Gene Symbol: PRMT1
  Gene Name: protein arginine methyltransferase 1
  ENSP ID: ENSP00000431957
MTSKDYYFDSYAHFGIHEEMLKDEVRTLTYRNSMFHNRHLFKDKVVLDVGSGTGILCMFAAKAGARKVIGIECSSISDYAVKIVKANKLDHVVTIIKGKVEEVELPVEKVDIIISEWMGYCLFYESMLNTVLYARDKWLAPDGLIFPDRATLYVTAIEDRQYKDYKIHWWENVYGFDMSCIKDVAIKEPLVDVVDPKQLVTNACLIK

SEQ ID NO: 67996 - protein, 54 aa, Homo sapiens
  Payload ID: 13556
  Gene Symbol: PRMT1
  Gene Name: protein arginine methyltransferase 1
  ENSP ID: ENSP00000432050
MAAAEAANCIMENFVATLANGMSLQPPLEEVTPFALPCVCPHFPSPPLPSCGLS

SEQ ID NO: 67997 - protein, 160 aa, Homo sapiens
  Payload ID: 13556
  Gene Symbol: PRMT1
  Gene Name: protein arginine methyltransferase 1
  ENSP ID: ENSP00000432349
MTSKDYYFDSYAHFGIHEEMLKDEVRTLTYRNSMFHNRHLFKDKVVLDVGSGTGILCMFAAKAGARKVIGIECSSISDYAVKIVKANKLDHVVTIIKGKVEEVELPVEKVDIIISEWMGYCLFYESMLNTVLYARDKWLAPDGLIFPDRATLYVTAIEDR

SEQ ID NO: 67998 - protein, 205 aa, Homo sapiens
  Payload ID: 13556
  Gene Symbol: PRMT1
  Gene Name: protein arginine methyltransferase 1
  ENSP ID: ENSP00000432538
MTSKDYYFDSYAHFGIHEEMLKDEVRTLTYRNSMFHNRHLFKDKVVLDVGSGTGILCMFAAKAGARKVIGIECSSISDYAVKIVKANKLDHVVTIIKGKVEEVELPVEKVDIIISEWMGYCLFYESMLNTVLYARDKWLAPDGLIFPDRATLYVTAIEDRQYKDYKIHWWENVYGFDMSCIKDVAIKEPLVDVVDPKQLVTNACL

SEQ ID NO: 67999 - protein, 160 aa, Homo sapiens; identical to SEQ ID NO: 67997
  Payload ID: 13556
  Gene Symbol: PRMT1
  Gene Name: protein arginine methyltransferase 1
  ENSP ID: ENSP00000432788

SEQ ID NO: 68000 - protein, 238 aa, Homo sapiens
  Payload ID: 13556
  Gene Symbol: PRMT1
  Gene Name: protein arginine methyltransferase 1
  ENSP ID: ENSP00000433480
  MOD_RES (1)..(1): Any amino acid
XAANCIMEVSAWSAAVGGRRLWNFVATLANGMSLQPPLEEVSCGQAESSEKPNAEDMTSKDYYFDSYAHFGIHEEMLKDEVRTLTYRNSMFHNRHLFKDKVVLDVGSGTGILCMFAAKAGARKVIGIECSSISDYAVKIVKANKLDHVVTIIKGKVEEVELPVEKVDIIISEWMGYCLFYESMLNTVLYARDKWLAPDGLIFPDRATLYVTAIEDRQYKDYKIHWWENVYGFDMSCIK

SEQ ID NO: 68001 - protein, 325 aa, Homo sapiens
  Payload ID: 13556
  Gene Symbol: PRMT1
  Gene Name: protein arginine methyltransferase 1
  ENSP ID: ENSP00000433556
MTSKDYYFDSYAHFGIHEEMLKDEVRTLTYRNSMFHNRHLFKDKVVLDVGSGTGILCMFAAKAGARKVIGIECSSISDYAVKIVKANKLDHVVTIIKGKVEEVELPVEKVDIIISEWMGYCLFYESMLNTVLYARDKWLAPDGLIFPDRATLYVTAIEDRQYKDYKIHWWENVYGFDMSCIKDVAIKEPLVDVVDPKQLVTNACLIKEVDIYTVKVEDLTFTSPFCLQVKRNDYVHALVAYFNIEFTRCHKRTGFSTSPESPYTHWKQTVFYMEDYLTVKTGEEIFGTIGMRPNAKNNRDLDFTIDLDFKGQLCELSCSTDYRMR

SEQ ID NO: 68002 - protein, 63 aa, Homo sapiens
  Payload ID: 13556
  Gene Symbol: PRMT1
  Gene Name: protein arginine methyltransferase 1
  ENSP ID: ENSP00000434911
MVGVAEVSCGQAESSEKPNAEDMTSKDYYFDSYAHFGIHEEMLKDEVRTLTYRNSMFHNRHLF

SEQ ID NO: 68003 - protein, 110 aa, Homo sapiens
  Payload ID: 13556
  Gene Symbol: PRMT1
  Gene Name: protein arginine methyltransferase 1
  ENSP ID: ENSP00000437273
MVGVAEVSCGQAESSEKPNAEDMTSKDYYFDSYAHFGIHEEMLKDEVRTLTYRNSMFHNRHLFKDKVVLDVGSGTGILCMFAAKAGARKVIGIECSSISDYAVKIVKANK

SEQ ID NO: 68004 - protein, 285 aa, Homo sapiens
  Payload ID: 13556
  Gene Symbol: PRMT1
  Gene Name: protein arginine methyltransferase 1
  ENSP ID: ENSP00000484505
MAAAEAANCIMEVSCGQAESSEKPNAEDMTSKDYYFDSYAHFGIHEEMLKDEVRTLTYRNSMFHNRHLFKDKVVLDVGSGTGILCMFAAKAGARKVIGIECSSISDYAVKIVKANKLDHVVTIIKGKVEEVELPVEKVDIIISEWMGYCLFYESMLNTVLYARDKWLEVDIYTVKVEDLTFTSPFCLQVKRNDYVHALVAYFNIEFTRCHKRTGFSTSPESPYTHWKQTVFYMEDYLTVKTGEEIFGTIGMRPNAKNNRDLDFTIDLDFKGQLCELSCSTDYRMR

SEQ ID NO: 68005 - protein, 228 aa, Homo sapiens
  Payload ID: 13557
  Gene Symbol: PRMT2
  Gene Name: protein arginine methyltransferase 2
  Uniprot ID: P55345
  ENSP ID: ENSP00000291705
MATSGDCPRSESQGEEPAECSEAGLLQEGVQPEEFVAIADYAATDETQLSFLRGEKILILRQTTADWWWGERAGCCGYIPANHVGKHVDEYDPEDTWQDEEYFGSYGTLKLHLEMLADQPRTTKYHSVILQNKESLTDKVILDVGCGTGIISLFCAHYARPRAVYAVEASEMAQHTGQLVLQNGFADIITVYQQKVEDVVLPEKVDVLVSEWMGTCLLVGEKVFPIWR

SEQ ID NO: 68006 - protein, 284 aa, Homo sapiens
  Payload ID: 13557
  Gene Symbol: PRMT2
  Gene Name: protein arginine methyltransferase 2
  Uniprot ID: P55345
  ENSP ID: ENSP00000335490
MATSGDCPRSESQGEEPAECSEAGLLQEGVQPEEFVAIADYAATDETQLSFLRGEKILILRQTTADWWWGERAGCCGYIPANHVGKHVDEYDPEDTWQDEEYFGSYGTLKLHLEMLADQPRTTKYHSVILQNKESLTDKVILDVGCGTGIISLFCAHYARPRAVYAVEASEMAQHTGQLVLQNGFADIITVYQQKVEDVVLPEKVDVLVSEWMGTCLLAAPLLSCRILPCTCASGPLHVLLACCLPLPCTCASVPLHVLLACCLPVLRAPQPSGLHLSWPIFLL

SEQ ID NO: 68007 - protein, 433 aa, Homo sapiens
  Payload ID: 13557
  Gene Symbol: PRMT2
  Gene Name: protein arginine methyltransferase 2
  Uniprot ID: P55345
  ENSP ID: ENSP00000347906
MATSGDCPRSESQGEEPAECSEAGLLQEGVQPEEFVAIADYAATDETQLSFLRGEKILILRQTTADWWWGERAGCCGYIPANHVGKHVDEYDPEDTWQDEEYFGSYGTLKLHLEMLADQPRTTKYHSVILQNKESLTDKVILDVGCGTGIISLFCAHYARPRAVYAVEASEMAQHTGQLVLQNGFADIITVYQQKVEDVVLPEKVDVLVSEWMGTCLLFEFMIESILYARDAWLKEDGVIWPTMAALHLVPCSADKDYRSKVLFWDNAYEFNLSALKSLAVKEFFSKPKYNHILKPEDCLSEPCTILQLDMRTVQISDLETLRGELRFDIRKAGTLHGFTAWFSVHFQSLQEGQPPQVLSTGPFHPTTHWKQTLFMMDDPVPVHTGDVVTGSVVLQRNPVWRRHMSVALSWAVTSRQDPTSQKVGEKVFPIWR

SEQ ID NO: 68008 - protein, 253 aa, Homo sapiens
  Payload ID: 13557
  Gene Symbol: PRMT2
  Gene Name: protein arginine methyltransferase 2
  ENSP ID: ENSP00000380752
MATSGDCPRSESQGEEPAECSEAGLLQEGVQPEEFVAIADYAATDETQLSFLRGEKILILRQTTADWWWGERAGCCGYIPANHVGKHVDEYDPEDTWQDEEYFGSYGTLKLHLEMLADQPRTTKYHSVILQNKESLTDKVILDVGCGTGIISLFCAHYARPRAVYAVEASEMAQHTGQLVLQNGFADIITVYQQKVEDVVLPEKVDVLVSEWMGTCLLVRAGVRAAGGRSWGASEHGLGWANLRISRVVRDSF

SEQ ID NO: 68009 - protein, 433 aa, Homo sapiens; identical to SEQ ID NO: 68007
  Payload ID: 13557
  Gene Symbol: PRMT2
  Gene Name: protein arginine methyltransferase 2
  Uniprot ID: P55345
  ENSP ID: ENSP00000380759

SEQ ID NO: 68010 - protein, 433 aa, Homo sapiens; identical to SEQ ID NO: 68007
  Payload ID: 13557
  Gene Symbol: PRMT2
  Gene Name: protein arginine methyltransferase 2
  Uniprot ID: P55345
  ENSP ID: ENSP00000380760

SEQ ID NO: 68011 - protein, 331 aa, Homo sapiens
  Payload ID: 13557
  Gene Symbol: PRMT2
  Gene Name: protein arginine methyltransferase 2
  Uniprot ID: P55345
  ENSP ID: ENSP00000397266
MATSGDCPRSESQGEEPAECSEAGLLQEGVQPEEFVAIADYAATDETQLSFLRGEKILILRQTTADWWWGERAGCCGYIPANHVGKHVDEYDPEDTWQDEEYFGSYGTLKLHLEMLADQPRTTKYHSVILQNKESLTDKVILDVGCGTGIISLFCAHYARPRAVYAVEASEMAQHTGQLVLQNGFADIITVYQQKVEDVVLPEKVDVLVSEWMGTCLLTLRGELRFDIRKAGTLHGFTAWFSVHFQSLQEGQPPQVLSTGPFHPTTHWKQTLFMMDDPVPVHTGDVVTGSVVLQRNPVWRRHMSVALSWAVTSRQDPTSQKVGEKVFPIWR

SEQ ID NO: 68012 - protein, 194 aa, Homo sapiens
  Payload ID: 13557
  Gene Symbol: PRMT2
  Gene Name: protein arginine methyltransferase 2
  ENSP ID: ENSP00000406127
  MOD_RES (1)..(1): Any amino acid
XQTTADWWWGERAGCCGYIPANHVGKHVDEYDPEDTWQDEEYFGSYGTLKLHLEMLADQPRTTKYHSVILQNKESLTDKVILDVGCGTGIISLFCAHYARPRAVYAVEASEMAQHTGQLVLQNGFADIITVYQQKVEDVVLPEKVDVLVSEWMGTCLLLLQDLACSPEATPRFPRSRLHTQQSPTSQWHCRCRG

SEQ ID NO: 68013 - protein, 301 aa, Homo sapiens
  Payload ID: 13557
  Gene Symbol: PRMT2
  Gene Name: protein arginine methyltransferase 2
  Uniprot ID: P55345
  ENSP ID: ENSP00000407463
MATSGDCPRSESQGEEPAECSEAGLLQEGVQPEEFVAIADYAATDETQLSFLRGEKILILRQTTADWWWGERAGCCGYIPANHVGKHVDEYDPEDTWQDEEYFGSYGTLKLHLEMLADQPRTTKYHSVILQNKESLTDKVILDVGCGTGIISLFCAHYARPRAVYAVEASEMAQHTGQLVLQNGFADIITVYQQKVEDVVLPEKVDVLVSEWMGTCLLHHTLEADAVHDGRPSPCPYRRRGHGFSCVAEKPSVEKAHVCGSELGCHFQTRPHISKSWRKSLPHLEMTVDALFGKQCAYLEG

SEQ ID NO: 68014 - protein, 289 aa, Homo sapiens
  Payload ID: 13557
  Gene Symbol: PRMT2
  Gene Name: protein arginine methyltransferase 2
  Uniprot ID: P55345
  ENSP ID: ENSP00000411984
MATSGDCPRSESQGEEPAECSEAGLLQEGVQPEEFVAIADYAATDETQLSFLRGEKILILRQTTADWWWGERAGCCGYIPANHVGKHVDEYDPEDTWQDEEYFGSYGTLKLHLEMLADQPRTTKYHSVILQNKESLTDKVILDVGCGTGIISLFCAHYARPRAVYAVEASEMAQHTGQLVLQNGFADIITVYQQKVEDVVLPEKVDVLVSEWMGTCLLFEFMIESILYARDAWLKEDGVIWPTMAALHLVPCSADKDYRSKVLFWDNAYEFNLSALKLEKKSSPSGDDS

SEQ ID NO: 68015 - protein, 161 aa, Homo sapiens
  Payload ID: 13557
  Gene Symbol: PRMT2
  Gene Name: protein arginine methyltransferase 2
  ENSP ID: ENSP00000482158
MLADQPRTTKYHSVILQNKESLRIKSSWTWAVGLGSSVSSVHTMRGLERVYAVEASEMAQHTGQLVLQNGFADIITVYQQKVEDVVLPEKVDVLVSEWMGTCLLFEFMIESILYARDAWLKETGSFGPPWLRCTLCPAVLIRIIVARCSSGTTRTSSTSAL

SEQ ID NO: 68016 - protein, 46 aa, Homo sapiens
  Payload ID: 13558
  Gene Symbol: PRMT3
  Gene Name: protein arginine methyltransferase 3
  ENSP ID: ENSP00000329586
MCSLASGATGYSHLLKKHFHTVSLSISLILTAWFINMDLNFMDTLS

SEQ ID NO: 68017 - protein, 531 aa, Homo sapiens
  Payload ID: 13558
  Gene Symbol: PRMT3
  Gene Name: protein arginine methyltransferase 3
  Uniprot ID: O60678
  ENSP ID: ENSP00000331879
MCSLASGATGGRGAVENEEDLPELSDSGDEAAWEDEDDADLPHGKQQTPCLFCNRLFTSAEETFSHCKSEHQFNIDSMVHKHGLEFYGYIKLINFIRLKNPTVEYMNSIYNPVPWEKEEYLKPVLEDDLLLQFDVEDLYEPVSVPFSYPNGLSENTSVVEKLKHMEARALSAEAALARAREDLQKMKQFAQDFVMHTDVRTCSSSTSVIADLQEDEDGVYFSSYGHYGIHEEMLKDKIRTESYRDFIYQNPHIFKDKVVLDVGCGTGILSMFAAKAGAKKVLGVDQSEILYQAMDIIRLNKLEDTITLIKGKIEEVHLPVEKVDVIISEWMGYFLLFESMLDSVLYAKNKYLAKGGSVYPDICTISLVAVSDVNKHADRIAFWDDVYGFKMSCMKKAVIPEAVVEVLDPKTLISEPCGIKHIDCHTTSISDLEFSSDFTLKITRTSMCTAIAGYFDIYFEKNCHNRVVFSTGPQSTKTHWKQTVFLLEKPFSVKAGEALKGKVTVHKNKKDPRSLTVTLTLNNSTQTYGLQ

SEQ ID NO: 68018 - protein, 469 aa, Homo sapiens
  Payload ID: 13558
  Gene Symbol: PRMT3
  Gene Name: protein arginine methyltransferase 3
  ENSP ID: ENSP00000397766
MCSLASGATGYSHLLKKHFHTVSLSISLILTAWFINMNPTVEYMNSIYNPVPWEKEEYLKPVLEDDLLLQFDVEDLYEPVSVPFSYPNGLSENTSVVEKLKHMEARALSAEAALARAREDLQKMKQFAQDFVMHTDVRTCSSSTSVIADLQEDEDGVYFSSYGHYGIHEEMLKDKIRTESYRDFIYQNPHIFKDKVVLDVGCGTGILSMFAAKAGAKKVLGVDQSEILYQAMDIIRLNKLEDTITLIKGKIEEVHLPVEKVDVIISEWMGYFLLFESMLDSVLYAKNKYLAKGGSVYPDICTISLVAVSDVNKHADRIAFWDDVYGFKMSCMKKAVIPEAVVEVLDPKTLISEPCGIKHIDCHTTSISDLEFSSDFTLKITRTSMCTAIAGYFDIYFEKNCHNRVVFSTGPQSTKTHWKQTVFLLEKPFSVKAGEALKGKVTVHKNKKDPRSLTVTLTLNNSTQTYGLQ

SEQ ID NO: 68019 - protein, 54 aa, Homo sapiens
  Payload ID: 13558
  Gene Symbol: PRMT3
  Gene Name: protein arginine methyltransferase 3
  ENSP ID: ENSP00000434260
MCSLASGATGGYPGPSAPGSSSPRPRRCGAGGRPSGTRARAGWGARRDHEGGAE

SEQ ID NO: 68020 - protein, 46 aa, Homo sapiens; identical to SEQ ID NO: 68016
  Payload ID: 13558
  Gene Symbol: PRMT3
  Gene Name: protein arginine methyltransferase 3
  ENSP ID: ENSP00000435151

SEQ ID NO: 68021 - protein, 576 aa, Homo sapiens
  Payload ID: 13559
  Gene Symbol: PRMT5
  Gene Name: protein arginine methyltransferase 5
  Uniprot ID: O14744
  ENSP ID: ENSP00000216350
MRGPNSGTEKGRLVIPEKQGFDFLCMPVFHPRFKREFIQEPAKNRPGPQTRSDLLLSGRAFLLPLNQEDNTNLARVLTNHIHTGHHSSMFWMRVPLVAPEDLRDDIIENAPTTHTEEYSGEEKTWMWWHNFRTLCDYSKRIAVALEIGADLPSNHVIDRWLGEPIKAAILPTSIFLTNKKGFPVLSKMHQRLIFRLLKLEVQFIITGTNHHSEKEFCSYLQYLEYLSQNRPPPNAYELFAKGYEDYLQSPLQPLMDNLESQTYEVFEKDPIKYSQYQQAIYKCLLDRVPEEEKDTNVQVLMVLGAGRGPLVNASLRAAKQADRRIKLYAVEKNPNAVVTLENWQFEEWGSQVTVVSSDMREWVAPEKADIIVSELLGSFADNELSPECLDGAQHFLKDDGVSIPGEYTSFLAPISSSKLYNEVRACREKDRDPEAQFEMPYVVRLHNFHQLSAPQPCFTFSHPNRDPMIDNNRYCTLEFPVEVNTVLHGFAGYFETVLYQDITLSIRPETHSPGMFSWFPILFPIKQPITVREGQTICVRFWRCSNSKKVWYEWAVTAPVCSAIHNPTGRSYTIGL

SEQ ID NO: 68022 - protein, 637 aa, Homo sapiens
  Payload ID: 13559
  Gene Symbol: PRMT5
  Gene Name: protein arginine methyltransferase 5
  Uniprot ID: O14744
  ENSP ID: ENSP00000319169
MAAMAVGGAGGSRVSSGRDLNCVPEIADTLGAVAKQGFDFLCMPVFHPRFKREFIQEPAKNRPGPQTRSDLLLSGRDWNTLIVGKLSPWIRPDSKVEKIRRNSEAAMLQELNFGAYLGLPAFLLPLNQEDNTNLARVLTNHIHTGHHSSMFWMRVPLVAPEDLRDDIIENAPTTHTEEYSGEEKTWMWWHNFRTLCDYSKRIAVALEIGADLPSNHVIDRWLGEPIKAAILPTSIFLTNKKGFPVLSKMHQRLIFRLLKLEVQFIITGTNHHSEKEFCSYLQYLEYLSQNRPPPNAYELFAKGYEDYLQSPLQPLMDNLESQTYEVFEKDPIKYSQYQQAIYKCLLDRVPEEEKDTNVQVLMVLGAGRGPLVNASLRAAKQADRRIKLYAVEKNPNAVVTLENWQFEEWGSQVTVVSSDMREWVAPEKADIIVSELLGSFADNELSPECLDGAQHFLKDDGVSIPGEYTSFLAPISSSKLYNEVRACREKDRDPEAQFEMPYVVRLHNFHQLSAPQPCFTFSHPNRDPMIDNNRYCTLEFPVEVNTVLHGFAGYFETVLYQDITLSIRPETHSPGMFSWFPILFPIKQPITVREGQTICVRFWRCSNSKKVWYEWAVTAPVCSAIHNPTGRSYTIGL

SEQ ID NO: 68023 - protein, 466 aa, Homo sapiens
  Payload ID: 13559
  Gene Symbol: PRMT5
  Gene Name: protein arginine methyltransferase 5
  Uniprot ID: O14744
  ENSP ID: ENSP00000380582
MRGPNSGTEKGRLVIPEKQGFDFLCMPVFHPRFKREFIQEPAKNRPGPQTRSDLLLSGRDWNTLIVGKLSPWIRPDSKVEKIRRNSEALEVQFIITGTNHHSEKEFCSYLQYLEYLSQNRPPPNAYELFAKGYEDYLQSPLQPLMDNLESQTYEVFEKDPIKYSQYQQAIYKCLLDRVPEEEKDTNVQVLMVLGAGRGPLVNASLRAAKQADRRIKLYAVEKNPNAVVTLENWQFEEWGSQVTVVSSDMREWVAPEKADIIVSELLGSFADNELSPECLDGAQHFLKDDGVSIPGEYTSFLAPISSSKLYNEVRACREKDRDPEAQFEMPYVVRLHNFHQLSAPQPCFTFSHPNRDPMIDNNRYCTLEFPVEVNTVLHGFAGYFETVLYQDITLSIRPETHSPGMFSWFPILFPIKQPITVREGQTICVRFWRCSNSKKVWYEWAVTAPVCSAIHNPTGRSYTIGL

SEQ ID NO: 68024 - protein, 620 aa, Homo sapiens
  Payload ID: 13559
  Gene Symbol: PRMT5
  Gene Name: protein arginine methyltransferase 5
  Uniprot ID: O14744
  ENSP ID: ENSP00000380583
MRGPNSGTEKGRLVIPEKQGFDFLCMPVFHPRFKREFIQEPAKNRPGPQTRSDLLLSGRDWNTLIVGKLSPWIRPDSKVEKIRRNSEAAMLQELNFGAYLGLPAFLLPLNQEDNTNLARVLTNHIHTGHHSSMFWMRVPLVAPEDLRDDIIENAPTTHTEEYSGEEKTWMWWHNFRTLCDYSKRIAVALEIGADLPSNHVIDRWLGEPIKAAILPTSIFLTNKKGFPVLSKMHQRLIFRLLKLEVQFIITGTNHHSEKEFCSYLQYLEYLSQNRPPPNAYELFAKGYEDYLQSPLQPLMDNLESQTYEVFEKDPIKYSQYQQAIYKCLLDRVPEEEKDTNVQVLMVLGAGRGPLVNASLRAAKQADRRIKLYAVEKNPNAVVTLENWQFEEWGSQVTVVSSDMREWVAPEKADIIVSELLGSFADNELSPECLDGAQHFLKDDGVSIPGEYTSFLAPISSSKLYNEVRACREKDRDPEAQFEMPYVVRLHNFHQLSAPQPCFTFSHPNRDPMIDNNRYCTLEFPVEVNTVLHGFAGYFETVLYQDITLSIRPETHSPGMFSWFPILFPIKQPITVREGQTICVRFWRCSNSKKVWYEWAVTAPVCSAIHNPTGRSYTIGL

SEQ ID NO: 68025 - protein, 179 aa, Homo sapiens
  Payload ID: 13559
  Gene Symbol: PRMT5
  Gene Name: protein arginine methyltransferase 5
  ENSP ID: ENSP00000387663
  MOD_RES (1)..(1): Any amino acid
XDDGVSIPGEYTSFLAPISSSKLYNEVRACREKDRDPEAQFEMPYVVRLHNFHQLSAPQPCFTFSHPNRDPMIDNNRYCTLEFPVEVNTVLHGFAGYFETVLYQDITLSIRPETHSPGMFSWFPILFPIKPITVREGQTICVRFWRCSNSKKVWYEWAVTAPVCSAIHNPTGRSYTIGL

SEQ ID NO: 68026 - protein, 186 aa, Homo sapiens
  Payload ID: 13559
  Gene Symbol: PRMT5
  Gene Name: protein arginine methyltransferase 5
  ENSP ID: ENSP00000409482
MAAMAVGGAGGSRVSSGRDLNCVPEIADTLGAVAKQGFDFLCMPVFHPRFKREFIQEPAKNRPGPQTRSDLLLSGRVFVFLGWGSADWNTLIVGKLSPWIRPDSKVEKIRRNSEAAMLQELNFGAYLGLPAFLLPLNQEDNTNLARVLTNHIHTGHHSSMFWMRVPLVAPEDLRDDIIENAPTTHT

SEQ ID NO: 68027 - protein, 86 aa, Homo sapiens
  Payload ID: 13559
  Gene Symbol: PRMT5
  Gene Name: protein arginine methyltransferase 5
  ENSP ID: ENSP00000450633
MAAMAVGGAGGSRVSSGRDLNCVPEIADTLGAVAKQGLEYANCGKAFSMDSSRLKSGEDSQELRGGHVTGAEFWCIFGSSSFPAAP

SEQ ID NO: 68028 - protein, 183 aa, Homo sapiens
  Payload ID: 13559
  Gene Symbol: PRMT5
  Gene Name: protein arginine methyltransferase 5
  ENSP ID: ENSP00000450737
MAAMAVGGAGGSRVSSGRDLNCVPEIADTLGAVAKQGFDFLCMPVFHPRFKREFIQEPAKNRPGPQTRSDLLLSGRDWNTLIVGKLSPWIRPDSKVEKIRRNSEALEVQFIITGTNHHSEKEFCSYLQYLEYLSQNRPPPNAYELFAKGYEDYLQSPLQPLMDNLESQTYEVFEKDPIKYSQY

SEQ ID NO: 68029 - protein, 185 aa, Homo sapiens
  Payload ID: 13559
  Gene Symbol: PRMT5
  Gene Name: protein arginine methyltransferase 5
  ENSP ID: ENSP00000450919
MAAMAVGGAGGSRVSSGRDLNCVPEIADTLGAVAKQGADWNTLIVGKLSPWIRPDSKVEKIRRNSEAAMLQELNFGAYLGLPAFLLPLNQEDNTNLARVLTNHIHTGHHSSMFWMRVPLVAPEDLRDDIIENAPTTHTEEYSGEEKTWMWWHNFRTLCDYSKRIAVALEIGADLPSNHVIDRWLG

SEQ ID NO: 68030 - protein, 138 aa, Homo sapiens
  Payload ID: 13559
  Gene Symbol: PRMT5
  Gene Name: protein arginine methyltransferase 5
  ENSP ID: ENSP00000450956
SQLEVQFIITGTNHHSEKEFCSYLQYLEYLSQNRPPPNAYELFAKGYEDYLQSPLQPLMDNLESQTYEVFEKDPIKYSQYQQAIYKCLLDRVPEEEKDTNVQVLMVLGAGRGPLVNASLRAAKQADRRIKLLENWQFE

SEQ ID NO: 68031 - protein, 69 aa, Homo sapiens
  Payload ID: 13559
  Gene Symbol: PRMT5
  Gene Name: protein arginine methyltransferase 5
  ENSP ID: ENSP00000451127
MRGPNSGTEKGRLVIPEKQGLEYANCGKAFSMDSSRLKSGEDSQELRGGHVTGAEFWCIFGSSSFPAAP

SEQ ID NO: 68032 - protein, 177 aa, Homo sapiens
  Payload ID: 13559
  Gene Symbol: PRMT5
  Gene Name: protein arginine methyltransferase 5
  ENSP ID: ENSP00000451245
ENWQFEEWGSQVTVVSSDMREWVAPEKADIIVSELLGSFADNELSPECLDGAQHFLKDDGVSIPGEYTSFLAPISSSKLYNEVRACREKDRDPEAQFEMPYVVRLHNFHQLSAPQPCFTFSHPNRDPMIDNNRYCTLEFPVEVNTVLHGFAGYFETVLYQDITLSIRPETHSPGISP

SEQ ID NO: 68033 - protein, 42 aa, Homo sapiens
  Payload ID: 13559
  Gene Symbol: PRMT5
  Gene Name: protein arginine methyltransferase 5
  ENSP ID: ENSP00000452102
MAAMAVGGAGGSRVSSGRDLNCVPEIADTLGAVAKQGFPAAP

SEQ ID NO: 68034 - protein, 180 aa, Homo sapiens
  Payload ID: 13559
  Gene Symbol: PRMT5
  Gene Name: protein arginine methyltransferase 5
  ENSP ID: ENSP00000452218
MAAMAVGGAGGSRVSSGRDLNCVPEIADTLGAVAKQGFDFLCMPVFHPRFKREFIQEPAKNRPGPQTRSDLLLSGRDWNTLIVGKLSPWIRPDSKVEKIRRNSEAFWMRVPLVAPEDLRDDIIENAPTTHTEEYSGEEKTWMWWHNFRTLCDYSKRIAVALEIGADLPSNHVIDRWLGEP

SEQ ID NO: 68035 - protein, 279 aa, Homo sapiens
  Payload ID: 13559
  Gene Symbol: PRMT5
  Gene Name: protein arginine methyltransferase 5
  ENSP ID: ENSP00000452409
RRNSEAAMLQELNFGAYLGLPAFLLPLNQEDNTNLARVLTNHIHTGHHSSMFWMRVPLVAPEDLRDDIIENAPTTHTEEYSGEEKTWMWWHNFRTLCDYTLEIGADLPSNHVIDRWLGEPIKAAILPTSIFLTNKKGFPVLSKMHQRLIFRLLKLEVQFIITGTNHHSEKEFCSYLQYLEYLSQNRPPPNAYELFAKGYEDYLQSPLQPLMDNLESQTYEVFEKDPIKYSQYQQAIYKCLLDRVPEEEKDTNVQVLMVLGAGRGPLVNASLRAAKQADR

SEQ ID NO: 68036 - protein, 169 aa, Homo sapiens
  Payload ID: 13559
  Gene Symbol: PRMT5
  Gene Name: protein arginine methyltransferase 5
  ENSP ID: ENSP00000452411
MPVFHPRFKREFIQEPAKNRPGPQTRSDLLLSGRDWNTLIVGKLSPWIRPDSKVEKIRRNSEAAMLQELNFGAYLGLPAFLLPLNQEDNTNLARVLTNHIHTGHHSSMFWMRVPLVAPEDLRDDIIENAPTTHTEEYSGEEKTWMWWHNFRTLCDYSKRIAVALEIGAD

SEQ ID NO: 68037 - protein, 61 aa, Homo sapiens
  Payload ID: 13559
  Gene Symbol: PRMT5
  Gene Name: protein arginine methyltransferase 5
  ENSP ID: ENSP00000452501
  MOD_RES (1)..(1): Any amino acid
XIRPETHSPGMFSWFPILFPIKQPITVREGQTICVRFWRCSNSKKGSSHQSMKTSGQGVRN

SEQ ID NO: 68038 - protein, 104 aa, Homo sapiens
  Payload ID: 13559
  Gene Symbol: PRMT5
  Gene Name: protein arginine methyltransferase 5
  ENSP ID: ENSP00000452509
MHQRLIFRLLKLEVQFIITGTNHHSEKEFCSYLQYLEYLSQNRPPPNAYELFAKGYEDYLQSPLQPLMDNLESQTYEVFEKDPIKYSQYQQAIYKCLLDRVPEE

SEQ ID NO: 68039 - protein, 593 aa, Homo sapiens
  Payload ID: 13559
  Gene Symbol: PRMT5
  Gene Name: protein arginine methyltransferase 5
  Uniprot ID: O14744
  ENSP ID: ENSP00000452555
MAAMAVGGAGGSRVSSGRDLNCVPEIADTLGAVAKQGFDFLCMPVFHPRFKREFIQEPAKNRPGPQTRSDLLLSGRAFLLPLNQEDNTNLARVLTNHIHTGHHSSMFWMRVPLVAPEDLRDDIIENAPTTHTEEYSGEEKTWMWWHNFRTLCDYSKRIAVALEIGADLPSNHVIDRWLGEPIKAAILPTSIFLTNKKGFPVLSKMHQRLIFRLLKLEVQFIITGTNHHSEKEFCSYLQYLEYLSQNRPPPNAYELFAKGYEDYLQSPLQPLMDNLESQTYEVFEKDPIKYSQYQQAIYKCLLDRVPEEEKDTNVQVLMVLGAGRGPLVNASLRAAKQADRRIKLYAVEKNPNAVVTLENWQFEEWGSQVTVVSSDMREWVAPEKADIIVSELLGSFADNELSPECLDGAQHFLKDDGVSIPGEYTSFLAPISSSKLYNEVRACREKDRDPEAQFEMPYVVRLHNFHQLSAPQPCFTFSHPNRDPMIDNNRYCTLEFPVEVNTVLHGFAGYFETVLYQDITLSIRPETHSPGMFSWFPILFPIKQPITVREGQTICVRFWRCSNSKKVWYEWAVTAPVCSAIHNPTGRSYTIGL

SEQ ID NO: 68040 - protein, 42 aa, Homo sapiens; identical to SEQ ID NO: 68033
  Payload ID: 13559
  Gene Symbol: PRMT5
  Gene Name: protein arginine methyltransferase 5
  ENSP ID: ENSP00000485787

SEQ ID NO: 68041 - protein, 375 aa, Homo sapiens
  Payload ID: 13560
  Gene Symbol: PRMT6
  Gene Name: protein arginine methyltransferase 6
  Uniprot ID: Q96LA8
  ENSP ID: ENSP00000359095
MSQPKKRKLESGGGGEGGEGTEEEDGAEREAALERPRRTKRERDQLYYECYSDVSVHEEMIADRVRTDAYRLGILRNWAALRGKTVLDVGAGTGILSIFCAQAGARRVYAVEASAIWQQAREVVRFNGLEDRVHVLPGPVETVELPEQVDAIVSEWMGYGLLHESMLSSVLHARTKWLKEGGLLLPASAELFIAPISDQMLEWRLGFWSQVKQHYGVDMSCLEGFATRCLMGHSEIVVQGLSGEDVLARPQRFAQLELSRAGLEQELEAGVGGRFRCSCYGSAPMHGFAIWFQVTFPGGESEKPLVLSTSPFHPATHWKQALLYLNEPVQVEQDTDVSGEITLLPSRDNPRRLRVLLRYKVGDQEEKTKDFAMED

SEQ ID NO: 68042 - protein, 692 aa, Homo sapiens
  Payload ID: 13561
  Gene Symbol: PRMT7
  Gene Name: protein arginine methyltransferase 7
  Uniprot ID: Q9NVM4
  ENSP ID: ENSP00000343103
MKIFCSRANPTTGSVEWLEEDEHYDYHQEIARSSYADMLHDKDRNVKYYQGIRAAVSRVKDRGQKALVLDIGTGTGLLSMMAVTAGADFCYAIEVFKPMADAAVKIVEKNGFSDKIKVINKHSTEVTVGPEGDMPCRANILVTELFDTELIGEGALPSYEHAHRHLVEENCEAVPHRATVYAQLVESGRMWSWNKLFPIHVQTSLGEQVIVPPVDVESCPGAPSVCDIQLNQVSPADFTVLSDVLPMFSIDFSKQVSSSAACHSRRFEPLTSGRAQVVLSWWDIEMDPEGKIKCTMAPFWAHSDPEEMQWRDHWMQCVYFLPQEEPVVQGSALYLVAHHDDYCVWYSLQRTSPEKNERVRQMRPVCDCQAHLLWNRPRFGEINDQDRTDRYVQALRTVLKPDSVCLCVSDGSLLSVLAHHLGVEQVFTVESSAASHKLLRKIFKANHLEDKINIIEKRPELLTNEDLQGRKVSLLLGEPFFTTSLLPWHNLYFWYVRTAVDQHLGPGAMVMPQAASLHAVVVEFRDLWRIRSPCGDCEGFDVHIMDDMIKRALDFRESREAEPHPLWEYPCRSLSEPWQILTFDFQQPVPLQPLCAEGTVELRRPGQSHAAVLWMEYHLTPECTLSTGLLEPADPEGGCCWNPHCKQAVYFFSPAPDPRALLGGPRTVSYAVEFHPDTGDIIMEFRHADTPD

SEQ ID NO: 68043 - protein, 692 aa, Homo sapiens; identical to SEQ ID NO: 68042
  Payload ID: 13561
  Gene Symbol: PRMT7
  Gene Name: protein arginine methyltransferase 7
  Uniprot ID: Q9NVM4
  ENSP ID: ENSP00000409324

SEQ ID NO: 68044 - protein, 642 aa, Homo sapiens
  Payload ID: 13561
  Gene Symbol: PRMT7
  Gene Name: protein arginine methyltransferase 7
  Uniprot ID: Q9NVM4
  ENSP ID: ENSP00000414716
MKIFCSRANPTTGSVEWLEEDEHYDYHQEIARSSYADMLHDKDRVFKPMADAAVKIVEKNGFSDKIKVINKHSTEVTVGPEGDMPCRANILVTELFDTELIGEGALPSYEHAHRHLVEENCEAVPHRATVYAQLVESGRMWSWNKLFPIHVQTSLGEQVIVPPVDVESCPGAPSVCDIQLNQVSPADFTVLSDVLPMFSIDFSKQVSSSAACHSRRFEPLTSGRAQVVLSWWDIEMDPEGKIKCTMAPFWAHSDPEEMQWRDHWMQCVYFLPQEEPVVQGSALYLVAHHDDYCVWYSLQRTSPEKNERVRQMRPVCDCQAHLLWNRPRFGEINDQDRTDRYVQALRTVLKPDSVCLCVSDGSLLSVLAHHLGVEQVFTVESSAASHKLLRKIFKANHLEDKINIIEKRPELLTNEDLQGRKVSLLLGEPFFTTSLLPWHNLYFWYVRTAVDQHLGPGAMVMPQAASLHAVVVEFRDLWRIRSPCGDCEGFDVHIMDDMIKRALDFRESREAEPHPLWEYPCRSLSEPWQILTFDFQQPVPLQPLCAEGTVELRRPGQSHAAVLWMEYHLTPECTLSTGLLEPADPEGGCCWNPHCKQAVYFFSPAPDPRALLGGPRTVSYAVEFHPDTGDIIMEFRHADTPD

SEQ ID NO: 68045 - protein, 567 aa, Homo sapiens
  Payload ID: 13561
  Gene Symbol: PRMT7
  Gene Name: protein arginine methyltransferase 7
  ENSP ID: ENSP00000454776
MKIFCSRANPTTGSVEWLEEDEHYDYHQEIARSSYADMLHDKDRNVKYYQGIRAAVSRVKDRGQKALVLDIGTGTGLLSMMAVTAGADFCYAIEVFKPMADAAVKIVEKNGFSDKIKVINKHSTEVTVGPEGDMPCRANILVTELFDTELIGEGALPSYEHAHRHLVEENCEAVPHRATVYAQLVESGRMWSWNKLFPIHVQTSLGEQVIVPPVDVESCPGAPSVCDIQLNQVSPADFTVLSDVLPMFSIDFSKQVSSSAACHSRRFEPLTSGRAQVVLSWWDIEMDPEGKIKCTMAPFWAHSDPEEMQWRDHWMQCVYFLPQEEPVVQGSALYLVAHHDDYCVWYSLQRTSPEKNERVRQMRPVCDCQAHLLWNRPRFGEINDQDRTDRYVQALRTVLKPDSVCLCVSDGSLLSVLAHHLGVEQVFTVESSAASHKLLRKIFKANHLEDKINIIEKRPELLTNEDLQGRKVSLLLGEPFFTTSLLPWHNLYFWYVRTAVDQHLGPGAMVMPQAASLHAVVVEFRVCREQQDVPLVLAATLPCVLAGGCGRGCSFLTGPVADPEPLW

SEQ ID NO: 68046 - protein, 80 aa, Homo sapiens
  Payload ID: 13561
  Gene Symbol: PRMT7
  Gene Name: protein arginine methyltransferase 7
  ENSP ID: ENSP00000454980
MKIFCSRANPTTGSVEWLEEDEHYDYHQEIARSSYADMLHDKDRNVKYYQGIRAAVSRVKDRGQKALVLDIGTGTGLLSM

SEQ ID NO: 68047 - protein, 223 aa, Homo sapiens
  Payload ID: 13561
  Gene Symbol: PRMT7
  Gene Name: protein arginine methyltransferase 7
  ENSP ID: ENSP00000455538
MKIFCSRANPTTGSVEWLEEDEHYDYHQEIARSSYADMLHDKDRNVKYYQGIRAAVSRVKDRGQKALVLDIGTGTGLLSMMAVTAGADFCYAIEVFKPMADAAVKIVEKNGFSDKIKVINKHSTEVTVGPEGDMPCRANILVTELFDTELIGEGALPSYEHAHRHLVEENCEAVPHRATVYAQLVESGRMWSWNKLFPIHVQTSLGEQVIVPPVDVESCPGAP

SEQ ID NO: 68048 - protein, 33 aa, Homo sapiens
  Payload ID: 13561
  Gene Symbol: PRMT7
  Gene Name: protein arginine methyltransferase 7
  ENSP ID: ENSP00000455705
MKIFCSRANPTTGSVEWLEEDEHYDYHQEIARM

SEQ ID NO: 68049 - protein, 72 aa, Homo sapiens
  Payload ID: 13561
  Gene Symbol: PRMT7
  Gene Name: protein arginine methyltransferase 7
  ENSP ID: ENSP00000456190
MKIFCSRANPTTGSVEWLEEDEHYDYHQEIARSSYADMLHDKDRNVKYYQGIRAAVSRVKDRGQKALVLDIG

SEQ ID NO: 68050 - protein, 108 aa, Homo sapiens
  Payload ID: 13561
  Gene Symbol: PRMT7
  Gene Name: protein arginine methyltransferase 7
  ENSP ID: ENSP00000456364
MKIFCSRANPTTGSVEWLEEDEHYDYHQEIARSSYADMLHDKDRNVKYYQGIRAAVSRVKDRGQKALVLDIGTGTGLLSMMAVTAGADFCYAIEVFKPMADAAVKIVE

SEQ ID NO: 68051 - protein, 169 aa, Homo sapiens
  Payload ID: 13561
  Gene Symbol: PRMT7
  Gene Name: protein arginine methyltransferase 7
  ENSP ID: ENSP00000456848
MKIFCSRANPTTGSVEWLEEDEHYDYHQEIARSSYADMLHDKDRNVKYYQGIRAAVSRVKDRGQKALVLDIGTGTGLLSMMAVTAGADFCYAIEVFKPMADAAVKIVEKNGFSDKIKVINKHSTEVTVGPEGDMPCRANILVTELFDTELIGEGALPSYEHAHRHLVEE

SEQ ID NO: 68052 - protein, 33 aa, Homo sapiens; identical to SEQ ID NO: 68048
  Payload ID: 13561
  Gene Symbol: PRMT7
  Gene Name: protein arginine methyltransferase 7
  ENSP ID: ENSP00000457381

SEQ ID NO: 68053 - protein, 394 aa, Homo sapiens
  Payload ID: 13562
  Gene Symbol: PRMT8
  Gene Name: protein arginine methyltransferase 8
  Uniprot ID: Q9NR22
  ENSP ID: ENSP00000372067
MGMKHSSRCLLLRRKMAENAAESTEVNSPPSQPPQPVVPAKPVQCVHHVSTQPSCPGRGKMSKLLNPEEMTSRDYYFDSYAHFGIHEEMLKDEVRTLTYRNSMYHNKHVFKDKVVLDVGSGTGILSMFAAKAGAKKVFGIECSSISDYSEKIIKANHLDNIITIFKGKVEEVELPVEKVDIIISEWMGYCLFYESMLNTVIFARDKWLKPGGLMFPDRAALYVVAIEDRQYKDFKIHWWENVYGFDMTCIRDVAMKEPLVDIVDPKQVVTNACLIKEVDIYTVKTEELSFTSAFCLQIQRNDYVHALVTYFNIEFTKCHKKMGFSTAPDAPYTHWKQTVFYLEDYLTVRRGEEIYGTISMKPNAKNVRDLDFTVDLDFKGQLCETSVSNDYKMR

SEQ ID NO: 68054 - protein, 385 aa, Homo sapiens
  Payload ID: 13562
  Gene Symbol: PRMT8
  Gene Name: protein arginine methyltransferase 8
  Uniprot ID: Q9NR22
  ENSP ID: ENSP00000414507
MESLASDGFKLKEVSSVNSPPSQPPQPVVPAKPVQCVHHVSTQPSCPGRGKMSKLLNPEEMTSRDYYFDSYAHFGIHEEMLKDEVRTLTYRNSMYHNKHVFKDKVVLDVGSGTGILSMFAAKAGAKKVFGIECSSISDYSEKIIKANHLDNIITIFKGKVEEVELPVEKVDIIISEWMGYCLFYESMLNTVIFARDKWLKPGGLMFPDRAALYVVAIEDRQYKDFKIHWWENVYGFDMTCIRDVAMKEPLVDIVDPKQVVTNACLIKEVDIYTVKTEELSFTSAFCLQIQRNDYVHALVTYFNIEFTKCHKKMGFSTAPDAPYTHWKQTVFYLEDYLTVRRGEEIYGTISMKPNAKNVRDLDFTVDLDFKGQLCETSVSNDYKMR

SEQ ID NO: 68055 - protein, 845 aa, Homo sapiens
  Payload ID: 13563
  Gene Symbol: PRMT9
  Gene Name: protein arginine methyltransferase 9
  Uniprot ID: Q6P2P2
  ENSP ID: ENSP00000314396
MSNSRPRSRRDAGGGAGAAGRDELVSRSLQSAEHCLGVQDFGTAYAHYLLVLSLAPELKHDVKETFQYTLFRWAEELDALSRIQDLLGCYEQALELFPDDEVICNSMGEHLFRMGFRDEAAGYFHKAVKLNPDFSDAKENFYRVANWLVERWHFIMLNDTKRNTIYNAAIQKAVCLGSKSVLDIGAGTGILSMFAKKAGAHSVYACELSKTMYELACDVVAANKMEAGIKLLHTKSLDIEIPKHIPERVSLVVTETVDAGLFGEGIVESLIHAWEHLLLQPKTKGESANCEKYGKVIPASAVIFGMAVECAEIRRHHRVGIKDIAGIHLPTNVKFQSPAYSSVDTEETIEPYTTEKMSRVPGGYLALTECFEIMTVDFNNLQELKSLATKKPDKIGIPVIKEGILDAIMVWFVLQLDDEHSLSTSPSEETCWEQAVYPVQDLADYWIKPGDHVMMEVSCQDCYLRIQSISVLGLECEMDVAKSFTQNKDLLSLGNEAELCSALANLQTSKPDAVEQTCILESTEIALLNNIPYHEGFKMAMSKVLSSLTPEKLYQTMDTHCQNEMSSGTGQSNTVQNILEPFYVLDVSEGFSVLPVIAGTLGQVKPYSSVEKDQHRIALDLISEANHFPKETLEFWLRHVEDESAMLQRPKSDKLWSIIILDVIEPSGLIQQEIMEKAAISRCLLQSGGKIFPQYVLMFGLLVESQTLLEENAVQGTERTLGLNIAPFINQFQVPIRVFLDLSSLPCIPLSKPVELLRLDLMTPYLNTSNREVKVYVCKSGRLTAIPFWYHMYLDEEIRLDTSSEASHWKQAAVVLDNPIQVEMGEELVLSIQHHKSNVSITVKQ

SEQ ID NO: 68056 - protein, 66 aa, Homo sapiens
  Payload ID: 13563
  Gene Symbol: PRMT9
  Gene Name: protein arginine methyltransferase 9
  ENSP ID: ENSP00000426732
MSNSRPRSRRDAGGGAGAAGRDELVSRSLQSAEHCLGVQDFGTAYAHYLLVLSLAPELKHDVKNGL

SEQ ID NO: 68057 - protein, 770 aa, Homo sapiens
  Payload ID: 13564
  Gene Symbol: PATL1
  Gene Name: protein associated with topoisomerase II homolog 1 (yeast)
  Uniprot ID: Q86TB9
  ENSP ID: ENSP00000300146
MFRYESLEDCPLDEDEDAFQGLGEEDEEIDQFNDDTFGSGAVDDDWQEAHERLAELEEKLPVAVNEQTGNGERDEMDLLGDHEENLAERLSKMVIENELEDPAIMRAVQTRPVLQPQPGSLNSSIWDGSEVLRRIRGPLLAQEMPTVSVLEYALPQRPPQGPEDDRDLSERALPRRSTSPIIGSPPVRAVPIGTPPKQMAVPSFTQQILCPKPVHVRPPMPPRYPAPYGERMSPNQLCSVPNSSLLGHPFPPSVPPVLSPLQRAQLLGGAQLQPGRMSPSQFARVPGFVGSPLAAMNPKLLQGRVGQMLPPAPGFRAFFSAPPSATPPPQQHPPGPGPHLQNLRSQAPMFRPDTTHLHPQHRRLLHQRQQQNRSQHRNLNGAGDRGSHRSSHQDHLRKDPYANLMLQREKDWVSKIQMMQLQSTDPYLDDFYYQNYFEKLEKLSAAEEIQGDGPKKERTKLITPQVAKLEHAYKPVQFEGSLGKLTVSSVNNPRKMIDAVVTSRSEDDETKEKQVRDKRRKTLVIIEKTYSLLLDVEDYERRYLLSLEEERPALMDDRKHKICSMYDNLRGKLPGQERPSDDHFVQIMCIRKGKRMVARILPFLSTEQAADILMTTARNLPFLIKKDAQDEVLPCLLSPFSLLLYHLPSVSITSLLRQLMNLPQSAATPALSNPHLTAVLQNKFGLSLLLILLSRGEDLQSSDPATESTQNNQWTEVMFMATRELLRIPQAALAKPISIPTNLVSLFSRYVDRQKLNLLETKLQLVQGIR

SEQ ID NO: 68058 - protein, 543 aa, Homo sapiens
  Payload ID: 13565
  Gene Symbol: PATL2
  Gene Name: protein associated with topoisomerase II homolog 2 (yeast)
  Uniprot ID: C9JE40
  ENSP ID: ENSP00000416673
MNCLEGPGKTCGPLASEEELVSACQLEKEEENEGEEEEEEEDEEDLDPDLDPDLEEEENDLGDPAVLGAVHNTQRALLSSPGVKAPGMLGMSLASLHFLWQTLDYLSPIPFWPTFPSTSSPAQHFGPRLPSPDPTLFCSLLTSWPPRFSHLTQLHPRHQRILQQQQHSQTPSPPAKKPWSQQPDPYANLMTRKEKDWVIKVQMVQLQSAKPRLDDYYYQEYYQKLEKKQADEELLGRRNRVESLKLVTPYIPKAEAYESVVRIEGSLGQVAVSTCFSPRRAIDAVPHGTQEQDIEAASSQRLRVLYRIEKMFLQLLEIEEGWKYRPPPPCFSEQQSNQVEKLFQTLKTQEQNNLEEAADGFLQVLSVRKGKALVARLLPFLPQDQAVTILLAITHHLPLLVRRDVADQALQMLFKPLGKCISHLTLHELLQGLQGLTLLPPGSSERPVTVVLQNQFGISLLYALLSHGEQLVSLHSSLEEPNSDHTAWTDMVVLIAWEIAQMPTASLAEPLAFPSNLLPLFCHHVDKQLVQQLEARMEFAWIY

SEQ ID NO: 68059 - protein, 354 aa, Homo sapiens
  Payload ID: 13565
  Gene Symbol: PATL2
  Gene Name: protein associated with topoisomerase II homolog 2 (yeast)
  ENSP ID: ENSP00000453695
MTRKEKDWVIKVQMVQLQSAKPRLDDYYYQEYYQKLEKKQADEELLGRRNRVESLKLVTPYIPKAEAYESVVRIEGSLGQVAVSTCFSPRRAIDAVPHGTQEQDIEAASSQRLRVLYRIEKMFLQLLEIEEGWKYRPPPPCFSEQQSNQVEKLFQTLKTQEQNNLEEAADGFLQVLSVRKGKALVARLLPFLPQDQAVTILLAITHHLPLLVRRDVADQALQMLFKPLGKCISHLTLHELLQGLQGLTLLPPGSSERPVTVVLQNQFGISLLYALLSHGEQLVSLHSSLEEPNSDHTAWTDMVVLIAWEIAQMPTASLAEPLAFPSNLLPLFCHHVDKQLVQQLEARMEFAWIY

SEQ ID NO: 68060 - protein, 158 aa, Homo sapiens
  Payload ID: 13565
  Gene Symbol: PATL2
  Gene Name: protein associated with topoisomerase II homolog 2 (yeast)
  ENSP ID: ENSP00000453723
QALQMLFKPLGKCISHLTLHELLQGLQGLTLLPPGSSERPVTVVLQNQDRHGGSDCLGDSPNAYSLSGRTPSFPQQPTSPVLSPRGQTIGSAAGGQDGVCLDLLICLFWNTCMWEVESSDTSYIDYVYRDPESLKTFLMPLYIGEPFPIFISFLQKSK

SEQ ID NO: 68061 - protein, 125 aa, Homo sapiens
  Payload ID: 13565
  Gene Symbol: PATL2
  Gene Name: protein associated with topoisomerase II homolog 2 (yeast)
  ENSP ID: ENSP00000453898
MLGMSLASLHFLWQTLDYLSPIPFWPTFPSTSSPAQHFGPRLPSPDPTLFCSLLTSWPPRFSHLTQLHPRHQRILQQQQHSQTPREPHFLLTTLLRKCQWWVSLKGCSSWLKVPQPRSLGLSSQT

SEQ ID NO: 68062 - protein, 543 aa, Homo sapiens; identical to SEQ ID NO: 68058
  Payload ID: 13565
  Gene Symbol: PATL2
  Gene Name: protein associated with topoisomerase II homolog 2 (yeast)
  Uniprot ID: C9JE40
  ENSP ID: ENSP00000453915

SEQ ID NO: 68063 - protein, 188 aa, Homo sapiens
  Payload ID: 13565
  Gene Symbol: PATL2
  Gene Name: protein associated with topoisomerase II homolog 2 (yeast)
  ENSP ID: ENSP00000454201
  MOD_RES (1)..(1): Any amino acid
XENEGEEEEEEEDEEDLDPDLDPDLEEEENDLGDPAVLGAVHNTQRALLSSPGVKAPGMLGMSLASLHFLWQTLDYLSPIPFWPTFPSTSSPAQHFGPRLPSPDPTLFCSLLTSWPPRFSHLTQLHPRHQRILQQQQHSQTPREPHFLLTTLLRKCQWWVSLKGCSSWLKVPQPRSLGLSSQTPMLTS

SEQ ID NO: 68064 - protein, 461 aa, Homo sapiens
  Payload ID: 13566
  Gene Symbol: PROC
  Gene Name: protein C (inactivator of coagulation factors Va and VIIIa)
  Uniprot ID: P04070
  ENSP ID: ENSP00000234071
MWQLTSLLLFVATWGISGTPAPLDSVFSSSERAHQVLRIRKRANSFLEELRHSSLERECIEEICDFEEAKEIFQNVDDTLAFWSKHVDGDQCLVLPLEHPCASLCCGHGTCIDGIGSFSCDCRSGWEGRFCQREVSFLNCSLDNGGCTHYCLEEVGWRRCSCAPGYKLGDDLLQCHPAVKFPCGRPWKRMEKKRSHLKRDTEDQEDQVDPRLIDGKMTRRGDSPWQVVLLDSKKKLACGAVLIHPSWVLTAAHCMDESKKLLVRLGEYDLRRWEKWELDLDIKEVFVHPNYSKSTTDNDIALLHLAQPATLSQTIVPICLPDSGLAERELNQAGQETLVTGWGYHSSREKEAKRNRTFVLNFIKIPVVPHNECSEVMSNMVSENMLCAGILGDRQDACEGDSGGPMVASFHGTWFLVGLVSWGEGCGLLHNYGVYTKVSRYLDWIHGHIRDKEAPQKSWAP

SEQ ID NO: 68065 - protein, 236 aa, Homo sapiens
  Payload ID: 13566
  Gene Symbol: PROC
  Gene Name: protein C (inactivator of coagulation factors Va and VIIIa)
  ENSP ID: ENSP00000384225
  MOD_RES (1)..(1): Any amino acid
XCSLDNGGCTHYCLEEVGWRRCSCAPGYKLGDDLLQCHPAGEYDLRRWEKWELDLDIKEVFVHPNYSKSTTDNDIALLHLAQPATLSQTIVPICLPDSGLAERELNQAGQETLVTGWGYHSSREKEAKRNRTFVLNFIKIPVVPHNECSEVMSNMVSENMLCAGILGDRQDACEGDSGGPMVASFHGTWFLVGLVSWGEGCGLLHNYGVYTKVSRYLDWIHGHIRDKEAPQKSWAP

SEQ ID NO: 68066 - protein, 495 aa, Homo sapiens
  Payload ID: 13566
  Gene Symbol: PROC
  Gene Name: protein C (inactivator of coagulation factors Va and VIIIa)
  ENSP ID: ENSP00000386679
MWQLTSLLLFVATWGISGTPAPLDSVFSSSERAHQVLRIRKRANSFLEELRHSSLERECIEEICDFEEAKEIFQNVDDTLAFWSKHVDGDQCLVLPLEHPCASLCCGHGTCIDGIGSFSCDCRSGWEGRFCQRGEGERWMLAGGGAGLGPGWGRGTSTSCPRPPLPAEVSFLNCSLDNGGCTHYCLEEVGWRRCSCAPGYKLGDDLLQCHPAVKFPCGRPWKRMEKKRSHLKRDTEDQEDQVDPRLIDGKMTRRGDSPWQVVLLDSKKKLACGAVLIHPSWVLTAAHCMDESKKLLVRLGEYDLRRWEKWELDLDIKEVFVHPNYSKSTTDNDIALLHLAQPATLSQTIVPICLPDSGLAERELNQAGQETLVTGWGYHSSREKEAKRNRTFVLNFIKIPVVPHNECSEVMSNMVSENMLCAGILGDRQDACEGDSGGPMVASFHGTWFLVGLVSWGEGCGLLHNYGVYTKVSRYLDWIHGHIRDKEAPQKSWAP

SEQ ID NO: 68067 - protein, 52 aa, Homo sapiens
  Payload ID: 13566
  Gene Symbol: PROC
  Gene Name: protein C (inactivator of coagulation factors Va and VIIIa)
  ENSP ID: ENSP00000391220
MWQLTSLLLFVATWGISGTPAPLGAADPQTCQLLPGGAPSQQPGAGVHRGDL

SEQ ID NO: 68068 - protein, 52 aa, Homo sapiens; identical to SEQ ID NO: 68067
  Payload ID: 13566
  Gene Symbol: PROC
  Gene Name: protein C (inactivator of coagulation factors Va and VIIIa)
  ENSP ID: ENSP00000392606

SEQ ID NO: 68069 - protein, 116 aa, Homo sapiens
  Payload ID: 13566
  Gene Symbol: PROC
  Gene Name: protein C (inactivator of coagulation factors Va and VIIIa)
  ENSP ID: ENSP00000406295
MWQLTSLLLFVATWGISGTPAPLDSVFSSSERAHQVLRIRKRANSFLEELRHSSLERECIEEICDFEEAKEIFQNVDDTLAFWSKHVDGDQCLVLPLEHPCASLCCGHGTCIDGIG

SEQ ID NO: 68070 - protein, 175 aa, Homo sapiens
  Payload ID: 13566
  Gene Symbol: PROC
  Gene Name: protein C (inactivator of coagulation factors Va and VIIIa)
  ENSP ID: ENSP00000411241
MWQLTSLLLFVATWGISGTPAPLDSVFSSSERAHQVLRIRKRANSFLEELRHSSLERECIEEICDFEEAKEIFQNVDDTLAFWSKHVDGDQCLVLPLEHPCASLCCGHGTCIDGIGSFSCDCRSGWEGRFCQREEVGWRRCSCAPGYKLGDDLLQCHPAVKFPCGRPWKRMEKKR

SEQ ID NO: 68071 - protein, 126 aa, Homo sapiens
  Payload ID: 13566
  Gene Symbol: PROC
  Gene Name: protein C (inactivator of coagulation factors Va and VIIIa)
  ENSP ID: ENSP00000412697
MWQLTSLLLFVATWGISGTPAPLDSVFSSSERAHQVLRIRKRANSFLEELRHSSLERECIEEICDFEEAKEIFQNVDDTLAFWSKHVDGDQCLVLPLEHPCASLCCGHGTCIDGIGSFSCDCRSGW

SEQ ID NO: 68072 - protein, 238 aa, Homo sapiens
  Payload ID: 13567
  Gene Symbol: PROCR
  Gene Name: protein C receptor, endothelial
  Uniprot ID: Q9UNN8
  ENSP ID: ENSP00000216968
MLTTLLPILLLSGWAFCSQDASDGLQRLHMLQISYFRDPYHVWYQGNASLGGHLTHVLEGPDTNTTIIQLQPLQEPESWARTQSGLQSYLLQFHGLVRLVHQERTLAFPLTIRCFLGCELPPEGSRAHVFFEVAVNGSSFVSFRPERALWQADTQVTSGVVTFTLQQLNAYNRTRYELREFLEDTCVQYVQKHISAENTKGSQTSRSYTSLVLGVLVGSFIIAGVAVGIFLCTGGRRC

SEQ ID NO: 68073 - protein, 213 aa, Homo sapiens
  Payload ID: 13567
  Gene Symbol: PROCR
  Gene Name: protein C receptor, endothelial
  ENSP ID: ENSP00000489117
  MOD_RES (1)..(1): Any amino acid
XYFRDPYHVWYQGNASLGGHLTHVLEGPDTNTTIIQLQPLQEPESWARTQSGLQSYLLQFHGLVRLVHQERTLAFPLTIRCFLGCELPPEGSRAHVFFEVAVNGSSFVSFRPERALWQADTQVTSGVVTFTLQQLNAYNRTRYELREFLEDTCVQYVQKHISAENTKDNGVGAGSLWPILQRQTESPEAFKRYNQINKSSTIKIQHSILPDLY

SEQ ID NO: 68074 - protein, 34 aa, Homo sapiens
  Payload ID: 13567
  Gene Symbol: PROCR
  Gene Name: protein C receptor, endothelial
  ENSP ID: ENSP00000489456
AYNRTRYELREFLEDTCVQYVQKHISAENTKDLY

SEQ ID NO: 68075 - protein, 525 aa, Homo sapiens
  Payload ID: 13568
  Gene Symbol: PDIA2
  Gene Name: protein disulfide isomerase family A, member 2
  Uniprot ID: Q13087
  ENSP ID: ENSP00000219406
MSRQLLPVLLLLLLRASCPWGQEQGARSPSEEPPEEEIPKEDGILVLSRHTLGLALREHPALLVEFYAPWCGHCQALAPEYSKAAAVLAAESMVVTLAKVDGPAQRELAEEFGVTEYPTLKFFRNGNRTHPEEYTGPRDAEGIAEWLRRRVGPSAMRLEDEAAAQALIGGRDLVVIGFFQDLQDEDVATFLALAQDALDMTFGLTDRPRLFQQFGLTKDTVVLFKKFDEGRADFPVDEELGLDLGDLSRFLVTHSMRLVTEFNSQTSAKIFAARILNHLLLFVNQTLAAHRELLAGFGEAAPRFRGQVLFVVVDVAADNEHVLQYFGLKAEAAPTLRLVNLETTKKYAPVDGGPVTAASITAFCHAVLNGQVKPYLLSQEIPPDWDQRPVKTLVGKNFEQVAFDETKNVFVKFYAPWCTHCKEMAPAWEALAEKYQDHEDIIIAELDATANELDAFAVHGFPTLKYFPAGPGRKVIEYKSTRDLETFSKFLDNGGVLPTEEPPEEPAAPFPEPPANSTMGSKEEL

SEQ ID NO: 68076 - protein, 522 aa, Homo sapiens
  Payload ID: 13568
  Gene Symbol: PDIA2
  Gene Name: protein disulfide isomerase family A, member 2
  Uniprot ID: Q13087
  ENSP ID: ENSP00000384410
MSRQLLPVLLLLLLRASCPWGQEQGARSPSEEPPEEEIPKEDGILVLSRHTLGLALREHPALLVEFYAPWCGHCQALAPEYSKAAAVLAAESMVVTLAKVDGPAQRELAEEFGVTEYPTLKFFRNGNRTHPEEYTGPRDAEGIAEWLRRRVGPSAMRLEDEAAAQALIGGRDLVVIGFFQDEDVATFLALAQDALDMTFGLTDRPRLFQQFGLTKDTVVLFKKFDEGRADFPVDEELGLDLGDLSRFLVTHSMRLVTEFNSQTSAKIFAARILNHLLLFVNQTLAAHRELLAGFGEAAPRFRGQVLFVVVDVAADNEHVLQYFGLKAEAAPTLRLVNLETTKKYAPVDGGPVTAASITAFCHAVLNGQVKPYLLSQEIPPDWDQRPVKTLVGKNFEQVAFDETKNVFVKFYAPWCTHCKEMAPAWEALAEKYQDHEDIIIAELDATANELDAFAVHGFPTLKYFPAGPGRKVIEYKSTRDLETFSKFLDNGGVLPTEEPPEEPAAPFPEPPANSTMGSKEEL

SEQ ID NO: 68077 - protein, 227 aa, Homo sapiens
  Payload ID: 13568
  Gene Symbol: PDIA2
  Gene Name: protein disulfide isomerase family A, member 2
  ENSP ID: ENSP00000392277
  MOD_RES (1)..(1): Any amino acid
XLLPVLLLLLLRASCPWGQEQGARSPSEEPPEEEIPKEDGILVLSRHTLGLALREHPALLVEFYAPWCGHCQALAPEYSKAAAVLAAESMVVTLAKVDGPAQRELAEEFGVTEYPTLKFFRNGNRTHPEEYTGPRDAEGIAEWLRRRVGPSAMRLEDEAAAQALIGGRDLVVIGFFQDALDMTFGLTDRPRLFQQFGLTKDTVVLFKKFDEGRADFPVDEELGLDLG

SEQ ID NO: 68078 - protein, 154 aa, Homo sapiens
  Payload ID: 13568
  Gene Symbol: PDIA2
  Gene Name: protein disulfide isomerase family A, member 2
  ENSP ID: ENSP00000405081
AVLNGQVKEIPPDWDQRPVKTLVGKNFEQVAFDETKNVFVKFYAPWCTHCKEMAPAWEALAEKYQDHEDIIIAELDATANELDAFAVHGFPTLKYFPAGPGRKVIEYKSTRDLETFSKFLDNGGVLPTEEPPEEPAAPFPEPPANSTMGSKEEL

SEQ ID NO: 68079 - protein, 505 aa, Homo sapiens
  Payload ID: 13569
  Gene Symbol: PDIA3
  Gene Name: protein disulfide isomerase family A, member 3
  Uniprot ID: P30101
  ENSP ID: ENSP00000300289
MRLRRLALFPGVALLLAAARLAAASDVLELTDDNFESRISDTGSAGLMLVEFFAPWCGHCKRLAPEYEAAATRLKGIVPLAKVDCTANTNTCNKYGVSGYPTLKIFRDGEEAGAYDGPRTADGIVSHLKKQAGPASVPLRTEEEFKKFISDKDASIVGFFDDSFSEAHSEFLKAASNLRDNYRFAHTNVESLVNEYDDNGEGIILFRPSHLTNKFEDKTVAYTEQKMTSGKIKKFIQENIFGICPHMTEDNKDLIQGKDLLIAYYDVDYEKNAKGSNYWRNRVMMVAKKFLDAGHKLNFAVASRKTFSHELSDFGLESTAGEIPVVAIRTAKGEKFVMQEEFSRDGKALERFLQDYFDGNLKRYLKSEPIPESNDGPVKVVVAENFDEIVNNENKDVLIEFYAPWCGHCKNLEPKYKELGEKLSKDPNIVIAKMDATANDVPSPYEVRGFPTIYFSPANKKLNPKKYEGGRELSDFISYLQREATNPPVIQEEKPKKKKKAQEDL

SEQ ID NO: 68080 - protein, 123 aa, Homo sapiens
  Payload ID: 13569
  Gene Symbol: PDIA3
  Gene Name: protein disulfide isomerase family A, member 3
  ENSP ID: ENSP00000389906
SDVLELTDDNFESRISDTGSAGLMLVEFFAPWCGHCKRLAPEYEAAATRLKGIVPLAKVDCTANTNTCNKYGVSGYPTLKIFRDGEEAGAYDGPRTAGVSSYFVLHISLTSLRTRLWHIQSKK

SEQ ID NO: 68081 - protein, 75 aa, Homo sapiens
  Payload ID: 13569
  Gene Symbol: PDIA3
  Gene Name: protein disulfide isomerase family A, member 3
  ENSP ID: ENSP00000391111
MRLRRLALFPGVALLLAAARLAAASDVLELTDDNFESRISDTGSAGLMLVEFFAPWLQNSPSQRDPSATLWLLKR

SEQ ID NO: 68082 - protein, 71 aa, Homo sapiens
  Payload ID: 13569
  Gene Symbol: PDIA3
  Gene Name: protein disulfide isomerase family A, member 3
  ENSP ID: ENSP00000398005
MRLRRLALFPGVALLLAAARLAAASDVLELTDDNFESRISDTGSAGLMLVEFFAPCSIPAGFEEESLLQPH

SEQ ID NO: 68083 - protein, 645 aa, Homo sapiens
  Payload ID: 13570
  Gene Symbol: PDIA4
  Gene Name: protein disulfide isomerase family A, member 4
  Uniprot ID: P13667
  ENSP ID: ENSP00000286091
MRPRKAFLLLLLLGLVQLLAVAGAEGPDEDSSNRENAIEDEEEEEEEDDDEEEDDLEVKEENGVLVLNDANFDNFVADKDTVLLEFYAPWCGHCKQFAPEYEKIANILKDKDPPIPVAKIDATSASVLASRFDVSGYPTIKILKKGQAVDYEGSRTQEEIVAKVREVSQPDWTPPPEVTLVLTKENFDEVVNDADIILVEFYAPWCGHCKKLAPEYEKAAKELSKRSPPIPLAKVDATAETDLAKRFDVSGYPTLKIFRKGRPYDYNGPREKYGIVDYMIEQSGPPSKEILTLKQVQEFLKDGDDVIIIGVFKGESDPAYQQYQDAANNLREDYKFHHTFSTEIAKFLKVSQGQLVVMQPEKFQSKYEPRSHMMDVQGSTQDSAIKDFVLKYALPLVGHRKVSNDAKRYTRRPLVVVYYSVDFSFDYRAATQFWRSKVLEVAKDFPEYTFAIADEEDYAGEVKDLGLSESGEDVNAAILDESGKKFAMEPEEFDSDTLREFVTAFKKGKLKPVIKSQPVPKNNKGPVKVVVGKTFDSIVMDPKKDVLIEFYAPWCGHCKQLEPVYNSLAKKYKGQKGLVIAKMDATANDVPSDRYKVEGFPTIYFAPSGDKKNPVKFEGGDRDLEHLSKFIEEHATKLSRTKEEL

SEQ ID NO: 68084 - protein, 163 aa, Homo sapiens
  Payload ID: 13570
  Gene Symbol: PDIA4
  Gene Name: protein disulfide isomerase family A, member 4
  ENSP ID: ENSP00000408628
MRPRKAFLLLLLLGLVQLLAVAGAEGPDEDFRQVQANSRRTRPGSGKGEGEPLERRGEGVKKQVRVLWNSKHSFSKCDSSNRENAIEDEEEEEEEDDDEEEDDLEVKEENGVLVLNDANFDNFVADKDTVLLEFYAPWCGHCKQFAPEYEKIANILKDKDPPI

SEQ ID NO: 68085 - protein, 519 aa, Homo sapiens
  Payload ID: 13571
  Gene Symbol: PDIA5
  Gene Name: protein disulfide isomerase family A, member 5
  Uniprot ID: Q14554
  ENSP ID: ENSP00000323313
MARAGPAWLLLAIWVVLPSWLSSAKVSSLIERISDPKDLKKLLRTRNNVLVLYSKSEVAAENHLRLLSTVAQAVKGQGTICWVDCGDAESRKLCKKMKVDLSPKDKKVELFHYQDGAFHTEYNRAVTFKSIVAFLKDPKGPPLWEEDPGAKDVVHLDSEKDFRRLLKKEEKPLLIMFYAPWCSMCKRMMPHFQKAATQLRGHAVLAGMNVYSSEFENIKEEYSVRGFPTICYFEKGRFLFQYDNYGSTAEDIVEWLKNPQPPQPQVPETPWADEGGSVYHLTDEDFDQFVKEHSSVLVMFHAPWCGHCKKMKPEFEKAAEALHGEADSSGVLAAVDATVNKALAERFHISEFPTLKYFKNGEKYAVPVLRTKKKFLEWMQNPEAPPPPEPTWEEQQTSVLHLVGDNFRETLKKKKHTLVMFYAPWCPHCKKVIPHFTATADAFKDDRKIACAAVDCVKDKNQDLCQQEAVKGYPTFHYYHYGKFAEKYDSDRTELGFTNYIRALREGDHERLGKKKEEL

SEQ ID NO: 68086 - protein, 83 aa, Homo sapiens
  Payload ID: 13571
  Gene Symbol: PDIA5
  Gene Name: protein disulfide isomerase family A, member 5
  ENSP ID: ENSP00000417199
  MOD_RES (1)..(1): Any amino acid
XTLVMFYAPWCPHCKKVIPHFTATADAFKDDRKIACAAVDCVKDKNQDLCQQEAVKGYPTFHYYHYGKFAEKYDSDRTVFSVG

SEQ ID NO: 68087 - protein, 262 aa, Homo sapiens
  Payload ID: 13571
  Gene Symbol: PDIA5
  Gene Name: protein disulfide isomerase family A, member 5
  Uniprot ID: Q14554
  ENSP ID: ENSP00000417520
MARAGPAWLLLAIWVVLPSWLSSAKVSSLIERISDPKDLKKLLRTRNNVLVLYSKSEVAAENHLRLLSTVAQAVKGQGTICWVDCGDAESRKLCKKMKVDLSPKDKKVELFHYQDGAFHTEYNRAVTFKSIVAFLKDPKGPPLWEEDPGAKDVVHLDSEKDFRRLLKKEEKPLLIMFYAPWCSMCKRMMPHFQKAATQLRGHAVLAGMNVYSSEFENIKEEYSVRGFPTICYFEKGRFLFQYDNYGSTAEDIVEWLKKVWPL

SEQ ID NO: 68088 - protein, 64 aa, Homo sapiens
  Payload ID: 13571
  Gene Symbol: PDIA5
  Gene Name: protein disulfide isomerase family A, member 5
  ENSP ID: ENSP00000419946
MKVDLSPKDKKVELFHYQDGAFHTEYNRAVTFKSIVAFLKDPKGPPLWEEDPGAKDVVHLDSEK

SEQ ID NO: 68089 - protein, 440 aa, Homo sapiens
  Payload ID: 13572
  Gene Symbol: PDIA6
  Gene Name: protein disulfide isomerase family A, member 6
  Uniprot ID: Q15084
  ENSP ID: ENSP00000272227
MALLVLGLVSCTFFLAVNGLYSSSDDVIELTPSNFNREVIQSDSLWLVEFYAPWCGHCQRLTPEWKKAATALKDVVKVGAVDADKHHSLGGQYGVQGFPTIKIFGSNKNRPEDYQGGRTGEAIVDAALSALRQLVKDRLGGRSGGYSSGKQGRSDSSSKKDVIELTDDSFDKNVLDSEDVWMVEFYAPWCGHCKNLEPEWAAAASEVKEQTKGKVKLAAVDATVNQVLASRYGIRGFPTIKIFQKGESPVDYDGGRTRSDIVSRALDLFSDNAPPPELLEIINEDIAKRTCEEHQLCVVAVLPHILDTGAAGRNSYLEVLLKLADKYKKKMWGWLWTEAGAQSELETALGIGGFGYPAMAAINARKMKFALLKGSFSEQGINEFLRELSFGRGSTAPVGGGAFPTIVEREPWDGRDGELPVEDDIDLSDVELDDLGKDEL

SEQ ID NO: 68090 - protein, 445 aa, Homo sapiens
  Payload ID: 13572
  Gene Symbol: PDIA6
  Gene Name: protein disulfide isomerase family A, member 6
  Uniprot ID: Q15084
  ENSP ID: ENSP00000371024
MYPSTTMANAPGLVSCTFFLAVNGLYSSSDDVIELTPSNFNREVIQSDSLWLVEFYAPWCGHCQRLTPEWKKAATALKDVVKVGAVDADKHHSLGGQYGVQGFPTIKIFGSNKNRPEDYQGGRTGEAIVDAALSALRQLVKDRLGGRSGGYSSGKQGRSDSSSKKDVIELTDDSFDKNVLDSEDVWMVEFYAPWCGHCKNLEPEWAAAASEVKEQTKGKVKLAAVDATVNQVLASRYGIRGFPTIKIFQKGESPVDYDGGRTRSDIVSRALDLFSDNAPPPELLEIINEDIAKRTCEEHQLCVVAVLPHILDTGAAGRNSYLEVLLKLADKYKKKMWGWLWTEAGAQSELETALGIGGFGYPAMAAINARKMKFALLKGSFSEQGINEFLRELSFGRGSTAPVGGGAFPTIVEREPWDGRDGELPVEDDIDLSDVELDDLGKDEL

SEQ ID NO: 68091 - protein, 488 aa, Homo sapiens
  Payload ID: 13572
  Gene Symbol: PDIA6
  Gene Name: protein disulfide isomerase family A, member 6
  Uniprot ID: Q15084
  ENSP ID: ENSP00000384459
MRIITAPASKVSRGSNELMILARRSDRGSPTSPAHSLSRKSPIMYPSTTMANAPGLVSCTFFLAVNGLYSSSDDVIELTPSNFNREVIQSDSLWLVEFYAPWCGHCQRLTPEWKKAATALKDVVKVGAVDADKHHSLGGQYGVQGFPTIKIFGSNKNRPEDYQGGRTGEAIVDAALSALRQLVKDRLGGRSGGYSSGKQGRSDSSSKKDVIELTDDSFDKNVLDSEDVWMVEFYAPWCGHCKNLEPEWAAAASEVKEQTKGKVKLAAVDATVNQVLASRYGIRGFPTIKIFQKGESPVDYDGGRTRSDIVSRALDLFSDNAPPPELLEIINEDIAKRTCEEHQLCVVAVLPHILDTGAAGRNSYLEVLLKLADKYKKKMWGWLWTEAGAQSELETALGIGGFGYPAMAAINARKMKFALLKGSFSEQGINEFLRELSFGRGSTAPVGGGAFPTIVEREPWDGRDGELPVEDDIDLSDVELDDLGKDEL

SEQ ID NO: 68092 - protein, 492 aa, Homo sapiens
  Payload ID: 13572
  Gene Symbol: PDIA6
  Gene Name: protein disulfide isomerase family A, member 6
  Uniprot ID: Q15084
  ENSP ID: ENSP00000385385
MRRDLREKLVWVCRPLAPVEVPANISSDFQPCSPTSPAHSLSRKSPIMYPSTTMANAPGLVSCTFFLAVNGLYSSSDDVIELTPSNFNREVIQSDSLWLVEFYAPWCGHCQRLTPEWKKAATALKDVVKVGAVDADKHHSLGGQYGVQGFPTIKIFGSNKNRPEDYQGGRTGEAIVDAALSALRQLVKDRLGGRSGGYSSGKQGRSDSSSKKDVIELTDDSFDKNVLDSEDVWMVEFYAPWCGHCKNLEPEWAAAASEVKEQTKGKVKLAAVDATVNQVLASRYGIRGFPTIKIFQKGESPVDYDGGRTRSDIVSRALDLFSDNAPPPELLEIINEDIAKRTCEEHQLCVVAVLPHILDTGAAGRNSYLEVLLKLADKYKKKMWGWLWTEAGAQSELETALGIGGFGYPAMAAINARKMKFALLKGSFSEQGINEFLRELSFGRGSTAPVGGGAFPTIVEREPWDGRDGELPVEDDIDLSDVELDDLGKDEL

SEQ ID NO: 68093 - protein, 11 aa, Homo sapiens
  Payload ID: 13572
  Gene Symbol: PDIA6
  Gene Name: protein disulfide isomerase family A, member 6
  ENSP ID: ENSP00000389558
MYPSTTMANAP

SEQ ID NO: 68094 - protein, 437 aa, Homo sapiens
  Payload ID: 13572
  Gene Symbol: PDIA6
  Gene Name: protein disulfide isomerase family A, member 6
  Uniprot ID: Q15084
  ENSP ID: ENSP00000438778
MILGLVSCTFFLAVNGLYSSSDDVIELTPSNFNREVIQSDSLWLVEFYAPWCGHCQRLTPEWKKAATALKDVVKVGAVDADKHHSLGGQYGVQGFPTIKIFGSNKNRPEDYQGGRTGEAIVDAALSALRQLVKDRLGGRSGGYSSGKQGRSDSSSKKDVIELTDDSFDKNVLDSEDVWMVEFYAPWCGHCKNLEPEWAAAASEVKEQTKGKVKLAAVDATVNQVLASRYGIRGFPTIKIFQKGESPVDYDGGRTRSDIVSRALDLFSDNAPPPELLEIINEDIAKRTCEEHQLCVVAVLPHILDTGAAGRNSYLEVLLKLADKYKKKMWGWLWTEAGAQSELETALGIGGFGYPAMAAINARKMKFALLKGSFSEQGINEFLRELSFGRGSTAPVGGGAFPTIVEREPWDGRDGELPVEDDIDLSDVELDDLGKDEL

SEQ ID NO: 68095 - protein, 492 aa, Homo sapiens; identical to SEQ ID NO: 68092
  Payload ID: 13572
  Gene Symbol: PDIA6
  Gene Name: protein disulfide isomerase family A, member 6
  Uniprot ID: Q15084
  ENSP ID: ENSP00000481892

SEQ ID NO: 68096 - protein, 584 aa, Homo sapiens
  Payload ID: 13573
  Gene Symbol: PDILT
  Gene Name: protein disulfide isomerase-like, testis expressed
  Uniprot ID: Q8N807
  ENSP ID: ENSP00000305465
MDLLWMPLLLVAACVSAVHSSPEVNAGVSSIHITKPVHILEERSLLVLTPAGLTQMLNQTRFLMVLFHNPSSKQSRNLAEELGKAVEIMGKGKNGIGFGKVDITIEKELQQEFGITKAPELKLFFEGNRSEPISCKGVVESAALVVWLRRQISQKAFLFNSSEQVAEFVISRPLVIVGFFQDLEEEVAELFYDVIKDFPELTFGVITIGNVIGRFHVTLDSVLVFKKGKIVNRQKLINDSTNKQELNRVIKQHLTDFVIEYNTENKDLISELHIMSHMLLFVSKSSESYGIIIQHYKLASKEFQNKILFILVDADEPRNGRVFKYFRVTEVDIPSVQILNLSSDARYKMPSDDITYESLKKFGRSFLSKNATKHQSSEEIPKYWDQGLVKQLVGKNFNVVVFDKEKDVFVMFYAPWSKKCKMLFPLLEELGRKYQNHSTIIIAKIDVTANDIQLMYLDRYPFFRLFPSGSQQAVLYKGEHTLKGFSDFLESHIKTKIEDEDELLSVEQNEVIEEEVLAEEKEVPMMRKGLPEQQSPELENMTKYVSKLEEPAGKKKTSEEVVVVVAKPKGPPVQKKKPKVKEEL

SEQ ID NO: 68097 - protein, 177 aa, Homo sapiens
  Payload ID: 13573
  Gene Symbol: PDILT
  Gene Name: protein disulfide isomerase-like, testis expressed
  ENSP ID: ENSP00000459161
MDLLWMPLLLVAACVSAVHSSPEVNAGVSSIHITKPVHILEERSLLVLTPAGLTQMLNQTRFLMVLFHEVLLLLPRLKYNGAILAHRNLHLPGSSDSPASASQVAGITDNPSSKQSRNLAEELGKAVEIMGKGKNGIGFGKVDITIEKELQQEFGITKAPELKLFFEGNRSEPISCK

SEQ ID NO: 68098 - protein, 300 aa, Homo sapiens
  Payload ID: 13574
  Gene Symbol: PGGT1B
  Gene Name: protein geranylgeranyltransferase type I, beta subunit
  Uniprot ID: P53609
  ENSP ID: ENSP00000368935
MAATEDERLAGSGEGERLDFLRDRHVRFFQRCLQVLPERYSSLETSRLTIAFFALSGLDMLDSLDVVNKDDIIEWIYSLQVLPTEDRSNLNRCGFRGSSYLGIPFNPSKAPGTAHPYDSGHIAMTYTGLSCLVILGDDLSRVNKEACLAGLRALQLEDGSFCAVPEGSENDMRFVYCASCICYMLNNWSGMDMKKAITYIRRSMLLKIFQYTNFEKNRNYILSTQDRLVGGFAKWPDSHPDALHAYFGICGLSLMEESGICKVHPALNVSTRTSERLLDLHQSWKTKDSKQCSENVHIST

SEQ ID NO: 68099 - protein, 377 aa, Homo sapiens
  Payload ID: 13574
  Gene Symbol: PGGT1B
  Gene Name: protein geranylgeranyltransferase type I, beta subunit
  Uniprot ID: P53609
  ENSP ID: ENSP00000404676
MAATEDERLAGSGEGERLDFLRDRHVRFFQRCLQVLPERYSSLETSRLTIAFFALSGLDMLDSLDVVNKDDIIEWIYSLQVLPTEDRSNLNRCGFRGSSYLGIPFNPSKAPGTAHPYDSGHIAMTYTGLSCLVILGDDLSRVNKEACLAGLRALQLEDGSFCAVPEGSENDMRFVYCASCICYMLNNWSGMDMKKAITYIRRSMSYDNGLAQGAGLESHGGSTFCGIASLCLMGKLEEVFSEKELNRIKRWCIMRQQNGYHGRPNKPVDTCYSFWVGATLKLLKIFQYTNFEKNRNYILSTQDRLVGGFAKWPDSHPDALHAYFGICGLSLMEESGICKVHPALNVSTRTSERLLDLHQSWKTKDSKQCSENVHIST

SEQ ID NO: 68100 - protein, 651 aa, Homo sapiens
  Payload ID: 13575
  Gene Symbol: PIAS1
  Gene Name: protein inhibitor of activated STAT, 1
  Uniprot ID: O75925
  ENSP ID: ENSP00000249636
MADSAELKQMVMSLRVSELQVLLGYAGRNKHGRKHELLTKALHLLKAGCSPAVQMKIKELYRRRFPQKIMTPADLSIPNVHSSPMPATLSPSTIPQLTYDGHPASSPLLPVSLLGPKHELELPHLTSALHPVHPDIKLQKLPFYDLLDELIKPTSLASDNSQRFRETCFAFALTPQQVQQISSSMDISGTKCDFTVQVQLRFCLSETSCPQEDHFPPNLCVKVNTKPCSLPGYLPPTKNGVEPKRPSRPINITSLVRLSTTVPNTIVVSWTAEIGRNYSMAVYLVKQLSSTVLLQRLRAKGIRNPDHSRALIKEKLTADPDSEIATTSLRVSLLCPLGKMRLTIPCRALTCSHLQCFDATLYIQMNEKKPTWVCPVCDKKAPYEHLIIDGLFMEILKYCTDCDEIQFKEDGTWAPMRSKKEVQEVSASYNGVDGCLSSTLEHQVASHHQSSNKNKKVEVIDLTIDSSSDEEEEEPSAKRTCPSLSPTSPLNNKGILSLPHQASPVSRTPSLPAVDTSYINTSLIQDYRHPFHMTPMPYDLQGLDFFPFLSGDNQHYNTSLLAAAAAAVSDDQDLLHSSRFFPYTSSQMFLDQLSAGGSTSLPTTNGSSSGSNSSLVSSNSLRESHSHTVTNRSSTDTASIFGIIPDIISLD

SEQ ID NO: 68101 - protein, 653 aa, Homo sapiens
  Payload ID: 13575
  Gene Symbol: PIAS1
  Gene Name: protein inhibitor of activated STAT, 1
  Uniprot ID: O75925
  ENSP ID: ENSP00000438574
MFTLQDSYVKQMVMSLRVSELQVLLGYAGRNKHGRKHELLTKALHLLKAGCSPAVQMKIKELYRRRFPQKIMTPADLSIPNVHSSPMPATLSPSTIPQLTYDGHPASSPLLPVSLLGPKHELELPHLTSALHPVHPDIKLQKLPFYDLLDELIKPTSLASDNSQRFRETCFAFALTPQQVQQISSSMDISGTKCDFTVQVQLRFCLSETSCPQEDHFPPNLCVKVNTKPCSLPGYLPPTKNGVEPKRPSRPINITSLVRLSTTVPNTIVVSWTAEIGRNYSMAVYLVKQLSSTVLLQRLRAKGIRNPDHSRALIKEKLTADPDSEIATTSLRVSLLCPLGKMRLTIPCRALTCSHLQCFDATLYIQMNEKKPTWVCPVCDKKAPYEHLIIDGLFMEILKYCTDCDEIQFKEDGTWAPMRSKKEVQEVSASYNGVDGCLSSTLEHQVASHHQSSNKNKKVEVIDLTIDSSSDEEEEEPSAKRTCPSLSPTSPLNNKGILSLPHQASPVSRTPSLPAVDTSYINTSLIQDYRHPFHMTPMPYDLQGLDFFPFLSGDNQHYNTSLLAAAAAAVSDDQDLLHSSRFFPYTSSQMFLDQLSAGGSTSLPTTNGSSSGSNSSLVSSNSLRESHSHTVTNRSSTDTASIFGIIPDIISLD

SEQ ID NO: 68102 - protein, 64 aa, Homo sapiens
  Payload ID: 13575
  Gene Symbol: PIAS1
  Gene Name: protein inhibitor of activated STAT, 1
  ENSP ID: ENSP00000456558
  MOD_RES (1)..(1): Any amino acid
XILSLPHQASPVSRTPSLPAVDTSYINTSLIQDYRHPFHMTPMPYDLQALQHLLACRCSSSSFR

SEQ ID NO: 68103 - protein, 160 aa, Homo sapiens
  Payload ID: 13575
  Gene Symbol: PIAS1
  Gene Name: protein inhibitor of activated STAT, 1
  ENSP ID: ENSP00000456721
MADSAELKQMVMSLRVSELQVLLGYAGRNKHGRKHELLTKALHLLKAGCSPAVQMKIKELYRRRFPQKIMTPADLSIPNVHSSPMPATLSPSTIPQLTYDGHPASSPLLPVSLLGPKHELELPHLTSALHPVHPDIKLQKLPFYDLLDELIKPTSLAEII

SEQ ID NO: 68104 - protein, 20 aa, Homo sapiens
  Payload ID: 13575
  Gene Symbol: PIAS1
  Gene Name: protein inhibitor of activated STAT, 1
  ENSP ID: ENSP00000457698
MADSAELKEEEWERRSPSAF

SEQ ID NO: 68105 - protein, 572 aa, Homo sapiens
  Payload ID: 13576
  Gene Symbol: PIAS2
  Gene Name: protein inhibitor of activated STAT, 2
  Uniprot ID: O75928
  ENSP ID: ENSP00000317163
MADFEELRNMVSSFRVSELQVLLGFAGRNKSGRKHDLLMRALHLLKSGCSPAVQIKIRELYRRRYPRTLEGLSDLSTIKSSVFSLDGGSSPVEPDLAVAGIHSLPSTSVTPHSPSSPVGSVLLQDTKPTFEMQQPSPPIPPVHPDVQLKNLPFYDVLDVLIKPTSLVQSSIQRFQEKFFIFALTPQQVREICISRDFLPGGRRDYTVQVQLRLCLAETSCPQEDNYPNSLCIKVNGKLFPLPGYAPPPKNGIEQKRPGRPLNITSLVRLSSAVPNQISISWASEIGKNYSMSVYLVRQLTSAMLLQRLKMKGIRNPDHSRALIKEKLTADPDSEIATTSLRVSLMCPLGKMRLTIPCRAVTCTHLQCFDAALYLQMNEKKPTWICPVCDKKAAYESLILDGLFMEILNDCSDVDEIKFQEDGSWCPMRPKKEAMKVSSQPCTKIESSSVLSKPCSVTVASEASKKKVDVIDLTIESSSDEEEDPPAKRKCIFMSETQSSPTKGVLMYQPSSVRVPSVTSVDPAAIPPSLTDYSVPFHHTPISSMSSDLPGEQRRNDINNELKLGTSSDTVQQ

SEQ ID NO: 68106 - protein, 182 aa, Homo sapiens
  Payload ID: 13576
  Gene Symbol: PIAS2
  Gene Name: protein inhibitor of activated STAT, 2
  ENSP ID: ENSP00000381648
MADFEELRNMVSSFRVSELQVLLGFAGRNKSGRKHDLLMRALHLLKSGCSPAVQIKIRELYRRRYPRTLEGLSDLSTIKSSVFSLDGGSSPVEPDLAVAGIHSLPSTSVTPHSPSSPVGSVLLQDTKPTFEMQQPSPPIPPVHPDVQLKNLPFYDVLDVLIKPTSLGIFCQVVGEIIQSKFS

SEQ ID NO: 68107 - protein, 282 aa, Homo sapiens
  Payload ID: 13576
  Gene Symbol: PIAS2
  Gene Name: protein inhibitor of activated STAT, 2
  ENSP ID: ENSP00000443238
MSVYLVRQLTSAMLLQRLKMKGIRNPDHSRALIKEKLTADPDSEIATTSLRVSLMCPLGKMRLTIPCRAVTCTHLQCFDAALYLQMNEKKPTWICPVCDKKAAYESLILDGLFMEILNDCSDVDEIKFQEDGSWCPMRPKKEAMKVSSQPCTKIESSSVLSKPCSVTVASEASKKKVDVIDLTIESSSDEEEDPPAKRKCIFMSETQSSPTKGVLMYQPSSVRVPSVTSVDPAAIPPSLTDYSVPFHHTPISSMSSDLPGEQRRNDINNELKLGTSSDTVQQ

SEQ ID NO: 68108 - protein, 122 aa, Homo sapiens
  Payload ID: 13576
  Gene Symbol: PIAS2
  Gene Name: protein inhibitor of activated STAT, 2
  ENSP ID: ENSP00000465312
MVSSFRVSELQVLLGFAGRNKSGRKHDLLMRALHLLKSGCSPAVQIKIRELYRRRYPRTLEGLSDLSTIKSSVFSLDGGSSPVEPDLAVAGIHSLPSTSVTPHSPSSPVGSVLLQDTKPTFE

SEQ ID NO: 68109 - protein, 621 aa, Homo sapiens
  Payload ID: 13576
  Gene Symbol: PIAS2
  Gene Name: protein inhibitor of activated STAT, 2
  Uniprot ID: O75928
  ENSP ID: ENSP00000465676
MADFEELRNMVSSFRVSELQVLLGFAGRNKSGRKHDLLMRALHLLKSGCSPAVQIKIRELYRRRYPRTLEGLSDLSTIKSSVFSLDGGSSPVEPDLAVAGIHSLPSTSVTPHSPSSPVGSVLLQDTKPTFEMQQPSPPIPPVHPDVQLKNLPFYDVLDVLIKPTSLVQSSIQRFQEKFFIFALTPQQVREICISRDFLPGGRRDYTVQVQLRLCLAETSCPQEDNYPNSLCIKVNGKLFPLPGYAPPPKNGIEQKRPGRPLNITSLVRLSSAVPNQISISWASEIGKNYSMSVYLVRQLTSAMLLQRLKMKGIRNPDHSRALIKEKLTADPDSEIATTSLRVSLMCPLGKMRLTIPCRAVTCTHLQCFDAALYLQMNEKKPTWICPVCDKKAAYESLILDGLFMEILNDCSDVDEIKFQEDGSWCPMRPKKEAMKVSSQPCTKIESSSVLSKPCSVTVASEASKKKVDVIDLTIESSSDEEEDPPAKRKCIFMSETQSSPTKGVLMYQPSSVRVPSVTSVDPAAIPPSLTDYSVPFHHTPISSMSSDLPGLDFLSLIPVDPQYCPPMFLDSLTSPLTASSTSVTTTSSHESSTHVSSSSSRSETGVITSSGSNIPDIISLD

SEQ ID NO: 68110 - protein, 89 aa, Homo sapiens
  Payload ID: 13576
  Gene Symbol: PIAS2
  Gene Name: protein inhibitor of activated STAT, 2
  ENSP ID: ENSP00000466596
MAVPFYIPTSNVWSDPVSQHPRQHLVLSVFFILAILNMVSSFRVSELQVLLGFAGRNKSGRKHDLLMRALHLLKSGCSPAVQIKIRELY

SEQ ID NO: 68111 - protein, 95 aa, Homo sapiens
  Payload ID: 13576
  Gene Symbol: PIAS2
  Gene Name: protein inhibitor of activated STAT, 2
  ENSP ID: ENSP00000468017
MLSKFHMAVPFYIPTSNVWSDPVSQHPRQHLVLSVFFILAILNMVSSFRVSELQVLLGFAGRNKSGRKHDLLMRALHLLKSGCSPAVQIKIRELY

SEQ ID NO: 68112 - protein, 88 aa, Homo sapiens
  Payload ID: 13576
  Gene Symbol: PIAS2
  Gene Name: protein inhibitor of activated STAT, 2
  ENSP ID: ENSP00000468166
MLPFSQNMVSSFRVSELQVLLGFAGRNKSGRKHDLLMRALHLLKSGCSPAVQIKIRELYRRRYPRTLEGLSDLSTIKSSVFSLDGGSS

SEQ ID NO: 68113 - protein, 536 aa, Homo sapiens
  Payload ID: 13576
  Gene Symbol: PIAS2
  Gene Name: protein inhibitor of activated STAT, 2
  ENSP ID: ENSP00000479025
HMAVPFYIPTSNVWSDPVSQHPRQHLVLSVFFILAILNMVSSFRVSELQVLLGFAGRNKSGRKHDLLMRALHLLKSGCSPAVQIKIRELYRRRYPRTLEGLSDLSTIKSSVFSLDGGSSPVEPDLAVAGIHSLPSTSVTPHSPSSPVGSVLLQDTKPTFEMQQPSPPIPPVHPDVQLKNLPFYDVLDVLIKPTSLVQSSIQRFQEKFFIFALTPQQVREICISRDFLPGGRRDYTVQVQLRLCLAETSCPQEDNYPNSLCIKVNGKLFPLPGYAPPPKNGIEQKRPGRPLNITSLVRLSSAVPNQISISWASEIGKNYSMSVYLVRQLTSAMLLQRLKMKGIRNPDHSRALIKEKLTADPDSEIATTSLRVSLMCPLGKMRLTIPCRAVTCTHLQCFDAALYLQMNEKKPTWICPVCDKKAAYESLILDGLFMEILNDCSDVDEIKFQEDGSWCPMRPKKEAMKVSSQPCTKIESSSVLSKPCSVTVASEASKKKVDVIDLTIESSSDEEEDPPAKRKCIFMSETQSSPTKGFVNL

SEQ ID NO: 68114 - protein, 593 aa, Homo sapiens
  Payload ID: 13577
  Gene Symbol: PIAS3
  Gene Name: protein inhibitor of activated STAT, 3
  ENSP ID: ENSP00000358304
MAELGELKHMVMSFRVSELQVLLGFAGRNKSGRKHELLAKALHLLKSSCAPSVQMKIKELYRRRFPRKTLGPSDLSLLSLPPGTSPPVHPDVTMKPLPFYEVYGELIRPTTLASTSSQRFEEAHFTFALTPQQVQQILTSREVLPGAKCDYTIQVQLRFCLCETSCPQEDYFPPNLFVKVNGKLCPLPGYLPPTKNGAEPKRPSRPINITPLARLSATVPNTIVVNWSSEFGRNYSLSVYLVRQLTAGTLLQKLRAKGIRNPDHSRALIKEKLTADPDSEVATTSLRVSLMCPLGKMRLTVPCRALTCAHLQSFDAALYLQMNEKKPTWTCPVCDKKAPYESLIIDGLFMEILSSCSDCDEIQFMEDGSWCPMKPKKEASEVCPPPGYGLDGLQYSPVQGGDPSENKKKVEVIDLTIESSSDEEDLPPTKKHCSVTSAAIPALPGSKGVLTSGHQPSSVLRSPAMGTLGGDFLSSLPLHEYPPAFPLGADIQGLDLFSFLQTESQHYGPSVITSLDEQDALGHFFQYRGTPSHFLGPLAPTLGSSHCSATPAPPPGRVSSIVAPGGALREGHGGPLPSGPSLTGCRSDIISLD

SEQ ID NO: 68115 - protein, 628 aa, Homo sapiens
  Payload ID: 13577
  Gene Symbol: PIAS3
  Gene Name: protein inhibitor of activated STAT, 3
  Uniprot ID: Q9Y6X2
  ENSP ID: ENSP00000376765
MAELGELKHMVMSFRVSELQVLLGFAGRNKSGRKHELLAKALHLLKSSCAPSVQMKIKELYRRRFPRKTLGPSDLSLLSLPPGTSPVGSPGPLAPIPPTLLAPGTLLGPKREVDMHPPLPQPVHPDVTMKPLPFYEVYGELIRPTTLASTSSQRFEEAHFTFALTPQQVQQILTSREVLPGAKCDYTIQVQLRFCLCETSCPQEDYFPPNLFVKVNGKLCPLPGYLPPTKNGAEPKRPSRPINITPLARLSATVPNTIVVNWSSEFGRNYSLSVYLVRQLTAGTLLQKLRAKGIRNPDHSRALIKEKLTADPDSEVATTSLRVSLMCPLGKMRLTVPCRALTCAHLQSFDAALYLQMNEKKPTWTCPVCDKKAPYESLIIDGLFMEILSSCSDCDEIQFMEDGSWCPMKPKKEASEVCPPPGYGLDGLQYSPVQGGDPSENKKKVEVIDLTIESSSDEEDLPPTKKHCSVTSAAIPALPGSKGVLTSGHQPSSVLRSPAMGTLGGDFLSSLPLHEYPPAFPLGADIQGLDLFSFLQTESQHYGPSVITSLDEQDALGHFFQYRGTPSHFLGPLAPTLGSSHCSATPAPPPGRVSSIVAPGGALREGHGGPLPSGPSLTGCRSDIISLD

SEQ ID NO: 68116 - protein, 259 aa, Homo sapiens
  Payload ID: 13577
  Gene Symbol: PIAS3
  Gene Name: protein inhibitor of activated STAT, 3
  ENSP ID: ENSP00000376766
MVMSFRVSELQVLLGFAGRNKSGRKHELLAKALHLLKSSCAPSVQMKIKELYRRRFPRKTLGPSDLSLLSLPPGTSPVGSPGPLAPIPPTLLAPGTLLGPKREVDMHPPLPQPVHPDVTMKPLPFYEVYGELIRPTTLASTSSQRFEEAHFTFALTPQQVQQILTSREVLPGAKCDYTIQVQLRFCLCETSCPQEDYFPPNLFVKVNGKLCPLPGYLPPTKNGAEPKRPSRPINITPLARLSATVPNTIVVNWSSEFGR

SEQ ID NO: 68117 - protein, 92 aa, Homo sapiens
  Payload ID: 13577
  Gene Symbol: PIAS3
  Gene Name: protein inhibitor of activated STAT, 3
  ENSP ID: ENSP00000476245
MEAGGCMDSEHMVMSFRVSELQVLLGFAGRNKSGRKHELLAKALHLLKSSCAPSVQMKIKELYRRRFPRKTLGPSDLSLLSLPPGTSPVGSP

SEQ ID NO: 68118 - protein, 510 aa, Homo sapiens
  Payload ID: 13578
  Gene Symbol: PIAS4
  Gene Name: protein inhibitor of activated STAT, 4
  Uniprot ID: Q8N2W9
  ENSP ID: ENSP00000262971
MAAELVEAKNMVMSFRVSDLQMLLGFVGRSKSGLKHELVTRALQLVQFDCSPELFKKIKELYETRYAKKNSEPAPQPHRPLDPLTMHSTYDRAGAVPRTPLAGPNIDYPVLYGKYLNGLGRLPAKTLKPEVRLVKLPFFNMLDELLKPTELVPQNNEKLQESPCIFALTPRQVELIRNSRELQPGVKAVQVVLRICYSDTSCPQEDQYPPNIAVKVNHSYCSVPGYYPSNKPGVEPKRPCRPINLTHLMYLSSATNRITVTWGNYGKSYSVALYLVRQLTSSELLQRLKTIGVKHPELCKALVKEKLRLDPDSEIATTGVRVSLICPLVKMRLSVPCRAETCAHLQCFDAVFYLQMNEKKPTWMCPVCDKPAPYDQLIIDGLLSKILSECEDADEIEYLVDGSWCPIRAEKERSCSPQGAILVLGPSDANGLLPAPSVNGSGALGSTGGGGPVGSMENGKPGADVVDLTLDSSSSSEDEEEEEEEEEDEDEEGPRPKRRCPFQKGLVPAC

SEQ ID NO: 68119 - protein, 336 aa, Homo sapiens
  Payload ID: 13579
  Gene Symbol: PROCA1
  Gene Name: protein interacting with cyclin A1
  Uniprot ID: Q8NCQ7
  ENSP ID: ENSP00000301039
MWVRTTLTIERWTKEKTEPKARSWDESRCRGDCKEPDKCCWRHKQCTGHIIYPFASDCVRHSLHLHSVNHCNCNSRLKDSSEDSSSSRGAGPTCSHVIESPCFELTPEEEHVERFRYGWCKSYRPVSVAVIHHPLYHECGADDLNEEEEEEEEESKPPIPTQVGPATASPDLGTSMATGTPDSTAPITIWRSESPTGKGQGSKVIKKVKKKKEKEKDKEEMDEKAKLKKKAKKGQLTKKKSPVKLEPSPPDVSRSLSARQLARMSESSPESREELESEDSYNGRGQGELSSEDIVESSSPRKRENTVQAKKTGAKPSQARKVNKRKSPPGSNPNLS

SEQ ID NO: 68120 - protein, 364 aa, Homo sapiens
  Payload ID: 13579
  Gene Symbol: PROCA1
  Gene Name: protein interacting with cyclin A1
  ENSP ID: ENSP00000411400
MWVRTTLTIERWTKEKTEPKARSWDEALSDVNRLPSWERGHLLAGVASSTDVSTFSEGGDCKEPDKCCWRHKQCTGHIIYPFASDCVRHSLHLHSVNHCNCNSRLKDSSEDSSSSRGAGPTCSHVIESPCFELTPEEEHVERFRYGWCKSYRPVSVAVIHHPLYHECGADDLNEEEEEEEEESKPPIPTQVGPATASPDLGTSMATGTPDSTAPITIWRSESPTGKGQGSKVIKKVKKKKEKEKDKEEMDEKAKLKKKAKKGQLTKKKSPVKLEPSPPDVSRSLSARQLARMSESSPESREELESEDSYNGRGQGELSSEDIVESSSPRKRENTVQAKKTGAKPSQARKVNKRKSPPGSNPNLS

SEQ ID NO: 68121 - protein, 152 aa, Homo sapiens
  Payload ID: 13579
  Gene Symbol: PROCA1
  Gene Name: protein interacting with cyclin A1
  ENSP ID: ENSP00000463898
MWVRTTLTIERWTKEKTEPKARSWDESRCRDVNRLPSWERGHLLAGVASSTDVSTFSEGDCKEPDKCCWRHKQCTGHIIYPFASDCVRHSLHLHSVNHCNCNSSFELVLPAQSQLCTPCSALREMGRRSVGLRQAQRKPTVPQASGSGSLGE

SEQ ID NO: 68122 - protein, 41 aa, Homo sapiens
  Payload ID: 13579
  Gene Symbol: PROCA1
  Gene Name: protein interacting with cyclin A1
  ENSP ID: ENSP00000464600
MWVRTTLTIERWTKEKTEPKARSWDESRCRGAKATDLSLWQ

SEQ ID NO: 68123 - protein, 110 aa, Homo sapiens
  Payload ID: 13579
  Gene Symbol: PROCA1
  Gene Name: protein interacting with cyclin A1
  ENSP ID: ENSP00000468747
MATGTPDSTAPITIWRSESPTGKGQGSKVIKKVKKKKEKEKDKEEMDEKAKLKKKAKKGQLTKKKSPVKLEPSPPDVSRSLSARQLARMSESSPESREELESEDSYNGRG

SEQ ID NO: 68124 - protein, 415 aa, Homo sapiens
  Payload ID: 13580
  Gene Symbol: PICK1
  Gene Name: protein interacting with PRKCA 1
  Uniprot ID: Q9NRD5
  ENSP ID: ENSP00000349465
MFADLDYDIEEDKLGIPTVPGKVTLQKDAQNLIGISIGGGAQYCPCLYIVQVFDNTPAALDGTVAAGDEITGVNGRSIKGKTKVEVAKMIQEVKGEVTIHYNKLQADPKQGMSLDIVLKKVKHRLVENMSSGTADALGLSRAILCNDGLVKRLEELERTAELYKGMTEHTKNLLRAFYELSQTHRAFGDVFSVIGVREPQPAASEAFVKFADAHRSIEKFGIRLLKTIKPMLTDLNTYLNKAIPDTRLTIKKYLDVKFEYLSYCLKVKEMDDEEYSCIALGEPLYRVSTGNYEYRLILRCRQEARARFSQMRKDVLEKMELLDQKHVQDIVFQLQRLVSTMSKYYNDCYAVLRDADVFPIEVDLAHTTLAYGLNQEEFTDGEEEEEEEDTAAGEPSRDTRGAAGPLDKGGSWCDS

SEQ ID NO: 68125 - protein, 415 aa, Homo sapiens; identical to SEQ ID NO: 68124
  Payload ID: 13580
  Gene Symbol: PICK1
  Gene Name: protein interacting with PRKCA 1
  Uniprot ID: Q9NRD5
  ENSP ID: ENSP00000385205

SEQ ID NO: 68126 - protein, 51 aa, Homo sapiens
  Payload ID: 13580
  Gene Symbol: PICK1
  Gene Name: protein interacting with PRKCA 1
  ENSP ID: ENSP00000387861
MFADLDYDIEEDKLYLTTPQQPWTAQWQLAMRSPVSMAGQSKGKLRWRWRR

SEQ ID NO: 68127 - protein, 134 aa, Homo sapiens
  Payload ID: 13580
  Gene Symbol: PICK1
  Gene Name: protein interacting with PRKCA 1
  ENSP ID: ENSP00000397588
MFADLDYDIEEDKLGIPTVPGKVTLQKDAQNLIGISIGGGAQYCPCLYIVQVFDNTPAALDGTVAAGDEITGVNGRSIKGKTKVEVAKMIQEVKGEVTIHYNKLQADPKQGMSLDIVLKKVKHRLVENMSSGTA

SEQ ID NO: 68128 - protein, 229 aa, Homo sapiens
  Payload ID: 13580
  Gene Symbol: PICK1
  Gene Name: protein interacting with PRKCA 1
  ENSP ID: ENSP00000398141
MFADLDYDIEEDKLGIPTVPGKVTLQKDAQNLIGISIGGGAQYCPCLYIVQVFDNTPAALDGTVAAGDEITGVNGRSIKGKTKVEVAKMIQEVKGEVTIHYNKLQADPKQGMSLDIVLKKVKHRLVENMSSGTADALGLSRAILCNDGLVKRLEELERTAELYKGMTEHTKNLLRAFYELSQTHRAFGDVFSVIGVREPQPAASEAFVKFADAHRSIEKFGIRLLKTIK

SEQ ID NO: 68129 - protein, 130 aa, Homo sapiens
  Payload ID: 13580
  Gene Symbol: PICK1
  Gene Name: protein interacting with PRKCA 1
  ENSP ID: ENSP00000410793
MFADLDYDIEEDKLGIPTVPGKVTLQKDAQNLIGISIGGGAQYCPCLYIVQVFDNTPAALDGTVAAGDEITGVNGRSIKGKTKVEVAKMIQEVKGEVTIHYNKLQADPKQGMSLDIGQRLGFHGPGPHSS

SEQ ID NO: 68130 - protein, 51 aa, Homo sapiens; identical to SEQ ID NO: 68126
  Payload ID: 13580
  Gene Symbol: PICK1
  Gene Name: protein interacting with PRKCA 1
  ENSP ID: ENSP00000413962

SEQ ID NO: 68131 - protein, 38 aa, Homo sapiens
  Payload ID: 13580
  Gene Symbol: PICK1
  Gene Name: protein interacting with PRKCA 1
  ENSP ID: ENSP00000416487
MFADLDYDIEEDKLGIPTVPGKVTLQKDAQNLIGISIG

SEQ ID NO: 68132 - protein, 76 aa, Homo sapiens
  Payload ID: 13581
  Gene Symbol: PKIA
  Gene Name: protein kinase (cAMP-dependent, catalytic) inhibitor alpha
  Uniprot ID: P61925
  ENSP ID: ENSP00000336552
MTDVETTYADFIASGRTGRRNAIHDILVSSASGNSNELALKLAGLDINKTEGEEDAQRSSTEQSGEAQGEAAKSES

SEQ ID NO: 68133 - protein, 76 aa, Homo sapiens; identical to SEQ ID NO: 68132
  Payload ID: 13581
  Gene Symbol: PKIA
  Gene Name: protein kinase (cAMP-dependent, catalytic) inhibitor alpha
  Uniprot ID: P61925
  ENSP ID: ENSP00000379696

SEQ ID NO: 68134 - protein, 76 aa, Homo sapiens; identical to SEQ ID NO: 68132
  Payload ID: 13581
  Gene Symbol: PKIA
  Gene Name: protein kinase (cAMP-dependent, catalytic) inhibitor alpha
  Uniprot ID: P61925
  ENSP ID: ENSP00000430887

SEQ ID NO: 68135 - protein, 85 aa, Homo sapiens
  Payload ID: 13582
  Gene Symbol: PKIB
  Gene Name: protein kinase (cAMP-dependent, catalytic) inhibitor beta
  Uniprot ID: Q9C010
  ENSP ID: ENSP00000258014
MSHQDVAMRTDSSKMTDVESGVANFASSARAGRRNALPDIQSSAATDGTSDLPLKLEALSVKEDAKEKDEKTTQDQLEKPQNEEK

SEQ ID NO: 68136 - protein, 78 aa, Homo sapiens
  Payload ID: 13582
  Gene Symbol: PKIB
  Gene Name: protein kinase (cAMP-dependent, catalytic) inhibitor beta
  Uniprot ID: Q9C010
  ENSP ID: ENSP00000346227
MRTDSSKMTDVESGVANFASSARAGRRNALPDIQSSAATDGTSDLPLKLEALSVKEDAKEKDEKTTQDQLEKPQNEEK

SEQ ID NO: 68137 - protein, 87 aa, Homo sapiens
  Payload ID: 13582
  Gene Symbol: PKIB
  Gene Name: protein kinase (cAMP-dependent, catalytic) inhibitor beta
  ENSP ID: ENSP00000357431
MHILFVDVAMRTDSSKMTDVESGVANFASSARAGRRNALPDIQSSAATDGTSDLPLKLEALSVKEDAKEKDEKTTQDQLEKPQNEEK

SEQ ID NO: 68138 - protein, 78 aa, Homo sapiens; identical to SEQ ID NO: 68136
  Payload ID: 13582
  Gene Symbol: PKIB
  Gene Name: protein kinase (cAMP-dependent, catalytic) inhibitor beta
  Uniprot ID: Q9C010
  ENSP ID: ENSP00000357433

SEQ ID NO: 68139 - protein, 78 aa, Homo sapiens; identical to SEQ ID NO: 68136
  Payload ID: 13582
  Gene Symbol: PKIB
  Gene Name: protein kinase (cAMP-dependent, catalytic) inhibitor beta
  Uniprot ID: Q9C010
  ENSP ID: ENSP00000357437

SEQ ID NO: 68140 - protein, 78 aa, Homo sapiens; identical to SEQ ID NO: 68136
  Payload ID: 13582
  Gene Symbol: PKIB
  Gene Name: protein kinase (cAMP-dependent, catalytic) inhibitor beta
  Uniprot ID: Q9C010
  ENSP ID: ENSP00000376280

SEQ ID NO: 68141 - protein, 78 aa, Homo sapiens; identical to SEQ ID NO: 68136
  Payload ID: 13582
  Gene Symbol: PKIB
  Gene Name: protein kinase (cAMP-dependent, catalytic) inhibitor beta
  Uniprot ID: Q9C010
  ENSP ID: ENSP00000376281

SEQ ID NO: 68142 - protein, 85 aa, Homo sapiens; identical to SEQ ID NO: 68135
  Payload ID: 13582
  Gene Symbol: PKIB
  Gene Name: protein kinase (cAMP-dependent, catalytic) inhibitor beta
  Uniprot ID: Q9C010
  ENSP ID: ENSP00000480824

SEQ ID NO: 68143 - protein, 76 aa, Homo sapiens
  Payload ID: 13583
  Gene Symbol: PKIG
  Gene Name: protein kinase (cAMP-dependent, catalytic) inhibitor gamma
  Uniprot ID: Q9Y2B9
  ENSP ID: ENSP00000338067
MMEVESSYSDFISCDRTGRRNAVPDIQGDSEAVSVRKLAGDMGELALEGAEGQVEGSAPDKEAGNQPQSSDGTTSS

SEQ ID NO: 68144 - protein, 76 aa, Homo sapiens; identical to SEQ ID NO: 68143
  Payload ID: 13583
  Gene Symbol: PKIG
  Gene Name: protein kinase (cAMP-dependent, catalytic) inhibitor gamma
  Uniprot ID: Q9Y2B9
  ENSP ID: ENSP00000361977

SEQ ID NO: 68145 - protein, 64 aa, Homo sapiens
  Payload ID: 13583
  Gene Symbol: PKIG
  Gene Name: protein kinase (cAMP-dependent, catalytic) inhibitor gamma
  ENSP ID: ENSP00000361978
MMEVESSYSDFISCDRTGRRNAVPDIQGDSEAVSVRKLAGDMGELALEGAEMDLTMLPWLVSNS

SEQ ID NO: 68146 - protein, 76 aa, Homo sapiens; identical to SEQ ID NO: 68143
  Payload ID: 13583
  Gene Symbol: PKIG
  Gene Name: protein kinase (cAMP-dependent, catalytic) inhibitor gamma
  Uniprot ID: Q9Y2B9
  ENSP ID: ENSP00000361980

SEQ ID NO: 68147 - protein, 76 aa, Homo sapiens; identical to SEQ ID NO: 68143
  Payload ID: 13583
  Gene Symbol: PKIG
  Gene Name: protein kinase (cAMP-dependent, catalytic) inhibitor gamma
  Uniprot ID: Q9Y2B9
  ENSP ID: ENSP00000361981

SEQ ID NO: 68148 - protein, 76 aa, Homo sapiens; identical to SEQ ID NO: 68143
  Payload ID: 13583
  Gene Symbol: PKIG
  Gene Name: protein kinase (cAMP-dependent, catalytic) inhibitor gamma
  Uniprot ID: Q9Y2B9
  ENSP ID: ENSP00000361983

SEQ ID NO: 68149 - protein, 76 aa, Homo sapiens; identical to SEQ ID NO: 68143
  Payload ID: 13583
  Gene Symbol: PKIG
  Gene Name: protein kinase (cAMP-dependent, catalytic) inhibitor gamma
  Uniprot ID: Q9Y2B9
  ENSP ID: ENSP00000361985

SEQ ID NO: 68150 - protein, 444 aa, Homo sapiens
  Payload ID: 13584
  Gene Symbol: PACSIN1
  Gene Name: protein kinase C and casein kinase substrate in neurons 1
  Uniprot ID: Q9BY11
  ENSP ID: ENSP00000244458
MSSSYDEASLAPEETTDSFWEVGNYKRTVKRIDDGHRLCNDLMNCVQERAKIEKAYGQQLTDWAKRWRQLIEKGPQYGSLERAWGAIMTEADKVSELHQEVKNNLLNEDLEKVKNWQKDAYHKQIMGGFKETKEAEDGFRKAQKPWAKKMKELEAAKKAYHLACKEEKLAMTREMNSKTEQSVTPEQQKKLQDKVDKCKQDVQKTQEKYEKVLEDVGKTTPQYMENMEQVFEQCQQFEEKRLVFLKEVLLDIKRHLNLAENSSYIHVYRELEQAIRGADAQEDLRWFRSTSGPGMPMNWPQFEEWNPDLPHTTTKKEKQPKKAEGVALTNATGAVESTSQAGDRGSVSSYDRGQPYATEWSDDESGNPFGGSETNGGANPFEDDSKGVRVRALYDYDGQEQDELSFKAGDELTKLGEEDEQGWCRGRLDSGQLGLYPANYVEAI

SEQ ID NO: 68151 - protein, 402 aa, Homo sapiens
  Payload ID: 13584
  Gene Symbol: PACSIN1
  Gene Name: protein kinase C and casein kinase substrate in neurons 1
  ENSP ID: ENSP00000363155
MNCVQERAKIEKAYGQQLTDWAKRWRQLIEKGPQYGSLERAWGAIMTEADKVSELHQEVKNNLLNEDLEKVKNWQKDAYHKQIMGGFKETKEAEDGFRKAQKPWAKKMKELEAAKKAYHLACKEEKLAMTREMNSKTEQSVTPEQQKKLQDKVDKCKQDVQKTQEKYEKVLEDVGKTTPQYMENMEQVFEQCQQFEEKRLVFLKEVLLDIKRHLNLAENSSYIHVYRELEQAIRGADAQEDLRWFRSTSGPGMPMNWPQFEEWNPDLPHTTTKKEKQPKKAEGVALTNATGAVESTSQAGDRGSVSSYDRGQPYATEWSDDESGNPFGGSETNGGANPFEDDSKGVRVRALYDYDGQEQDELSFKAGDELTKLGEEDEQGWCRGRLDSGQLGLYPANYVEAI

SEQ ID NO: 68152 - protein, 444 aa, Homo sapiens; identical to SEQ ID NO: 68150
  Payload ID: 13584
  Gene Symbol: PACSIN1
  Gene Name: protein kinase C and casein kinase substrate in neurons 1
  Uniprot ID: Q9BY11
  ENSP ID: ENSP00000439639

SEQ ID NO: 68153 - protein, 444 aa, Homo sapiens; identical to SEQ ID NO: 68150
  Payload ID: 13584
  Gene Symbol: PACSIN1
  Gene Name: protein kinase C and casein kinase substrate in neurons 1
  Uniprot ID: Q9BY11
  ENSP ID: ENSP00000484060

SEQ ID NO: 68154 - protein, 486 aa, Homo sapiens
  Payload ID: 13585
  Gene Symbol: PACSIN2
  Gene Name: protein kinase C and casein kinase substrate in neurons 2
  Uniprot ID: Q9UNF0
  ENSP ID: ENSP00000263246
MSVTYDDSVGVEVSSDSFWEVGNYKRTVKRIDDGHRLCSDLMNCLHERARIEKAYAQQLTEWARRWRQLVEKGPQYGTVEKAWMAFMSEAERVSELHLEVKASLMNDDFEKIKNWQKEAFHKQMMGGFKETKEAEDGFRKAQKPWAKKLKEVEAAKKAHHAACKEEKLAISREANSKADPSLNPEQLKKLQDKIEKCKQDVLKTKEKYEKSLKELDQGTPQYMENMEQVFEQCQQFEEKRLRFFREVLLEVQKHLDLSNVAGYKAIYHDLEQSIRAADAVEDLRWFRANHGPGMAMNWPQFEEWSADLNRTLSRREKKKATDGVTLTGINQTGDQSLPSKPSSTLNVPSNPAQSAQSQSSYNPFEDEDDTGSTVSEKDDTKAKNVSSYEKTQSYPTDWSDDESNNPFSSTDANGDSNPFDDDATSGTEVRVRALYDYEGQEHDELSFKAGDELTKMEDEDEQGWCKGRLDNGQVGLYPANYVEAIQ

SEQ ID NO: 68155 - protein, 445 aa, Homo sapiens
  Payload ID: 13585
  Gene Symbol: PACSIN2
  Gene Name: protein kinase C and casein kinase substrate in neurons 2
  Uniprot ID: Q9UNF0
  ENSP ID: ENSP00000338379
MSVTYDDSVGVEVSSDSFWEVGNYKRTVKRIDDGHRLCSDLMNCLHERARIEKAYAQQLTEWARRWRQLVEKGPQYGTVEKAWMAFMSEAERVSELHLEVKASLMNDDFEKIKNWQKEAFHKQMMGGFKETKEAEDGFRKAQKPWAKKLKEVEAAKKAHHAACKEEKLAISREANSKADPSLNPEQLKKLQDKIEKCKQDVLKTKEKYEKSLKELDQGTPQYMENMEQVFEQCQQFEEKRLRFFREVLLEVQKHLDLSNVAGYKAIYHDLEQSIRAADAVEDLRWFRANHGPGMAMNWPQFEEWSADLNRTLSRREKKKATDGVTLTGINQTGDQSLPSKPSSVSSYEKTQSYPTDWSDDESNNPFSSTDANGDSNPFDDDATSGTEVRVRALYDYEGQEHDELSFKAGDELTKMEDEDEQGWCKGRLDNGQVGLYPANYVEAIQ

SEQ ID NO: 68156 - protein, 486 aa, Homo sapiens; identical to SEQ ID NO: 68154
  Payload ID: 13585
  Gene Symbol: PACSIN2
  Gene Name: protein kinase C and casein kinase substrate in neurons 2
  Uniprot ID: Q9UNF0
  ENSP ID: ENSP00000385040

SEQ ID NO: 68157 - protein, 486 aa, Homo sapiens; identical to SEQ ID NO: 68154
  Payload ID: 13585
  Gene Symbol: PACSIN2
  Gene Name: protein kinase C and casein kinase substrate in neurons 2
  Uniprot ID: Q9UNF0
  ENSP ID: ENSP00000385372

SEQ ID NO: 68158 - protein, 445 aa, Homo sapiens; identical to SEQ ID NO: 68155
  Payload ID: 13585
  Gene Symbol: PACSIN2
  Gene Name: protein kinase C and casein kinase substrate in neurons 2
  Uniprot ID: Q9UNF0
  ENSP ID: ENSP00000385952

SEQ ID NO: 68159 - protein, 152 aa, Homo sapiens
  Payload ID: 13585
  Gene Symbol: PACSIN2
  Gene Name: protein kinase C and casein kinase substrate in neurons 2
  ENSP ID: ENSP00000396816
MSVTYDDSVGVEVSSDSFWEVGNYKRTVKRIDDGHRLCSDLMNCLHERARIEKAYAQQLTEWARRWRQLVEKGPQYGTVEKAWMAFMSEAERVSELHLEVKASLMNDDFEKIKNWQKEAFHKQMMGGFKETKEAEDGFRKAQKPWAKKLKEV

SEQ ID NO: 68160 - protein, 155 aa, Homo sapiens
  Payload ID: 13585
  Gene Symbol: PACSIN2
  Gene Name: protein kinase C and casein kinase substrate in neurons 2
  ENSP ID: ENSP00000398573
MSVTYDDSVGVEVSSDSFWEVGNYKRTVKRIDDGHRLCSDLMNCLHERARIEKAYAQQLTEWARRWRQLVEKGPQYGTVEKAWMAFMSEAERVSELHLEVKASLMNDDFEKIKNWQKEAFHKQMMGGFKETKEAEDGFRKAQKPWAKKLKEVHLS

SEQ ID NO: 68161 - protein, 33 aa, Homo sapiens
  Payload ID: 13585
  Gene Symbol: PACSIN2
  Gene Name: protein kinase C and casein kinase substrate in neurons 2
  ENSP ID: ENSP00000399953
MSVTYDDSVGVEVSSDSFWEVGNYKRTVKRIDD

SEQ ID NO: 68162 - protein, 152 aa, Homo sapiens; identical to SEQ ID NO: 68159
  Payload ID: 13585
  Gene Symbol: PACSIN2
  Gene Name: protein kinase C and casein kinase substrate in neurons 2
  ENSP ID: ENSP00000403435

SEQ ID NO: 68163 - protein, 59 aa, Homo sapiens
  Payload ID: 13585
  Gene Symbol: PACSIN2
  Gene Name: protein kinase C and casein kinase substrate in neurons 2
  ENSP ID: ENSP00000422788
  MOD_RES (1)..(1): Any amino acid
XTEVRVRALYDYEGQEHDELSFKAETGFHHIIQSGLELLSSSDPPASASQSAGITGMSP

SEQ ID NO: 68164 - protein, 451 aa, Homo sapiens
  Payload ID: 13585
  Gene Symbol: PACSIN2
  Gene Name: protein kinase C and casein kinase substrate in neurons 2
  ENSP ID: ENSP00000489297
MSVTYDDSVGVEVSSDSFWEVGNYKRTVKRIDDGHRLCSDLMNCLHERARIEKAYAQQLTEWARRWRQLVEKGPQYGTVEKAWMAFMSEAERVSELHLEVKASLMNDDFEKIKNWQKEAFHKQMMGGFKETKEAEDGFRKAQKPWAKKLKEVEAAKKAHHAACKEEKLAISREANSKADPSLNPEQLKKLQDKIEKCKQDVLKTKEKYEKSLKELDQGTPQYMENMEQVFEQCQQFEEKRLRFFREVLLEVQKHLDLSNVAGYKAIYHDLEQSIRAADAVEDLRWFRANHGPGMAMNWPQFEDEEWSADLNRTLSRREKKKATDGVTLTGINQTGDQSLPSKPSSTLNVPSNPAQSAQSQSSYNPFEDEDDTGSTVSEKDDTKAKNVSSYEKTQSYPTDWSDDESNNPFSSTDANGDSNPFDDDATSGTEVRVRALYDYEGQEHDELSFKA

SEQ ID NO: 68165 - protein, 424 aa, Homo sapiens [sequence omitted]

SEQ ID NO: 68166 - protein, 69 aa, Homo sapiens
  Payload ID: 13586
  Gene Symbol: PACSIN3
  Gene Name: protein kinase C and casein kinase substrate in neurons 3
  ENSP ID: ENSP00000431861
MAPEEDAGGEALGGSFWEAGNYRRTVQRVEDGHRLCGDLVSCFQERARIEKAYAQQLADWARKWRGTVE

SEQ ID NO: 68167 - protein, 48 aa, Homo sapiens
  Payload ID: 13586
  Gene Symbol: PACSIN3
  Gene Name: protein kinase C and casein kinase substrate in neurons 3
  ENSP ID: ENSP00000431924
MEDMEQAFETCQAAERQRLLFFKDMLLTLHQHLDLSSSEKFHELHRDL

SEQ ID NO: 68168 - protein, 320 aa, Homo sapiens
  Payload ID: 13586
  Gene Symbol: PACSIN3
  Gene Name: protein kinase C and casein kinase substrate in neurons 3
  ENSP ID: ENSP00000431948
MAPEEDAGGEALGGSFWEAGNYRRTVQRVEDGHRLCGDLVSCFQERARIEKAYAQQLADWARKWRGTVEKGPQYGTLEKAWHAFFTAAERLSALHLEVREKLQGQDSERVRAWQRGAFHRPVLGGFRESRAAEDGFRKAQKPWLKRLKEVEASKKSYHAARKDEKTAQTRESHAKADSAVSQEQLRKLQERVERCAKEAEKTKAQYEQTLAELHRYTPRYMEDMEQAFETCQAAERQRLLFFKDMLLTLHQHLDLSSSEKFHELHRDLHQGIEAASDEEDLRWWRSTHGPGMAMNWPQFEALVLGHTEDNQPEREGWPEP

SEQ ID NO: 68169 - protein, 76 aa, Homo sapiens
  Payload ID: 13586
  Gene Symbol: PACSIN3
  Gene Name: protein kinase C and casein kinase substrate in neurons 3
  ENSP ID: ENSP00000433962
  MOD_RES (1)..(1): Any amino acid
XEDLRWWRSTHGPGMAMNWPQFEEWSLDTQRTISRKEKGGRSPDEVTLTSIVPTRDGTAPPPQSPGSPGGGAAEDE

SEQ ID NO: 68170 - protein, 36 aa, Homo sapiens
  Payload ID: 13586
  Gene Symbol: PACSIN3
  Gene Name: protein kinase C and casein kinase substrate in neurons 3
  ENSP ID: ENSP00000434521
MEDMEQAFETCQAAERQRLLFFKDMLLTLHQHLDLS

SEQ ID NO: 68171 - protein, 148 aa, Homo sapiens
  Payload ID: 13586
  Gene Symbol: PACSIN3
  Gene Name: protein kinase C and casein kinase substrate in neurons 3
  ENSP ID: ENSP00000434699
MAPEEDAGGEALGGSFWEAGNYRRTVQRVEDGHRLCGDLVSCFQERARIEKAYAQQLADWARKWRGTVEKGPQYGTLEKAWHAFFTAAERLSALHLEVREKLQGQDSERVRAWQRGAFHRPVLGGFRESRAAEDGFRKAQKPWLKRLK

SEQ ID NO: 68172 - protein, 142 aa, Homo sapiens
  Payload ID: 13586
  Gene Symbol: PACSIN3
  Gene Name: protein kinase C and casein kinase substrate in neurons 3
  ENSP ID: ENSP00000435638
MAPEEDAGGEALGGSFWEAGNYRRTVQRVEDGHRLCGDLVSCFQERARIEKAYAQQLADWARKWRGTVEKGPQYGTLEKAWHAFFTAAERLSALHLEVREKLQGQDSERVRAWQRGAFHRPVLGGFRESRAAEDGFRKAQKP

SEQ ID NO: 68173 - protein, 69 aa, Homo sapiens; identical to SEQ ID NO: 68166
  Payload ID: 13586
  Gene Symbol: PACSIN3
  Gene Name: protein kinase C and casein kinase substrate in neurons 3
  ENSP ID: ENSP00000435672

SEQ ID NO: 68174 - protein, 405 aa, Homo sapiens
  Payload ID: 13586
  Gene Symbol: PACSIN3
  Gene Name: protein kinase C and casein kinase substrate in neurons 3
  ENSP ID: ENSP00000437252
MAPEEDAGGEALGGSFWEAGNYRRTVQRVEDGHRLCGDLVSCFQERARIEKAYAQQLADWARKWRGTVEKGPQYGTLEKAWHAFFTAAERLSALHLEVREKLQGQDSERVRAWQRGAFHRPVLGGFRESRAAEDGFRKAQKPWLKRLKEVEASKKSYHAARKDEKTAQTRESHAKADSAVSQEQLRKLQERVERCAKEAEKTKAQYEQTLAELHRYTPRYMEDMEQAFETCQAAERQRLLFFKDMLLTLHQHLDLSSSEKFHELHRDLHQGIEAASDEEDLRWWRSTHGPGMAMNWPQFEEWSLDTQRTISRKEKGGRSPDEVTLTSIVPTRDGTAPPPQSPGSPGTGQDEEWSDEESPRKAATGVRVRALYDYAGQEADELSFRAGEELLKMSEEDEQGWCQGQ

SEQ ID NO: 68175 - protein, 424 aa, Homo sapiens [sequence omitted]

SEQ ID NO: 68176 - protein, 62 aa, Homo sapiens
  Payload ID: 13587
  Gene Symbol: PRKCSH
  Gene Name: protein kinase C substrate 80K-H
  ENSP ID: ENSP00000464835
MLLPLLLLLPMCWAVEVKRPRGVSLTNHHFYDESKPFTCLDGSATIPFDQVNDDYCDCKDGS

SEQ ID NO: 68177 - protein, 144 aa, Homo sapiens
  Payload ID: 13587
  Gene Symbol: PRKCSH
  Gene Name: protein kinase C substrate 80K-H
  ENSP ID: ENSP00000465047
MLLPLLLLLPMCWAVEVKRPRGVSLTNHHFYDESKPFTCLDGSATIPFDQVNDDYCDCKDGSDEPGTAACPNGSFHCTNTGYKPLYIPSNRVNDGVCDCCDGTDEYNSGVICENTCKEKGRKERESLQQMAEVTREGFRLKKIL

SEQ ID NO: 68178 - protein, 528 aa, Homo sapiens
  Payload ID: 13587
  Gene Symbol: PRKCSH
  Gene Name: protein kinase C substrate 80K-H
  Uniprot ID: P14314
  ENSP ID: ENSP00000465461
MLLPLLLLLPMCWAVEVKRPRGVSLTNHHFYDESKPFTCLDGSATIPFDQVNDDYCDCKDGSDEPGTAACPNGSFHCTNTGYKPLYIPSNRVNDGVCDCCDGTDEYNSGVICENTCKEKGRKERESLQQMAEVTREGFRLKKILIEDWKKAREEKQKKLIELQAGKKSLEDQVEMLRTVKEEAEKPEREAKEQHQKLWEEQLAAAKAQQEQELAADAFKELDDDMDGTVSVTELQTHPELDTDGDGALSEAEAQALLSGDTQTDATSFYDRVWAAIRDKYRSEALPTDLPAPSAPDLTEPKEEQPPVPSSPTEEEEEEEEEEEEEAEEEEEEEDSEEAPPPLSPPQPASPAEEDKMPPYDEQTQAFIDAAQEARNKFEEAERSLKDMEESIRNLEQEISFDFGPNGEFAYLYSQCYELTTNEYVYRLCPFKLVSQKPKLGGSPTSLGTWGSWIGPDHDKFSAMKYEQGTGCWQGPNRSTTVRLLCGKETMVTSTTEPSRCEYLMELMTPAACPEPPPEAPTEDDHDEL

SEQ ID NO: 68179 - protein, 525 aa, Homo sapiens
  Payload ID: 13587
  Gene Symbol: PRKCSH
  Gene Name: protein kinase C substrate 80K-H
  Uniprot ID: P14314
  ENSP ID: ENSP00000465489
MLLPLLLLLPMCWAVEVKRPRGVSLTNHHFYDESKPFTCLDGSATIPFDQVNDDYCDCKDGSDEPGTAACPNGSFHCTNTGYKPLYIPSNRVNDGVCDCCDGTDEYNSGVICENTCKEKGRKERESLQQMAEVTREGFRLKKILIEDWKKAREEKQKKLIELQAGKKSLEDQVEMLRTVKEEAEKPEREAKEQHQKLWEEQLAAAKAQQEQELAADAFKELDDDMDGTVSVTELQTHPELDTDGDGALSEAEAQALLSGDTQTDATSFYDRVWAAIRDKYRSEALPTDLPAPSAPDLTEPKEEQPPVPSSPTEEEEEEEEEEEEEAEEEEEEEDSEVQGEQPKPASPAEEDKMPPYDEQTQAFIDAAQEARNKFEEAERSLKDMEESIRNLEQEISFDFGPNGEFAYLYSQCYELTTNEYVYRLCPFKLVSQKPKLGGSPTSLGTWGSWIGPDHDKFSAMKYEQGTGCWQGPNRSTTVRLLCGKETMVTSTTEPSRCEYLMELMTPAACPEPPPEAPTEDDHDEL

SEQ ID NO: 68180 - protein, 140 aa, Homo sapiens
  Payload ID: 13587
  Gene Symbol: PRKCSH
  Gene Name: protein kinase C substrate 80K-H
  ENSP ID: ENSP00000465821
MLLPLLLLLPMCWAVEVKRPRGVSLTNHHFYDESKPFTCLDGSATIPFDQVNDDYCDCKDGSDEPGTAACPNGSFHCTNTGYKPLYIPSNRVNDGVCDCCDGTDEYNSGVICENTCKEKGRKERESLQQMAEVTREGFRL

SEQ ID NO: 68181 - protein, 132 aa, Homo sapiens
  Payload ID: 13587
  Gene Symbol: PRKCSH
  Gene Name: protein kinase C substrate 80K-H
  ENSP ID: ENSP00000465889
MLLPLLLLLPMCWAVEVKRPRGVSLTSESSCSPSRQAGGGRGQHWALGIGIYSLLTQFPGSAPLVGMGGQRWYLVEKALTCPGLSFLYPADHHFYDESKPFTCLDGSATIPFDQVNDDYCDCKDGSDEPGTA

SEQ ID NO: 68182 - protein, 200 aa, Homo sapiens
  Payload ID: 13587
  Gene Symbol: PRKCSH
  Gene Name: protein kinase C substrate 80K-H
  ENSP ID: ENSP00000465948
AEEEEEEEDSEVQGEQPKPASPAEEDKMPPYDEQTQAFIDAAQEARNKFEEAERSLKDMEESIRNLEQEISFDFGPNGEFAYLYSQCYELTTNEYVYRLCPFKLVSQKPKLGGSPTSLGTWGSWIGPDHDKFSAMKYEQGTGCWQGPNRSTTVRLLCGKETMVTSTTEPSRCEYLMELMTPAACPEPPPEAPTEDDHDEL

SEQ ID NO: 68183 - protein, 525 aa, Homo sapiens; identical to SEQ ID NO: 68179
  Payload ID: 13587
  Gene Symbol: PRKCSH
  Gene Name: protein kinase C substrate 80K-H
  Uniprot ID: P14314
  ENSP ID: ENSP00000466012

SEQ ID NO: 68184 - protein, 535 aa, Homo sapiens
  Payload ID: 13587
  Gene Symbol: PRKCSH
  Gene Name: protein kinase C substrate 80K-H
  ENSP ID: ENSP00000466134
MLLPLLLLLPMCWAVEVKRPRGVSLTNHHFYDESKPFTCLDGSATIPFDQVNDDYCDCKDGSDEPGTAACPNGSFHCTNTGYKPLYIPSNRVNDGVCDCCDGTDEYNSGVICENTCKEKGRKERESLQQMAEVTREGFRLKKILIEDWKKAREEKQKKLIELQAGKKSLEDQVEMLRTVKEEAEKPEREAKEQHQKLWEEQLAAAKAQQEQELAADAFKELDDDMDGTVSVTELQTHPELDTDGDGALSEAEAQALLSGDTQTDATSFYDRVWAAIRDKYRSEALPTDLPAPSAPDLTEPKEEQPPVPSSPTEEEEEEEEEEEEEAEEEEEEEDSEVQGEQPKEAPPPLSPPQPASPAEEDKMPPYDEQTQAFIDAAQEARNKFEEAERSLKDMEESIRNLEQEISFDFGPNGEFAYLYSQCYELTTNEYVYRLCPFKLVSQKPKLGGSPTSLGTWGSWIGPDHDKFSAMKYEQGTGCWQGPNRSTTVRLLCGKETMVTSTTEPSRCEYLMELMTPAACPEPPPEAPTEDDHDEL

SEQ ID NO: 68185 - protein, 168 aa, Homo sapiens
  Payload ID: 13587
  Gene Symbol: PRKCSH
  Gene Name: protein kinase C substrate 80K-H
  ENSP ID: ENSP00000467566
MLLPLLLLLPMCWAVEVKRPRGVSLTNHHFYDESKPFTCLDGSATIPFDQVNDDYCDCKDGSDEPGTAACPNGSFHCTNTGYKPLYIPSNRVNDGVCDCCDGTDEYNSGVICENTCKEKGRKERESLQQMAEVTREGFRLKKILIEDWKKAREEKQKKLIELQAGKKS

SEQ ID NO: 68186 - protein, 150 aa, Homo sapiens
  Payload ID: 13588
  Gene Symbol: PRKCA
  Gene Name: protein kinase C, alpha
  ENSP ID: ENSP00000284384
  MOD_RES (1)..(1): Any amino acid
XVFPGNDSTASQDVANRFARKGALRQKNVHEVKDHKFIARFFKQPTFCSHCTDFIWGFGKQGFQCQVCCFVVHKRCHEFVTFSCPGADKGPDTDLFSPVLLVCLYLLRSYSLSEGPQEQAQVQNPHLRKPHLLRSLWVTALWTYPSRDEM

SEQ ID NO: 68187 - protein, 672 aa, Homo sapiens
  Payload ID: 13588
  Gene Symbol: PRKCA
  Gene Name: protein kinase C, alpha
  Uniprot ID: P17252
  ENSP ID: ENSP00000408695
MADVFPGNDSTASQDVANRFARKGALRQKNVHEVKDHKFIARFFKQPTFCSHCTDFIWGFGKQGFQCQVCCFVVHKRCHEFVTFSCPGADKGPDTDDPRSKHKFKIHTYGSPTFCDHCGSLLYGLIHQGMKCDTCDMNVHKQCVINVPSLCGMDHTEKRGRIYLKAEVADEKLHVTVRDAKNLIPMDPNGLSDPYVKLKLIPDPKNESKQKTKTIRSTLNPQWNESFTFKLKPSDKDRRLSVEIWDWDRTTRNDFMGSLSFGVSELMKMPASGWYKLLNQEEGEYYNVPIPEGDEEGNMELRQKFEKAKLGPAGNKVISPSEDRKQPSNNLDRVKLTDFNFLMVLGKGSFGKVMLADRKGTEELYAIKILKKDVVIQDDDVECTMVEKRVLALLDKPPFLTQLHSCFQTVDRLYFVMEYVNGGDLMYHIQQVGKFKEPQAVFYAAEISIGLFFLHKRGIIYRDLKLDNVMLDSEGHIKIADFGMCKEHMMDGVTTRTFCGTPDYIAPEIIAYQPYGKSVDWWAYGVLLYEMLAGQPPFDGEDEDELFQSIMEHNVSYPKSLSKEAVSVCKGLMTKHPAKRLGCGPEGERDVREHAFFRRIDWEKLENREIQPPFKPKVCGKGAENFDKFFTRGQPVLTPPDQLVIANIDQSDFEGFSYVNPQFVHPILQSAV

SEQ ID NO: 68188 - protein, 308 aa, Homo sapiens
  Payload ID: 13588
  Gene Symbol: PRKCA
  Gene Name: protein kinase C, alpha
  ENSP ID: ENSP00000462087
MADVFPGNDSTASQDVANRFARKGALRQKNVHEVKDHKFIARFFKQPTFCSHCTDFIWGFGKQGFQCQVCCFVVHKRCHEFVTFSCPGADKGPDTDDPRSKHKFKIHTYGSPTFCDHCGSLLYGLIHQGMKCDTCDMNVHKQCVINVPSLCGMDHTEKRGRIYLKAEVADEKLHVTVRDAKNLIPMDPNGLSDPYVKLKLIPDPKNESKQKTKTIRSTLNPQWNESFTFKLKPSDKDRRLSVEIWDWDRTTRNDFMGSLSFGVSELMKMPASGWYKLLNQEEGEYYNVPIPEGDEEGNMELRQKFEWR

SEQ ID NO: 68189 - protein, 673 aa, Homo sapiens
  Payload ID: 13589
  Gene Symbol: PRKCB
  Gene Name: protein kinase C, beta
  Uniprot ID: P05771
  ENSP ID: ENSP00000305355
MADPAAGPPPSEGEESTVRFARKGALRQKNVHEVKNHKFTARFFKQPTFCSHCTDFIWGFGKQGFQCQVCCFVVHKRCHEFVTFSCPGADKGPASDDPRSKHKFKIHTYSSPTFCDHCGSLLYGLIHQGMKCDTCMMNVHKRCVMNVPSLCGTDHTERRGRIYIQAHIDRDVLIVLVRDAKNLVPMDPNGLSDPYVKLKLIPDPKSESKQKTKTIKCSLNPEWNETFRFQLKESDKDRRLSVEIWDWDLTSRNDFMGSLSFGISELQKASVDGWFKLLSQEEGEYFNVPVPPEGSEANEELRQKFERAKISQGTKVPEEKTTNTVSKFDNNGNRDRMKLTDFNFLMVLGKGSFGKVMLSERKGTDELYAVKILKKDVVIQDDDVECTMVEKRVLALPGKPPFLTQLHSCFQTMDRLYFVMEYVNGGDLMYHIQQVGRFKEPHAVFYAAEIAIGLFFLQSKGIIYRDLKLDNVMLDSEGHIKIADFGMCKENIWDGVTTKTFCGTPDYIAPEIIAYQPYGKSVDWWAFGVLLYEMLAGQAPFEGEDEDELFQSIMEHNVAYPKSMSKEAVAICKGLMTKHPGKRLGCGPEGERDIKEHAFFRYIDWEKLERKEIQPPYKPKACGRNAENFDRFFTRHPPVLTPPDQEVIRNIDQSEFEGFSFVNSEFLKPEVKS

SEQ ID NO: 68190 - protein, 671 aa, Homo sapiens
  Payload ID: 13589
  Gene Symbol: PRKCB
  Gene Name: protein kinase C, beta
  Uniprot ID: P05771
  ENSP ID: ENSP00000318315
MADPAAGPPPSEGEESTVRFARKGALRQKNVHEVKNHKFTARFFKQPTFCSHCTDFIWGFGKQGFQCQVCCFVVHKRCHEFVTFSCPGADKGPASDDPRSKHKFKIHTYSSPTFCDHCGSLLYGLIHQGMKCDTCMMNVHKRCVMNVPSLCGTDHTERRGRIYIQAHIDRDVLIVLVRDAKNLVPMDPNGLSDPYVKLKLIPDPKSESKQKTKTIKCSLNPEWNETFRFQLKESDKDRRLSVEIWDWDLTSRNDFMGSLSFGISELQKASVDGWFKLLSQEEGEYFNVPVPPEGSEANEELRQKFERAKISQGTKVPEEKTTNTVSKFDNNGNRDRMKLTDFNFLMVLGKGSFGKVMLSERKGTDELYAVKILKKDVVIQDDDVECTMVEKRVLALPGKPPFLTQLHSCFQTMDRLYFVMEYVNGGDLMYHIQQVGRFKEPHAVFYAAEIAIGLFFLQSKGIIYRDLKLDNVMLDSEGHIKIADFGMCKENIWDGVTTKTFCGTPDYIAPEIIAYQPYGKSVDWWAFGVLLYEMLAGQAPFEGEDEDELFQSIMEHNVAYPKSMSKEAVAICKGLMTKHPGKRLGCGPEGERDIKEHAFFRYIDWEKLERKEIQPPYKPKARDKRDTSNFDKEFTRQPVELTPTDKLFIMNLDQNEFAGFSYTNPEFVINV

SEQ ID NO: 68191 - protein, 57 aa, Homo sapiens
  Payload ID: 13589
  Gene Symbol: PRKCB
  Gene Name: protein kinase C, beta
  ENSP ID: ENSP00000454428
MADPAAGPPPSEGEESTVRFARKGALRQKNVHEVKNHKFTARFFKQPTFCSHCTDFI

SEQ ID NO: 68192 - protein, 130 aa, Homo sapiens
  Payload ID: 13589
  Gene Symbol: PRKCB
  Gene Name: protein kinase C, beta
  ENSP ID: ENSP00000457980
MGVMLSERKGTDELYAVKILKKDVVIQDDDVECTMVEKRVLALPGKPPFLTQLHSCFQTMDRLYFVMEYVNGGDLMYHIQQVGRFKEPHAVFYAAEIAIGLFFLQSKGIIYRDLKLDNVMLDSEGHIKIA

SEQ ID NO: 68193 - protein, 122 aa, Homo sapiens
  Payload ID: 13589
  Gene Symbol: PRKCB
  Gene Name: protein kinase C, beta
  ENSP ID: ENSP00000458564
  MOD_RES (1)..(1): Any amino acid
XSMSKEAVAICKGLMTKHPGKRLGCGPEGERDIKEHAFFRYIDWEKLERKEIQPPYKPKAVSSPFSLTAGYSHTRYSCLCLMFSKCSLRGRRQCVYWNMGVCIHTYAQNHWLLRWTFSIGPA

SEQ ID NO: 68194 - protein, 119 aa, Homo sapiens
  Payload ID: 13589
  Gene Symbol: PRKCB
  Gene Name: protein kinase C, beta
  ENSP ID: ENSP00000459227
MDPNGLSDPYVKLKLIPDPKSESKQKTKTIKCSLNPEWNETFRFQLKESDKDRRLSVEIWDWDLTSRNDFMGSLSFGISELQKASVDGWFKLLSQEEGEYFNVPVPPEGSEANEELRQK

SEQ ID NO: 68195 - protein, 676 aa, Homo sapiens
  Payload ID: 13590
  Gene Symbol: PRKCD
  Gene Name: protein kinase C, delta
  Uniprot ID: Q05655
  ENSP ID: ENSP00000331602
MAPFLRIAFNSYELGSLQAEDEANQPFCAVKMKEALSTERGKTLVQKKPTMYPEWKSTFDAHIYEGRVIQIVLMRAAEEPVSEVTVGVSVLAERCKKNNGKAEFWLDLQPQAKVLMSVQYFLEDVDCKQSMRSEDEAKFPTMNRRGAIKQAKIHYIKNHEFIATFFGQPTFCSVCKDFVWGLNKQGYKCRQCNAAIHKKCIDKIIGRCTGTAANSRDTIFQKERFNIDMPHRFKVHNYMSPTFCDHCGSLLWGLVKQGLKCEDCGMNVHHKCREKVANLCGINQKLLAEALNQVTQRASRRSDSASSEPVGIYQGFEKKTGVAGEDMQDNSGTYGKIWEGSSKCNINNFIFHKVLGKGSFGKVLLGELKGRGEYFAIKALKKDVVLIDDDVECTMVEKRVLTLAAENPFLTHLICTFQTKDHLFFVMEFLNGGDLMYHIQDKGRFELYRATFYAAEIMCGLQFLHSKGIIYRDLKLDNVLLDRDGHIKIADFGMCKENIFGESRASTFCGTPDYIAPEILQGLKYTFSVDWWSFGVLLYEMLIGQSPFHGDDEDELFESIRVDTPHYPRWITKESKDILEKLFEREPTKRLGVTGNIKIHPFFKTINWTLLEKRRLEPPFRPKVKSPRDYSNFDQEFLNEKARLSYSDKNLIDSMDQSAFAGFSFVNPKFEHLLED

SEQ ID NO: 68196 - protein, 676 aa, Homo sapiens; identical to SEQ ID NO: 68195
  Payload ID: 13590
  Gene Symbol: PRKCD
  Gene Name: protein kinase C, delta
  Uniprot ID: Q05655
  ENSP ID: ENSP00000378217

SEQ ID NO: 68197 - protein, 125 aa, Homo sapiens
  Payload ID: 13590
  Gene Symbol: PRKCD
  Gene Name: protein kinase C, delta
  ENSP ID: ENSP00000418106
MAPFLRIAFNSYELGSLQAEDEANQPFCAVKMKEALSTERGKTLVQKKPTMYPEWKSTFDAHIYEGRVIQIVLMRAAEEPVSEVTVGVSVLAERCKKNNGKAEFWLDLQPQAKVLMSVQYFLEDV

SEQ ID NO: 68198 - protein, 223 aa, Homo sapiens
  Payload ID: 13590
  Gene Symbol: PRKCD
  Gene Name: protein kinase C, delta
  ENSP ID: ENSP00000419629
MAPFLRIAFNSYELGSLQAEDEANQPFCAVKMKEALSTERGKTLVQKKPTMYPEWKSTFDAHIYEGRVIQIVLMRAAEEPVSEVTVGVSVLAERCKKNNGKAEFWLDLQPQAKVLMSVQYFLEDVDCKQSMRSEDEAKFPTMNRRGAIKQAKIHYIKNHEFIATFFGQPTFCSVCKDFVWGLNKQGYKCRHCGMNVHHKCREKVANLCGINQKLLAEALNQVT

SEQ ID NO: 68199 - protein, 77 aa, Homo sapiens
  Payload ID: 13590
  Gene Symbol: PRKCD
  Gene Name: protein kinase C, delta
  ENSP ID: ENSP00000419726
MAPFLRIAFNSYELGSLQAEDEANQPFCAVKMKEALSTERGKTLVQKKPTMYPEWKSTFDAHIYEGRVIQIVLMRAA

SEQ ID NO: 68200 - protein, 261 aa, Homo sapiens
  Payload ID: 13591
  Gene Symbol: PRKCDBP
  Gene Name: protein kinase C, delta binding protein
  Uniprot ID: Q969G5
  ENSP ID: ENSP00000307292
MRESALERGPVPEAPAGGPVHAVTVVTLLEKLASMLETLRERQGGLARRQGGLAGSVRRIQSGLGALSRSHDTTSNTLAQLLAKAERVSSHANAAQERAVRRAAQVQRLEANHGLLVARGKLHVLLFKEEGEVPASAFQKAPEPLGPADQSELGPEQLEAEVGESSDEEPVESRAQRLRRTGLQKVQSLRRALSGRKGPAAPPPTPVKPPRLGPGRSAEAQPEAQPALEPTLEPEPPQDTEEDPGRPGAAEEALLQMESVA

SEQ ID NO: 68201 - protein, 293 aa, Homo sapiens
  Payload ID: 13591
  Gene Symbol: PRKCDBP
  Gene Name: protein kinase C, delta binding protein
  ENSP ID: ENSP00000432047
MRESALERGPVPEAPAGGPVHAVTVVTLLEKLASMLETLRERQGGLARRQGGLAGSVRRIQSGLGALSRSHDTTSNTLAQLLAKAERVSSHANAAQERAVRRAAQVQRLEANHGLLVARGKLHVLLFKASPTLQRFAVRTQLSLPLPSHACLSPQTLAAEEEGEVPASAFQKAPEPLGPADQSELGPEQLEAEVGESSDEEPVESRAQRLRRTGLQKVQSLRRALSGRKGPAAPPPTPVKPPRLGPGRSAEAQPEAQPALEPTLEPEPPQDTEEDPGRPGAAEEALLQMESVA

SEQ ID NO: 68202 - protein, 737 aa, Homo sapiens
  Payload ID: 13592
  Gene Symbol: PRKCE
  Gene Name: protein kinase C, epsilon
  Uniprot ID: Q02156
  ENSP ID: ENSP00000306124
MVVFNGLLKIKICEAVSLKPTAWSLRHAVGPRPQTFLLDPYIALNVDDSRIGQTATKQKTNSPAWHDEFVTDVCNGRKIELAVFHDAPIGYDDFVANCTIQFEELLQNGSRHFEDWIDLEPEGRVYVIIDLSGSSGEAPKDNEERVFRERMRPRKRQGAVRRRVHQVNGHKFMATYLRQPTYCSHCRDFIWGVIGKQGYQCQVCTCVVHKRCHELIITKCAGLKKQETPDQVGSQRFSVNMPHKFGIHNYKVPTFCDHCGSLLWGLLRQGLQCKVCKMNVHRRCETNVAPNCGVDARGIAKVLADLGVTPDKITNSGQRRKKLIAGAESPQPASGSSPSEEDRSKSAPTSPCDQEIKELENNIRKALSFDNRGEEHRAASSPDGQLMSPGENGEVRQGQAKRLGLDEFNFIKVLGKGSFGKVMLAELKGKDEVYAVKVLKKDVILQDDDVDCTMTEKRILALARKHPYLTQLYCCFQTKDRLFFVMEYVNGGDLMFQIQRSRKFDEPRSRFYAAEVTSALMFLHQHGVIYRDLKLDNILLDAEGHCKLADFGMCKEGILNGVTTTTFCGTPDYIAPEILQELEYGPSVDWWALGVLMYEMMAGQPPFEADNEDDLFESILHDDVLYPVWLSKEAVSILKAFMTKNPHKRLGCVASQNGEDAIKQHPFFKEIDWVLLEQKKIKPPFKPRIKTKRDVNNFDQDFTREEPVLTLVDEAIVKQINQEEFKGFSYFGEDLMP

SEQ ID NO: 68203 - protein, 219 aa, Homo sapiens
  Payload ID: 13592
  Gene Symbol: PRKCE
  Gene Name: protein kinase C, epsilon
  ENSP ID: ENSP00000378341
MNVHRRCETNVAPNCGVDARGIAKVLADLGVTPDKITNSGQRRKKLIAGAESPQPASGSSPSEEDRSKSAPTSPCDQEIKELENNIRKALSFDNRGEEHRAASSPDGQLMSPGENGEVRQGQAKRLGLDEFNFIKVLGKGSFGKVMLAELKGKDEVYAVKVLKKDVILQDDDVDCTMTEKRILALARKHPYLTQLYCCFQTKGTGFSIQGCACEGMREL

SEQ ID NO: 68204 - protein, 127 aa, Homo sapiens
  Payload ID: 13592
  Gene Symbol: PRKCE
  Gene Name: protein kinase C, epsilon
  ENSP ID: ENSP00000394574
MVVFNGLLKIKICEAVSLKPTAWSLRHAVGPRPQTFLLDPYIALNVDDSRIGQTATKQKTNSPAWHDEFVTDVCNGRKIELAVFHDAPIGYDDFVANCTIQFEELLQNGSRHFEDWIDLEPEGRVYV

SEQ ID NO: 68205 - protein, 683 aa, Homo sapiens
  Payload ID: 13593
  Gene Symbol: PRKCH
  Gene Name: protein kinase C, eta
  Uniprot ID: P24723
  ENSP ID: ENSP00000329127
MSSGTMKFNGYLRVRIGEAVGLQPTRWSLRHSLFKKGHQLLDPYLTVSVDQVRVGQTSTKQKTNKPTYNEEFCANVTDGGHLELAVFHETPLGYDHFVANCTLQFQELLRTTGASDTFEGWVDLEPEGKVFVVITLTGSFTEATLQRDRIFKHFTRKRQRAMRRRVHQINGHKFMATYLRQPTYCSHCREFIWGVFGKQGYQCQVCTCVVHKRCHHLIVTACTCQNNINKVDSKIAEQRFGINIPHKFSIHNYKVPTFCDHCGSLLWGIMRQGLQCKICKMNVHIRCQANVAPNCGVNAVELAKTLAGMGLQPGNISPTSKLVSRSTLRRQGKESSKEGNGIGVNSSNRLGIDNFEFIRVLGKGSFGKVMLARVKETGDLYAVKVLKKDVILQDDDVECTMTEKRILSLARNHPFLTQLFCCFQTPDRLFFVMEFVNGGDLMFHIQKSRRFDEARARFYAAEIISALMFLHDKGIIYRDLKLDNVLLDHEGHCKLADFGMCKEGICNGVTTATFCGTPDYIAPEILQEMLYGPAVDWWAMGVLLYEMLCGHAPFEAENEDDLFEAILNDEVVYPTWLHEDATGILKSFMTKNPTMRLGSLTQGGEHAILRHPFFKEIDWAQLNHRQIEPPFRPRIKSREDVSNFDPDFIKEEPVLTPIDEGHLPMINQDEFRNFSYVSPELQP

SEQ ID NO: 68206 - protein, 83 aa, Homo sapiens
  Payload ID: 13593
  Gene Symbol: PRKCH
  Gene Name: protein kinase C, eta
  ENSP ID: ENSP00000450959
MRRRVHQINGHKFMATYLRQPTYCSHCREFIWGVFGKQGYQCQVCTCVVHKRCHHLIVTACTCQNNINKVDSKIAEQRFGINI

SEQ ID NO: 68207 - protein, 522 aa, Homo sapiens
  Payload ID: 13593
  Gene Symbol: PRKCH
  Gene Name: protein kinase C, eta
  Uniprot ID: P24723
  ENSP ID: ENSP00000450981
MRRRVHQINGHKFMATYLRQPTYCSHCREFIWGVFGKQGYQCQVCTCVVHKRCHHLIVTACTCQNNINKVDSKIAEQRFGINIPHKFSIHNYKVPTFCDHCGSLLWGIMRQGLQCKICKMNVHIRCQANVAPNCGVNAVELAKTLAGMGLQPGNISPTSKLVSRSTLRRQGKESSKEGNGIGVNSSNRLGIDNFEFIRVLGKGSFGKVMLARVKETGDLYAVKVLKKDVILQDDDVECTMTEKRILSLARNHPFLTQLFCCFQTPDRLFFVMEFVNGGDLMFHIQKSRRFDEARARFYAAEIISALMFLHDKGIIYRDLKLDNVLLDHEGHCKLADFGMCKEGICNGVTTATFCGTPDYIAPEILQEMLYGPAVDWWAMGVLLYEMLCGHAPFEAENEDDLFEAILNDEVVYPTWLHEDATGILKSFMTKNPTMRLGSLTQGGEHAILRHPFFKEIDWAQLNHRQIEPPFRPRIKSREDVSNFDPDFIKEEPVLTPIDEGHLPMINQDEFRNFSYVSPELQP

SEQ ID NO: 68208 - protein, 73 aa, Homo sapiens
  Payload ID: 13593
  Gene Symbol: PRKCH
  Gene Name: protein kinase C, eta
  ENSP ID: ENSP00000451205
MRRRVHQINGHKFMATYLRQPTYCSHCREFIWGVFGKQGYQCQVCTCVVHKRCHHLIVTACTCQNNINKVDSK

SEQ ID NO: 68209 - protein, 15 aa, Homo sapiens
  Payload ID: 13593
  Gene Symbol: PRKCH
  Gene Name: protein kinase C, eta
  ENSP ID: ENSP00000451789
MRRRVHQINGHKFMA

SEQ ID NO: 68210 - protein, 53 aa, Homo sapiens
  Payload ID: 13593
  Gene Symbol: PRKCH
  Gene Name: protein kinase C, eta
  ENSP ID: ENSP00000451793
MRQGLQCKICKMNVHIRCQANVAPNCGVNAVELAKTLAGMGLQPGNISPTSKL

SEQ ID NO: 68211 - protein, 151 aa, Homo sapiens
  Payload ID: 13593
  Gene Symbol: PRKCH
  Gene Name: protein kinase C, eta
  ENSP ID: ENSP00000451871
MEFVNGGDLMFHIQKSRRFDEARARFYAAEIISALMFLHDKGIIYRDLKLDNVLLDHEGHCKLADFGMCKEGICNGVTTATFCGTPDYIAPEILQEMLYGPAVDWWAMGVLLYEMLCGHAPFEAENEDDLFEAILNDEVVYPTWLHEDATG

SEQ ID NO: 68212 - protein, 224 aa, Homo sapiens
  Payload ID: 13593
  Gene Symbol: PRKCH
  Gene Name: protein kinase C, eta
  ENSP ID: ENSP00000451930
MRRRVHQINGHKFMATYLRQPTYCSHCREFIWGVFGKQGYQCQVCTCVVHKRCHHLIVTACTCQNNINKVDSKIAEQRFGINIPHKFSIHNYKVPTFCDHCGSLLWGIMRQGLQCKICKMNVHIRCQANVAPNCGVNAVELAKTLAGMGLQPGNISPTSKLVSRSTLRRQGKESSKEGNGIGVNSSNRLGIDNFEFIRVLGKGSFGKVMLARVKETGDLYAVKV

SEQ ID NO: 68213 - protein, 87 aa, Homo sapiens
  Payload ID: 13593
  Gene Symbol: PRKCH
  Gene Name: protein kinase C, eta
  ENSP ID: ENSP00000451933
MRRRVHQINGHKFMATYLRQPTYCSHCREFIWGVFGKQGYQCQVCTCVVHKRCHHLIVTACTCQNNINKVDSKIAEQRFGINIPHKF

SEQ ID NO: 68214 - protein, 129 aa, Homo sapiens
  Payload ID: 13593
  Gene Symbol: PRKCH
  Gene Name: protein kinase C, eta
  ENSP ID: ENSP00000452055
MRRRVHQINGHKFMATYLRQPTYCSHCREFIWGVFGKQGYQCQVCTCVVHKRCHHLIVTACTCQNNINKVDSKIAEQRFGINIPHKFSIHNYKVPTFCDHCGSLLWGIMRQGLQCKICKMNVHIRCQAN

SEQ ID NO: 68215 - protein, 118 aa, Homo sapiens
  Payload ID: 13593
  Gene Symbol: PRKCH
  Gene Name: protein kinase C, eta
  ENSP ID: ENSP00000452129
MSSGTMKFNGYLRVRIGEAVGLQPTRWSLRHSLFKKGHQLLDPYLTVSVDQVRVGQTSTKQKTNKPTYNEEFCANVTDGGHLELAVFHETPLGYDHFVANCTLQFQELLRTTGASDTF

SEQ ID NO: 68216 - protein, 71 aa, Homo sapiens
  Payload ID: 13593
  Gene Symbol: PRKCH
  Gene Name: protein kinase C, eta
  ENSP ID: ENSP00000452330
MRRRVHQINGHKFMATYLRQPTYCSHCREFIWGVFGKQGYQCQVCTCVVHKRCHHLIVTACTCQNNINKVD

SEQ ID NO: 68217 - protein, 106 aa, Homo sapiens
  Payload ID: 13593
  Gene Symbol: PRKCH
  Gene Name: protein kinase C, eta
  ENSP ID: ENSP00000452528
MRRRVHQINGHKFMATYLRQPTYCSHCREFIWGVFGKQGYQCQVCTCVVHKRCHHLIVTACTCQNNINKVDSKIAEQRFGINIPHKFSIHNYKVPTFCDHCGSLLW

SEQ ID NO: 68218 - protein, 144 aa, Homo sapiens
  Payload ID: 13593
  Gene Symbol: PRKCH
  Gene Name: protein kinase C, eta
  ENSP ID: ENSP00000452588
MQSAGDMGRQEELEAASWKDLGAPSGRKDWLGRIPGCFPGSALPKTLCSLQPWRASFSQFLSEVDLEPEGKVFVVITLTGSFTEATLQRDRIFKHFTRKRQRAMRRRVHQINGHKFMATYLRQPTYCSHCREFIWGVFGKQGYQ

SEQ ID NO: 68219 - protein, 697 aa, Homo sapiens
  Payload ID: 13594
  Gene Symbol: PRKCG
  Gene Name: protein kinase C, gamma
  Uniprot ID: P05129
  ENSP ID: ENSP00000263431
MAGLGPGVGDSEGGPRPLFCRKGALRQKVVHEVKSHKFTARFFKQPTFCSHCTDFIWGIGKQGLQCQVCSFVVHRRCHEFVTFECPGAGKGPQTDDPRNKHKFRLHSYSSPTFCDHCGSLLYGLVHQGMKCSCCEMNVHRRCVRSVPSLCGVDHTERRGRLQLEIRAPTADEIHVTVGEARNLIPMDPNGLSDPYVKLKLIPDPRNLTKQKTRTVKATLNPVWNETFVFNLKPGDVERRLSVEVWDWDRTSRNDFMGAMSFGVSELLKAPVDGWYKLLNQEEGEYYNVPVADADNCSLLQKFEACNYPLELYERVRMGPSSSPIPSPSPSPTDPKRCFFGASPGRLHISDFSFLMVLGKGSFGKVMLAERRGSDELYAIKILKKDVIVQDDDVDCTLVEKRVLALGGRGPGGRPHFLTQLHSTFQTPDRLYFVMEYVTGGDLMYHIQQLGKFKEPHAAFYAAEIAIGLFFLHNQGIIYRDLKLDNVMLDAEGHIKITDFGMCKENVFPGTTTRTFCGTPDYIAPEIIAYQPYGKSVDWWSFGVLLYEMLAGQPPFDGEDEEELFQAIMEQTVTYPKSLSREAVAICKGFLTKHPGKRLGSGPDGEPTIRAHGFFRWIDWERLERLEIPPPFRPRPCGRSGENFDKFFTRAAPALTPPDRLVLASIDQADFQGFTYVNPDFVHPDARSPTSPVPVPVM

SEQ ID NO: 68220 - protein, 35 aa, Homo sapiens
  Payload ID: 13594
  Gene Symbol: PRKCG
  Gene Name: protein kinase C, gamma
  ENSP ID: ENSP00000387919
MKCSCCEMNVHRRCVRSVPSLCGVDHTERRGRLQL

SEQ ID NO: 68221 - protein, 99 aa, Homo sapiens
  Payload ID: 13594
  Gene Symbol: PRKCG
  Gene Name: protein kinase C, gamma
  ENSP ID: ENSP00000471271
MKCSCCEMNVHRRCVRSVPSLCGVDHTERRGRLQLEIRAPTADEIHVTVGEARNLIPMDPNGLSDPYVKLKLIPDPRNLTKQKTRTVKATLNPVWNETF

SEQ ID NO: 68222 - protein, 19 aa, Homo sapiens
  Payload ID: 13594
  Gene Symbol: PRKCG
  Gene Name: protein kinase C, gamma
  ENSP ID: ENSP00000471544
MKCSCCEMNVHRRCVRSVP

SEQ ID NO: 68223 - protein, 596 aa, Homo sapiens
  Payload ID: 13595
  Gene Symbol: PRKCI
  Gene Name: protein kinase C, iota
  Uniprot ID: P41743
  ENSP ID: ENSP00000295797
MPTQRDSSTMSHTVAGGGSGDHSHQVRVKAYYRGDIMITHFEPSISFEGLCNEVRDMCSFDNEQLFTMKWIDEEGDPCTVSSQLELEEAFRLYELNKDSELLIHVFPCVPERPGMPCPGEDKSIYRRGARRWRKLYCANGHTFQAKRFNRRAHCAICTDRIWGLGRQGYKCINCKLLVHKKCHKLVTIECGRHSLPQEPVMPMDQSSMHSDHAQTVIPYNPSSHESLDQVGEEKEAMNTRESGKASSSLGLQDFDLLRVIGRGSYAKVLLVRLKKTDRIYAMKVVKKELVNDDEDIDWVQTEKHVFEQASNHPFLVGLHSCFQTESRLFFVIEYVNGGDLMFHMQRQRKLPEEHARFYSAEISLALNYLHERGIIYRDLKLDNVLLDSEGHIKLTDYGMCKEGLRPGDTTSTFCGTPNYIAPEILRGEDYGFSVDWWALGVLMFEMMAGRSPFDIVGSSDNPDQNTEDYLFQVILEKQIRIPRSLSVKAASVLKSFLNKDPKERLGCHPQTGFADIQGHPFFRNVDWDMMEQKQVVPPFKPNISGEFGLDNFDSQFTNEPVQLTPDDDDIVRKIDQSEFEGFEYINPLLMSAEECV

SEQ ID NO: 68224 - protein, 706 aa, Homo sapiens
  Payload ID: 13596
  Gene Symbol: PRKCQ
  Gene Name: protein kinase C, theta
  Uniprot ID: Q04759
  ENSP ID: ENSP00000263125
MSPFLRIGLSNFDCGSCQSCQGEAVNPYCAVLVKEYVESENGQMYIQKKPTMYPPWDSTFDAHINKGRVMQIIVKGKNVDLISETTVELYSLAERCRKNNGKTEIWLELKPQGRMLMNARYFLEMSDTKDMNEFETEGFFALHQRRGAIKQAKVHHVKCHEFTATFFPQPTFCSVCHEFVWGLNKQGYQCRQCNAAIHKKCIDKVIAKCTGSAINSRETMFHKERFKIDMPHRFKVYNYKSPTFCEHCGTLLWGLARQGLKCDACGMNVHHRCQTKVANLCGINQKLMAEALAMIESTQQARCLRDTEQIFREGPVEIGLPCSIKNEARPPCLPTPGKREPQGISWESPLDEVDKMCHLPEPELNKERPSLQIKLKIEDFILHKMLGKGSFGKVFLAEFKKTNQFFAIKALKKDVVLMDDDVECTMVEKRVLSLAWEHPFLTHMFCTFQTKENLFFVMEYLNGGDLMYHIQSCHKFDLSRATFYAAEIILGLQFLHSKGIVYRDLKLDNILLDKDGHIKIADFGMCKENMLGDAKTNTFCGTPDYIAPEILLGQKYNHSVDWWSFGVLLYEMLIGQSPFHGQDEEELFHSIRMDNPFYPRWLEKEAKDLLVKLFVREPEKRLGVRGDIRQHPLFREINWEELERKEIDPPFRPKVKSPFDCSNFDKEFLNEKPRLSFADRALINSMDQNMFRNFSFMNPGMERLIS

SEQ ID NO: 68225 - protein, 643 aa, Homo sapiens
  Payload ID: 13596
  Gene Symbol: PRKCQ
  Gene Name: protein kinase C, theta
  Uniprot ID: Q04759
  ENSP ID: ENSP00000380361
MSPFLRIGLSNFDCGSCQSCQGEAVNPYCAVLVKEYVESENGQMYIQKKPTMYPPWDSTFDAHINKGRVMQIIVKGKNVDLISETTVELYSLAERCRKNNGKTEIWLELKPQGRMLMNARYFLEMSDTKDMNEFETEGFFALHQRRGAIKQAKVHHVKCHEFTATFFPQPTFCSVCHEFVWGLNKQGYQCRQCNAAIHKKCIDKVIAKCTGSAINSRETMFHKERFKIDMPHRFKVYNYKSPTFCEHCGTLLWGLARQGLKCDACGMNVHHRCQTKVANLCGINQKLMAEALAMIESTQQARCLRDTEQIFREGPVEIGLPCSIKNEARPPCLPTPGKREPQGISWESPLDEVDKMCHLPEPELNKERPSLQIKLKIEDFILHKMLGKGSFGKVFLAEFKKTNQFFAIKALKKDVVLMDDDVECTMVEKRVLSLAWEHPFLTHMFCTFQTKENLFFVMEYLNGGDLMYHIQSCHKFDLSRATFYAAEIILGLQFLHSKGIVYRDLKLDNILLDKDGHIKIADFGMCKENMLGDAKTNTFCGTPDYIAPELFVREPEKRLGVRGDIRQHPLFREINWEELERKEIDPPFRPKVKSPFDCSNFDKEFLNEKPRLSFADRALINSMDQNMFRNFSFMNPGMERLIS

SEQ ID NO: 68226 - protein, 581 aa, Homo sapiens
  Payload ID: 13596
  Gene Symbol: PRKCQ
  Gene Name: protein kinase C, theta
  Uniprot ID: Q04759
  ENSP ID: ENSP00000441752
MDTKDMNEFETEGFFALHQRRGAIKQAKVHHVKCHEFTATFFPQPTFCSVCHEFVWGLNKQGYQCRQCNAAIHKKCIDKVIAKCTGSAINSRETMFHKERFKIDMPHRFKVYNYKSPTFCEHCGTLLWGLARQGLKCDACGMNVHHRCQTKVANLCGINQKLMAEALAMIESTQQARCLRDTEQIFREGPVEIGLPCSIKNEARPPCLPTPGKREPQGISWESPLDEVDKMCHLPEPELNKERPSLQIKLKIEDFILHKMLGKGSFGKVFLAEFKKTNQFFAIKALKKDVVLMDDDVECTMVEKRVLSLAWEHPFLTHMFCTFQTKENLFFVMEYLNGGDLMYHIQSCHKFDLSRATFYAAEIILGLQFLHSKGIVYRDLKLDNILLDKDGHIKIADFGMCKENMLGDAKTNTFCGTPDYIAPEILLGQKYNHSVDWWSFGVLLYEMLIGQSPFHGQDEEELFHSIRMDNPFYPRWLEKEAKDLLVKLFVREPEKRLGVRGDIRQHPLFREINWEELERKEIDPPFRPKVKSPFDCSNFDKEFLNEKPRLSFADRALINSMDQNMFRNFSFMNPGMERLIS

SEQ ID NO: 68227 - protein, 670 aa, Homo sapiens [sequence omitted]

SEQ ID NO: 68228 - protein, 592 aa, Homo sapiens
  Payload ID: 13597
  Gene Symbol: PRKCZ
  Gene Name: protein kinase C, zeta
  Uniprot ID: Q05513
  ENSP ID: ENSP00000367830
MPSRTGPKMEGSGGRVRLKAHYGGDIFITSVDAATTFEELCEEVRDMCRLHQQHPLTLKWVDSEGDPCTVSSQMELEEAFRLARQCRDEGLIIHVFPSTPEQPGLPCPGEDKSIYRRGARRWRKLYRANGHLFQAKRFNRRAYCGQCSERIWGLARQGYRCINCKLLVHKRCHGLVPLTCRKHMDSVMPSQEPPVDDKNEDADLPSEETDGIAYISSSRKHDSIKDDSEDLKPVIDGMDGIKISQGLGLQDFDLIRVIGRGSYAKVLLVRLKKNDQIYAMKVVKKELVHDDEDIDWVQTEKHVFEQASSNPFLVGLHSCFQTTSRLFLVIEYVNGGDLMFHMQRQRKLPEEHARFYAAEICIALNFLHERGIIYRDLKLDNVLLDADGHIKLTDYGMCKEGLGPGDTTSTFCGTPNYIAPEILRGEEYGFSVDWWALGVLMFEMMAGRSPFDIITDNPDMNTEDYLFQVILEKPIRIPRFLSVKASHVLKGFLNKDPKERLGCRPQTGFSDIKSHAFFRSIDWDLLEKKQALPPFQPQITDDYGLDNFDTQFTSEPVQLTPDDEDAIKRIDQSEFEGFEYINPLLLSTEESV

SEQ ID NO: 68229 - protein, 409 aa, Homo sapiens
  Payload ID: 13597
  Gene Symbol: PRKCZ
  Gene Name: protein kinase C, zeta
  Uniprot ID: Q05513
  ENSP ID: ENSP00000383711
MDSVMPSQEPPVDDKNEDADLPSEETDGIAYISSSRKHDSIKDDSEDLKPVIDGMDGIKISQGLGLQDFDLIRVIGRGSYAKVLLVRLKKNDQIYAMKVVKKELVHDDEDIDWVQTEKHVFEQASSNPFLVGLHSCFQTTSRLFLVIEYVNGGDLMFHMQRQRKLPEEHARFYAAEICIALNFLHERGIIYRDLKLDNVLLDADGHIKLTDYGMCKEGLGPGDTTSTFCGTPNYIAPEILRGEEYGFSVDWWALGVLMFEMMAGRSPFDIITDNPDMNTEDYLFQVILEKPIRIPRFLSVKASHVLKGFLNKDPKERLGCRPQTGFSDIKSHAFFRSIDWDLLEKKQALPPFQPQITDDYGLDNFDTQFTSEPVQLTPDDEDAIKRIDQSEFEGFEYINPLLLSTEESV

SEQ ID NO: 68230 - protein, 409 aa, Homo sapiens; identical to SEQ ID NO: 68229
  Payload ID: 13597
  Gene Symbol: PRKCZ
  Gene Name: protein kinase C, zeta
  Uniprot ID: Q05513
  ENSP ID: ENSP00000383712

SEQ ID NO: 68231 - protein, 109 aa, Homo sapiens
  Payload ID: 13597
  Gene Symbol: PRKCZ
  Gene Name: protein kinase C, zeta
  ENSP ID: ENSP00000421219
MDSVMPSQEPPVDDKNEDADLPSEETDGIAYISSSRKHDSIKDDSEDLKPVIDGMDGIKISQGLGLQDFDLIRVIGRGSYAKVLLVRLKKNDQIYAMKVVKKELVHDDE

SEQ ID NO: 68232 - protein, 82 aa, Homo sapiens
  Payload ID: 13597
  Gene Symbol: PRKCZ
  Gene Name: protein kinase C, zeta
  ENSP ID: ENSP00000421350
MDSVMPSQEPPVDDKNEDADLPSEETDGIAYISSSRKHDSIKDDSEDLKPVIDGMDGIKISQGLGLQDFDLIRVIGRGSYAK

SEQ ID NO: 68233 - protein, 65 aa, Homo sapiens
  Payload ID: 13597
  Gene Symbol: PRKCZ
  Gene Name: protein kinase C, zeta
  ENSP ID: ENSP00000421587
MCRLHQQHPLTLKWVDSEGDPCTVSSQMELEEAFRLARQCRDEGLIIHVFPSTPEQPGLPCPGED

SEQ ID NO: 68234 - protein, 70 aa, Homo sapiens
  Payload ID: 13597
  Gene Symbol: PRKCZ
  Gene Name: protein kinase C, zeta
  ENSP ID: ENSP00000421869
MDSVMPSQEPPVDDKNEDADLPSEETDGIAYISSSRKHDSIKDDSEDLKPVIDGMDGIKISQGLGLQDFD

SEQ ID NO: 68235 - protein, 46 aa, Homo sapiens
  Payload ID: 13597
  Gene Symbol: PRKCZ
  Gene Name: protein kinase C, zeta
  ENSP ID: ENSP00000422349
MDSVMPSQEPPVDDKNEDADLPSEETDGIAYISSSRKHDSIKDDSE

SEQ ID NO: 68236 - protein, 105 aa, Homo sapiens
  Payload ID: 13597
  Gene Symbol: PRKCZ
  Gene Name: protein kinase C, zeta
  ENSP ID: ENSP00000422764
MPSQEPPVDDKNEDADLPSEETDGIAYISSSRKHDSIKDDSEDLKPVIDGMDGIKISQGLGLQDFDLIRVIGRGSYAKVLLVRLKKNDQIYAMKVVKKELVHDDE

SEQ ID NO: 68237 - protein, 98 aa, Homo sapiens
  Payload ID: 13597
  Gene Symbol: PRKCZ
  Gene Name: protein kinase C, zeta
  ENSP ID: ENSP00000424228
MDSVMPSQEPPVDDKNEDADLPSEETDGIAYISSSRKHDSIKDDSEDLKPVIDGMDGIKISQGLGLQDFDLIRVIGRGSYAKVLLVRLKKNDQIYAMK

SEQ ID NO: 68238 - protein, 347 aa, Homo sapiens
  Payload ID: 13597
  Gene Symbol: PRKCZ
  Gene Name: protein kinase C, zeta
  ENSP ID: ENSP00000424398
MPSQEPPVDDKNEDADLPSEETDGIAYISSSRKHDSIKDDSEDLKPVIDGMDGIKISQGLGLQDFDLIRVIGRGSYAKVLLVRLKKNDQIYAMKVVKKELVHDDEDIDWVQTEKHVFEQASSNPFLVGLHSCFQTTSRLFLVIEYVNGGDLMFHMQRQRKLPEEHARFYAAEICIALNFLHERGIIYRDLKLDNVLLDADGHIKLTDYGMCKEGLGPGDTTSTFCGTPNYIAPEILRGEEYGFSVDWWALGVLMFEMMAGRSPFDIITDNPDMNTEDYLFQVILEKPIRIPRFLSVKASHVLKGFLNKDPKERLGCRPQTGFSDIKSHAFFRSIDWDLVFHTKNTSN

SEQ ID NO: 68239 - protein, 136 aa, Homo sapiens
  Payload ID: 13597
  Gene Symbol: PRKCZ
  Gene Name: protein kinase C, zeta
  ENSP ID: ENSP00000424763
MPSQEPPVDDKNEDADLPSEETDGIAYISSSRKHDSIKDDSEDLKPVIDGMDGIKISQGLGLQDFDLIRVIGRGSYAKVLLVRLKKNDQIYAMKVVKKELVHDDEDIDWVQTEKHVFEQASSNPFLVGLHSCFQTT

SEQ ID NO: 68240 - protein, 181 aa, Homo sapiens
  Payload ID: 13597
  Gene Symbol: PRKCZ
  Gene Name: protein kinase C, zeta
  ENSP ID: ENSP00000424945
MPSRTGPKMEGSGGRVRLKAHYGGDIFITSVDAATTFEELCEEVRDMCRLHQQHPLTLKWVDSEVFPSTPEQPGLPCPGEDKSIYRRGARRWRKLYRANGHLFQAKRFNRRAYCGQCSERIWGLARQGYRCINCKLLVHKRCHGLVPLTCRKHMDSVMPSQEPPVDDKNEDADLPSEETDG

SEQ ID NO: 68241 - protein, 73 aa, Homo sapiens
  Payload ID: 13597
  Gene Symbol: PRKCZ
  Gene Name: protein kinase C, zeta
  ENSP ID: ENSP00000425317
MDSVMPSQEPPVDDKNEDADLPSEETDGIAYISSSRKHDSIKDDSEDLKPVIDGMDGIKISQGLGLQDFDLIR

SEQ ID NO: 68242 - protein, 73 aa, Homo sapiens
  Payload ID: 13597
  Gene Symbol: PRKCZ
  Gene Name: protein kinase C, zeta
  ENSP ID: ENSP00000425643
MDLANHLFQVAGYPAAVDRVKSGSLCLFIYLGQQRELSLHGDCNFILIYLPPGSQKMEEAVPCQRPPLPSQAL

SEQ ID NO: 68243 - protein, 488 aa, Homo sapiens
  Payload ID: 13597
  Gene Symbol: PRKCZ
  Gene Name: protein kinase C, zeta
  Uniprot ID: Q05513
  ENSP ID: ENSP00000426412
MLTPRTDESIYRRGARRWRKLYRANGHLFQAKRFNRRAYCGQCSERIWGLARQGYRCINCKLLVHKRCHGLVPLTCRKHMDSVMPSQEPPVDDKNEDADLPSEETDGIAYISSSRKHDSIKDDSEDLKPVIDGMDGIKISQGLGLQDFDLIRVIGRGSYAKVLLVRLKKNDQIYAMKVVKKELVHDDEDIDWVQTEKHVFEQASSNPFLVGLHSCFQTTSRLFLVIEYVNGGDLMFHMQRQRKLPEEHARFYAAEICIALNFLHERGIIYRDLKLDNVLLDADGHIKLTDYGMCKEGLGPGDTTSTFCGTPNYIAPEILRGEEYGFSVDWWALGVLMFEMMAGRSPFDIITDNPDMNTEDYLFQVILEKPIRIPRFLSVKASHVLKGFLNKDPKERLGCRPQTGFSDIKSHAFFRSIDWDLLEKKQALPPFQPQITDDYGLDNFDTQFTSEPVQLTPDDEDAIKRIDQSEFEGFEYINPLLLSTEESV

SEQ ID NO: 68244 - protein, 21 aa, Homo sapiens
  Payload ID: 13597
  Gene Symbol: PRKCZ
  Gene Name: protein kinase C, zeta
  ENSP ID: ENSP00000427085
MDSVMPSQEPPVDDKNEDADL

SEQ ID NO: 68245 - protein, 25 aa, Homo sapiens
  Payload ID: 13597
  Gene Symbol: PRKCZ
  Gene Name: protein kinase C, zeta
  ENSP ID: ENSP00000427134
MDSVMPSQEPPVDDKNEDADLPSEE

SEQ ID NO: 68246 - protein, 61 aa, Homo sapiens
  Payload ID: 13597
  Gene Symbol: PRKCZ
  Gene Name: protein kinase C, zeta
  ENSP ID: ENSP00000462105
MDSVMPSQEPPVDDKNEDADLPSEETDGIAYISSSRKHDSIKDDSEDLKPVIDGMDGIKIS

SEQ ID NO: 68247 - protein, 912 aa, Homo sapiens
  Payload ID: 13598
  Gene Symbol: PRKD1
  Gene Name: protein kinase D1
  Uniprot ID: Q15139
  ENSP ID: ENSP00000333568
MSAPPVLRPPSPLLPVAAAAAAAAAALVPGSGPGPAPFLAPVAAPVGGISFHLQIGLSREPVLLLQDSSGDYSLAHVREMACSIVDQKFPECGFYGMYDKILLFRHDPTSENILQLVKAASDIQEGDLIEVVLSASATFEDFQIRPHALFVHSYRAPAFCDHCGEMLWGLVRQGLKCEGCGLNYHKRCAFKIPNNCSGVRRRRLSNVSLTGVSTIRTSSAELSTSAPDEPLLQKSPSESFIGREKRSNSQSYIGRPIHLDKILMSKVKVPHTFVIHSYTRPTVCQYCKKLLKGLFRQGLQCKDCRFNCHKRCAPKVPNNCLGEVTINGDLLSPGAESDVVMEEGSDDNDSERNSGLMDDMEEAMVQDAEMAMAECQNDSGEMQDPDPDHEDANRTISPSTSNNIPLMRVVQSVKHTKRKSSTVMKEGWMVHYTSKDTLRKRHYWRLDSKCITLFQNDTGSRYYKEIPLSEILSLEPVKTSALIPNGANPHCFEITTANVVYYVGENVVNPSSPSPNNSVLTSGVGADVARMWEIAIQHALMPVIPKGSSVGTGTNLHRDISVSISVSNCQIQENVDISTVYQIFPDEVLGSGQFGIVYGGKHRKTGRDVAIKIIDKLRFPTKQESQLRNEVAILQNLHHPGVVNLECMFETPERVFVVMEKLHGDMLEMILSSEKGRLPEHITKFLITQILVALRHLHFKNIVHCDLKPENVLLASADPFPQVKLCDFGFARIIGEKSFRRSVVGTPAYLAPEVLRNKGYNRSLDMWSVGVIIYVSLSGTFPFNEDEDIHDQIQNAAFMYPPNPWKEISHEAIDLINNLLQVKMRKRYSVDKTLSHPWLQDYQTWLDLRELECKIGERYITHESDDLRWEKYAGEQGLQYPTHLINPSASHSDTPETEETEMKALGERVSIL

SEQ ID NO: 68248 - protein, 920 aa, Homo sapiens
  Payload ID: 13598
  Gene Symbol: PRKD1
  Gene Name: protein kinase D1
  ENSP ID: ENSP00000390535
MSAPPVLRPPSPLLPVAAAAAAAAAALVPGSGPGPAPFLAPVAAPVGGISFHLQIGLSREPVLLLQDSSGDYSLAHVREMACSIVDQKFPECGFYGMYDKILLFRHDPTSENILQLVKAASDIQEGDLIEVVLSASATFEDFQIRPHALFVHSYRAPAFCDHCGEMLWGLVRQGLKCEGCGLNYHKRCAFKIPNNCSGVRRRRLSNVSLTGVSTIRTSSAELSTSAPDEPLLSPVSPGFEQKSPSESFIGREKRSNSQSYIGRPIHLDKILMSKVKVPHTFVIHSYTRPTVCQYCKKLLKGLFRQGLQCKDCRFNCHKRCAPKVPNNCLGEVTINGDLLSPGAESDVVMEEGSDDNDSERNSGLMDDMEEAMVQDAEMAMAECQNDSGEMQDPDPDHEDANRTISPSTSNNIPLMRVVQSVKHTKRKSSTVMKEGWMVHYTSKDTLRKRHYWRLDSKCITLFQNDTGSRYYKEIPLSEILSLEPVKTSALIPNGANPHCFEITTANVVYYVGENVVNPSSPSPNNSVLTSGVGADVARMWEIAIQHALMPVIPKGSSVGTGTNLHRDISVSISVSNCQIQENVDISTVYQIFPDEVLGSGQFGIVYGGKHRKTGRDVAIKIIDKLRFPTKQESQLRNEVAILQNLHHPGVVNLECMFETPERVFVVMEKLHGDMLEMILSSEKGRLPEHITKFLITQILVALRHLHFKNIVHCDLKPENVLLASADPFPQVKLCDFGFARIIGEKSFRRSVVGTPAYLAPEVLRNKGYNRSLDMWSVGVIIYVSLSGTFPFNEDEDIHDQIQNAAFMYPPNPWKEISHEAIDLINNLLQVKMRKRYSVDKTLSHPWLQDYQTWLDLRELECKIGERYITHESDDLRWEKYAGEQGLQYPTHLINPSASHSDTPETEETEMKALGERVSIL

SEQ ID NO: 68249 - protein, 117 aa, Homo sapiens
  Payload ID: 13598
  Gene Symbol: PRKD1
  Gene Name: protein kinase D1
  ENSP ID: ENSP00000446866
MILSPPQPCGTFPECGFYGMYDKILLFRHDPTSENILQLVKAASDIQEGDLIEVVLSASATFEDFQIRPHALFVHSYRAPAFCDHCGEMLWGLVRQGLKCEGCGLNYHKRCAFKIPN

SEQ ID NO: 68250 - protein, 157 aa, Homo sapiens
  Payload ID: 13598
  Gene Symbol: PRKD1
  Gene Name: protein kinase D1
  ENSP ID: ENSP00000447333
SSTVMKEGWMVHYTSKDTLRKRHYWRLDSKCITLFQNDTGSRYYKEIPLSEILSLEPVKTSALIPNGANPHCFEITTANVVYYVGENVVNPSSPSPNNSVLTSGVGADVARMWEIAIQHALMPVIPKGSSVGTGTNLHSESASFLTSPKLIMCLPLA

SEQ ID NO: 68251 - protein, 80 aa, Homo sapiens
  Payload ID: 13598
  Gene Symbol: PRKD1
  Gene Name: protein kinase D1
  ENSP ID: ENSP00000447723
EVLRNKGYNRSLDMWSVGVIIYVSLSGTFPFNEDEDIHDQIQNAAFMYPPNPWKEISHEDVDLIQYNTYILGCLSSHCTA

SEQ ID NO: 68252 - protein, 912 aa, Homo sapiens; identical to SEQ ID NO: 68247
  Payload ID: 13598
  Gene Symbol: PRKD1
  Gene Name: protein kinase D1
  Uniprot ID: Q15139
  ENSP ID: ENSP00000482645

SEQ ID NO: 68253 - protein, 878 aa, Homo sapiens
  Payload ID: 13599
  Gene Symbol: PRKD2
  Gene Name: protein kinase D2
  Uniprot ID: Q9BZL6
  ENSP ID: ENSP00000291281
MATAPSYPAGLPGSPGPGSPPPPGGLELQSPPPLLPQIPAPGSGVSFHIQIGLTREFVLLPAASELAHVKQLACSIVDQKFPECGFYGLYDKILLFKHDPTSANLLQLVRSSGDIQEGDLVEVVLSASATFEDFQIRPHALTVHSYRAPAFCDHCGEMLFGLVRQGLKCDGCGLNYHKRCAFSIPNNCSGARKRRLSSTSLASGHSVRLGTSESLPCTAEELSRSTTELLPRRPPSSSSSSSASSYTGRPIELDKMLLSKVKVPHTFLIHSYTRPTVCQACKKLLKGLFRQGLQCKDCKFNCHKRCATRVPNDCLGEALINGDVPMEEATDFSEADKSALMDESEDSGVIPGSHSENALHASEEEEGEGGKAQSSLGYIPLMRVVQSVRHTTRKSSTTLREGWVVHYSNKDTLRKRHYWRLDCKCITLFQNNTTNRYYKEIPLSEILTVESAQNFSLVPPGTNPHCFEIVTANATYFVGEMPGGTPGGPSGQGAEAARGWETAIRQALMPVILQDAPSAPGHAPHRQASLSISVSNSQIQENVDIATVYQIFPDEVLGSGQFGVVYGGKHRKTGRDVAVKVIDKLRFPTKQESQLRNEVAILQSLRHPGIVNLECMFETPEKVFVVMEKLHGDMLEMILSSEKGRLPERLTKFLITQILVALRHLHFKNIVHCDLKPENVLLASADPFPQVKLCDFGFARIIGEKSFRRSVVGTPAYLAPEVLLNQGYNRSLDMWSVGVIMYVSLSGTFPFNEDEDINDQIQNAAFMYPASPWSHISAGAIDLINNLLQVKMRKRYSVDKSLSHPWLQEYQTWLDLRELEGKMGERYITHESDDARWEQFAAEHPLPGSGLPTDRDLGGACPPQDHDMQGLAERISVL

SEQ ID NO: 68254 - protein, 878 aa, Homo sapiens; identical to SEQ ID NO: 68253
  Payload ID: 13599
  Gene Symbol: PRKD2
  Gene Name: protein kinase D2
  Uniprot ID: Q9BZL6
  ENSP ID: ENSP00000393978

SEQ ID NO: 68255 - protein, 73 aa, Homo sapiens
  Payload ID: 13599
  Gene Symbol: PRKD2
  Gene Name: protein kinase D2
  ENSP ID: ENSP00000469064
SGVSFHIQIGLTREFVLLPAASELAHVKQLACSIVDQKPRPPSRTSRSARTPSRCTPIGRLPSVITAGRCSSA

SEQ ID NO: 68256 - protein, 721 aa, Homo sapiens
  Payload ID: 13599
  Gene Symbol: PRKD2
  Gene Name: protein kinase D2
  Uniprot ID: Q9BZL6
  ENSP ID: ENSP00000469106
MLFGLVRQGLKCDGCGLNYHKRCAFSIPNNCSGARKRRLSSTSLASGHSVRLGTSESLPCTAEELSRSTTELLPRRPPSSSSSSSASSYTGRPIELDKMLLSKVKVPHTFLIHSYTRPTVCQACKKLLKGLFRQGLQCKDCKFNCHKRCATRVPNDCLGEALINGDVPMEEATDFSEADKSALMDESEDSGVIPGSHSENALHASEEEEGEGGKAQSSLGYIPLMRVVQSVRHTTRKSSTTLREGWVVHYSNKDTLRKRHYWRLDCKCITLFQNNTTNRYYKEIPLSEILTVESAQNFSLVPPGTNPHCFEIVTANATYFVGEMPGGTPGGPSGQGAEAARGWETAIRQALMPVILQDAPSAPGHAPHRQASLSISVSNSQIQENVDIATVYQIFPDEVLGSGQFGVVYGGKHRKTGRDVAVKVIDKLRFPTKQESQLRNEVAILQSLRHPGIVNLECMFETPEKVFVVMEKLHGDMLEMILSSEKGRLPERLTKFLITQILVALRHLHFKNIVHCDLKPENVLLASADPFPQVKLCDFGFARIIGEKSFRRSVVGTPAYLAPEVLLNQGYNRSLDMWSVGVIMYVSLSGTFPFNEDEDINDQIQNAAFMYPASPWSHISAGAIDLINNLLQVKMRKRYSVDKSLSHPWLQEYQTWLDLRELEGKMGERYITHESDDARWEQFAAEHPLPGSGLPTDRDLGGACPPQDHDMQGLAERISVL

SEQ ID NO: 68257 - protein, 67 aa, Homo sapiens
  Payload ID: 13599
  Gene Symbol: PRKD2
  Gene Name: protein kinase D2
  ENSP ID: ENSP00000470363
MLFGLVRQGLKCDGCGLNYHKRCAFSIPNNCSGARKRRLSSTSLASGHSVRLGTSESLPCTAEELVR

SEQ ID NO: 68258 - protein, 94 aa, Homo sapiens
  Payload ID: 13599
  Gene Symbol: PRKD2
  Gene Name: protein kinase D2
  ENSP ID: ENSP00000470442
MLFGLVRQGLKCDDCKFNCHKRCATRVPNDCLGEALINGDVPMEEATDFSEADKSALMDESEDSGVIPGSHSENALHASEEEEGEGGKAQSSLG

SEQ ID NO: 68259 - protein, 888 aa, Homo sapiens
  Payload ID: 13599
  Gene Symbol: PRKD2
  Gene Name: protein kinase D2
  ENSP ID: ENSP00000470804
MATAPSYPAGLPGSPGPGSPPPPGGLELQSPPPLLPQIPAPGSGVSFHIQIGLTREFVLLPAASELAHVKQLACSIVDQKFPECGFYGLYDKILLFKHDPTSANLLQLVRSSGDIQEGDLVEVVLSASATFEDFQIRPHALTVHSYRAPAFCDHCGEMLFGLVRQGLKCDGCGLNYHKRCAFSIPNNCSGARKRRLSSTSLASGHSVRLGTSESLPCTAEELSRSTTELLPRRPPSSSSSSSASSYTGRPIELDKMLLSKVKVPHTFLIHSYTRPTVCQACKKLLKGLFRQGLQCKDCKFNCHKRCATRVPNDCLGEALINGDVPMEEATDFSEADKSALMDESEDSGVIPGSHSENALHASEEEEGEGGKAQSSLGYIPLMRVVQSVRHTTRKSSTTLREGWVVHYSNKDTLRKRHYWRLDCKCITLFQNNTTNRYYKEIPLSEILTVESAQNFSLVPPGTNPHCFEIVTANATYFVGEMPGGTPGGPSGQGAEAARGWETAIRQALMPVILQDAPSAPGHAPHRQASLSISVSNSQIQENVDIATVYQIFPDEVLGSGQFGVVYGGKHRKTGRDVAVKVIDKLRFPTKQESQLRNEVAILQSLRHPGIVNLECMFETPEKVFVVMEKLHGDMLEMILSSEKGRLPERLTKFLITQILVALRHLHFKNIVHCDLKPENVLLASADPFPQVKLCDFGFARIIGEKSFRRSVVGTPAYLAPEVLLNQGYNRSLDMWSVGVIMYVSLSGTFPFNEDEDINDQIQNAAFMYPASPWSHISAGGAWGPPTPWAAIDLINNLLQVKMRKRYSVDKSLSHPWLQEYQTWLDLRELEGKMGERYITHESDDARWEQFAAEHPLPGSGLPTDRDLGGACPPQDHDMQGLAERISVL

SEQ ID NO: 68260 - protein, 18 aa, Homo sapiens
  Payload ID: 13599
  Gene Symbol: PRKD2
  Gene Name: protein kinase D2
  ENSP ID: ENSP00000470919
MLFGLVRQGLKCDGCGLN

SEQ ID NO: 68261 - protein, 721 aa, Homo sapiens; identical to SEQ ID NO: 68256
  Payload ID: 13599
  Gene Symbol: PRKD2
  Gene Name: protein kinase D2
  Uniprot ID: Q9BZL6
  ENSP ID: ENSP00000472744

SEQ ID NO: 68262 - protein, 153 aa, Homo sapiens
  Payload ID: 13599
  Gene Symbol: PRKD2
  Gene Name: protein kinase D2
  ENSP ID: ENSP00000472913
  MOD_RES (1)..(1): Any amino acid
XQASLSISVSNSQIQENVDIATVYQIFPDEVLGSGQFGVVYGGKHRKTGRDVAVKVIDKLRFPTKQESQLRNEVAILQSLRHPGIVNLECMFETPEKVFVVMEKLHGDMLEMILSSEKGRLPERLTKFLITQISAFWALACPTPKPCAKPFTS

SEQ ID NO: 68263 - protein, 68 aa, Homo sapiens
  Payload ID: 13599
  Gene Symbol: PRKD2
  Gene Name: protein kinase D2
  ENSP ID: ENSP00000472987
MATAPSYPAGLPGSPGPGSPPPPGGLELQSPPPLLPQIPAPGSGVSFHIQIGLTREFVLLPAASELAH

SEQ ID NO: 68264 - protein, 890 aa, Homo sapiens
  Payload ID: 13600
  Gene Symbol: PRKD3
  Gene Name: protein kinase D3
  Uniprot ID: O94806
  ENSP ID: ENSP00000234179
MSANNSPPSAQKSVLPTAIPAVLPAASPCSSPKTGLSARLSNGSFSAPSLTNSRGSVHTVSFLLQIGLTRESVTIEAQELSLSAVKDLVCSIVYQKFPECGFFGMYDKILLFRHDMNSENILQLITSADEIHEGDLVEVVLSALATVEDFQIRPHTLYVHSYKAPTFCDYCGEMLWGLVRQGLKCEGCGLNYHKRCAFKIPNNCSGVRKRRLSNVSLPGPGLSVPRPLQPEYVALPSEESHVHQEPSKRIPSWSGRPIWMEKMVMCRVKVPHTFAVHSYTRPTICQYCKRLLKGLFRQGMQCKDCKFNCHKRCASKVPRDCLGEVTFNGEPSSLGTDTDIPMDIDNNDINSDSSRGLDDTEEPSPPEDKMFFLDPSDLDVERDEEAVKTISPSTSNNIPLMRVVQSIKHTKRKSSTMVKEGWMVHYTSRDNLRKRHYWRLDSKCLTLFQNESGSKYYKEIPLSEILRISSPRDFTNISQGSNPHCFEIITDTMVYFVGENNGDSSHNPVLAATGVGLDVAQSWEKAIRQALMPVTPQASVCTSPGQGKDHKDLSTSISVSNCQIQENVDISTVYQIFADEVLGSGQFGIVYGGKHRKTGRDVAIKVIDKMRFPTKQESQLRNEVAILQNLHHPGIVNLECMFETPERVFVVMEKLHGDMLEMILSSEKSRLPERITKFMVTQILVALRNLHFKNIVHCDLKPENVLLASAEPFPQVKLCDFGFARIIGEKSFRRSVVGTPAYLAPEVLRSKGYNRSLDMWSVGVIIYVSLSGTFPFNEDEDINDQIQNAAFMYPPNPWREISGEAIDLINNLLQVKMRKRYSVDKSLSHPWLQDYQTWLDLREFETRIGERYITHESDDARWEIHAYTHNLVYPKHFIMAPNPDDMEEDP

SEQ ID NO: 68265 - protein, 890 aa, Homo sapiens; identical to SEQ ID NO: 68264
  Payload ID: 13600
  Gene Symbol: PRKD3
  Gene Name: protein kinase D3
  Uniprot ID: O94806
  ENSP ID: ENSP00000368356

SEQ ID NO: 68266 - protein, 172 aa, Homo sapiens
  Payload ID: 13600
  Gene Symbol: PRKD3
  Gene Name: protein kinase D3
  ENSP ID: ENSP00000398743
TDTMVYFVGENNGDSSHNPVLAATGVGLDVAQSWEKAIRQALMPVTPQASVCTSPGQGKDHKDLSTSISVSNCQIQENVDISTVYQIFADEVLGSGQFGIVYGDLSVLRVVTSLEDFLSSEEQRTVRGKHRKTGRDVAIKVIDKMRFPTKQESQLRNEVAILQNLHHPGIVN

SEQ ID NO: 68267 - protein, 185 aa, Homo sapiens
  Payload ID: 13600
  Gene Symbol: PRKD3
  Gene Name: protein kinase D3
  ENSP ID: ENSP00000399540
  MOD_RES (1)..(1): Any amino acid
XTSISVSNCQIQENVDISTVYQIFADEVLGSGQFGIVYGGKHRKTGRDVAIKVIDKMRFPTKQESQLRNEVAILQILVALRNLHFKNIVHCDLKPENVLLASAEPFPQVKLCDFGFARIIGEKSFRRSVVGTPAYLAPEVLRSKGYNRSLDMWSVGVIIYVSLSGTFPFNEDEDINDQIQNAAFM

SEQ ID NO: 68268 - protein, 181 aa, Homo sapiens
  Payload ID: 13600
  Gene Symbol: PRKD3
  Gene Name: protein kinase D3
  ENSP ID: ENSP00000401839
MYDKILLFRHDMNSENILQLITSADEIHEGDLVEVVLSALATVEDFQIRPHTLYVHSYKAPTFCDYCGEMLWGLVRQGLKCEGCGLNYHKRCAFKIPNNCSGVRKRRLSNVSLPGPGLSVPRPLQPEYVALPSEESHVHQEPSKRIPSWSGRPIWMEKMVMCRVKVPHTFAVHSYTRPTIC

SEQ ID NO: 68269 - protein, 493 aa, Homo sapiens
  Payload ID: 13601
  Gene Symbol: PKDCC
  Gene Name: protein kinase domain containing, cytoplasmic
  Uniprot ID: Q504Y2
  ENSP ID: ENSP00000294964
MRRRRAAVAAGFCASFLLGSVLNVLFAPGSEPPRPGQSPEPSPAPGPGRRGGRGELARQIRARYEEVQRYSRGGPGPGAGRPERRRLMDLAPGGPGLPRPRPPWARPLSDGAPGWPPAPGPGSPGPGPRLGCAALRNVSGAQYMGSGYTKAVYRVRLPGGAAVALKAVDFSGHDLGSCVREFGVRRGCYRLAAHKLLKEMVLLERLRHPNVLQLYGYCYQDSEDIPDTLTTITELGAPVEMIQLLQTSWEDRFRICLSLGRLLHHLAHSPLGSVTLLDFRPRQFVLVDGELKVTDLDDARVEETPCAGSTDCILEFPARNFTLPCSAQGWCEGMNEKRNLYNAYRFFFTYLLPHSAPPSLRPLLDSIVNATGELAWGVDETLAQLEKVLHLYRSGQYLQNSTASSSTEYQCIPDSTIPQEDYRCWPSYHHGSCLLSVFNLAEAVDVCESHAQCRAFVVTNQTTWTGRQLVFFKTGWSQVVPDPNKTTYVKASG

SEQ ID NO: 68270 - protein, 181 aa, Homo sapiens
  Payload ID: 13601
  Gene Symbol: PKDCC
  Gene Name: protein kinase domain containing, cytoplasmic
  ENSP ID: ENSP00000385220
MRRRRAAVAAGFCASFLLGSVLNVLFAPGSEPPRPGQSPEPSPAPGPGRRGGRGELARQIRARYEEAGPRLPAQAPPARARAWAAPRFATCPARSTWAQATPRPCTGSACPAVPRWRSRRWTLAATIWAAACASSGYGGAAIGWRPTSCLRRWCCWSGCGTPTCCSSMATATRTARTSQTP

SEQ ID NO: 68271 - protein, 942 aa, Homo sapiens
  Payload ID: 13602
  Gene Symbol: PKN1
  Gene Name: protein kinase N1
  Uniprot ID: Q16512
  ENSP ID: ENSP00000242783
MASDAVQSEPRSWSLLEQLGLAGADLAAPGVQQQLELERERLRREIRKELKLKEGAENLRRATTDLGRSLGPVELLLRGSSRRLDLLHQQLQELHAHVVLPDPAATHDGPQSPGAGGPTCSATNLSRVAGLEKQLAIELKVKQGAENMIQTYSNGSTKDRKLLLTAQQMLQDSKTKIDIIRMQLRRALQAGQLENQAAPDDTQGSPDLGAVELRIEELRHHFRVEHAVAEGAKNVLRLLSAAKAPDRKAVSEAQEKLTESNQKLGLLREALERRLGELPADHPKGRLLREELAAASSAAFSTRLAGPFPATHYSTLCKPAPLTGTLEVRVVGCRDLPETIPWNPTPSMGGPGTPDSRPPFLSRPARGLYSRSGSLSGRSSLKAEAENTSEVSTVLKLDNTVVGQTSWKPCGPNAWDQSFTLELERARELELAVFWRDQRGLCALKFLKLEDFLDNERHEVQLDMEPQGCLVAEVTFRNPVIERIPRLRRQKKIFSKQQGKAFQRARQMNIDVATWVRLLRRLIPNATGTGTFSPGASPGSEARTTGDISVEKLNLGTDSDSSPQKSSRDPPSSPSSLSSPIQESTAPELPSETQETPGPALCSPLRKSPLTLEDFKFLAVLGRGHFGKVLLSEFRPSGELFAIKALKKGDIVARDEVESLMCEKRILAAVTSAGHPFLVNLFGCFQTPEHVCFVMEYSAGGDLMLHIHSDVFSEPRAIFYSACVVLGLQFLHEHKIVYRDLKLDNLLLDTEGYVKIADFGLCKEGMGYGDRTSTFCGTPEFLAPEVLTDTSYTRAVDWWGLGVLLYEMLVGESPFPGDDEEEVFDSIVNDEVRYPRFLSAEAIGIMRRLLRRNPERRLGSSERDAEDVKKQPFFRTLGWEALLARRLPPPFVPTLSGRTDVSNFDEEFTGEAPTLSPPRDARPLTAAEQAAFLDFDFVAGGC

SEQ ID NO: 68272 - protein, 948 aa, Homo sapiens
  Payload ID: 13602
  Gene Symbol: PKN1
  Gene Name: protein kinase N1
  Uniprot ID: Q16512
  ENSP ID: ENSP00000343325
MAEANNPSEQELESEPRSWSLLEQLGLAGADLAAPGVQQQLELERERLRREIRKELKLKEGAENLRRATTDLGRSLGPVELLLRGSSRRLDLLHQQLQELHAHVVLPDPAATHDGPQSPGAGGPTCSATNLSRVAGLEKQLAIELKVKQGAENMIQTYSNGSTKDRKLLLTAQQMLQDSKTKIDIIRMQLRRALQAGQLENQAAPDDTQGSPDLGAVELRIEELRHHFRVEHAVAEGAKNVLRLLSAAKAPDRKAVSEAQEKLTESNQKLGLLREALERRLGELPADHPKGRLLREELAAASSAAFSTRLAGPFPATHYSTLCKPAPLTGTLEVRVVGCRDLPETIPWNPTPSMGGPGTPDSRPPFLSRPARGLYSRSGSLSGRSSLKAEAENTSEVSTVLKLDNTVVGQTSWKPCGPNAWDQSFTLELERARELELAVFWRDQRGLCALKFLKLEDFLDNERHEVQLDMEPQGCLVAEVTFRNPVIERIPRLRRQKKIFSKQQGKAFQRARQMNIDVATWVRLLRRLIPNATGTGTFSPGASPGSEARTTGDISVEKLNLGTDSDSSPQKSSRDPPSSPSSLSSPIQESTAPELPSETQETPGPALCSPLRKSPLTLEDFKFLAVLGRGHFGKVLLSEFRPSGELFAIKALKKGDIVARDEVESLMCEKRILAAVTSAGHPFLVNLFGCFQTPEHVCFVMEYSAGGDLMLHIHSDVFSEPRAIFYSACVVLGLQFLHEHKIVYRDLKLDNLLLDTEGYVKIADFGLCKEGMGYGDRTSTFCGTPEFLAPEVLTDTSYTRAVDWWGLGVLLYEMLVGESPFPGDDEEEVFDSIVNDEVRYPRFLSAEAIGIMRRLLRRNPERRLGSSERDAEDVKKQPFFRTLGWEALLARRLPPPFVPTLSGRTDVSNFDEEFTGEAPTLSPPRDARPLTAAEQAAFLDFDFVAGGC

SEQ ID NO: 68273 - protein, 255 aa, Homo sapiens
  Payload ID: 13602
  Gene Symbol: PKN1
  Gene Name: protein kinase N1
  ENSP ID: ENSP00000465842
MACRPCRGAGRIWCCRSHKSEPRSWSLLEQLGLAGADLAAPGVQQQLELERERLRREIRKELKLKEGAENLRRATTDLGRSLGPVELLLRGSSRRLDLLHQQLQELHAHVVLPDPAATHDGPQSPGAGGPTCSATNLSRVAGLEKQLAIELKVKQGAENMIQTYSNGSTKDRKLLLTAQQMLQDSKTKIDIIRMQLRRALQAGQLENQAAPDDTQGEVSTVLKLDNTVVGQTSWKPCGPNAWDQSFTLELERARE

SEQ ID NO: 68274 - protein, 198 aa, Homo sapiens
  Payload ID: 13602
  Gene Symbol: PKN1
  Gene Name: protein kinase N1
  ENSP ID: ENSP00000465867
PGPALCSPLRKSPLTLEDFKFLAVLGRGHFGKVLLSEFRPSGELFAIKALKKGDIVARDEVESLMCEKRILAAVTSAGHPFLVNLFGCFQTPEHVCFVMEYSAGGDLMLHIHSDVFSEPRAIFYSACVVLGLQFLHEHKIVYRDLKLDNLLLDTEGYVKIADFGLCKEGMGYGDRTSTFCGTPEFATPASCRPKPSAS

SEQ ID NO: 68275 - protein, 263 aa, Homo sapiens
  Payload ID: 13602
  Gene Symbol: PKN1
  Gene Name: protein kinase N1
  ENSP ID: ENSP00000466367
MACRPCRGAGRIWCCRSHKSEPRSWSLLEQLGLAGADLAAPGVQQQLELERERLRREIRKELKLKEGAENLRRATTDLGRSLGPVELLLRGSSRRLDLLHQQLQELHAHVVLPDPAATHDGPQSPGAGGPTCSATNLSRVAGLEKQLAIELKVKQGAENMIQTYSNGSTKDRKLLLTAQQMLQDSKTKIDIIRMQLRRALQAGQLENQAAPDDTQGSPDLGAVELRIEELRHHFRVEHAVAEGAKNVLRLLSAAKAPDRKAVS

SEQ ID NO: 68276 - protein, 151 aa, Homo sapiens
  Payload ID: 13602
  Gene Symbol: PKN1
  Gene Name: protein kinase N1
  ENSP ID: ENSP00000466819
WVRLLRRLIPNATGTGTFSPGASPGSEARTTGDISVEKLNLGTDSDSSPQKSSRDPPSSPSSLSSPIQESTAPELPSETQETPGPALCSPVGPAPATALCAHAVRPHRRQQLRRGVHRGGPHTEPAPRRAAPHSRGAGSLPGLRLRGRGLL

SEQ ID NO: 68277 - protein, 14 aa, Homo sapiens
  Payload ID: 13602
  Gene Symbol: PKN1
  Gene Name: protein kinase N1
  ENSP ID: ENSP00000467422
MIQTYSNGSTKDRK

SEQ ID NO: 68278 - protein, 226 aa, Homo sapiens
  Payload ID: 13602
  Gene Symbol: PKN1
  Gene Name: protein kinase N1
  ENSP ID: ENSP00000468497
  MOD_RES (1)..(1): Any amino acid
XNPERRLGSSERDAEDVKKQPFFRPGSRSVAQAGVQWLNLGSLQPPPPRFMQFSCLSLPSTWDYRRAPLHHTRLIFVFLVETGFRHVGQAGPELLASSDPPASASRSAGITGLSHHAGPPLFLIRLLHQALADSGLGSPVGPAPATALCAHAVRPHRRQQLRRGVHRGGPHTEPAPRRAAPHSRGAGSLPGLRLRGRGLLAPSPAPAPAPARELLVFKKAFGICRI

SEQ ID NO: 68279 - protein, 604 aa, Homo sapiens
  Payload ID: 13603
  Gene Symbol: PKN2
  Gene Name: protein kinase N2
  ENSP ID: ENSP00000317851
MASNPERGEILLTELQGDSRSLPFSENVSAVQKLDFSDTMVQQKLDDIKDRIKREIRKELKIKEGAENLRKVTTDKKSLAYVDNILKKSNKKLEELHHKLQELNAHIVVSDPEDITDCPRTPDTPNNDPRCSTSNNRLKALQKQLDIELKVKQGAENMIQMYSNGSSKDRKLHGTAQQLLQDSKTKIEVIRMQILQAVQTNELAFDNAKPVISPLELRMEELRHHFRIEFAVAEGAKNVMKLLGSGKVTDRKALSEAQARFNESSQKLDLLKYSLEQRLNEVPKNHPKSRIIIEELSLVAASPTLSPRQSMISTQNQYSTLSKPAALTGTLEVRLMGCQDILENVPGRSKATSVALPGWSPSETRSSFMSRTSKSKSGSSRNLLKTDDLSNDVCAVLKLDNTVVGQTSWKPISNQSWDQKFTLELDRSRELEISVYWRDWRSLCAVKFLRLEDFLDNQRHGMCLYLEPQGTLFAEVTFFNPVIERRPKLQRQKKIFSKQQGKTFLRAPQMNINIATWGRLVRRAIPTVNHSGTFSPQAPVPTTVPVVDVRIPQLAPPARYVSEILSISYTKLLGHSYVLIIAGVLSLAFFPSSILKVVFCLLKK

SEQ ID NO: 68280 - protein, 320 aa, Homo sapiens
  Payload ID: 13603
  Gene Symbol: PKN2
  Gene Name: protein kinase N2
  ENSP ID: ENSP00000359536
MIQMYSNGSSKDRKLHGTAQQLLQDSKTKIEVIRMQILQAVQTNELAFDNAKPVISPLELRMEELRHHFRIEFAVAEGAKNVMKLLGSGKVTDRKALSEAQARFNESSQKLDLLKYSLEQRLNEVPKNHPKSRIIIEELSLVAASPTLSPRQSMISTQNQYSTLSKPAALTGTLEVRLMGCQDILENVPGRSKATSVALPGWSPSETRSSFMSRTSKSKSGSSRNLLKTDDLSNDVCAVLKLDNTVVGQTSWKPISNQSWDQKFTLELDRSRELEISVYWRDWRSLCKISEVRRFFRQPTAWHVSLFGTTGYFICRGYLF

SEQ ID NO: 68281 - protein, 936 aa, Homo sapiens
  Payload ID: 13603
  Gene Symbol: PKN2
  Gene Name: protein kinase N2
  Uniprot ID: Q16513
  ENSP ID: ENSP00000359544
MASNPERGEILLTELQGDSRSLPFSENVSAVQKLDFSDTMVQQKLDDIKDRIKREIRKELKIKEGAENLRKVTTDKKSLAYVDNILKKSNKKLEELHHKLQELNAHIVVSDPEDITDCPRTPDTPNNDPRCSTSNNRLKALQKQLDIELKVKQGAENMIQMYSNGSSKDRKLHGTAQQLLQDSKTKIEVIRMQILQAVQTNELAFDNAKPVISPLELRMEELRHHFRIEFAVAEGAKNVMKLLGSGKVTDRKALSEAQARFNESSQKLDLLKYSLEQRLNEVPKNHPKSRIIIEELSLVAASPTLSPRQSMISTQNQYSTLSKPAALTGTLEVRLMGCQDILENVPGRSKATSVALPGWSPSETRSSFMSRTSKSKSGSSRNLLKTDDLSNDVCAVLKLDNTVVGQTSWKPISNQSWDQKFTLELDRVTFFNPVIERRPKLQRQKKIFSKQQGKTFLRAPQMNINIATWGRLVRRAIPTVNHSGTFSPQAPVPTTVPVVDVRIPQLAPPASDSTVTKLDFDLEPEPPPAPPRASSLGEIDESSELRVLDIPGQDSETVFDIQNDRNSILPKSQSEYKPDTPQSGLEYSGIQELEDRRSQQRFQFNLQDFRCCAVLGRGHFGKVLLAEYKNTNEMFAIKALKKGDIVARDEVDSLMCEKRIFETVNSVRHPFLVNLFACFQTKEHVCFVMEYAAGGDLMMHIHTDVFSEPRAVFYAACVVLGLQYLHEHKIVYRDLKLDNLLLDTEGFVKIADFGLCKEGMGYGDRTSTFCGTPEFLAPEVLTETSYTRAVDWWGLGVLIYEMLVGESPFPGDDEEEVFDSIVNDEVRYPRFLSTEAISIMRRLLRRNPERRLGASEKDAEDVKKHPFFRLIDWSALMDKKVKPPFIPTIRGREDVSNFDDEFTSEAPILTPPREPRILSEEEQEMFRDFDYIADWC

SEQ ID NO: 68282 - protein, 984 aa, Homo sapiens
  Payload ID: 13603
  Gene Symbol: PKN2
  Gene Name: protein kinase N2
  Uniprot ID: Q16513
  ENSP ID: ENSP00000359552
MASNPERGEILLTELQGDSRSLPFSENVSAVQKLDFSDTMVQQKLDDIKDRIKREIRKELKIKEGAENLRKVTTDKKSLAYVDNILKKSNKKLEELHHKLQELNAHIVVSDPEDITDCPRTPDTPNNDPRCSTSNNRLKALQKQLDIELKVKQGAENMIQMYSNGSSKDRKLHGTAQQLLQDSKTKIEVIRMQILQAVQTNELAFDNAKPVISPLELRMEELRHHFRIEFAVAEGAKNVMKLLGSGKVTDRKALSEAQARFNESSQKLDLLKYSLEQRLNEVPKNHPKSRIIIEELSLVAASPTLSPRQSMISTQNQYSTLSKPAALTGTLEVRLMGCQDILENVPGRSKATSVALPGWSPSETRSSFMSRTSKSKSGSSRNLLKTDDLSNDVCAVLKLDNTVVGQTSWKPISNQSWDQKFTLELDRSRELEISVYWRDWRSLCAVKFLRLEDFLDNQRHGMCLYLEPQGTLFAEVTFFNPVIERRPKLQRQKKIFSKQQGKTFLRAPQMNINIATWGRLVRRAIPTVNHSGTFSPQAPVPTTVPVVDVRIPQLAPPASDSTVTKLDFDLEPEPPPAPPRASSLGEIDESSELRVLDIPGQDSETVFDIQNDRNSILPKSQSEYKPDTPQSGLEYSGIQELEDRRSQQRFQFNLQDFRCCAVLGRGHFGKVLLAEYKNTNEMFAIKALKKGDIVARDEVDSLMCEKRIFETVNSVRHPFLVNLFACFQTKEHVCFVMEYAAGGDLMMHIHTDVFSEPRAVFYAACVVLGLQYLHEHKIVYRDLKLDNLLLDTEGFVKIADFGLCKEGMGYGDRTSTFCGTPEFLAPEVLTETSYTRAVDWWGLGVLIYEMLVGESPFPGDDEEEVFDSIVNDEVRYPRFLSTEAISIMRRLLRRNPERRLGASEKDAEDVKKHPFFRLIDWSALMDKKVKPPFIPTIRGREDVSNFDDEFTSEAPILTPPREPRILSEEEQEMFRDFDYIADWC

SEQ ID NO: 68283 - protein, 65 aa, Homo sapiens
  Payload ID: 13603
  Gene Symbol: PKN2
  Gene Name: protein kinase N2
  ENSP ID: ENSP00000389076
  MOD_RES (1)..(1): Any amino acid
XGFVKIADFGLCKEGMGYGDRTSTFCGTPEFLAPEVLTETSYTRAVDWWGLGVLIYEMLVGETSV

SEQ ID NO: 68284 - protein, 211 aa, Homo sapiens
  Payload ID: 13603
  Gene Symbol: PKN2
  Gene Name: protein kinase N2
  ENSP ID: ENSP00000401125
  MOD_RES (1)..(1): Any amino acid
XEELRHHFRIEFAVAEGAKNVMKLLGSGKVTDRKALSEAQARFNESSQKLDLLKYSLEQRLNEVPKNHPKSRIIIEELSLVAASPTLSPRQSMISTQNQYSTLSKPAALTDDVCAVLKLDNTVVGQTSWKPISNQSWDQKFTLELDRSRELEISVYWRDWRSLCAVKFLRLEDFLDNQRHGMCLYLEPQGTLFAEVTFFNPVIERRPKLQR

SEQ ID NO: 68285 - protein, 889 aa, Homo sapiens
  Payload ID: 13604
  Gene Symbol: PKN3
  Gene Name: protein kinase N3
  Uniprot ID: Q6P5Z2
  ENSP ID: ENSP00000291906
MEEGAPRQPGPSQWPPEDEKEVIRRAIQKELKIKEGVENLRRVATDRRHLGHVQQLLRSSNRRLEQLHGELRELHARILLPGPGPGPAEPVASGPRPWAEQLRARHLEALRRQLHVELKVKQGAENMTHTCASGTPKERKLLAAAQQMLRDSQLKVALLRMKISSLEASGSPEPGPELLAEELQHRLHVEAAVAEGAKNVVKLLSSRRTQDRKALAEAQAQLQESSQKLDLLRLALEQLLEQLPPAHPLRSRVTRELRAAVPGYPQPSGTPVKPTALTGTLQVRLLGCEQLLTAVPGRSPAAALASSPSEGWLRTKAKHQRGRGELASEVLAVLKVDNRVVGQTGWGQVAEQSWDQTFVIPLERARELEIGVHWRDWRQLCGVAFLRLEDFLDNACHQLSLSLVPQGLLFAQVTFCDPVIERRPRLQRQERIFSKRRGQDFLRASQMNLGMAAWGRLVMNLLPPCSSPSTISPPKGCPRTPTTLREASDPATPSNFLPKKTPLGEEMTPPPKPPRLYLPQEPTSEETPRTKRPHMEPRTRRGPSPPASPTRKPPRLQDFRCLAVLGRGHFGKVLLVQFKGTGKYYAIKALKKQEVLSRDEIESLYCEKRILEAVGCTGHPFLLSLLACFQTSSHACFVTEFVPGGDLMMQIHEDVFPEPQARFYVACVVLGLQFLHEKKIIYRDLKLDNLLLDAQGFLKIADFGLCKEGIGFGDRTSTFCGTPEFLAPEVLTQEAYTRAVDWWGLGVLLYEMLVGECPFPGDTEEEVFDCIVNMDAPYPGFLSVQGLEFIQKLLQKCPEKRLGAGEQDAEEIKVQPFFRTTNWQALLARTIQPPFVPTLCGPADLRYFEGEFTGLPPALTPPAPHSLLTARQQAAFRDFDFVSERFLEP

SEQ ID NO: 68286 - protein, 207 aa, Homo sapiens
  Payload ID: 13605
  Gene Symbol: PRKAA1
  Gene Name: protein kinase, AMP-activated, alpha 1 catalytic subunit
  ENSP ID: ENSP00000296800
MATAEKQKHDGRVKIGHYILGDTLGVGTFGKVKVGKHELTGHKVAVKILNRQKIRSLDVVGKIRREIQNLKLFRHPHIIKLYQVISTPSDIFMVMEYVSGGELFDYICKNGRLDEKESRRLFQQILSGVDYCHRHMVVHRDLKPENVLLDAHMNAKIADFGLSNMMSDGEFLRTSCGSPNYAAPEVISGRDCNIIRILTSQFTNYQH

SEQ ID NO: 68287 - protein, 574 aa, Homo sapiens
  Payload ID: 13605
  Gene Symbol: PRKAA1
  Gene Name: protein kinase, AMP-activated, alpha 1 catalytic subunit
  Uniprot ID: Q13131
  ENSP ID: ENSP00000346148
MRRLSSWRKMATAEKQKHDGRVKIGHYILGDTLGVGTFGKVKVGKHELTGHKVAVKILNRQKIRSLDVVGKIRREIQNLKLFRHPHIIKLYQVISTPSDIFMVMEYVSGGELFDYICKNGRKSDVPGVVKTGSTKELDEKESRRLFQQILSGVDYCHRHMVVHRDLKPENVLLDAHMNAKIADFGLSNMMSDGEFLRTSCGSPNYAAPEVISGRLYAGPEVDIWSSGVILYALLCGTLPFDDDHVPTLFKKICDGIFYTPQYLNPSVISLLKHMLQVDPMKRATIKDIREHEWFKQDLPKYLFPEDPSYSSTMIDDEALKEVCEKFECSEEEVLSCLYNRNHQDPLAVAYHLIIDNRRIMNEAKDFYLATSPPDSFLDDHHLTRPHPERVPFLVAETPRARHTLDELNPQKSKHQGVRKAKWHLGIRSQSRPNDIMAEVCRAIKQLDYEWKVVNPYYLRVRRKNPVTSTYSKMSLQLYQVDSRTYLLDFRSIDDEITEAKSGTATPQRSGSVSNYRSCQRSDSDAEAQGKSSEVSLTSSVTSLDSSPVDLTPRPGSHTIEFFEMCANLIKILAQ

SEQ ID NO: 68288 - protein, 559 aa, Homo sapiens
  Payload ID: 13605
  Gene Symbol: PRKAA1
  Gene Name: protein kinase, AMP-activated, alpha 1 catalytic subunit
  Uniprot ID: Q13131
  ENSP ID: ENSP00000380317
MRRLSSWRKMATAEKQKHDGRVKIGHYILGDTLGVGTFGKVKVGKHELTGHKVAVKILNRQKIRSLDVVGKIRREIQNLKLFRHPHIIKLYQVISTPSDIFMVMEYVSGGELFDYICKNGRLDEKESRRLFQQILSGVDYCHRHMVVHRDLKPENVLLDAHMNAKIADFGLSNMMSDGEFLRTSCGSPNYAAPEVISGRLYAGPEVDIWSSGVILYALLCGTLPFDDDHVPTLFKKICDGIFYTPQYLNPSVISLLKHMLQVDPMKRATIKDIREHEWFKQDLPKYLFPEDPSYSSTMIDDEALKEVCEKFECSEEEVLSCLYNRNHQDPLAVAYHLIIDNRRIMNEAKDFYLATSPPDSFLDDHHLTRPHPERVPFLVAETPRARHTLDELNPQKSKHQGVRKAKWHLGIRSQSRPNDIMAEVCRAIKQLDYEWKVVNPYYLRVRRKNPVTSTYSKMSLQLYQVDSRTYLLDFRSIDDEITEAKSGTATPQRSGSVSNYRSCQRSDSDAEAQGKSSEVSLTSSVTSLDSSPVDLTPRPGSHTIEFFEMCANLIKILAQ

SEQ ID NO: 68289 - protein, 552 aa, Homo sapiens
  Payload ID: 13606
  Gene Symbol: PRKAA2
  Gene Name: protein kinase, AMP-activated, alpha 2 catalytic subunit
  Uniprot ID: P54646
  ENSP ID: ENSP00000360290
MAEKQKHDGRVKIGHYVLGDTLGVGTFGKVKIGEHQLTGHKVAVKILNRQKIRSLDVVGKIKREIQNLKLFRHPHIIKLYQVISTPTDFFMVMEYVSGGELFDYICKHGRVEEMEARRLFQQILSAVDYCHRHMVVHRDLKPENVLLDAHMNAKIADFGLSNMMSDGEFLRTSCGSPNYAAPEVISGRLYAGPEVDIWSCGVILYALLCGTLPFDDEHVPTLFKKIRGGVFYIPEYLNRSVATLLMHMLQVDPLKRATIKDIREHEWFKQDLPSYLFPEDPSYDANVIDDEAVKEVCEKFECTESEVMNSLYSGDPQDQLAVAYHLIIDNRRIMNQASEFYLASSPPSGSFMDDSAMHIPPGLKPHPERMPPLIADSPKARCPLDALNTTKPKSLAVKKAKWHLGIRSQSKPYDIMAEVYRAMKQLDFEWKVVNAYHLRVRRKNPVTGNYVKMSLQLYLVDNRSYLLDFKSIDDEVVEQRSGSSTPQRSCSAAGLHRPRSSFDSTTAESHSLSGSLTGSLTGSTLSSVSPRLGSHTMDFFEMCASLITTLAR

SEQ ID NO: 68290 - protein, 552 aa, Homo sapiens [sequence omitted]

SEQ ID NO: 68291 - protein, 270 aa, Homo sapiens
  Payload ID: 13607
  Gene Symbol: PRKAB1
  Gene Name: protein kinase, AMP-activated, beta 1 non-catalytic subunit
  Uniprot ID: Q9Y478
  ENSP ID: ENSP00000229328
MGNTSSERAALERHGGHKTPRRDSSGGTKDGDRPKILMDSPEDADLFHSEEIKAPEKEEFLAWQHDLEVNDKAPAQARPTVFRWTGGGKEVYLSGSFNNWSKLPLTRSHNNFVAILDLPEGEHQYKFFVDGQWTHDPSEPIVTSQLGTVNNIIQVKKTDFEVFDALMVDSQKCSDVSELSSSPPGPYHQEPYVCKPEERFRAPPILPPHLLQVILNKDTGISCDPALLPEPNHVMLNHLYALSIKDGVMVLSATHRYKKKYVTTLLYKPI

SEQ ID NO: 68292 - protein, 62 aa, Homo sapiens
  Payload ID: 13607
  Gene Symbol: PRKAB1
  Gene Name: protein kinase, AMP-activated, beta 1 non-catalytic subunit
  ENSP ID: ENSP00000437993
MVDSQKCSDVSELSSSPPGPYHQEPYVCKPEERFRAPPILPPHLLQVILNKDTGISCDPALL

SEQ ID NO: 68293 - protein, 104 aa, Homo sapiens
  Payload ID: 13607
  Gene Symbol: PRKAB1
  Gene Name: protein kinase, AMP-activated, beta 1 non-catalytic subunit
  ENSP ID: ENSP00000439235
MVDSQKCSDVSELSSSPPGPYHQEPYVCKPEERFRAPPILPPHLLQVILNKDTGISCDPALLPEPNHVMLNHLYALSIKDGVMVLSATHRYKKKYVTTLLYKPI

SEQ ID NO: 68294 - protein, 270 aa, Homo sapiens; identical to SEQ ID NO: 68291
  Payload ID: 13607
  Gene Symbol: PRKAB1
  Gene Name: protein kinase, AMP-activated, beta 1 non-catalytic subunit
  Uniprot ID: Q9Y478
  ENSP ID: ENSP00000441369

SEQ ID NO: 68295 - protein, 58 aa, Homo sapiens
  Payload ID: 13607
  Gene Symbol: PRKAB1
  Gene Name: protein kinase, AMP-activated, beta 1 non-catalytic subunit
  ENSP ID: ENSP00000444816
MGNTSSERAALERHGGHKTPRRDSSGGTKDGDRPKILMDSPEDADLFHSEEIKDGRRE

SEQ ID NO: 68296 - protein, 58 aa, Homo sapiens; identical to SEQ ID NO: 68295
  Payload ID: 13607
  Gene Symbol: PRKAB1
  Gene Name: protein kinase, AMP-activated, beta 1 non-catalytic subunit
  ENSP ID: ENSP00000486936

SEQ ID NO: 68297 - protein, 272 aa, Homo sapiens
  Payload ID: 13608
  Gene Symbol: PRKAB2
  Gene Name: protein kinase, AMP-activated, beta 2 non-catalytic subunit
  Uniprot ID: O43741
  ENSP ID: ENSP00000254101
MGNTTSDRVSGERHGAKAARSEGAGGHAPGKEHKIMVGSTDDPSVFSLPDSKLPGDKEFVSWQQDLEDSVKPTQQARPTVIRWSEGGKEVFISGSFNNWSTKIPLIKSHNDFVAILDLPEGEHQYKFFVDGQWVHDPSEPVVTSQLGTINNLIHVKKSDFEVFDALKLDSMESSETSCRDLSSSPPGPYGQEMYAFRSEERFKSPPILPPHLLQVILNKDTNISCDPALLPEPNHVMLNHLYALSIKDSVMVLSATHRYKKKYVTTLLYKPI

SEQ ID NO: 68298 - protein, 340 aa, Homo sapiens
  Payload ID: 13609
  Gene Symbol: PRKAG1
  Gene Name: protein kinase, AMP-activated, gamma 1 non-catalytic subunit
  Uniprot ID: P54619
  ENSP ID: ENSP00000323867
METVISSDSSPAVENEHPQETPESNNSVYTSFMKSHRCYDLIPTSSKLVVFDTSLQVKKAFFALVTNGVRAAPLWDSKKQSFVVLRALSCPLGMLTITDFINILHRYYKSALVQIYELEEHKIETWREVYLQDSFKPLVCISPNASLFDAVSSLIRNKIHRLPVIDPESGNTLYILTHKRILKFLKLFITEFPKPEFMSKSLEELQIGTYANIAMVRTTTPVYVALGIFVQHRVSALPVVDEKGRVVDIYSKFDVINLAAEKTYNNLDVSVTKALQHRSHYFEGVLKCYLHETLETIINRLVEAEVHRLVVVDENDVVKGIVSLSDILQALVLTGGEKKP

SEQ ID NO: 68299 - protein, 93 aa, Homo sapiens
  Payload ID: 13609
  Gene Symbol: PRKAG1
  Gene Name: protein kinase, AMP-activated, gamma 1 non-catalytic subunit
  ENSP ID: ENSP00000446987
RVVDIYSKFDVINLAAEKTYNNLDVSVTKALQHRSHYFEGVLKCYLHETLETIINRLVEAEVHRLVVVDENDVVKGICPTHCLLEALWESDET

SEQ ID NO: 68300 - protein, 331 aa, Homo sapiens
  Payload ID: 13609
  Gene Symbol: PRKAG1
  Gene Name: protein kinase, AMP-activated, gamma 1 non-catalytic subunit
  Uniprot ID: P54619
  ENSP ID: ENSP00000447433
METVISSDSSPAVENEHPQETPESNNSVYTSFMKSHRCYDLIPTSSKLVVFDTSLQVKKAFFALVTNGVRAAPLWDSKKQSFVGMLTITDFINILHRYYKSALVQIYELEEHKIETWREVYLQDSFKPLVCISPNASLFDAVSSLIRNKIHRLPVIDPESGNTLYILTHKRILKFLKLFITEFPKPEFMSKSLEELQIGTYANIAMVRTTTPVYVALGIFVQHRVSALPVVDEKGRVVDIYSKFDVINLAAEKTYNNLDVSVTKALQHRSHYFEGVLKCYLHETLETIINRLVEAEVHRLVVVDENDVVKGIVSLSDILQALVLTGGEKKP

SEQ ID NO: 68301 - protein, 82 aa, Homo sapiens
  Payload ID: 13609
  Gene Symbol: PRKAG1
  Gene Name: protein kinase, AMP-activated, gamma 1 non-catalytic subunit
  ENSP ID: ENSP00000447637
METVISSDSSPAVENEHPQETPESNNSVYTSFMKSHRCYDLIPTSSKLVVFDTSLQSCPCGFAFMIITVLATGEESFFCFGD

SEQ ID NO: 68302 - protein, 202 aa, Homo sapiens
  Payload ID: 13609
  Gene Symbol: PRKAG1
  Gene Name: protein kinase, AMP-activated, gamma 1 non-catalytic subunit
  ENSP ID: ENSP00000447671
MSILKVKKAFFALVTNGVRAAPLWDSKKQSFVGMLTITDFINILHRYYKSALVQIYELEEHKIETWREVYLQDSFKPLVCISPNARSLSSPSQSSCPSLWKSYRLAPMPILLWFALPPPSMWLWGFLYSIESQPCQWWMRRNLAAEKTYNNLDVSVTKALQHRSHYFEGVLKCYLHETLETIINRLVEAEVHRLVVVDENDV

SEQ ID NO: 68303 - protein, 125 aa, Homo sapiens
  Payload ID: 13609
  Gene Symbol: PRKAG1
  Gene Name: protein kinase, AMP-activated, gamma 1 non-catalytic subunit
  ENSP ID: ENSP00000448251
MKSHRCYDLIPTSSKLVVFDTSLQVKKAFFALVTNGVRAAPLWDSKKQSFVGMLTITDFINILHRYYKSALVQIYELEEHKIETWREVYLQDSFKPLVCISPNASLFDAVSSLIRNKIHRLPVID

SEQ ID NO: 68304 - protein, 69 aa, Homo sapiens
  Payload ID: 13609
  Gene Symbol: PRKAG1
  Gene Name: protein kinase, AMP-activated, gamma 1 non-catalytic subunit
  ENSP ID: ENSP00000448290
MKSHRCYDLIPTSSKLVVFDTSLQVKKAFFALVTNGVRAAPLWDSKKQSFVGMLTITDFINILHRYYKS

SEQ ID NO: 68305 - protein, 82 aa, Homo sapiens
  Payload ID: 13609
  Gene Symbol: PRKAG1
  Gene Name: protein kinase, AMP-activated, gamma 1 non-catalytic subunit
  ENSP ID: ENSP00000448739
MKSHRCYDLIPTSSKLVVFDTSLQVKKAFFALVTNGVRAAPLWDSKKQSFVGMLTITDFINILHRYYKSALVQIYELEEHKI

SEQ ID NO: 68306 - protein, 280 aa, Homo sapiens
  Payload ID: 13609
  Gene Symbol: PRKAG1
  Gene Name: protein kinase, AMP-activated, gamma 1 non-catalytic subunit
  ENSP ID: ENSP00000448873
MSILKVKKAFFALVTNGVRAAPLWDSKKQSFVGMLTITDFINILHRYYKSALVQIYELEEHKIETWREVYLQDSFKPLVCISPNASLFDAVSSLIRNKIHRLPVIDPESGNTLYILTHKRILKFLKLFITEFPKPEFMSKSLEELQIGTYANIAMVRTTTPVYVALGIFVQHRVSALPVVDEKGRVVDIYSKFDVINLAAEKTYNNLDVSVTKALQHRSHYFEGVLKCYLHETLETIINRLVEAEVHRLVVVDENDVVKGIVSLSDILQALVLTGGEKKP

SEQ ID NO: 68307 - protein, 299 aa, Homo sapiens
  Payload ID: 13609
  Gene Symbol: PRKAG1
  Gene Name: protein kinase, AMP-activated, gamma 1 non-catalytic subunit
  Uniprot ID: P54619
  ENSP ID: ENSP00000448972
MKSHRCYDLIPTSSKLVVFDTSLQVKKAFFALVTNGVRAAPLWDSKKQSFVGMLTITDFINILHRYYKSALVQIYELEEHKIETWREVYLQDSFKPLVCISPNASLFDAVSSLIRNKIHRLPVIDPESGNTLYILTHKRILKFLKLFITEFPKPEFMSKSLEELQIGTYANIAMVRTTTPVYVALGIFVQHRVSALPVVDEKGRVVDIYSKFDVINLAAEKTYNNLDVSVTKALQHRSHYFEGVLKCYLHETLETIINRLVEAEVHRLVVVDENDVVKGIVSLSDILQALVLTGGEKKP

SEQ ID NO: 68308 - protein, 28 aa, Homo sapiens
  Payload ID: 13609
  Gene Symbol: PRKAG1
  Gene Name: protein kinase, AMP-activated, gamma 1 non-catalytic subunit
  ENSP ID: ENSP00000449104
MLTITDFINILHRYYKSALVQIYELEEH

SEQ ID NO: 68309 - protein, 251 aa, Homo sapiens
  Payload ID: 13609
  Gene Symbol: PRKAG1
  Gene Name: protein kinase, AMP-activated, gamma 1 non-catalytic subunit
  ENSP ID: ENSP00000449121
NSVYTSFMKSHRCYDLIPTSSKLVVFDTSLQVKKAFFALVTNGVRAAPLWDSKKQSFVGMLTITDFINILHRYYKSALVQIYELEEHKIETWREVYLQDSFKPLVCISPNARSLSSPSQSSCPSLWKSYRLAPMPILLWFALPPPSMWLWGFLYSIESQPCQWWMRRNLAAEKTYNNLDVSVTKALQHRSHYFEGVLKCYLHETLETIINRLVEAEVHRLVVVDENDVVKGIVSLSDILQALVLTGGEKKP

SEQ ID NO: 68310 - protein, 161 aa, Homo sapiens
  Payload ID: 13609
  Gene Symbol: PRKAG1
  Gene Name: protein kinase, AMP-activated, gamma 1 non-catalytic subunit
  ENSP ID: ENSP00000449637
MKSHRCYDLIPTSSKLVVFDTSLQVKKAFFALVTNGVRAAPLWDSKKQSFVGMLTITDFINILHRYYKSALVQIYELEEHKIETWREVYLQDSFKPLVCISPNASLFDAVSSLIRNKIHRLPVIDPESGNTLYILTHKRILKFLKLFITEFPKPEFMSKSL

SEQ ID NO: 68311 - protein, 145 aa, Homo sapiens
  Payload ID: 13609
  Gene Symbol: PRKAG1
  Gene Name: protein kinase, AMP-activated, gamma 1 non-catalytic subunit
  ENSP ID: ENSP00000450112
MLTITDFINILHRYYKSALVQIYELEEHKIETWREVYLQDSFKPLVCISPNASLFDAVSSLIRNKIHRLPVIDPESGNTLYILTHKRILKFLKLFITEFPKPEFMSKSLEELQIGTYANIAMVRTTTPVYVALGIFVQHRVSALP

SEQ ID NO: 68312 - protein, 43 aa, Homo sapiens
  Payload ID: 13609
  Gene Symbol: PRKAG1
  Gene Name: protein kinase, AMP-activated, gamma 1 non-catalytic subunit
  ENSP ID: ENSP00000450273
MFSLTGVMVISSDSSPAVENEHPQETPESNNSVYTSFMKSHRC

SEQ ID NO: 68313 - protein, 569 aa, Homo sapiens
  Payload ID: 13610
  Gene Symbol: PRKAG2
  Gene Name: protein kinase, AMP-activated, gamma 2 non-catalytic subunit
  Uniprot ID: Q9UGJ0
  ENSP ID: ENSP00000287878
MGSAVMDTKKKKDVSSPGGSGGKKNASQKRRSLRVHIPDLSSFAMPLLDGDLEGSGKHSSRKVDSPFGPGSPSKGFFSRGPQPRPSSPMSAPVRPKTSPGSPKTVFPFSYQESPPRSPRRMSFSGIFRSSSKESSPNSNPATSPGGIRFFSRSRKTSGLSSSPSTPTQVTKQHTFPLESYKHEPERLENRIYASSSPPDTGQRFCPSSFQSPTRPPLASPTHYAPSKAAALAAALGPAEAGMLEKLEFEDEAVEDSESGVYMRFMRSHKCYDIVPTSSKLVVFDTTLQVKKAFFALVANGVRAAPLWESKKQSFVGMLTITDFINILHRYYKSPMVQIYELEEHKIETWRELYLQETFKPLVNISPDASLFDAVYSLIKNKIHRLPVIDPISGNALYILTHKRILKFLQLFMSDMPKPAFMKQNLDELGIGTYHNIAFIHPDTPIIKALNIFVERRISALPVVDESGKVVDIYSKFDVINLAAEKTYNNLDITVTQALQHRSQYFEGVVKCNKLEILETIVDRIVRAEVHRLVVVNEADSIVGIISLSDILQALILTPAGAKQKETETE

SEQ ID NO: 68314 - protein, 525 aa, Homo sapiens
  Payload ID: 13610
  Gene Symbol: PRKAG2
  Gene Name: protein kinase, AMP-activated, gamma 2 non-catalytic subunit
  Uniprot ID: Q9UGJ0
  ENSP ID: ENSP00000376549
MPLLDGDLEGSGKHSSRKVDSPFGPGSPSKGFFSRGPQPRPSSPMSAPVRPKTSPGSPKTVFPFSYQESPPRSPRRMSFSGIFRSSSKESSPNSNPATSPGGIRFFSRSRKTSGLSSSPSTPTQVTKQHTFPLESYKHEPERLENRIYASSSPPDTGQRFCPSSFQSPTRPPLASPTHYAPSKAAALAAALGPAEAGMLEKLEFEDEAVEDSESGVYMRFMRSHKCYDIVPTSSKLVVFDTTLQVKKAFFALVANGVRAAPLWESKKQSFVGMLTITDFINILHRYYKSPMVQIYELEEHKIETWRELYLQETFKPLVNISPDASLFDAVYSLIKNKIHRLPVIDPISGNALYILTHKRILKFLQLFMSDMPKPAFMKQNLDELGIGTYHNIAFIHPDTPIIKALNIFVERRISALPVVDESGKVVDIYSKFDVINLAAEKTYNNLDITVTQALQHRSQYFEGVVKCNKLEILETIVDRIVRAEVHRLVVVNEADSIVGIISLSDILQALILTPAGAKQKETETE

SEQ ID NO: 68315 - protein, 328 aa, Homo sapiens
  Payload ID: 13610
  Gene Symbol: PRKAG2
  Gene Name: protein kinase, AMP-activated, gamma 2 non-catalytic subunit
  Uniprot ID: Q9UGJ0
  ENSP ID: ENSP00000387386
MLEKLEFEDEAVEDSESGVYMRFMRSHKCYDIVPTSSKLVVFDTTLQVKKAFFALVANGVRAAPLWESKKQSFVGMLTITDFINILHRYYKSPMVQIYELEEHKIETWRELYLQETFKPLVNISPDASLFDAVYSLIKNKIHRLPVIDPISGNALYILTHKRILKFLQLFMSDMPKPAFMKQNLDELGIGTYHNIAFIHPDTPIIKALNIFVERRISALPVVDESGKVVDIYSKFDVINLAAEKTYNNLDITVTQALQHRSQYFEGVVKCNKLEILETIVDRIVRAEVHRLVVVNEADSIVGIISLSDILQALILTPAGAKQKETETE

SEQ ID NO: 68316 - protein, 52 aa, Homo sapiens
  Payload ID: 13610
  Gene Symbol: PRKAG2
  Gene Name: protein kinase, AMP-activated, gamma 2 non-catalytic subunit
  ENSP ID: ENSP00000417252
MLEKLEFEDEARCQGALIVCACHHALGGNPESYPQSRPFNHRLVPLSAPVKI

SEQ ID NO: 68317 - protein, 163 aa, Homo sapiens
  Payload ID: 13610
  Gene Symbol: PRKAG2
  Gene Name: protein kinase, AMP-activated, gamma 2 non-catalytic subunit
  ENSP ID: ENSP00000419493
MLEKLEFEDEAVEDSESGVYMRFMRSHKCYDIVPTSSKLVVFDTTLQVKKAFFALVANGVRAAPLWESKKQSFVGMLTITDFINILHRYYKSPMVQIYELEEHKIETWRELYLQETFKPLVNISPDASLFDAVYSLIKNKIHRLPVIDPISGNALYILTHKRI

SEQ ID NO: 68318 - protein, 445 aa, Homo sapiens
  Payload ID: 13610
  Gene Symbol: PRKAG2
  Gene Name: protein kinase, AMP-activated, gamma 2 non-catalytic subunit
  ENSP ID: ENSP00000419577
MKRFGSLRSNKKHKDQNRSTERRQSEPHGLFASGLSSSPSTPTQVTKQHTFPLESYKHEPERLENRIYASSSPPDTGQRFCPSSFQSPTRPPLASPTHYAPSKAAALAAALGPAEAGMLEKLEFEDEAVEDSESGVYMRFMRSHKCYDIVPTSSKLVVFDTTLQVKKAFFALVANGVRAAPLWESKKQSFVGMLTITDFINILHRYYKSPMVQIYELEEHKIETWRELYLQETFKPLVNISPDASLFDAVYSLIKNKIHRLPVIDPISGNALYILTHKRILKFLQLFMSDMPKPAFMKQNLDELGIGTYHNIAFIHPDTPIIKALNIFVERRISALPVVDESGKVVDIYSKFDVINLAAEKTYNNLDITVTQALQHRSQYFEGVVKCNKLEILETIVDRIVRAEVHRLVVVNEADSIVGIISLSDILQALILTPAGAKQKETETE

SEQ ID NO: 68319 - protein, 118 aa, Homo sapiens
  Payload ID: 13610
  Gene Symbol: PRKAG2
  Gene Name: protein kinase, AMP-activated, gamma 2 non-catalytic subunit
  ENSP ID: ENSP00000420645
MLTITDFINILHRYYKSPMVQIYELEEHKIETWRELYLQETFKPLVNISPDASLFDAVYSLIKNKIHRLPVIDPISGNALYILTHKRILKFLQLFVHQEDGINYTLYKRCLICQSLPS

SEQ ID NO: 68320 - protein, 229 aa, Homo sapiens
  Payload ID: 13610
  Gene Symbol: PRKAG2
  Gene Name: protein kinase, AMP-activated, gamma 2 non-catalytic subunit
  ENSP ID: ENSP00000420783
MGSAVMDTKKKKDVSSPGGSGGKKNASQKRRSLRVHIPDLSSFAMPLLDGDLEGSGKHSSRKVDSPFGPGSPSKGFFSRGPQPRPSSPMSAPVRPKTSPGSPKTVFPFSYQESPPRSPRRMSFSGIFRSSSKESSPNSNPATSPGGIRFFSRSRKTSGLSSSPSTPTQVTKQHTFPLESYKHEPERLENRIYASSSPPDTGQRFCPSSFQSPTRPPLASPTHYAPSKAQ

SEQ ID NO: 68321 - protein, 489 aa, Homo sapiens
  Payload ID: 13611
  Gene Symbol: PRKAG3
  Gene Name: protein kinase, AMP-activated, gamma 3 non-catalytic subunit
  Uniprot ID: Q9UGI9
  ENSP ID: ENSP00000233944
MEPGLEHALRRTPSWSSLGGSEHQEMSFLEQENSSSWPSPAVTSSSERIRGKRRAKALRWTRQKSVEEGEPPGQGEGPRSRPAAESTGLEATFPKTTPLAQADPAGVGTPPTGWDCLPSDCTASAAGSSTDDVELATEFPATEAWECELEGLLEERPALCLSPQAPFPKLGWDDELRKPGAQIYMRFMQEHTCYDAMATSSKLVIFDTMLEIKKAFFALVANGVRAAPLWDSKKQSFVGMLTITDFILVLHRYYRSPLVQIYEIEQHKIETWREIYLQGCFKPLVSISPNDSLFEAVYTLIKNRIHRLPVLDPVSGNVLHILTHKRLLKFLHIFGSLLPRPSFLYRTIQDLGIGTFRDLAVVLETAPILTALDIFVDRRVSALPVVNECGQVVGLYSRFDVIHLAAQQTYNHLDMSVGEALRQRTLCLEGVLSCQPHESLGEVIDRIAREQVHRLVLVDETQHLLGVVSLSDILQALVLSPAGIDALGA

SEQ ID NO: 68322 - protein, 489 aa, Homo sapiens; identical to SEQ ID NO: 68321
  Payload ID: 13611
  Gene Symbol: PRKAG3
  Gene Name: protein kinase, AMP-activated, gamma 3 non-catalytic subunit
  Uniprot ID: Q9UGI9
  ENSP ID: ENSP00000397133

SEQ ID NO: 68323 - protein, 100 aa, Homo sapiens
  Payload ID: 13611
  Gene Symbol: PRKAG3
  Gene Name: protein kinase, AMP-activated, gamma 3 non-catalytic subunit
  ENSP ID: ENSP00000416100
MEPGLEHALRRTPSWSSLGGSEHQEMSFLEQENSSSWPSPAVTSSSERIRGKRRAKALRWTRQKSVEEGEPPGPRSRPAAESTGLEATFPKTTPLAQADP

SEQ ID NO: 68324 - protein, 353 aa, Homo sapiens
  Payload ID: 13611
  Gene Symbol: PRKAG3
  Gene Name: protein kinase, AMP-activated, gamma 3 non-catalytic subunit
  ENSP ID: ENSP00000419272
MEPGLEHALRRTPSWSSLGGSEHQEMSFLEQENSSSWPSPAVTSSSERIRGKRRAKALRWTRQKSVEEGEPPGQGEGPRSRPAAESTGLEATFPKTTPLAQADPAGVGTPPTGWDCLPSDCTASAAGSSTDDVELATEFPATEAWECELEGLLEERPALCLSPQAPFPKLGWDDELRKPGAQIYMRFMQEHTCYDAMATSSKLVIFDTMLEIKKAFFALVANGVRAAPLWDSKKQSFVGMLTITDFILVLHRYYRSPLRSTCKAASSLWSPSLLMIACLKLSTPSSRTGSIACLFLTRCQATYSTSSHTNACSSSCTSLVPCCPGPPSSTALSKIWASAHSETWLWCWRQHPS

SEQ ID NO: 68325 - protein, 489 aa, Homo sapiens; identical to SEQ ID NO: 68321
  Payload ID: 13611
  Gene Symbol: PRKAG3
  Gene Name: protein kinase, AMP-activated, gamma 3 non-catalytic subunit
  Uniprot ID: Q9UGI9
  ENSP ID: ENSP00000436068

SEQ ID NO: 68326 - protein, 351 aa, Homo sapiens
  Payload ID: 13612
  Gene Symbol: PRKACA
  Gene Name: protein kinase, cAMP-dependent, catalytic, alpha
  Uniprot ID: P17612
  ENSP ID: ENSP00000309591
MGNAAAAKKGSEQESVKEFLAKAKEDFLKKWESPAQNTAHLDQFERIKTLGTGSFGRVMLVKHKETGNHYAMKILDKQKVVKLKQIEHTLNEKRILQAVNFPFLVKLEFSFKDNSNLYMVMEYVPGGEMFSHLRRIGRFSEPHARFYAAQIVLTFEYLHSLDLIYRDLKPENLLIDQQGYIQVTDFGFAKRVKGRTWTLCGTPEYLAPEIILSKGYNKAVDWWALGVLIYEMAAGYPPFFADQPIQIYEKIVSGKVRFPSHFSSDLKDLLRNLLQVDLTKRFGNLKNGVNDIKNHKWFATTDWIAIYQRKVEAPFIPKFKGPGDTSNFDDYEEEEIRVSINEKCGKEFSEF

SEQ ID NO: 68327 - protein, 207 aa, Homo sapiens
  Payload ID: 13612
  Gene Symbol: PRKACA
  Gene Name: protein kinase, cAMP-dependent, catalytic, alpha
  ENSP ID: ENSP00000466289
EFLAKAKEDFLKKWESPAQNTAHLDQFERIKTLGTGSFGRVMLVKHKETGNHYAMKILDKQKVVKLKQIEHTLNEKRILQAVNFPFLVKLEFSFKDNSNLYMVMEYVPGGEMFSHLRRIGRFSEPHARFYAAQIVLTFEYLHSLDLIYRDLKPENLLIDQQGYIQVTDFGFAKRVKGRTWTLCGTPEYLAPEIILSKVGASPALPFP

SEQ ID NO: 68328 - protein, 343 aa, Homo sapiens
  Payload ID: 13612
  Gene Symbol: PRKACA
  Gene Name: protein kinase, cAMP-dependent, catalytic, alpha
  Uniprot ID: P17612
  ENSP ID: ENSP00000466651
MASNSSDVKEFLAKAKEDFLKKWESPAQNTAHLDQFERIKTLGTGSFGRVMLVKHKETGNHYAMKILDKQKVVKLKQIEHTLNEKRILQAVNFPFLVKLEFSFKDNSNLYMVMEYVPGGEMFSHLRRIGRFSEPHARFYAAQIVLTFEYLHSLDLIYRDLKPENLLIDQQGYIQVTDFGFAKRVKGRTWTLCGTPEYLAPEIILSKGYNKAVDWWALGVLIYEMAAGYPPFFADQPIQIYEKIVSGKVRFPSHFSSDLKDLLRNLLQVDLTKRFGNLKNGVNDIKNHKWFATTDWIAIYQRKVEAPFIPKFKGPGDTSNFDDYEEEEIRVSINEKCGKEFSEF

SEQ ID NO: 68329 - protein, 25 aa, Homo sapiens
  Payload ID: 13612
  Gene Symbol: PRKACA
  Gene Name: protein kinase, cAMP-dependent, catalytic, alpha
  ENSP ID: ENSP00000466660
MLVKHKETGNHYAMKILDKQKVVKL

SEQ ID NO: 68330 - protein, 124 aa, Homo sapiens
  Payload ID: 13612
  Gene Symbol: PRKACA
  Gene Name: protein kinase, cAMP-dependent, catalytic, alpha
  ENSP ID: ENSP00000466976
MGNAAAAKKGSEQESVKEFLAKAKEDFLKKWESPAQPSQPTSACFKRVSQLQSDQVLLVYPGTGYGKRGSRLTPAPTHTPIPPNHRPHLLRANERSANLPFGVILPGKERFLVTCSVGCLLEFF

SEQ ID NO: 68331 - protein, 251 aa, Homo sapiens
  Payload ID: 13612
  Gene Symbol: PRKACA
  Gene Name: protein kinase, cAMP-dependent, catalytic, alpha
  ENSP ID: ENSP00000468352
  MOD_RES (1)..(1): Any amino acid
XIKTLGTGSFGRVMLVKHKETGNHYAMKILDKQKVVKLKQIEHTLNEKRILQAVNFPFLVKLEFSFKDNSNLYMVMEYVPGGEMFSHLRRIGRFSEPHARFYAAQIVLTFEYLHSLDLIYRDLKPENLLIDQQGYIQVTDFGFAKRVKGRTWTLCGTPEYLAPEIILSKGYNKAVDWWALGVLIYEMAAGYPPFFADQPIQIYEKIVSGKVEAPFIPKFKGPGDTSNFDDYEEEEIRVSINEKCGKEFSEF

SEQ ID NO: 68332 - protein, 264 aa, Homo sapiens
  Payload ID: 13613
  Gene Symbol: PRKACB
  Gene Name: protein kinase, cAMP-dependent, catalytic, beta
  ENSP ID: ENSP00000359714
MSARKSSDASACSSSEISDSFVKEFLAKAKEDFLKKWENPTQNNAGLEDFERKKTLGTGSFGRVMLVKHKATEQYYAMKILDKQKVVKLKQIEHTLNEKRILQAVNFPFLVRLEYAFKDNSNLYMVMEYVPGGEMFSHLRRIGRFSEPHARFYAAQIVLTFEYLHSLDLIYRDLKPENLLIDHQGYIQVTDFGFAKRVKGRTWTLCGTPEYLAPEIILSKGYNKAVDWWALGVLIYEMAAGYPPFFADQPIQIYEKIVSGKQNF

SEQ ID NO: 68333 - protein, 355 aa, Homo sapiens
  Payload ID: 13613
  Gene Symbol: PRKACB
  Gene Name: protein kinase, cAMP-dependent, catalytic, beta
  Uniprot ID: P22694
  ENSP ID: ENSP00000359716
MGLSRKSSDASACSSSEISVKEFLAKAKEDFLKKWENPTQNNAGLEDFERKKTLGTGSFGRVMLVKHKATEQYYAMKILDKQKVVKLKQIEHTLNEKRILQAVNFPFLVRLEYAFKDNSNLYMVMEYVPGGEMFSHLRRIGRFSEPHARFYAAQIVLTFEYLHSLDLIYRDLKPENLLIDHQGYIQVTDFGFAKRVKGRTWTLCGTPEYLAPEIILSKGYNKAVDWWALGVLIYEMAAGYPPFFADQPIQIYEKIVSGKVRFPSHFSSDLKDLLRNLLQVDLTKRFGNLKNGVSDIKTHKWFATTDWIAIYQRKVEAPFIPKFRGSGDTSNFDDYEEEDIRVSITEKCAKEFGEF

SEQ ID NO: 68334 - protein, 245 aa, Homo sapiens
  Payload ID: 13613
  Gene Symbol: PRKACB
  Gene Name: protein kinase, cAMP-dependent, catalytic, beta
  ENSP ID: ENSP00000359718
MGLLKEFLAKAKEDFLKKWENPTQNNAGLEDFERKKTLGTGSFGRVMLVKHKATEQYYAMKILDKQKVVKLKQIEHTLNEKRILQAVNFPFLVRLEYAFKDNSNLYMVMEYVPGGEMFSHLRRIGRFSEPHARFYAAQIVLTFEYLHSLDLIYRDLKPENLLIDHQGYIQVTDFGFAKRVKGRTWTLCGTPEYLAPEIILSKGYNKAVDWWALGVLIYEMAAGYPPFFADQPIQIYEKIVSGKNF

SEQ ID NO: 68335 - protein, 398 aa, Homo sapiens
  Payload ID: 13613
  Gene Symbol: PRKACB
  Gene Name: protein kinase, cAMP-dependent, catalytic, beta
  Uniprot ID: P22694
  ENSP ID: ENSP00000359719
MAAYREPPCNQYTGTTTALQKLEGFASRLFHRHSKGTAHDQKTALENDSLHFSEHTALWDRSMKEFLAKAKEDFLKKWENPTQNNAGLEDFERKKTLGTGSFGRVMLVKHKATEQYYAMKILDKQKVVKLKQIEHTLNEKRILQAVNFPFLVRLEYAFKDNSNLYMVMEYVPGGEMFSHLRRIGRFSEPHARFYAAQIVLTFEYLHSLDLIYRDLKPENLLIDHQGYIQVTDFGFAKRVKGRTWTLCGTPEYLAPEIILSKGYNKAVDWWALGVLIYEMAAGYPPFFADQPIQIYEKIVSGKVRFPSHFSSDLKDLLRNLLQVDLTKRFGNLKNGVSDIKTHKWFATTDWIAIYQRKVEAPFIPKFRGSGDTSNFDDYEEEDIRVSITEKCAKEFGEF

SEQ ID NO: 68336 - protein, 257 aa, Homo sapiens
  Payload ID: 13613
  Gene Symbol: PRKACB
  Gene Name: protein kinase, cAMP-dependent, catalytic, beta
  Uniprot ID: P22694
  ENSP ID: ENSP00000359722
MGNAATAKKGSEVESVKEFLAKAKEDFLKKWENPTQNNAGLEDFERKKTLGTGSFGRVMLVKHKATEQYYAMKILDKQKVVKLKQIEHTLNEKRILQAVNFPFLVRLEYAFKDNSNLYMVMEYVPGGEMFSHLRRIGRFSEPHARFYAAQIVLTFEYLHSLDLIYRDLKPENLLIDHQGYIQVTDFGFAKRVKGRTWTLCGTPEYLAPEIILSKGYNKAVDWWALGVLIYEMAAGYPPFFADQPIQIYEKIVSGKNF

SEQ ID NO: 68337 - protein, 351 aa, Homo sapiens
  Payload ID: 13613
  Gene Symbol: PRKACB
  Gene Name: protein kinase, cAMP-dependent, catalytic, beta
  Uniprot ID: P22694
  ENSP ID: ENSP00000359723
MGNAATAKKGSEVESVKEFLAKAKEDFLKKWENPTQNNAGLEDFERKKTLGTGSFGRVMLVKHKATEQYYAMKILDKQKVVKLKQIEHTLNEKRILQAVNFPFLVRLEYAFKDNSNLYMVMEYVPGGEMFSHLRRIGRFSEPHARFYAAQIVLTFEYLHSLDLIYRDLKPENLLIDHQGYIQVTDFGFAKRVKGRTWTLCGTPEYLAPEIILSKGYNKAVDWWALGVLIYEMAAGYPPFFADQPIQIYEKIVSGKVRFPSHFSSDLKDLLRNLLQVDLTKRFGNLKNGVSDIKTHKWFATTDWIAIYQRKVEAPFIPKFRGSGDTSNFDDYEEEDIRVSITEKCAKEFGEF

SEQ ID NO: 68338 - protein, 357 aa, Homo sapiens
  Payload ID: 13613
  Gene Symbol: PRKACB
  Gene Name: protein kinase, cAMP-dependent, catalytic, beta
  ENSP ID: ENSP00000378314
MGLSRKSSDASACSSSEISDFVKEFLAKAKEDFLKKWENPTQNNAGLEDFERKKTLGTGSFGRVMLVKHKATEQYYAMKILDKQKVVKLKQIEHTLNEKRILQAVNFPFLVRLEYAFKDNSNLYMVMEYVPGGEMFSHLRRIGRFSEPHARFYAAQIVLTFEYLHSLDLIYRDLKPENLLIDHQGYIQVTDFGFAKRVKGRTWTLCGTPEYLAPEIILSKGYNKAVDWWALGVLIYEMAAGYPPFFADQPIQIYEKIVSGKVRFPSHFSSDLKDLLRNLLQVDLTKRFGNLKNGVSDIKTHKWFATTDWIAIYQRKVEAPFIPKFRGSGDTSNFDDYEEEDIRVSITEKCAKEFGEF

SEQ ID NO: 68339 - protein, 321 aa, Homo sapiens
  Payload ID: 13613
  Gene Symbol: PRKACB
  Gene Name: protein kinase, cAMP-dependent, catalytic, beta
  Uniprot ID: P22694
  ENSP ID: ENSP00000378315
MSARKSSDASACSSSEISVKEFLAKAKEDFLKKWENPTQNNAGLEDFERKKTLGTGSFGRVMLVKHKATEQYYAMKILDKQKDNSNLYMVMEYVPGGEMFSHLRRIGRFSEPHARFYAAQIVLTFEYLHSLDLIYRDLKPENLLIDHQGYIQVTDFGFAKRVKGRTWTLCGTPEYLAPEIILSKGYNKAVDWWALGVLIYEMAAGYPPFFADQPIQIYEKIVSGKVRFPSHFSSDLKDLLRNLLQVDLTKRFGNLKNGVSDIKTHKWFATTDWIAIYQRKVEAPFIPKFRGSGDTSNFDDYEEEDIRVSITEKCAKEFGEF

SEQ ID NO: 68340 - protein, 186 aa, Homo sapiens
  Payload ID: 13613
  Gene Symbol: PRKACB
  Gene Name: protein kinase, cAMP-dependent, catalytic, beta
  ENSP ID: ENSP00000390906
MGLSRKSSDASACSSSEISVKEFLAKAKEDFLKKWENPTQNNAGLEDFERKKTLGTGSFGRVMLVKHKATEQYYAMKILDKQKVVKLKQIEHTLNEKRILQAVNFPFLVRLEYAFKDNSNLYMVMEYVPGGEMFSHLRRIGRFSEPHARFYAAQIVLTFEYLHSLDLIYRDLKPENLLIDHQGYIQ

SEQ ID NO: 68341 - protein, 214 aa, Homo sapiens
  Payload ID: 13613
  Gene Symbol: PRKACB
  Gene Name: protein kinase, cAMP-dependent, catalytic, beta
  ENSP ID: ENSP00000392275
MGLSCSSSEISVKEFLAKAKEDFLKKWENPTQNNAGLEDFERKKTLGTGSFGRVMLVKHKATEQYYAMKILDKQKVVKLKQIEHTLNEKRILQAVNFPFLVRLEYAFKDNSNLYMVMEYVPGGEMFSHLRRIGRFSEPHARFYAAQIVLTFEYLHSLDLIYRDLKPENLLIDHQGYIQVTDFGFAKRVKGRTWTLCGTPEYLAPEIILSKGYNK

SEQ ID NO: 68342 - protein, 206 aa, Homo sapiens
  Payload ID: 13613
  Gene Symbol: PRKACB
  Gene Name: protein kinase, cAMP-dependent, catalytic, beta
  ENSP ID: ENSP00000393654
MSARKSSDASACSSSEISVKEFLAKAKEDFLKKWENPTQNNAGLEDFERKKTLGTGSFGRVMLVKHKATEQYYAMKILDKQKVVKLKQIEHTLNEKRILQAVNFPFLVRLEYAFKDNSNLYMVMEYVPGGEMFSHLRRIGRFSEPHARFYAAQIVLTFEYLHSLDLIYRDLKPENLLIDHQGYIQVTDFGFAKRVKGRTWTLCGTP

SEQ ID NO: 68343 - protein, 209 aa, Homo sapiens
  Payload ID: 13613
  Gene Symbol: PRKACB
  Gene Name: protein kinase, cAMP-dependent, catalytic, beta
  ENSP ID: ENSP00000397175
MSACSSSEISVKEFLAKAKEDFLKKWENPTQNNAGLEDFERKKTLGTGSFGRVMLVKHKATEQYYAMKILDKQKVVKLKQIEHTLNEKRILQAVNFPFLVRLEYAFKDNSNLYMVMEYVPGGEMFSHLRRIGRFSEPHARFYAAQIVLTFEYLHSLDLIYRDLKPENLLIDHQGYIQVTDFGFAKRVKGRTWTLCGTPEYLAPEIILSK

SEQ ID NO: 68344 - protein, 197 aa, Homo sapiens
  Payload ID: 13613
  Gene Symbol: PRKACB
  Gene Name: protein kinase, cAMP-dependent, catalytic, beta
  ENSP ID: ENSP00000399326
MSVKEFLAKAKEDFLKKWENPTQNNAGLEDFERKKTLGTGSFGRVMLVKHKATEQYYAMKILDKQKVVKLKQIEHTLNEKRILQAVNFPFLVRLEYAFKDNSNLYMVMEYVPGGEMFSHLRRIGRFSEPHARFYAAQIVLTFEYLHSLDLIYRDLKPENLLIDHQGYIQVTDFGFAKRVKGRTWTLCGTPEYLAPEI

SEQ ID NO: 68345 - protein, 358 aa, Homo sapiens
  Payload ID: 13613
  Gene Symbol: PRKACB
  Gene Name: protein kinase, cAMP-dependent, catalytic, beta
  Uniprot ID: P22694
  ENSP ID: ENSP00000401252
MGLSRKSSDASACSSSEISDSFVKEFLAKAKEDFLKKWENPTQNNAGLEDFERKKTLGTGSFGRVMLVKHKATEQYYAMKILDKQKVVKLKQIEHTLNEKRILQAVNFPFLVRLEYAFKDNSNLYMVMEYVPGGEMFSHLRRIGRFSEPHARFYAAQIVLTFEYLHSLDLIYRDLKPENLLIDHQGYIQVTDFGFAKRVKGRTWTLCGTPEYLAPEIILSKGYNKAVDWWALGVLIYEMAAGYPPFFADQPIQIYEKIVSGKVRFPSHFSSDLKDLLRNLLQVDLTKRFGNLKNGVSDIKTHKWFATTDWIAIYQRKVEAPFIPKFRGSGDTSNFDDYEEEDIRVSITEKCAKEFGEF

SEQ ID NO: 68346 - protein, 338 aa, Homo sapiens
  Payload ID: 13613
  Gene Symbol: PRKACB
  Gene Name: protein kinase, cAMP-dependent, catalytic, beta
  ENSP ID: ENSP00000479339
MLLLSSSISLYKDRNEARLISSQNNAGLEDFERKKTLGTGSFGRVMLVKHKATEQYYAMKILDKQKVVKLKQIEHTLNEKRILQAVNFPFLVRLEYAFKDNSNLYMVMEYVPGGEMFSHLRRIGRFSEPHARFYAAQIVLTFEYLHSLDLIYRDLKPENLLIDHQGYIQVTDFGFAKRVKGRTWTLCGTPEYLAPEIILSKGYNKAVDWWALGVLIYEMAAGYPPFFADQPIQIYEKIVSGKVRFPSHFSSDLKDLLRNLLQVDLTKRFGNLKNGVSDIKTHKWFATTDWIAIYQRKVEAPFIPKFRGSGDTSNFDDYEEEDIRVSITEKCAKEFGEF

SEQ ID NO: 68347 - protein, 357 aa, Homo sapiens
  Payload ID: 13613
  Gene Symbol: PRKACB
  Gene Name: protein kinase, cAMP-dependent, catalytic, beta
  Uniprot ID: P22694
  ENSP ID: ENSP00000479722
MSARKSSDASACSSSEISDSFVKEFLAKAKEDFLKKWENPTQNNAGLEDFERKKTLGTGSFGRVMLVKHKATEQYYAMKILDKQKVVKLKQIEHTLNEKRILQAVNFPFLVRLEYAFKDNSNLYMVMEYVPGGEMFSHLRRIGRFSEPHARFYAAQIVLTFEYLHSLDLIYRDLKPENLLIDHQGYIQVTDFGFAKRVKGRTWTLCGTPEYLAPEIILSKGYNKAVDWWALGVLIYEMAAGYPPFFADQPIQIYEKIVSGKVRFPSHFSSDLKDLLRNLLQVDLTKRFGNLKNGVSDIKTHKWFATTDWIAIYQRKVEAPFIPKFRGSGDTSNFDDYEEEDIRVSITEKCAKEFGEF

SEQ ID NO: 68348 - protein, 339 aa, Homo sapiens
  Payload ID: 13613
  Gene Symbol: PRKACB
  Gene Name: protein kinase, cAMP-dependent, catalytic, beta
  Uniprot ID: P22694
  ENSP ID: ENSP00000481980
MGLLKEFLAKAKEDFLKKWENPTQNNAGLEDFERKKTLGTGSFGRVMLVKHKATEQYYAMKILDKQKVVKLKQIEHTLNEKRILQAVNFPFLVRLEYAFKDNSNLYMVMEYVPGGEMFSHLRRIGRFSEPHARFYAAQIVLTFEYLHSLDLIYRDLKPENLLIDHQGYIQVTDFGFAKRVKGRTWTLCGTPEYLAPEIILSKGYNKAVDWWALGVLIYEMAAGYPPFFADQPIQIYEKIVSGKVRFPSHFSSDLKDLLRNLLQVDLTKRFGNLKNGVSDIKTHKWFATTDWIAIYQRKVEAPFIPKFRGSGDTSNFDDYEEEDIRVSITEKCAKEFGEF

SEQ ID NO: 68349 - protein, 351 aa, Homo sapiens
  Payload ID: 13614
  Gene Symbol: PRKACG
  Gene Name: protein kinase, cAMP-dependent, catalytic, gamma
  Uniprot ID: P22612
  ENSP ID: ENSP00000366488
MGNAPAKKDTEQEESVNEFLAKARGDFLYRWGNPAQNTASSDQFERLRTLGMGSFGRVMLVRHQETGGHYAMKILNKQKVVKMKQVEHILNEKRILQAIDFPFLVKLQFSFKDNSYLYLVMEYVPGGEMFSRLQRVGRFSEPHACFYAAQVVLAVQYLHSLDLIHRDLKPENLLIDQQGYLQVTDFGFAKRVKGRTWTLCGTPEYLAPEIILSKGYNKAVDWWALGVLIYEMAVGFPPFYADQPIQIYEKIVSGRVRFPSKLSSDLKHLLRSLLQVDLTKRFGNLRNGVGDIKNHKWFATTSWIAIYEKKVEAPFIPKYTGPGDASNFDDYEEEELRISINEKCAKEFSEF

SEQ ID NO: 68350 - protein, 381 aa, Homo sapiens
  Payload ID: 13615
  Gene Symbol: PRKAR1A
  Gene Name: protein kinase, cAMP-dependent, regulatory, type I, alpha
  Uniprot ID: P10644
  ENSP ID: ENSP00000351410
MESGSTAASEEARSLRECELYVQKHNIQALLKDSIVQLCTARPERPMAFLREYFERLEKEEAKQIQNLQKAGTRTDSREDEISPPPPNPVVKGRRRRGAISAEVYTEEDAASYVRKVIPKDYKTMAALAKAIEKNVLFSHLDDNERSDIFDAMFSVSFIAGETVIQQGDEGDNFYVIDQGETDVYVNNEWATSVGEGGSFGELALIYGTPRAATVKAKTNVKLWGIDRDSYRRILMGSTLRKRKMYEEFLSKVSILESLDKWERLTVADALEPVQFEDGQKIVVQGEPGDEFFIILEGSAAVLQRRSENEEFVEVGRLGPSDYFGEIALLMNRPRAATVVARGPLKCVKLDRPRFERVLGPCSDILKRNIQQYNSFVSLSV

SEQ ID NO: 68351 - protein, 124 aa, Homo sapiens
  Payload ID: 13615
  Gene Symbol: PRKAR1A
  Gene Name: protein kinase, cAMP-dependent, regulatory, type I, alpha
  ENSP ID: ENSP00000376474
MESGSTAASEEARSLRECELYVQKHNIQALLKDSIVQLCTARPERPMAFLREYFERRRQNRFRICRKQALVQTQGRMRFLLLHPTQWLKVGGDEVLSALRSTRRKMRHPMLERLYQKITRQWPL

SEQ ID NO: 68352 - protein, 381 aa, Homo sapiens; identical to SEQ ID NO: 68350
  Payload ID: 13615
  Gene Symbol: PRKAR1A
  Gene Name: protein kinase, cAMP-dependent, regulatory, type I, alpha
  Uniprot ID: P10644
  ENSP ID: ENSP00000376475

SEQ ID NO: 68353 - protein, 381 aa, Homo sapiens; identical to SEQ ID NO: 68350
  Payload ID: 13615
  Gene Symbol: PRKAR1A
  Gene Name: protein kinase, cAMP-dependent, regulatory, type I, alpha
  Uniprot ID: P10644
  ENSP ID: ENSP00000445625

SEQ ID NO: 68354 - protein, 167 aa, Homo sapiens
  Payload ID: 13615
  Gene Symbol: PRKAR1A
  Gene Name: protein kinase, cAMP-dependent, regulatory, type I, alpha
  ENSP ID: ENSP00000464701
MESGSTAASEEARSLRECELYVQKHNIQALLKDSIVQLCTARPERPMAFLREYFERLEKEEAKQIQNLQKAGTRTDSREDEISPPPPNPVVKGRRRRGAISAEVYTEEDAASYVRKVIPKDYKTMAALAKAIEKNVLFSHLDDNERSDIFDAMFSVSFIAGETVIQQ

SEQ ID NO: 68355 - protein, 157 aa, Homo sapiens
  Payload ID: 13615
  Gene Symbol: PRKAR1A
  Gene Name: protein kinase, cAMP-dependent, regulatory, type I, alpha
  ENSP ID: ENSP00000464715
MESGSTAASEEARSLRECELYVQKHNIQALLKDSIVQLCTARPERPMAFLREYFERLEKEEAKQIQNLQKAGTRTDSREDEISPPPPNPVVKGRRRRGAISAEVYTEEDAASYVRKVIPKDYKTMAALAKAIEKNVLFSHLDDNERSDIFDAMFSVS

SEQ ID NO: 68356 - protein, 381 aa, Homo sapiens; identical to SEQ ID NO: 68350
  Payload ID: 13615
  Gene Symbol: PRKAR1A
  Gene Name: protein kinase, cAMP-dependent, regulatory, type I, alpha
  Uniprot ID: P10644
  ENSP ID: ENSP00000464977

SEQ ID NO: 68357 - protein, 182 aa, Homo sapiens
  Payload ID: 13615
  Gene Symbol: PRKAR1A
  Gene Name: protein kinase, cAMP-dependent, regulatory, type I, alpha
  ENSP ID: ENSP00000465013
MESGSTAASEEARSLRECELYVQKHNIQALLKDSIVQLCTARPERPMAFLREYFERLEKEEAKQIQNLQKAGTRTDSREDEISPPPPNPVVKGRRRRGAISAEVYTEEDAASYVRKVIPKDYKTMAALAKAIEKNVLFSHLDDNERSDIFDAMFSVSFIAGETVIQQGDEGDNFYVIDQGET

SEQ ID NO: 68358 - protein, 204 aa, Homo sapiens
  Payload ID: 13615
  Gene Symbol: PRKAR1A
  Gene Name: protein kinase, cAMP-dependent, regulatory, type I, alpha
  ENSP ID: ENSP00000465445
MESGSTAASEEARSLRECELYVQKHNIQALLKDSIVQLCTARPERPMAFLREYFERLEKEEAKQIQNLQKAGTRTDSREDEISPPPPNPVVKGRRRRGAISAEVYTEEDAASYVRKVIPKDYKTMAALAKAIEKNVLFSHLDDNERSDIFDAMFSVSFIAGETVIQQGDEGDNFYVIDQGETDVYVNNEWATSVGEGGSFGELA

SEQ ID NO: 68359 - protein, 35 aa, Homo sapiens
  Payload ID: 13615
  Gene Symbol: PRKAR1A
  Gene Name: protein kinase, cAMP-dependent, regulatory, type I, alpha
  ENSP ID: ENSP00000465740
  MOD_RES (1)..(1): Any amino acid
XDRDSYRRILMGSTLRKRKMYEEFLSKVSILVGIN

SEQ ID NO: 68360 - protein, 153 aa, Homo sapiens
  Payload ID: 13615
  Gene Symbol: PRKAR1A
  Gene Name: protein kinase, cAMP-dependent, regulatory, type I, alpha
  ENSP ID: ENSP00000466314
  MOD_RES (1)..(1): Any amino acid
XGSFGELALIYGTPRAATVKAKTNVKLWGIDRDSYRRILMGSTLRKRKMYEEFLSKVSILESLDKWERLTVADALEPVQFEDGQKIVVQGEPGDEFFIILEGSAAVLQRRSENEEFVEVGRLGPSDYFGMYEFPHNKYMVSLSHLSVRYCSLP

SEQ ID NO: 68361 - protein, 381 aa, Homo sapiens; identical to SEQ ID NO: 68350
  Payload ID: 13615
  Gene Symbol: PRKAR1A
  Gene Name: protein kinase, cAMP-dependent, regulatory, type I, alpha
  Uniprot ID: P10644
  ENSP ID: ENSP00000466459

SEQ ID NO: 68362 - protein, 113 aa, Homo sapiens
  Payload ID: 13615
  Gene Symbol: PRKAR1A
  Gene Name: protein kinase, cAMP-dependent, regulatory, type I, alpha
  ENSP ID: ENSP00000466649
MESGSTAASEEARSLRECELYVQKHNIQALLKDSIVQLCTARPERPMAFLREYFERLEKEEAKQIQNLQKAGTRTDSREDEISPPPPNPVVKGRRRRGAISAEVYTEEDAASY

SEQ ID NO: 68363 - protein, 131 aa, Homo sapiens
  Payload ID: 13615
  Gene Symbol: PRKAR1A
  Gene Name: protein kinase, cAMP-dependent, regulatory, type I, alpha
  ENSP ID: ENSP00000466722
MESGSTAASEEARSLRECELYVQKHNIQALLKDSIVQLCTARPERPMAFLREYFERLEKEEAKQIQNLQKAGTRTDSREDEISPPPPNPVVKGRRRRGAISAEVYTEEDAASYVRKFFSRLYQKITRQWPL

SEQ ID NO: 68364 - protein, 297 aa, Homo sapiens
  Payload ID: 13615
  Gene Symbol: PRKAR1A
  Gene Name: protein kinase, cAMP-dependent, regulatory, type I, alpha
  ENSP ID: ENSP00000467311
MESGSTAASEEARSLRECELYVQKHNIQALLKDSIVQLCTARPERPMAFLREYFERLEKEEAKQIQNLQKAGTRTDSREDEISPPPPNPVVKGRRRRGAISAEVYTEEDAASYVRKVIPKDYKTMAALAKAIEKNVLFSHLDDNERSDIFDAMFSVSFIAGETVIQQGDEGDNFYVIDQGETDVYVNNEWATSVGEGGSFGELALIYGTPRAATVKAKTNVKLWGIDRDSYRRILMGSTLRKRKMYEEFLSKVSILESLDKWERLTVADALEPVQFEDGQKIVVQGEPGDEFFIILE

SEQ ID NO: 68365 - protein, 45 aa, Homo sapiens
  Payload ID: 13615
  Gene Symbol: PRKAR1A
  Gene Name: protein kinase, cAMP-dependent, regulatory, type I, alpha
  ENSP ID: ENSP00000467500
MESGSTAASEEARSLRECELYVQKHNIQALLKDSIVQLCTARPER

SEQ ID NO: 68366 - protein, 65 aa, Homo sapiens
  Payload ID: 13615
  Gene Symbol: PRKAR1A
  Gene Name: protein kinase, cAMP-dependent, regulatory, type I, alpha
  ENSP ID: ENSP00000467867
MESGSTAASEEARSLRECELYVQKHNIQALLKDSIVQLCTARPERPMAFLREYFERLEKEEAKQI

SEQ ID NO: 68367 - protein, 337 aa, Homo sapiens
  Payload ID: 13615
  Gene Symbol: PRKAR1A
  Gene Name: protein kinase, cAMP-dependent, regulatory, type I, alpha
  Uniprot ID: P10644
  ENSP ID: ENSP00000468106
MESGSTAASEEARSLRECELYVQKHNIQALLKDSIVQLCTARPERPMAFLREYFERLEKEEAKQIQNLQKAGTRTDSREDEISPPPPNPVVKGRRRRGAISAEVYTEEDAASYVRKVIPKDYKTMAALAKAIEKNVLFSHLDDNERSDIFDAMFSVSFIAGETVIQQGDEGDNFYVIDQGETDVYVNNEWATSVGEGGSFGELALIYGTPRAATVKAKTNVKLWGIDRDSYRRILMGSTLRKRKMYEEFLSKVSILESLDKWERLTVADALEPVQFEDGQKIVVQGEPGDEFFIILEGSAAVLQRRSENEEFVEVGRLGPSDYFGHLIISRRSIPLG

SEQ ID NO: 68368 - protein, 381 aa, Homo sapiens
  Payload ID: 13616
  Gene Symbol: PRKAR1B
  Gene Name: protein kinase, cAMP-dependent, regulatory, type I, beta
  Uniprot ID: P31321
  ENSP ID: ENSP00000353415
MASPPACPSEEDESLKGCELYVQLHGIQQVLKDCIVHLCISKPERPMKFLREHFEKLEKEENRQILARQKSNSQSDSHDEEVSPTPPNPVVKARRRRGGVSAEVYTEEDAVSYVRKVIPKDYKTMTALAKAISKNVLFAHLDDNERSDIFDAMFPVTHIAGETVIQQGNEGDNFYVVDQGEVDVYVNGEWVTNISEGGSFGELALIYGTPRAATVKAKTDLKLWGIDRDSYRRILMGSTLRKRKMYEEFLSKVSILESLEKWERLTVADALEPVQFEDGEKIVVQGEPGDDFYIITEGTASVLQRRSPNEEYVEVGRLGPSDYFGEIALLLNRPRAATVVARGPLKCVKLDRPRFERVLGPCSEILKRNIQRYNSFISLTV

SEQ ID NO: 68369 - protein, 242 aa, Homo sapiens
  Payload ID: 13616
  Gene Symbol: PRKAR1B
  Gene Name: protein kinase, cAMP-dependent, regulatory, type I, beta
  ENSP ID: ENSP00000383569
  MOD_RES (1)..(1): Any amino acid
XRPPHRGNAHHPRPGLVLIFSAGGHPPAPAPGPSRQHAEDFLGEVYVNGEWVTNISEGGSFGELALIYGTPRAATVKAKTDLKLWGIDRDSYRRILMGSTLRKRKMYEEFLSKVSILESLEKWERLTVADALEPVQFEDGEKIVVQGEPGDDFYIITEGTASVLQRRSPNEEYVEVGRLGPSDYFGEIALLLNRPRAATVVARGPLKCVKLDRPRFERVLGPCSEILKRNIQRYNSFISLTV

SEQ ID NO: 68370 - protein, 381 aa, Homo sapiens; identical to SEQ ID NO: 68368
  Payload ID: 13616
  Gene Symbol: PRKAR1B
  Gene Name: protein kinase, cAMP-dependent, regulatory, type I, beta
  Uniprot ID: P31321
  ENSP ID: ENSP00000385349

SEQ ID NO: 68371 - protein, 381 aa, Homo sapiens; identical to SEQ ID NO: 68368
  Payload ID: 13616
  Gene Symbol: PRKAR1B
  Gene Name: protein kinase, cAMP-dependent, regulatory, type I, beta
  Uniprot ID: P31321
  ENSP ID: ENSP00000385749

SEQ ID NO: 68372 - protein, 169 aa, Homo sapiens
  Payload ID: 13616
  Gene Symbol: PRKAR1B
  Gene Name: protein kinase, cAMP-dependent, regulatory, type I, beta
  ENSP ID: ENSP00000394633
MDPLEENRQILARQKSNSQSDSHDEEVSPTPPNPVVKARRRRGGVSAEVYTEEDAVSYVRKVIPKDYKTMTALAKAISKNVLFAHLDDNERSDIFDAMFPVTHIAGETVIQQGNEGDNFYVVDQGEVDVYVNGEWVTNISEGGSFGELALIYGTPRAATVKAKTDLKLW

SEQ ID NO: 68373 - protein, 297 aa, Homo sapiens
  Payload ID: 13616
  Gene Symbol: PRKAR1B
  Gene Name: protein kinase, cAMP-dependent, regulatory, type I, beta
  ENSP ID: ENSP00000402648
MASPPACPSEEDESLKGCELYVQLHGIQQVLKDCIVHLCISKPERPMKFLREHFEKLEKEENRQILARQKSNSQSDSHDEEVSPTPPNPVVKARRRRGGVSAEVYTEEDAVSYVRKVIPKDYKTMTALAKAISKNVLFAHLDDNERSDIFDAMFPVTHIAGETVIQQGNEGDNFYVVDQGEVDVYVNGEWVTNISEGGSFGELALIYGTPRAATVKAKTDLKLWGIDRDSYRRILMGSTLRKRKMYEEFLSKVSILESLEKWERLTVADALEPVQFEDGEKIVVQGEPGDDFYIITE

SEQ ID NO: 68374 - protein, 165 aa, Homo sapiens
  Payload ID: 13616
  Gene Symbol: PRKAR1B
  Gene Name: protein kinase, cAMP-dependent, regulatory, type I, beta
  ENSP ID: ENSP00000406670
MASPPACPSEEDESLKGCELYVQLHGIQQVLKDCIVHLCISKPERPMKFLREHFEKLEKEENRQILARQKSNSQSDSHDEEVSPTPPNPVVKARRRRGGVSAEVYTEEDAVSYVRKVIPKDYKTMTALAKAISKNVLFAHLDDNERSDIFDAMFPVTHIAGETVI

SEQ ID NO: 68375 - protein, 116 aa, Homo sapiens
  Payload ID: 13616
  Gene Symbol: PRKAR1B
  Gene Name: protein kinase, cAMP-dependent, regulatory, type I, beta
  ENSP ID: ENSP00000410414
MASPPACPSEEDESLKGCELYVQLHGIQQVLKDCIVHLCISKPERPMKFLREHFEKLEKEENRQILARQKSNSQSDSHDEEVSPTPPNPVVKARRRRGGVSAEVYTEEDAVSYVRK

SEQ ID NO: 68376 - protein, 381 aa, Homo sapiens; identical to SEQ ID NO: 68368
  Payload ID: 13616
  Gene Symbol: PRKAR1B
  Gene Name: protein kinase, cAMP-dependent, regulatory, type I, beta
  Uniprot ID: P31321
  ENSP ID: ENSP00000440449

SEQ ID NO: 68377 - protein, 381 aa, Homo sapiens; identical to SEQ ID NO: 68368
  Payload ID: 13616
  Gene Symbol: PRKAR1B
  Gene Name: protein kinase, cAMP-dependent, regulatory, type I, beta
  Uniprot ID: P31321
  ENSP ID: ENSP00000444487

SEQ ID NO: 68378 - protein, 404 aa, Homo sapiens
  Payload ID: 13617
  Gene Symbol: PRKAR2A
  Gene Name: protein kinase, cAMP-dependent, regulatory, type II, alpha
  Uniprot ID: P13861
  ENSP ID: ENSP00000265563
MSHIQIPPGLTELLQGYTVEVLRQQPPDLVEFAVEYFTRLREARAPASVLPAATPRQSLGHPPPEPGPDRVADAKGDSESEEDEDLEVPVPSRFNRRVSVCAETYNPDEEEEDTDPRVIHPKTDEQRCRLQEACKDILLFKNLDQEQLSQVLDAMFERIVKADEHVIDQGDDGDNFYVIERGTYDILVTKDNQTRSVGQYDNRGSFGELALMYNTPRAATIVATSEGSLWGLDRVTFRRIIVKNNAKKRKMFESFIESVPLLKSLEVSERMKIVDVIGEKIYKDGERIITQGEKADSFYIIESGEVSILIRSRTKSNKDGGNQEVEIARCHKGQYFGELALVTNKPRAASAYAVGDVKCLVMDVQAFERLLGPCMDIMKRNISHYEEQLVKMFGSSVDLGNLGQ

SEQ ID NO: 68379 - protein, 382 aa, Homo sapiens
  Payload ID: 13617
  Gene Symbol: PRKAR2A
  Gene Name: protein kinase, cAMP-dependent, regulatory, type II, alpha
  Uniprot ID: P13861
  ENSP ID: ENSP00000296446
MSHIQIPPGLTELLQGYTVEVLRQQPPDLVEFAVEYFTRLREARAPASVLPAATPRQSLGHPPPEPGPDRVADAKGDSESEEDEDLEVPVPSRFNRRVSVCAETYNPDEEEEDTDPRVIHPKTDEQRCRLQEACKDILLFKNLDQEQLSQVLDAMFERIVKADEHVIDQGDDGDNFYVIERGTYDILVTKDNQTRSVGQYDNRGSFGELALMYNTPRAATIVATSEGSLWGLDRVTFRRIIVKNNAKKRKMFESFIESVPLLKSLEVSERMKIVDVIGEKIYKDGERIITQTKSNKDGGNQEVEIARCHKGQYFGELALVTNKPRAASAYAVGDVKCLVMDVQAFERLLGPCMDIMKRNISHYEEQLVKMFGSSVDLGNLGQ

SEQ ID NO: 68380 - protein, 404 aa, Homo sapiens; identical to SEQ ID NO: 68378
  Payload ID: 13617
  Gene Symbol: PRKAR2A
  Gene Name: protein kinase, cAMP-dependent, regulatory, type II, alpha
  Uniprot ID: P13861
  ENSP ID: ENSP00000394041

SEQ ID NO: 68381 - protein, 200 aa, Homo sapiens
  Payload ID: 13617
  Gene Symbol: PRKAR2A
  Gene Name: protein kinase, cAMP-dependent, regulatory, type II, alpha
  ENSP ID: ENSP00000400840
  MOD_RES (1)..(1): Any amino acid
XDTDPRVIHPKTDEQRCRLQEACKDILLFKNLDQEQLSQVLDAMFERIVKADEHVIDQGDDGDNFYVIERGTYDILVTKDNQTRSVGQYDNRGSFGELALMYNTPRAATIVATSEGSLWGLDRVTFRRIIVKNNAKKRKMFESFIESVPLLKSLEDGQRFNPHLHFASEGPFIRPLVKITPTQFLYLWFKTACLSNNLSA

SEQ ID NO: 68382 - protein, 92 aa, Homo sapiens
  Payload ID: 13617
  Gene Symbol: PRKAR2A
  Gene Name: protein kinase, cAMP-dependent, regulatory, type II, alpha
  ENSP ID: ENSP00000409239
  MOD_RES (1)..(1): Any amino acid
XTKSNKDGGNQEVEIARCHKGQYFGELALVTNKPRAASAYAVGDVKCLVMDVQAFERLLGPCMDIMKRNISHYEEQLVKMFGSSVDLGNLGQ

SEQ ID NO: 68383 - protein, 114 aa, Homo sapiens
  Payload ID: 13617
  Gene Symbol: PRKAR2A
  Gene Name: protein kinase, cAMP-dependent, regulatory, type II, alpha
  ENSP ID: ENSP00000411432
MSHIQIPPGLTELLQGYTVEVLRQQPPDLVEFAVEYFTRLREARAPASVLPAATPRQSLGHPPPEPGPDRVADAKGDSESEEDEDLEVCAETYNPDEEEEDTDPRVIHPKTDEQ

SEQ ID NO: 68384 - protein, 99 aa, Homo sapiens
  Payload ID: 13617
  Gene Symbol: PRKAR2A
  Gene Name: protein kinase, cAMP-dependent, regulatory, type II, alpha
  ENSP ID: ENSP00000416438
  MOD_RES (1)..(1): Any amino acid
XDRVTFRRIIVKNNAKKRKMFESFIESVPLLKSLEVSERMKIVDVIGEKIYKDGERIITQGEKADSFYIIESGEVSILIRSRLWMYKHSRGFWGPAWTS

SEQ ID NO: 68385 - protein, 418 aa, Homo sapiens
  Payload ID: 13618
  Gene Symbol: PRKAR2B
  Gene Name: protein kinase, cAMP-dependent, regulatory, type II, beta
  Uniprot ID: P31323
  ENSP ID: ENSP00000265717
MSIEIPAGLTELLQGFTVEVLRHQPADLLEFALQHFTRLQQENERKGTARFGHEGRTWGDLGAAAGGGTPSKGVNFAEEPMQSDSEDGEEEEAAPADAGAFNAPVINRFTRRASVCAEAYNPDEEEDDAESRIIHPKTDDQRNRLQEACKDILLFKNLDPEQMSQVLDAMFEKLVKDGEHVIDQGDDGDNFYVIDRGTFDIYVKCDGVGRCVGNYDNRGSFGELALMYNTPRAATITATSPGALWGLDRVTFRRIIVKNNAKKRKMYESFIESLPFLKSLEFSERLKVVDVIGTKVYNDGEQIIAQGDSADSFFIVESGEVKITMKRKGKSEVEENGAVEIARCSRGQYFGELALVTNKPRAASAHAIGTVKCLAMDVQAFERLLGPCMEIMKRNIATYEEQLVALFGTNMDIVEPTA

SEQ ID NO: 68386 - protein, 181 aa, Homo sapiens
  Payload ID: 13619
  Gene Symbol: PRKG1
  Gene Name: protein kinase, cGMP-dependent, type I
  ENSP ID: ENSP00000363087
SCIIKEGDVGSLVYVMEDGKVEVTKEGVKLCTMGPGKVFGELAILYNCTRTATVKTLVNVKLWAIDRQCFQTIMMRTGLIKHTEYMEFLKSVPTFQSLPEEILSKLADVLEETHYENGEYIIRQGARGDTFFIISKGTVNVTREDSPSEDPVFLRTLGKGDWFGEKALQGWTWNLFEYVVE

SEQ ID NO: 68387 - protein, 686 aa, Homo sapiens
  Payload ID: 13619
  Gene Symbol: PRKG1
  Gene Name: protein kinase, cGMP-dependent, type I
  Uniprot ID: Q13976
  ENSP ID: ENSP00000363092
MGTLRDLQYALQEKIEELRQRDALIDELELELDQKDELIQKLQNELDKYRSVIRPATQQAQKQSASTLQGEPRTKRQAISAEPTAFDIQDLSHVTLPFYPKSPQSKDLIKEAILDNDFMKNLELSQIQEIVDCMYPVEYGKDSCIIKEGDVGSLVYVMEDGKVEVTKEGVKLCTMGPGKVFGELAILYNCTRTATVKTLVNVKLWAIDRQCFQTIMMRTGLIKHTEYMEFLKSVPTFQSLPEEILSKLADVLEETHYENGEYIIRQGARGDTFFIISKGTVNVTREDSPSEDPVFLRTLGKGDWFGEKALQGEDVRTANVIAAEAVTCLVIDRDSFKHLIGGLDDVSNKAYEDAEAKAKYEAEAAFFANLKLSDFNIIDTLGVGGFGRVELVQLKSEESKTFAMKILKKRHIVDTRQQEHIRSEKQIMQGAHSDFIVRLYRTFKDSKYLYMLMEACLGGELWTILRDRGSFEDSTTRFYTACVVEAFAYLHSKGIIYRDLKPENLILDHRGYAKLVDFGFAKKIGFGKKTWTFCGTPEYVAPEIILNKGHDISADYWSLGILMYELLTGSPPFSGPDPMKTYNIILRGIDMIEFPKKIAKNAANLIKKLCRDNPSERLGNLKNGVKDIQKHKWFEGFNWEGLRKGTLTPPIIPSVASPTDTSNFDSFPEDNDEPPPDDNSGWDIDF

SEQ ID NO: 68388 - protein, 671 aa, Homo sapiens
  Payload ID: 13619
  Gene Symbol: PRKG1
  Gene Name: protein kinase, cGMP-dependent, type I
  Uniprot ID: Q13976
  ENSP ID: ENSP00000363097
MSELEEDFAKILMLKEERIKELEKRLSEKEEEIQELKRKLHKCQSVLPVPSTHIGPRTTRAQGISAEPQTYRSFHDLRQAFRKFTKSERSKDLIKEAILDNDFMKNLELSQIQEIVDCMYPVEYGKDSCIIKEGDVGSLVYVMEDGKVEVTKEGVKLCTMGPGKVFGELAILYNCTRTATVKTLVNVKLWAIDRQCFQTIMMRTGLIKHTEYMEFLKSVPTFQSLPEEILSKLADVLEETHYENGEYIIRQGARGDTFFIISKGTVNVTREDSPSEDPVFLRTLGKGDWFGEKALQGEDVRTANVIAAEAVTCLVIDRDSFKHLIGGLDDVSNKAYEDAEAKAKYEAEAAFFANLKLSDFNIIDTLGVGGFGRVELVQLKSEESKTFAMKILKKRHIVDTRQQEHIRSEKQIMQGAHSDFIVRLYRTFKDSKYLYMLMEACLGGELWTILRDRGSFEDSTTRFYTACVVEAFAYLHSKGIIYRDLKPENLILDHRGYAKLVDFGFAKKIGFGKKTWTFCGTPEYVAPEIILNKGHDISADYWSLGILMYELLTGSPPFSGPDPMKTYNIILRGIDMIEFPKKIAKNAANLIKKLCRDNPSERLGNLKNGVKDIQKHKWFEGFNWEGLRKGTLTPPIIPSVASPTDTSNFDSFPEDNDEPPPDDNSGWDIDF

SEQ ID NO: 68389 - protein, 459 aa, Homo sapiens
  Payload ID: 13619
  Gene Symbol: PRKG1
  Gene Name: protein kinase, cGMP-dependent, type I
  ENSP ID: ENSP00000384200
MEFLKSVPTFQSLPEEILSKLADVLEETHYENGEYIIRQGARGDTFFIISKGTVNVTREDSPSEDPVFLRTLGKGDWFGEKALQGEDVRTANVIAAEAVTCLVIDRDSFKHLIGGLDDVSNKAYEDAEAKAKYEAEAAFFANLKLSDFNIIDTLGVGGFGRVELVQLKSEESKTFAMKILKKRHIVDTRQQEHIRSEKQIMQGAHSDFIVRLYRTFKDSKYLYMLMEACLGGELWTILRDRGSFEDSTTRFYTACVVEAFAYLHSKGIIYRDLKPENLILDHRGYAKLVDFGFAKKIGFGKKTWTFCGTPEYVAPEIILNKGHDISADYWSLGILMYELLTGSPPFSGPDPMKTYNIILRGIDMIEFPKKIAKNAANLIKKLCRDNPSERLGNLKNGVKDIQKHKWFEGFNWEGLRKGTLTPPIIPSVASPTDTSNFDSFPEDNDEPPPDDNSGWDIDF

SEQ ID NO: 68390 - protein, 762 aa, Homo sapiens
  Payload ID: 13620
  Gene Symbol: PRKG2
  Gene Name: protein kinase, cGMP-dependent, type II
  Uniprot ID: Q13237
  ENSP ID: ENSP00000264399
MGNGSVKPKHSKHPDGHSGNLTTDALRNKVTELERELRRKDAEIQEREYHLKELREQLSKQTVAIAELTEELQNKCIQLNKLQDVVHMQGGSPLQASPDKVPLEVHRKTSGLVSLHSRRGAKAGVSAEPTTRTYDLNKPPEFSFEKARVRKDSSEKKLITDALNKNQFLKRLDPQQIKDMVECMYGRNYQQGSYIIKQGEPGNHIFVLAEGRLEVFQGEKLLSSIPMWTTFGELAILYNCTRTASVKAITNVKTWALDREVFQNIMRRTAQARDEQYRNFLRSVSLLKNLPEDKLTKIIDCLEVEYYDKGDYIIREGEEGSTFFILAKGKVKVTQSTEGHDQPQLIKTLQKGEYFGEKALISDDVRSANIIAEENDVACLVIDRETFNQTVGTFEELQKYLEGYVANLNRDDEKRHAKRSMSNWKLSKALSLEMIQLKEKVARFSSSSPFQNLEIIATLGVGGFGRVELVKVKNENVAFAMKCIRKKHIVDTKQQEHVYSEKRILEELCSPFIVKLYRTFKDNKYVYMLLEACLGGELWSILRDRGSFDEPTSKFCVACVTEAFDYLHRLGIIYRDLKPENLILDAEGYLKLVDFGFAKKIGSGQKTWTFCGTPEYVAPEVILNKGHDFSVDFWSLGILVYELLTGNPPFSGVDQMMTYNLILKGIEKMDFPRKITRRPEDLIRRLCRQNPTERLGNLKNGINDIKKHRWLNGFNWEGLKARSLPSPLQRELKGPIDHSYFDKYPPEKGMPPDELSGWDKDF

SEQ ID NO: 68391 - protein, 762 aa, Homo sapiens; identical to SEQ ID NO: 68390
  Payload ID: 13620
  Gene Symbol: PRKG2
  Gene Name: protein kinase, cGMP-dependent, type II
  Uniprot ID: Q13237
  ENSP ID: ENSP00000378945

SEQ ID NO: 68392 - protein, 342 aa, Homo sapiens
  Payload ID: 13620
  Gene Symbol: PRKG2
  Gene Name: protein kinase, cGMP-dependent, type II
  ENSP ID: ENSP00000439967
MSNWKLSKALSLEMIQLKEKVARFSSSSPFQNLEIIATLGVGGFGRVELVKVKNENVAFAMKCIRKKHIVDTKQQEHVYSEKRILEELCSPFIVKLYRTFKDNKYVYMLLEACLGGELWSILRDRGSFDEPTSKFCVACVTEAFDYLHRLGIIYRDLKPENLILDAEGYLKLVDFGFAKKIGSGQKTWTFCGTPEYVAPEVILNKGHDFSVDFWSLGILVYELLTGNPPFSGVDQMMTYNLILKGIEKMDFPRKITRRPEDLIRRLCRQNPTERLGNLKNGINDIKKHRWLNGFNWEGLKARSLPSPLQRELKGPIDHSYFDKYPPEKGMPPDELSGWDKDF

SEQ ID NO: 68393 - protein, 733 aa, Homo sapiens
  Payload ID: 13620
  Gene Symbol: PRKG2
  Gene Name: protein kinase, cGMP-dependent, type II
  Uniprot ID: Q13237
  ENSP ID: ENSP00000486129
MGNGSVKPKHSKHPDGHSGNLTTDALRNKVTELERELRRKDAEIQEREYHLKELREQLSKQTVAIAELTEELQNKCIQLNKLQDVVHMQGGSPLQASPDKVPLEVHRKTSGLVSLHSRRGAKAGVSAEPTTRTYDLNKPPEFSFEKARVRKDSSEKKLITDALNKNQFLKRLDPQQIKDMVECMYGRNYQQGSYIIKQGEPGNHIFVLAEGRLEVFQGEKLLSSIPMWTTFGELAILYNCTRTASVKAITNVKTWALDREVFQNIMRRTAQARDEQYRNFLRSVSLLKNLPEDKLTKIIDCLEVEYYDKGDYIIREGEEGSTFFILAKGKVKVTQSTEGHDQPQLIKTLQKGEYFGEKALISDDVRSANIIAEENDVACLVIDRETFNQTVGTFEELQKYLEGYVANLNRDDEKRHAKRSMSNWKLSKALSLEMIQLKEKVKVKNENVAFAMKCIRKKHIVDTKQQEHVYSEKRILEELCSPFIVKLYRTFKDNKYVYMLLEACLGGELWSILRDRGSFDEPTSKFCVACVTEAFDYLHRLGIIYRDLKPENLILDAEGYLKLVDFGFAKKIGSGQKTWTFCGTPEYVAPEVILNKGHDFSVDFWSLGILVYELLTGNPPFSGVDQMMTYNLILKGIEKMDFPRKITRRPEDLIRRLCRQNPTERLGNLKNGINDIKKHRWLNGFNWEGLKARSLPSPLQRELKGPIDHSYFDKYPPEKGMPPDELSGWDKDF

SEQ ID NO: 68394 - protein, 4128 aa, Homo sapiens [sequence omitted]

SEQ ID NO: 68395 - protein, 4097 aa, Homo sapiens
  Payload ID: 13621
  Gene Symbol: PRKDC
  Gene Name: protein kinase, DNA-activated, catalytic polypeptide
  Uniprot ID: P78527
  ENSP ID: ENSP00000345182
MAGSGAGVRCSLLRLQETLSAADRCGAALAGHQLIRGLGQECVLSSSPAVLALQTSLVFSRDFGLLVFVRKSLNSIEFRECREEILKFLCIFLEKMGQKIAPYSVEIKNTCTSVYTKDRAAKCKIPALDLLIKLLQTFRSSRLMDEFKIGELFSKFYGELALKKKIPDTVLEKVYELLGLLGEVHPSEMINNAENLFRAFLGELKTQMTSAVREPKLPVLAGCLKGLSSLLCNFTKSMEEDPQTSREIFNFVLKAIRPQIDLKRYAVPSAGLRLFALHASQFSTCLLDNYVSLFEVLLKWCAHTNVELKKAALSALESFLKQVSNMVAKNAEMHKNKLQYFMEQFYGIIRNVDSNNKELSIAIRGYGLFAGPCKVINAKDVDFMYVELIQRCKQMFLTQTDTGDDRVYQMPSFLQSVASVLLYLDTVPEVYTPVLEHLVVMQIDSFPQYSPKMQLVCCRAIVKVFLALAAKGPVLRNCISTVVHQGLIRICSKPVVLPKGPESESEDHRASGEVRTGKWKVPTYKDYVDLFRHLLSSDQMMDSILADEAFFSVNSSSESLNHLLYDEFVKSVLKIVEKLDLTLEIQTVGEQENGDEAPGVWMIPTSDPAANLHPAKPKDFSAFINLVEFCREILPEKQAEFFEPWVYSFSYELILQSTRLPLISGFYKLLSITVRNAKKIKYFEGVSPKSLKHSPEDPEKYSCFALFVKFGKEVAVKMKQYKDELLASCLTFLLSLPHNIIELDVRAYVPALQMAFKLGLSYTPLAEVGLNALEEWSIYIDRHVMQPYYKDILPCLDGYLKTSALSDETKNNWEVSALSRAAQKGFNKVVLKHLKKTKNLSSNEAISLEEIRIRVVQMLGSLGGQINKNLLTVTSSDEMMKSYVAWDREKRLSFAVPFREMKPVIFLDVFLPRVTELALTASDRQTKVAACELLHSMVMFMLGKATQMPEGGQGAPPMYQLYKRTFPVLLRLACDVDQVTRQLYEPLVMQLIHWFTNNKKFESQDTVALLEAILDGIVDPVDSTLRDFCGRCIREFLKWSIKQITPQQQEKSPVNTKSLFKRLYSLALHPNAFKRLGASLAFNNIYREFREEESLVEQFVFEALVIYMESLALAHADEKSLGTIQQCCDAIDHLCRIIEKKHVSLNKAKKRRLPRGFPPSASLCLLDLVKWLLAHCGRPQTECRHKSIELFYKFVPLLPGNRSPNLWLKDVLKEEGVSFLINTFEGGGCGQPSGILAQPTLLYLRGPFSLQATLCWLDLLLAALECYNTFIGERTVGALQVLGTEAQSSLLKAVAFFLESIAMHDIIAAEKCFGTGAAGNRTSPQEGERYNYSKCTVVVRIMEFTTTLLNTSPEGWKLLKKDLCNTHLMRVLVQTLCEPASIGFNIGDVQVMAHLPDVCVNLMKALKMSPYKDILETHLREKITAQSIEELCAVNLYGPDAQVDRSRLAAVVSACKQLHRAGLLHNILPSQSTDLHHSVGTELLSLVYKGIAPGDERQCLPSLDLSCKQLASGLLELAFAFGGLCERLVSLLLNPAVLSTASLGSSQGSVIHFSHGEYFYSLFSETINTELLKNLDLAVLELMQSSVDNTKMVSAVLNGMLDQSFRERANQKHQGLKLATTILQHWKKCDSWWAKDSPLETKMAVLALLAKILQIDSSVSFNTSHGSFPEVFTTYISLLADTKLDLHLKGQAVTLLPFFTSLTGGSLEELRRVLEQLIVAHFPMQSREFPPGTPRFNNYVDCMKKFLDALELSQSPMLLELMTEVLCREQQHVMEELFQSSFRRIARRGSCVTQVGLLESVYEMFRKDDPRLSFTRQSFVDRSLLTLLWHCSLDALREFFSTIVVDAIDVLKSRFTKLNESTFDTQITKKMGYYKILDVMYSRLPKDDVHAKESKINQVFHGSCITEGNELTKTLIKLCYDAFTENMAGENQLLERRRLYHCAAYNCAISVICCVFNELKFYQGFLFSEKPEKNLLIFENLIDLKRRYNFPVEVEVPMERKKKYIEIRKEAREAANGDSDGPSYMSSLSYLADSTLSEEMSQFDFSTGVQSYSYSSQDPRPATGRFRRREQRDPTVHDDVLELEMDELNRHECMAPLTALVKHMHRSLGPPQGEEDSVPRDLPSWMKFLHGKLGNPIVPLNIRLFLAKLVINTEEVFRPYAKHWLSPLLQLAASENNGGEGIHYMVVEIVATILSWTGLATPTGVPKDEVLANRLLNFLMKHVFHPKRAVFRHNLEIIKTLVECWKDCLSIPYRLIFEKFSGKDPNSKDNSVGIQLLGIVMANDLPPYDPQCGIQSSEYFQALVNNMSFVRYKEVYAAAAEVLGLILRYVMERKNILEESLCELVAKQLKQHQNTMEDKFIVCLNKVTKSFPPLADRFMNAVFFLLPKFHGVLKTLCLEVVLCRVEGMTELYFQLKSKDFVQVMRHRDDERQKVCLDIIYKMMPKLKPVELRELLNPVVEFVSHPSTTCREQMYNILMWIHDNYRDPESETDNDSQEIFKLAKDVLIQGLIDENPGLQLIIRNFWSHETRLPSNTLDRLLALNSLYSPKIEVHFLSLATNFLLEMTSMSPDYPNPMFEHPLSECEFQEYTIDSDWRFRSTVLTPMFVETQASQGTLQTRTQEGSLSARWPVAGQIRATQQQHDFTLTQTADGRSSFDWLTGSSTDPLVDHTSPSSDSLLFAHKRSERLQRAPLKSVGPDFGKKRLGLPGDEVDNKVKGAAGRTDLLRLRRRFMRDQEKLSLMYARKGVAEQKREKEIKSELKMKQDAQVVLYRSYRHGDLPDIQIKHSSLITPLQAVAQRDPIIAKQLFSSLFSGILKEMDKFKTLSEKNNITQKLLQDFNRFLNTTFSFFPPFVSCIQDISCQHAALLSLDPAAVSAGCLASLQQPVGIRLLEEALLRLLPAELPAKRVRGKARLPPDVLRWVELAKLYRSIGEYDVLRGIFTSEIGTKQITQSALLAEARSDYSEAAKQYDEALNKQDWVDGEPTEAEKDFWELASLDCYNHLAEWKSLEYCSTASIDSENPPDLNKIWSEPFYQETYLPYMIRSKLKLLLQGEADQSLLTFIDKAMHGELQKAILELHYSQELSLLYLLQDDVDRAKYYIQNGIQSFMQNYSSIDVLLHQSRLTKLQSVQALTEIQEFISFISKQGNLSSQVPLKRLLNTWTNRYPDAKMDPMNIWDDIITNRCFFLSKIEEKLTPLPEDNSMNVDQDGDPSDRMEVQEQEEDISSLIRSCKFSMKMKMIDSARKQNNFSLAMKLLKELHKESKTRDDWLVSWVQSYCRLSHCRSRSQGCSEQVLTVLKTVSLLDENNVSSYLSKNILAFRDQNILLGTTYRIIANALSSEPACLAEIEEDKARRILELSGSSSEDSEKVIAGLYQRAFQHLSEAVQAAEEEAQPPSWSCGPAAGVIDAYMTLADFCDQQLRKEEENASVIDSAELQAYPALVVEKMLKALKLNSNEARLKFPRLLQIIERYPEETLSLMTKEISSVPCWQFISWISHMVALLDKDQAVAVQHSVEEITDNYPQAIVYPFIISSESYSFKDTSTGHKNKEFVARIKSKLDQGGVIQDFINALDQLSNPELLFKDWSNDVRAELAKTPVNKKNIEKMYERMYAALGDPKAPGLGAFRRKFIQTFGKEFDKHFGKGGSKLLRMKLSDFNDITNMLLLKMNKDSKPPGNLKECSPWMSDFKVEFLRNELEIPGQYDGRGKPLPEYHVRIAGFDERVTVMASLRRPKRIIIRGHDEREHPFLVKGGEDLRQDQRVEQLFQVMNGILAQDSACSQRALQLRTYSVVPMTSSDPRAPPCEYKDWLTKMSGKHDVGAYMLMYKGANRTETVTSFRKRESKVPADLLKRAFVRMSTSPEAFLALRSHFASSHALICISHWILGIGDRHLNNFMVAMETGGVIGIDFGHAFGSATQFLPVPELMPFRLTRQFINLMLPMKETGLMYSIMVHALRAFRSDPGLLTNTMDVFVKEPSFDWKNFEQKMLKKGGSWIQEINVAEKNWYPRQKICYAKRKLAGANPAVITCDELLLGHEKAPAFRDYVAVARGSKDHNIRAQEPESGLSEETQVKCLMDQATDPNILGRTWEGWEPWM

SEQ ID NO: 68396 - protein, 70 aa, Homo sapiens
  Payload ID: 13621
  Gene Symbol: PRKDC
  Gene Name: protein kinase, DNA-activated, catalytic polypeptide
  ENSP ID: ENSP00000441157
MGQKIAPYSVEIKNTCTSVYTKDRAAKCKIPALDLLIKLLQTFRSSRLMDEFKIGELFSKFYGELALKKK

SEQ ID NO: 68397 - protein, 90 aa, Homo sapiens
  Payload ID: 13621
  Gene Symbol: PRKDC
  Gene Name: protein kinase, DNA-activated, catalytic polypeptide
  ENSP ID: ENSP00000442177
  MOD_RES (1)..(1): Any amino acid
XNNFMVAMETGGVIGIDFGHAFGSATQFLPVPELMPFRLTRQFINLMLPMKETGLMYSIMVHALRAFRSDPGLLTNTMDVFVKEPSFDWK

SEQ ID NO: 68398 - protein, 313 aa, Homo sapiens
  Payload ID: 13622
  Gene Symbol: PRKRA
  Gene Name: protein kinase, interferon-inducible double stranded RNA dependent activator
  Uniprot ID: O75569
  ENSP ID: ENSP00000318176
MSQSRHRAEAPPLEREDSGTFSLGKMITAKPGKTPIQVLHEYGMKTKNIPVYECERSDVQIHVPTFTFRVTVGDITCTGEGTSKKLAKHRAAEAAINILKANASICFAVPDPLMPDPSKQPKNQLNPIGSLQELAIHHGWRLPEYTLSQEGGPAHKREYTTICRLESFMETGKGASKKQAKRNAAEKFLAKFSNISPENHISLTNVVGHSLGCTWHSLRNSPGEKINLLKRSLLSIPNTDYIQLLSEIAKEQGFNITYLDIDELSANGQYQCLAELSTSPITVCHGSGISCGNAQSDAAHNALQYLKIIAERK

SEQ ID NO: 68399 - protein, 95 aa, Homo sapiens
  Payload ID: 13622
  Gene Symbol: PRKRA
  Gene Name: protein kinase, interferon-inducible double stranded RNA dependent activator
  ENSP ID: ENSP00000388455
MQSTPFCGFCSLGKMITAKPGKTPIQVLHEYGMKTKNIPVYECERSDVQIHVPTFTFRVTVGDITCTGEGTSKKLAKHRAAEAAINILKANASIW

SEQ ID NO: 68400 - protein, 302 aa, Homo sapiens
  Payload ID: 13622
  Gene Symbol: PRKRA
  Gene Name: protein kinase, interferon-inducible double stranded RNA dependent activator
  Uniprot ID: O75569
  ENSP ID: ENSP00000393883
MQSTPFCGFCSLGKMITAKPGKTPIQVLHEYGMKTKNIPVYECERSDVQIHVPTFTFRVTVGDITCTGEGTSKKLAKHRAAEAAINILKANASICFAVPDPLMPDPSKQPKNQLNPIGSLQELAIHHGWRLPEYTLSQEGGPAHKREYTTICRLESFMETGKGASKKQAKRNAAEKFLAKFSNISPENHISLTNVVGHSLGCTWHSLRNSPGEKINLLKRSLLSIPNTDYIQLLSEIAKEQGFNITYLDIDELSANGQYQCLAELSTSPITVCHGSGISCGNAQSDAAHNALQYLKIIAERK

SEQ ID NO: 68401 - protein, 105 aa, Homo sapiens
  Payload ID: 13622
  Gene Symbol: PRKRA
  Gene Name: protein kinase, interferon-inducible double stranded RNA dependent activator
  ENSP ID: ENSP00000408029
MSQSRHRAEAPPLEREDSGTFSLGKMITAKPGKTPIQVLHEYGMKTKNIPVYECERSDVQIHVPTFTFRVTVGDITCTGEGTSKKLAKHRAAEAAINILKANASI

SEQ ID NO: 68402 - protein, 108 aa, Homo sapiens
  Payload ID: 13622
  Gene Symbol: PRKRA
  Gene Name: protein kinase, interferon-inducible double stranded RNA dependent activator
  ENSP ID: ENSP00000408668
MQSTPFCGFCSLGKMITAKPGKTPIQVLHEYGMKTKNIPVYECERSDVQIHVPTFTFRVTVGDITCTGEGTSKKLAKHRAAEAAINILKANASIWNWLFIMAGDFLNI

SEQ ID NO: 68403 - protein, 288 aa, Homo sapiens
  Payload ID: 13622
  Gene Symbol: PRKRA
  Gene Name: protein kinase, interferon-inducible double stranded RNA dependent activator
  Uniprot ID: O75569
  ENSP ID: ENSP00000430604
MITAKPGKTPIQVLHEYGMKTKNIPVYECERSDVQIHVPTFTFRVTVGDITCTGEGTSKKLAKHRAAEAAINILKANASICFAVPDPLMPDPSKQPKNQLNPIGSLQELAIHHGWRLPEYTLSQEGGPAHKREYTTICRLESFMETGKGASKKQAKRNAAEKFLAKFSNISPENHISLTNVVGHSLGCTWHSLRNSPGEKINLLKRSLLSIPNTDYIQLLSEIAKEQGFNITYLDIDELSANGQYQCLAELSTSPITVCHGSGISCGNAQSDAAHNALQYLKIIAERK

SEQ ID NO: 68404 - protein, 499 aa, Homo sapiens
  Payload ID: 13623
  Gene Symbol: PKMYT1
  Gene Name: protein kinase, membrane associated tyrosine/threonine 1
  Uniprot ID: Q99640
  ENSP ID: ENSP00000262300
MLERPPALAMPMPTEGTPPPLSGTPIPVPAYFRHAEPGFSLKRPRGLSRSLPPPPPAKGSIPISRLFPPRTPGWHQLQPRRVSFRGEASETLQSPGYDPSRPESFFQQSFQRLSRLGHGSYGEVFKVRSKEDGRLYAVKRSMSPFRGPKDRARKLAEVGSHEKVGQHPCCVRLEQAWEEGGILYLQTELCGPSLQQHCEAWGASLPEAQVWGYLRDTLLALAHLHSQGLVHLDVKPANIFLGPRGRCKLGDFGLLVELGTAGAGEVQEGDPRYMAPELLQGSYGTAADVFSLGLTILEVACNMELPHGGEGWQQLRQGYLPPEFTAGLSSELRSVLVMMLEPDPKLRATAEALLALPVLRQPRAWGVLWCMAAEALSRGWALWQALLALLCWLWHGLAHPASWLQPLGPPATPPGSPPCSLLLDSSLSSNWDDDSLGPSLSPEAVLARTVGSTSTPRSRCTPRDALDLSDINSEPPRGSFPSFEPRNLLSLFEDTLDPT

SEQ ID NO: 68405 - protein, 447 aa, Homo sapiens
  Payload ID: 13623
  Gene Symbol: PKMYT1
  Gene Name: protein kinase, membrane associated tyrosine/threonine 1
  ENSP ID: ENSP00000371675
MPMPTEGTPPPLSGTPIPVPAYFRHAEPGFSLKRPRGLSRSLPPPPPAKGSIPISRLFPPRTPGWHQLQPRRVSFRGEASETLQSPGYDPSRPESFFQQSFQRLSRLGHGSYGEVFKVRSKEDGRLYAVKRSMSPFRGPKDRARKLAEVGSHEKVGQHPCCVRLEQAWEEGGILYLQTELCGPSLQQHCEAWGASLPEAQVWGYLRDTLLALAHLHSQGLVHLDVKPANIFLGPRGRCKLGDFGLLVELGTAGAGEVQEGDPRYMAPELLQGSYGTAADVFSLGLTILEVACNMELPHGGEGWQQLRQGYLPPEFTAGLSSELRSVLVMMLEPDPKLRATAEALLALPVLRQPRAWGVLWCMAAEALSRGWALWQALLALLCWLWHGLAHPASWLQPLGPPATPPGSPPCSLLLDSSLSSNWDDDSLGPCVLKRTEGALECSQMEGL

SEQ ID NO: 68406 - protein, 568 aa, Homo sapiens
  Payload ID: 13623
  Gene Symbol: PKMYT1
  Gene Name: protein kinase, membrane associated tyrosine/threonine 1
  ENSP ID: ENSP00000392855
MLERPPALAMPMPTEGTPPPLSGTPIPVPAYFRHAEPGFSLKRPRGLSRSLPPPPPAKGSIPISRLFPPRTPGWHQLQPRRVSFRGEASETLQSPGYDPSRPESFFQQSFQRLSRLGHGSYGEVFKVRSKEDGRLYAVKRSMSPFRGPKDRARKLAEVGSHEKVGQHPCCVRLEQAWEEGGILYLQTELCGPSLQQHCEAWGASLPEAQVWGYLRDTLLALAHLHSQGLVHLDVKPANIFLGPRGRCKLGDFGLLVELGTAGAGEVQEGDPRYMAPELLQGSYGTAADVFSLGLTILEVACNMELPHGGEGWQQLRQGYLPPEFTAGLSSELRSVLVMMLEPDPKLRATAEALLALPVLRQPRAWGVLWCMAAEALSRGWALWQALLALLCWLWHGLAHPASWLQPLGPPATPPGSPPCSLLLDSSLSSNWDDDSLGPSLSPEAVLARTVGSTSTPRSRCTPRVLTPLRLSPAAEPSAPGLGPAAEAPCCVEQRGFLSRHIPRSFSAFQAAPPKSACNALHLHGHTQPSAFVWSLTCSSHHGRTFEARTKVDPLFKICGGFLTVFADL

SEQ ID NO: 68407 - protein, 480 aa, Homo sapiens
  Payload ID: 13623
  Gene Symbol: PKMYT1
  Gene Name: protein kinase, membrane associated tyrosine/threonine 1
  Uniprot ID: Q99640
  ENSP ID: ENSP00000397739
MLERPPALAMPMPTEGTPPPLSGTPIPVPAYFRHAEPGFSLKRPRGLSRSLPPPPPAKGSIPISRLFPPRTPGWHQLQPRRVSFRGEASETLQSPGYDPSRPESFFQQSFQRLSRLGHGSYGEVFKVRSKEDGRLYAVKRSMSPFRGPKDRARKLAEVGSHEKVGQHPCCVRLEQAWEEGGILYLQTELCGPSLQQHCEAWGASLPEAQVWGYLRDTLLALAHLHSQGLVHLDVKPANIFLGPRGRCKLGDFGLLVELGTAGAGEVQEGDPRYMAPELLQGSYGTAADVFSLGLTILEVACNMELPHGGEGWQQLRQGYLPPEFTAGLSSELRSVLVMMLEPDPKLRATAEALLALPVLRQPRAWGVLWCMAAEALSRGWALWQALLALLCWLWHGLAHPASWLQPLGPPATPPGSPPCSLLLDSSLSSNWDDDSLGPGHPPCLACPPAGLHSPLRLSWPGLWGAPPPPGAGAHPGMPWT

SEQ ID NO: 68408 - protein, 274 aa, Homo sapiens
  Payload ID: 13623
  Gene Symbol: PKMYT1
  Gene Name: protein kinase, membrane associated tyrosine/threonine 1
  ENSP ID: ENSP00000458545
MPMPTEGTPPPLSGTPIPVPAYFRHAEPGFSLKRPRGLSRSLPPPPPAKGSIPISRLFPPRTPGWHQLQPRRVSFRGEASETLQSPGYDPSRPESFFQQSFQRLSRLGHGSYGEVFKVRSKEDGRLYAVKRSMSPFRGPKDRARKLAEVGSHEKVGQHPCCVRLEQAWEEGGILYLQTELCGPSLQQHCEAWGASLPEAQVWGYLRDTLLALAHLHSQGLVHLDVKPANIFLGPRGRCKLGDFGLLVELGTAGAGEVQEGDPRYMAPELLQGSY

SEQ ID NO: 68409 - protein, 147 aa, Homo sapiens
  Payload ID: 13623
  Gene Symbol: PKMYT1
  Gene Name: protein kinase, membrane associated tyrosine/threonine 1
  ENSP ID: ENSP00000458842
MLERPPALAMPMPTEGTPPPLSGTPIPVPAYFRHAEPGFSLKRPRGLSRSLPPPPPAKGSIPISRLFPPRTPGWHQLQPRRVSFRGEASETLQSPGYDPSRPESFFQQSFQRLSRLGHGSYGEVFKVRSKEDGRLYAVKRSMSPFRG

SEQ ID NO: 68410 - protein, 490 aa, Homo sapiens
  Payload ID: 13623
  Gene Symbol: PKMYT1
  Gene Name: protein kinase, membrane associated tyrosine/threonine 1
  Uniprot ID: Q99640
  ENSP ID: ENSP00000458943
MPMPTEGTPPPLSGTPIPVPAYFRHAEPGFSLKRPRGLSRSLPPPPPAKGSIPISRLFPPRTPGWHQLQPRRVSFRGEASETLQSPGYDPSRPESFFQQSFQRLSRLGHGSYGEVFKVRSKEDGRLYAVKRSMSPFRGPKDRARKLAEVGSHEKVGQHPCCVRLEQAWEEGGILYLQTELCGPSLQQHCEAWGASLPEAQVWGYLRDTLLALAHLHSQGLVHLDVKPANIFLGPRGRCKLGDFGLLVELGTAGAGEVQEGDPRYMAPELLQGSYGTAADVFSLGLTILEVACNMELPHGGEGWQQLRQGYLPPEFTAGLSSELRSVLVMMLEPDPKLRATAEALLALPVLRQPRAWGVLWCMAAEALSRGWALWQALLALLCWLWHGLAHPASWLQPLGPPATPPGSPPCSLLLDSSLSSNWDDDSLGPSLSPEAVLARTVGSTSTPRSRCTPRDALDLSDINSEPPRGSFPSFEPRNLLSLFEDTLDPT

SEQ ID NO: 68411 - protein, 490 aa, Homo sapiens; identical to SEQ ID NO: 68410
  Payload ID: 13623
  Gene Symbol: PKMYT1
  Gene Name: protein kinase, membrane associated tyrosine/threonine 1
  Uniprot ID: Q99640
  ENSP ID: ENSP00000459123

SEQ ID NO: 68412 - protein, 60 aa, Homo sapiens
  Payload ID: 13623
  Gene Symbol: PKMYT1
  Gene Name: protein kinase, membrane associated tyrosine/threonine 1
  ENSP ID: ENSP00000459880
  MOD_RES (1)..(1): Any amino acid
XAEGGPCGRPCLPCSAGSGMGWLTLPAGYSPWARQPPRLAHHPAVCSWTAASPATGMTTA

SEQ ID NO: 68413 - protein, 215 aa, Homo sapiens
  Payload ID: 13623
  Gene Symbol: PKMYT1
  Gene Name: protein kinase, membrane associated tyrosine/threonine 1
  ENSP ID: ENSP00000460598
MLERPPALAMPMPTEGTPPPLSGTPIPVPAYFRHAEPGFSLKRPRGLSRSLPPPPPAKGSIPISRLFPPRTPGWHQLQPRRVSFRGEASETLQSPGYDPSRPESFFQQSFQRLSRLGHGSYGEVFKLLFPPRDTSKRSPGVSAGRPWLLRRWVSTDPARGMEVRSKEDGRLYAVKRSMSPFRGPKDRARKLAEVGSHEKVGQHPCCVRLEQAWEE

SEQ ID NO: 68414 - protein, 430 aa, Homo sapiens
  Payload ID: 13623
  Gene Symbol: PKMYT1
  Gene Name: protein kinase, membrane associated tyrosine/threonine 1
  Uniprot ID: Q99640
  ENSP ID: ENSP00000460868
MLERWHQLQPRRVSFRGEASETLQSPGYDPSRPESFFQQSFQRLSRLGHGSYGEVFKVRSKEDGRLYAVKRSMSPFRGPKDRARKLAEVGSHEKVGQHPCCVRLEQAWEEGGILYLQTELCGPSLQQHCEAWGASLPEAQVWGYLRDTLLALAHLHSQGLVHLDVKPANIFLGPRGRCKLGDFGLLVELGTAGAGEVQEGDPRYMAPELLQGSYGTAADVFSLGLTILEVACNMELPHGGEGWQQLRQGYLPPEFTAGLSSELRSVLVMMLEPDPKLRATAEALLALPVLRQPRAWGVLWCMAAEALSRGWALWQALLALLCWLWHGLAHPASWLQPLGPPATPPGSPPCSLLLDSSLSSNWDDDSLGPSLSPEAVLARTVGSTSTPRSRCTPRDALDLSDINSEPPRGSFPSFEPRNLLSLFEDTLDPT

SEQ ID NO: 68415 - protein, 169 aa, Homo sapiens
  Payload ID: 13623
  Gene Symbol: PKMYT1
  Gene Name: protein kinase, membrane associated tyrosine/threonine 1
  ENSP ID: ENSP00000461330
MLERPPALAMPMPTEGTPPPLSGTPIPVPAYFRHAEPGFSLKRPRGLSRSLPPPPPAKGSIPISRLFPPRTPGWHQLQPRRVSFRGEASETLQSPGYDPSRPESFFQQSFQRLSRLGHGSYGEVFKVRSKEDGRLYAVKRSMSPFRGPKDRARKLAEVGSHEKVGQHPC

SEQ ID NO: 68416 - protein, 50 aa, Homo sapiens
  Payload ID: 13623
  Gene Symbol: PKMYT1
  Gene Name: protein kinase, membrane associated tyrosine/threonine 1
  ENSP ID: ENSP00000461628
MLERPPALAMPMPTEGTPPPLSGTPIPVPAYFRHAEPGFSLKRPRGLSRS

SEQ ID NO: 68417 - protein, 358 aa, Homo sapiens
  Payload ID: 13624
  Gene Symbol: PRKX
  Gene Name: protein kinase, X-linked
  Uniprot ID: P51817
  ENSP ID: ENSP00000262848
MEAPGLAQAAAAESDSRKVAEETPDGAPALCPSPEALSPEPPVYSLQDFDTLATVGTGTFGRVHLVKEKTAKHFFALKVMSIPDVIRLKQEQHVHNEKSVLKEVSHPFLIRLFWTWHDERFLYMLMEYVPGGELFSYLRNRGRFSSTTGLFYSAEIICAIEYLHSKEIVYRDLKPENILLDRDGHIKLTDFGFAKKLVDRTWTLCGTPEYLAPEVIQSKGHGRAVDWWALGILIFEMLSGFPPFFDDNPFGIYQKILAGKIDFPRHLDFHVKDLIKKLLVVDRTRRLGNMKNGANDVKHHRWFRSVDWEAVPQRKLKPPIVPKIAGDGDTSNFETYPENDWDTAAPVPQKDLEIFKNF

SEQ ID NO: 68418 - protein, 194 aa, Homo sapiens
  Payload ID: 13625
  Gene Symbol: POFUT1
  Gene Name: protein O-fucosyltransferase 1
  Uniprot ID: Q9H488
  ENSP ID: ENSP00000364882
MGAAAWARPLSVSFLLLLLPLPGMPAGSWDPAGYLLYCPCMGRFGNQADHFLGSLAFAKLLNRTLAVPPWIEYQHHKPPFTNLHVSYQKYFKLEPLQAYHRVISLEDFMEKLAPTHWPPEKRVAYCFEVAAQRSPDKKTCPMKEGNPFGPFWDQFHVSFNKSELFTGISFSASYREQWSQRRENHSCVTLLFPR

SEQ ID NO: 68419 - protein, 388 aa, Homo sapiens
  Payload ID: 13625
  Gene Symbol: POFUT1
  Gene Name: protein O-fucosyltransferase 1
  Uniprot ID: Q9H488
  ENSP ID: ENSP00000364902
MGAAAWARPLSVSFLLLLLPLPGMPAGSWDPAGYLLYCPCMGRFGNQADHFLGSLAFAKLLNRTLAVPPWIEYQHHKPPFTNLHVSYQKYFKLEPLQAYHRVISLEDFMEKLAPTHWPPEKRVAYCFEVAAQRSPDKKTCPMKEGNPFGPFWDQFHVSFNKSELFTGISFSASYREQWSQRFSPKEHPVLALPGAPAQFPVLEEHRPLQKYMVWSDEMVKTGEAQIHAHLVRPYVGIHLRIGSDWKNACAMLKDGTAGSHFMASPQCVGYSRSTAAPLTMTMCLPDLKEIQRAVKLWVRSLDAQSVYVATDSESYVPELQQLFKGKVKVVSLKPEVAQVDLYILGQADHFIGNCVSSFTAFVKRERDLQGRPSSFFGMDRPPKLRDEF

SEQ ID NO: 68420 - protein, 424 aa, Homo sapiens
  Payload ID: 13626
  Gene Symbol: POFUT2
  Gene Name: protein O-fucosyltransferase 2
  Uniprot ID: Q9Y2G5
  ENSP ID: ENSP00000329682
MATLSFVFLLLGAVSWPPASASGQEFWPGQSAADILSGAASRRRYLLYDVNPPEGFNLRRDVYIRIASLLKTLLKTEEWVLVLPPWGRLYHWQSPDIHQVRIPWSEFFDLPSLNKNIPVIEYEQFIAESGGPFIDQVYVLQSYAEGWKEGTWEEKVDERPCIDQLLYSQDKHEYYRGWFWGYEETRGLNVSCLSVQGSASIVAPLLLRNTSARSVMLDRAENLLHDHYGGKEYWDTRRSMVFARHLREVGDEFRSRHLNSTDDADRIPFQEDWMKMKVKLGSALGGPYLGVHLRRKDFIWGHRQDVPSLEGAVRKIRSLMKTHRLDKVFVATDAVRKEYEELKKLLPEMVRFEPTWEELELYKDGGVAIIDQWICAHARCLPTSLSAESGSGGFQRFFCPKYSVSEQMVACVHSGHFHTVCLLV

SEQ ID NO: 68421 - protein, 380 aa, Homo sapiens
  Payload ID: 13626
  Gene Symbol: POFUT2
  Gene Name: protein O-fucosyltransferase 2
  Uniprot ID: Q9Y2G5
  ENSP ID: ENSP00000335427
MATLSFVFLLLGAVSWPPASASGQEFWPGQSAADILSGAASRRRYLLYDVNPPEGFNLRRDVYIRIASLLKTLLKTEEWVLVLPPWGRLYHWQSPDIHQVRIPWSEFFDLPSLNKNIPVIEYEQFIAESGGPFIDQVYVLQSYAEGWKEGTWEEKVDERPCIDQLLYSQDKHEYYRGWFWGYEETRGLNVSCLSVQGSASIVAPLLLRNTSARSVMLDRAENLLHDHYGGKEYWDTRRSMVFARHLREVGDEFRSRHLNSTDDADRIPFQEDWMKMKVKLGSALGGPYLGVHLRRKDFIWGHRQDVPSLEGAVRKIRSLMKTHRLDKVFVATDAVRKEYEELKKLLPEMVRFEPTWEELELYKDGGVAIIDQWICAHASS

SEQ ID NO: 68422 - protein, 429 aa, Homo sapiens
  Payload ID: 13626
  Gene Symbol: POFUT2
  Gene Name: protein O-fucosyltransferase 2
  Uniprot ID: Q9Y2G5
  ENSP ID: ENSP00000339613
MATLSFVFLLLGAVSWPPASASGQEFWPGQSAADILSGAASRRRYLLYDVNPPEGFNLRRDVYIRIASLLKTLLKTEEWVLVLPPWGRLYHWQSPDIHQVRIPWSEFFDLPSLNKNIPVIEYEQFIAESGGPFIDQVYVLQSYAEGWKEGTWEEKVDERPCIDQLLYSQDKHEYYRGWFWGYEETRGLNVSCLSVQGSASIVAPLLLRNTSARSVMLDRAENLLHDHYGGKEYWDTRRSMVFARHLREVGDEFRSRHLNSTDDADRIPFQEDWMKMKVKLGSALGGPYLGVHLRRKDFIWGHRQDVPSLEGAVRKIRSLMKTHRLDKVFVATDAVRKEYEELKKLLPEMVRFEPTWEELELYKDGGVAIIDQWICAHARFFIGTSVSTFSFRIHEEREILGLDPKTTYNRFCGDQEKACEQPTHWKITY

SEQ ID NO: 68423 - protein, 265 aa, Homo sapiens
  Payload ID: 13626
  Gene Symbol: POFUT2
  Gene Name: protein O-fucosyltransferase 2
  ENSP ID: ENSP00000407635
  MOD_RES (1)..(1): Any amino acid
XQFIAESGGPFIDQVYVLQSYAEGWKEGTWEEKVDERPCIDQLLYSQDKHEYYRDGGLVSPKCRLPLKALTLPGLLWKSCQLTASMCPVPGQLALKHGRGWFWGYEETRGLNVSCLSVQGSASIVAPLLLRNTSARSVMLDRAENLLHDHYGGKEYWDTRRSMVFARHLREVGDEFRSRHLNSTDDADRIPFQEDWMKMKVKLGSALGGPYLGVHLRRKDFIWGHRQDVPSLEGAVRKIRSLMKTHRLDKVFVATDAVRKEYEEL

SEQ ID NO: 68424 - protein, 212 aa, Homo sapiens
  Payload ID: 13626
  Gene Symbol: POFUT2
  Gene Name: protein O-fucosyltransferase 2
  ENSP ID: ENSP00000478168
MATLSFVFLLLGAVSWPPASASGQEFWPGQSAADILSGAASRRRYLLYDVNPPEGFNLRRDVYIRIASLLKTLLKTEEWVLVLPPWGRLYHWQSPDIHQVRIPWSEFFDLPSLNKNIPVIEYEQFIAGRRTACGVCFVVSQCSARDKESGGPFIDQVYVLQSYAEGWKEGTWEEKVDERPCIDQLLYSQDKHEYYRCLLRLLPLPQRMVLGL

SEQ ID NO: 68425 - protein, 141 aa, Homo sapiens
  Payload ID: 13626
  Gene Symbol: POFUT2
  Gene Name: protein O-fucosyltransferase 2
  ENSP ID: ENSP00000482216
MVFARHLREVGDEFRSRHLNSTDDADRIPFQEDWMKMKVKLGSALGGPYLGVHLRRKDFIWGHRQDVPSLEGAVRKIRSLMKTHRLDKVFVATDAVRKEYEELKKLLPEMVRFEPTWEELELYKDGGVAIIDQWICAHASS

SEQ ID NO: 68426 - protein, 392 aa, Homo sapiens
  Payload ID: 13627
  Gene Symbol: POGLUT1
  Gene Name: protein O-glucosyltransferase 1
  Uniprot ID: Q8NBL1
  ENSP ID: ENSP00000295588
MEWWASSPLRLWLLLFLLPSAQGRQKESGSKWKVFIDQINRSLENYEPCSSQNCSCYHGVIEEDLTPFRGGISRKMMAEVVRRKLGTHYQITKNRLYRENDCMFPSRCSGVEHFILEVIGRLPDMEMVINVRDYPQVPKWMEPAIPVFSFSKTSEYHDIMYPAWTFWEGGPAVWPIYPTGLGRWDLFREDLVRSAAQWPWKKKNSTAYFRGSRTSPERDPLILLSRKNPKLVDAEYTKNQAWKSMKDTLGKPAAKDVHLVDHCKYKYLFNFRGVAASFRFKHLFLCGSLVFHVGDEWLEFFYPQLKPWVHYIPVKTDLSNVQELLQFVKANDDVAQEIAERGSQFIRNHLQMDDITCYWENLLSEYSKFLSYNVTRRKGYDQIIPKMLKTEL

SEQ ID NO: 68427 - protein, 187 aa, Homo sapiens
  Payload ID: 13627
  Gene Symbol: POGLUT1
  Gene Name: protein O-glucosyltransferase 1
  ENSP ID: ENSP00000419288
MEWWASSPLRLWLLLFLLPSAQGRQKESGSKWKVFIDQINRSLENYEPCSSQNCSCYHGVIEEDLTPFRGGISRKMMAEVVRRKLGTHYQITKNRLYRENDCMFPSRCSGVEHFILEVIGRLPDMEMVINVRDYPQVPKWMEPAIPVFSFSKTCFISCVASGQRPHLCCISHGLASFLESVWFHCLS

SEQ ID NO: 68428 - protein, 189 aa, Homo sapiens
  Payload ID: 13627
  Gene Symbol: POGLUT1
  Gene Name: protein O-glucosyltransferase 1
  ENSP ID: ENSP00000419865
  MOD_RES (1)..(1): Any amino acid
XCGAALPPAPQRGICSSKWKVFIDQINRSLENYEPCSSQNCSCYHGVIEEDLTPFRGGISRKMMAEVVRRKLGTHYQITKNRLYRENDCMFPSRCSGVEHFILEVIGRLPDMEMVINVRDYPQVPKWMEPAIPVFSFSKTSEYHDIMYPAWTFWEGGPAVWPIYPTGLGRWDLFREDLVRSAAQWPWKK

SEQ ID NO: 68429 - protein, 163 aa, Homo sapiens
  Payload ID: 13627
  Gene Symbol: POGLUT1
  Gene Name: protein O-glucosyltransferase 1
  ENSP ID: ENSP00000419876
MEWWASSPLRLWLLLFLLPSAQGRQKESGSKWKVFIDQINRSLENYEPCSSQNCSCYHGVIEEDLTPFRGGISRKMMAEVVRRKLGTHYQITKNRLYRENDCMFPSRCSGVEHFILEVIGRLPDMEMVINVRDYPQVPKWMEPAIPVFSFSKARLWKIGKIYL

SEQ ID NO: 68430 - protein, 111 aa, Homo sapiens
  Payload ID: 13627
  Gene Symbol: POGLUT1
  Gene Name: protein O-glucosyltransferase 1
  ENSP ID: ENSP00000420594
MEWWASSPLRLWLLLFLLPSAQGRQKESGGLRAVPSLPLGLGVWPESRGAPPRGRLPGRCRGRCSSELGRRHRGALRRRVQNGKYLLTKLTGLWRITNHVQVKTAAATMVS

SEQ ID NO: 68431 - protein, 660 aa, Homo sapiens
  Payload ID: 13628
  Gene Symbol: POMGNT1
  Gene Name: protein O-linked mannose N-acetylglucosaminyltransferase 1 (beta 1,2-)
  Uniprot ID: Q8WZA1
  ENSP ID: ENSP00000361052
MDDWKPSPLIKPFGARKKRSWYLTWKYKLTNQRALRRFCQTGAVLFLLVTVIVNIKLILDTRRAISEANEDPEPEQDYDEALGRLEPPRRRGSGPRRVLDVEVYSSRSKVYVAVDGTTVLEDEAREQGRGIHVIVLNQATGHVMAKRVFDTYSPHEDEAMVLFLNMVAPGRVLICTVKDEGSFHLKDTAKALLRSLGSQAGPALGWRDTWAFVGRKGGPVFGEKHSKSPALSSWGDPVLLKTDVPLSSAEEAECHWADTELNRRRRRFCSKVEGYGSVCSCKDPTPIEFSPDPLPDNKVLNVPVAVIAGNRPNYLYRMLRSLLSAQGVSPQMITVFIDGYYEEPMDVVALFGLRGIQHTPISIKNARVSQHYKASLTATFNLFPEAKFAVVLEEDLDIAVDFFSFLSQSIHLLEEDDSLYCISAWNDQGYEHTAEDPALLYRVETMPGLGWVLRRSLYKEELEPKWPTPEKLWDWDMWMRMPEQRRGRECIIPDVSRSYHFGIVGLNMNGYFHEAYFKKHKFNTVPGVQLRNVDSLKKEAYEVEVHRLLSEAEVLDHSKNPCEDSFLPDTEGHTYVAFIRMEKDDDFTTWTQLAKCLHIWDLDVRGNHRGLWRLFRKKNHFLMVGVPASPYSVKKPPSVTPIFLEPPPKEEGAPGAPEQT

SEQ ID NO: 68432 - protein, 748 aa, Homo sapiens
  Payload ID: 13628
  Gene Symbol: POMGNT1
  Gene Name: protein O-linked mannose N-acetylglucosaminyltransferase 1 (beta 1,2-)
  Uniprot ID: Q8WZA1
  ENSP ID: ENSP00000361060
MDDWKPSPLIKPFGARKKRSWYLTWKYKLTNQRALRRFCQTGAVLFLLVTVIVNIKLILDTRRAISEANEDPEPEQDYDEALGRLEPPRRRGSGPRRVLDVEVYSSRSKVYVAVDGTTVLEDEAREQGRGIHVIVLNQATGHVMAKRVFDTYSPHEDEAMVLFLNMVAPGRVLICTVKDEGSFHLKDTAKALLRSLGSQAGPALGWRDTWAFVGRKGGPVFGEKHSKSPALSSWGDPVLLKTDVPLSSAEEAECHWADTELNRRRRRFCSKVEGYGSVCSCKDPTPIEFSPDPLPDNKVLNVPVAVIAGNRPNYLYRMLRSLLSAQGVSPQMITVFIDGYYEEPMDVVALFGLRGIQHTPISIKNARVSQHYKASLTATFNLFPEAKFAVVLEEDLDIAVDFFSFLSQSIHLLEEDDSLYCISAWNDQGYEHTAEDPALLYRVETMPGLGWVLRRSLYKEELEPKWPTPEKLWDWDMWMRMPEQRRGRECIIPDVSRSYHFGIVGLNMNGYFHEAYFKKHKFNTVPGVQLRNVDSLKKEAYEVEVHRLLSEAEVLDHSKNPCEDSFLPDTEGHTYVAFIRMEKDDDFTTWTQLAKCLHIWDLDVRGNHRGLWRLFRKKNHFLMSEEATLSHPNFPGATPKGGGSPRSPRTDMRPPPGPCGAGPGSESNLFIDCPEGLENRPNLEGLDFFLGWNAALRVGLALTQETAVPNPWTGPAGAHMLTQTHSETLRHWTRPPLSLLFVQISKAG

SEQ ID NO: 68433 - protein, 200 aa, Homo sapiens
  Payload ID: 13628
  Gene Symbol: POMGNT1
  Gene Name: protein O-linked mannose N-acetylglucosaminyltransferase 1 (beta 1,2-)
  ENSP ID: ENSP00000379698
MDDWKPSPLIKPFGARKKRSWYLTWKYKLTNQRALRRFCQTGAVLFLLVTVIVNIKLILDTRRAISEANEDPEPEQDYDEALGRLEPPRRRGSGPRRVLDVEVYSSRSKVYVAVDGTTVLEDEAREQGRGIHVIVLNQATGHVMAKRVFDTYSPHEDEAMVLFLNMVAPGRVLICTVKVLSSGRNILNHLPSLPGGTQSC

SEQ ID NO: 68434 - protein, 580 aa, Homo sapiens
  Payload ID: 13629
  Gene Symbol: POMGNT2
  Gene Name: protein O-linked mannose N-acetylglucosaminyltransferase 2 (beta 1,4-)
  Uniprot ID: Q8NAT1
  ENSP ID: ENSP00000344125
MHLSAVFNALLVSVLAAVLWKHVRLREHAATLEEELALSRQATEPAPALRIDYPKALQILMEGGTHMVCTGRTHTDRICRFKWLCYSNEAEEFIFFHGNTSVMLPNLGSRRFQPALLDLSTVEDHNTQYFNFVELPAAALRFMPKPVFVPDVALIANRFNPDNLMHVFHDDLLPLFYTLRQFPGLAHEARLFFMEGWGEGAHFDLYKLLSPKQPLLRAQLKTLGRLLCFSHAFVGLSKITTWYQYGFVQPQGPKANILVSGNEIRQFARFMTEKLNVSHTGVPLGEEYILVFSRTQNRLILNEAELLLALAQEFQMKTVTVSLEDHTFADVVRLVSNASMLVSMHGAQLVTTLFLPRGATVVELFPYAVNPDHYTPYKTLAMLPGMDLQYVAWRNMMPENTVTHPERPWDQGGITHLDRAEQARILQSREVPRHLCCRNPEWLFRIYQDTKVDIPSLIQTIRRVVKGRPGPRKQKWTVGLYPGKVREARCQASVHGASEARLTVSWQIPWNLKYLKVREVKYEVWLQEQGENTYVPYILALQNHTFTENIKPFTTYLVWVRCIFNKILLGPFADVLVCNT

SEQ ID NO: 68435 - protein, 580 aa, Homo sapiens; identical to SEQ ID NO: 68434
  Payload ID: 13629
  Gene Symbol: POMGNT2
  Gene Name: protein O-linked mannose N-acetylglucosaminyltransferase 2 (beta 1,4-)
  Uniprot ID: Q8NAT1
  ENSP ID: ENSP00000408992

SEQ ID NO: 68436 - protein, 341 aa, Homo sapiens
  Payload ID: 13630
  Gene Symbol: PPP1CA
  Gene Name: protein phosphatase 1, catalytic subunit, alpha isozyme
  Uniprot ID: P62136
  ENSP ID: ENSP00000326031
MSDSEKLNLDSIIGRLLEGSRVLTPHCAPVQGSRPGKNVQLTENEIRGLCLKSREIFLSQPILLELEAPLKICGDIHGQYYDLLRLFEYGGFPPESNYLFLGDYVDRGKQSLETICLLLAYKIKYPENFFLLRGNHECASINRIYGFYDECKRRYNIKLWKTFTDCFNCLPIAAIVDEKIFCCHGGLSPDLQSMEQIRRIMRPTDVPDQGLLCDLLWSDPDKDVQGWGENDRGVSFTFGAEVVAKFLHKHDLDLICRAHQVVEDGYEFFAKRQLVTLFSAPNYCGEFDNAGAMMSVDETLMCSFQILKPADKNKGKYGQFSGLNPGGRPITPPRNSAKAKK

SEQ ID NO: 68437 - protein, 286 aa, Homo sapiens
  Payload ID: 13630
  Gene Symbol: PPP1CA
  Gene Name: protein phosphatase 1, catalytic subunit, alpha isozyme
  Uniprot ID: P62136
  ENSP ID: ENSP00000350974
MSDSEKLNLDSIIGRLLEGDIHGQYYDLLRLFEYGGFPPESNYLFLGDYVDRGKQSLETICLLLAYKIKYPENFFLLRGNHECASINRIYGFYDECKRRYNIKLWKTFTDCFNCLPIAAIVDEKIFCCHGGLSPDLQSMEQIRRIMRPTDVPDQGLLCDLLWSDPDKDVQGWGENDRGVSFTFGAEVVAKFLHKHDLDLICRAHQVVEDGYEFFAKRQLVTLFSAPNYCGEFDNAGAMMSVDETLMCSFQILKPADKNKGKYGQFSGLNPGGRPITPPRNSAKAKK

SEQ ID NO: 68438 - protein, 330 aa, Homo sapiens
  Payload ID: 13630
  Gene Symbol: PPP1CA
  Gene Name: protein phosphatase 1, catalytic subunit, alpha isozyme
  Uniprot ID: P62136
  ENSP ID: ENSP00000365936
MSDSEKLNLDSIIGRLLEVQGSRPGKNVQLTENEIRGLCLKSREIFLSQPILLELEAPLKICGDIHGQYYDLLRLFEYGGFPPESNYLFLGDYVDRGKQSLETICLLLAYKIKYPENFFLLRGNHECASINRIYGFYDECKRRYNIKLWKTFTDCFNCLPIAAIVDEKIFCCHGGLSPDLQSMEQIRRIMRPTDVPDQGLLCDLLWSDPDKDVQGWGENDRGVSFTFGAEVVAKFLHKHDLDLICRAHQVVEDGYEFFAKRQLVTLFSAPNYCGEFDNAGAMMSVDETLMCSFQILKPADKNKGKYGQFSGLNPGGRPITPPRNSAKAKK

SEQ ID NO: 68439 - protein, 253 aa, Homo sapiens
  Payload ID: 13630
  Gene Symbol: PPP1CA
  Gene Name: protein phosphatase 1, catalytic subunit, alpha isozyme
  ENSP ID: ENSP00000431146
MSDSEKLNLDSIIGRLLEVQGSRPGKNVQLTENEIRGLCLKSREIFLSQPILLELEAPLKICGDIHGQYYDLLRLFEYGGFPPESNYLFLGDYVDRGKQSLETICLLLAYKIKYPENFFLLRGNHECASINRIYGFYDECLSPDLQSMEQIRRIMRPTDVPDQGLLCDLLWSDPDKDVQGWGENDRGVSFTFGAEVVAKFLHKHDLDLICRAHQVVEDGYEFFAKRQLVTLFSAPNYCGEFDNAGAMMSVDET

SEQ ID NO: 68440 - protein, 179 aa, Homo sapiens
  Payload ID: 13630
  Gene Symbol: PPP1CA
  Gene Name: protein phosphatase 1, catalytic subunit, alpha isozyme
  ENSP ID: ENSP00000438409
MRQRADRRSMVSTSGAATASSAAGPSRGAAHSPSSAPHASRHRPPFSSRATGLLQQRQHCVHHCTQLCPRVQTPCLPPPPAPATELHSYLQQGGERGLLDTTPGTAGWGTSATGAVQGSRPGKNVQLTENEIRGLCLKSREIFLSQPILLELEAPLKICGDIHGQYYDLLRLFEYGGFP

SEQ ID NO: 68441 - protein, 169 aa, Homo sapiens
  Payload ID: 13630
  Gene Symbol: PPP1CA
  Gene Name: protein phosphatase 1, catalytic subunit, alpha isozyme
  ENSP ID: ENSP00000439568
MRQRADRRSMVSTSGAATASSAAGPSRGAAHSPSSAPHASRHRPPFSSRATGLLQQRQHCVHHCTQLCPRVQTPCLPPPPAPATELHSYLQQGGERGLLDTTPVQGSRPGKNVQLTENEIRGLCLKSREIFLSQPILLELEAPLKICGDIHGQYYDLLRLFEYGGFPPE

SEQ ID NO: 68442 - protein, 327 aa, Homo sapiens
  Payload ID: 13631
  Gene Symbol: PPP1CB
  Gene Name: protein phosphatase 1, catalytic subunit, beta isozyme
  Uniprot ID: P62140
  ENSP ID: ENSP00000296122
MADGELNVDSLITRLLEVRGCRPGKIVQMTEAEVRGLCIKSREIFLSQPILLELEAPLKICGDIHGQYTDLLRLFEYGGFPPEANYLFLGDYVDRGKQSLETICLLLAYKIKYPENFFLLRGNHECASINRIYGFYDECKRRFNIKLWKTFTDCFNCLPIAAIVDEKIFCCHGGLSPDLQSMEQIRRIMRPTDVPDTGLLCDLLWSDPDKDVQGWGENDRGVSFTFGADVVSKFLNRHDLDLICRAHQVVEDGYEFFAKRQLVTLFSAPNYCGEFDNAGGMMSVDETLMCSFQILKPSEKKAKYQYGGLNSGRPVTPPRTANPPKKR

SEQ ID NO: 68443 - protein, 327 aa, Homo sapiens; identical to SEQ ID NO: 68442
  Payload ID: 13631
  Gene Symbol: PPP1CB
  Gene Name: protein phosphatase 1, catalytic subunit, beta isozyme
  Uniprot ID: P62140
  ENSP ID: ENSP00000351298

SEQ ID NO: 68444 - protein, 327 aa, Homo sapiens; identical to SEQ ID NO: 68442
  Payload ID: 13631
  Gene Symbol: PPP1CB
  Gene Name: protein phosphatase 1, catalytic subunit, beta isozyme
  Uniprot ID: P62140
  ENSP ID: ENSP00000378769

SEQ ID NO: 68445 - protein, 82 aa, Homo sapiens
  Payload ID: 13631
  Gene Symbol: PPP1CB
  Gene Name: protein phosphatase 1, catalytic subunit, beta isozyme
  ENSP ID: ENSP00000388056
CASINRIYGFYDECKRRFNIKLWKTFTDCFNCLPIAAIVDEKIFCCHGGRLVNLPYRFFFSSIIRKIPIIIKRLWENKAVLV

SEQ ID NO: 68446 - protein, 169 aa, Homo sapiens
  Payload ID: 13631
  Gene Symbol: PPP1CB
  Gene Name: protein phosphatase 1, catalytic subunit, beta isozyme
  ENSP ID: ENSP00000390715
MTEAEVRGLCIKSREIFLSQPILLELEAPLKICGDIHGQYTDLLRLFEYGGFPPEANYLFLGDYVDRGKQSLETICLLLAYKIKYPENFFLLRGNHECASINRIYGFYDECKRRFNIKLWKTFTDCFNCLPIAAIVDEKIFCCHGGLSPDLQSMEQIRRIMRPTDVPDT

SEQ ID NO: 68447 - protein, 64 aa, Homo sapiens
  Payload ID: 13631
  Gene Symbol: PPP1CB
  Gene Name: protein phosphatase 1, catalytic subunit, beta isozyme
  ENSP ID: ENSP00000394589
MTEAEVRGLCIKSREIFLSQPILLELEAPLKICGIQEQLSGSSGSGSLTRLQLRRDLGLQSSEG

SEQ ID NO: 68448 - protein, 125 aa, Homo sapiens
  Payload ID: 13631
  Gene Symbol: PPP1CB
  Gene Name: protein phosphatase 1, catalytic subunit, beta isozyme
  ENSP ID: ENSP00000398839
MADGELNVDSLITRLLEVRGCRPGKIVQMTEAEVRGLCIKSREIFLSQPILLELEAPLKICGDIHGQYTDLLRLFEYGGFPPEANYLFLGDYVDRGKQSLETICLLLAYKIKYPENFFLLRGNHE

SEQ ID NO: 68449 - protein, 138 aa, Homo sapiens
  Payload ID: 13631
  Gene Symbol: PPP1CB
  Gene Name: protein phosphatase 1, catalytic subunit, beta isozyme
  ENSP ID: ENSP00000414918
MADGELNVDSLITRLLEVRGCRPGKIVQMTEAEVRGLCIKSREIFLSQPILLELEAPLKICGDIHGQYTDLLRLFEYGGFPPEANYLFLGDYVDRGKQSLETICLLLAYKIKYPENFFLLRGNHECASINRIYGFYDE

SEQ ID NO: 68450 - protein, 323 aa, Homo sapiens
  Payload ID: 13632
  Gene Symbol: PPP1CC
  Gene Name: protein phosphatase 1, catalytic subunit, gamma isozyme
  Uniprot ID: P36873
  ENSP ID: ENSP00000335084
MADLDKLNIDSIIQRLLEVRGSKPGKNVQLQENEIRGLCLKSREIFLSQPILLELEAPLKICGDIHGQYYDLLRLFEYGGFPPESNYLFLGDYVDRGKQSLETICLLLAYKIKYPENFFLLRGNHECASINRIYGFYDECKRRYNIKLWKTFTDCFNCLPIAAIVDEKIFCCHGGLSPDLQSMEQIRRIMRPTDVPDQGLLCDLLWSDPDKDVLGWGENDRGVSFTFGAEVVAKFLHKHDLDLICRAHQVVEDGYEFFAKRQLVTLFSAPNYCGEFDNAGAMMSVDETLMCSFQILKPAEKKKPNATRPVTPPRGMITKQAKK

SEQ ID NO: 68451 - protein, 337 aa, Homo sapiens
  Payload ID: 13632
  Gene Symbol: PPP1CC
  Gene Name: protein phosphatase 1, catalytic subunit, gamma isozyme
  Uniprot ID: P36873
  ENSP ID: ENSP00000341779
MADLDKLNIDSIIQRLLEVRGSKPGKNVQLQENEIRGLCLKSREIFLSQPILLELEAPLKICGDIHGQYYDLLRLFEYGGFPPESNYLFLGDYVDRGKQSLETICLLLAYKIKYPENFFLLRGNHECASINRIYGFYDECKRRYNIKLWKTFTDCFNCLPIAAIVDEKIFCCHGGLSPDLQSMEQIRRIMRPTDVPDQGLLCDLLWSDPDKDVLGWGENDRGVSFTFGAEVVAKFLHKHDLDLICRAHQVVEDGYEFFAKRQLVTLFSAPNYCGEFDNAGAMMSVDETLMCSFQILKPAEKKKPNATRPVTPPRVASGLNPSIQKASNYRNNTVLYE

SEQ ID NO: 68452 - protein, 83 aa, Homo sapiens
  Payload ID: 13632
  Gene Symbol: PPP1CC
  Gene Name: protein phosphatase 1, catalytic subunit, gamma isozyme
  ENSP ID: ENSP00000447090
NCLPIAAIVDEKIFCCHGGLSPDLQSMEQIRRIMRPTDVPDQDFKACREKEAKCHETCNASKGYDHKASKEIDVVLTLPSRDL

SEQ ID NO: 68453 - protein, 332 aa, Homo sapiens
  Payload ID: 13632
  Gene Symbol: PPP1CC
  Gene Name: protein phosphatase 1, catalytic subunit, gamma isozyme
  ENSP ID: ENSP00000447122
MFLPLYLNLVLYFVFWLHWTNCDFSLAVRGSKPGKNVQLQENEIRGLCLKSREIFLSQPILLELEAPLKICGDIHGQYYDLLRLFEYGGFPPESNYLFLGDYVDRGKQSLETICLLLAYKIKYPENFFLLRGNHECASINRIYGFYDECKRRYNIKLWKTFTDCFNCLPIAAIVDEKIFCCHGGLSPDLQSMEQIRRIMRPTDVPDQGLLCDLLWSDPDKDVLGWGENDRGVSFTFGAEVVAKFLHKHDLDLICRAHQVVEDGYEFFAKRQLVTLFSAPNYCGEFDNAGAMMSVDETLMCSFQILKPAEKKKPNATRPVTPPRGMITKQAKK

SEQ ID NO: 68454 - protein, 54 aa, Homo sapiens
  Payload ID: 13632
  Gene Symbol: PPP1CC
  Gene Name: protein phosphatase 1, catalytic subunit, gamma isozyme
  ENSP ID: ENSP00000447528
  MOD_RES (1)..(1): Any amino acid
XIHGQYYDLLRLFEYGGFPPESNYLFLGDYVDRGKQFITRSSIYGADSANYATN

SEQ ID NO: 68455 - protein, 270 aa, Homo sapiens
  Payload ID: 13632
  Gene Symbol: PPP1CC
  Gene Name: protein phosphatase 1, catalytic subunit, gamma isozyme
  ENSP ID: ENSP00000448437
MADLDKLNIDSIIQRLLEVRGSKPGKNVQLQENEIRGLCLKSREIFLSQPILLELEAPLKICGDIHGQYYDLLRLFEYGGFPPESNYLFLGDYVDRGKQSLETICLLLAYKIKYPENFFLLRGNHECASINRIYGFYDECKRRYNIKLWKTFTDCFNCLPIAAIVDEKIFCCHGGLSPDLQSMEQIRRIMRPTDVPDQGLLCDLLWSDPDKDVLGWGENDRGVSFTFGAEVVAKFLHKHDLDLICRAHQVLILNFTCTLKSMCVSTDSPC

SEQ ID NO: 68456 - protein, 304 aa, Homo sapiens
  Payload ID: 13632
  Gene Symbol: PPP1CC
  Gene Name: protein phosphatase 1, catalytic subunit, gamma isozyme
  ENSP ID: ENSP00000448981
MADLDKLNIDSIIQRLLEVRGSKPGKNVQLQENEIRGLCLKSREIFLSQPILLELEAPLKICGDIHGQYYDLLRLFEYGGFPPESNYLFLGDYVDRGKQSLETICLLLAYKIKYPENFFLLRGNHECASINRIYGFYDECKRRYNIKLWKTFTDCFNCLPIAAIVDEKIFCCHGGLSPDLQSMEQIRRIMRPTDVPDQGLLCDLLWSDPDKDVLGWGENDRGVSFTFGAEVVAKFLHKHDLDLICRAHQVVEDGYEFFAKRQLVTLFSAPNYCGEFDNAGAMMSVDETLMCSFQVEHAFNMISF

SEQ ID NO: 68457 - protein, 140 aa, Homo sapiens
  Payload ID: 13632
  Gene Symbol: PPP1CC
  Gene Name: protein phosphatase 1, catalytic subunit, gamma isozyme
  ENSP ID: ENSP00000482210
MADLDKLNIDSIIQRLLEVRGSKPGKNVQLQENEIRGLCLKSREIFLSQPILLELEAPLKICGDIHGQYYDLLRLFEYGGFPPESNYLFLGDYVDRGKQSLETICLLLAYKIKYPENFFLLRGNHECASINRIYGFYDEC

SEQ ID NO: 68458 - protein, 74 aa, Homo sapiens
  Payload ID: 13633
  Gene Symbol: PPP1R11
  Gene Name: protein phosphatase 1, regulatory (inhibitor) subunit 11
  ENSP ID: ENSP00000365949
MGRRSSKCCCIYEKPRAFGESSTESDEEEEEGCGHTHCVRGHRKGRRRATLGPTPTTPPQPPDPSQPPPGPMQH

SEQ ID NO: 68459 - protein, 74 aa, Homo sapiens; identical to SEQ ID NO: 68458
  Payload ID: 13633
  Gene Symbol: PPP1R11
  Gene Name: protein phosphatase 1, regulatory (inhibitor) subunit 11
  ENSP ID: ENSP00000365954

SEQ ID NO: 68460 - protein, 74 aa, Homo sapiens; identical to SEQ ID NO: 68458
  Payload ID: 13633
  Gene Symbol: PPP1R11
  Gene Name: protein phosphatase 1, regulatory (inhibitor) subunit 11
  ENSP ID: ENSP00000365956

SEQ ID NO: 68461 - protein, 74 aa, Homo sapiens; identical to SEQ ID NO: 68458
  Payload ID: 13633
  Gene Symbol: PPP1R11
  Gene Name: protein phosphatase 1, regulatory (inhibitor) subunit 11
  ENSP ID: ENSP00000365960

SEQ ID NO: 68462 - protein, 126 aa, Homo sapiens
  Payload ID: 13633
  Gene Symbol: PPP1R11
  Gene Name: protein phosphatase 1, regulatory (inhibitor) subunit 11
  Uniprot ID: O60927
  ENSP ID: ENSP00000365963
MAEAGAGLSETVTETTVTVTTEPENRSLTIKLRKRKPEKKVEWTSDTVDNEHMGRRSSKCCCIYEKPRAFGESSTESDEEEEEGCGHTHCVRGHRKGRRRATLGPTPTTPPQPPDPSQPPPGPMQH

SEQ ID NO: 68463 - protein, 74 aa, Homo sapiens; identical to SEQ ID NO: 68458
  Payload ID: 13633
  Gene Symbol: PPP1R11
  Gene Name: protein phosphatase 1, regulatory (inhibitor) subunit 11
  ENSP ID: ENSP00000365964

SEQ ID NO: 68464 - protein, 126 aa, Homo sapiens; identical to SEQ ID NO: 68462
  Payload ID: 13633
  Gene Symbol: PPP1R11
  Gene Name: protein phosphatase 1, regulatory (inhibitor) subunit 11
  Uniprot ID: O60927
  ENSP ID: ENSP00000373107

SEQ ID NO: 68465 - protein, 74 aa, Homo sapiens; identical to SEQ ID NO: 68458
  Payload ID: 13633
  Gene Symbol: PPP1R11
  Gene Name: protein phosphatase 1, regulatory (inhibitor) subunit 11
  ENSP ID: ENSP00000383495

SEQ ID NO: 68466 - protein, 74 aa, Homo sapiens; identical to SEQ ID NO: 68458
  Payload ID: 13633
  Gene Symbol: PPP1R11
  Gene Name: protein phosphatase 1, regulatory (inhibitor) subunit 11
  ENSP ID: ENSP00000383496

SEQ ID NO: 68467 - protein, 74 aa, Homo sapiens; identical to SEQ ID NO: 68458
  Payload ID: 13633
  Gene Symbol: PPP1R11
  Gene Name: protein phosphatase 1, regulatory (inhibitor) subunit 11
  ENSP ID: ENSP00000383497

SEQ ID NO: 68468 - protein, 74 aa, Homo sapiens; identical to SEQ ID NO: 68458
  Payload ID: 13633
  Gene Symbol: PPP1R11
  Gene Name: protein phosphatase 1, regulatory (inhibitor) subunit 11
  ENSP ID: ENSP00000383498

SEQ ID NO: 68469 - protein, 74 aa, Homo sapiens; identical to SEQ ID NO: 68458
  Payload ID: 13633
  Gene Symbol: PPP1R11
  Gene Name: protein phosphatase 1, regulatory (inhibitor) subunit 11
  ENSP ID: ENSP00000383499

SEQ ID NO: 68470 - protein, 74 aa, Homo sapiens; identical to SEQ ID NO: 68458
  Payload ID: 13633
  Gene Symbol: PPP1R11
  Gene Name: protein phosphatase 1, regulatory (inhibitor) subunit 11
  ENSP ID: ENSP00000388044

SEQ ID NO: 68471 - protein, 74 aa, Homo sapiens; identical to SEQ ID NO: 68458
  Payload ID: 13633
  Gene Symbol: PPP1R11
  Gene Name: protein phosphatase 1, regulatory (inhibitor) subunit 11
  ENSP ID: ENSP00000390548

SEQ ID NO: 68472 - protein, 74 aa, Homo sapiens; identical to SEQ ID NO: 68458
  Payload ID: 13633
  Gene Symbol: PPP1R11
  Gene Name: protein phosphatase 1, regulatory (inhibitor) subunit 11
  ENSP ID: ENSP00000390917

SEQ ID NO: 68473 - protein, 74 aa, Homo sapiens; identical to SEQ ID NO: 68458
  Payload ID: 13633
  Gene Symbol: PPP1R11
  Gene Name: protein phosphatase 1, regulatory (inhibitor) subunit 11
  ENSP ID: ENSP00000391581

SEQ ID NO: 68474 - protein, 74 aa, Homo sapiens; identical to SEQ ID NO: 68458
  Payload ID: 13633
  Gene Symbol: PPP1R11
  Gene Name: protein phosphatase 1, regulatory (inhibitor) subunit 11
  ENSP ID: ENSP00000392044

SEQ ID NO: 68475 - protein, 74 aa, Homo sapiens; identical to SEQ ID NO: 68458
  Payload ID: 13633
  Gene Symbol: PPP1R11
  Gene Name: protein phosphatase 1, regulatory (inhibitor) subunit 11
  ENSP ID: ENSP00000392260

SEQ ID NO: 68476 - protein, 126 aa, Homo sapiens; identical to SEQ ID NO: 68462
  Payload ID: 13633
  Gene Symbol: PPP1R11
  Gene Name: protein phosphatase 1, regulatory (inhibitor) subunit 11
  Uniprot ID: O60927
  ENSP ID: ENSP00000394056

SEQ ID NO: 68477 - protein, 74 aa, Homo sapiens; identical to SEQ ID NO: 68458
  Payload ID: 13633
  Gene Symbol: PPP1R11
  Gene Name: protein phosphatase 1, regulatory (inhibitor) subunit 11
  ENSP ID: ENSP00000396522

SEQ ID NO: 68478 - protein, 74 aa, Homo sapiens; identical to SEQ ID NO: 68458
  Payload ID: 13633
  Gene Symbol: PPP1R11
  Gene Name: protein phosphatase 1, regulatory (inhibitor) subunit 11
  ENSP ID: ENSP00000397132

SEQ ID NO: 68479 - protein, 74 aa, Homo sapiens; identical to SEQ ID NO: 68458
  Payload ID: 13633
  Gene Symbol: PPP1R11
  Gene Name: protein phosphatase 1, regulatory (inhibitor) subunit 11
  ENSP ID: ENSP00000398205

SEQ ID NO: 68480 - protein, 74 aa, Homo sapiens; identical to SEQ ID NO: 68458
  Payload ID: 13633
  Gene Symbol: PPP1R11
  Gene Name: protein phosphatase 1, regulatory (inhibitor) subunit 11
  ENSP ID: ENSP00000399167

SEQ ID NO: 68481 - protein, 74 aa, Homo sapiens; identical to SEQ ID NO: 68458
  Payload ID: 13633
  Gene Symbol: PPP1R11
  Gene Name: protein phosphatase 1, regulatory (inhibitor) subunit 11
  ENSP ID: ENSP00000399222

SEQ ID NO: 68482 - protein, 74 aa, Homo sapiens; identical to SEQ ID NO: 68458
  Payload ID: 13633
  Gene Symbol: PPP1R11
  Gene Name: protein phosphatase 1, regulatory (inhibitor) subunit 11
  ENSP ID: ENSP00000399723

SEQ ID NO: 68483 - protein, 74 aa, Homo sapiens; identical to SEQ ID NO: 68458
  Payload ID: 13633
  Gene Symbol: PPP1R11
  Gene Name: protein phosphatase 1, regulatory (inhibitor) subunit 11
  ENSP ID: ENSP00000399965

SEQ ID NO: 68484 - protein, 74 aa, Homo sapiens; identical to SEQ ID NO: 68458
  Payload ID: 13633
  Gene Symbol: PPP1R11
  Gene Name: protein phosphatase 1, regulatory (inhibitor) subunit 11
  ENSP ID: ENSP00000400589

SEQ ID NO: 68485 - protein, 74 aa, Homo sapiens; identical to SEQ ID NO: 68458
  Payload ID: 13633
  Gene Symbol: PPP1R11
  Gene Name: protein phosphatase 1, regulatory (inhibitor) subunit 11
  ENSP ID: ENSP00000400763

SEQ ID NO: 68486 - protein, 74 aa, Homo sapiens; identical to SEQ ID NO: 68458
  Payload ID: 13633
  Gene Symbol: PPP1R11
  Gene Name: protein phosphatase 1, regulatory (inhibitor) subunit 11
  ENSP ID: ENSP00000401267

SEQ ID NO: 68487 - protein, 126 aa, Homo sapiens; identical to SEQ ID NO: 68462
  Payload ID: 13633
  Gene Symbol: PPP1R11
  Gene Name: protein phosphatase 1, regulatory (inhibitor) subunit 11
  Uniprot ID: O60927
  ENSP ID: ENSP00000403557

SEQ ID NO: 68488 - protein, 74 aa, Homo sapiens; identical to SEQ ID NO: 68458
  Payload ID: 13633
  Gene Symbol: PPP1R11
  Gene Name: protein phosphatase 1, regulatory (inhibitor) subunit 11
  ENSP ID: ENSP00000403611

SEQ ID NO: 68489 - protein, 74 aa, Homo sapiens; identical to SEQ ID NO: 68458
  Payload ID: 13633
  Gene Symbol: PPP1R11
  Gene Name: protein phosphatase 1, regulatory (inhibitor) subunit 11
  ENSP ID: ENSP00000404779

SEQ ID NO: 68490 - protein, 74 aa, Homo sapiens; identical to SEQ ID NO: 68458
  Payload ID: 13633
  Gene Symbol: PPP1R11
  Gene Name: protein phosphatase 1, regulatory (inhibitor) subunit 11
  ENSP ID: ENSP00000404824

SEQ ID NO: 68491 - protein, 74 aa, Homo sapiens; identical to SEQ ID NO: 68458
  Payload ID: 13633
  Gene Symbol: PPP1R11
  Gene Name: protein phosphatase 1, regulatory (inhibitor) subunit 11
  ENSP ID: ENSP00000406410

SEQ ID NO: 68492 - protein, 74 aa, Homo sapiens; identical to SEQ ID NO: 68458
  Payload ID: 13633
  Gene Symbol: PPP1R11
  Gene Name: protein phosphatase 1, regulatory (inhibitor) subunit 11
  ENSP ID: ENSP00000406648

SEQ ID NO: 68493 - protein, 126 aa, Homo sapiens; identical to SEQ ID NO: 68462
  Payload ID: 13633
  Gene Symbol: PPP1R11
  Gene Name: protein phosphatase 1, regulatory (inhibitor) subunit 11
  Uniprot ID: O60927
  ENSP ID: ENSP00000407981

SEQ ID NO: 68494 - protein, 74 aa, Homo sapiens; identical to SEQ ID NO: 68458
  Payload ID: 13633
  Gene Symbol: PPP1R11
  Gene Name: protein phosphatase 1, regulatory (inhibitor) subunit 11
  ENSP ID: ENSP00000408173

SEQ ID NO: 68495 - protein, 74 aa, Homo sapiens; identical to SEQ ID NO: 68458
  Payload ID: 13633
  Gene Symbol: PPP1R11
  Gene Name: protein phosphatase 1, regulatory (inhibitor) subunit 11
  ENSP ID: ENSP00000409066

SEQ ID NO: 68496 - protein, 74 aa, Homo sapiens; identical to SEQ ID NO: 68458
  Payload ID: 13633
  Gene Symbol: PPP1R11
  Gene Name: protein phosphatase 1, regulatory (inhibitor) subunit 11
  ENSP ID: ENSP00000410429

SEQ ID NO: 68497 - protein, 126 aa, Homo sapiens; identical to SEQ ID NO: 68462
  Payload ID: 13633
  Gene Symbol: PPP1R11
  Gene Name: protein phosphatase 1, regulatory (inhibitor) subunit 11
  Uniprot ID: O60927
  ENSP ID: ENSP00000411038

SEQ ID NO: 68498 - protein, 74 aa, Homo sapiens; identical to SEQ ID NO: 68458
  Payload ID: 13633
  Gene Symbol: PPP1R11
  Gene Name: protein phosphatase 1, regulatory (inhibitor) subunit 11
  ENSP ID: ENSP00000411693

SEQ ID NO: 68499 - protein, 74 aa, Homo sapiens; identical to SEQ ID NO: 68458
  Payload ID: 13633
  Gene Symbol: PPP1R11
  Gene Name: protein phosphatase 1, regulatory (inhibitor) subunit 11
  ENSP ID: ENSP00000411976

SEQ ID NO: 68500 - protein, 126 aa, Homo sapiens; identical to SEQ ID NO: 68462
  Payload ID: 13633
  Gene Symbol: PPP1R11
  Gene Name: protein phosphatase 1, regulatory (inhibitor) subunit 11
  Uniprot ID: O60927
  ENSP ID: ENSP00000412297

SEQ ID NO: 68501 - protein, 74 aa, Homo sapiens; identical to SEQ ID NO: 68458
  Payload ID: 13633
  Gene Symbol: PPP1R11
  Gene Name: protein phosphatase 1, regulatory (inhibitor) subunit 11
  ENSP ID: ENSP00000412526

SEQ ID NO: 68502 - protein, 74 aa, Homo sapiens; identical to SEQ ID NO: 68458
  Payload ID: 13633
  Gene Symbol: PPP1R11
  Gene Name: protein phosphatase 1, regulatory (inhibitor) subunit 11
  ENSP ID: ENSP00000414471

SEQ ID NO: 68503 - protein, 126 aa, Homo sapiens; identical to SEQ ID NO: 68462
  Payload ID: 13633
  Gene Symbol: PPP1R11
  Gene Name: protein phosphatase 1, regulatory (inhibitor) subunit 11
  Uniprot ID: O60927
  ENSP ID: ENSP00000414808

SEQ ID NO: 68504 - protein, 74 aa, Homo sapiens; identical to SEQ ID NO: 68458
  Payload ID: 13633
  Gene Symbol: PPP1R11
  Gene Name: protein phosphatase 1, regulatory (inhibitor) subunit 11
  ENSP ID: ENSP00000415651

SEQ ID NO: 68505 - protein, 74 aa, Homo sapiens; identical to SEQ ID NO: 68458
  Payload ID: 13633
  Gene Symbol: PPP1R11
  Gene Name: protein phosphatase 1, regulatory (inhibitor) subunit 11
  ENSP ID: ENSP00000416038

SEQ ID NO: 68506 - protein, 147 aa, Homo sapiens
  Payload ID: 13634
  Gene Symbol: PPP1R14A
  Gene Name: protein phosphatase 1, regulatory (inhibitor) subunit 14A
  Uniprot ID: Q96A00
  ENSP ID: ENSP00000301242
MAAQRLGKRVLSKLQSPSRARGPGGSPGGLQKRHARVTVKYDRRELQRRLDVEKWIDGRLEELYRGMEADMPDEINIDELLELESEEERSRKIQGLLKSCGKPVEDFIQELLAKLQGLHRQPGLRQPSPSHDGSLSPLQDRARTAHP

SEQ ID NO: 68507 - protein, 120 aa, Homo sapiens
  Payload ID: 13634
  Gene Symbol: PPP1R14A
  Gene Name: protein phosphatase 1, regulatory (inhibitor) subunit 14A
  Uniprot ID: Q96A00
  ENSP ID: ENSP00000301243
MAAQRLGKRVLSKLQSPSRARGPGGSPGGLQKRHARVTVKYDRRELQRRLDVEKWIDGRLEELYRGMGLLKSCGKPVEDFIQELLAKLQGLHRQPGLRQPSPSHDGSLSPLQDRARTAHP

SEQ ID NO: 68508 - protein, 121 aa, Homo sapiens
  Payload ID: 13634
  Gene Symbol: PPP1R14A
  Gene Name: protein phosphatase 1, regulatory (inhibitor) subunit 14A
  ENSP ID: ENSP00000465104
MAAQRLGKRVLSKLQSPSRARGPGGSPGGLQKRHARVTVKYDRRELQRRLDVEKWIDGRLEELYRGMEADMPDEINIDELLELESEEERSRKIQGLLKSCGKPVEVSFLSLILSLFWPQVL

SEQ ID NO: 68509 - protein, 77 aa, Homo sapiens
  Payload ID: 13634
  Gene Symbol: PPP1R14A
  Gene Name: protein phosphatase 1, regulatory (inhibitor) subunit 14A
  ENSP ID: ENSP00000465811
MPDEINIDELLELESEEERSRKIQGLLKSCGKPVEDFIQELLAKLQGLHRQPGLRQPSPSHDGSLSPLQDRARTAHP

SEQ ID NO: 68510 - protein, 123 aa, Homo sapiens
  Payload ID: 13634
  Gene Symbol: PPP1R14A
  Gene Name: protein phosphatase 1, regulatory (inhibitor) subunit 14A
  ENSP ID: ENSP00000466572
MAAQRLGKRVLSKLQSPSRARGPGGSPGGLQKRHARVTVKYDRRELQRRLDVEKWIDGRLEELYRGMEADMPDEINIDELLELESEEERSRKIQPPPGPGPDCSPLTLLHSPCPPDAAQLACV

SEQ ID NO: 68511 - protein, 147 aa, Homo sapiens
  Payload ID: 13635
  Gene Symbol: PPP1R14B
  Gene Name: protein phosphatase 1, regulatory (inhibitor) subunit 14B
  Uniprot ID: Q96C90
  ENSP ID: ENSP00000310117
MADSGTAGGAALAAPAPGPGSGGPGPRVYFQSPPGAAGEGPGGADDEGPVRRQGKVTVKYDRKELRKRLNLEEWILEQLTRLYDCQEEEIPELEIDVDELLDMESDDARAARVKELLVDCYKPTEAFISGLLDKIRGMQKLSTPQKK

SEQ ID NO: 68512 - protein, 72 aa, Homo sapiens
  Payload ID: 13635
  Gene Symbol: PPP1R14B
  Gene Name: protein phosphatase 1, regulatory (inhibitor) subunit 14B
  ENSP ID: ENSP00000439333
MSLPPPPPPPQEEEIPELEIDVDELLDMESDDARAARVKELLVDCYKPTEAFISGLLDKIRGMQKLSTPQKK

SEQ ID NO: 68513 - protein, 45 aa, Homo sapiens
  Payload ID: 13635
  Gene Symbol: PPP1R14B
  Gene Name: protein phosphatase 1, regulatory (inhibitor) subunit 14B
  ENSP ID: ENSP00000441067
MESDDARAARVKELLVDCYKPTEAFISGLLDKIRGMQKLSTPQKK

SEQ ID NO: 68514 - protein, 165 aa, Homo sapiens
  Payload ID: 13636
  Gene Symbol: PPP1R14C
  Gene Name: protein phosphatase 1, regulatory (inhibitor) subunit 14C
  Uniprot ID: Q8TAE6
  ENSP ID: ENSP00000355260
MSVATGSSETAGGASGGGARVFFQSPRGGAGGSPGSSSGSGSSREDSAPVATAAAAGQVQQQQQRRHQQGKVTVKYDRKELRKRLVLEEWIVEQLGQLYGCEEEEMPEVEIDIDDLLDADSDEERASKLQEALVDCYKPTEEFIKELLSRIRGMRKLSPPQKKSV

SEQ ID NO: 68515 - protein, 145 aa, Homo sapiens
  Payload ID: 13637
  Gene Symbol: PPP1R14D
  Gene Name: protein phosphatase 1, regulatory (inhibitor) subunit 14D
  Uniprot ID: Q9NXH3
  ENSP ID: ENSP00000299174
MLSSSPASCTSPSPDGENPCKKVHWASGRRRTSSTDSESKSHPDSSKIPRSRRPSRLTVKYDRGQLQRWLEMEQWVDAQVQELFQDQATPSEPEIDLEALMDLSTEEQKTQLEAILGNCPRPTEAFISELLSQLKKLRRLSRPQK

SEQ ID NO: 68516 - protein, 200 aa, Homo sapiens
  Payload ID: 13637
  Gene Symbol: PPP1R14D
  Gene Name: protein phosphatase 1, regulatory (inhibitor) subunit 14D
  ENSP ID: ENSP00000398342
MLSSSPASCTSPSPDGENPCKKVHWASGRRRTSSTDSESKSHPDSSKIPRSRRPSRLTVKYDRGQLQRWLEMEQWVDAQVQELFQSLALSPRLECSGVIHSLQLLPPGFNRFSCLSSWSSWDYGIKQPLLSLRLTWKLSWIYPQRSRRLSWRPFLGTAPAPQRLLSLSCSVNSRNSGDSAGLRNKPERPSLAASALPGLP

SEQ ID NO: 68517 - protein, 171 aa, Homo sapiens
  Payload ID: 13638
  Gene Symbol: PPP1R1A
  Gene Name: protein phosphatase 1, regulatory (inhibitor) subunit 1A
  Uniprot ID: Q13522
  ENSP ID: ENSP00000257905
MEQDNSPRKIQFTVPLLEPHLDPEAAEQIRRRRPTPATLVLTSDQSSPEIDEDRIPNPHLKSTLAMSPRQRKKMTRITPTMKELQMMVEHHLGQQQQGEEPEGAAESTGTQESRPPGIPDTEVESRLGTSGTAKKTAECIPKTHERGSKEPSTKEPSTHIPPLDSKGANSV

SEQ ID NO: 68518 - protein, 64 aa, Homo sapiens
  Payload ID: 13638
  Gene Symbol: PPP1R1A
  Gene Name: protein phosphatase 1, regulatory (inhibitor) subunit 1A
  ENSP ID: ENSP00000448559
MEQDNSPRKIQFTVPLLEPHLDPEAAEQIRRRRPTPATLVLTSDQSSPEIDEDRIPNPHLKSSR

SEQ ID NO: 68519 - protein, 90 aa, Homo sapiens
  Payload ID: 13638
  Gene Symbol: PPP1R1A
  Gene Name: protein phosphatase 1, regulatory (inhibitor) subunit 1A
  ENSP ID: ENSP00000450178
  MOD_RES (1)..(1): Any amino acid
XRRRPTPATLVLTSDQSSPEIDEDRIPNPHLKSTLAMSPRQRKKMTRITPTMKETAECIPKTHERGSKEPSTKEPSTHIPPLDSKGANSV

SEQ ID NO: 68520 - protein, 153 aa, Homo sapiens
  Payload ID: 13638
  Gene Symbol: PPP1R1A
  Gene Name: protein phosphatase 1, regulatory (inhibitor) subunit 1A
  ENSP ID: ENSP00000473304
MEQDNSPRKIQFTVPLLEPHLDPEAAEQIRRRRPTPATLVLTSDQSSPEIDEDRIPNPHLKKLQNASLKLTREAVRNPAQKNPQPIYHHWIPREPTRSERGGGTGGQKSVGGFPCSTHTLAPFYVFTRSILLLKRGERMSHPLEPRDDPTKMP

SEQ ID NO: 68521 - protein, 204 aa, Homo sapiens
  Payload ID: 13639
  Gene Symbol: PPP1R1B
  Gene Name: protein phosphatase 1, regulatory (inhibitor) subunit 1B
  Uniprot ID: Q9UD71
  ENSP ID: ENSP00000254079
MDPKDRKKIQFSVPAPPSQLDPRQVEMIRRRRPTPAMLFRLSEHSSPEEEASPHQRASGEGHHLKSKRPNPCAYTPPSLKAVQRIAESHLQSISNLNENQASEEEDELGELRELGYPREEDEEEEEDDEEEEEEEDSQAEVLKVIRQSAGQKTTCGQGLEGPWERPPPLDESERDGGSEDQVEDPALSEPGEEPQRPSPSEPGT

SEQ ID NO: 68522 - protein, 168 aa, Homo sapiens
  Payload ID: 13639
  Gene Symbol: PPP1R1B
  Gene Name: protein phosphatase 1, regulatory (inhibitor) subunit 1B
  Uniprot ID: Q9UD71
  ENSP ID: ENSP00000377808
MLFRLSEHSSPEEEASPHQRASGEGHHLKSKRPNPCAYTPPSLKAVQRIAESHLQSISNLNENQASEEEDELGELRELGYPREEDEEEEEDDEEEEEEEDSQAEVLKVIRQSAGQKTTCGQGLEGPWERPPPLDESERDGGSEDQVEDPALSEPGEEPQRPSPSEPGT

SEQ ID NO: 68523 - protein, 168 aa, Homo sapiens; identical to SEQ ID NO: 68522
  Payload ID: 13639
  Gene Symbol: PPP1R1B
  Gene Name: protein phosphatase 1, regulatory (inhibitor) subunit 1B
  Uniprot ID: Q9UD71
  ENSP ID: ENSP00000377810

SEQ ID NO: 68524 - protein, 204 aa, Homo sapiens; identical to SEQ ID NO: 68521
  Payload ID: 13639
  Gene Symbol: PPP1R1B
  Gene Name: protein phosphatase 1, regulatory (inhibitor) subunit 1B
  Uniprot ID: Q9UD71
  ENSP ID: ENSP00000462137

SEQ ID NO: 68525 - protein, 144 aa, Homo sapiens
  Payload ID: 13639
  Gene Symbol: PPP1R1B
  Gene Name: protein phosphatase 1, regulatory (inhibitor) subunit 1B
  ENSP ID: ENSP00000462522
MDPKDRKKIQFSVPAPPSQLDPRQIRRRRPTPAMLFRLSEHSSPEEEASPHQRASGEGHHLKSKRPNPCAYTPPSLKAVQRIAESHLQSISNLNENQASEEEDELGELRELGYPREEDEEEEEDDEEEEEEEDSQAEVLKVIRQ

SEQ ID NO: 68526 - protein, 171 aa, Homo sapiens
  Payload ID: 13639
  Gene Symbol: PPP1R1B
  Gene Name: protein phosphatase 1, regulatory (inhibitor) subunit 1B
  ENSP ID: ENSP00000462841
MDPKDRKKIQFSVPAPPSQLDPRQVEMIRRRRPTPAMLFRLSEHSSPAVQRIAESHLQSISNLNENQASEEEDELGELRELGYPREEDEEEEEDDEEEEEEEDSQAEVLKVIRQSAGQKTTCGQGLEGPWERPPPLDESERDGGSEDQVEDPALSEPGEEPQRPSPSEPGT

SEQ ID NO: 68527 - protein, 116 aa, Homo sapiens
  Payload ID: 13640
  Gene Symbol: PPP1R1C
  Gene Name: protein phosphatase 1, regulatory (inhibitor) subunit 1C
  Uniprot ID: Q8WVI7
  ENSP ID: ENSP00000280295
MEPNSPKKIQFAVPVFQSQIAPEAAEQLGFCRSQIRKRRPTPASLVILNEHNPPEIDDKRGPNTQGELQNASPKQRKQSVYTPPTIKGVKHLKGQNESAFPEEEEGTNEREEQRDH

SEQ ID NO: 68528 - protein, 109 aa, Homo sapiens
  Payload ID: 13640
  Gene Symbol: PPP1R1C
  Gene Name: protein phosphatase 1, regulatory (inhibitor) subunit 1C
  Uniprot ID: Q8WVI7
  ENSP ID: ENSP00000386359
MEPNSPKKIQFAVPVFQSQIAPEAAEQIRKRRPTPASLVILNEHNPPEIDDKRGPNTQGELQNASPKQRKQSVYTPPTIKGVKHLKGQNESAFPEEEEGTNEREEQRDH

SEQ ID NO: 68529 - protein, 109 aa, Homo sapiens; identical to SEQ ID NO: 68528
  Payload ID: 13640
  Gene Symbol: PPP1R1C
  Gene Name: protein phosphatase 1, regulatory (inhibitor) subunit 1C
  Uniprot ID: Q8WVI7
  ENSP ID: ENSP00000386778

SEQ ID NO: 68530 - protein, 170 aa, Homo sapiens
  Payload ID: 13641
  Gene Symbol: PPP1R2
  Gene Name: protein phosphatase 1, regulatory (inhibitor) subunit 2
  ENSP ID: ENSP00000400238
MAASTASHRPIKGILKNKTSTTSSMVASAEQPRGNVDEELSKKSQKWDEMNILATYHPADKDYGLMKIDEPSTPYHRLAAAEGLEPKYRIQEQESSGEEDSDLSPEEREKKRQFEMKRKLHYNEGLNIKLARQLISKDLHDDDEDEEMLETADGESMNTEESNQGSTPSD

SEQ ID NO: 68531 - protein, 80 aa, Homo sapiens
  Payload ID: 13641
  Gene Symbol: PPP1R2
  Gene Name: protein phosphatase 1, regulatory (inhibitor) subunit 2
  ENSP ID: ENSP00000406725
MAASTASHRPIKGILKNKTSTTSSMVASAEQPRGNVDEELSKKSQKWDEMNILATYHPADKDYGLMKIDEPSTPYHRYIL

SEQ ID NO: 68532 - protein, 54 aa, Homo sapiens
  Payload ID: 13641
  Gene Symbol: PPP1R2
  Gene Name: protein phosphatase 1, regulatory (inhibitor) subunit 2
  ENSP ID: ENSP00000415175
TYHPADKDYGLMKIDEPSTPYHSMMGDDEDACSDTEATEAMAPDILARKKKATI

SEQ ID NO: 68533 - protein, 205 aa, Homo sapiens
  Payload ID: 13641
  Gene Symbol: PPP1R2
  Gene Name: protein phosphatase 1, regulatory (inhibitor) subunit 2
  Uniprot ID: P41236
  ENSP ID: ENSP00000484580
MAASTASHRPIKGILKNKTSTTSSMVASAEQPRGNVDEELSKKSQKWDEMNILATYHPADKDYGLMKIDEPSTPYHSMMGDDEDACSDTEATEAMAPDILARKLAAAEGLEPKYRIQEQESSGEEDSDLSPEEREKKRQFEMKRKLHYNEGLNIKLARQLISKDLHDDDEDEEMLETADGESMNTEESNQGSTPSDQQQNKLRSS

SEQ ID NO: 68534 - protein, 80 aa, Homo sapiens; identical to SEQ ID NO: 68531
  Payload ID: 13641
  Gene Symbol: PPP1R2
  Gene Name: protein phosphatase 1, regulatory (inhibitor) subunit 2
  ENSP ID: ENSP00000486328

SEQ ID NO: 68535 - protein, 940 aa, Homo sapiens
  Payload ID: 13642
  Gene Symbol: PPP1R10
  Gene Name: protein phosphatase 1, regulatory subunit 10
  Uniprot ID: Q96QC0
  ENSP ID: ENSP00000365694
MGSGPIDPKELLKGLDSFLNRDGEVKSVDGISKIFSLMKEARKMVSRCTYLNILLQTRSPEILVKFIDVGGYKLLNNWLTYSKTTNNIPLLQQILLTLQHLPLTVDHLKQNNTAKLVKQLSKSSEDEELRKLASVLVSDWMAVIRSQSSTQPAEKDKKKRKDEGKSRTTLPERPLTEVKAETRAEEAPEKKREKPKSLRTTAPSHAKFRSTGLELETPSLVPVKKNASTVVVSDKYNLKPIPLKRQSNVAAPGDATPPAEKKYKPLNTTPNATKEIKVKIIPPQPMEGLGFLDALNSAPVPGIKIKKKKKVLSPTAAKPSPFEGKTSTEPSTAKPSSPEPAPPSEAMDADRPGTPVPPVEVPELMDTASLEPGALDAKPVESPGDPNQLTRKGRKRKSVTWPEEGKLREYFYFELDETERVNVNKIKDFGEAAKREILSDRHAFETARRLSHDNMEEKVPWVCPRPLVLPSPLVTPGSNSQERYIQAEREKGILQELFLNKESPHEPDPEPYEPIPPKLIPLDEECSMDETPYVETLEPGGSGGSPDGAGGSKLPPVLANLMGSMGAGKGPQGPGGGGINVQEILTSIMGSPNSHPSEELLKQPDYSDKIKQMLVPHGLLGPGPIANGFPPGGPGGPKGMQHFPPGPGGPMPGPHGGPGGPVGPRLLGPPPPPRGGDPFWDGPGDPMRGGPMRGGPGPGPGPYHRGRGGRGGNEPPPPPPPFRGARGGRSGGGPPNGRGGPGGGMVGGGGHRPHEGPGGGMGNSSGHRPHEGPGGGMGSGHRPHEGPGGSMGGGGGHRPHEGPGGGISGGSGHRPHEGPGGGMGAGGGHRPHEGPGGSMGGSGGHRPHEGPGHGGPHGHRPHDVPGHRGHDHRGPPPHEHRGHDGPGHGGGGHRGHDGGHSHGGDMSNRPVCRHFMMKGNCRYENNCAFYHPGVNGPPLP

SEQ ID NO: 68536 - protein, 940 aa, Homo sapiens; identical to SEQ ID NO: 68535
  Payload ID: 13642
  Gene Symbol: PPP1R10
  Gene Name: protein phosphatase 1, regulatory subunit 10
  Uniprot ID: Q96QC0
  ENSP ID: ENSP00000373080

SEQ ID NO: 68537 - protein, 940 aa, Homo sapiens; identical to SEQ ID NO: 68535
  Payload ID: 13642
  Gene Symbol: PPP1R10
  Gene Name: protein phosphatase 1, regulatory subunit 10
  Uniprot ID: Q96QC0
  ENSP ID: ENSP00000389299

SEQ ID NO: 68538 - protein, 940 aa, Homo sapiens; identical to SEQ ID NO: 68535
  Payload ID: 13642
  Gene Symbol: PPP1R10
  Gene Name: protein phosphatase 1, regulatory subunit 10
  Uniprot ID: Q96QC0
  ENSP ID: ENSP00000407181

SEQ ID NO: 68539 - protein, 940 aa, Homo sapiens; identical to SEQ ID NO: 68535
  Payload ID: 13642
  Gene Symbol: PPP1R10
  Gene Name: protein phosphatase 1, regulatory subunit 10
  Uniprot ID: Q96QC0
  ENSP ID: ENSP00000407310

SEQ ID NO: 68540 - protein, 940 aa, Homo sapiens; identical to SEQ ID NO: 68535
  Payload ID: 13642
  Gene Symbol: PPP1R10
  Gene Name: protein phosphatase 1, regulatory subunit 10
  Uniprot ID: Q96QC0
  ENSP ID: ENSP00000413554

SEQ ID NO: 68541 - protein, 940 aa, Homo sapiens; identical to SEQ ID NO: 68535
  Payload ID: 13642
  Gene Symbol: PPP1R10
  Gene Name: protein phosphatase 1, regulatory subunit 10
  Uniprot ID: Q96QC0
  ENSP ID: ENSP00000416060

SEQ ID NO: 68542 - protein, 1030 aa, Homo sapiens
  Payload ID: 13643
  Gene Symbol: PPP1R12A
  Gene Name: protein phosphatase 1, regulatory subunit 12A
  Uniprot ID: O14974
  ENSP ID: ENSP00000261207
MKMADAKQKRNEQLKRWIGSETDLEPPVVKRQKTKVKFDDGAVFLAACSSGDTDEVLKLLHRGADINYANVDGLTALHQACIDDNVDMVKFLVENGANINQPDNEGWIPLHAAASCGYLDIAEFLIGQGAHVGAVNSEGDTPLDIAEEEAMEELLQNEVNRQGVDIEAARKEEERIMLRDARQWLNSGHINDVRHAKSGGTALHVAAAKGYTEVLKLLIQAGYDVNIKDYDGWTPLHAAAHWGKEEACRILVDNLCDMEMVNKVGQTAFDVADEDILGYLEELQKKQNLLHSEKRDKKSPLIESTANMDNNQSQKTFKNKETLIIEPEKNASRIESLEQEKVDEEEEGKKDESSCSSEEDEEDDSESEAETDKTKPLASVTNANTSSTQAAPVAVTTPTVSSGQATPTSPIKKFPTTATKISPKEEERKDESPATWRLGLRKTGSYGALAEITASKEGQKEKDTAGVTRSASSPRLSSSLDNKEKEKDSKGTRLAYVAPTIPRRLASTSDIEEKENRDSSSLRTSSSYTRRKWEDDLKKNSSVNEGSTYHKSCSFGRRQDDLISSSVPSTTSTPTVTSAAGLQKSLLSSTSTTTKITTGSSSAGTQSSTSNRLWAEDSTEKEKDSVPTAVTIPVAPTVVNAAASTTTLTTTTAGTVSSTTEVRERRRSYLTPVRDEESESQRKARSRQARQSRRSTQGVTLTDLQEAEKTIGRSRSTRTREQENEEKEKEEKEKQDKEKQEEKKESETSREDEYKQKYSRTYDETYQRYRPVSTSSSTTPSSSLSTMSSSLYASSQLNRPNSLVGITSAYSRGITKENEREGEKREEEKEGEDKSQPKSIRERRRPREKRRSTGVSFWTQDSDENEQEQQSDTEEGSNKKETQTDSISRYETSSTSAGDRYDSLLGRSGSYSYLEERKPYSSRLEKDDSTDFKKLYEQILAENEKLKAQLHDTNMELTDLKLQLEKATQRQERFADRSLLEMEKRERRALERRISEMEEELKMLPDLKADNQRLKDENGALIRVISKLSK

SEQ ID NO: 68543 - protein, 1030 aa, Homo sapiens; identical to SEQ ID NO: 68542
  Payload ID: 13643
  Gene Symbol: PPP1R12A
  Gene Name: protein phosphatase 1, regulatory subunit 12A
  Uniprot ID: O14974
  ENSP ID: ENSP00000389168

SEQ ID NO: 68544 - protein, 995 aa, Homo sapiens
  Payload ID: 13643
  Gene Symbol: PPP1R12A
  Gene Name: protein phosphatase 1, regulatory subunit 12A
  Uniprot ID: O14974
  ENSP ID: ENSP00000416769
MKMADAKQKRNEQLKRWIGSETDLEPPVVKRQKTKVKFDDGAVFLAACSSGDTDEVLKLLHRGADINYANVDGLTALHQACIDDNVDMVKFLVENGANINQPDNEGWIPLHAAASCGYLDIAEFLIGQGAHVGAVNSEGDTPLDIAEEEAMEELLQNEVNRQGVDIEAARKEEERIMLRDARQWLNSGHINDVRHAKSGGTALHVAAAKGYTEVLKLLIQAGYDVNIKDYDGWTPLHAAAHWGKEEACRILVDNLCDMEMVNKVGQTAFDVADEDILGYLEELQKKQNLLHSEKRDKKSPLIESTANMDNNQSQKTFKNKETLIIEPEKNASRIESLEQEKVDEEEEGKKDESSCSSEEDEEDDSESEAETDKTKPLASVTNANTSSTQAAPVAVTTPTVSSGQATPTSPIKKFPTTATKISPKEEERKDESPATWRLGLRKTGSYGALAEITASKEGQKEKDTAGVTRSASSPRLSSSLDNKEKEKDSKGTRLAYVAPTIPRRLASTSDIEEKENRDSSSLRTSSSYTRRKWEDDLKKNSSVNEGSTYHKSCSFGRRQDDLISSSVPSTTSTPTVTSAAGLQKSLLSSTSTTTKITTGSSSAGTQSSTSNRLWAEDSTEKEKDSVPTAVTIPVAPTVVNAAASTTTLTTTTAGTVSSTTEVRERRRSYLTPVRDEESESQRKARSRQARQSRRSTQGVTLTDLQEAEKTIGRSRSTRTREQENEEKEKEEKEKQDKEKQEEKKESETSREDEYKQKYSRTYDETYQRYRPVSTSSSTTPSSSLSTMSSSLYASSQLNRPNSLVGITSAYSRGITKENEREGEKREEEKEGEDKSQPKSIRERRRPREKRRSTGVSFWTQDSDENEQEQQSDTEEGSNKKETQTDSISRYETSSTSAGDRYDSLLGRSGSYSYLEERKPYSSRLEKDDSTDFKKRQERFADRSLLEMEKRERRALERRISEMEEELKMLPDLKADNQRLKDENGALIRVISKLSK

SEQ ID NO: 68545 - protein, 692 aa, Homo sapiens
  Payload ID: 13643
  Gene Symbol: PPP1R12A
  Gene Name: protein phosphatase 1, regulatory subunit 12A
  ENSP ID: ENSP00000446816
MKMADAKQKRNEQLKRWIGSETDLEPPVVKRQKTKVKFDDGAVFLAACSSGDTDEVLKLLHRGADINYANVDGLTALHQACIDDNVDMVKFLVENGANINQPDNEGWIPLHAAASCGYLDIAEFLIGQGAHVGAVNSEGDTPLDIAEEEAMEELLQNEVNRQGVDIEAARKEEERIMLRDARQWLNSGHINDVRHAKSGGTALHVAAAKGYTEVLKLLIQAGYDVNIKDYDGWTPLHAAAHWGKEEACRILVDNLCDMEMVNKVGQTAFDVADEDILGYLEELQKKQNLLHSEKRDKKSPLIESTANMDNNQSQKTFKNKETLIIEPEKNASRIESLEQEKVDEEEEGKKDESSCSSEEDEEDDSESEAETDKTKPLASVTNANTSSTQAAPVAVTTPTVSSGQATPTSPIKKFPTTATKISPKEEERKDESPATWRLGLRKTGSYGALAEITASKEGQKEKDTAGVTRSASSPRLSSSLDNKEKEKDSKGTRLAYVAPTIPRRLASTSDIEEKENRDSSSLRTSSSYTRRKWEDDLKKNSSVNEGSTYHKSCSFGRRQDDLISSSVPSTTSTPTVTSAAGLQKSLLSSTSTTTKITTGSSSAGTQSRSYLTPVRDEESESQRKARSRQARQSRRSTQGVTLTDLQEAEKTIGRSRSTRTREQENEEKEKEEKEKQDKEKQEEKKESETSRE

SEQ ID NO: 68546 - protein, 974 aa, Homo sapiens
  Payload ID: 13643
  Gene Symbol: PPP1R12A
  Gene Name: protein phosphatase 1, regulatory subunit 12A
  Uniprot ID: O14974
  ENSP ID: ENSP00000446855
MKMADAKQKRNEQLKRWIGSETDLEPPVVKRQKTKVKFDDGAVFLAACSSGDTDEVLKLLHRGADINYANVDGLTALHQACIDDNVDMVKFLVENGANINQPDNEGWIPLHAAASCGYLDIAEFLIGQGAHVGAVNSEGDTPLDIAEEEAMEELLQNEVNRQGVDIEAARKEEERIMLRDARQWLNSGHINDVRHAKSGGTALHVAAAKGYTEVLKLLIQAGYDVNIKDYDGWTPLHAAAHWGKEEACRILVDNLCDMEMVNKVGQTAFDVADEDILGYLEELQKKQNLLHSEKRDKKSPLIESTANMDNNQSQKTFKNKETLIIEPEKNASRIESLEQEKVDEEEEGKKDESSCSSEEDEEDDSESEAETDKTKPLASVTNANTSSTQAAPVAVTTPTVSSGQATPTSPIKKFPTTATKISPKEEERKDESPATWRLGLRKTGSYGALAEITASKEGQKEKDTAGVTRSASSPRLSSSLDNKEKEKDSKGTRLAYVAPTIPRRLASTSDIEEKENRDSSSLRTSSSYTRRKWEDDLKKNSSVNEGSTYHKSTSNRLWAEDSTEKEKDSVPTAVTIPVAPTVVNAAASTTTLTTTTAGTVSSTTEVRERRRSYLTPVRDEESESQRKARSRQARQSRRSTQGVTLTDLQEAEKTIGRSRSTRTREQENEEKEKEEKEKQDKEKQEEKKESETSREDEYKQKYSRTYDETYQRYRPVSTSSSTTPSSSLSTMSSSLYASSQLNRPNSLVGITSAYSRGITKENEREGEKREEEKEGEDKSQPKSIRERRRPREKRRSTGVSFWTQDSDENEQEQQSDTEEGSNKKETQTDSISRYETSSTSAGDRYDSLLGRSGSYSYLEERKPYSSRLEKDDSTDFKKLYEQILAENEKLKAQLHDTNMELTDLKLQLEKATQRQERFADRSLLEMEKRERRALERRISEMEEELKMLPDLKADNQRLKDENGALIRVISKLSK

SEQ ID NO: 68547 - protein, 367 aa, Homo sapiens
  Payload ID: 13643
  Gene Symbol: PPP1R12A
  Gene Name: protein phosphatase 1, regulatory subunit 12A
  ENSP ID: ENSP00000447144
  MOD_RES (1)..(1): Any amino acid
XPTVSSGQATPTSPIKKFPTTATKISPKEEERKDESPATWRLGLRKTGSYGALAEITASKEGQKEKDTAGVTRSASSPRLSSSLDNKEKEKDSKGTRLAYVAPTIPRRLASTSDIEEKENRDSSSLRTSSSYTRRKWEDDLKKNSSVNEGSTYHKSSSVPSTTSTPTVTSAAGLQKSLLSSTSTTTKITTGSSSAGTQSSTSNRLWAEDSTEKEKDSVPTAVTIPVAPTVVNAAASTTTLTTTTAGTVSSTTEVRERRRSYLTPVRDEESESQRKARSRQARQSRRSTQGVTLTDLQEAEKTIGRSRSTRTREQENEEKEKEEKEKQDKEKQEEKKESETSREDEYKQKYSRTYDETYQRYRPVSTS

SEQ ID NO: 68548 - protein, 210 aa, Homo sapiens
  Payload ID: 13643
  Gene Symbol: PPP1R12A
  Gene Name: protein phosphatase 1, regulatory subunit 12A
  ENSP ID: ENSP00000447338
GLTALHQACIDDNVDMVKFLVENGANINQPDNEGWIPLHAAASCGYLDIAEFLIGQGAHVGAVNSEGDTPLDIAEEEAMEELLQNEVNRQGVDIEAARKEEERIMLRDARQWLNSGHINDVRHAKSGGTALHVAAAKGYTEVLKLLIQAGYDVNIKDYDGWTPLHAAAHWGKEEACRILVDNLCDMEMVNKVLHSEKRDKKSPLIESTAN

SEQ ID NO: 68549 - protein, 943 aa, Homo sapiens
  Payload ID: 13643
  Gene Symbol: PPP1R12A
  Gene Name: protein phosphatase 1, regulatory subunit 12A
  Uniprot ID: O14974
  ENSP ID: ENSP00000449514
MVKFLVENGANINQPDNEGWIPLHAAASCGYLDIAEFLIGQGAHVGAVNSEGDTPLDIAEEEAMEELLQNEVNRQGVDIEAARKEEERIMLRDARQWLNSGHINDVRHAKSGGTALHVAAAKGYTEVLKLLIQAGYDVNIKDYDGWTPLHAAAHWGKEEACRILVDNLCDMEMVNKVGQTAFDVADEDILGYLEELQKKQNLLHSEKRDKKSPLIESTANMDNNQSQKTFKNKETLIIEPEKNASRIESLEQEKVDEEEEGKKDESSCSSEEDEEDDSESEAETDKTKPLASVTNANTSSTQAAPVAVTTPTVSSGQATPTSPIKKFPTTATKISPKEEERKDESPATWRLGLRKTGSYGALAEITASKEGQKEKDTAGVTRSASSPRLSSSLDNKEKEKDSKGTRLAYVAPTIPRRLASTSDIEEKENRDSSSLRTSSSYTRRKWEDDLKKNSSVNEGSTYHKSCSFGRRQDDLISSSVPSTTSTPTVTSAAGLQKSLLSSTSTTTKITTGSSSAGTQSSTSNRLWAEDSTEKEKDSVPTAVTIPVAPTVVNAAASTTTLTTTTAGTVSSTTEVRERRRSYLTPVRDEESESQRKARSRQARQSRRSTQGVTLTDLQEAEKTIGRSRSTRTREQENEEKEKEEKEKQDKEKQEEKKESETSREDEYKQKYSRTYDETYQRYRPVSTSSSTTPSSSLSTMSSSLYASSQLNRPNSLVGITSAYSRGITKENEREGEKREEEKEGEDKSQPKSIRERRRPREKRRSTGVSFWTQDSDENEQEQQSDTEEGSNKKETQTDSISRYETSSTSAGDRYDSLLGRSGSYSYLEERKPYSSRLEKDDSTDFKKLYEQILAENEKLKAQLHDTNMELTDLKLQLEKATQRQERFADRSLLEMEKRERRALERRISEMEEELKMLPDLKADNQRLKDENGALIRVISKLSK

SEQ ID NO: 68550 - protein, 161 aa, Homo sapiens
  Payload ID: 13643
  Gene Symbol: PPP1R12A
  Gene Name: protein phosphatase 1, regulatory subunit 12A
  ENSP ID: ENSP00000449647
ESETSREDEYKQKYSRTYDETYQRYRPVSTSSSTTPSSSLSTMSSSLYASSQLNRPNSLVGITSAYSRGITKENEREGEKREEEKEGEDKSQPKSIRERRRPREKRRSTGVSFWTQDSDENEQEQQSDTEEGSNKKETQTDSISSPVRPVINFCLLMILLN

SEQ ID NO: 68551 - protein, 188 aa, Homo sapiens
  Payload ID: 13643
  Gene Symbol: PPP1R12A
  Gene Name: protein phosphatase 1, regulatory subunit 12A
  ENSP ID: ENSP00000449666
  MOD_RES (1)..(1): Any amino acid
XEREGEKREEEKEGEDKSQPKSIRERRRPREKRRSTGVSFWTQDSDENEQEQQSDTEEGSNKKETQTDSISRYETSSTSAGDRYDSLLGRSGSYSYLEERKPYSSRLEKDDSTDFKKLYEQILAENEKLKAQLHDTNMELTDLKLQLEKATQRQERFADRSLLEMEKRVTGKSQYLLGGTKSSRKKNI

SEQ ID NO: 68552 - protein, 97 aa, Homo sapiens
  Payload ID: 13643
  Gene Symbol: PPP1R12A
  Gene Name: protein phosphatase 1, regulatory subunit 12A
  ENSP ID: ENSP00000449843
MEELLQNEVNRQGVDIEAARKEEERIMLRDARQWLNSGHINDVRHAKSGGTALHVAAAKGYTEVLKLLIQAGYDVNIKDYDGWTPLHAAAHWGKEEA

SEQ ID NO: 68553 - protein, 234 aa, Homo sapiens
  Payload ID: 13643
  Gene Symbol: PPP1R12A
  Gene Name: protein phosphatase 1, regulatory subunit 12A
  ENSP ID: ENSP00000450059
  MOD_RES (1)..(1): Any amino acid
XEDEYKQKYSRTYDETYQRYRPVSTSSSTTPSSSLSTMSSSLYASSQLNRPNSLVGITSAYSRGITKENEREGEKREEEKEGEDKSQPKSIRERRRPREKRRSTGVSFWTQDSDENEQEQQSDTEEGSNKKETQTDSISRYETSSTSAGDRYDSLLGRSGSYSYLEERKPYSSRLEKDDSTDFKKLYEQILAENEKLKAQLHDTNMELTDLKLQLEKATQSSPVQDTTETRKIC

SEQ ID NO: 68554 - protein, 299 aa, Homo sapiens
  Payload ID: 13643
  Gene Symbol: PPP1R12A
  Gene Name: protein phosphatase 1, regulatory subunit 12A
  ENSP ID: ENSP00000450061
ANMDNNQSQKTFKNKETLIIEPEKNASRIESLEQEKVDEEEEGKKDESSCSSEEDEEDDSESEAETDKTKPLASVTNANTSSTQAAPVAVTTPTVSSGQATPTSPIKKFPTTATKISPKEEERKDESPATWRLGLRKTGSYGALAEITASKEGQKEKDTAGVTRSASSPRLSSSLDNKEKEKDSKGTRLAYVAPTIPRRLASTSDIEEKENRDSSSLRTSSSYTRRKWEDDLKKNSSVNEGSTYHKRSYLTPVRDEESESQRKARSRQARQSRRSTQGVTLTDLQEAEKTIGRSRSTRT

SEQ ID NO: 68555 - protein, 100 aa, Homo sapiens
  Payload ID: 13643
  Gene Symbol: PPP1R12A
  Gene Name: protein phosphatase 1, regulatory subunit 12A
  ENSP ID: ENSP00000489242
RYDSLLGRSGSYSYLEERKPYSSRLEKDDSTDFKKLYEQILAENEKLKAQLHDTNMELTDLKLQLEKATQRQERFADRSLLEMEKRVTGKRTKSSRKKNI

SEQ ID NO: 68556 - protein, 386 aa, Homo sapiens
  Payload ID: 13644
  Gene Symbol: PPP1R12B
  Gene Name: protein phosphatase 1, regulatory subunit 12B
  Uniprot ID: O60237
  ENSP ID: ENSP00000349206
MAELEHLGGKRAESARMRRAEQLRRWRGSLTEQEPAERRGAGRQPLTRRGSPRVRFEDGAVFLAACSSGDTDEVRKLLARGADINTVNVDGLTALHQACIDENLDMVKFLVENRANVNQQDNEGWTPLHAAASCGYLNIAEYFINHGASVGIVNSEGEVPSDLAEEPAMKDLLLEQVKKQGVDLEQSRKEEEQQMLQDARQWLNSGKIEDVRQARSGATALHVAAAKGYSEVLRLLIQAGYELNVQDYDGWTPLHAAAHWGVKEACSILAEALCDMDIRNKLGQTPFDVADEGLVEHLELLQKKQNVLRSEKETRNKLIESDLNSKIQSGFFKNKEKMLYEEETPKSQEMEEENKESSSSSSEEEEGEDEASESETEKEAVLFWPF

SEQ ID NO: 68557 - protein, 1043 aa, Homo sapiens
  Payload ID: 13644
  Gene Symbol: PPP1R12B
  Gene Name: protein phosphatase 1, regulatory subunit 12B
  ENSP ID: ENSP00000375821
MAELEHLGGKRAESARMRRAEQLRRWRGSLTEQEPAERRGAGRQPLTRRGSPRVRFEDGAVFLAACSSGDTDEVRKLLARGADINTVNVDGLTALHQACIDENLDMVKFLVENRANVNQQDNEGWTPLHAAASCGYLNIAEYFINHGASVGIVNSEGEVPSDLAEEPAMKDLLLEQVKKQGVDLEQSRKEEEQQMLQDARQWLNSGKIEDVRQARSGATALHVAAAKGYSEVLRLLIQAGYELNVQDYDGWTPLHAAAHWGVKEACSILAEALCDMDIRNKLGQTPFDVADEGLVEHLELLQKKQNVLRSEKETRNKLIESDLNSKIQSGFFKNKEKMLYEEETPKSQEMEEENKESSSSSSEEEEGEDEASESETEKEADKKPEAFVNHSNSESKSSITEQIPAPAQNTFSASSARRFSSGLFNKPEEPKDESPSSWRLGLRKTGSHNMLSEVANSREPIRDRGSSIYRSSSSPRISALLDNKDKERENKSYISSLAPRKLNSTSDIEEKENRESAVNLVRSGSYTRQLWRDEAKGNEIPQTIAPSTYVSTYLKSASFGRSSDPTSPYISANRNSSPATSPITIGSSTSRGSQWQPASSCPAPISANTTASVHHGRTPHKSQADTTAEKTADNVSSSTPLCVITNRPLPSTANGVTATPVLSITGTDSSVEAREKRRSYLTPVRDEEAESLRKARSRQARQTRRSTQGVTLTDLQEAERTFSRSRAERQAQEQPREKPTDTEGLEGSPEKHEPSAVPATEAGEGQQPWGRSLDEEPICHRLRCPAQPDKPTTPASPSTSRPSLYTSSHLLWTNRFSVPDSESSETTTNTTTAKEMDKNENEEADLDEQSSKRLSIRERRRPKERRRGTGINFWTKDEDETDGSEEVKETWHERLSRLESGGSNPTTSDSYGDRASARARREAREARLATLTSRVEEDSNRDYKKLYESALTENQKLKTKLQEAQLELADIKSKLEKVAQQKQEKTSDRSSVLEMEKRERRALERKMSEMEEEMKVLTELKSDNQRLKDENGALIRVISKLSK

SEQ ID NO: 68558 - protein, 515 aa, Homo sapiens
  Payload ID: 13644
  Gene Symbol: PPP1R12B
  Gene Name: protein phosphatase 1, regulatory subunit 12B
  Uniprot ID: O60237
  ENSP ID: ENSP00000417159
MAELEHLGGKRAESARMRRAEQLRRWRGSLTEQEPAERRGAGRQPLTRRGSPRVRFEDGAVFLAACSSGDTDEVRKLLARGADINTVNVDGLTALHQACIDENLDMVKFLVENRANVNQQDNEGWTPLHAAASCGYLNIAEYFINHGASVGIVNSEGEVPSDLAEEPAMKDLLLEQVKKQGVDLEQSRKEEEQQMLQDARQWLNSGKIEDVRQARSGATALHVAAAKGYSEVLRLLIQAGYELNVQDYDGWTPLHAAAHWGVKEACSILAEALCDMDIRNKLGQTPFDVADEGLVEHLELLQKKQNVLRSEKETRNKLIESDLNSKIQSGFFKNKEKMLYEEETPKSQEMEEENKESSSSSSEEEEGEDEASESETEKEADKKPEAFVNHSNSESKSSITEQIPAPAQNTFSASSARRFSSGLFNKPEEPKDESPSSWRLGLRKTGSHNMLSEVANSREPIRDRGSSIYRSSSSPRISALLDNKDKVQFGRVWGNSKAVFFFHENSILGTNENIF

SEQ ID NO: 68559 - protein, 142 aa, Homo sapiens
  Payload ID: 13644
  Gene Symbol: PPP1R12B
  Gene Name: protein phosphatase 1, regulatory subunit 12B
  ENSP ID: ENSP00000417814
MAELEHLGGKRAESARMRRAEQLRRWRGSLTEQEPAERRGAGRQPLTRRGSPRVRFEDGAVFLAACSSGDTDEVRKLLARGADINTVNVDGLTALHQACIDENLDMVKFLVENRANVNQQDNEGWTPLHAAASCGYLNIAES

SEQ ID NO: 68560 - protein, 212 aa, Homo sapiens
  Payload ID: 13644
  Gene Symbol: PPP1R12B
  Gene Name: protein phosphatase 1, regulatory subunit 12B
  ENSP ID: ENSP00000417975
  MOD_RES (1)..(1): Any amino acid
XNRANVNQQDNEGWTPLHAAASCGYLNIAELLIQAGYELNVQDYDGWTPLHAAAHWGVKEACSILAEALCDMDIRNKLGQTPFDVADEGLVEHLELLQKKQNVLRSEKETRNKLIESDLNSKIQSGFFKNKEKMLYEEETPKSQEMEEENKESSSSSSEEEEGEDEASESETEKEADKKPEAFVNHSNSESKSSITEQIPAPAQNTFSASSA

SEQ ID NO: 68561 - protein, 982 aa, Homo sapiens
  Payload ID: 13644
  Gene Symbol: PPP1R12B
  Gene Name: protein phosphatase 1, regulatory subunit 12B
  Uniprot ID: O60237
  ENSP ID: ENSP00000476755
MAELEHLGGKRAESARMRRAEQLRRWRGSLTEQEPAERRGAGRQPLTRRGSPRVRFEDGAVFLAACSSGDTDEVRKLLARGADINTVNVDGLTALHQACIDENLDMVKFLVENRANVNQQDNEGWTPLHAAASCGYLNIAEYFINHGASVGIVNSEGEVPSDLAEEPAMKDLLLEQVKKQGVDLEQSRKEEEQQMLQDARQWLNSGKIEDVRQARSGATALHVAAAKGYSEVLRLLIQAGYELNVQDYDGWTPLHAAAHWGVKEACSILAEALCDMDIRNKLGQTPFDVADEGLVEHLELLQKKQNVLRSEKETRNKLIESDLNSKIQSGFFKNKEKMLYEEETPKSQEMEEENKESSSSSSEEEEGEDEASESETEKEADKKPEAFVNHSNSESKSSITEQIPAPAQNTFSASSARRFSSGLFNKPEEPKDESPSSWRLGLRKTGSHNMLSEVANSREPIRDRGSSIYRSSSSPRISALLDNKDKERENKSYISSLAPRKLNSTSDIEEKENRESAVNLVRSGSYTRQLWRDEAKGNEIPQTIAPSTYVSTYLKRTPHKSQADTTAEKTADNVSSSTPLCVITNRPLPSTANGVTATPVLSITGTDSSVEAREKRRSYLTPVRDEEAESLRKARSRQARQTRRSTQGVTLTDLQEAERTFSRSRAERQAQEQPREKPTDTEGLEGSPEKHEPSAVPATEAGEGQQPWGRSLDEEPICHRLRCPAQPDKPTTPASPSTSRPSLYTSSHLLWTNRFSVPDSESSETTTNTTTAKEMDKNENEEADLDEQSSKRLSIRERRRPKERRRGTGINFWTKDEDETDGSEEVKETWHERLSRLESGGSNPTTSDSYGDRASARARREAREARLATLTSRVEEDSNRDYKKLYESALTENQKLKTKLQEAQLELADIKSKLEKVAQQKQEKTSDRSSVLEMEKRERRALERKMSEMEEEMKVLTELKSDNQRLKDENGALIRVISKLSK

SEQ ID NO: 68562 - protein, 208 aa, Homo sapiens
  Payload ID: 13644
  Gene Symbol: PPP1R12B
  Gene Name: protein phosphatase 1, regulatory subunit 12B
  Uniprot ID: O60237
  ENSP ID: ENSP00000480852
MDKNENEEADLDEQSSKRLSIRERRRPKERRRGTGINFWTKDEDETDGSEEVKETWHERLSRLESGGSNPTTSDSYGDRASARARREAREARLATLTSRVEEDSNRDYKKLYESALTENQKLKTKLQEAQLELADIKSKLEKVAQQKQEKTSDRSSVLEMEKRERRALERKMSEMEEEMKVLTELKSDNQRLKDENGALIRVISKLSK

SEQ ID NO: 68563 - protein, 224 aa, Homo sapiens
  Payload ID: 13644
  Gene Symbol: PPP1R12B
  Gene Name: protein phosphatase 1, regulatory subunit 12B
  Uniprot ID: O60237
  ENSP ID: ENSP00000484005
MDKNENEEADLDEQSSKRLSIRERRRPKERRRGTGINFWTKDEDETDGSEEVKETWHERLSRLESGGSNPTTSDSYGDRASARARREAREARLATLTSRVEEDSNRDYKKLYESALTENQKLKTKLQEAQLELADIKSKLEKVAQQKQEKTSDRSSVLEMEKRERRALERKMSEMEEEMKNLHQLKQIQTLKQMNEQLQAENRALTRVVARLSESIESSDTQEL

SEQ ID NO: 68564 - protein, 186 aa, Homo sapiens
  Payload ID: 13644
  Gene Symbol: PPP1R12B
  Gene Name: protein phosphatase 1, regulatory subunit 12B
  ENSP ID: ENSP00000488930
MSSLYTRSKEFTRNRKSQSDSPPASPSPTAKTLRHERLSRLESGGSNPTTSDSYGDRASARARREAREARLATLTSRVEEDSNRDYKKLYESALTENQKLKTKLQEAQLELADIKSKLEKVAQQKQEKTSDRSSVLEMEKRERRALERKMSEMEEEMKVLTELKSDNQRLKDENGALIRVISKLSK

SEQ ID NO: 68565 - protein, 20 aa, Homo sapiens
  Payload ID: 13644
  Gene Symbol: PPP1R12B
  Gene Name: protein phosphatase 1, regulatory subunit 12B
  ENSP ID: ENSP00000489025
PQTIAPSTYVSTYLKRSIKM

SEQ ID NO: 68566 - protein, 8 aa, Homo sapiens
  Payload ID: 13644
  Gene Symbol: PPP1R12B
  Gene Name: protein phosphatase 1, regulatory subunit 12B
  ENSP ID: ENSP00000489098
  MOD_RES (1)..(1): Any amino acid
XWQVTCSN

SEQ ID NO: 68567 - protein, 782 aa, Homo sapiens
  Payload ID: 13645
  Gene Symbol: PPP1R12C
  Gene Name: protein phosphatase 1, regulatory subunit 12C
  Uniprot ID: Q9BZL4
  ENSP ID: ENSP00000263433
MSGEDGPAAGPGAAAAAARERRREQLRQWGARAGAEPGPGERRARTVRFERAAEFLAACAGGDLDEARLMLRAADPGPGAELDPAAPPPARAVLDSTNADGISALHQACIDENLEVVRFLVEQGATVNQADNEGWTPLHVAASCGYLDIARYLLSHGANIAAVNSDGDLPLDLAESDAMEGLLKAEIARRGVDVEAAKRAEEELLLHDTRCWLNGGAMPEARHPRTGASALHVAAAKGYIEVMRLLLQAGYDPELRDGDGWTPLHAAAHWGVEDACRLLAEHGGGMDSLTHAGQRPCDLADEEVLSLLEELARKQEDLRNQKEASQSRGQEPQAPSSSKHRRSSVCRLSSREKISLQDLSKERRPGGAGGPPIQDEDEGEEGPTEPPPAEPRTLNGVSSPPHPSPKSPVQLEEAPFSRRFGLLKTGSSGALGPPERRTAEGAPGAGLQRSASSSWLEGTSTQAKELRLARITPTPSPKLPEPSVLSEVTKPPPCLENSSPPSRIPEPESPAKPNVPTASTAPPADSRDRRRSYQMPVRDEESESQRKARSRLMRQSRRSTQGVTLTDLKEAEKAAGKAPESEKPAQSLDPSRRPRVPGVENSDSPAQRAEAPDGQGPGPQAAREHRKVGKEWRGPAEGEEAEPADRSQESSTLEGGPSARRQRWQRDLNPEPEPESEEPDGGFRTLYAELRRENERLREALTETTLRLAQLKVELERATQRQERFAERPALLELERFERRALERKAAELEEELKALSDLRADNQRLKDENAALIRVISKLSK

SEQ ID NO: 68568 - protein, 707 aa, Homo sapiens
  Payload ID: 13645
  Gene Symbol: PPP1R12C
  Gene Name: protein phosphatase 1, regulatory subunit 12C
  Uniprot ID: Q9BZL4
  ENSP ID: ENSP00000387833
MRNGGPCQPLAAGPRAEGASVNWSVTAWGPGTQACIDENLEVVRFLVEQGATVNQADNEGWTPLHVAASCGYLDIARYLLSHGANIAAVNSDGDLPLDLAESDAMEGLLKAEIARRGVDVEAAKRAEEELLLHDTRCWLNGGAMPEARHPRTGASALHVAAAKGYIEVMRLLLQAGYDPELRDGDGWTPLHAAAHWGVEDACRLLAEHGGGMDSLTHAGQRPCDLADEEVLSLLEELARKQEDLRNQKEASQSRGQEPQAPSSSKHRRSSVCRLSSREKISLQDLSKERRPGGAGGPPIQDEDEGEEGPTEPPPAEPRTLNGVSSPPHPSPKSPVQLEEAPFSRRFGLLKTGSSGALGPPERRTAEGAPGAGLQRSASSSWLEGTSTQAKELRLARITPTPSPKLPEPSVLSEVTKPPPCLENSSPPSRIPEPESPAKPNVPTASTAPPADSRDRRRSYQMPVRDEESESQRKARSRLMRQSRRSTQGVTLTDLKEAEKAAGKAPESEKPAQSLDPSRRPRVPGVENSDSPAQREAPDGQGPGPQAAREHRKVGKEWRGPAEGEEAEPADRSQESSTLEGGPSARRQRWQRDLNPEPEPESEEPDGGFRTLYAELRRENERLREALTETTLRLAQLKVELERATQRQERFAERPALLELERFERRALERKAAELEEELKALSDLRADNQRLKDENAALIRVISKLSK

SEQ ID NO: 68569 - protein, 737 aa, Homo sapiens
  Payload ID: 13645
  Gene Symbol: PPP1R12C
  Gene Name: protein phosphatase 1, regulatory subunit 12C
  ENSP ID: ENSP00000465957
  MOD_RES (1)..(1): Any amino acid
XRTVRFERAAEFLAACAGGDLDEARLMLRAADPGPGAELDPAAPPPARAVLDSTNADGISALHQACIDENLEVVRFLVEQGATVNQADNEGWTPLHVAASCGYLDIARYLLSHGANIAAVNSDGDLPLDLAESDAMEGLLKAEIARRGVDVEAAKRAEEELLLHDTRCWLNGGAMPEARHPRTGASALHVAAAKGYIEVMRLLLQAGYDPELRDGDGWTPLHAAAHWGVEDACRLLAEHGGGMDSLTHAGQRPCDLADEEVLSLLEELARKQEDLRNQKEASQSRGQEPQAPSSSKHRRSSVCRLSSREKISLQDLSKERRPGGAGGPPIQDEDEGEEGPTEPPPAEPRTLNGVSSPPHPSPKSPVLEEAPFSRRFGLLKTGSSGALGPPERRTAEGAPGAGLQRSASSSWLEGTSTQAKELRLARITPTPSPKLPEPSVLSEVTKPPPCLENSSPPSRIPEPESPAKPNVPTASTAPPADSRDRRRSYQMPVRDEESESQRKARSRLMRQSRRSTQGVTLTDLKEAEKAAGKAPESEKPAQSLDPSRRPRVPGVENSDSPAQREAPDGQGPGPQAAREHRKVGKEWRGPAEGEEAEPADRSQESSTLEGGPSARRQRWQRDLNPEPEPESEEPDGGFRTLYAELRRENERLREALTETTLRLAQLKVELERATQRQERFAERPALLELERFERRALERKAAELEEELKALSDLRADNQRLKDENAALIRVISKLSK

SEQ ID NO: 68570 - protein, 234 aa, Homo sapiens
  Payload ID: 13645
  Gene Symbol: PPP1R12C
  Gene Name: protein phosphatase 1, regulatory subunit 12C
  ENSP ID: ENSP00000468148
  MOD_RES (1)..(1): Any amino acid
XEVTKPPPCLENSSPPSRIPEPESPAKPNVPTASTAPPADSRDRRRSYQMPVRDEESESQRKARSRLMRQSRRSTQGVTLTDLKEAEKAAGKAEPADRSQESSTLEGGPSARRQRWQRDLNPEPEPESEEPDGGFRTLYAELRRENERLREALTETTLRLAQLKVELERATQRQERFAERPALLELERFERRALERKAAELEEELKALSDLRADNQRLKDENAALIRVISKLSK

SEQ ID NO: 68571 - protein, 828 aa, Homo sapiens
  Payload ID: 13646
  Gene Symbol: PPP1R13L
  Gene Name: protein phosphatase 1, regulatory subunit 13 like
  Uniprot ID: Q8WUF5
  ENSP ID: ENSP00000354218
MDSEAFQSARDFLDMNFQSLAMKHMDLKQMELDTAAAKVDELTKQLESLWSDSPAPPGPQAGPPSRPPRYSSSSIPEPFGSRGSPRKAATDGADTPFGRSESAPTLHPYSPLSPKGRPSSPRTPLYLQPDAYGSLDRATSPRPRAFDGAGSSLGRAPSPRPGPGPLRQQGPPTPFDFLGRAGSPRGSPLAEGPQAFFPERGPSPRPPATAYDAPASAFGSSLLGSGGSAFAPPLRAQDDLTLRRRPPKAWNESDLDVAYEKKPSQTASYERLDVFARPASPSLQLLPWRESSLDGLGGTGKDNLTSATLPRNYKVSPLASDRRSDAGSYRRSLGSAGPSGTLPRSWQPVSRIPMPPSSPQPRGAPRQRPIPLSMIFKLQNAFWEHGASRAMLPGSPLFTRAPPPKLQPQPQPQPQPQSQPQPQLPPQPQTQPQTPTPAPQHPQQTWPPVNEGPPKPPTELEPEPEIEGLLTPVLEAGDVDEGPVARPLSPTRLQPALPPEAQSVPELEEVARVLAEIPRPLKRRGSMEQAPAVALPPTHKKQYQQIISRLFHRHGGPGPGGPEPELSPITEGSEARAGPPAPAPPAPIPPPAPSQSSPPEQPQSMEMRSVLRKAGSPRKARRARLNPLVLLLDAALTGELEVVQQAVKEMNDPSQPNEEGITALHNAICGANYSIVDFLITAGANVNSPDSHGWTPLHCAASCNDTVICMALVQHGAAIFATTLSDGATAFEKCDPYREGYADCATYLADVEQSMGLMNSGAVYALWDYSAEFGDELSFREGESVTVLRRDGPEETDWWWAALHGQEGYVPRNYFGLFPRVKPQRSKV

SEQ ID NO: 68572 - protein, 828 aa, Homo sapiens; identical to SEQ ID NO: 68571
  Payload ID: 13646
  Gene Symbol: PPP1R13L
  Gene Name: protein phosphatase 1, regulatory subunit 13 like
  Uniprot ID: Q8WUF5
  ENSP ID: ENSP00000403902

SEQ ID NO: 68573 - protein, 90 aa, Homo sapiens
  Payload ID: 13646
  Gene Symbol: PPP1R13L
  Gene Name: protein phosphatase 1, regulatory subunit 13 like
  ENSP ID: ENSP00000466555
ETDWWWAALHGQEGYVPRNYFGIPSKVPPMPTTIITSPSKPATCPAGPGMGHHTTGYSWESLLTPSLPAVLGSGWETLVSTRIPAPPLPN

SEQ ID NO: 68574 - protein, 128 aa, Homo sapiens
  Payload ID: 13646
  Gene Symbol: PPP1R13L
  Gene Name: protein phosphatase 1, regulatory subunit 13 like
  ENSP ID: ENSP00000466730
MDSEAFQSARDFLDMNFQSLAMKHMDLKQMELDTAAAKVDELTKQLESLWSDSPAPPGPQAGPPSRPPRYSSSSIPEPFGSRGSPRKAATDGADTPFGRSESAPTLHPYSPLSPKGRPSSPRTPLYLQ

SEQ ID NO: 68575 - protein, 29 aa, Homo sapiens
  Payload ID: 13646
  Gene Symbol: PPP1R13L
  Gene Name: protein phosphatase 1, regulatory subunit 13 like
  ENSP ID: ENSP00000466939
  MOD_RES (1)..(1): Any amino acid
XEKCDPYREGYADCATYLAAVPQGEASKE

SEQ ID NO: 68576 - protein, 60 aa, Homo sapiens
  Payload ID: 13646
  Gene Symbol: PPP1R13L
  Gene Name: protein phosphatase 1, regulatory subunit 13 like
  ENSP ID: ENSP00000467471
MDSEAFQSARDFLDMNFQSLAMKHMDLKQMELDTAAAKVDELTKQLESLWSDSPAPPGPQ

SEQ ID NO: 68577 - protein, 348 aa, Homo sapiens
  Payload ID: 13646
  Gene Symbol: PPP1R13L
  Gene Name: protein phosphatase 1, regulatory subunit 13 like
  ENSP ID: ENSP00000478646
MEGPVARPLSPTRLQPALPPEAQSVPELEEVARVLAEIPRPLKRRGSMEQAPAVALPPTHKKQYQQIISRLFHRHGGPGPGGRSQSCPPSLRDLRPGQGPLLLPHQLPFHPAPSQSSPPEQPQSMEMRSVLRKAGSPRKARRARLNPLVLLLDAALTGELEVVQQAVKEMNDPSQPNEEGITALHNAICGANYSIVDFLITAGANVNSPDSHGWTPLHCAASCNDTVICMALVQHGAAIFATTLSDGATAFEKCDPYREGYADCATYLADVEQSMGLMNSGAVYALWDYSAEFGDELSFREGESVTVLRRDGPEETDWWWAALHGQEGYVPRNYFGLFPRVKPQRSKV

SEQ ID NO: 68578 - protein, 1090 aa, Homo sapiens
  Payload ID: 13647
  Gene Symbol: PPP1R13B
  Gene Name: protein phosphatase 1, regulatory subunit 13B
  Uniprot ID: Q96KQ4
  ENSP ID: ENSP00000202556
MMPMILTVFLSNNEQILTEVPITPETTCRDVVEFCKEPGEGSCHLAEVWRGNERPIPFDHMMYEHLQKWGPRREEVKFFLRHEDSPTENSEQGGRQTQEQRTQRNVINVPGEKRTENGVGNPRVELTLSELQDMAARQQQQIENQQQMLVAKEQRLHFLKQQERRQQQSISENEKLQKLKERVEAQENKLKKIRAMRGQVDYSKIMNGNLSAEIERFSAMFQEKKQEVQTAILRVDQLSQQLEDLKKGKLNGFQSYNGKLTGPAAVELKRLYQELQIRNQLNQEQNSKLQQQKELLNKRNMEVAMMDKRISELRERLYGKKIQLNRVNGTSSPQSPLSTSGRVAAVGPYIQVPSAGSFPVLGDPIKPQSLSIASNAAHGRSKSANDGNWPTLKQNSSSSVKPVQVAGADWKDPSVEGSVKQGTVSSQPVPFSALGPTEKPGIEIGKVPPPIPGVGKQLPPSYGTYPSPTPLGPGSTSSLERRKEGSLPRPSAGLPSRQRPTLLPATGSTPQPGSSQQIQQRISVPPSPTYPPAGPPAFPAGDSKPELPLTVAIRPFLADKGSRPQSPRKGPQTVNSSSIYSMYLQQATPPKNYQPAAHSALNKSVKAVYGKPVLPSGSTSPSPLPFLHGSLSTGTPQPQPPSESTEKEPEQDGPAAPADGSTVESLPRPLSPTKLTPIVHSPLRYQSDADLEALRRKLANAPRPLKKRSSITEPEGPGGPNIQKLLYQRFNTLAGGMEGTPFYQPSPSQDFMGTLADVDNGNTNANGNLEELPPAQPTAPLPAEPAPSSDANDNELPSPEPEELICPQTTHQTAEPAEDNNNNVATVPTTEQIPSPVAEAPSPGEEQVPPAPLPPASHPPATSTNKRTNLKKPNSERTGHGLRVRFNPLALLLDASLEGEFDLVQRIIYEVEDPSKPNDEGITPLHNAVCAGHHHIVKFLLDFGVNVNAADSDGWTPLHCAASCNSVHLCKQLVESGAAIFASTISDIETAADKCEEMEEGYIQCSQFLYGVQEKLGVMNKGVAYALWDYEAQNSDELSFHEGDALTILRRKDESETEWWWARLGDREGYVPKNLLGLYPRIKPRQRTLA

SEQ ID NO: 68579 - protein, 143 aa, Homo sapiens
  Payload ID: 13647
  Gene Symbol: PPP1R13B
  Gene Name: protein phosphatase 1, regulatory subunit 13B
  ENSP ID: ENSP00000450734
MMPMILTVFLSNNEQILTEVPITPETTCRDVVEFCKEPGEGSCHLAEVWRGNGFREPSHKTYCTWPGTVAHSCNLNTLGGRERPIPFDHMMYEHLQKWGPRREEVKFFLRHEDSPTENSEQGGRQTQEQRTQRNVINVPGEKR

SEQ ID NO: 68580 - protein, 122 aa, Homo sapiens
  Payload ID: 13647
  Gene Symbol: PPP1R13B
  Gene Name: protein phosphatase 1, regulatory subunit 13B
  ENSP ID: ENSP00000451396
MLMILTVFLSNNEQILTEVPITPETTCRDVVEFCKEPGEGSCHLAEVWRGNERPIPFDHMMYEHLQKWGPRREEVKFFLRHEDSPTENSEQGGRQTQEQRTQRNVINVPGEKRTENGDSYLG

SEQ ID NO: 68581 - protein, 106 aa, Homo sapiens
  Payload ID: 13647
  Gene Symbol: PPP1R13B
  Gene Name: protein phosphatase 1, regulatory subunit 13B
  ENSP ID: ENSP00000451433
  MOD_RES (1)..(1): Any amino acid
XKQLVESGAAIFASTISDIETAADKCEEMEEGYIQCSQFLYGKLQLENGLNGAHFSRQRPQCESYSFQEPLYGNMSSVAAQCVCLPVPTLLGRLGGSASCSSSPKG

SEQ ID NO: 68582 - protein, 635 aa, Homo sapiens
  Payload ID: 13647
  Gene Symbol: PPP1R13B
  Gene Name: protein phosphatase 1, regulatory subunit 13B
  ENSP ID: ENSP00000451739
  MOD_RES (1)..(1): Any amino acid
XVGPYIQVPSAGSFPVLGDPIKPQSLSIASNAAHGRSKSANDGNWPTLKQNSSSSVKPVQVAGADWKDPSVEGSVKQGTVSSQPVPFSALGPTEKPGIEIGKVPPPIPGVGKQLPPSYGTYPSPTPLGPGSTSSLERRKEGSLPRPSAGLPSRQRPTLLPATGSTPQPGSSQQIQQRISVPPSPTYPPAGPPAFPAGDSKPELPLTVAIRPFLADKGSRPQSPRKGPQTVNSSSIYSMYLQQATPPKNYQPAAHSALNKSVKAVYGKPVLPSGSTSPSPLPFLHGSLSTGTPQPQPPSESTEKEPEQDGPAAPADGSTVESLPRPLSPTKLTPIVHSPLRYQSDADLEALRRKLANAPRPLKKRSSITEPEGPGGPNIQKLLYQRFNTLAGGMEGTPFYQPSPSQDFMGTLADVDNGNTNANGNLEELPPAQPTAPLPAEPAPSSDANDNELPSPEPEELICPQTTHQTAEPAEDNNNNVATVPTTEQIPSPVAEAPSPGEEQVPPAPLPPASHPPATSTNKRTNLKKPNSERTGHGLRVRFNPLALLLDASLEGEFDLVQRIIYEVEDPSKPNDEGITPLHNAVCAGHHHIVKFLLDFGVNVNAADSDGWGAGKAGCDEQRCGVCSVGLRGPEQ

SEQ ID NO: 68583 - protein, 149 aa, Homo sapiens
  Payload ID: 13647
  Gene Symbol: PPP1R13B
  Gene Name: protein phosphatase 1, regulatory subunit 13B
  ENSP ID: ENSP00000452376
MILTVFLSNNEQILTEVPITPETTCRDVVEFCKEPGEGSCHLAEVWRGNERPIPFDHMMYEHLQKWGPRREEVKFFLRHEDSPTENSEQGGRQTQEQRTQRNVINVPGEKRTENGVGNPRVELTLSELQDMAARQQQQIENQQQMLVAK

SEQ ID NO: 68584 - protein, 674 aa, Homo sapiens
  Payload ID: 13648
  Gene Symbol: PPP1R15A
  Gene Name: protein phosphatase 1, regulatory subunit 15A
  Uniprot ID: O75807
  ENSP ID: ENSP00000200453
MAPGQAPHQATPWRDAHPFFLLSPVMGLLSRAWSRLRGLGPLEPWLVEAVKGAALVEAGLEGEARTPLAIPHTPWGRRPEEEAEDSGGPGEDRETLGLKTSSSLPEAWGLLDDDDGMYGEREATSVPRGQGSQFADGQRAPLSPSLLIRTLQGSDKNPGEEKAEEEGVAEEEGVNKFSYPPSHRECCPAVEEEDDEEAVKKEAHRTSTSALSPGSKPSTWVSCPGEEENQATEDKRTERSKGARKTSVSPRSSGSDPRSWEYRSGEASEEKEEKAHKETGKGEAAPGPQSSAPAQRPQLKSWWCQPSDEEEGEVKALGAAEKDGEAECPPCIPPPSAFLKAWVYWPGEDTEEEEDEEEDEDSDSGSDEEEGEAEASSSTPATGVFLKSWVYQPGEDTEEEEDEDSDTGSAEDEREAETSASTPPASAFLKAWVYRPGEDTEEEEDEDVDSEDKEDDSEAALGEAESDPHPSHPDQRAHFRGWGYRPGKETEEEEAAEDWGEAEPCPFRVAIYVPGEKPPPPWAPPRLPLRLQRRLKRPETPTHDPDPETPLKARKVRFSEKVTVHFLAVWAGPAQAARQGPWEQLARDRSRFARRITQAQEELSPCLTPAARARAWARLRNPPLAPIPALTQTLPSSSVPSSPVQTTPLSQAVATPSRSSAAAAAALDLSGRRG

SEQ ID NO: 68585 - protein, 258 aa, Homo sapiens
  Payload ID: 13648
  Gene Symbol: PPP1R15A
  Gene Name: protein phosphatase 1, regulatory subunit 15A
  ENSP ID: ENSP00000469239
  MOD_RES (1)..(1): Any amino acid
XDSGSDEEEGEAEASSSTPATGVFLKSWVYQPGEDTEEEEDEDSDTGSAEDEREAETSASTPPASAFLKAWVYRPGEDTEEEEDEDVDSEDKEDDSEAALGEAESDPHPSHPDQRAHFRGWGYRPGKETEEEEAAEDWGEAEPCPFRVAIYVPGEKPPPPWAPPRLPLRLQRRLKRPETPTHDPDPETPLKARKVGAESPDSIFFFFLIELESWAVTQAGVQRHDLGSLPTSAAQVQAILVPQPPEYLGLQAHDTTPS

SEQ ID NO: 68586 - protein, 713 aa, Homo sapiens
  Payload ID: 13649
  Gene Symbol: PPP1R15B
  Gene Name: protein phosphatase 1, regulatory subunit 15B
  Uniprot ID: Q5SWA1
  ENSP ID: ENSP00000356156
MEPGTGGSRKRLGPRAGFRFWPPFFPRRSQAGSSKFPTPLGPENSGNPTLLSSAQPETRVSYWTKLLSQLLAPLPGLLQKVLIWSQLFGGMFPTRWLDFAGVYSALRALKGREKPAAPTAQKSLSSLQLDSSDPSVTSPLDWLEEGIHWQYSPPDLKLELKAKGSALDPAAQAFLLEQQLWGVELLPSSLQSRLYSNRELGSSPSGPLNIQRIDNFSVVSYLLNPSYLDCFPRLEVSYQNSDGNSEVVGFQTLTPESSCLREDHCHPQPLSAELIPASWQGCPPLSTEGLPEIHHLRMKRLEFLQQASKGQDLPTPDQDNGYHSLEEEHSLLRMDPKHCRDNPTQFVPAAGDIPGNTQESTEEKIELLTTEVPLALEEESPSEGCPSSEIPMEKEPGEGRISVVDYSYLEGDLPISARPACSNKLIDYILGGASSDLETSSDPEGEDWDEEAEDDGFDSDSSLSDSDLEQDPEGLHLWNSFCSVDPYNPQNFTATIQTAARIVPEEPSDSEKDLSGKSDLENSSQSGSLPETPEHSSGEEDDWESSADEAESLKLWNSFCNSDDPYNPLNFKAPFQTSGENEKGCRDSKTPSESIVAISECHTLLSCKVQLLGSQESECPDSVQRDVLSGGRHTHVKRKKVTFLEEVTEYYISGDEDRKGPWEEFARDGCRFQKRIQETEDAIGYCLTFEHRERMFNRLQGTCFKGLNVLKQC

SEQ ID NO: 68587 - protein, 528 aa, Homo sapiens
  Payload ID: 13650
  Gene Symbol: PPP1R16A
  Gene Name: protein phosphatase 1, regulatory subunit 16A
  Uniprot ID: Q96I34
  ENSP ID: ENSP00000292539
MAEHLELLAEMPMVGRMSTQERLKHAQKRRAQQVKMWAQAEKEAQGKKGPGERPRKEAASQGLLKQVLFPPSVVLLEAAARNDLEEVRQFLGSGVSPDLANEDGLTALHQCCIDDFREMVQQLLEAGANINACDSECWTPLHAAATCGHLHLVELLIASGANLLAVNTDGNMPYDLCDDEQTLDCLETAMADRGITQDSIEAARAVPELRMLDDIRSRLQAGADLHAPLDHGATLLHVAAANGFSEAAALLLEHRASLSAKDQDGWEPLHAAAYWGQVPLVELLVAHGADLNAKSLMDETPLDVCGDEEVRAKLLELKHKHDALLRAQSRQRSLLRRRTSSAGSRGKVVRRVSLTQRTDLYRKQHAQEAIVWQQPPPTSPEPPEDNDDRQTGAELRPPPPEEDNPEVVRPHNGRVGGSPVRHLYSKRLDRSVSYQLSPLDSTTPHTLVHDKAHHTLADLKRQRAAAKLQRPPPEGPESPETAEPGLPGDTVTPQPDCGFRAGGDPPLLKLTAPAVEAPVERRPCCLLM

SEQ ID NO: 68588 - protein, 528 aa, Homo sapiens; identical to SEQ ID NO: 68587
  Payload ID: 13650
  Gene Symbol: PPP1R16A
  Gene Name: protein phosphatase 1, regulatory subunit 16A
  Uniprot ID: Q96I34
  ENSP ID: ENSP00000391126

SEQ ID NO: 68589 - protein, 65 aa, Homo sapiens
  Payload ID: 13650
  Gene Symbol: PPP1R16A
  Gene Name: protein phosphatase 1, regulatory subunit 16A
  ENSP ID: ENSP00000480604
MAEHLELLAEMPMVGRMSTQERLKHAQKRRAQQVKMWAQAEKEAQGKKGPGERPRKEAASQGLLK

SEQ ID NO: 68590 - protein, 567 aa, Homo sapiens
  Payload ID: 13651
  Gene Symbol: PPP1R16B
  Gene Name: protein phosphatase 1, regulatory subunit 16B
  Uniprot ID: Q96T49
  ENSP ID: ENSP00000299824
MASHVDLLTELQLLEKVPTLERLRAAQKRRAQQLKKWAQYEQDLQHRKRKHERKRSTGGRRKKVSFEASVALLEASLRNDAEEVRYFLKNKVSPDLCNEDGLTALHQCCIDNFEEIVKLLLSHGANVNAKDNELWTPLHAAATCGHINLVKILVQYGADLLAVNSDGNMPYDLCEDEPTLDVIETCMAYQGITQEKINEMRVAPEQQMIADIHCMIAAGQDLDWIDAQGATLLHIAGANGYLRAAELLLDHGVRVDVKDWDGWEPLHAAAFWGQMQMAELLVSHGASLSARTSMDEMPIDLCEEEEFKVLLLELKHKHDVIMKSQLRHKSSLSRRTSSAGSRGKVVRRASLSDRTNLYRKEYEGEAILWQRSAAEDQRTSTYNGDIRETRTDQENKDPNPRLEKPVLLSEFPTKIPRGELDMPVENGLRAPVSAYQYALANGDVWKVHEVPDYSMAYGNPGVADATPPWSSYKEQSPQTLLELKRQRAAAKLLSHPFLSTHLGSSMARTGESSSEGKAPLIGGRTSPYSSNGTSVYYTVTSGDPPLLKFKAPIEEMEEKVHGCCRIS

SEQ ID NO: 68591 - protein, 525 aa, Homo sapiens
  Payload ID: 13651
  Gene Symbol: PPP1R16B
  Gene Name: protein phosphatase 1, regulatory subunit 16B
  Uniprot ID: Q96T49
  ENSP ID: ENSP00000362428
MASHVDLLTELQLLEKVPTLERLRAAQKRRAQQLKKWAQYEQDLQHRKRKHERKRSTGGRRKKVSFEASVALLEASLRNDAEEVRYFLKNKVSPDLCNEDGLTALHQCCIDNFEEIVKLLLSHGANVNAKDNELWTPLHAAATCGHINLVKILVQYGADLLAVNSDGNMPYDLCEDEPTLDVIETCMAYQGITQEKINEMRVAPEQQMIADIHCMIAAGQDLDWIDAQGATLMQMAELLVSHGASLSARTSMDEMPIDLCEEEEFKVLLLELKHKHDVIMKSQLRHKSSLSRRTSSAGSRGKVVRRASLSDRTNLYRKEYEGEAILWQRSAAEDQRTSTYNGDIRETRTDQENKDPNPRLEKPVLLSEFPTKIPRGELDMPVENGLRAPVSAYQYALANGDVWKVHEVPDYSMAYGNPGVADATPPWSSYKEQSPQTLLELKRQRAAAKLLSHPFLSTHLGSSMARTGESSSEGKAPLIGGRTSPYSSNGTSVYYTVTSGDPPLLKFKAPIEEMEEKVHGCCRIS

SEQ ID NO: 68592 - protein, 155 aa, Homo sapiens
  Payload ID: 13652
  Gene Symbol: PPP1R17
  Gene Name: protein phosphatase 1, regulatory subunit 17
  Uniprot ID: O96001
  ENSP ID: ENSP00000340125
MMSTEQMQPLELSEDRLDKLDPRCSHLDDLSDQFIKDCDLKKKPRKGKNVQATLNVESDQKKPRRKDTPALHIPPFIPGVFSEHLIKRYDVQERHPKGKMIPVLHNTDLEQKKPRRKDTPALHMSPFAAGVTLLRDERPKAIVEDDEKDGDKIAI

SEQ ID NO: 68593 - protein, 104 aa, Homo sapiens
  Payload ID: 13652
  Gene Symbol: PPP1R17
  Gene Name: protein phosphatase 1, regulatory subunit 17
  Uniprot ID: O96001
  ENSP ID: ENSP00000386459
MMSTEQMQPLELSEDRLDKLDPRCSHLGVFSEHLIKRYDVQERHPKGKMIPVLHNTDLEQKKPRRKDTPALHMSPFAAGVTLLRDERPKAIVEDDEKDGDKIAI

SEQ ID NO: 68594 - protein, 613 aa, Homo sapiens
  Payload ID: 13653
  Gene Symbol: PPP1R18
  Gene Name: protein phosphatase 1, regulatory subunit 18
  Uniprot ID: Q6NYC8
  ENSP ID: ENSP00000274853
MATIPDWKLQLLARRRQEEASVRGREKAERERLSQMPAWKRGLLERRRAKLGLSPGEPSPVLGTVEAGPPDPDESAVLLEAIGPVHQNRFIRQERQQQQQQQQRSEELLAERKPGPLEARERRPSPGEMRDQSPKGRESREERLSPRETRERRLGIGGAQELSLRPLEARDWRQSPGEVGDRSSRLSEAWKWRLSPGETPERSLRLAESREQSPRRKEVESRLSPGESAYQKLGLTEAHKWRPDSRESQEQSLVQLEATEWRLRSGEERQDYSEECGRKEEWPVPGVAPKETAELSETLTREAQGNSSAGVEAAEQRPVEDGERGMKPTEGWKWTLNSGKAREWTPRDIEAQTQKPEPPESAEKLLESPGVEAGEGEAEKEEAGAQGRPLRALQNCCSVPSPLPPEDAGTGGLRQQEEEAVELQPPPPAPLSPPPPAPTAPQPPGDPLMSRLFYGVKAGPGVGAPRRSGHTFTVNPRRSVPPATPATPTSPATVDAAVPGAGKKRYPTAEEILVLGGYLRLSRSCLAKGSPERHHKQLKISFSETALETTYQYPSESSVLEELGPEPEVPSAPNPPAAQPDDEEDEEELLLLQPELQGGLRTKALIVDESCRR

SEQ ID NO: 68595 - protein, 613 aa, Homo sapiens [sequence omitted]

SEQ ID NO: 68596 - protein, 613 aa, Homo sapiens; identical to SEQ ID NO: 68594
  Payload ID: 13653
  Gene Symbol: PPP1R18
  Gene Name: protein phosphatase 1, regulatory subunit 18
  Uniprot ID: Q6NYC8
  ENSP ID: ENSP00000382150

SEQ ID NO: 68597 - protein, 613 aa, Homo sapiens [sequence omitted]

SEQ ID NO: 68598 - protein, 613 aa, Homo sapiens
  Payload ID: 13653
  Gene Symbol: PPP1R18
  Gene Name: protein phosphatase 1, regulatory subunit 18
  ENSP ID: ENSP00000387526
MATIPDWKLQLLARRRQEEASVRGREKAERERLSQMPAWKRGLLERRRAKLGLSPGEPSPVLGTVEAGPPDPDESAVLLEAIGPVHQNRFIRQERQQQQQQQQRSEELLAERKPGPLEARERRPSPGEMRDQSPKGRESREERLSPRETRERRLGIGGAQELSLRPLEARDWRQSPGEVGDRSSRLSEAWKWRLSPGETPERSLRLAESREQSPRRKEVESRLSPGESAYQKLGLTEAHKWRPDSRESQEQSLVQLEATEWRLRSGEERQDYSEECGRKEEWPVPGVAPKETAELSETLTREAQGNSSAGVEAAEQRPVEDGERGMKPTEGWKWTLNSRKAREWTPRDIEAQTQKPEPPESAEKLLESPGVEAGEGEAEKEEAGAQGRPLRALQNCCSVPSPLPPEDAGTGGLRQQEEEAVELQPPPPAPLSPPPPAPTAPQPPGDPLMSRLFYGVKAGPGVGAPRRSGHTFTVNPRRSVPPATPATPTSPATVDAAVPGAGKKRYPTAEEILVLGGYLRLSRSCLAKGSPERHHKQLKISFSETALETTYQYPSESSVLEELGPEPEVPSAPNPPAAQPDDEEDEEELLLLQPELQGGLRTKALIVDESCRR

SEQ ID NO: 68599 - protein, 613 aa, Homo sapiens; identical to SEQ ID NO: 68594
  Payload ID: 13653
  Gene Symbol: PPP1R18
  Gene Name: protein phosphatase 1, regulatory subunit 18
  Uniprot ID: Q6NYC8
  ENSP ID: ENSP00000388790

SEQ ID NO: 68600 - protein, 613 aa, Homo sapiens; identical to SEQ ID NO: 68598
  Payload ID: 13653
  Gene Symbol: PPP1R18
  Gene Name: protein phosphatase 1, regulatory subunit 18
  ENSP ID: ENSP00000399786

SEQ ID NO: 68601 - protein, 613 aa, Homo sapiens; identical to SEQ ID NO: 68594
  Payload ID: 13653
  Gene Symbol: PPP1R18
  Gene Name: protein phosphatase 1, regulatory subunit 18
  Uniprot ID: Q6NYC8
  ENSP ID: ENSP00000400129

SEQ ID NO: 68602 - protein, 613 aa, Homo sapiens; identical to SEQ ID NO: 68594
  Payload ID: 13653
  Gene Symbol: PPP1R18
  Gene Name: protein phosphatase 1, regulatory subunit 18
  Uniprot ID: Q6NYC8
  ENSP ID: ENSP00000400990

SEQ ID NO: 68603 - protein, 613 aa, Homo sapiens; identical to SEQ ID NO: 68594
  Payload ID: 13653
  Gene Symbol: PPP1R18
  Gene Name: protein phosphatase 1, regulatory subunit 18
  Uniprot ID: Q6NYC8
  ENSP ID: ENSP00000404066

SEQ ID NO: 68604 - protein, 613 aa, Homo sapiens; identical to SEQ ID NO: 68594
  Payload ID: 13653
  Gene Symbol: PPP1R18
  Gene Name: protein phosphatase 1, regulatory subunit 18
  Uniprot ID: Q6NYC8
  ENSP ID: ENSP00000405234

SEQ ID NO: 68605 - protein, 76 aa, Homo sapiens
  Payload ID: 13653
  Gene Symbol: PPP1R18
  Gene Name: protein phosphatase 1, regulatory subunit 18
  ENSP ID: ENSP00000411275
LKISFSETALETTYQYPSESSVLEELGPEPEVPSAPNPPAAQPDDEEDEEELLLLQPELQGGLRTKALIVDESCRR

SEQ ID NO: 68606 - protein, 613 aa, Homo sapiens; identical to SEQ ID NO: 68594
  Payload ID: 13653
  Gene Symbol: PPP1R18
  Gene Name: protein phosphatase 1, regulatory subunit 18
  Uniprot ID: Q6NYC8
  ENSP ID: ENSP00000412456

SEQ ID NO: 68607 - protein, 613 aa, Homo sapiens; identical to SEQ ID NO: 68594
  Payload ID: 13653
  Gene Symbol: PPP1R18
  Gene Name: protein phosphatase 1, regulatory subunit 18
  Uniprot ID: Q6NYC8
  ENSP ID: ENSP00000413596

SEQ ID NO: 68608 - protein, 76 aa, Homo sapiens; identical to SEQ ID NO: 68605
  Payload ID: 13653
  Gene Symbol: PPP1R18
  Gene Name: protein phosphatase 1, regulatory subunit 18
  ENSP ID: ENSP00000416491

SEQ ID NO: 68609 - protein, 613 aa, Homo sapiens; identical to SEQ ID NO: 68594
  Payload ID: 13653
  Gene Symbol: PPP1R18
  Gene Name: protein phosphatase 1, regulatory subunit 18
  Uniprot ID: Q6NYC8
  ENSP ID: ENSP00000416648

SEQ ID NO: 68610 - protein, 613 aa, Homo sapiens; identical to SEQ ID NO: 68594
  Payload ID: 13653
  Gene Symbol: PPP1R18
  Gene Name: protein phosphatase 1, regulatory subunit 18
  Uniprot ID: Q6NYC8
  ENSP ID: ENSP00000480270

SEQ ID NO: 68611 - protein, 165 aa, Homo sapiens
  Payload ID: 13653
  Gene Symbol: PPP1R18
  Gene Name: protein phosphatase 1, regulatory subunit 18
  Uniprot ID: Q6NYC8
  ENSP ID: ENSP00000482578
MSRLFYGVKAGPGVGAPRRSGHTFTVNPRRSVPPATPATPTSPATVDAAVPGAGKKRYPTAEEILVLGGYLRLSRSCLAKGSPERHHKQLKISFSETALETTYQYPSESSVLEELGPEPEVPSAPNPPAAQPDDEEDEEELLLLQPELQGGLRTKALIVDESCRR

SEQ ID NO: 68612 - protein, 769 aa, Homo sapiens
  Payload ID: 13654
  Gene Symbol: PPP1R21
  Gene Name: protein phosphatase 1, regulatory subunit 21
  Uniprot ID: Q6ZMI0
  ENSP ID: ENSP00000281394
MASAELQGKYQKLAQEYSKLRAQNQVLKKGVVDEQANSAALKEQLKMKDQSLRKLQQEMDSLTFRNLQLAKRVELLQDELALSEPRGKKNKKSGESSSQLSQEQKSVFDEDLQKKIEENERLHIQFFEADEQHKHVEAELRSRLATLETEAAQHQAVVDGLTRKYMETIEKLQNDKAKLEVKSQTLEKEAKECRLRTEECQLQLKTLHEDLSGRLEESLSIINEKVPFNDTKYSQYNALNVPLHNRRHQLKMRDIAGQALAFVQDLVTALLNFHTYTEQRIQIFPVDSAIDTISPLNQKFSQYLHENASYVRPLEEGMLHLFESITEDTVTVLETTVKLKTFSEHLTSYICFLRKILPYQLKSLEEECESSLCTSALRARNLELSQDMKKMTAVFEKLQTYIALLALPSTEPDGLLRTNYSSVLTNVGAALHGFHDVMKDISKHYSQKAAIEHELPTATQKLITTNDCILSSVVALTNGAGKIASFFSNNLDYFIASLSYGPKAASGFISPLSAECMLQYKKKAAAYMKSLRKPLLESVPYEEALANRRILLSSTESREGLAQQVQQSLEKISKLEQEKEHWMLEAQLAKIKLEKENQRIADKLKNTGSAQLVGLAQENAAVSNTAGQDEATAKAVLEPIQSTSLVPDVESREDLIKNHYMARIVELTSQLQLADSKSVHFYAECRALSKRLALAEKSKEALTEEMKLASQNISRLQDELTTTKRSYEDQLSMMSDHLCSMNETLSKQREEIDTLKMSSKGNSKKNKSR

SEQ ID NO: 68613 - protein, 780 aa, Homo sapiens
  Payload ID: 13654
  Gene Symbol: PPP1R21
  Gene Name: protein phosphatase 1, regulatory subunit 21
  Uniprot ID: Q6ZMI0
  ENSP ID: ENSP00000294952
MASAELQGKYQKLAQEYSKLRAQNQVLKKGVVDEQANSAALKEQLKMKDQSLRKLQQEMDSLTFRNLQLAKRVELLQDELALSEPRGKKNKKSGESSSQLSQEQKSVFDEDLQKKIEENERLHIQFFEADEQHKHVEAELRSRLATLETEAAQHQAVVDGLTRKYMETIEKLQNDKAKLEVKSQTLEKEAKECRLRTEECQLQLKTLHEDLSGRLEESLSIINEKVPFNDTKYSQYNALNVPLHNRRHQLKMRDIAGQALAFVQDLVTALLNFHTYTEQRIQIFPVDSAIDTISPLNQKFSQYLHENASYVRPLEEGMLHLFESITEDTVTVLETTVKLKTFSEHLTSYICFLRKILPYQLKSLEEECESSLCTSALRARNLELSQDMKKMTAVFEKLQTYIALLALPSTEPDGLLRTNYSSVLTNVGAALHGFHDVMKDISKHYSQKAAIEHELPTATQKLITTNDCILSSVVALTNGAGKIASFFSNNLDYFIASLSYGPKAASGFISPLSAECMLQYKKKAAAYMKSLRKPLLESVPYEEALANRRILLSSTESREGLAQQVQQSLEKISKLEQEKEHWMLEAQLAKIKLEKENQRIADKLKNTGSAQLVGLAQENAAVSNTAGQDEATAKAVLEPIQSTSLIGTLTRTSDSEVPDVESREDLIKNHYMARIVELTSQLQLADSKSVHFYAECRALSKRLALAEKSKEALTEEMKLASQNISRLQDELTTTKRSYEDQLSMMSDHLCSMNETLSKQREEIDTLKMSSKGNSKKNKSR

SEQ ID NO: 68614 - protein, 116 aa, Homo sapiens
  Payload ID: 13654
  Gene Symbol: PPP1R21
  Gene Name: protein phosphatase 1, regulatory subunit 21
  ENSP ID: ENSP00000403001
  MOD_RES (1)..(1): Any amino acid
XHLTSYICFLRKILPYQLKSLEEECESSLCTSALRARNLELSQDMKKMTAVFEKLQTYIALLALPILQRASRSTELLTLTWQKQNSVIFGYRARWTPSDKLQFCVNKCWCCSAWIS

SEQ ID NO: 68615 - protein, 53 aa, Homo sapiens
  Payload ID: 13654
  Gene Symbol: PPP1R21
  Gene Name: protein phosphatase 1, regulatory subunit 21
  ENSP ID: ENSP00000406283
MKDQSLRKLQQEMDSLTFRNLQLAKRVELLQDELALSEPRGKKNKDCLRMVNT

SEQ ID NO: 68616 - protein, 40 aa, Homo sapiens
  Payload ID: 13654
  Gene Symbol: PPP1R21
  Gene Name: protein phosphatase 1, regulatory subunit 21
  ENSP ID: ENSP00000410955
MKDQSLRKLQQEMDSLTFRNLQLAKRVELLQDELALSEPR

SEQ ID NO: 68617 - protein, 54 aa, Homo sapiens
  Payload ID: 13654
  Gene Symbol: PPP1R21
  Gene Name: protein phosphatase 1, regulatory subunit 21
  ENSP ID: ENSP00000414130
MASAELQGKYQKLAQEYSKLRAQNQVLKKGVVDEQANSAALKLNCEDQSVFTLI

SEQ ID NO: 68618 - protein, 738 aa, Homo sapiens
  Payload ID: 13654
  Gene Symbol: PPP1R21
  Gene Name: protein phosphatase 1, regulatory subunit 21
  Uniprot ID: Q6ZMI0
  ENSP ID: ENSP00000415696
MASAELQGKYQKLAQEYSKLRAQNQVLKKGVVDEQANSAALKEQLKMKDQSLRKLQQEMDSLTFRNLQLAKRVELLQDELALSEPRGKKNKKSGESSSQLSQEQKSVFDEDLQKKIEENERLHIQFFEADEQHKHVEAELRSRLATLETEAAQHQAVVDGLTRKYMETIEKLQNDKAKLEVKSQTLEKEAKECRLRTEECQLQLKTLHEDLSGRLEESLSIINEKVPFNDTKYSQYNALNVPLHNRRHQLKMRDIAGQALAFVQDLVTALLNFHTYTEQRIQIFPVDSAIDTISPLNQKFSQYLHENASYVRPLEEGMLHLFESITEDTVTVLETTVKLKTFSEHLTSYICFLRKILPYQLKSLEEECESSLCTSALRARNLELSQDMKKMTAVFEKLQTYIALLALPSTEPDGLLRTNYSSVLTNVGAALHGFHDVMKDISKHYSQKAAIEHELPTATQKLITTNDCILSSVVALTNGAGKIASFFSNNLDYFIASLSYGPKAASGFISPLSAECMLQYKKKAAAYMKSLRKVQQSLEKISKLEQEKEHWMLEAQLAKIKLEKENQRIADKLKNTGSAQLVGLAQENAAVSNTAGQDEATAKAVLEPIQSTSLVPDVESREDLIKNHYMARIVELTSQLQLADSKSVHFYAECRALSKRLALAEKSKEALTEEMKLASQNISRLQDELTTTKRSYEDQLSMMSDHLCSMNETLSKQREEIDTLKMSSKGNSKKNKSR

SEQ ID NO: 68619 - protein, 1209 aa, Homo sapiens
  Payload ID: 13655
  Gene Symbol: PPP1R26
  Gene Name: protein phosphatase 1, regulatory subunit 26
  Uniprot ID: Q5T8A7
  ENSP ID: ENSP00000349274
MFLMNASPVVALQSKWEAFGPPGSCRFPRCFSEADEGVESASVSARVQMLISTLQRDGAARGTSDERAAQRGHRAEGCHDARPAAKPTVHKEPPALAVCGLVADFDPMGEEETTDFGPLVLDSDSDDSVDRDIEEAIQEYLKAKSGAAQPGAGGAQPGAAQPSRAAGGGSRCKPEPAHGSAPTALCPPKLVPGSGGGPGSQVGSSKDQGSASPVSVSSDDSFEQSIRAEIEQFLNEKRQHETQKCDGSVEKKPDTNENSAKSLLKSHQEPPTKVVHRQGLLGVQKEFAFRKPPRLAKMNVQPRSLRSKVTTTQENEGSTKPATPCRPSEAAQNKGGIKRSASAARRGKRVMSAAQASEASDSSSDDGIEEAIQLYQLQKTRKEADGDLPQRVQLREERAPDPPAHSTSSATKSALPETHRKTPSKKKLVATKTMDPGPGGLDTDHAPKLLKETKAPPPASPASRSEFVERSSCRADTSAELMCAEAILDISKTILPAPVEGSDGSLSASPLFYSPNVPSRSDGDSSSVDSDDSIEQEIRTFLALKAQSGSLLARGESCPQAAQGPLLPPGLNSQTGGHKTPLSKTPDPLLGCKRKRRGGGHVRPSTPKKMQEVVKDGSQDADHSQGRAEPGHERRDLPIQGKASEALGGEGTARGPGDTRMSQGQGKTDEARRLDEKESSEDKSSSLDSDEDLDTAIKDLLRSKRKLKKRCREPRAACRKKVRFSTAQTHFLEQLGGLRRDWKDRGPPVLKSCLSKSKRDSGEGPGKKPPSVFGSTAERMRQEGAASQDAALAFRVRRPASASASEGNPFPRESQGPAPSPGSLSDDSSSVDSNDSIELEIRKFLAEKAKESVSSSEVQAEGPTALGTGGPARPEVLCRKEPAPPPGVCTRSQRARGVPHLAEGLRGTESAGAQGTAGLFSQGGKGLPAAPARGDPVPPRSTSGGVSAKGLSVSRRNVYVHKDQSPRGAEPAAKSAFGQLPSCATAGTEAGGARGTFHMGCGSPSFLTPSPGAERDAGAQADRTPPWSDFAHQSRLPSPWVLRSEGRDAVWRGGVGSERDKGSEGPARGLPSLPLAGFSPLLSTQLFHFGKGVSWGGRQAGLFSPHLGLPLQGPSFSAFREAQAGPSPVFGSPHLLAKKDGGPWPTRKAQAGLSLHDRRSSGSEESILDLRYRRRVNRDDQEQDALGSDASDFSDTSTEDSGGSSVVKV

SEQ ID NO: 68620 - protein, 1209 aa, Homo sapiens; identical to SEQ ID NO: 68619
  Payload ID: 13655
  Gene Symbol: PPP1R26
  Gene Name: protein phosphatase 1, regulatory subunit 26
  Uniprot ID: Q5T8A7
  ENSP ID: ENSP00000385826

SEQ ID NO: 68621 - protein, 1209 aa, Homo sapiens; identical to SEQ ID NO: 68619
  Payload ID: 13655
  Gene Symbol: PPP1R26
  Gene Name: protein phosphatase 1, regulatory subunit 26
  Uniprot ID: Q5T8A7
  ENSP ID: ENSP00000473820

SEQ ID NO: 68622 - protein, 1209 aa, Homo sapiens; identical to SEQ ID NO: 68619
  Payload ID: 13655
  Gene Symbol: PPP1R26
  Gene Name: protein phosphatase 1, regulatory subunit 26
  Uniprot ID: Q5T8A7
  ENSP ID: ENSP00000474794

SEQ ID NO: 68623 - protein, 1209 aa, Homo sapiens; identical to SEQ ID NO: 68619
  Payload ID: 13655
  Gene Symbol: PPP1R26
  Gene Name: protein phosphatase 1, regulatory subunit 26
  Uniprot ID: Q5T8A7
  ENSP ID: ENSP00000474807

SEQ ID NO: 68624 - protein, 154 aa, Homo sapiens
  Payload ID: 13656
  Gene Symbol: PPP1R27
  Gene Name: protein phosphatase 1, regulatory subunit 27
  Uniprot ID: Q86WC6
  ENSP ID: ENSP00000331065
MPSRTARYARYSPRQRRRRMLADRSVRFPNDVLFLDHIRQGDLEQVGRFIRTRKVSLATIHPSGLAALHEAVLSGNLECVKLLVKYGADIHQRDEAGWTPLHIACSDGYPDIARYLISLGADRDATNDDGDLPSDLIDPDYKELVELFKGTTMD

SEQ ID NO: 68625 - protein, 114 aa, Homo sapiens
  Payload ID: 13656
  Gene Symbol: PPP1R27
  Gene Name: protein phosphatase 1, regulatory subunit 27
  ENSP ID: ENSP00000459421
MPSRTARYARYSPRQRRRRMLADRSVRFPNDVLFLDHIRQGDLEQVGRFIRTRKVSLATIHPSGLAALHEAVLSGNLECVKLLVKYGADIHQRDEAGWTPLHIACSDGYPDIAR

SEQ ID NO: 68626 - protein, 425 aa, Homo sapiens
  Payload ID: 13657
  Gene Symbol: PPP1R32
  Gene Name: protein phosphatase 1, regulatory subunit 32
  Uniprot ID: Q7Z5V6
  ENSP ID: ENSP00000344140
MMGKLPLGVVSPYVKMSSGGYTDPLKFYATSYCTAYGREDFKPRVGSHVGTGYKSNFQPVVSCQASLEALDNPARGEQAQDHFQSVASQSYRPLEVPDGKHPLPWSMRQTSSGYGREKPSAGPPTKEVRKVHFDTQEHGPQAITGLEPREVPLLHQQQGQDPLERENFRHGPRFMTSEYNSKYLRDPLDQPDFLQKKSIGAKEGSGFTKQSHQSPIVFQPPSQALPGDPALLPGQSVTKSDFLPKTHLHGDEFLPVLARGSKRETAFSRGNERILNPRVPPPCPEPSSVSHQQFQPLHRMQQTNVALLGRETVGKKEPTGFSLNNPMYVRSPCDPDRDQRYLTTYNQGYFENIPKGLDQEGWTRGGIQPQMPGGYALSQPVSCMEATPNPMESLRHLHPHVGRTLTSADPFYQNTPHSSRCVAHS

SEQ ID NO: 68627 - protein, 405 aa, Homo sapiens
  Payload ID: 13657
  Gene Symbol: PPP1R32
  Gene Name: protein phosphatase 1, regulatory subunit 32
  Uniprot ID: Q7Z5V6
  ENSP ID: ENSP00000391560
MMGKLPLGVVSPYVKMSSGGYTDPLKFYATSYCTAYGREDFKPRVGSHVGTGYKSNFQPVVSCQASLEALDNPARGEQAQDHFQSVASQSYRPLEVPDGKHPLPWSMRQTSSGYGREKPSAGPPTKEVRKVHFDTQEHGPQAITGLEPREVPLLHQQQGQDPLERENFRHGPRFMTSEYNSKYLRDPLDQPDFLQKKSIGAKEGSGFTKQSHQSPIVFQPPSQALPGDPGDEFLPVLARGSKRETAFSRGNERILNPRVPPPCPEPSSVSHQQFQPLHRMQQTNVALLGRETVGKKEPTGFSLNNPMYVRSPCDPDRDQRYLTTYNQGYFENIPKGLDQEGWTRGGIQPQMPGGYALSQPVSCMEATPNPMESLRHLHPHVGRTLTSADPFYQNTPHSSRCVAHS

SEQ ID NO: 68628 - protein, 137 aa, Homo sapiens
  Payload ID: 13657
  Gene Symbol: PPP1R32
  Gene Name: protein phosphatase 1, regulatory subunit 32
  ENSP ID: ENSP00000437511
GQSVTKSDFLPKTHLHGDEFLPVLARGSKRETAFSRGNERILNPRVPPPCPEPSSVSHQQFQPLHRMQQTNVALLGRETVGKKEPTGFSLNNPMYVRSPCDPDRDQRYLTTYNQGTLTSADPFYQNTPHSSRCVAHS

SEQ ID NO: 68629 - protein, 55 aa, Homo sapiens
  Payload ID: 13657
  Gene Symbol: PPP1R32
  Gene Name: protein phosphatase 1, regulatory subunit 32
  ENSP ID: ENSP00000439468
MPGGYALSQPVSCMEATPNPMESLRHLHPHVGRTLTSADPFYQNTPHSSRCVAHS

SEQ ID NO: 68630 - protein, 176 aa, Homo sapiens
  Payload ID: 13657
  Gene Symbol: PPP1R32
  Gene Name: protein phosphatase 1, regulatory subunit 32
  ENSP ID: ENSP00000441053
PSQALPGDPALLPGQSVTKSDFLPKTHLHVPPPCPEPSSVSHQQFQPLHRMQQTNVALLGRETVGKKEPTGFSLNNPMYVRSPCDPDRDQRYLTTYNQGYFENIPKGLDQEGWTRGGIQPQMPGGYALSQPVSCMEATPNPMESLRHLHPHVGRTLTSADPFYQNTPHSSRCVAHS

SEQ ID NO: 68631 - protein, 102 aa, Homo sapiens
  Payload ID: 13657
  Gene Symbol: PPP1R32
  Gene Name: protein phosphatase 1, regulatory subunit 32
  ENSP ID: ENSP00000444387
MEKGSRGCRGGQSPASSQGPLLSSRYFENIPKGLDQEGWTRGGIQPQMPGGYALSQPVSCMEATPNPMESLRHLHPHVGRTLTSADPFYQNTPHSSRCVAHS

SEQ ID NO: 68632 - protein, 253 aa, Homo sapiens
  Payload ID: 13658
  Gene Symbol: PPP1R35
  Gene Name: protein phosphatase 1, regulatory subunit 35
  Uniprot ID: Q8TAP8
  ENSP ID: ENSP00000292330
MMMGCGESELKSADGEEAAAVPGPPPEPQVPQLRAPVPEPGLDLSLSPRPDSPQPRHGSPGRRKGRAERRGAARQRRQVRFRLTPPSPVRSEPQPAVPQELEMPVLKSSLALGLELRAAAGSHFDAAKAVEEQLRKSFQIRCGLEESVSEGLNVPRSKRLFRDLVSLQVPEEQVLNAALREKLALLPPQARAPHPKEPPGPGPDMTILCDPETLFYESPHLTLDGLPPLRLQLRPRPSEDTFLMHRTLRRWEA

SEQ ID NO: 68633 - protein, 422 aa, Homo sapiens
  Payload ID: 13659
  Gene Symbol: PPP1R36
  Gene Name: protein phosphatase 1, regulatory subunit 36
  Uniprot ID: Q96LQ0
  ENSP ID: ENSP00000298705
MYRVPEFYARRKRLGGQTPYLMDQLGLRLGMWYWKDETRTLEFRRFAAEDSVQWLLKHHPHFTPAAEVKEKGKKGKAVHFAETDGPASDRLTDKRLAAKDDKSAKAVEKRGQQGTITLDDVKFVTLLLLQDTEMQRICSFTTFMRNKNLDNFLMALLYYLSHYLEKNSLEKKPKSYMVGLVEKKEMELVLSELEAAQRYLAQKYCILVLGLAVPDKHHMCCGKEKISDTQKDWKFFESFYTFCTYVAWIVFRRQHLTEIEEEVGRLFRTNMFNIPRRRREDEESGGEKKRMTFVQFRRMMAKRPAIKKAINMRSPVMSTLLPSLREKAQNVFEKKYHQVDVRFPAEMQKHVGTLDSVPMPVVGILGEPRCLFNPHTLHPLDPEENTKSFGRYPSLMENNNMRIQDTLDLVMKTLSSHTSCPK

SEQ ID NO: 68634 - protein, 45 aa, Homo sapiens
  Payload ID: 13659
  Gene Symbol: PPP1R36
  Gene Name: protein phosphatase 1, regulatory subunit 36
  ENSP ID: ENSP00000435229
MYRVPEFYARRKRLGGQTPYLMDQLGLRLGMWYWKDETRTLEFRR

SEQ ID NO: 68635 - protein, 74 aa, Homo sapiens
  Payload ID: 13659
  Gene Symbol: PPP1R36
  Gene Name: protein phosphatase 1, regulatory subunit 36
  ENSP ID: ENSP00000451900
MYRVPEFYARRKRLGGQTPYLMDQLGLRLGMWYWKDETRTLEFRRFAAEDSVQWLLKHHPHAPIPKLAENQQSA

SEQ ID NO: 68636 - protein, 44 aa, Homo sapiens
  Payload ID: 13659
  Gene Symbol: PPP1R36
  Gene Name: protein phosphatase 1, regulatory subunit 36
  ENSP ID: ENSP00000452491
MQRICSFTTFMRNKNLDNFLMALLYYLSHYLEKNSLEKKPKSYM

SEQ ID NO: 68637 - protein, 691 aa, Homo sapiens
  Payload ID: 13660
  Gene Symbol: PPP1R37
  Gene Name: protein phosphatase 1, regulatory subunit 37
  Uniprot ID: O75864
  ENSP ID: ENSP00000221462
MEIAPQEAPPVPGADGDIEEAPAEAGSPSPASPPADGRLKAAAKRVTFPSDEDIVSGAVEPKDPWRHAQNVTVDEVIGAYKQACQKLNCRQIPKLLRQLQEFTDLGHRLDCLDLKGEKLDYKTCEALEEVFKRLQFKVVDLEQTNLDEDGASALFDMIEYYESATHLNISFNKHIGTRGWQAAAHMMRKTSCLQYLDARNTPLLDHSAPFVARALRIRSSLAVLHLENASLSGRPLMLLATALKMNMNLRELYLADNKLNGLQDSAQLGNLLKFNCSLQILDLRNNHVLDSGLAYICEGLKEQRKGLVTLVLWNNQLTHTGMAFLGMTLPHTQSLETLNLGHNPIGNEGVRHLKNGLISNRSVLRLGLASTKLTCEGAVAVAEFIAESPRLLRLDLRENEIKTGGLMALSLALKVNHSLLRLDLDREPKKEAVKSFIETQKALLAEIQNGCKRNLVLAREREEKEQPPQLSASMPETTATEPQPDDEPAAGVQNGAPSPAPSPDSDSDSDSDGEEEEEEEGERDETPCPALVPPTDSLGPGDRSPPGSPSTPTEQRISVSSPGRGHKVFVVTRVESPPERAEPPASPTPPSPPPPPSPPASPSLPPAGAIDTRDTGSSEPQPPPEPPRSGPPLPNGLKPEFALALPPEPPPGPEVKGGSCGLEHELSCSKNEKELEELLLEASQESGQETL

SEQ ID NO: 68638 - protein, 186 aa, Homo sapiens
  Payload ID: 13660
  Gene Symbol: PPP1R37
  Gene Name: protein phosphatase 1, regulatory subunit 37
  ENSP ID: ENSP00000445252
MEIAPQEAPPVPGADGDIEEAPAEAGSPSPASPPADGRLKAAAKRVTFPSDEDIVSGAVEPKDPWRHGEKLDYKTCEALEEVFKRLQFKVVDLEQTNLDEDGASALFDMIEYYESATHLNISFNKHIGTRGWQAAAHMMRKTSCLQYLDARNTPLLDHSAPFVARALRIRSSLAVLHLENASLSGR

SEQ ID NO: 68639 - protein, 1122 aa, Homo sapiens
  Payload ID: 13661
  Gene Symbol: PPP1R3A
  Gene Name: protein phosphatase 1, regulatory subunit 3A
  Uniprot ID: Q16821
  ENSP ID: ENSP00000284601
MEPSEVPSQISKDNFLEVPNLSDSLCEDEEVTFQPGFSPQPSRRGSDSSEDIYLDTPSSGTRRVSFADSFGFNLVSVKEFDCWELPSASTTFDLGTDIFHTEEYVLAPLFDLPSSKEDLMQQLQIQKAILESTESLLGSTSIKGIIRVLNVSFEKLVYVRMSLDDWQTHYDILAEYVPNSCDGETDQFSFKIVLVPPYQKDGSKVEFCIRYETSVGTFWSNNNGTNYTFICQKKEQEPEPVKPWKEVPNRQIKGCLKVKSSKEESSVTSEENNFENPKNTDTYIPTIICSHEDKEDLEASNRNVKDVNREHDEHNEKELELMINQHLIRTRSTASRDERNTFSTDPVNFPNKAEGLEKKQIHGEICTDLFQRSLSPSSSAESSVKGDFYCNEKYSSGDDCTHQPSEETTSNMGEIKPSLGDTSSDELVQLHTGSKEVLDDNANPAHGNGTVQIPCPSSDQLMAGNLNKKHEGGAKNIEVKDLGCLRRDFHSDTSACLKESTEEGSSKEDYYGNGKDDEEQRIYLGVNEKQRKNFQTILHDQERKMGNPKISVAGIGASNRDLATLLSEHTAIPTRAITADVSHSPRTNLSWEEAVLTPEHHHLTSEGSALGGITGQVCSSRTGNVLRNDYLFQVEEKSGGINSEDQDNSPQHKQSWNVLESQGKSRENKTNITEHIKGQTDCEDVWGKRDNTRSLKATTEELFTCQETVCCELSSLADHGITEKAEAGTAYIIKTTSESTPESMSAREKAIIAKLPQETARSDRPIEVKETAFDPHEGRNDDSHYTLCQRDTVGVIYDNDFEKESRLGICNVRVDEMEKEETMSMYNPRKTHDREKCGTGNITSVEESSWVITEYQKATSKLDLQLGMLPTDKTVFSENRDLRQVQELSKKTDSDAIVHSAFNSDTNRAPQNSSPFSKHHTEISVSTNEQAIAVENAVTTMASQPISTKSENICNSTREIQGIEKHPYPESKPEEVSRSSGIVTSGSRKERCIGQIFQTEEYSVEKSLGPMILINKPLENMEEARHENEGLVSSGQSLYTSGEKESDSSASTSLPVEESQAQGNESLFSKYTNSKIPYFLLFLIFLITVYHYDLMIGLTFYVLSLSWLSWEEGRQKESVKKK

SEQ ID NO: 68640 - protein, 74 aa, Homo sapiens
  Payload ID: 13661
  Gene Symbol: PPP1R3A
  Gene Name: protein phosphatase 1, regulatory subunit 3A
  Uniprot ID: Q16821
  ENSP ID: ENSP00000284602
MEPSEVPSQISKDNFLEVPNLSDSLCEDEEVTFQPGFSPQPSRRGSDSSEDIYLDTPSSERTRAGACKTMERSS

SEQ ID NO: 68641 - protein, 191 aa, Homo sapiens
  Payload ID: 13661
  Gene Symbol: PPP1R3A
  Gene Name: protein phosphatase 1, regulatory subunit 3A
  ENSP ID: ENSP00000401278
MINQHLIRTRSTASRDERNTFSTDPVNFPNKAEGLEKKQIHGEICTDLFQRSLSPSSSAESSVKGDFYCNEKYSSGDDCTHQPSEETTSNMGEIKPSLGDTSSDELVQLHTGSKEVLDDNANPAHGNGTVQIPCPSSDQLMAGNLNKKHEGGAKNIEVKDLGCLRRDFHSDTSACLKESTEEGSSKEDYYG

SEQ ID NO: 68642 - protein, 285 aa, Homo sapiens
  Payload ID: 13662
  Gene Symbol: PPP1R3B
  Gene Name: protein phosphatase 1, regulatory subunit 3B
  Uniprot ID: Q86XI6
  ENSP ID: ENSP00000308318
MMAVDIEYRYNCMAPSLRQERFAFKISPKPSKPLRPCIQLSSKNEASGMVAPAVQEKKVKKRVSFADNQGLALTMVKVFSEFDDPLDMPFNITELLDNIVSLTTAESESFVLDFSQPSADYLDFRNRLQADHVCLENCVLKDKAIAGTVKVQNLAFEKTVKIRMTFDTWKSYTDFPCQYVKDTYAGSDRDTFSFDISLPEKIQSYERMEFAVYYECNGQTYWDSNRGKNYRIIRAELKSTQGMTKPHSGPDLGISFDQFGSPRCSYGLFPEWPSYLGYEKLGPYY

SEQ ID NO: 68643 - protein, 285 aa, Homo sapiens; identical to SEQ ID NO: 68642
  Payload ID: 13662
  Gene Symbol: PPP1R3B
  Gene Name: protein phosphatase 1, regulatory subunit 3B
  Uniprot ID: Q86XI6
  ENSP ID: ENSP00000428642

SEQ ID NO: 68644 - protein, 317 aa, Homo sapiens
  Payload ID: 13663
  Gene Symbol: PPP1R3C
  Gene Name: protein phosphatase 1, regulatory subunit 3C
  Uniprot ID: Q9UQK1
  ENSP ID: ENSP00000238994
MSCTRMIQVLDPRPLTSSVMPVDVAMRLCLAHSPPVKSFLGPYDEFQRRHFVNKLKPLKSCLNIKHKAKSQNDWKCSHNQAKKRVVFADSKGLSLTAIHVFSDLPEEPAWDLQFDLLDLNDISSALKHHEEKNLILDFPQPSTDYLSFRSHFQKNFVCLENCSLQERTVTGTVKVKNVSFEKKVQIRITFDSWKNYTDVDCVYMKNVYGGTDSDTFSFAIDLPPVIPTEQKIEFCISYHANGQVFWDNNDGQNYRIVHVQWKPDGVQTQMAPQDCAFHQTSPKTELESTIFGSPRLASGLFPEWQSWGRMENLASYR

SEQ ID NO: 68645 - protein, 299 aa, Homo sapiens
  Payload ID: 13664
  Gene Symbol: PPP1R3D
  Gene Name: protein phosphatase 1, regulatory subunit 3D
  Uniprot ID: O95685
  ENSP ID: ENSP00000360035
MSRGPSSAVLPSALGSRKLGPRSLSCLSDLDGGVALEPRACRPPGSPGRAPPPTPAPSGCDPRLRPIILRRARSLPSSPERRQKAAGAPGAACRPGCSQKLRVRFADALGLELAQVKVFNAGDDPSVPLHVLSRLAINSDLCCSSQDLEFTLHCLVPDFPPPVEAADFGERLQRQLVCLERVTCSDLGISGTVRVCNVAFEKQVAVRYTFSGWRSTHEAVARWRGPAGPEGTEDVFTFGFPVPPFLLELGSRVHFAVRYQVAGAEYWDNNDHRDYSLTCRNHALHMPRGECEESWIHFI

SEQ ID NO: 68646 - protein, 279 aa, Homo sapiens
  Payload ID: 13665
  Gene Symbol: PPP1R3E
  Gene Name: protein phosphatase 1, regulatory subunit 3E
  Uniprot ID: Q9H7J1
  ENSP ID: ENSP00000408288
MSRERPPGTDIPRNLSFIAALTERAYYRSQRPSLEEEPEEEPGEGGTRFGARSRAHAPSRGRRARSAPAGGGGARAPRSRSPDTRKRVRFADALGLELAVVRRFRPGELPRVPRHVQIQLQRDALRHFAPCQPRARGLQEARAALEPASEPGFAARLLTQRICLERAEAGPLGVAGSARVVDLAYEKRVSVRWSADGWRSQREAPAAYAGPAPPPPRADRFAFRLPAPPIGGALLFALRYRVTGHEFWDNNGGRDYALRGPEHPGSGGAPEPQGWIHFI

SEQ ID NO: 68647 - protein, 49 aa, Homo sapiens
  Payload ID: 13665
  Gene Symbol: PPP1R3E
  Gene Name: protein phosphatase 1, regulatory subunit 3E
  ENSP ID: ENSP00000453175
  MOD_RES (1)..(1): Any amino acid
XGALLFALRYRVTGHEFWDNNGGRDYALRGPEHPGSGGAPEPQGWIHFI

SEQ ID NO: 68648 - protein, 18 aa, Homo sapiens
  Payload ID: 13665
  Gene Symbol: PPP1R3E
  Gene Name: protein phosphatase 1, regulatory subunit 3E
  ENSP ID: ENSP00000453437
EHPGSGGAPEPQGWIHFI

SEQ ID NO: 68649 - protein, 29 aa, Homo sapiens
  Payload ID: 13665
  Gene Symbol: PPP1R3E
  Gene Name: protein phosphatase 1, regulatory subunit 3E
  ENSP ID: ENSP00000453543
NGGRDYALRGPEHPGSGGAPEPQGWIHFI

SEQ ID NO: 68650 - protein, 13 aa, Homo sapiens
  Payload ID: 13665
  Gene Symbol: PPP1R3E
  Gene Name: protein phosphatase 1, regulatory subunit 3E
  ENSP ID: ENSP00000453726
  MOD_RES (1)..(1): Any amino acid
XGAPEPQGWIHFI

SEQ ID NO: 68651 - protein, 34 aa, Homo sapiens
  Payload ID: 13665
  Gene Symbol: PPP1R3E
  Gene Name: protein phosphatase 1, regulatory subunit 3E
  ENSP ID: ENSP00000454106
  MOD_RES (1)..(1): Any amino acid
XFWDNNGGRDYALRGPEHPGSGGAPEPQGWIHFI

SEQ ID NO: 68652 - protein, 799 aa, Homo sapiens
  Payload ID: 13666
  Gene Symbol: PPP1R3F
  Gene Name: protein phosphatase 1, regulatory subunit 3F
  Uniprot ID: Q6ZSY5
  ENSP ID: ENSP00000055335
MARTAPVEPPLRHSAPPSPAAGEPRTSVEAAVAPRRVLFADEALGLPLAQLRRYRPWGGPGAGKMAAAAGQDGGGGGGADEDDDGEDGDEGEEEEEACPEPSPLCPVPAGGGFYLVPTFSLPPAPGRLERLGRVMVELEALLPPPGAVPGGAGVWVPGGRPPVLRGLVRVLNRSFEKAVHVRASHDGWASFCDHPARYVPRSPPWAGAGGTGAGDPILDPGLGLGPGQASASSPDDGGRTDRFAFQLPFAEGAGDGARLDFVVRYETPEGTFWANNHGRNYTVLLRIAPAPTPTDAEGLPQQQQLPQLEPQPECQGPVEAEARQLKSCMKPVRRRPAEEELKTKNMDDNTFAMAEHPDVQESVGPLVAPTPLRPWPQMTLQVSDVPMTGNPAEEGDVPRSSPPVAFTEVLQAPAIRIPPSSPLCGLGGSPRDQASGPDASEGATGPFLEPSQQQAEATWGVSSENGGGLEAVSGSEELLGEDTIDQELEQLYLSHLSRLRAAVAAGGAGGGGEGSTDGGMSPSHPLGILTDRDLILKWPGPERALNSALAEEITLHYARLGRGVELIKDTEDPDDEGEGEEGLSVTPSSPEGDSPKESPPEILSGARSVVATMGDVWLPWAEGSGCDGPVVLGTEGQFIGDPEKGMGKDTSSLHMNRVIAGVTESLGEAGTEAQIEVTSEWAGSLDPISGKEPASPVLLQGQNPTLLSPLGAEVCLSSVARPHVSSQDEKDAGPSLEPPKKSPTLAVPAECVCALPPQLRGPLTQTLGVLAGLVVVPVALNSGVSLLVLALCLSLAWFS

SEQ ID NO: 68653 - protein, 453 aa, Homo sapiens
  Payload ID: 13666
  Gene Symbol: PPP1R3F
  Gene Name: protein phosphatase 1, regulatory subunit 3F
  Uniprot ID: Q6ZSY5
  ENSP ID: ENSP00000365359
MDDNTFAMEHPDVQESVGPLVAPTPLRPWPQMTLQVSDVPMTGNPAEEGDVPRSSPPVAFTEVLQAPAIRIPPSSPLCGLGGSPRDQASGPDASEGATGPFLEPSQQQAEATWGVSSENGGGLEAVSGSEELLGEDTIDQELEQLYLSHLSRLRAAVAAGGAGGGGEGSTDGGMSPSHPLGILTDRDLILKWPGPERALNSALAEEITLHYARLGRGVELIKDTEDPDDEGEGEEGLSVTPSSPEGDSPKESPPEILSGARSVVATMGDVWLPWAEGSGCDGPVVLGTEGQFIGDPEKGMGKDTSSLHMNRVIAGVTESLGEAGTEAQIEVTSEWAGSLDPISGKEPASPVLLQGQNPTLLSPLGAEVCLSSVARPHVSSQDEKDAGPSLEPPKKSPTLAVPAECVCALPPQLRGPLTQTLGVLAGLVVVPVALNSGVSLLVLALCLSLAWFS

SEQ ID NO: 68654 - protein, 453 aa, Homo sapiens; identical to SEQ ID NO: 68653
  Payload ID: 13666
  Gene Symbol: PPP1R3F
  Gene Name: protein phosphatase 1, regulatory subunit 3F
  Uniprot ID: Q6ZSY5
  ENSP ID: ENSP00000417535

SEQ ID NO: 68655 - protein, 161 aa, Homo sapiens
  Payload ID: 13666
  Gene Symbol: PPP1R3F
  Gene Name: protein phosphatase 1, regulatory subunit 3F
  ENSP ID: ENSP00000418949
  MOD_RES (1)..(1): Any amino acid
XGAGDGARLDFVVRYETPEGTFWANNHGRNYTVLLRIAPAPTPTDAEGLPQQQQLPQLEPQPECQGPVEAEARQLKSCMKPVRRRPAEEELKTKNMDDNTFAMAEHPDVQESVGPLVAPTPLRPWPQMTLQVKSNHGVKRRQAEMMQAAPMLEICSLKFSQ

SEQ ID NO: 68656 - protein, 453 aa, Homo sapiens; identical to SEQ ID NO: 68653
  Payload ID: 13666
  Gene Symbol: PPP1R3F
  Gene Name: protein phosphatase 1, regulatory subunit 3F
  Uniprot ID: Q6ZSY5
  ENSP ID: ENSP00000420687

SEQ ID NO: 68657 - protein, 358 aa, Homo sapiens
  Payload ID: 13667
  Gene Symbol: PPP1R3G
  Gene Name: protein phosphatase 1, regulatory subunit 3G
  Uniprot ID: B7ZBB8
  ENSP ID: ENSP00000393832
MEPIGARLSLEAPGPAPFREAPPAEELPAPVVPCVQGGGDGGGASETPSPDAQLGDRPLSPKEEAAPQEQEELLECRRRCRARSFSLPADPILQAAKFLQQQQQQAVALGGEGAEDAQLGPGGCCAKCKKRVQFADTLGLSLASVKHFSEAEEPQVPPAVLSRLRSFPMRAEDLEQLGGLLAAAAVAAPLSAPPSRLRPLFQLPGPSAAAERLQRQRVCLERVQCSTASGAEVKGSGRVLSCPGPRAVTVRYTFTEWRSFLDVPAELQPEPLEPQQPEAPSGASEPGSGDAKKEPGAECFHFSLCLPPGLQPEDEEDADERGVAVHFAVCYRCAQGEYWDNNAGANYTLRYARPADAL

SEQ ID NO: 68658 - protein, 228 aa, Homo sapiens
  Payload ID: 13668
  Gene Symbol: PPP1R42
  Gene Name: protein phosphatase 1, regulatory subunit 42
  Uniprot ID: Q7Z4L9
  ENSP ID: ENSP00000315035
MVRLTLDLIARNSNLKPRKEETISQCLKKITHINFSDKNIDAIEDLSLCKNLSVLYLYDNCISQITNLNYATNLTHLYLQNNCISCIENLRSLKKLEKLYLGGNYIAVIEGLEGLGELRELHVENQRLPLGEKLLFDPRTLHSLAKSLCILNISNNNIDDITDLELLENLNQLIAVDNQLLHVKDLEFLLNKLMKLWKIDLNGNPVCLKPKYRDRLILVSKSLGTYLY

SEQ ID NO: 68659 - protein, 309 aa, Homo sapiens
  Payload ID: 13668
  Gene Symbol: PPP1R42
  Gene Name: protein phosphatase 1, regulatory subunit 42
  ENSP ID: ENSP00000429721
MVRLTLDLIARNSNLKPRKEETISQCLKKITHINFSDKNIDAIEDLSLCKNLSVLYLYDNCISQITNLNYATNLTHLYLQNNCISCIENLRSLKKLEKLYLGGNYIAVIEGLEGLGELRELHVENQRLPLGEKLLFDPRTLHSLAKSLCILNISNNNIDDITDLELLENLNQLIAVDNQLLHVKDLEFLLNKLMKLWKIDLNGNPVCLKPKYRDRLILVSKSLEFLDGKEIKNIERQFLMNWKASKDAKKISKKRSSKNEDASNSLISNFKTMHHIVPVYYPQVGKPKLAFFSEIQRYPVNANASPESS

SEQ ID NO: 68660 - protein, 360 aa, Homo sapiens
  Payload ID: 13669
  Gene Symbol: PPP1R7
  Gene Name: protein phosphatase 1, regulatory subunit 7
  Uniprot ID: Q15435
  ENSP ID: ENSP00000234038
MAAERGAGQQQSQEMMEVDRRVESEESGDEEGKKHSSGIVADLSEQSLKDGEERGEEDPEEEHELPVDMETINLDRDAEDVDLNHYRIGKIEGFEVLKKVKTLCLRQNLIKCIENLEELQSLRELDLYDNQIKKIENLEALTELEILDISFNLLRNIEGVDKLTRLKKLFLVNNKISKIENLSNLHQLQMLELGSNRIRAIENIDTLTNLESLFLGKNKITKLQNLDALTNLTVLSMQSNRLTKIEGLQNLVNLRELYLSHNGIEVIEGLENNNKLTMLDIASNRIKKIENISHLTELQEFWMNDNLLESWSDLDELKGARSLETVYLERNPLQKDPQYRRKVMLALPSVRQIDATFVRF

SEQ ID NO: 68661 - protein, 317 aa, Homo sapiens
  Payload ID: 13669
  Gene Symbol: PPP1R7
  Gene Name: protein phosphatase 1, regulatory subunit 7
  Uniprot ID: Q15435
  ENSP ID: ENSP00000272983
MAAERGAGQQQSQEMMEEEHELPVDMETINLDRDAEDVDLNHYRIGKIEGFEVLKKVKTLCLRQNLIKCIENLEELQSLRELDLYDNQIKKIENLEALTELEILDISFNLLRNIEGVDKLTRLKKLFLVNNKISKIENLSNLHQLQMLELGSNRIRAIENIDTLTNLESLFLGKNKITKLQNLDALTNLTVLSMQSNRLTKIEGLQNLVNLRELYLSHNGIEVIEGLENNNKLTMLDIASNRIKKIENISHLTELQEFWMNDNLLESWSDLDELKGARSLETVYLERNPLQKDPQYRRKVMLALPSVRQIDATFVRF

SEQ ID NO: 68662 - protein, 221 aa, Homo sapiens
  Payload ID: 13669
  Gene Symbol: PPP1R7
  Gene Name: protein phosphatase 1, regulatory subunit 7
  Uniprot ID: Q15435
  ENSP ID: ENSP00000385012
MEEHELPVDMETINLDRDAEDVDLNHYRIGKIEGFEVLKKVKTLCLRQNLIKCIENLEELQSLRELDLYDNQIKKIENLEALTELEILDISFNLLRNIEGVDKLTRLKKLFLVNNKISKIENLSNLHQLQMLELGSNRIRAIENIDTLTNLESLFLGKNKITKLQNLDALTNLTVLSMQSNRLTKIEGLQNLVNLRELYLSHNGIEVIEGLENNVQDSLTY

SEQ ID NO: 68663 - protein, 280 aa, Homo sapiens
  Payload ID: 13669
  Gene Symbol: PPP1R7
  Gene Name: protein phosphatase 1, regulatory subunit 7
  Uniprot ID: Q15435
  ENSP ID: ENSP00000385022
MAAERGAGQQQSQEMMEVDRRVESEESGDEEGKKHSSGIVADLSEQSLKDGEERGEEDPEEEHELPVDMETINLDRDAEDVDLNHYRIGKIEGFEVLKKVKTLCLRQNLIKCIENLEELQSLRELDLYDNQIKKIENLEALTELEILDISFNLLRNIEGVDKLTRLKKLFLVNNKISKIENLSNLHQLQMLELGSNRIRAIENIDTLTNLESLFLGKNKITKLQNLDALTNLTVLSMQSNRLTKIEGLQNLVNLRELYLSHNGIEVIEGLENNVQDSLTY

SEQ ID NO: 68664 - protein, 237 aa, Homo sapiens
  Payload ID: 13669
  Gene Symbol: PPP1R7
  Gene Name: protein phosphatase 1, regulatory subunit 7
  Uniprot ID: Q15435
  ENSP ID: ENSP00000385466
MAAERGAGQQQSQEMMEEEHELPVDMETINLDRDAEDVDLNHYRIGKIEGFEVLKKVKTLCLRQNLIKCIENLEELQSLRELDLYDNQIKKIENLEALTELEILDISFNLLRNIEGVDKLTRLKKLFLVNNKISKIENLSNLHQLQMLELGSNRIRAIENIDTLTNLESLFLGKNKITKLQNLDALTNLTVLSMQSNRLTKIEGLQNLVNLRELYLSHNGIEVIEGLENNVQDSLTY

SEQ ID NO: 68665 - protein, 274 aa, Homo sapiens
  Payload ID: 13669
  Gene Symbol: PPP1R7
  Gene Name: protein phosphatase 1, regulatory subunit 7
  ENSP ID: ENSP00000385498
MAAERGAGQQQSQEMMEVDRRVESEESGDEEGKKHSSGIVADLSEQSLKDGEERGEEDPEEEHELPVDMETINLDRDAEDVDLNHYRIGKIEGFETLCLRQNLIKCIENLEELQSLRELDLYDNQIKKIENLEALTELEILDISFNLLRNIEGVDKLTRLKKLFLVNNKISKIENLSNLHQLQMLELGSNRIRAIENIDTLTNLESLFLGKNKITKLQNLDALTNLTVLSMQSNRLTKIEGLQNLVNLRELYLSHNGIEVIEGLENNVQDSLTY

SEQ ID NO: 68666 - protein, 360 aa, Homo sapiens; identical to SEQ ID NO: 68660
  Payload ID: 13669
  Gene Symbol: PPP1R7
  Gene Name: protein phosphatase 1, regulatory subunit 7
  Uniprot ID: Q15435
  ENSP ID: ENSP00000385657

SEQ ID NO: 68667 - protein, 335 aa, Homo sapiens
  Payload ID: 13669
  Gene Symbol: PPP1R7
  Gene Name: protein phosphatase 1, regulatory subunit 7
  ENSP ID: ENSP00000392373
  MOD_RES (1)..(1): Any amino acid
XRVESEESGDEEGKKHSSGIVADLSEQSLKDGEERGEEDPEEEHELPVDMETINLDRDAEDVDLNHYRIGKIEGFETLCLRQNLIKCIENLEELQSLRELDLYDNQIKKIENLEALTELEILDISFNLLRNIEGVDKLTRLKKLFLVNNKISKIENLSNLHQLQMLELGSNRIRAIENIDTLTNLESLFLGKNKITKLQNLDALTNLTVLSMQSNRLTKIEGLQNLVNLRELYLSHNGIEVIEGLENNNKLTMLDIASNRIKKIENISHLTELQEFWMNDNLLESWSDLDELKGARSLETVYLERNPLQKDPQYRRKVMLALPSVRQIDATFVRF

SEQ ID NO: 68668 - protein, 282 aa, Homo sapiens
  Payload ID: 13669
  Gene Symbol: PPP1R7
  Gene Name: protein phosphatase 1, regulatory subunit 7
  ENSP ID: ENSP00000396376
MVDRRVESEESGDEEGKKHSSGIVADLSEQSLKDGEERGEEDPEEEHELPVDMETINLDRDAEDVDLNHYRIGKIEGFEVLKKVKTLCLRQNLIKCIENLEELQSLRELDLYDNQIKKIENLEALTELEILDISFNLLRNIEGVDKLTRLKKLFLVNNKISKIENLSNLHQLQMLELGSNRIRAIENIDTLTNLESLFLGKNKITKLQNLDALTNLTVLSMQSNRLTKIEGLQNLVNLRELYLSHNGIEVIEGLENNNKLTMLDIASNRIKKIENISHLTEL

SEQ ID NO: 68669 - protein, 140 aa, Homo sapiens
  Payload ID: 13669
  Gene Symbol: PPP1R7
  Gene Name: protein phosphatase 1, regulatory subunit 7
  ENSP ID: ENSP00000397985
LEGNEVGDRVREKSKNHSRRRKLLSKVDRRVESEESGDEEGKKHSSGIVADLSEQSLKDGEERGEEDPEEEHELPVDMETINLDRDAEDVDLNHYRIGKIEGFEVLKKVKTLCLRQNLIKCIENLEELQSLRELDLYDNQ

SEQ ID NO: 68670 - protein, 184 aa, Homo sapiens
  Payload ID: 13669
  Gene Symbol: PPP1R7
  Gene Name: protein phosphatase 1, regulatory subunit 7
  ENSP ID: ENSP00000409719
MAAERGAGQQQSQEMMEVDRRVESEESGDEEGKKHSSGIVADLSEQSLKDGEERGEEDPEEEHELPVDMETINLDRDAEISALFQDVDLNHYRIGKIEGFEVLKKVKTLCLRQNLIKCIENLEELQSLRELDLYDNQIKKIENLEALTELEILDISFNLLRNIEGVDKLTRLKKLFLVNNKISK

SEQ ID NO: 68671 - protein, 289 aa, Homo sapiens
  Payload ID: 13669
  Gene Symbol: PPP1R7
  Gene Name: protein phosphatase 1, regulatory subunit 7
  ENSP ID: ENSP00000412092
MEEHELPVDMETINLDRDAEDVDLNHYRIGKIEGFEVLKKVKTLCLRQNLIKCIENLEELQSLRELDLYDNQIKKIENLEALTELEILDISFNLLRNIEGVDKLTRLKKLFLVNNKISKIENLSNLHQLQMLELGSNRIRAIENIDTLTNLESLFLGKNKITKLQNLDALTNLTVLSMQSNRLTKIEGLQNLVNLRELYLSHNGIEVIEGLENNNKLTMLDIASNRIKKIENISHLTELQEFWMNDNLLESWSDLDELKGARSLETVYLERNPLQKDPQYRRKVMLALP

SEQ ID NO: 68672 - protein, 108 aa, Homo sapiens
  Payload ID: 13669
  Gene Symbol: PPP1R7
  Gene Name: protein phosphatase 1, regulatory subunit 7
  ENSP ID: ENSP00000413360
  MOD_RES (1)..(1): Any amino acid
XDIASNRIKKIENISHLTELQEFWMNDNLLESWSDLDELKGARSLETVYLERNPLQKDPQYRRKVMLALPSVRQIDATFVRALLQRAPGRADCFHVCPSVLATSLACG

SEQ ID NO: 68673 - protein, 127 aa, Homo sapiens
  Payload ID: 13670
  Gene Symbol: PPP1R8
  Gene Name: protein phosphatase 1, regulatory subunit 8
  Uniprot ID: Q12972
  ENSP ID: ENSP00000236412
MVQTAVVPVKKKRVEGPGSLGLEESGSRRMQNFAFSGGLYGGLPPTHSEAGSQPHGIHGTALIGGLPMPYPNLAPDVDLTPVVPSAVNMNPAPNPAVYNPEAVNEPKKKKYAKEAWPGKKPTPSLLI

SEQ ID NO: 68674 - protein, 351 aa, Homo sapiens
  Payload ID: 13670
  Gene Symbol: PPP1R8
  Gene Name: protein phosphatase 1, regulatory subunit 8
  Uniprot ID: Q12972
  ENSP ID: ENSP00000311677
MAAAANSGSSLPLFDCPTWAGKPPPGLHLDVVKGDKLIEKLIIDEKKYYLFGRNPDLCDFTIDHQSCSRVHAALVYHKHLKRVFLIDLNSTHGTFLGHIRLEPHKPQQIPIDSTVSFGASTRAYTLREKPQTLPSAVKGDEKMGGEDDELKGLLGLPEEETELDNLTEFNTAHNKRISTLTIEEGNLDIQRPKRKRKNSRVTFSEDDEIINPEDVDPSVGRFRNMVQTAVVPVKKKRVEGPGSLGLEESGSRRMQNFAFSGGLYGGLPPTHSEAGSQPHGIHGTALIGGLPMPYPNLAPDVDLTPVVPSAVNMNPAPNPAVYNPEAVNEPKKKKYAKEAWPGKKPTPSLLI

SEQ ID NO: 68675 - protein, 209 aa, Homo sapiens
  Payload ID: 13670
  Gene Symbol: PPP1R8
  Gene Name: protein phosphatase 1, regulatory subunit 8
  Uniprot ID: Q12972
  ENSP ID: ENSP00000363042
MGGEDDELKGLLGLPEEETELDNLTEFNTAHNKRISTLTIEEGNLDIQRPKRKRKNSRVTFSEDDEIINPEDVDPSVGRFRNMVQTAVVPVKKKRVEGPGSLGLEESGSRRMQNFAFSGGLYGGLPPTHSEAGSQPHGIHGTALIGGLPMPYPNLAPDVDLTPVVPSAVNMNPAPNPAVYNPEAVNEPKKKKYAKEAWPGKKPTPSLLI

SEQ ID NO: 68676 - protein, 205 aa, Homo sapiens
  Payload ID: 13670
  Gene Symbol: PPP1R8
  Gene Name: protein phosphatase 1, regulatory subunit 8
  ENSP ID: ENSP00000410206
MGGEDDELKGLLGLPEEETELDNLTEFNTAHNKRISTLTIEEGNLDIQRPKRKRKNSRVTFSEDDEIINPEDVDPSVGRFRNMVQTAVVPVKKKRVEGPGSLGLEESGSRRMQNFAFSGGLYGGLPPTHSEAGSQPHGIHGTALIGGLPMPYPNLAPDVDLTPVVPSAVNMNPAPNPAVYNPEAVNEPKKKKYAKEAWPGKKPTP

SEQ ID NO: 68677 - protein, 1296 aa, Homo sapiens
  Payload ID: 13671
  Gene Symbol: PPP1R9A
  Gene Name: protein phosphatase 1, regulatory subunit 9A
  Uniprot ID: Q9ULJ8
  ENSP ID: ENSP00000289495
MLKTESSGERTTLRSASPHRNAYRTEFQALKSTFDKPKSDGEQKTKEGEGSQQSRGRKYGSNVNRIKNLFMQMGMEPNENAAVIAKTRGKGGHSSPQRRMKPKEFLEKTDGSVVKLESSVSERISRFDTMYDGPSYSKFTETRKMFERSVHESGQNNRYSPKKEKAGGSEPQDEWGGSKSNRGSTDSLDSLSSRTEAVSPTVSQLSAVFENTDSPSAIISEKAENNEYSVTGHYPLNLPSVTVTNLDTFGHLKDSNSWPPSNKRGVDTEDAHKSNATPVPEVASKSTSLASIPGEEIQQSKEPEDSTSNQQTPDSIDKDGPEEPCAESKAMPKSEIPSPQSQLLEDAEANLVGREAAKQQRKELAGGDFTSPDASASSCGKEVPEDSNNFDGSHVYMHSDYNVYRVRSRYNSDWGETGTEQDEEEDSDENSYYQPDMEYSEIVGLPEEEEIPANRKIKFSSAPIKVFNTYSNEDYDRRNDEVDPVAASAEYELEKRVEKLELFPVELEKDEDGLGISIIGMGVGADAGLEKLGIFVKTVTEGGAAQRDGRIQVNDQIVEVDGISLVGVTQNFAATVLRNTKGNVRFVIGREKPGQVSEVAQLISQTLEQERRQRELLEQHYAQYDADDDETGEYATDEEEDEVGPVLPGSDMAIEVFELPENEDMFSPSELDTSKLSHKFKELQIKHAVTEAEIQKLKTKLQAAENEKVRWELEKTQLQQNIEENKERMLKLESYWIEAQTLCHTVNEHLKETQSQYQALEKKYNKAKKLIKDFQQKELDFIKRQEAERKKIEDLEKAHLVEVQGLQVRIRDLEAEVFRLLKQNGTQVNNNNNIFERRTSLGEVSKGDTMENLDGKQTSCQDGLSQDLNEAVPETERLDSKALKTRAQLSVKNRRQRPSRTRLYDSVSSTDGEDSLERKGLRTSSPESDSGVPPLTPVDSNVPFSSDHIAEFQEEPLDPEMGPLSSMWGDTSLFSTSKSDHDVEESPCHHQTTNKKILREKDDAKDPKSLRASSSLAVQGGKIKRKFVDLGAPLRRNSSKGKKWKEKEKEASRFSAGSRIFRGRLENWTPKPCSTAQTSTRSPCMPFSWFNDSRKGSYSFRNLPAPTSSLQPSPETLISDKKGSKNFTFNDDFSPSSTSSADLSGLGAEPKTPGLSQSLALSSDEILDDGQSPKHSQCQNRAVQEWSVQQVSHWLMSLNLEQYVSEFSAQNITGEQLLQLDGNKLKALGMTASQDRAVVKKKLKEMKMSLEKARKAQEKMEKQREKLRRKEQEQMQRKSKKTEKMTSTTAEGAGEQ

SEQ ID NO: 68678 - protein, 1098 aa, Homo sapiens
  Payload ID: 13671
  Gene Symbol: PPP1R9A
  Gene Name: protein phosphatase 1, regulatory subunit 9A
  Uniprot ID: Q9ULJ8
  ENSP ID: ENSP00000344524
MLKTESSGERTTLRSASPHRNAYRTEFQALKSTFDKPKSDGEQKTKEGEGSQQSRGRKYGSNVNRIKNLFMQMGMEPNENAAVIAKTRGKGGHSSPQRRMKPKEFLEKTDGSVVKLESSVSERISRFDTMYDGPSYSKFTETRKMFERSVHESGQNNRYSPKKEKAGGSEPQDEWGGSKSNRGSTDSLDSLSSRTEAVSPTVSQLSAVFENTDSPSAIISEKAENNEYSVTGHYPLNLPSVTVTNLDTFGHLKDSNSWPPSNKRGVDTEDAHKSNATPVPEVASKSTSLASIPGEEIQQSKEPEDSTSNQQTPDSIDKDGPEEPCAESKAMPKSEIPSPQSQLLEDAEANLVGREAAKQQRKELAGGDFTSPDASASSCGKEVPEDSNNFDGSHVYMHSDYNVYRVRSRYNSDWGETGTEQDEEEDSDENSYYQPDMEYSEIVGLPEEEEIPANRKIKFSSAPIKVFNTYSNEDYDRRNDEVDPVAASAEYELEKRVEKLELFPVELEKDEDGLGISIIGMGVGADAGLEKLGIFVKTVTEGGAAQRDGRIQVNDQIVEVDGISLVGVTQNFAATVLRNTKGNVRFVIGREKPGQVSEVAQLISQTLEQERRQRELLEQHYAQYDADDDETGEYATDEEEDEVGPVLPGSDMAIEVFELPENEDMFSPSELDTSKLSHKFKELQIKHAVTEAEIQKLKTKLQAAENEKVRWELEKTQLQQNIEENKERMLKLESYWIEAQTLCHTVNEHLKETQSQYQALEKKYNKAKKLIKDFQQKELDFIKRQEAERKKIEDLEKAHLVEVQGLQVRIRDLEAEVFRLLKQNGTQVNNNNNIFERRTSLGEVSKGDTMENLDGKQTSCQDGLSQDLNEAVPETERLDSKALKTRAQLSVKNRRQRPSRTRLYDSVSSTDGEDSLERKNFTFNDDFSPSSTSSADLSGLGAEPKTPGLSQSLALSSDESLDMIDDEILDDGQSPKHSQCQNRAVQEWSVQQVSHWLMSLNLEQYVSEFSAQNITGEQLLQLDGNKLKALGMTASQDRAVVKKKLKEMKMSLEKARKAQEKMEKQREKLRRKEQEQMQRKSKKTEKMTSTTAEGAGEQ

SEQ ID NO: 68679 - protein, 41 aa, Homo sapiens
  Payload ID: 13671
  Gene Symbol: PPP1R9A
  Gene Name: protein phosphatase 1, regulatory subunit 9A
  ENSP ID: ENSP00000398499
MLKTESSGERTTLRSASPHRNAYRTEFQALKSTFDKPKSDG

SEQ ID NO: 68680 - protein, 1098 aa, Homo sapiens; identical to SEQ ID NO: 68678
  Payload ID: 13671
  Gene Symbol: PPP1R9A
  Gene Name: protein phosphatase 1, regulatory subunit 9A
  Uniprot ID: Q9ULJ8
  ENSP ID: ENSP00000398870

SEQ ID NO: 68681 - protein, 1253 aa, Homo sapiens
  Payload ID: 13671
  Gene Symbol: PPP1R9A
  Gene Name: protein phosphatase 1, regulatory subunit 9A
  Uniprot ID: Q9ULJ8
  ENSP ID: ENSP00000402893
MLKTESSGERTTLRSASPHRNAYRTEFQALKSTFDKPKSDGEQKTKEGEGSQQSRGRKYGSNVNRIKNLFMQMGMEPNENAAVIAKTRGKGGHSSPQRRMKPKEFLEKTDGSVVKLESSVSERISRFDTMYDGPSYSKFTETRKMFERSVHESGQNNRYSPKKEKAGGSEPQDEWGGSKSNRGSTDSLDSLSSRTEAVSPTVSQLSAVFENTDSPSAIISEKAENNEYSVTGHYPLNLPSVTVTNLDTFGHLKDSNSWPPSNKRGVDTEDAHKSNATPVPEVASKSTSLASIPGEEIQQSKEPEDSTSNQQTPDSIDKDGPEEPCAESKAMPKSEIPSPQSQLLEDAEANLVGREAAKQQRKELAGGDFTSPDASASSCGKEVPEDSNNFDGSHVYMHSDYNVYRVRSRYNSDWGETGTEQDEEEDSDENSYYQPDMEYSEIVGLPEEEEIPANRKIKFSSAPIKVFNTYSNEDYDRRNDEVDPVAASAEYELEKRVEKLELFPVELEKDEDGLGISIIGMGVGADAGLEKLGIFVKTVTEGGAAQRDGRIQVNDQIVEVDGISLVGVTQNFAATVLRNTKGNVRFVIGREKPGQVSEVAQLISQTLEQERRQRELLEQHYAQYDADDDETGEYATDEEEDEVGPVLPGSDMAIEVFELPENEDMFSPSELDTSKLSHKFKELQIKHAVTEAEIQKLKTKLQAAENEKVRWELEKTQLQQNIEENKERMLKLESYWIEAQTLCHTVNEHLKETQSQYQALEKKYNKAKKLIKDFQQKELDFIKRQEAERKKIEDLEKAHLVEVQGLQVRIRDLEAEVFRLLKQNGTQVNNNNNIFERRTSLGEVSKGDTMENLDGKQTSCQDGLSQDLNEAVPETERLDSKALKTRAQLSVKNRRQRPSRTRLYDSVSSTDGEDSLERKPSNSFYNHMHITKLLPPKGLRTSSPESDSGVPPLTPVDSNVPFSSDHIAEFQEEPLDPEMGPLSSMWGDTSLFSTSKSDHDVEESPCHHQTTNKKILREKDDAKDPKSLRASSSLAVQGGKIKRKFVDLGAPLRRNSSKGKKWKEKEKEASRFSAGSRIFRGRLENWTPKPCSTAQTSTRSPCMPFSWFNDSRKGSYSFRNLPAPTSSLQPSPETLISDKKGSKNFTFNDDFSPSSTSSADLSGLGAEPKTPGLSQSLALSSDEALGMTASQDRAVVKKKLKEMKMSLEKARKAQEKMEKQREKLRRKEQEQMQRKSKKTEKMTSTTAEGAGEQ

SEQ ID NO: 68682 - protein, 1374 aa, Homo sapiens
  Payload ID: 13671
  Gene Symbol: PPP1R9A
  Gene Name: protein phosphatase 1, regulatory subunit 9A
  Uniprot ID: Q9ULJ8
  ENSP ID: ENSP00000405514
MLKTESSGERTTLRSASPHRNAYRTEFQALKSTFDKPKSDGEQKTKEGEGSQQSRGRKYGSNVNRIKNLFMQMGMEPNENAAVIAKTRGKGGHSSPQRRMKPKEFLEKTDGSVVKLESSVSERISRFDTMYDGPSYSKFTETRKMFERSVHESGQNNRYSPKKEKAGGSEPQDEWGGSKSNRGSTDSLDSLSSRTEAVSPTVSQLSAVFENTDSPSAIISEKAENNEYSVTGHYPLNLPSVTVTNLDTFGHLKDSNSWPPSNKRGVDTEDAHKSNATPVPEVASKSTSLASIPGEEIQQSKEPEDSTSNQQTPDSIDKDGPEEPCAESKAMPKSEIPSPQSQLLEDAEANLVGREAAKQQRKELAGGDFTSPDASASSCGKEVPEDSNNFDGSHVYMHSDYNVYRVRSRYNSDWGETGTEQDEEEDSDENSYYQPDMEYSEIVGLPEEEEIPANRKIKFSSAPIKVFNTYSNEDYDRRNDEVDPVAASAEYELEKRVEKLELFPVELEKDEDGLGISIIGMGVGADAGLEKLGIFVKTVTEGGAAQRDGRIQVNDQIVEVDGISLVGVTQNFAATVLRNTKGNVRFVIGREKPGQVSEVAQLISQTLEQERRQRELLEQHYAQYDADDDENTVAELQGMSGNCNNNNNYFLKTGEYATDEEEDEVGPVLPGSDMAIEVFELPENEDMFSPSELDTSKLSHKFKELQIKHAVTEAEIQKLKTKLQAAENEKVRWELEKTQLQQNIEENKERMLKLESYWIEAQTLCHTVNEHLKETQSQYQALEKKYNKAKKLIKDFQQKELDFIKRQEAERKKIEDLEKAHLVEVQGLQVRIRDLEAEVFRLLKQNGTQVNNNNNIFERRTSLGEVSKGDTMENLDGKQTSCQDGLSQDLNEAVPETERLDSKALKTRAQLSVKNRRQRPSRTRLYDSVSSTDGEDSLERKPSNSFYNHMHITKLLPPKGLRTSSPESDSGVPPLTPVDSNVPFSSDHIAEFQEEPLDPEMGPLSSMWGDTSLFSTSKSDHDVEESPCHHQTTNKKILREKDDAKDPKSLRASSSLAVQGGKIKRKFVDLGAPLRRNSSKGKKWKEKEKEASRFSAGSRIFRGRLENWTPKPCSTAQTSTRSPCMPFSWFNDSRKGSYSFRNLPAPTSSLQPSPETLISDKKGSKVENTWITKANKRNPNPSSSSIFGRHSQLMSVVWIQETNNFTFNDDFSPSSTSSADLSGLGAEPKTPGLSQSLALSSDEILDDGQSPKHSQCQNRAVQEWSVQQVSHWLMSLNLEQYVSEFSAQNITGEQLLQLDGNKLKALGMTASQDRAVVKKKLKEMKMSLEKARKAQEKMEKQREKLRRKEQEQMQRKSKKTEKMTSTTAEGAGEQ

SEQ ID NO: 68683 - protein, 73 aa, Homo sapiens
  Payload ID: 13671
  Gene Symbol: PPP1R9A
  Gene Name: protein phosphatase 1, regulatory subunit 9A
  ENSP ID: ENSP00000405820
MLKTESSGERTTLRSASPHRNAYRTEFQALKSTFDKPKSDGEQKTKEGEGSQQSRGRKYGSNVNRIKNLFMQM

SEQ ID NO: 68684 - protein, 1253 aa, Homo sapiens; identical to SEQ ID NO: 68681
  Payload ID: 13671
  Gene Symbol: PPP1R9A
  Gene Name: protein phosphatase 1, regulatory subunit 9A
  Uniprot ID: Q9ULJ8
  ENSP ID: ENSP00000411342

SEQ ID NO: 68685 - protein, 817 aa, Homo sapiens
  Payload ID: 13672
  Gene Symbol: PPP1R9B
  Gene Name: protein phosphatase 1, regulatory subunit 9B
  ENSP ID: ENSP00000478767
MMKTEPRGPGGPLRSASPHRSAYEAGIQALKPPDAPGPDEAPKGAHHKKYGSNVHRIKSMFLQMGTTAGPSGEAGGGAGLAEAPRASERGVRLSLPRASSLNENVDHSALLKLGTSVSERVSRFDSKPAPSAQPAPPPHPPSRLQETRKLFERSAPAAAGGDKEAAARRLLRQERAGLQDRKLDVVVRFNGSTEALDKLDADAVSPTVSQLSAVFEKADSRTGLHRGPGLPRAAGVPQVNSKLVSKRSRVFQPPPPPPPAPSGDAPAEKERCPAGQQPPQHRVAPARPPPKPREVRKIKPVEVEESGESEAESAPGEVIQAEVTVHAALENGSTVATAASPAPEEPKAQAAPEKEAAAVAPPERGVGNGRAPDVAPEEVDESKKEDFSEADLVDVSAYSGLGEDSAGSALEEDDEDDEEDGEPPYEPESGCVEIPGLSEEEDPAPSRKIHFSTAPIQVFSTYSNEDYDRRNEDVDPMAASAEYELEKRVERLELFPVELEKDSEGLGISIIGMGAGADMGLEKLGIFVKTVTEGGAAHRDGRIQVNDLLVEVDGTSLVGVTQSFAASVLRNTKGRVRFMIGRERPGEQSEVAQLIQQTLEQERWQREMMEQRYAQYGEDDEETGEYATDEDEELSPTFPGGEMAIEVFELAENEDALSPVDMEPEKLVHKFKELQIKHAVTEAEIQQLKRKLQSLEQEKGRWRVEKAQLEQSVEENKERMEKLEGYWGEAQSLCQAVDEHLRETQAQYQALERKYSKAKRLIKDYQQKEIEFLKKETAQRRVLEESELARKEEMDKLLDKISELEGNLQTLRNSNST

SEQ ID NO: 68686 - protein, 309 aa, Homo sapiens
  Payload ID: 13673
  Gene Symbol: PPP2CA
  Gene Name: protein phosphatase 2, catalytic subunit, alpha isozyme
  Uniprot ID: P67775
  ENSP ID: ENSP00000418447
MDEKVFTKELDQWIEQLNECKQLSESQVKSLCEKAKEILTKESNVQEVRCPVTVCGDVHGQFHDLMELFRIGGKSPDTNYLFMGDYVDRGYYSVETVTLLVALKVRYRERITILRGNHESRQITQVYGFYDECLRKYGNANVWKYFTDLFDYLPLTALVDGQIFCLHGGLSPSIDTLDHIRALDRLQEVPHEGPMCDLLWSDPDDRGGWGISPRGAGYTFGQDISETFNHANGLTLVSRAHQLVMEGYNWCHDRNVVTIFSAPNYCYRCGNQAAIMELDDTLKYSFLQFDPAPRRGEPHVTRRTPDYFL

SEQ ID NO: 68687 - protein, 145 aa, Homo sapiens
  Payload ID: 13673
  Gene Symbol: PPP2CA
  Gene Name: protein phosphatase 2, catalytic subunit, alpha isozyme
  ENSP ID: ENSP00000428816
MPFNGSDVLNLLFLYPLTSNEAKEILTKESNVQEVRCPVTVCGDVHGQFHDLMELFRIGGKSPDTNYLFMGDYVDRGYYSVETVTLLVALKVRYRERITILRGNHESRQITQVYGFYDECLRKYGNANVWKYFTDLFDYLPLTAL

SEQ ID NO: 68688 - protein, 126 aa, Homo sapiens
  Payload ID: 13673
  Gene Symbol: PPP2CA
  Gene Name: protein phosphatase 2, catalytic subunit, alpha isozyme
  ENSP ID: ENSP00000430869
MELFRIGGKSPDTNYLFMGDYVDRGYYSVETVTLLVALKVRYRERITILRGNHESRQITQVYGFYDECLRKYGNANVWKYFTDLFDYLPLTALVDGQIFCLHGGLSPSIDTLDHIRALDRLQEVPH

SEQ ID NO: 68689 - protein, 309 aa, Homo sapiens
  Payload ID: 13674
  Gene Symbol: PPP2CB
  Gene Name: protein phosphatase 2, catalytic subunit, beta isozyme
  Uniprot ID: P62714
  ENSP ID: ENSP00000221138
MDDKAFTKELDQWVEQLNECKQLNENQVRTLCEKAKEILTKESNVQEVRCPVTVCGDVHGQFHDLMELFRIGGKSPDTNYLFMGDYVDRGYYSVETVTLLVALKVRYPERITILRGNHESRQITQVYGFYDECLRKYGNANVWKYFTDLFDYLPLTALVDGQIFCLHGGLSPSIDTLDHIRALDRLQEVPHEGPMCDLLWSDPDDRGGWGISPRGAGYTFGQDISETFNHANGLTLVSRAHQLVMEGYNWCHDRNVVTIFSAPNYCYRCGNQAAIMELDDTLKYSFLQFDPAPRRGEPHVTRRTPDYFL

SEQ ID NO: 68690 - protein, 47 aa, Homo sapiens
  Payload ID: 13674
  Gene Symbol: PPP2CB
  Gene Name: protein phosphatase 2, catalytic subunit, beta isozyme
  ENSP ID: ENSP00000428142
MDDKAFTKELDQWVEQLNECKQLNENQVRTLCEKAKEILTKESNVQE

SEQ ID NO: 68691 - protein, 184 aa, Homo sapiens
  Payload ID: 13674
  Gene Symbol: PPP2CB
  Gene Name: protein phosphatase 2, catalytic subunit, beta isozyme
  ENSP ID: ENSP00000428618
MTETRREGRERAREGERQVGRGRIGGKSPDTNYLFMGDYVDRGYYSVETVTLLVALKVRYPERITILRGNHESRQITQVYGFYDECLRKYGNANVWKYFTDLFDYLPLTALVDGQIFCLHGGLSPSIDTLDHIRALDRLQEVPHEGPMCDLLWSDPDDRGGWGISPRGAGYTFGQDISETFNHA

SEQ ID NO: 68692 - protein, 125 aa, Homo sapiens
  Payload ID: 13674
  Gene Symbol: PPP2CB
  Gene Name: protein phosphatase 2, catalytic subunit, beta isozyme
  ENSP ID: ENSP00000428866
MELFRIGGKSPDTNYLFMGDYVDRGYYSVETVTLLVALKVRYPERITILRGNHESRQITQVYGFYDECLRKYGNANVWKYFTDLFDYLPLTALVDGQIFCLHGGLSPSIDTLDHIRALDRLQEVP

SEQ ID NO: 68693 - protein, 52 aa, Homo sapiens
  Payload ID: 13674
  Gene Symbol: PPP2CB
  Gene Name: protein phosphatase 2, catalytic subunit, beta isozyme
  ENSP ID: ENSP00000429927
  MOD_RES (1)..(1): Any amino acid
XIFSAPNYCYRCGNQAAIMELDDTLKYSFLQFDPAPRRGEPHVTRRTPDYFL

SEQ ID NO: 68694 - protein, 124 aa, Homo sapiens
  Payload ID: 13674
  Gene Symbol: PPP2CB
  Gene Name: protein phosphatase 2, catalytic subunit, beta isozyme
  ENSP ID: ENSP00000430758
IFCLHGGLSPSIDTLDHIRALDRLQEVPHEGPMCDLLWSDPDDRGGWGISPRGAGYTFGQDISETFNHANGLTLVSRAHQLVMEGYNWCHDRNVVTIFSAPNYCYRCGNQAAIMELDDTLKYSL

SEQ ID NO: 68695 - protein, 589 aa, Homo sapiens
  Payload ID: 13675
  Gene Symbol: PPP2R1A
  Gene Name: protein phosphatase 2, regulatory subunit A, alpha
  Uniprot ID: P30153
  ENSP ID: ENSP00000324804
MAAADGDDSLYPIAVLIDELRNEDVQLRLNSIKKLSTIALALGVERTRSELLPFLTDTIYDEDEVLLALAEQLGTFTTLVGGPEYVHCLLPPLESLATVEETVVRDKAVESLRAISHEHSPSDLEAHFVPLVKRLAGGDWFTSRTSACGLFSVCYPRVSSAVKAELRQYFRNLCSDDTPMVRRAAASKLGEFAKVLELDNVKSEIIPMFSNLASDEQDSVRLLAVEACVNIAQLLPQEDLEALVMPTLRQAAEDKSWRVRYMVADKFTELQKAVGPEITKTDLVPAFQNLMKDCEAEVRAAASHKVKEFCENLSADCRENVIMSQILPCIKELVSDANQHVKSALASVIMGLSPILGKDNTIEHLLPLFLAQLKDECPEVRLNIISNLDCVNEVIGIRQLSQSLLPAIVELAEDAKWRVRLAIIEYMPLLAGQLGVEFFDEKLNSLCMAWLVDHVYAIREAATSNLKKLVEKFGKEWAHATIIPKVLAMSGDPNYLHRMTTLFCINVLSEVCGQDITTKHMLPTVLRMAGDPVANVRFNVAKSLQKIGPILDNSTLQSEVKPILEKLTQDQDVDVKYFAQEALTVLSLA

SEQ ID NO: 68696 - protein, 132 aa, Homo sapiens
  Payload ID: 13675
  Gene Symbol: PPP2R1A
  Gene Name: protein phosphatase 2, regulatory subunit A, alpha
  ENSP ID: ENSP00000375668
  MOD_RES (1)..(1): Any amino acid
XAIREAATSNLKKLVEKFGKEWAHATIIPKVLAMSGDPNYLHRMTTLFCINVLSEVCGQDITTKHMLPTVLRMAGDPVANVRFNVAKSLQKIGPILDNSTLQSEVKPILEKLTQDQDVDVKYFAQEALTGKT

SEQ ID NO: 68697 - protein, 395 aa, Homo sapiens
  Payload ID: 13675
  Gene Symbol: PPP2R1A
  Gene Name: protein phosphatase 2, regulatory subunit A, alpha
  ENSP ID: ENSP00000391905
MAAADGDDSLYPIAVLIDELRNEDVQVRRLRGTWGRRGGVPGGTGGPRGEDSAFAGSGGRGRRPISLRLNSIKKLSTIALALGVERTRSELLPFLTDTIYDEDEVLLALAEQLGTFTTLVGGPEYVHCLLPPLESLATVEETVVRDKAVESLRAISHEHSPSDLEAHFVPLVKRLAGGDWFTSRTSACGLFSVCYPRVSSAVKAELRQYFRNLCSDDTPMVRRAAASKLGEFAKVLELDNVKSEIIPMFSNLASDEQDSVRLLAVEACVNIAQLLPQEDLEALVMPTLRQAAEDKSWRVRYMVADKFTELQKAVGPEITKTDLVPAFQNLMKDCEAEVRAAASHKVKEFCENLSADCRENVIMSQILPCIKELVSDANQHVKSALASVIMGLSPI

SEQ ID NO: 68698 - protein, 38 aa, Homo sapiens
  Payload ID: 13675
  Gene Symbol: PPP2R1A
  Gene Name: protein phosphatase 2, regulatory subunit A, alpha
  ENSP ID: ENSP00000469150
MAAADGDDSLYPIAVLIDELRNEDVQCWELLIIGEASW

SEQ ID NO: 68699 - protein, 410 aa, Homo sapiens
  Payload ID: 13675
  Gene Symbol: PPP2R1A
  Gene Name: protein phosphatase 2, regulatory subunit A, alpha
  ENSP ID: ENSP00000470504
MVRRAAASKLGEFAKVLELDNVKSEIIPMFSNLASDEQDSVRLLAVEACVNIAQLLPQEDLEALVMPTLRQAAEDKSWRVRYMVADKFTELQKAVGPEITKTDLVPAFQNLMKDCEAEVRAAASHKVKEFCENLSADCRENVIMSQILPCIKELVSDANQHVKSALASVIMGLSPILGKDNTIEHLLPLFLAQLKDECPEVRLNIISNLDCVNEVIGIRQLSQSLLPAIVELAEDAKWRVRLAIIEYMPLLAGQLGVEFFDEKLNSLCMAWLVDHVYAIREAATSNLKKLVEKFGKEWAHATIIPKVLAMSGDPNYLHRMTTLFCINVLSEVCGQDITTKHMLPTVLRMAGDPVANVRFNVAKSLQKIGPILDNSTLQSEVKPILEKLTQDQDVDVKYFAQEALTVLSLA

SEQ ID NO: 68700 - protein, 66 aa, Homo sapiens
  Payload ID: 13675
  Gene Symbol: PPP2R1A
  Gene Name: protein phosphatase 2, regulatory subunit A, alpha
  ENSP ID: ENSP00000471298
MAAADGDDSLYPIAVLIDELRNEDVQRRGFTMLARLGRELLTSSDPPASASQSVGITGVSHRAQPG

SEQ ID NO: 68701 - protein, 38 aa, Homo sapiens; identical to SEQ ID NO: 68698
  Payload ID: 13675
  Gene Symbol: PPP2R1A
  Gene Name: protein phosphatase 2, regulatory subunit A, alpha
  ENSP ID: ENSP00000485914

SEQ ID NO: 68702 - protein, 667 aa, Homo sapiens
  Payload ID: 13676
  Gene Symbol: PPP2R1B
  Gene Name: protein phosphatase 2, regulatory subunit A, beta
  Uniprot ID: P30154
  ENSP ID: ENSP00000311344
MAGASELGTGPGAAGGDGDDSLYPIAVLIDELRNEDVQLRLNSIKKLSTIALALGVERTRSELLPFLTDTIYDEDEVLLALAEQLGNFTGLVGGPDFAHCLLPPLENLATVEETVVRDKAVESLRQISQEHTPVALEAYFVPLVKRLASGDWFTSRTSACGLFSVCYPRASNAVKAEIRQQFRSLCSDDTPMVRRAAASKLGEFAKVLELDSVKSEIVPLFTSLASDEQDSVRLLAVEACVSIAQLLSQDDLETLVMPTLRQAAEDKSWRVRYMVADRFSELQKAMGPKITLNDLIPAFQNLLKDCEAEVRAAAAHKVKELGENLPIEDRETIIMNQILPYIKELVSDTNQHVKSALASVIMGLSTILGKENTIEHLLPLFLAQLKDECPDVRLNIISNLDCVNEVIGIRQLSQSLLPAIVELAEDAKWRVRLAIIEYMPLLAGQLGVEFFDEKLNSLCMAWLVDHVYAIREAATNNLMKLVQKFGTEWAQNTIVPKVLVMANDPNYLHRMTTLFCINALSEACGQEITTKQMLPIVLKMAGDQVANVRFNVAKSLQKIGPILDTNALQGEVKPVLQKLGQDEDMDVKYFAQEAISVVAQRLRKLEFPVKDSGEPSVPRADKNHFPRPTVPGEDMGKGPVYQLRGDTRDTLAQLGIAELVHFSQSTD

SEQ ID NO: 68703 - protein, 556 aa, Homo sapiens
  Payload ID: 13676
  Gene Symbol: PPP2R1B
  Gene Name: protein phosphatase 2, regulatory subunit A, beta
  Uniprot ID: P30154
  ENSP ID: ENSP00000343317
MAGASELGTGPGAAGGDGDDSLYPIAVLIDELRNEDVQLRLNSIKKLSTIALALGVERTRSELLPFLTDTIYDEDEVLLALAEQLGNFTGLVGGPDFAHCLLPPLENLATVEETVVRDKAVESLRQISQEHTPVALEAYFVPLVKRLASGDWFTSRTSACGLFSVCYPRASNAVKAEIRQQFRSLCSDDTPMVRRAAASKLGEFAKVLELDSVKSEIVPLFTSLASDEQDSVRLLAVEACVSIAQLLSQDDLETLVMPTLRQAAEDKSWRVRYMVADRFSELQKAMGPKITLNDLIPAFQNLLKDCEAEVRAAAAHKVKELGENLPIEDRETIIMNQILPYIKCPDVRLNIISNLDCVNEVIGIRQLSQSLLPAIVELAEDAKWRVRLAIIEYMPLLAGQLGVEFFDEKLNSLCMAWLVDHVYAIREAATNNLMKLVQKFGTEWAQNTIVPKVLVMANDPNYLHRMTTLFCINALSEACGQEITTKQMLPIVLKMAGDQVANVRFNVAKSLQKIGPILDTNALQGEVKPVLQKLGQDEDMDVKYFAQEAISVLALA

SEQ ID NO: 68704 - protein, 474 aa, Homo sapiens
  Payload ID: 13676
  Gene Symbol: PPP2R1B
  Gene Name: protein phosphatase 2, regulatory subunit A, beta
  Uniprot ID: P30154
  ENSP ID: ENSP00000376775
MAGASELGTGPGAAGGDGDDSLYPIAVLIDELRNEDVQLRLNSIKKLSTIALALGVERTRSELLPFLTDTIYDEDEVLLALAEQLGNFTGLVGGPDFAHCLLDSVRLLAVEACVSIAQLLSQDDLETLVMPTLRQAAEDKSWRVRYMVADRFSELQKAMGPKITLNDLIPAFQNLLKDCEAEVRAAAAHKVKELGENLPIEDRETIIMNQILPYIKELVSDTNQHVKSALASVIMGLSTILGKENTIEHLLPLFLAQLKDECPDVRLNIISNLDCVNEVIGIRQLSQSLLPAIVELAEDAKWRVRLAIIEYMPLLAGQLGVEFFDEKLNSLCMAWLVDHVYAIREAATNNLMKLVQKFGTEWAQNTIVPKVLVMANDPNYLHRMTTLFCINALSEACGQEITTKQMLPIVLKMAGDQVANVRFNVAKSLQKIGPILDTNALQGEVKPVLQKLGQDEDMDVKYFAQEAISVLALA

SEQ ID NO: 68705 - protein, 603 aa, Homo sapiens
  Payload ID: 13676
  Gene Symbol: PPP2R1B
  Gene Name: protein phosphatase 2, regulatory subunit A, beta
  Uniprot ID: P30154
  ENSP ID: ENSP00000410671
MAGASELGTGPGAAGGDGDDSLYPIAVLIDELRNEDVQPPLENLATVEETVVRDKAVESLRQISQEHTPVALEAYFVPLVKRLASGDWFTSRTSACGLFSVCYPRASNAVKAEIRQQFRSLCSDDTPMVRRAAASKLGEFAKVLELDSVKSEIVPLFTSLASDEQDSVRLLAVEACVSIAQLLSQDDLETLVMPTLRQAAEDKSWRVRYMVADRFSELQKAMGPKITLNDLIPAFQNLLKDCEAEVRAAAAHKVKELGENLPIEDRETIIMNQILPYIKELVSDTNQHVKSALASVIMGLSTILGKENTIEHLLPLFLAQLKDECPDVRLNIISNLDCVNEVIGIRQLSQSLLPAIVELAEDAKWRVRLAIIEYMPLLAGQLGVEFFDEKLNSLCMAWLVDHVYAIREAATNNLMKLVQKFGTEWAQNTIVPKVLVMANDPNYLHRMTTLFCINALSEACGQEITTKQMLPIVLKMAGDQVANVRFNVAKSLQKIGPILDTNALQGEVKPVLQKLGQDEDMDVKYFAQEAISVVAQRLRKLEFPVKDSGEPSVPRADKNHFPRPTVPGEDMGKGPVYQLRGDTRDTLAQLGIAELVHFSQSTD

SEQ ID NO: 68706 - protein, 83 aa, Homo sapiens
  Payload ID: 13676
  Gene Symbol: PPP2R1B
  Gene Name: protein phosphatase 2, regulatory subunit A, beta
  ENSP ID: ENSP00000432666
MAGASELGTGPGAAGGDGDDSLYPIAVLIDELRNEDVQLRLNSIKKLSTIALALGVERTRSELLPFLTASFGKSGNCGRDCCS

SEQ ID NO: 68707 - protein, 224 aa, Homo sapiens
  Payload ID: 13676
  Gene Symbol: PPP2R1B
  Gene Name: protein phosphatase 2, regulatory subunit A, beta
  ENSP ID: ENSP00000433598
  MOD_RES (1)..(1): Any amino acid
XNLLKDCEAEVRAAAAHKVKELGENLPIEDRETIIMNQILPYIKELVSDTNQHVKSALASVIMGLSTILGKENTIEHLLPLFLAQLKDECPDVRLNIISNLDCVNEVIGIRQLSQSLLPAIVELAEDAKWRVRLAIIEYMPLLAGQLALSEACGQEITTKQMLPIVLKMAGDQVANVRFNVAKSLQKIGPILDTNALQGEVKPVLQKLGQDEDMDVKYFAQEAI

SEQ ID NO: 68708 - protein, 119 aa, Homo sapiens
  Payload ID: 13676
  Gene Symbol: PPP2R1B
  Gene Name: protein phosphatase 2, regulatory subunit A, beta
  ENSP ID: ENSP00000434705
MPRSPLKCPWIPSSRLGTGSACWLRLNSIKKLSTIALALGVERTRSELLPFLTDTIYDEDEVLLALAEQLGNFTGLVGGPDFAHCLLPPLENLATVEETVVRDKAVESLRQISQEHTPV

SEQ ID NO: 68709 - protein, 135 aa, Homo sapiens
  Payload ID: 13676
  Gene Symbol: PPP2R1B
  Gene Name: protein phosphatase 2, regulatory subunit A, beta
  ENSP ID: ENSP00000436626
MAGASELGTGPGAAGGDGDDSLYPIAVLIDELRNEDVQLRLNSIKKLSTIALALGVERTRSELLPFLTDTIYDEDEVLLALAEQLGNFTGLVGGPDFAHCLLTPSGNCHLGHEILAFLQKSCLWVGRTICYHCVS

SEQ ID NO: 68710 - protein, 601 aa, Homo sapiens
  Payload ID: 13676
  Gene Symbol: PPP2R1B
  Gene Name: protein phosphatase 2, regulatory subunit A, beta
  Uniprot ID: P30154
  ENSP ID: ENSP00000437193
MAGASELGTGPGAAGGDGDDSLYPIAVLIDELRNEDVQLRLNSIKKLSTIALALGVERTRSELLPFLTDTIYDEDEVLLALAEQLGNFTGLVGGPDFAHCLLPPLENLATVEETVVRDKAVESLRQISQEHTPVALEAYFVPLVKRLASGDWFTSRTSACGLFSVCYPRASNAVKAEIRQQFRSLCSDDTPMVRRAAASKLGEFAKVLELDSVKSEIVPLFTSLASDEQDSVRLLAVEACVSIAQLLSQDDLETLVMPTLRQAAEDKSWRVRYMVADRFSELQKAMGPKITLNDLIPAFQNLLKDCEAEVRAAAAHKVKELGENLPIEDRETIIMNQILPYIKELVSDTNQHVKSALASVIMGLSTILGKENTIEHLLPLFLAQLKDECPDVRLNIISNLDCVNEVIGIRQLSQSLLPAIVELAEDAKWRVRLAIIEYMPLLAGQLGVEFFDEKLNSLCMAWLVDHVYAIREAATNNLMKLVQKFGTEWAQNTIVPKVLVMANDPNYLHRMTTLFCINALSEACGQEITTKQMLPIVLKMAGDQVANVRFNVAKSLQKIGPILDTNALQGEVKPVLQKLGQDEDMDVKYFAQEAISVLALA

SEQ ID NO: 68711 - protein, 457 aa, Homo sapiens
  Payload ID: 13677
  Gene Symbol: PPP2R2A
  Gene Name: protein phosphatase 2, regulatory subunit B, alpha
  Uniprot ID: P63151
  ENSP ID: ENSP00000325074
MFPKFSLRSMFHGAGGGNDIQWCFSQVKGAVDDDVAEADIISTVEFNHSGELLATGDKGGRVVIFQQEQENKIQSHSRGEYNVYSTFQSHEPEFDYLKSLEIEEKINKIRWLPQKNAAQFLLSTNDKTIKLWKISERDKRPEGYNLKEEDGRYRDPTTVTTLRVPVFRPMDLMVEASPRRIFANAHTYHINSISINSDYETYLSADDLRINLWHLEITDRSFNIVDIKPANMEELTEVITAAEFHPNSCNTFVYSSSKGTIRLCDMRASALCDRHSKLFEEPEDPSNRSFFSEIISSISDVKFSHSGRYMMTRDYLSVKIWDLNMENRPVETYQVHEYLRSKLCSLYENDCIFDKFECCWNGSDSVVMTGSYNNFFRMFDRNTKRDITLEASRENNKPRTVLKPRKVCASGKRKKDEISVDSLDFNKKILHTAWHPKENIIAVATTNNLYIFQDKVN

SEQ ID NO: 68712 - protein, 447 aa, Homo sapiens
  Payload ID: 13677
  Gene Symbol: PPP2R2A
  Gene Name: protein phosphatase 2, regulatory subunit B, alpha
  Uniprot ID: P63151
  ENSP ID: ENSP00000370113
MAGAGGGNDIQWCFSQVKGAVDDDVAEADIISTVEFNHSGELLATGDKGGRVVIFQQEQENKIQSHSRGEYNVYSTFQSHEPEFDYLKSLEIEEKINKIRWLPQKNAAQFLLSTNDKTIKLWKISERDKRPEGYNLKEEDGRYRDPTTVTTLRVPVFRPMDLMVEASPRRIFANAHTYHINSISINSDYETYLSADDLRINLWHLEITDRSFNIVDIKPANMEELTEVITAAEFHPNSCNTFVYSSSKGTIRLCDMRASALCDRHSKLFEEPEDPSNRSFFSEIISSISDVKFSHSGRYMMTRDYLSVKIWDLNMENRPVETYQVHEYLRSKLCSLYENDCIFDKFECCWNGSDSVVMTGSYNNFFRMFDRNTKRDITLEASRENNKPRTVLKPRKVCASGKRKKDEISVDSLDFNKKILHTAWHPKENIIAVATTNNLYIFQDKVN

SEQ ID NO: 68713 - protein, 51 aa, Homo sapiens
  Payload ID: 13677
  Gene Symbol: PPP2R2A
  Gene Name: protein phosphatase 2, regulatory subunit B, alpha
  ENSP ID: ENSP00000428164
MAGAGGGNDIQWCFSQVKGAVDDDVAEGKKAFNAKFGYIIFAEMFPTGGFP

SEQ ID NO: 68714 - protein, 14 aa, Homo sapiens
  Payload ID: 13677
  Gene Symbol: PPP2R2A
  Gene Name: protein phosphatase 2, regulatory subunit B, alpha
  ENSP ID: ENSP00000428165
MDLMVEASPRRIFA

SEQ ID NO: 68715 - protein, 33 aa, Homo sapiens
  Payload ID: 13677
  Gene Symbol: PPP2R2A
  Gene Name: protein phosphatase 2, regulatory subunit B, alpha
  ENSP ID: ENSP00000428542
MAGAGGGNDIQWCFSQVKGAVDDDVAEDHLFET

SEQ ID NO: 68716 - protein, 3 aa, Homo sapiens
  Payload ID: 13677
  Gene Symbol: PPP2R2A
  Gene Name: protein phosphatase 2, regulatory subunit B, alpha
  ENSP ID: ENSP00000428705
MDL

SEQ ID NO: 68717 - protein, 5 aa, Homo sapiens
  Payload ID: 13677
  Gene Symbol: PPP2R2A
  Gene Name: protein phosphatase 2, regulatory subunit B, alpha
  ENSP ID: ENSP00000428800
MDLMV

SEQ ID NO: 68718 - protein, 132 aa, Homo sapiens
  Payload ID: 13677
  Gene Symbol: PPP2R2A
  Gene Name: protein phosphatase 2, regulatory subunit B, alpha
  ENSP ID: ENSP00000429279
MAGAGGGNDIQWCFSQVKGAVDDDVAEADIISTVEFNHSGELLATGDKGGRVVIFQQEQENKIQSHSRGEYNVYSTFQSHEPEFDYLKSLEIEEKINKIRWLPQKNAAQFLLSTNVQAGFSDSLPKNRIWQG

SEQ ID NO: 68719 - protein, 197 aa, Homo sapiens
  Payload ID: 13677
  Gene Symbol: PPP2R2A
  Gene Name: protein phosphatase 2, regulatory subunit B, alpha
  ENSP ID: ENSP00000430320
MEELTEVITAAEFHPNSCNTFVYSSSKGTIRLCDMRASALCDRHSKLFEEPEDPSNRSFFSEIISSISDVKFSHSGRYMMTRDYLSVKIWDLNMENRPVETYQVHEYLRSKLCSLYENDCIFDKFECCWNGSDSVVMTGSYNNFFRMFDRNTKRDITLEASRENNKPRTVLKPRKVCASGKRKKDEISVDSLDFNKK

SEQ ID NO: 68720 - protein, 33 aa, Homo sapiens
  Payload ID: 13677
  Gene Symbol: PPP2R2A
  Gene Name: protein phosphatase 2, regulatory subunit B, alpha
  ENSP ID: ENSP00000486025
FPGAGGGNDIQWCFSQVKGAVDDDVAEVGIFQT

SEQ ID NO: 68721 - protein, 486 aa, Homo sapiens
  Payload ID: 13678
  Gene Symbol: PPP2R5A
  Gene Name: protein phosphatase 2, regulatory subunit B', alpha
  Uniprot ID: Q15172
  ENSP ID: ENSP00000261461
MSSSSPPAGAASAAISASEKVDGFTRKSVRKAQRQKRSQGSSQFRSQGSQAELHPLPQLKDATSNEQQELFCQKLQQCCILFDFMDSVSDLKSKEIKRATLNELVEYVSTNRGVIVESAYSDIVKMISANIFRTLPPSDNPDFDPEEDEPTLEASWPHIQLVYEFFLRFLESPDFQPSIAKRYIDQKFVQQLLELFDSEDPRERDFLKTVLHRIYGKFLGLRAFIRKQINNIFLRFIYETEHFNGVAELLEILGSIINGFALPLKAEHKQFLMKVLIPMHTAKGLALFHAQLAYCVVQFLEKDTTLTEPVIRGLLKFWPKTCSQKEVMFLGEIEEILDVIEPTQFKKIEEPLFKQISKCVSSSHFQVAERALYFWNNEYILSLIEENIDKILPIMFASLYKISKEHWNPTIVALVYNVLKTLMEMNGKLFDDLTSSYKAERQREKKKELEREELWKKLEELKLKKALEKQNSAYNMHSILSNTSAE

SEQ ID NO: 68722 - protein, 429 aa, Homo sapiens
  Payload ID: 13678
  Gene Symbol: PPP2R5A
  Gene Name: protein phosphatase 2, regulatory subunit B', alpha
  Uniprot ID: Q15172
  ENSP ID: ENSP00000442866
MIMNATSNEQQELFCQKLQQCCILFDFMDSVSDLKSKEIKRATLNELVEYVSTNRGVIVESAYSDIVKMISANIFRTLPPSDNPDFDPEEDEPTLEASWPHIQLVYEFFLRFLESPDFQPSIAKRYIDQKFVQQLLELFDSEDPRERDFLKTVLHRIYGKFLGLRAFIRKQINNIFLRFIYETEHFNGVAELLEILGSIINGFALPLKAEHKQFLMKVLIPMHTAKGLALFHAQLAYCVVQFLEKDTTLTEPVIRGLLKFWPKTCSQKEVMFLGEIEEILDVIEPTQFKKIEEPLFKQISKCVSSSHFQVAERALYFWNNEYILSLIEENIDKILPIMFASLYKISKEHWNPTIVALVYNVLKTLMEMNGKLFDDLTSSYKAERQREKKKELEREELWKKLEELKLKKALEKQNSAYNMHSILSNTSAE

SEQ ID NO: 68723 - protein, 1150 aa, Homo sapiens
  Payload ID: 13679
  Gene Symbol: PPP2R3A
  Gene Name: protein phosphatase 2, regulatory subunit B'', alpha
  Uniprot ID: Q06190
  ENSP ID: ENSP00000264977
MAATYRLVVSTVNHYSSVVIDRRFEQAIHYCTGTCHTFTHGIDCIVVHHSVCADLLHIPVSQFKDADLNSMFLPHENGLSSAEGDYPQQAFTGIPRVKRGSTFQNTYNLKDIAGEAISFASGKIKEFSFEKLKNSNHAAYRKGRKVKSDSFNRRSVDLDLLCGHYNNDGNAPSFGLLRSSSVEEKPLSHRNSLDTNLTSMFLQNFSEEDLVTQILEKHKIDNFSSGTDIKMCLDILLKCSEDLKKCTDIIKQCIKKKSGSSISEGSGNDTISSSETVYMNVMTRLASYLKKLPFEFMQSGNNEALDLTELISNMPSLQLTPFSPVFGTEQPPKYEDVVQLSASDSGRFQTIELQNDKPNSRKMDTVQSIPNNSTNSLYNLEVNDPRTLKAVQVQSQSLTMNPLENVSSDDLMETLYIEEESDGKKALDKGQKTENGPSHELLKVNEHRAEFPEHATHLKKCPTPMQNEIGKIFEKSFVNLPKEDCKSKVSKFEEGDQRDFTNSSSQEEIDKLLMDLESFSQKMETSLREPLAKGKNSNFLNSHSQLTGQTLVDLEPKSKVSSPIEKVSPSCLTRIIETNGHKIEEEDRALLLRILESIEDFAQELVECKSSRGSLSQEKEMMQILQETLTTSSQANLSVCRSPVGDKAKDTTSAVLIQQTPEVIKIQNKPEKKPGTPLPPPATSPSSPRPLSPVPHVNNVVNAPLSINIPRFYFPEGLPDTCSNHEQTLSRIETAFMDIEEQKADIYEMGKIAKVCGCPLYWKAPMFRAAGGEKTGFVTAQSFIAMWRKLLNNHHDDASKFICLLAKPNCSSLEQEDFIPLLQDVVDTHPGLTFLKDAPEFHSRYITTVIQRIFYTVNRSWSGKITSTEIRKSNFLQTLALLEEEEDINQITDYFSYEHFYVIYCKFWELDTDHDLYISQADLSRYNDQASSSRIIERIFSGAVTRGKTIQKEGRMSYADFVWFLISEEDKRNPTSIEYWFRCMDVDGDGVLSMYELEYFYEEQCERMEAMGIEPLPFHDLLCQMLDLVKPAVDGKITLRDLKRCRMAHIFYDTFFNLEKYLDHEQRDPFAVQKDVENDGPEPSDWDRFAAEEYETLVAEESAQAQFQEGFEDYETDEPASPSEFGNKSNKILSASLPEKCGKLQSVDEE

SEQ ID NO: 68724 - protein, 529 aa, Homo sapiens
  Payload ID: 13679
  Gene Symbol: PPP2R3A
  Gene Name: protein phosphatase 2, regulatory subunit B'', alpha
  Uniprot ID: Q06190
  ENSP ID: ENSP00000334748
MMIKETSLRRDPDLRGELAFLARGCDFVLPSRFKKRLKSFQQTQIQNKPEKKPGTPLPPPATSPSSPRPLSPVPHVNNVVNAPLSINIPRFYFPEGLPDTCSNHEQTLSRIETAFMDIEEQKADIYEMGKIAKVCGCPLYWKAPMFRAAGGEKTGFVTAQSFIAMWRKLLNNHHDDASKFICLLAKPNCSSLEQEDFIPLLQDVVDTHPGLTFLKDAPEFHSRYITTVIQRIFYTVNRSWSGKITSTEIRKSNFLQTLALLEEEEDINQITDYFSYEHFYVIYCKFWELDTDHDLYISQADLSRYNDQASSSRIIERIFSGAVTRGKTIQKEGRMSYADFVWFLISEEDKRNPTSIEYWFRCMDVDGDGVLSMYELEYFYEEQCERMEAMGIEPLPFHDLLCQMLDLVKPAVDGKITLRDLKRCRMAHIFYDTFFNLEKYLDHEQRDPFAVQKDVENDGPEPSDWDRFAAEEYETLVAEESAQAQFQEGFEDYETDEPASPSEFGNKSNKILSASLPEKCGKLQSVDEE

SEQ ID NO: 68725 - protein, 191 aa, Homo sapiens
  Payload ID: 13679
  Gene Symbol: PPP2R3A
  Gene Name: protein phosphatase 2, regulatory subunit B'', alpha
  ENSP ID: ENSP00000400980
  MOD_RES (1)..(1): Any amino acid
XNIPRFYFPEGLPDTCSNHEQTLSRIETAFMDIEEQKADIYEMGKIAKVCGCPLYWKAPMFRAAGGEKTGFVTAQSFIAMWRKLLNNHHDDASKFICLLAKPNCSSLEQEDFIPLLQDVVDTHPGLTFLKDAPEFHSRYITTVIQRIFYTVNRSWSGKITSTEIRKSNFLQSNEDLAKLAVHDGYTNIFLF

SEQ ID NO: 68726 - protein, 414 aa, Homo sapiens
  Payload ID: 13679
  Gene Symbol: PPP2R3A
  Gene Name: protein phosphatase 2, regulatory subunit B'', alpha
  Uniprot ID: Q06190
  ENSP ID: ENSP00000419344
MDIEEQKADIYEMGKIAKVCGCPLYWKAPMFRAAGGEKTGFVTAQSFIAMWRKLLNNHHDDASKFICLLAKPNCSSLEQEDFIPLLQDVVDTHPGLTFLKDAPEFHSRYITTVIQRIFYTVNRSWSGKITSTEIRKSNFLQTLALLEEEEDINQITDYFSYEHFYVIYCKFWELDTDHDLYISQADLSRYNDQASSSRIIERIFSGAVTRGKTIQKEGRMSYADFVWFLISEEDKRNPTSIEYWFRCMDVDGDGVLSMYELEYFYEEQCERMEAMGIEPLPFHDLLCQMLDLVKPAVDGKITLRDLKRCRMAHIFYDTFFNLEKYLDHEQRDPFAVQKDVENDGPEPSDWDRFAAEEYETLVAEESAQAQFQEGFEDYETDEPASPSEFGNKSNKILSASLPEKCGKLQSVDEE

SEQ ID NO: 68727 - protein, 446 aa, Homo sapiens
  Payload ID: 13680
  Gene Symbol: PPP2R2B
  Gene Name: protein phosphatase 2, regulatory subunit B, beta
  Uniprot ID: Q00005
  ENSP ID: ENSP00000336591
MKCFSRYLPYIFRPPNTILSSSCHTEADIISTVEFNHTGELLATGDKGGRVVIFQREQESKNQVHRRGEYNVYSTFQSHEPEFDYLKSLEIEEKINKIRWLPQQNAAYFLLSTNDKTVKLWKVSERDKRPEGYNLKDEEGRLRDPATITTLRVPVLRPMDLMVEATPRRVFANAHTYHINSISVNSDYETYMSADDLRINLWNFEITNQSFNIVDIKPANMEELTEVITAAEFHPHHCNTFVYSSSKGTIRLCDMRASALCDRHTKFFEEPEDPSNRSFFSEIISSISDVKFSHSGRYIMTRDYLTVKVWDLNMENRPIETYQVHDYLRSKLCSLYENDCIFDKFECVWNGSDSVIMTGSYNNFFRMFDRNTKRDVTLEASRENSKPRAILKPRKVCVGGKRRKDEISVDSLDFSKKILHTAWHPSENIIAVAATNNLYIFQDKVN

SEQ ID NO: 68728 - protein, 443 aa, Homo sapiens
  Payload ID: 13680
  Gene Symbol: PPP2R2B
  Gene Name: protein phosphatase 2, regulatory subunit B, beta
  Uniprot ID: Q00005
  ENSP ID: ENSP00000377931
MEEDIDTRKINNSFLRDHSYATEADIISTVEFNHTGELLATGDKGGRVVIFQREQESKNQVHRRGEYNVYSTFQSHEPEFDYLKSLEIEEKINKIRWLPQQNAAYFLLSTNDKTVKLWKVSERDKRPEGYNLKDEEGRLRDPATITTLRVPVLRPMDLMVEATPRRVFANAHTYHINSISVNSDYETYMSADDLRINLWNFEITNQSFNIVDIKPANMEELTEVITAAEFHPHHCNTFVYSSSKGTIRLCDMRASALCDRHTKFFEEPEDPSNRSFFSEIISSISDVKFSHSGRYIMTRDYLTVKVWDLNMENRPIETYQVHDYLRSKLCSLYENDCIFDKFECVWNGSDSVIMTGSYNNFFRMFDRNTKRDVTLEASRENSKPRAILKPRKVCVGGKRRKDEISVDSLDFSKKILHTAWHPSENIIAVAATNNLYIFQDKVN

SEQ ID NO: 68729 - protein, 443 aa, Homo sapiens; identical to SEQ ID NO: 68728
  Payload ID: 13680
  Gene Symbol: PPP2R2B
  Gene Name: protein phosphatase 2, regulatory subunit B, beta
  Uniprot ID: Q00005
  ENSP ID: ENSP00000377933

SEQ ID NO: 68730 - protein, 501 aa, Homo sapiens
  Payload ID: 13680
  Gene Symbol: PPP2R2B
  Gene Name: protein phosphatase 2, regulatory subunit B, beta
  Uniprot ID: Q00005
  ENSP ID: ENSP00000377935
MVLQPSERHYRDWNHRRLGPWCSPTGSPAPLSCETGCGEGSWILVCRLLVPTQVSLLSMEEDIDTRKINNSFLRDHSYATEADIISTVEFNHTGELLATGDKGGRVVIFQREQESKNQVHRRGEYNVYSTFQSHEPEFDYLKSLEIEEKINKIRWLPQQNAAYFLLSTNDKTVKLWKVSERDKRPEGYNLKDEEGRLRDPATITTLRVPVLRPMDLMVEATPRRVFANAHTYHINSISVNSDYETYMSADDLRINLWNFEITNQSFNIVDIKPANMEELTEVITAAEFHPHHCNTFVYSSSKGTIRLCDMRASALCDRHTKFFEEPEDPSNRSFFSEIISSISDVKFSHSGRYIMTRDYLTVKVWDLNMENRPIETYQVHDYLRSKLCSLYENDCIFDKFECVWNGSDSVIMTGSYNNFFRMFDRNTKRDVTLEASRENSKPRAILKPRKVCVGGKRRKDEISVDSLDFSKKILHTAWHPSENIIAVAATNNLYIFQDKVN

SEQ ID NO: 68731 - protein, 509 aa, Homo sapiens
  Payload ID: 13680
  Gene Symbol: PPP2R2B
  Gene Name: protein phosphatase 2, regulatory subunit B, beta
  Uniprot ID: Q00005
  ENSP ID: ENSP00000377936
MLLSLPALHLQTSEHHPFFQLPHRRLGPWCSPTGSPAPLSCETGCGEGSWILVCRLLVPTQVSLLSMEEDIDTRKINNSFLRDHSYATEADIISTVEFNHTGELLATGDKGGRVVIFQREQESKNQVHRRGEYNVYSTFQSHEPEFDYLKSLEIEEKINKIRWLPQQNAAYFLLSTNDKTVKLWKVSERDKRPEGYNLKDEEGRLRDPATITTLRVPVLRPMDLMVEATPRRVFANAHTYHINSISVNSDYETYMSADDLRINLWNFEITNQSFNIVDIKPANMEELTEVITAAEFHPHHCNTFVYSSSKGTIRLCDMRASALCDRHTKFFEEPEDPSNRSFFSEIISSISDVKFSHSGRYIMTRDYLTVKVWDLNMENRPIETYQVHDYLRSKLCSLYENDCIFDKFECVWNGSDSVIMTGSYNNFFRMFDRNTKRDVTLEASRENSKPRAILKPRKVCVGGKRRKDEISVDSLDFSKKILHTAWHPSENIIAVAATNNLYIFQDKVN

SEQ ID NO: 68732 - protein, 432 aa, Homo sapiens
  Payload ID: 13680
  Gene Symbol: PPP2R2B
  Gene Name: protein phosphatase 2, regulatory subunit B, beta
  Uniprot ID: Q00005
  ENSP ID: ENSP00000398779
MNYPDENTYGNKADIISTVEFNHTGELLATGDKGGRVVIFQREQESKNQVHRRGEYNVYSTFQSHEPEFDYLKSLEIEEKINKIRWLPQQNAAYFLLSTNDKTVKLWKVSERDKRPEGYNLKDEEGRLRDPATITTLRVPVLRPMDLMVEATPRRVFANAHTYHINSISVNSDYETYMSADDLRINLWNFEITNQSFNIVDIKPANMEELTEVITAAEFHPHHCNTFVYSSSKGTIRLCDMRASALCDRHTKFFEEPEDPSNRSFFSEIISSISDVKFSHSGRYIMTRDYLTVKVWDLNMENRPIETYQVHDYLRSKLCSLYENDCIFDKFECVWNGSDSVIMTGSYNNFFRMFDRNTKRDVTLEASRENSKPRAILKPRKVCVGGKRRKDEISVDSLDFSKKILHTAWHPSENIIAVAATNNLYIFQDKVN

SEQ ID NO: 68733 - protein, 58 aa, Homo sapiens
  Payload ID: 13680
  Gene Symbol: PPP2R2B
  Gene Name: protein phosphatase 2, regulatory subunit B, beta
  ENSP ID: ENSP00000421224
MQNSDIISTVEFNHTGELLATGDKGGRVVIFQREQESKNQVHRRGEYNVYSTFQSHEP

SEQ ID NO: 68734 - protein, 449 aa, Homo sapiens
  Payload ID: 13680
  Gene Symbol: PPP2R2B
  Gene Name: protein phosphatase 2, regulatory subunit B, beta
  Uniprot ID: Q00005
  ENSP ID: ENSP00000421396
MIPGIGTLTQDTLWCFSQVKGTIEIGTTEADIISTVEFNHTGELLATGDKGGRVVIFQREQESKNQVHRRGEYNVYSTFQSHEPEFDYLKSLEIEEKINKIRWLPQQNAAYFLLSTNDKTVKLWKVSERDKRPEGYNLKDEEGRLRDPATITTLRVPVLRPMDLMVEATPRRVFANAHTYHINSISVNSDYETYMSADDLRINLWNFEITNQSFNIVDIKPANMEELTEVITAAEFHPHHCNTFVYSSSKGTIRLCDMRASALCDRHTKFFEEPEDPSNRSFFSEIISSISDVKFSHSGRYIMTRDYLTVKVWDLNMENRPIETYQVHDYLRSKLCSLYENDCIFDKFECVWNGSDSVIMTGSYNNFFRMFDRNTKRDVTLEASRENSKPRAILKPRKVCVGGKRRKDEISVDSLDFSKKILHTAWHPSENIIAVAATNNLYIFQDKVN

SEQ ID NO: 68735 - protein, 37 aa, Homo sapiens
  Payload ID: 13680
  Gene Symbol: PPP2R2B
  Gene Name: protein phosphatase 2, regulatory subunit B, beta
  ENSP ID: ENSP00000421577
MKCFSRYLPYIFRPPNTILSSSCHTEGRILRLGAVCL

SEQ ID NO: 68736 - protein, 49 aa, Homo sapiens
  Payload ID: 13680
  Gene Symbol: PPP2R2B
  Gene Name: protein phosphatase 2, regulatory subunit B, beta
  ENSP ID: ENSP00000424409
MKCFSRYLPYIFRPPNTILSSSCHTEGNSSFLEIGPIYTQNELKRLRCY

SEQ ID NO: 68737 - protein, 40 aa, Homo sapiens
  Payload ID: 13680
  Gene Symbol: PPP2R2B
  Gene Name: protein phosphatase 2, regulatory subunit B, beta
  ENSP ID: ENSP00000425413
MQNCSDHGAVPLAPLPPSPVRLAAGRDHGYLSAGFWFPRK

SEQ ID NO: 68738 - protein, 78 aa, Homo sapiens
  Payload ID: 13680
  Gene Symbol: PPP2R2B
  Gene Name: protein phosphatase 2, regulatory subunit B, beta
  ENSP ID: ENSP00000425828
  MOD_RES (1)..(1): Any amino acid
XGRYIMTRDYLTVKVWDLNMENRPIETYQVHDYLRSKLCSLYENDCIFDKFECVWNGSDRLGRSLHVAKDPSHTDQLV

SEQ ID NO: 68739 - protein, 44 aa, Homo sapiens
  Payload ID: 13680
  Gene Symbol: PPP2R2B
  Gene Name: protein phosphatase 2, regulatory subunit B, beta
  ENSP ID: ENSP00000426599
MEEDIDTRKINNSFLRDHSYATEGAKGEPKTENSGPIMKHELSR

SEQ ID NO: 68740 - protein, 432 aa, Homo sapiens; identical to SEQ ID NO: 68732
  Payload ID: 13680
  Gene Symbol: PPP2R2B
  Gene Name: protein phosphatase 2, regulatory subunit B, beta
  Uniprot ID: Q00005
  ENSP ID: ENSP00000431320

SEQ ID NO: 68741 - protein, 44 aa, Homo sapiens; identical to SEQ ID NO: 68739
  Payload ID: 13680
  Gene Symbol: PPP2R2B
  Gene Name: protein phosphatase 2, regulatory subunit B, beta
  ENSP ID: ENSP00000433890

SEQ ID NO: 68742 - protein, 44 aa, Homo sapiens; identical to SEQ ID NO: 68739
  Payload ID: 13680
  Gene Symbol: PPP2R2B
  Gene Name: protein phosphatase 2, regulatory subunit B, beta
  ENSP ID: ENSP00000434497

SEQ ID NO: 68743 - protein, 497 aa, Homo sapiens
  Payload ID: 13681
  Gene Symbol: PPP2R5B
  Gene Name: protein phosphatase 2, regulatory subunit B', beta
  Uniprot ID: Q15173
  ENSP ID: ENSP00000164133
METKLPPASTPTSPSSPGLSPVPPPDKVDGFSRRSLRRARPRRSHSSSQFRYQSNQQELTPLPLLKDVPASELHELLSRKLAQCGVMFDFLDCVADLKGKEVKRAALNELVECVGSTRGVLIEPVYPDIIRMISVNIFRTLPPSENPEFDPEEDEPNLEPSWPHLQLVYEFFLRFLESPDFQPSVAKRYVDQKFVLMLLELFDSEDPREREYLKTILHRVYGKFLGLRAYIRKQCNHIFLRFIYEFEHFNGVAELLEILGSIINGFALPLKTEHKQFLVRVLIPLHSVKSLSVFHAQLAYCVVQFLEKDATLTEHVIRGLLKYWPKTCTQKEVMFLGEMEEILDVIEPSQFVKIQEPLFKQVARCVSSPHFQVAERALYFWNNEYILSLIEDNCHTVLPAVFGTLYQVSKEHWNQTIVSLIYNVLKTFMEMNGKLFDELTASYKLEKQQEQQKAQERQELWQGLEELRLRRLQGTQGAKEAPLQRLTPQVAASGGQS

SEQ ID NO: 68744 - protein, 111 aa, Homo sapiens
  Payload ID: 13681
  Gene Symbol: PPP2R5B
  Gene Name: protein phosphatase 2, regulatory subunit B', beta
  ENSP ID: ENSP00000436136
MFDFLDCVADLKGKEVKRAALNELVECVGSTRGVLIEPVYPDIIRMISVNIFRTLPPSENPEFDPEEDEPNLEPSWPHLQLVYEFFLRFLESPDFQPSVAKRYVDQKFVLM

SEQ ID NO: 68745 - protein, 193 aa, Homo sapiens
  Payload ID: 13681
  Gene Symbol: PPP2R5B
  Gene Name: protein phosphatase 2, regulatory subunit B', beta
  ENSP ID: ENSP00000437088
METKLPPASTPTSPSSPGLSPVPPPDKVDGFSRRSLRRARPRRSHSSSQFRYQSNQQELTPLPLLKDVPASELHELLSRKLAQCGVMFDFLDCVADLKGKEVKRAALNELVECVGSTRGVLIEPVYPDIIRMISVNIFRTLPPSENPEFDPEEDEPNLEPSWPHLQLVYEFFLRFLESPDFQPSVAKRYVDQK

SEQ ID NO: 68746 - protein, 169 aa, Homo sapiens
  Payload ID: 13682
  Gene Symbol: PPP2R3B
  Gene Name: protein phosphatase 2, regulatory subunit B'', beta
  ENSP ID: ENSP00000371038
MERAEPGPRLQRPAGPGPALPRERGARPGPRRALRAGGMRLRERSLRQDPDLRQELASLARGCDFVLPSRFKKRLKAFQQVQTRKEEPLPPATSQSIPTFYFPRGRPQDSVNVDAVISKIESTFARFPHERATMDDMGLVAKACGCPLYWKGPLFYGAGGERTGSVSVH

SEQ ID NO: 68747 - protein, 575 aa, Homo sapiens
  Payload ID: 13682
  Gene Symbol: PPP2R3B
  Gene Name: protein phosphatase 2, regulatory subunit B'', beta
  Uniprot ID: Q9Y5P8
  ENSP ID: ENSP00000375080
MPPGKVLQPVLKMKVDELFLYWLSEASTQRMLQDCLRRIKAPGRDQPTPGDGEQPGAWPTAPLAAPRPSGLEPPGTPGPGPALPLGAASSPRNAPHVRGTRRSAGTRVVQTRKEEPLPPATSQSIPTFYFPRGRPQDSVNVDAVISKIESTFARFPHERATMDDMGLVAKACGCPLYWKGPLFYGAGGERTGSVSVHKFVAMWRKILQNCHDDAAKFVHLLMSPGCNYLVQEDFVPFLQDVVNTHPGLSFLKEASEFHSRYITTVIQRIFYAVNRSWSGRITCAELRRSSFLQNVALLEEEADINQLTEFFSYEHFYVIYCKFWELDTDHDLLIDADDLARHNDHALSTKMIDRIFSGAVTRGRKVQKEGKISYADFVWFLISEEDKKTPTSIEYWFRCMDLDGDGALSMFELEYFYEEQCRRLDSMAIEALPFQDCLCQMLDLVKPRTEGKITLQDLKRCKLANVFFDTFFNIEKYLDHEQKEQISLLRDGDSGGPELSDWEKYAAEEYDILVAEETAGEPWEDGFEAELSPVEQKLSALRSPLAQRPFFEAPSPLGAVDLYEYACGDEDLEPL

SEQ ID NO: 68748 - protein, 575 aa, Homo sapiens
  Payload ID: 13682
  Gene Symbol: PPP2R3B
  Gene Name: protein phosphatase 2, regulatory subunit B'', beta
  ENSP ID: ENSP00000480675
MPPGKVLQPVLKMKVDELFLYWLSEASTQRMLQDCLRRIKAPGRDQPTPGDGEQPGAWPTAPLAAPRPSGLEPPGTPGPGPALPLGAASSPRNAPHVRGTRRSAGTRVVQTRKEEPLPPATSQSIPTFYFPRGRPQDSVNVDAVISKIESTFARFPHERATMDDMGLVAKACGCPLYWKGPLFYGAGGERTGSVSVHKFVAMWRKILQNCHDDAAKFVHLLMSPGCNYLVQEDFVPFLQDVVNTHPGLSFLKEASEFHSRYITTVIQRIFYAVNRSWSGRITCAELRRSSFLQNVALLEEEADINQLTEFFSYEHFYVIYCKFGELDTDHDLLIDADDLARHNDHALSTKMIDRIFSGAVTRGRKVQKEGKISYADFVWFLISEEDKKTPTSIEYWFRCMDLDGDGALSMFELEYFYEEQCRRLDSMAIEALPFQDCLCQMLDLVKPRTEGKITLQDLKRCKLANVFFDTFFNIEKYLDHEQKEQISLLRDGDSGGPELSDWEKYAAEEYDILVAEETAGEPWEDGFEAELSPVEQKLSALRSPLAQRPFFEAPSPLGAVDLYEYACGDEDLEPL

SEQ ID NO: 68749 - protein, 575 aa, Homo sapiens
  Payload ID: 13682
  Gene Symbol: PPP2R3B
  Gene Name: protein phosphatase 2, regulatory subunit B'', beta
  ENSP ID: ENSP00000481962
MPPGKVLQPVLKMKVDELFLYWLSEASTQRMLQDCLRRIKAPGRDQPTPGDGEQPGAWPTAPLAAPRPSGLEPPGTPGPGPALPLGAASSPRNAPHVRGTRRSAGTRVVQTRKEEPLPPATSQSIPTFYFPRGRPQDSVNVDAVISKIESTFARFPHERATMDDMGLVAKACGCPLYWKGPLFYGAGGERTGSVSVHKFVAMWRKILQNCHDDAAKFVHLLMSPGCNYLVQEDFVPFLQDVVNTHPGLSFLKEASEFHSRYITTVIQRIFYAVNRSWSGRITCAELRRSSFLQNVALLEEEADINQLTEFFSYEHFYVIYCKFWELDTDHDLLIDADDLARHNDHALSTKMIDRIFSGAVTRGRKVQKEGKISYADFVWFLISEEDKKTPTSIEYWFRCMDLDGDGALSMFELEYFYEEQCRRLDSMAIEALPFQDCLCQMLDLVKPRTEGKITLQDLKRCKLANVFFDTFFNIEKYLDHEQKEQISLLRDGDSGGPELSDWEKYAAEEYDILVAEETVGEPWEDGFEAELSPVEQKLSALRSPLAQRPFFEAPSPLGAVDLYEYACGDEDLEPL

SEQ ID NO: 68750 - protein, 169 aa, Homo sapiens; identical to SEQ ID NO: 68746
  Payload ID: 13682
  Gene Symbol: PPP2R3B
  Gene Name: protein phosphatase 2, regulatory subunit B'', beta
  ENSP ID: ENSP00000485689

SEQ ID NO: 68751 - protein, 169 aa, Homo sapiens; identical to SEQ ID NO: 68746
  Payload ID: 13682
  Gene Symbol: PPP2R3B
  Gene Name: protein phosphatase 2, regulatory subunit B'', beta
  ENSP ID: ENSP00000487375

SEQ ID NO: 68752 - protein, 453 aa, Homo sapiens
  Payload ID: 13683
  Gene Symbol: PPP2R2D
  Gene Name: protein phosphatase 2, regulatory subunit B, delta
  Uniprot ID: Q66LE6
  ENSP ID: ENSP00000399970
MAGAGGGGCPAGGNDFQWCFSQVKGAIDEDVAEADIISTVEFNYSGDLLATGDKGGRVVIFQREQENKSRPHSRGEYNVYSTFQSHEPEFDYLKSLEIEEKINKIRWLPQQNAAHFLLSTNDKTIKLWKISERDKRAEGYNLKDEDGRLRDPFRITALRVPILKPMDLMVEASPRRIFANAHTYHINSISVNSDHETYLSADDLRINLWHLEITDRSFNIVDIKPANMEELTEVITAAEFHPHQCNVFVYSSSKGTIRLCDMRSSALCDRHSKFFEEPEDPSSRSFFSEIISSISDVKFSHSGRYMMTRDYLSVKVWDLNMESRPVETHQVHEYLRSKLCSLYENDCIFDKFECCWNGSDSAIMTGSYNNFFRMFDRDTRRDVTLEASRESSKPRASLKPRKVCTGGKRRKDEISVDSLDFNKKILHTAWHPVDNVIAVAATNNLYIFQDKIN

SEQ ID NO: 68753 - protein, 150 aa, Homo sapiens
  Payload ID: 13683
  Gene Symbol: PPP2R2D
  Gene Name: protein phosphatase 2, regulatory subunit B, delta
  ENSP ID: ENSP00000428418
  MOD_RES (1)..(1): Any amino acid
XGNDFQWCFSQVKGAIDEDVAEADIISTVEFNYSGDLLATGDKGGRVVIFQREQENKSRPHSRGEYNVYSTFQSHEPEFDYLKSLEIEEKINKIRWLPQQNAAHFLLSTNDKTIKLWKISERDKRAEGYNLKDEDGRLRDPFRITALRMT

SEQ ID NO: 68754 - protein, 77 aa, Homo sapiens
  Payload ID: 13683
  Gene Symbol: PPP2R2D
  Gene Name: protein phosphatase 2, regulatory subunit B, delta
  ENSP ID: ENSP00000481133
MAGAGGGGCPAGGNDFQWCFSQVKGAIDEDVAEADIISTVEFNYSGDLLATGDKGGRVVIFQREQEVLAQPRRPALP

SEQ ID NO: 68755 - protein, 57 aa, Homo sapiens
  Payload ID: 13683
  Gene Symbol: PPP2R2D
  Gene Name: protein phosphatase 2, regulatory subunit B, delta
  ENSP ID: ENSP00000485636
SQVKGAIDEDVAEGRGEESSGLLPQIMLSRQQLHLPLALLIRGNDNSVKTADDVQGL

SEQ ID NO: 68756 - protein, 111 aa, Homo sapiens
  Payload ID: 13684
  Gene Symbol: PPP2R5D
  Gene Name: protein phosphatase 2, regulatory subunit B', delta
  ENSP ID: ENSP00000230402
MPYKLKKEKEPPKVAKCTAKPSSSGKDGGGENTEEVTCLTRPSRSPSPSPSPKPSLSHRHPTSVPAIARRPPRSSAKSSTQGGPRLSRRSDGKAPPASTSARIGSCRSFLP

SEQ ID NO: 68757 - protein, 570 aa, Homo sapiens
  Payload ID: 13684
  Gene Symbol: PPP2R5D
  Gene Name: protein phosphatase 2, regulatory subunit B', delta
  Uniprot ID: Q14738
  ENSP ID: ENSP00000377669
MPYKLKKEKEPPKVAKCTAKPSSSGKDGGGENTEEAQPQPQPQPQPQAQSQPPSSNKRPSNSTPPPTQLSKIKYSGGPQIVKKELFIQKLRQCCVLFDFVSDPLSDLKFKEVKRAGLNEMVEYITHSRDVVTEAIYPEAVTMFSVNLFRTLPPSSNPTGAEFDPEEDEPTLEAAWPHLQLVYEFFLRFLESPDFQPNIAKKYIDQKFVLALLDLFDSEDPRERDFLKTILHRIYGKFLGLRAYIRRQINHIFYRFIYETEHHNGIAELLEILGSIINGFALPLKEEHKMFLIRVLLPLHKVKSLSVYHPQLAYCVVQFLEKESSLTEPVIVGLLKFWPKTHSPKEVMFLNELEEILDVIEPSEFSKVMEPLFRQLAKCVSSPHFQVAERALYYWNNEYIMSLISDNAARVLPIMFPALYRNSKSHWNKTIHGLIYNALKLFMEMNQKLFDDCTQQYKAEKQKGRFRMKEREEMWQKIEELARLNPQYPMFRAPPPLPPVYSMETETPTAEDIQLLKRTVETEAVQMLKDIKKEKVLLRRKSELPQDVYTIKALEAHKRAEEFLTASQEAL

SEQ ID NO: 68758 - protein, 602 aa, Homo sapiens
  Payload ID: 13684
  Gene Symbol: PPP2R5D
  Gene Name: protein phosphatase 2, regulatory subunit B', delta
  Uniprot ID: Q14738
  ENSP ID: ENSP00000417963
MPYKLKKEKEPPKVAKCTAKPSSSGKDGGGENTEEAQPQPQPQPQPQAQSQPPSSNKRPSNSTPPPTQLSKIKYSGGPQIVKKERRQSSSRFNLSKNRELQKLPALKDSPTQEREELFIQKLRQCCVLFDFVSDPLSDLKFKEVKRAGLNEMVEYITHSRDVVTEAIYPEAVTMFSVNLFRTLPPSSNPTGAEFDPEEDEPTLEAAWPHLQLVYEFFLRFLESPDFQPNIAKKYIDQKFVLALLDLFDSEDPRERDFLKTILHRIYGKFLGLRAYIRRQINHIFYRFIYETEHHNGIAELLEILGSIINGFALPLKEEHKMFLIRVLLPLHKVKSLSVYHPQLAYCVVQFLEKESSLTEPVIVGLLKFWPKTHSPKEVMFLNELEEILDVIEPSEFSKVMEPLFRQLAKCVSSPHFQVAERALYYWNNEYIMSLISDNAARVLPIMFPALYRNSKSHWNKTIHGLIYNALKLFMEMNQKLFDDCTQQYKAEKQKGRFRMKEREEMWQKIEELARLNPQYPMFRAPPPLPPVYSMETETPTAEDIQLLKRTVETEAVQMLKDIKKEKVLLRRKSELPQDVYTIKALEAHKRAEEFLTASQEAL

SEQ ID NO: 68759 - protein, 504 aa, Homo sapiens
  Payload ID: 13684
  Gene Symbol: PPP2R5D
  Gene Name: protein phosphatase 2, regulatory subunit B', delta
  ENSP ID: ENSP00000419756
  MOD_RES (1)..(1): Any amino acid
XKKERRQSSSRFNLSKNRELQKLPALKDSPTQEREELFIQKLRQCCVLFDFVSDPLSDLKFKEVKRAGLNEMVEYITHSRDVVTEAIYPEAVTMFSVNLFRTLPPSSNPTGAEFDPEEDEPTLEAAWPHLQLVYEFFLRFLESPDFQPNIAKKYIDQKFVLALLDLFDSEDPRERDFLKTILHRIYGKFLGLRAYIRRQINHIFYRFIYETEHHNGIAELLEILGSIINGFALPLKEEHKMFLIRVLLPLHKVKSLSVYHPQVIVGLLKFWPKTHSPKEVMFLNELEEILDVIEPSEFSKVMEPLFRQLAKCVSSPHFQVAERALYYWNNEYIMSLISDNAARVLPIMFPALYRNSKSHWNKTIHGLIYNALKLFMEMNQKLFDDCTQQYKAEKQKGRFRMKEREEMWQKIEELARLNPQYPMFRAPPPLPPVYSMETETPTAEDIQLLKRTVETEAVQMLKDIKKEKVLLRRKSELPQDVYTIKALEAHKRAEEFLTASQEAL

SEQ ID NO: 68760 - protein, 154 aa, Homo sapiens
  Payload ID: 13684
  Gene Symbol: PPP2R5D
  Gene Name: protein phosphatase 2, regulatory subunit B', delta
  ENSP ID: ENSP00000420529
  MOD_RES (1)..(1): Any amino acid
XFLNELEEILDVIEPSEFSKVMEPLFRQLAKCVSSPHFQVAERALYYWNNEYIMSLISDNAARVLPIMFPALYRNSKSHWNKTIHGLIYNALKLFMEMNQKLFDDCTQQYKAEKQNPTPILLLLLRGRFRMKEREEMWQKIEELARLNPQYPMF

SEQ ID NO: 68761 - protein, 594 aa, Homo sapiens
  Payload ID: 13684
  Gene Symbol: PPP2R5D
  Gene Name: protein phosphatase 2, regulatory subunit B', delta
  ENSP ID: ENSP00000420550
MPYKLKKEKEPPKVAKCTAKPSSSGKDGGGENTEEPQPQAQSQPPSSNKRPSNSTPPPTQLSKIKYSGGPQIVKKERRQSSSRFNLSKNRELQKLPALKDSPTQEREELFIQKLRQCCVLFDFVSDPLSDLKFKEVKRAGLNEMVEYITHSRDVVTEAIYPEAVTMFSVNLFRTLPPSSNPTGAEFDPEEDEPTLEAAWPHLQLVYEFFLRFLESPDFQPNIAKKYIDQKFVLALLDLFDSEDPRERDFLKTILHRIYGKFLGLRAYIRRQINHIFYRFIYETEHHNGIAELLEILGSIINGFALPLKEEHKMFLIRVLLPLHKVKSLSVYHPQLAYCVVQFLEKESSLTEPVIVGLLKFWPKTHSPKEVMFLNELEEILDVIEPSEFSKVMEPLFRQLAKCVSSPHFQVAERALYYWNNEYIMSLISDNAARVLPIMFPALYRNSKSHWNKTIHGLIYNALKLFMEMNQKLFDDCTQQYKAEKQKGRFRMKEREEMWQKIEELARLNPQYPMFRAPPPLPPVYSMETETPTAEDIQLLKRTVETEAVQMLKDIKKEKVLLRRKSELPQDVYTIKALEAHKRAEEFLTASQEAL

SEQ ID NO: 68762 - protein, 496 aa, Homo sapiens
  Payload ID: 13684
  Gene Symbol: PPP2R5D
  Gene Name: protein phosphatase 2, regulatory subunit B', delta
  Uniprot ID: Q14738
  ENSP ID: ENSP00000420674
MPYKLKKEKELFIQKLRQCCVLFDFVSDPLSDLKFKEVKRAGLNEMVEYITHSRDVVTEAIYPEAVTMFSVNLFRTLPPSSNPTGAEFDPEEDEPTLEAAWPHLQLVYEFFLRFLESPDFQPNIAKKYIDQKFVLALLDLFDSEDPRERDFLKTILHRIYGKFLGLRAYIRRQINHIFYRFIYETEHHNGIAELLEILGSIINGFALPLKEEHKMFLIRVLLPLHKVKSLSVYHPQLAYCVVQFLEKESSLTEPVIVGLLKFWPKTHSPKEVMFLNELEEILDVIEPSEFSKVMEPLFRQLAKCVSSPHFQVAERALYYWNNEYIMSLISDNAARVLPIMFPALYRNSKSHWNKTIHGLIYNALKLFMEMNQKLFDDCTQQYKAEKQKGRFRMKEREEMWQKIEELARLNPQYPMFRAPPPLPPVYSMETETPTAEDIQLLKRTVETEAVQMLKDIKKEKVLLRRKSELPQDVYTIKALEAHKRAEEFLTASQEAL

SEQ ID NO: 68763 - protein, 467 aa, Homo sapiens
  Payload ID: 13685
  Gene Symbol: PPP2R5E
  Gene Name: protein phosphatase 2, regulatory subunit B', epsilon isoform
  Uniprot ID: Q16537
  ENSP ID: ENSP00000337641
MSSAPTTPPSVDKVDGFSRKSVRKARQKRSQSSSQFRSQGKPIELTPLPLLKDVPSSEQPELFLKKLQQCCVIFDFMDTLSDLKMKEYKRSTLNELVDYITISRGCLTEQTYPEVVRMVSCNIFRTLPPSDSNEFDPEEDEPTLEASWPHLQLVYEFFIRFLESQEFQPSIAKKYIDQKFVLQLLELFDSEDPRERDYLKTVLHRIYGKFLGLRAFIRKQINNIFLRFVYETEHFNGVAELLEILGSIINGFALPLKAEHKQFLVKVLIPLHTVRSLSLFHAQLAYCIVQFLEKDPSLTEPVIRGLMKFWPKTCSQKEVMFLGELEEILDVIEPSQFVKIQEPLFKQIAKCVSSPHFQVAERALYYWNNEYIMSLIEENSNVILPIMFSSLYRISKEHWNPAIVALVYNVLKAFMEMNSTMFDELTATYKSDRQREKKKEKEREELWKKLEDLELKRGLRRDGIIPT

SEQ ID NO: 68764 - protein, 391 aa, Homo sapiens
  Payload ID: 13685
  Gene Symbol: PPP2R5E
  Gene Name: protein phosphatase 2, regulatory subunit B', epsilon isoform
  Uniprot ID: Q16537
  ENSP ID: ENSP00000404632
MDTLSDLKMKEYKRSTLNELVDYITISRGCLTEQTYPEVVRMVSCNIFRTLPPSDSNEFDPEEDEPTLEASWPHLQLVYEFFIRFLESQEFQPSIAKKYIDQKFVLQLLELFDSEDPRERDYLKTVLHRIYGKFLGLRAFIRKQINNIFLRFVYETEHFNGVAELLEILGSIINGFALPLKAEHKQFLVKVLIPLHTVRSLSLFHAQLAYCIVQFLEKDPSLTEPVIRGLMKFWPKTCSQKEVMFLGELEEILDVIEPSQFVKIQEPLFKQIAKCVSSPHFQVAERALYYWNNEYIMSLIEENSNVILPIMFSSLYRISKEHWNPAIVALVYNVLKAFMEMNSTMFDELTATYKSDRQREKKKEKEREELWKKLEDLELKRGLRRDGIIPT

SEQ ID NO: 68765 - protein, 462 aa, Homo sapiens
  Payload ID: 13685
  Gene Symbol: PPP2R5E
  Gene Name: protein phosphatase 2, regulatory subunit B', epsilon isoform
  Uniprot ID: Q16537
  ENSP ID: ENSP00000452396
MSSAPTTPPSVDKVDGFSRKSVRKARQKRSQSSSQFRSQGKPIELTPLPLLKDVPSSEQPELFLKKLQQCCVIFDFMDTLSDLKMKEYKRSTLNELVDYITISRGCLTEQTYPEVVRMVSCNIFRTLPPSDSNEFDPEEDEPTLEASWPHLQLVYEFFIRFLESQEFQPSIAKKYIDQKFVLQLLELFDSEDPRERDYLKTVLHRIYGKFLGLRAFIRKQINNIFLRFVYETEHFNGVAELLEILGSIINGFALPLKAEHKQFLVKVLIPLHTVRSLSLFHAQLAYCIVQFLEKDPSLTEPVIRGLMKFWPKTCSQKEVMFLGELEEILDVIEPSQFVKIQEPLFKQIAKCVSSPHFQVAERALYYWNNEYIMSLIEENSNVILPIMFSSLYRISKEHWNPAIVALVYNVLKAFMEMNSTMFDELTATYNEKKKEKEREELWKKLEDLELKRGLRRDGIIPT

SEQ ID NO: 68766 - protein, 447 aa, Homo sapiens
  Payload ID: 13686
  Gene Symbol: PPP2R2C
  Gene Name: protein phosphatase 2, regulatory subunit B, gamma
  Uniprot ID: Q9Y2T4
  ENSP ID: ENSP00000335083
MGLSFFSKHLPIQEGQPWALKTPADIISTVEFNHTGELLATGDKGGRVVIFQREPESKNAPHSQGEYDVYSTFQSHEPEFDYLKSLEIEEKINKIKWLPQQNAAHSLLSTNDKTIKLWKITERDKRPEGYNLKDEEGKLKDLSTVTSLQVPVLKPMDLMVEVSPRRIFANGHTYHINSISVNSDCETYMSADDLRINLWHLAITDRSFNIVDIKPANMEDLTEVITASEFHPHHCNLFVYSSSKGSLRLCDMRAAALCDKHSKLFEEPEDPSNRSFFSEIISSVSDVKFSHSGRYMLTRDYLTVKVWDLNMEARPIETYQVHDYLRSKLCSLYENDCIFDKFECAWNGSDSVIMTGAYNNFFRMFDRNTKRDVTLEASRESSKPRAVLKPRRVCVGGKRRRDDISVDSLDFTKKILHTAWHPAENIIAIAATNNLYIFQDKVNSDMH

SEQ ID NO: 68767 - protein, 447 aa, Homo sapiens
  Payload ID: 13686
  Gene Symbol: PPP2R2C
  Gene Name: protein phosphatase 2, regulatory subunit B, gamma
  Uniprot ID: Q9Y2T4
  ENSP ID: ENSP00000372042
MGEDTDTRKINHSFLRDHSYVTEADIISTVEFNHTGELLATGDKGGRVVIFQREPESKNAPHSQGEYDVYSTFQSHEPEFDYLKSLEIEEKINKIKWLPQQNAAHSLLSTNDKTIKLWKITERDKRPEGYNLKDEEGKLKDLSTVTSLQVPVLKPMDLMVEVSPRRIFANGHTYHINSISVNSDCETYMSADDLRINLWHLAITDRSFNIVDIKPANMEDLTEVITASEFHPHHCNLFVYSSSKGSLRLCDMRAAALCDKHSKLFEEPEDPSNRSFFSEIISSVSDVKFSHSGRYMLTRDYLTVKVWDLNMEARPIETYQVHDYLRSKLCSLYENDCIFDKFECAWNGSDSVIMTGAYNNFFRMFDRNTKRDVTLEASRESSKPRAVLKPRRVCVGGKRRRDDISVDSLDFTKKILHTAWHPAENIIAIAATNNLYIFQDKVNSDMH

SEQ ID NO: 68768 - protein, 430 aa, Homo sapiens
  Payload ID: 13686
  Gene Symbol: PPP2R2C
  Gene Name: protein phosphatase 2, regulatory subunit B, gamma
  Uniprot ID: Q9Y2T4
  ENSP ID: ENSP00000422374
MGKRDTADIISTVEFNHTGELLATGDKGGRVVIFQREPESKNAPHSQGEYDVYSTFQSHEPEFDYLKSLEIEEKINKIKWLPQQNAAHSLLSTNDKTIKLWKITERDKRPEGYNLKDEEGKLKDLSTVTSLQVPVLKPMDLMVEVSPRRIFANGHTYHINSISVNSDCETYMSADDLRINLWHLAITDRSFNIVDIKPANMEDLTEVITASEFHPHHCNLFVYSSSKGSLRLCDMRAAALCDKHSKLFEEPEDPSNRSFFSEIISSVSDVKFSHSGRYMLTRDYLTVKVWDLNMEARPIETYQVHDYLRSKLCSLYENDCIFDKFECAWNGSDSVIMTGAYNNFFRMFDRNTKRDVTLEASRESSKPRAVLKPRRVCVGGKRRRDDISVDSLDFTKKILHTAWHPAENIIAIAATNNLYIFQDKVNSDMH

SEQ ID NO: 68769 - protein, 440 aa, Homo sapiens
  Payload ID: 13686
  Gene Symbol: PPP2R2C
  Gene Name: protein phosphatase 2, regulatory subunit B, gamma
  Uniprot ID: Q9Y2T4
  ENSP ID: ENSP00000423649
MREADTLRPPQLMEVSADIISTVEFNHTGELLATGDKGGRVVIFQREPESKNAPHSQGEYDVYSTFQSHEPEFDYLKSLEIEEKINKIKWLPQQNAAHSLLSTNDKTIKLWKITERDKRPEGYNLKDEEGKLKDLSTVTSLQVPVLKPMDLMVEVSPRRIFANGHTYHINSISVNSDCETYMSADDLRINLWHLAITDRSFNIVDIKPANMEDLTEVITASEFHPHHCNLFVYSSSKGSLRLCDMRAAALCDKHSKLFEEPEDPSNRSFFSEIISSVSDVKFSHSGRYMLTRDYLTVKVWDLNMEARPIETYQVHDYLRSKLCSLYENDCIFDKFECAWNGSDSVIMTGAYNNFFRMFDRNTKRDVTLEASRESSKPRAVLKPRRVCVGGKRRRDDISVDSLDFTKKILHTAWHPAENIIAIAATNNLYIFQDKVNSDMH

SEQ ID NO: 68770 - protein, 42 aa, Homo sapiens
  Payload ID: 13686
  Gene Symbol: PPP2R2C
  Gene Name: protein phosphatase 2, regulatory subunit B, gamma
  ENSP ID: ENSP00000423650
MGLSFFSKHLPIQEGQPWALKTPADIISTVEFNHTGELLATE

SEQ ID NO: 68771 - protein, 440 aa, Homo sapiens; identical to SEQ ID NO: 68769
  Payload ID: 13686
  Gene Symbol: PPP2R2C
  Gene Name: protein phosphatase 2, regulatory subunit B, gamma
  Uniprot ID: Q9Y2T4
  ENSP ID: ENSP00000425247

SEQ ID NO: 68772 - protein, 485 aa, Homo sapiens
  Payload ID: 13687
  Gene Symbol: PPP2R5C
  Gene Name: protein phosphatase 2, regulatory subunit B', gamma
  Uniprot ID: Q13362
  ENSP ID: ENSP00000262239
MLTCNKAGSRMVVDAANSNGPFQPVVLLHIRDVPPADQEKLFIQKLRQCCVLFDFVSDPLSDLKWKEVKRAALSEMVEYITHNRNVITEPIYPEVVHMFAVNMFRTLPPSSNPTGAEFDPEEDEPTLEAAWPHLQLVYEFFLRFLESPDFQPNIAKKYIDQKFVLQLLELFDSEDPRERDFLKTTLHRIYGKFLGLRAYIRKQINNIFYRFIYETEHHNGIAELLEILGSIINGFALPLKEEHKIFLLKVLLPLHKVKSLSVYHPQLAYCVVQFLEKDSTLTEPVVMALLKYWPKTHSPKEVMFLNELEEILDVIEPSEFVKIMEPLFRQLAKCVSSPHFQVAERALYYWNNEYIMSLISDNAAKILPIMFPSLYRNSKTHWNKTIHGLIYNALKLFMEMNQKLFDDCTQQFKAEKLKEKLKMKEREEAWVKIENLAKANPQAQKDPKKDRPLARRKSELPQDPHTKKALEAHCRADELASQDGR

SEQ ID NO: 68773 - protein, 540 aa, Homo sapiens
  Payload ID: 13687
  Gene Symbol: PPP2R5C
  Gene Name: protein phosphatase 2, regulatory subunit B', gamma
  Uniprot ID: Q13362
  ENSP ID: ENSP00000329009
MPNKNKKEKESPKAGKSGKSSKEGQDTVESEQISVRKNSLVAVPSTVSAKIKVPVSQPIVKKDKRQNSSRFSASNNRELQKLPSLKDVPPADQEKLFIQKLRQCCVLFDFVSDPLSDLKWKEVKRAALSEMVEYITHNRNVITEPIYPEVVHMFAVNMFRTLPPSSNPTGAEFDPEEDEPTLEAAWPHLQLVYEFFLRFLESPDFQPNIAKKYIDQKFVLQLLELFDSEDPRERDFLKTTLHRIYGKFLGLRAYIRKQINNIFYRFIYETEHHNGIAELLEILGSIINGFALPLKEEHKIFLLKVLLPLHKVKSLSVYHPQLAYCVVQFLEKDSTLTEPVVMALLKYWPKTHSPKEVMFLNELEEILDVIEPSEFVKIMEPLFRQLAKCVSSPHFQVAERALYYWNNEYIMSLISDNAAKILPIMFPSLYRNSKTHWNKTIHGLIYNALKLFMEMNQKLFDDCTQQFKAEKLKEKLKMKEREEAWVKIENLAKANPQAQKDPKKDRPLARRKSELPQDPHTKKALEAHCRADELASQDGR

SEQ ID NO: 68774 - protein, 524 aa, Homo sapiens
  Payload ID: 13687
  Gene Symbol: PPP2R5C
  Gene Name: protein phosphatase 2, regulatory subunit B', gamma
  Uniprot ID: Q13362
  ENSP ID: ENSP00000333905
MLTCNKAGSRMVVDAANSNGPFQPVVLLHIRDVPPADQEKLFIQKLRQCCVLFDFVSDPLSDLKWKEVKRAALSEMVEYITHNRNVITEPIYPEVVHMFAVNMFRTLPPSSNPTGAEFDPEEDEPTLEAAWPHLQLVYEFFLRFLESPDFQPNIAKKYIDQKFVLQLLELFDSEDPRERDFLKTTLHRIYGKFLGLRAYIRKQINNIFYRFIYETEHHNGIAELLEILGSIINGFALPLKEEHKIFLLKVLLPLHKVKSLSVYHPQLAYCVVQFLEKDSTLTEPVVMALLKYWPKTHSPKEVMFLNELEEILDVIEPSEFVKIMEPLFRQLAKCVSSPHFQVAERALYYWNNEYIMSLISDNAAKILPIMFPSLYRNSKTHWNKTIHGLIYNALKLFMEMNQKLFDDCTQQFKAEKLKEKLKMKEREEAWVKIENLAKANPQYTVYSQASTMSIPVAMETDGPLFEDVQMLRKTVKDEAHQAQKDPKKDRPLARRKSELPQDPHTKKALEAHCRADELASQDGR

SEQ ID NO: 68775 - protein, 449 aa, Homo sapiens
  Payload ID: 13687
  Gene Symbol: PPP2R5C
  Gene Name: protein phosphatase 2, regulatory subunit B', gamma
  Uniprot ID: Q13362
  ENSP ID: ENSP00000408389
MLTCNKAGSRMVVDAANSNGPFQPVVLLHIRDVPPADQEKLFIQKLRQCCVLFDFVSDPLSDLKWKEVKRAALSEMVEYITHNRNVITEPIYPEVVHMFAVNMFRTLPPSSNPTGAEFDPEEDEPTLEAAWPHLQLVYEFFLRFLESPDFQPNIAKKYIDQKFVLQLLELFDSEDPRERDFLKTTLHRIYGKFLGLRAYIRKQINNIFYRFIYETEHHNGIAELLEILGSIINGFALPLKEEHKIFLLKVLLPLHKVKSLSVYHPQLAYCVVQFLEKDSTLTEPVVMALLKYWPKTHSPKEVMFLNELEEILDVIEPSEFVKIMEPLFRQLAKCVSSPHFQVAERALYYWNNEYIMSLISDNAAKILPIMFPSLYRNSKTHWNKTIHGLIYNALKLFMEMNQKLFDDCTQQFKAEKLKEKLKMKEREEAWVKIENLAKANPQVLKKRIT

SEQ ID NO: 68776 - protein, 555 aa, Homo sapiens
  Payload ID: 13687
  Gene Symbol: PPP2R5C
  Gene Name: protein phosphatase 2, regulatory subunit B', gamma
  Uniprot ID: Q13362
  ENSP ID: ENSP00000412324
MPNKNKKEKESPKAGKSGKSSKEGQDTVESEGTSPEEPSSPKVPPPLLPELLVLIFGGLQGRDVPPADQEKLFIQKLRQCCVLFDFVSDPLSDLKWKEVKRAALSEMVEYITHNRNVITEPIYPEVVHMFAVNMFRTLPPSSNPTGAEFDPEEDEPTLEAAWPHLQLVYEFFLRFLESPDFQPNIAKKYIDQKFVLQLLELFDSEDPRERDFLKTTLHRIYGKFLGLRAYIRKQINNIFYRFIYETEHHNGIAELLEILGSIINGFALPLKEEHKIFLLKVLLPLHKVKSLSVYHPQLAYCVVQFLEKDSTLTEPVVMALLKYWPKTHSPKEVMFLNELEEILDVIEPSEFVKIMEPLFRQLAKCVSSPHFQVAERALYYWNNEYIMSLISDNAAKILPIMFPSLYRNSKTHWNKTIHGLIYNALKLFMEMNQKLFDDCTQQFKAEKLKEKLKMKEREEAWVKIENLAKANPQYTVYSQASTMSIPVAMETDGPLFEDVQMLRKTVKDEAHQAQKDPKKDRPLARRKSELPQDPHTKKALEAHCRADELASQDGR

SEQ ID NO: 68777 - protein, 124 aa, Homo sapiens
  Payload ID: 13687
  Gene Symbol: PPP2R5C
  Gene Name: protein phosphatase 2, regulatory subunit B', gamma
  ENSP ID: ENSP00000450525
MPNKNKKEKESPKAGKSGKSSKEGQDTVESEQISVRKNSLVAVPSTVSAKIKVPVSQPIVKKDKRQNSSRFSASNNRELQKLPSLKDCKCTRFETYVYRGPTFHTHGFCGPTVGLEYAWIWLRL

SEQ ID NO: 68778 - protein, 45 aa, Homo sapiens
  Payload ID: 13687
  Gene Symbol: PPP2R5C
  Gene Name: protein phosphatase 2, regulatory subunit B', gamma
  ENSP ID: ENSP00000450626
  MOD_RES (1)..(1): Any amino acid
XFDDCTQQFKAEKLKEKLKMKEREEAWVKIENLAKANPQACRGSA

SEQ ID NO: 68779 - protein, 71 aa, Homo sapiens
  Payload ID: 13687
  Gene Symbol: PPP2R5C
  Gene Name: protein phosphatase 2, regulatory subunit B', gamma
  ENSP ID: ENSP00000450743
FAVNMFRTLPPSSNPTGAEFDPEEDEPTLEAAWPHLQLVYEFFLRFLESPDFQPNIAKKYIDQKFVLQVYL

SEQ ID NO: 68780 - protein, 151 aa, Homo sapiens
  Payload ID: 13687
  Gene Symbol: PPP2R5C
  Gene Name: protein phosphatase 2, regulatory subunit B', gamma
  ENSP ID: ENSP00000450816
  MOD_RES (1)..(1): Any amino acid
XNSKTHWNKTIHGLIYNALKLFMEMNQKLFDDCTQQFKAEKLKEKLKMKEREEAWVKIENLAKANPQYTVYSQASTMSIPVAMETDGPLFEDVQMLRKTVKDEAHQGLALIPRLECSGTILAHCSLGLLDSSNPPTSASQAAVTTGTTTLS

SEQ ID NO: 68781 - protein, 216 aa, Homo sapiens
  Payload ID: 13687
  Gene Symbol: PPP2R5C
  Gene Name: protein phosphatase 2, regulatory subunit B', gamma
  ENSP ID: ENSP00000450867
MLTCNKAGSRMVVDAANSNGPFQPVVLLHIRDVPPADQEKLFIQKLRQCCVLFDFVSDPLSDLKWKEVKRAALSEMVEYITHNRNVITEPIYPEVVHMFAVNMFRTLPPSSNPTGAEFDPEEDEPTLEAAWPHLQLLELFDSEDPRERDFLKTTLHRIYGKFLGLRAYIRKQINNIFYRFIYETEHHNGIAELLEILGSIINGFALPLKEEHKIFL

SEQ ID NO: 68782 - protein, 553 aa, Homo sapiens
  Payload ID: 13687
  Gene Symbol: PPP2R5C
  Gene Name: protein phosphatase 2, regulatory subunit B', gamma
  ENSP ID: ENSP00000450931
NKNKKEKESPKAGKSGKSSKEGQDTVESEGTSPEEPSSPKVPPPLLPELLVLIFGGLQGRDVPPADQEKLFIQKLRQCCVLFDFVSDPLSDLKWKEVKRAALSEMVEYITHNRNVITEPIYPEVVHMFAVNMFRTLPPSSNPTGAEFDPEEDEPTLEAAWPHLQLVYEFFLRFLESPDFQPNIAKKYIDQKFVLQLLELFDSEDPRERDFLKTTLHRIYGKFLGLRAYIRKQINNIFYRFIYETEHHNGIAELLEILGSIINGFALPLKEEHKIFLLKVLLPLHKVKSLSVYHPQLAYCVVQFLEKDSTLTEPVVMALLKYWPKTHSPKEVMFLNELEEILDVIEPSEFVKIMEPLFRQLAKCVSSPHFQVAERALYYWNNEYIMSLISDNAAKILPIMFPSLYRNSKTHWNKTIHGLIYNALKLFMEMNQKLFDDCTQQFKAEKLKEKLKMKEREEAWVKIENLAKANPQYTVYSQASTMSIPVAMETDGPLFEDVQMLRKTVKDEAHQAQKDPKKDRPLARRKSELPQDPHTKKALEAHCRADELASQDGR

SEQ ID NO: 68783 - protein, 384 aa, Homo sapiens
  Payload ID: 13687
  Gene Symbol: PPP2R5C
  Gene Name: protein phosphatase 2, regulatory subunit B', gamma
  ENSP ID: ENSP00000451179
MLTCNKAGSRMVVDAANSNGPFQPVVLLHIRDVPPADQEKLFIQKLRQCCVLFDFVSDPLSDLKWKEVKRAALSEMVEYITHNRNVITEPIYPEVVHMFAVNMFRTLPPSSNPTGAEFDPEEDEPTLEAAWPHLQLVYEFFLRFLESPDFQPNIAKKYIDQKFVLQLLELFDSEDPRERDFLKTTLHRIYGKFLGLRAYIRKQINNIFYRFIYETEHHNGIAELLEILGSIINGFALPLKEEHKIFLLKVLLPLHKVKSLSVYHPQLAYCVVQFLEKDSTLTEPVVMALLKYWPKTHSPKEVMFLNELEEILDVIEPSEFVKIMEPLFRQLAKCVSSPHFQVAERALYYWNNEYIMSLISDNAAKILPIMFPSLYRNSKTHWNK

SEQ ID NO: 68784 - protein, 153 aa, Homo sapiens
  Payload ID: 13687
  Gene Symbol: PPP2R5C
  Gene Name: protein phosphatase 2, regulatory subunit B', gamma
  ENSP ID: ENSP00000452124
KQINNIFYRFIYETEHHNGIAELLEILGSIINGFALPLKEEHKIFLLKVLLPLHKVKSLSVYHPQLAYCVVQFLEKDSTLTEPVVMALLKYWPKTHSPKEVMFLNELEEILDVIEPSEFVKIMEPLFRQLAKCVSSPHFQREAKNERTGRSMG

SEQ ID NO: 68785 - protein, 46 aa, Homo sapiens
  Payload ID: 13687
  Gene Symbol: PPP2R5C
  Gene Name: protein phosphatase 2, regulatory subunit B', gamma
  ENSP ID: ENSP00000452500
MLTCNKAGSRMVVDAANSNGPFQPVVLLHIRGTVPTCSVAQPQSSC

SEQ ID NO: 68786 - protein, 69 aa, Homo sapiens
  Payload ID: 13687
  Gene Symbol: PPP2R5C
  Gene Name: protein phosphatase 2, regulatory subunit B', gamma
  ENSP ID: ENSP00000452533
QPNIAKKYIDQKFVLQLLELFDSEDPRERDFLKTTLHRIYGKFLGLRAYIRKQINNIFYRCLKFSKIKY

SEQ ID NO: 68787 - protein, 69 aa, Homo sapiens
  Payload ID: 13687
  Gene Symbol: PPP2R5C
  Gene Name: protein phosphatase 2, regulatory subunit B', gamma
  ENSP ID: ENSP00000452630
MLTCNKAGSRMVVDAANSNGPFQPVVLLHIRDCKCTRFETYVYRGPTFHTHGFCGPTVGLEYAWIWLRL

SEQ ID NO: 68788 - protein, 146 aa, Homo sapiens
  Payload ID: 13687
  Gene Symbol: PPP2R5C
  Gene Name: protein phosphatase 2, regulatory subunit B', gamma
  ENSP ID: ENSP00000452632
  MOD_RES (1)..(1): Any amino acid
XGKSSKEGQDTVESEQISVRKNSLVAVPSTVSAKIKVPVSQPIVKKDKRQNSSRFSASNNRELQKLPSLKVEAVKLGRVSAELRLEVPDLQLWPPTEQQGEQTHGEPRGPQSMDGAASLLPCPSSSTPDLPAFSPALLPLLPTCQP

SEQ ID NO: 68789 - protein, 29 aa, Homo sapiens
  Payload ID: 13687
  Gene Symbol: PPP2R5C
  Gene Name: protein phosphatase 2, regulatory subunit B', gamma
  ENSP ID: ENSP00000453875
DKRQNSSRFSASNNRELQKLPSLKGPPTL

SEQ ID NO: 68790 - protein, 89 aa, Homo sapiens
  Payload ID: 13687
  Gene Symbol: PPP2R5C
  Gene Name: protein phosphatase 2, regulatory subunit B', gamma
  ENSP ID: ENSP00000453906
LAKCVSSPHFQVAERALYYWNNEYIMSLISDNAAKILPIMFPSLYRNSKTHWNKTIHGLIYNALKLFMEMNQKLFDDCTQQFKAEKLKS

SEQ ID NO: 68791 - protein, 68 aa, Homo sapiens
  Payload ID: 13687
  Gene Symbol: PPP2R5C
  Gene Name: protein phosphatase 2, regulatory subunit B', gamma
  ENSP ID: ENSP00000454035
MPNKNKKEKESPKAGKSGKSSKEGQDTVESECYCLRAGATELEITTENTEMLGPSLLPHKDTRGNLAY

SEQ ID NO: 68792 - protein, 107 aa, Homo sapiens
  Payload ID: 13687
  Gene Symbol: PPP2R5C
  Gene Name: protein phosphatase 2, regulatory subunit B', gamma
  ENSP ID: ENSP00000454124
MLTCNKAGSRMVVDAANSNGPFQPVVLLHIRVEAVKLGRVSAELRLEVPDLQLWPPTEQQGEQTHGEPRGPQSMDGAASLLPCPSSSTPDLPAFSPALLPLLPTCQP

SEQ ID NO: 68793 - protein, 453 aa, Homo sapiens
  Payload ID: 13688
  Gene Symbol: PPP2R3C
  Gene Name: protein phosphatase 2, regulatory subunit B'', gamma
  Uniprot ID: Q969Q6
  ENSP ID: ENSP00000261475
MDWKEVLRRRLATPNTCPNKKKSEQELKDEEMDLFTKYYSEWKGGRKNTNEFYKTIPRFYYRLPAEDEVLLQKLREESRAVFLQRKSRELLDNEELQNLWFLLDKHQTPPMIGEEAMINYENFLKVGEKAGAKCKQFFTAKVFAKLLHTDSYGRISIMQFFNYVMRKVWLHQTRIGLSLYDVAGQGYLRESDLENYILELIPTLPQLDGLEKSFYSFYVCTAVRKFFFFLDPLRTGKIKIQDILACSFLDDLLELRDEELSKESQETNWFSAPSALRVYGQYLNLDKDHNGMLSKEELSRYGTATMTNVFLDRVFQECLTYDGEMDYKTYLDFVLALENRKEPAALQYIFKLLDIENKGYLNVFSLNYFFRAIQELMKIHGQDPVSFQDVKDEIFDMVKPKDPLKISLQDLINSNQGDTVTTILIDLNGFWTYENREALVANDSENSADLDDT

SEQ ID NO: 68794 - protein, 22 aa, Homo sapiens
  Payload ID: 13688
  Gene Symbol: PPP2R3C
  Gene Name: protein phosphatase 2, regulatory subunit B'', gamma
  ENSP ID: ENSP00000450429
MDWKEVLRRRLATPNTCPNTAC

SEQ ID NO: 68795 - protein, 41 aa, Homo sapiens
  Payload ID: 13688
  Gene Symbol: PPP2R3C
  Gene Name: protein phosphatase 2, regulatory subunit B'', gamma
  ENSP ID: ENSP00000450649
  MOD_RES (1)..(1): Any amino acid
XALENRKEPAALQYIFKLLDIENKGYLNVFSLNYFFRIYFY

SEQ ID NO: 68796 - protein, 226 aa, Homo sapiens
  Payload ID: 13688
  Gene Symbol: PPP2R3C
  Gene Name: protein phosphatase 2, regulatory subunit B'', gamma
  ENSP ID: ENSP00000450716
MDWKEVLRRRLATPNTCPNKKKSEQELKDEEMDLFTKYYSEWKGGRKNTNEFYKTIPRFYYRLPAEDEVLLQKLREESRAVFLQRKSRELLDNEELQVGEKAGAKCKQFFTAKVFAKLLHTDSYGRISIMQFFNYVMRKVWLHQTRIGLSLYDVAGQGYLRESDLENYILELIPTLPQLDGLEKSFYSFYVCTAVRKFFFFLDPLRTGKIKIQDILACSFLDDLLE

SEQ ID NO: 68797 - protein, 167 aa, Homo sapiens
  Payload ID: 13688
  Gene Symbol: PPP2R3C
  Gene Name: protein phosphatase 2, regulatory subunit B'', gamma
  ENSP ID: ENSP00000450815
MDWKEVLRRRLATPNTCPNKKKSEQELKDEEMDLFTKYYSEWKGGRKNTNEFYKTIPRFYYRLPAEDEVLLQKLREESRAVFLQRKSRELLDNEELQNLWFLLDKHQTPPMIGEEAMINYENFLKVGEKAGAKCKQFFTAKVFAKLLHTDSYGRISIMQFFNYVMRK

SEQ ID NO: 68798 - protein, 22 aa, Homo sapiens
  Payload ID: 13688
  Gene Symbol: PPP2R3C
  Gene Name: protein phosphatase 2, regulatory subunit B'', gamma
  ENSP ID: ENSP00000451075
MDWKEVLRRRLATPNTCPNTAC

SEQ ID NO: 68799 - protein, 226 aa, Homo sapiens
  Payload ID: 13688
  Gene Symbol: PPP2R3C
  Gene Name: protein phosphatase 2, regulatory subunit B'', gamma
  ENSP ID: ENSP00000451174
  MOD_RES (1)..(1): Any amino acid
XLPAEDEVLLQKLREESRAVFLQRKSRELLDNEELQTPPMIGEEAMINYENFLKVGEKAGAKCKQFFTAKVFAKLLHTDSYGRISIMQFFNYVMRKVWLHQTRIGLSLYDVAGQGYLRESDLENYILELIPTLPQLDGLEKSFYSFYVCTAVRKFFFFLDPLRTGKIKIQDILACSFLDDLLELRDEELSKESQETNWFSAPSALRVYGQYLNLDKDHNGMLSKEE

SEQ ID NO: 68800 - protein, 22 aa, Homo sapiens
  Payload ID: 13688
  Gene Symbol: PPP2R3C
  Gene Name: protein phosphatase 2, regulatory subunit B'', gamma
  ENSP ID: ENSP00000451416
MDWKEVLRRRLATPNTCPNTAC

SEQ ID NO: 68801 - protein, 53 aa, Homo sapiens
  Payload ID: 13688
  Gene Symbol: PPP2R3C
  Gene Name: protein phosphatase 2, regulatory subunit B'', gamma
  ENSP ID: ENSP00000451423
MDWKEVLRRRLATPNTCPNSRETVIMRLKLHEVRGWGCLAHPSFRVYYSVLCT

SEQ ID NO: 68802 - protein, 29 aa, Homo sapiens
  Payload ID: 13688
  Gene Symbol: PPP2R3C
  Gene Name: protein phosphatase 2, regulatory subunit B'', gamma
  ENSP ID: ENSP00000451450
MDWKEVLRRRLATPNTCPNKIYLVFSAAC

SEQ ID NO: 68803 - protein, 190 aa, Homo sapiens
  Payload ID: 13688
  Gene Symbol: PPP2R3C
  Gene Name: protein phosphatase 2, regulatory subunit B'', gamma
  ENSP ID: ENSP00000451523
MDWKEVLRRRLATPNTCPNKKKSEQELKDEEMDLFTKYYSEWKGGRKNTNEFYKTIPRFYYRLPAEDEVLLQKLREESRAVFLQRKSRELLDNEELQNLWFLLDKHQTPPMIGEEAMINYENFLKVGEKAGAKCKQFFTAKVFAKLLHTDSYGRISIMQFFNYVMRKGDSFLLCLNSLSGNQVGFWSVLL

SEQ ID NO: 68804 - protein, 19 aa, Homo sapiens
  Payload ID: 13688
  Gene Symbol: PPP2R3C
  Gene Name: protein phosphatase 2, regulatory subunit B'', gamma
  ENSP ID: ENSP00000451994
  MOD_RES (1)..(1): Any amino acid
XEVLRRRLATPNTCPNTAC

SEQ ID NO: 68805 - protein, 128 aa, Homo sapiens
  Payload ID: 13688
  Gene Symbol: PPP2R3C
  Gene Name: protein phosphatase 2, regulatory subunit B'', gamma
  ENSP ID: ENSP00000452173
GQYLNLDKDHNGMLSKEELSRYGTATMTNVFLDRVFQECLTYDGEMAIQELMKIHGQDPVSFQDVKDEIFDMVKPKDPLKISLQDLINSNQGDTVTTILIDLNGFWTYENREALVANDSENSADLDDT

SEQ ID NO: 68806 - protein, 134 aa, Homo sapiens
  Payload ID: 13688
  Gene Symbol: PPP2R3C
  Gene Name: protein phosphatase 2, regulatory subunit B'', gamma
  ENSP ID: ENSP00000452194
MDWKEVLRRRLATPNTCPNKKKSEQELKDEEMDLFTKYYSEWKGGRKNTNEFYKTIPRFYYRLPAEDEVLLQKLREESRAVFLQRKSRELLDNEELQNLWFLLDKHQTPPMIGEEAMINYENFLKAIFHSKSLC

SEQ ID NO: 68807 - protein, 22 aa, Homo sapiens
  Payload ID: 13688
  Gene Symbol: PPP2R3C
  Gene Name: protein phosphatase 2, regulatory subunit B'', gamma
  ENSP ID: ENSP00000452263
MDWKEVLRRRLATPNTCPNTAC

SEQ ID NO: 68808 - protein, 22 aa, Homo sapiens
  Payload ID: 13688
  Gene Symbol: PPP2R3C
  Gene Name: protein phosphatase 2, regulatory subunit B'', gamma
  ENSP ID: ENSP00000452266
MDWKEVLRRRLATPNTCPNTAC

SEQ ID NO: 68809 - protein, 22 aa, Homo sapiens
  Payload ID: 13688
  Gene Symbol: PPP2R3C
  Gene Name: protein phosphatase 2, regulatory subunit B'', gamma
  ENSP ID: ENSP00000452436
MDWKEVLRRRLATPNTCPNTAC

SEQ ID NO: 68810 - protein, 106 aa, Homo sapiens
  Payload ID: 13688
  Gene Symbol: PPP2R3C
  Gene Name: protein phosphatase 2, regulatory subunit B'', gamma
  ENSP ID: ENSP00000452534
MDWKEVLRRRLATPNTCPNKKKSEQELKDEEMDLFTKYYSEWKGGRKNTNEFYKTIPRFYYRLPAEDEVLLQKLREESRAVFLQRKSRELLDNEELQAIFHSKSLC

SEQ ID NO: 68811 - protein, 329 aa, Homo sapiens
  Payload ID: 13689
  Gene Symbol: PPP2R4
  Gene Name: protein phosphatase 2A activator, regulatory subunit 4
  ENSP ID: ENSP00000335200
MAEGERQPPPDSSEEAPPATQNFIIPKKEIHTVPDMGKWKRSQVPFGTVAYADYIGFILTLNEGVKGKKLTFEYRVSEAIEKLVALLNTLDRWIDETPPVDQPSRFGNKAYRTWYAKLDEEAENLVATVVPTHLAAAVPEVAVYLKESVGNSTRIDYGTGHEAAFAAFLCCLCKIGVLRVDDQIAIVFKVFNRYLEVMRKLQKTYRMEPAGSQGVWGLDDFQFLPFIWGSSQLIDHPYLEPRHFVDEKAVNENHKDYMFLECILFITEMKTGPFAEHSNQLWNISAVPSWSKVNQGLIRMYKAECLEKFPVIQHFKFGSLLPIHPVTSG

SEQ ID NO: 68812 - protein, 104 aa, Homo sapiens
  Payload ID: 13689
  Gene Symbol: PPP2R4
  Gene Name: protein phosphatase 2A activator, regulatory subunit 4
  ENSP ID: ENSP00000337412
MAEGERQPPPDSSEEAPPATQNFIIPKKEIHTVPDMGKWKRSQMKTGPFAEHSNQLWNISAVPSWSKVNQGLIRMYKAECLEKFPVIQHFKFGSLLPIHPVTSG

SEQ ID NO: 68813 - protein, 358 aa, Homo sapiens
  Payload ID: 13689
  Gene Symbol: PPP2R4
  Gene Name: protein phosphatase 2A activator, regulatory subunit 4
  Uniprot ID: Q15257
  ENSP ID: ENSP00000337448
MAEGERQPPPDSSEEAPPATQNFIIPKKEIHTVPDMGKWKRSQAYADYIGFILTLNEGVKGKKLTFEYRVSEMWNEVHEEKEQAAKQSVSCDECIPLPRAGHCAPSEAIEKLVALLNTLDRWIDETPPVDQPSRFGNKAYRTWYAKLDEEAENLVATVVPTHLAAAVPEVAVYLKESVGNSTRIDYGTGHEAAFAAFLCCLCKIGVLRVDDQIAIVFKVFNRYLEVMRKLQKTYRMEPAGSQGVWGLDDFQFLPFIWGSSQLIDHPYLEPRHFVDEKAVNENHKDYMFLECILFITEMKTGPFAEHSNQLWNISAVPSWSKVNQGLIRMYKAECLEKFPVIQHFKFGSLLPIHPVTSG

SEQ ID NO: 68814 - protein, 281 aa, Homo sapiens
  Payload ID: 13689
  Gene Symbol: PPP2R4
  Gene Name: protein phosphatase 2A activator, regulatory subunit 4
  Uniprot ID: Q15257
  ENSP ID: ENSP00000347109
MAEGERQPPPDSSEEAPPATQNFIIPKKEIHTVPDMGKWKRSQAYADYIGFILTLNEGVKGKKLTFEYRVSEEAENLVATVVPTHLAAAVPEVAVYLKESVGNSTRIDYGTGHEAAFAAFLCCLCKIGVLRVDDQIAIVFKVFNRYLEVMRKLQKTYRMEPAGSQGVWGLDDFQFLPFIWGSSQLIDHPYLEPRHFVDEKAVNENHKDYMFLECILFITEMKTGPFAEHSNQLWNISAVPSWSKVNQGLIRMYKAECLEKFPVIQHFKFGSLLPIHPVTSG

SEQ ID NO: 68815 - protein, 294 aa, Homo sapiens
  Payload ID: 13689
  Gene Symbol: PPP2R4
  Gene Name: protein phosphatase 2A activator, regulatory subunit 4
  Uniprot ID: Q15257
  ENSP ID: ENSP00000349726
MAEGERQPPPDSSEEAPPATQNFIIPKKEIHTVPDMGKWKRSQAIEKLVALLNTLDRWIDETPPVDQPSRFGNKAYRTWYAKLDEEAENLVATVVPTHLAAAVPEVAVYLKESVGNSTRIDYGTGHEAAFAAFLCCLCKIGVLRVDDQIAIVFKVFNRYLEVMRKLQKTYRMEPAGSQGVWGLDDFQFLPFIWGSSQLIDHPYLEPRHFVDEKAVNENHKDYMFLECILFITEMKTGPFAEHSNQLWNISAVPSWSKVNQGLIRMYKAECLEKFPVIQHFKFGSLLPIHPVTSG

SEQ ID NO: 68816 - protein, 323 aa, Homo sapiens
  Payload ID: 13689
  Gene Symbol: PPP2R4
  Gene Name: protein phosphatase 2A activator, regulatory subunit 4
  Uniprot ID: Q15257
  ENSP ID: ENSP00000351885
MAEGERQPPPDSSEEAPPATQNFIIPKKEIHTVPDMGKWKRSQAYADYIGFILTLNEGVKGKKLTFEYRVSEAIEKLVALLNTLDRWIDETPPVDQPSRFGNKAYRTWYAKLDEEAENLVATVVPTHLAAAVPEVAVYLKESVGNSTRIDYGTGHEAAFAAFLCCLCKIGVLRVDDQIAIVFKVFNRYLEVMRKLQKTYRMEPAGSQGVWGLDDFQFLPFIWGSSQLIDHPYLEPRHFVDEKAVNENHKDYMFLECILFITEMKTGPFAEHSNQLWNISAVPSWSKVNQGLIRMYKAECLEKFPVIQHFKFGSLLPIHPVTSG

SEQ ID NO: 68817 - protein, 323 aa, Homo sapiens; identical to SEQ ID NO: 68816
  Payload ID: 13689
  Gene Symbol: PPP2R4
  Gene Name: protein phosphatase 2A activator, regulatory subunit 4
  Uniprot ID: Q15257
  ENSP ID: ENSP00000377036

SEQ ID NO: 68818 - protein, 61 aa, Homo sapiens
  Payload ID: 13689
  Gene Symbol: PPP2R4
  Gene Name: protein phosphatase 2A activator, regulatory subunit 4
  ENSP ID: ENSP00000387726
MKTGPFAEHSNQLWNISAVPSWSKVNQGLIRMYKAECLEKFPVIQHFKFGSLLPIHPVTSG

SEQ ID NO: 68819 - protein, 41 aa, Homo sapiens
  Payload ID: 13689
  Gene Symbol: PPP2R4
  Gene Name: protein phosphatase 2A activator, regulatory subunit 4
  ENSP ID: ENSP00000389312
MKTGPFAEHSNQLWNISAVPSWSKVNQGLIRMYKAEAGPCD

SEQ ID NO: 68820 - protein, 129 aa, Homo sapiens
  Payload ID: 13689
  Gene Symbol: PPP2R4
  Gene Name: protein phosphatase 2A activator, regulatory subunit 4
  ENSP ID: ENSP00000393092
MGKWKRSQAYADYIGFILTLNEGVKGKKLTFEYRVSEAIEKLVALLNTLDRWIDETPPVDQPSRFGNKAYRTWYAKLDEEAENLVATVVPTHLAAAVPEVAVYLKESVGNSTRIDYGTGHEAAFAAFLC

SEQ ID NO: 68821 - protein, 151 aa, Homo sapiens
  Payload ID: 13689
  Gene Symbol: PPP2R4
  Gene Name: protein phosphatase 2A activator, regulatory subunit 4
  ENSP ID: ENSP00000393196
MKTGPFAEHSNQLWNISAVPSWSKVNQGLIRMYKAEVSGGWPVCPSLLPHLVLGWGQSKRCGTWGSCFLLPHCFALNLRPAPLTLGASESPIWGMGSQRSTSHPSPEKLQSSSVLMSLEAEARTCCMGSGGDGGLPSPLSSGQRLLKARAV

SEQ ID NO: 68822 - protein, 64 aa, Homo sapiens
  Payload ID: 13689
  Gene Symbol: PPP2R4
  Gene Name: protein phosphatase 2A activator, regulatory subunit 4
  ENSP ID: ENSP00000393796
MGKWKRSQAYADYIGFILTLNEGVKGKKLTFEYRVSEAIEKLVALLNTLDRWIDETPPVDQPSR

SEQ ID NO: 68823 - protein, 61 aa, Homo sapiens; identical to SEQ ID NO: 68818
  Payload ID: 13689
  Gene Symbol: PPP2R4
  Gene Name: protein phosphatase 2A activator, regulatory subunit 4
  ENSP ID: ENSP00000394001

SEQ ID NO: 68824 - protein, 288 aa, Homo sapiens
  Payload ID: 13689
  Gene Symbol: PPP2R4
  Gene Name: protein phosphatase 2A activator, regulatory subunit 4
  ENSP ID: ENSP00000394338
MGKWKRSQAYADYIGFILTLNEGVKGKKLTFEYRVSEAIEKLVALLNTLDRWIDETPPVDQPSRFGNKAYRTWYAKLDEEAENLVATVVPTHLAAAVPEVAVYLKESVGNSTRIDYGTGHEAAFAAFLCCLCKIGVLRVDDQIAIVFKVFNRYLEVMRKLQKTYRMEPAGSQGVWGLDDFQFLPFIWGSSQLIDHPYLEPRHFVDEKAVNENHKDYMFLECILFITEMKTGPFAEHSNQLWNISAVPSWSKVNQGLIRMYKAECLEKFPVIQHFKFGSLLPIHPVTSG

SEQ ID NO: 68825 - protein, 250 aa, Homo sapiens
  Payload ID: 13689
  Gene Symbol: PPP2R4
  Gene Name: protein phosphatase 2A activator, regulatory subunit 4
  ENSP ID: ENSP00000395499
MAEGERQPPPDSSEEAPPATQNFIIPKKEIHTVPDMGKWKRSQAYADYIGFILTLNEGVKGKKLTFEYRVSEMWNEVHEEKEQAAKQSVSCDECIPLPRAGHCAPSEAIEKLVALLNTLDRWIDETPPVDQPSRFGNKAYRTWYAKLDEEAENLVATVVPTHLAAAVPEVAVYLKESVGNSTRIDYGTGHEAAFAAFLCCLCKIGVLRVDDQIAIVFKVFNRYLEVMRKLQKTYRMEPAGSQGVWGLDDF

SEQ ID NO: 68826 - protein, 120 aa, Homo sapiens
  Payload ID: 13689
  Gene Symbol: PPP2R4
  Gene Name: protein phosphatase 2A activator, regulatory subunit 4
  ENSP ID: ENSP00000396660
  MOD_RES (1)..(1): Any amino acid
XYLEVMRKLQKTYRMEPAGSQGVWGLDDFQFLPFIWGSSQLIDHPYLEPRHFVDEKAVNENHKDYMFLECILFITEVRRRGEREAHGCLQAQMNQGWWPYSGSEEPELLPKMAGPAGAGY

SEQ ID NO: 68827 - protein, 132 aa, Homo sapiens
  Payload ID: 13689
  Gene Symbol: PPP2R4
  Gene Name: protein phosphatase 2A activator, regulatory subunit 4
  ENSP ID: ENSP00000399069
MWNEVHEEKEQAAKQSVSCDECIPLPRAGHCAPSEAIEKLVALLNTLDRWIDETPPVDQPSRFGNKAYRTWYAKLDEEAENLVATVVPTHLAAAVPEVAVYLKESVGNSTRIDYGTGHEAAFAAFLCCLCKI

SEQ ID NO: 68828 - protein, 176 aa, Homo sapiens
  Payload ID: 13689
  Gene Symbol: PPP2R4
  Gene Name: protein phosphatase 2A activator, regulatory subunit 4
  ENSP ID: ENSP00000400314
MISAHCNPHLLDSGDPPASASQVAGTTDSSEEAPPATQNFIIPKKEIHTVPDMGKWKRSQVPFGTVAYADYIGFILTLNEGVKGKKLTFEYRVSEAIEKLVALLNTLDRWIDETPPVDQPSRFGNKAYRTWYAKLDEEAENLVATVVPTHLAAAVPEVAVYLKESVGNSTRIDYGT

SEQ ID NO: 68829 - protein, 263 aa, Homo sapiens
  Payload ID: 13689
  Gene Symbol: PPP2R4
  Gene Name: protein phosphatase 2A activator, regulatory subunit 4
  ENSP ID: ENSP00000403542
MGKWKRSQAYADYIGFILTLNEGVKGKKLTFEYRVSEAIEKLVALLNTLDRWIDETPPVDQPSRFGNKAYRTWYAKLDEEAENLVATVVPTHLAAAVPEVAVYLKESVGNSTRIDYGTGHEAAFAAFLCCLCKIGVLRVDDQIAIVFKVFNRYLEVMRKLQKTYRMEPAGSQGVWGLDDFQFLPFIWGSSQLIDHPYLEPRHFVDEKAVNENHKDYMFLECILFITEMKTGPFAEHSNQLWNISAVPSWSKVNQGLIRMYKAE

SEQ ID NO: 68830 - protein, 218 aa, Homo sapiens
  Payload ID: 13689
  Gene Symbol: PPP2R4
  Gene Name: protein phosphatase 2A activator, regulatory subunit 4
  ENSP ID: ENSP00000405100
  MOD_RES (1)..(1): Any amino acid
XKTYRMEPAGSQGVWGLDDFQFLPFIWGSSQLIDHPYLEPRHFVDEKAVNENHKDYMFLECILFITEMKTGPFAEHSNQLWNISAVPSWSKVNQGLIRMYKAEVSGGWPVCPSLLPHLVLGWGQSKRCGTWGSCFLLPHCFALNLRPAPLTLGASESPIWGMGSQRSTSHPSPEKLQSSSVLMSLEAEARTCCMGSGGDGGLPSPLSSGQRLLKARAV

SEQ ID NO: 68831 - protein, 253 aa, Homo sapiens
  Payload ID: 13689
  Gene Symbol: PPP2R4
  Gene Name: protein phosphatase 2A activator, regulatory subunit 4
  ENSP ID: ENSP00000406997
MAEGERQPPPDSSEEAPPATQNFIIPKKEIHTVPDMGKWKRSQAYADYIGFILTLNEGVKGKKLTFEYRVSEMWNEVHEEKEQAAKQSVSCDECIPLPRAGHCAPSEAIEKLVALLNTLDRWIDETPPVDQPSRFGNKAYRTWYAKLDEEAENLVATVVPTHLAAAVPEVAVYLKESVGNSTRIDYGTGHEAAFAAFLCCLCKIGVLRVDDQIAIVFKVFNRYLEVMRKLQKTYRMEPAGSQGVWGLDDFQFL

SEQ ID NO: 68832 - protein, 61 aa, Homo sapiens; identical to SEQ ID NO: 68818
  Payload ID: 13689
  Gene Symbol: PPP2R4
  Gene Name: protein phosphatase 2A activator, regulatory subunit 4
  ENSP ID: ENSP00000408316

SEQ ID NO: 68833 - protein, 61 aa, Homo sapiens; identical to SEQ ID NO: 68818
  Payload ID: 13689
  Gene Symbol: PPP2R4
  Gene Name: protein phosphatase 2A activator, regulatory subunit 4
  ENSP ID: ENSP00000408726

SEQ ID NO: 68834 - protein, 61 aa, Homo sapiens; identical to SEQ ID NO: 68818
  Payload ID: 13689
  Gene Symbol: PPP2R4
  Gene Name: protein phosphatase 2A activator, regulatory subunit 4
  ENSP ID: ENSP00000411604

SEQ ID NO: 68835 - protein, 77 aa, Homo sapiens
  Payload ID: 13689
  Gene Symbol: PPP2R4
  Gene Name: protein phosphatase 2A activator, regulatory subunit 4
  ENSP ID: ENSP00000416522
MKTGPFAEHSNQLWNISAVPSWSKVNQGLIRMYKAEASPSDTWGLGISHLGHGQSEKHQPPQPRKAAVQLCPDELGG

SEQ ID NO: 68836 - protein, 61 aa, Homo sapiens; identical to SEQ ID NO: 68818
  Payload ID: 13689
  Gene Symbol: PPP2R4
  Gene Name: protein phosphatase 2A activator, regulatory subunit 4
  ENSP ID: ENSP00000416661

SEQ ID NO: 68837 - protein, 376 aa, Homo sapiens
  Payload ID: 13690
  Gene Symbol: PP2D1
  Gene Name: protein phosphatase 2C-like domain containing 1
  Uniprot ID: A8MPX8
  ENSP ID: ENSP00000331295
MSTNNALRVFWKSREWNMKTSTFDSDEDILLLPKRKRFRKKKSRPVRHTKRHEEEQVYEQGTTLPCSICKHEIDLTGIFLHKKQHVALATLGFQWMGRKKPQPSVIAVQRQFMISKLLSSFMFTEKTLQSINNAFELLWKKQIPAYYKIFDNIDRSVIYSQKICHLLIKGVGICEDRNSTWKADMNDKFTVVSNFGNKPNVCFFGLFDGHHGASAAELTSMELPVLLLHQLSKFDPSYQMTTDEQQIINSFYTVFREEYAAIEDLFSAINKTEAVRCEYEDTHKAFAKAFWRMDRLLGLGRKEVSRVQWSGCSAVTCILEGKPKSPYAHKNWKRKNTHDGLAESSPSQEMPKIISGILHVANTGTRRNEHLPEYYG

SEQ ID NO: 68838 - protein, 630 aa, Homo sapiens
  Payload ID: 13690
  Gene Symbol: PP2D1
  Gene Name: protein phosphatase 2C-like domain containing 1
  Uniprot ID: A8MPX8
  ENSP ID: ENSP00000373702
MSTNNALRVFWKSREWNMKTSTFDSDEDILLLPKRKRFRKKKSRPVRHTKRHEEEQVYEQGTTLPCSICKHEIDLTGIFLHKKQHVALATLGFQWMGRKKPQPSVIAVQRQFMISKLLSSFMFTEKTLQSINNAFELLWKKQIPAYYKIFDNIDRSVIYSQKICHLLIKGVGICEDRNSTWKADMNDKFTVVSNFGNKPNVCFFGLFDGHHGASAAELTSMELPVLLLHQLSKFDPSYQMTTDEQQIINSFYTVFREEYAAIEDLFSAINKTEAVRCEYEDTHKAFAKAFWRMDRLLGLGRKEVSRVQWSGCSAVTCILEGKPKSPYAHKNWKRKNTHDGLAESSPSQEMPKIISGILHVANTGNVQAVLCRNGKGFCLTKEHTTRNTNERRRILQNGAVISSNEPYGLVEGQVKTTRGLGFHGNLKLKKSIIPAPQTISVPIDDLCQFLIVATNGLWEVLDKEEVTALAMTTFHMYKETYCPIIPNKSPSKGPLLFSTSEPNLTKSQSNIHVLFQYKSVSEVRVSTTNSKENLSDSNYSKYCIYNPENVETFPAETTHRKPCSEKVTDRPTSVNDVATNEKESDTKSFYEGAAEYVSHELVNAALLAGSRDNITVMVIFLNGSEYQLLT

SEQ ID NO: 68839 - protein, 469 aa, Homo sapiens
  Payload ID: 13691
  Gene Symbol: PPP3CA
  Gene Name: protein phosphatase 3, catalytic subunit, alpha isozyme
  Uniprot ID: Q08209
  ENSP ID: ENSP00000320580
MSEPKAIDPKLSTTDRVVKAVPFPPSHRLTAKEVFDNDGKPRVDILKAHLMKEGRLEESVALRIITEGASILRQEKNLLDIDAPVTVCGDIHGQFFDLMKLFEVGGSPANTRYLFLGDYVDRGYFSIECVLYLWALKILYPKTLFLLRGNHECRHLTEYFTFKQECKIKYSERVYDACMDAFDCLPLAALMNQQFLCVHGGLSPEINTLDDIRKLDRFKEPPAYGPMCDILWSDPLEDFGNEKTQEHFTHNTVRGCSYFYSYPAVCEFLQHNNLLSILRAHEAQDAGYRMYRKSQTTGFPSLITIFSAPNYLDVYNNKVTEMLVNVLNICSDDELGSEEDGFDGATAAARKEVIRNKIRAIGKMARVFSVLREESESVLTLKGLTPTGMLPSGVLSGGKQTLQSAIKGFSPQHKITSFEEAKGLDRINERMPPRRDAMPSDANLNSINKALTSETNGTDSNGSNSSNIQ

SEQ ID NO: 68840 - protein, 511 aa, Homo sapiens
  Payload ID: 13691
  Gene Symbol: PPP3CA
  Gene Name: protein phosphatase 3, catalytic subunit, alpha isozyme
  Uniprot ID: Q08209
  ENSP ID: ENSP00000378322
MSEPKAIDPKLSTTDRVVKAVPFPPSHRLTAKEVFDNDGKPRVDILKAHLMKEGRLEESVALRIITEGASILRQEKNLLDIDAPVTVCGDIHGQFFDLMKLFEVGGSPANTRYLFLGDYVDRGYFSIECVLYLWALKILYPKTLFLLRGNHECRHLTEYFTFKQECKIKYSERVYDACMDAFDCLPLAALMNQQFLCVHGGLSPEINTLDDIRKLDRFKEPPAYGPMCDILWSDPLEDFGNEKTQEHFTHNTVRGCSYFYSYPAVCEFLQHNNLLSILRAHEAQDAGYRMYRKSQTTGFPSLITIFSAPNYLDVYNNKAAVLKYENNVMNIRQFNCSPHPYWLPNFMDVFTWSLPFVGEKVTEMLVNVLNICSDDELGSEEDGFDGATAAARKEVIRNKIRAIGKMARVFSVLREESESVLTLKGLTPTGMLPSGVLSGGKQTLQSAIKGFSPQHKITSFEEAKGLDRINERMPPRRDAMPSDANLNSINKALTSETNGTDSNGSNSSNIQ

SEQ ID NO: 68841 - protein, 521 aa, Homo sapiens
  Payload ID: 13691
  Gene Symbol: PPP3CA
  Gene Name: protein phosphatase 3, catalytic subunit, alpha isozyme
  Uniprot ID: Q08209
  ENSP ID: ENSP00000378323
MSEPKAIDPKLSTTDRVVKAVPFPPSHRLTAKEVFDNDGKPRVDILKAHLMKEGRLEESVALRIITEGASILRQEKNLLDIDAPVTVCGDIHGQFFDLMKLFEVGGSPANTRYLFLGDYVDRGYFSIECVLYLWALKILYPKTLFLLRGNHECRHLTEYFTFKQECKIKYSERVYDACMDAFDCLPLAALMNQQFLCVHGGLSPEINTLDDIRKLDRFKEPPAYGPMCDILWSDPLEDFGNEKTQEHFTHNTVRGCSYFYSYPAVCEFLQHNNLLSILRAHEAQDAGYRMYRKSQTTGFPSLITIFSAPNYLDVYNNKAAVLKYENNVMNIRQFNCSPHPYWLPNFMDVFTWSLPFVGEKVTEMLVNVLNICSDDELGSEEDGFDGATAAARKEVIRNKIRAIGKMARVFSVLREESESVLTLKGLTPTGMLPSGVLSGGKQTLQSATVEAIEADEAIKGFSPQHKITSFEEAKGLDRINERMPPRRDAMPSDANLNSINKALTSETNGTDSNGSNSSNIQ

SEQ ID NO: 68842 - protein, 289 aa, Homo sapiens
  Payload ID: 13691
  Gene Symbol: PPP3CA
  Gene Name: protein phosphatase 3, catalytic subunit, alpha isozyme
  Uniprot ID: Q08209
  ENSP ID: ENSP00000422781
MSEPKAIDPKLSTTDRVVKAVPFPPSHRLTAKEVFDNDGKPRVDILKAHLMKEGRLEESVALRIITEGASILRQEKNLLDIDAPVTAAVLKYENNVMNIRQFNCSPHPYWLPNFMDVFTWSLPFVGEKVTEMLVNVLNICSDDELGSEEDGFDGATAAARKEVIRNKIRAIGKMARVFSVLREESESVLTLKGLTPTGMLPSGVLSGGKQTLQSATVEAIEADEAIKGFSPQHKITSFEEAKGLDRINERMPPRRDAMPSDANLNSINKALTSETNGTDSNGSNSSNIQ

SEQ ID NO: 68843 - protein, 423 aa, Homo sapiens
  Payload ID: 13691
  Gene Symbol: PPP3CA
  Gene Name: protein phosphatase 3, catalytic subunit, alpha isozyme
  ENSP ID: ENSP00000422990
MKLFEVGGSPANTRYLFLGDYVDRGYFSIECVLYLWALKILYPKTLFLLRGNHECRHLTEYFTFKQECKIKYSERVYDACMDAFDCLPLAALMNQQFLCVHGGLSPEINTLDDIRKLDRFKEPPAYGPMCDILWSDPLEDFGNEKTQEHFTHNTVRGCSYFYSYPAVCEFLQHNNLLSILRAHEAQDAGYRMYRKSQTTGFPSLITIFSAPNYLDVYNNKAAVLKYENNVMNIRQFNCSPHPYWLPNFMDVFTWSLPFVGEKVTEMLVNVLNICSDDELGSEEDGFDGATAAARKEVIRNKIRAIGKMARVFSVLREESESVLTLKGLTPTGMLPSGVLSGGKQTLQSATVEAIEADEAIKGFSPQHKITSFEEAKGLDRINERMPPRRDAMPSDANLNSINKALTSETNGTDSNGSNSSNIQ

SEQ ID NO: 68844 - protein, 16 aa, Homo sapiens
  Payload ID: 13691
  Gene Symbol: PPP3CA
  Gene Name: protein phosphatase 3, catalytic subunit, alpha isozyme
  ENSP ID: ENSP00000426565
APVTEAPQMTPIHTPR

SEQ ID NO: 68845 - protein, 147 aa, Homo sapiens
  Payload ID: 13691
  Gene Symbol: PPP3CA
  Gene Name: protein phosphatase 3, catalytic subunit, alpha isozyme
  ENSP ID: ENSP00000431619
MKEGRLEESVALRIITEGASILRQEKNLLDIDAPVTVCGDIHGQFFDLMKLFEVGGSPANTRYLFLGDYVDRGYFSIECVLYLWALKILYPKTLFLLRGNHECRHLTEYFTFKQECKIKYSERVYDACMDAFDCLPLAALMNQQFLC

SEQ ID NO: 68846 - protein, 132 aa, Homo sapiens
  Payload ID: 13691
  Gene Symbol: PPP3CA
  Gene Name: protein phosphatase 3, catalytic subunit, alpha isozyme
  ENSP ID: ENSP00000434599
MKEGRLEESVALRIITEGASILRQEKNLLDIDAPVTVCGDIHGQFFDLMKLFEVGGSPANTRYLFLGDYVDRGYFSIECVLYLWALKILYPKTLFLLRGNHECRHLTEYFTFKQECKIKYSERVYDACMDAF

SEQ ID NO: 68847 - protein, 496 aa, Homo sapiens
  Payload ID: 13692
  Gene Symbol: PPP3CB
  Gene Name: protein phosphatase 3, catalytic subunit, beta isozyme
  ENSP ID: ENSP00000343147
MAAPEPARAAPPPPPPPPPPPGADRVVKAVPFPPTHRLTSEEVFDLDGIPRVDVLKNHLVKEGRVDEEIALRIINEGAAILRREKTMIEVEAPITVCGDIHGQFFDLMKLFEVGGSPANTRYLFLGDYVDRGYFSIECVLYLWVLKILYPSTLFLLRGNHECRHLTEYFTFKQECKIKYSERVYEACMEAFDSLPLAALLNQQFLCVHGGLSPEIHTLDDIRRLDRFKEPPAFGPMCDLLWSDPSEDFGNEKSQEHFSHNTVRGCSYFYNYPAVCEFLQNNNLLSIIRAHEAQDAGYRMYRKSQTTGFPSLITIFSAPNYLDVYNNKAAVLKYENNVMNIRQFNCSPHPYWLPNFMDVFTWSLPFVGEKVTEMLVNVLSICSDDELMTEGEDQFDGSAAARKEIIRNKIRAIGKMARVFSVLREESESVLTLKGLTPTGMLPSGVLAGGRQTLQSGNDVMQLAVPQMDWGTPHSFANNSHNACREFLLFFSSCLSS

SEQ ID NO: 68848 - protein, 524 aa, Homo sapiens
  Payload ID: 13692
  Gene Symbol: PPP3CB
  Gene Name: protein phosphatase 3, catalytic subunit, beta isozyme
  Uniprot ID: P16298
  ENSP ID: ENSP00000353881
MAAPEPARAAPPPPPPPPPPPGADRVVKAVPFPPTHRLTSEEVFDLDGIPRVDVLKNHLVKEGRVDEEIALRIINEGAAILRREKTMIEVEAPITVCGDIHGQFFDLMKLFEVGGSPANTRYLFLGDYVDRGYFSIECVLYLWVLKILYPSTLFLLRGNHECRHLTEYFTFKQECKIKYSERVYEACMEAFDSLPLAALLNQQFLCVHGGLSPEIHTLDDIRRLDRFKEPPAFGPMCDLLWSDPSEDFGNEKSQEHFSHNTVRGCSYFYNYPAVCEFLQNNNLLSIIRAHEAQDAGYRMYRKSQTTGFPSLITIFSAPNYLDVYNNKAAVLKYENNVMNIRQFNCSPHPYWLPNFMDVFTWSLPFVGEKVTEMLVNVLSICSDDELMTEGEDQFDGSAAARKEIIRNKIRAIGKMARVFSVLREESESVLTLKGLTPTGMLPSGVLAGGRQTLQSATVEAIEAEKAIRGFSPPHRICSFEEAKGLDRINERMPPRKDAVQQDGFNSLNTAHATENHGTGNHTAQ

SEQ ID NO: 68849 - protein, 515 aa, Homo sapiens
  Payload ID: 13692
  Gene Symbol: PPP3CB
  Gene Name: protein phosphatase 3, catalytic subunit, beta isozyme
  Uniprot ID: P16298
  ENSP ID: ENSP00000378305
MAAPEPARAAPPPPPPPPPPPGADRVVKAVPFPPTHRLTSEEVFDLDGIPRVDVLKNHLVKEGRVDEEIALRIINEGAAILRREKTMIEVEAPITVCGDIHGQFFDLMKLFEVGGSPANTRYLFLGDYVDRGYFSIECVLYLWVLKILYPSTLFLLRGNHECRHLTEYFTFKQECKIKYSERVYEACMEAFDSLPLAALLNQQFLCVHGGLSPEIHTLDDIRRLDRFKEPPAFGPMCDLLWSDPSEDFGNEKSQEHFSHNTVRGCSYFYNYPAVCEFLQNNNLLSIIRAHEAQDAGYRMYRKSQTTGFPSLITIFSAPNYLDVYNNKAAVLKYENNVMNIRQFNCSPHPYWLPNFMDVFTWSLPFVGEKVTEMLVNVLSICSDDELMTEGEDQFDVGSAAARKEIIRNKIRAIGKMARVFSVLREESESVLTLKGLTPTGMLPSGVLAGGRQTLQSAIRGFSPPHRICSFEEAKGLDRINERMPPRKDAVQQDGFNSLNTAHATENHGTGNHTAQ

SEQ ID NO: 68850 - protein, 525 aa, Homo sapiens
  Payload ID: 13692
  Gene Symbol: PPP3CB
  Gene Name: protein phosphatase 3, catalytic subunit, beta isozyme
  Uniprot ID: P16298
  ENSP ID: ENSP00000378306
MAAPEPARAAPPPPPPPPPPPGADRVVKAVPFPPTHRLTSEEVFDLDGIPRVDVLKNHLVKEGRVDEEIALRIINEGAAILRREKTMIEVEAPITVCGDIHGQFFDLMKLFEVGGSPANTRYLFLGDYVDRGYFSIECVLYLWVLKILYPSTLFLLRGNHECRHLTEYFTFKQECKIKYSERVYEACMEAFDSLPLAALLNQQFLCVHGGLSPEIHTLDDIRRLDRFKEPPAFGPMCDLLWSDPSEDFGNEKSQEHFSHNTVRGCSYFYNYPAVCEFLQNNNLLSIIRAHEAQDAGYRMYRKSQTTGFPSLITIFSAPNYLDVYNNKAAVLKYENNVMNIRQFNCSPHPYWLPNFMDVFTWSLPFVGEKVTEMLVNVLSICSDDELMTEGEDQFDVGSAAARKEIIRNKIRAIGKMARVFSVLREESESVLTLKGLTPTGMLPSGVLAGGRQTLQSATVEAIEAEKAIRGFSPPHRICSFEEAKGLDRINERMPPRKDAVQQDGFNSLNTAHATENHGTGNHTAQ

SEQ ID NO: 68851 - protein, 187 aa, Homo sapiens
  Payload ID: 13692
  Gene Symbol: PPP3CB
  Gene Name: protein phosphatase 3, catalytic subunit, beta isozyme
  ENSP ID: ENSP00000398022
HPYWLPNFMDVFTWSLPFVGEKVTEMLVNVLSICSDDELMTEGEDQFDERLIYGNKKVGSAAARKEIIRNKIRAIGKMARVFSVLREESESVLTLKGLTPTGMLPSGVLAGGRQTLQSATVEAIEAEKAIRGFSPPHRICSFEEAKGLDRINERMPPRKDAVQQDGFNSLNTAHATENHGTGNHTAQ

SEQ ID NO: 68852 - protein, 512 aa, Homo sapiens
  Payload ID: 13693
  Gene Symbol: PPP3CC
  Gene Name: protein phosphatase 3, catalytic subunit, gamma isozyme
  Uniprot ID: P48454
  ENSP ID: ENSP00000240139
MSGRRFHLSTTDRVIKAVPFPPTQRLTFKEVFENGKPKVDVLKNHLVKEGRLEEEVALKIINDGAAILRQEKTMIEVDAPITVCGDIHGQFFDLMKLFEVGGSPSNTRYLFLGDYVDRGYFSIECVLYLWSLKINHPKTLFLLRGNHECRHLTDYFTFKQECRIKYSEQVYDACMETFDCLPLAALLNQQFLCVHGGMSPEITSLDDIRKLDRFTEPPAFGPVCDLLWSDPSEDYGNEKTLEHYTHNTVRGCSYFYSYPAVCEFLQNNNLLSIIRAHEAQDAGYRMYRKSQATGFPSLITIFSAPNYLDVYNNKAAVLKYENNVMNIRQFNCSPHPYWLPNFMDVFTWSLPFVGEKVTEMLVNVLNICSDDELISDDEAEGSTTVRKEIIRNKIRAIGKMARVFSILRQESESVLTLKGLTPTGTLPLGVLSGGKQTIETATVEAVEAREAIRGFSLQHKIRSFEEARGLDRINERMPPRKDSIHAGGPMKSVTSAHSHAAHRSDQGKKAHS

SEQ ID NO: 68853 - protein, 502 aa, Homo sapiens
  Payload ID: 13693
  Gene Symbol: PPP3CC
  Gene Name: protein phosphatase 3, catalytic subunit, gamma isozyme
  Uniprot ID: P48454
  ENSP ID: ENSP00000289963
MSGRRFHLSTTDRVIKAVPFPPTQRLTFKEVFENGKPKVDVLKNHLVKEGRLEEEVALKIINDGAAILRQEKTMIEVDAPITVCGDIHGQFFDLMKLFEVGGSPSNTRYLFLGDYVDRGYFSIECVLYLWSLKINHPKTLFLLRGNHECRHLTDYFTFKQECRIKYSEQVYDACMETFDCLPLAALLNQQFLCVHGGMSPEITSLDDIRKLDRFTEPPAFGPVCDLLWSDPSEDYGNEKTLEHYTHNTVRGCSYFYSYPAVCEFLQNNNLLSIIRAHEAQDAGYRMYRKSQATGFPSLITIFSAPNYLDVYNNKAAVLKYENNVMNIRQFNCSPHPYWLPNFMDVFTWSLPFVGEKVTEMLVNVLNICSDDELISDDEAEGSTTVRKEIIRNKIRAIGKMARVFSILRQESESVLTLKGLTPTGTLPLGVLSGGKQTIETAIRGFSLQHKIRSFEEARGLDRINERMPPRKDSIHAGGPMKSVTSAHSHAAHRSDQGKKAHS

SEQ ID NO: 68854 - protein, 521 aa, Homo sapiens
  Payload ID: 13693
  Gene Symbol: PPP3CC
  Gene Name: protein phosphatase 3, catalytic subunit, gamma isozyme
  Uniprot ID: P48454
  ENSP ID: ENSP00000380878
MSGRRFHLSTTDRVIKAVPFPPTQRLTFKEVFENGKPKVDVLKNHLVKEGRLEEEVALKIINDGAAILRQEKTMIEVDAPITVCGDIHGQFFDLMKLFEVGGSPSNTRYLFLGDYVDRGYFSIECVLYLWSLKINHPKTLFLLRGNHECRHLTDYFTFKQECRIKYSEQVYDACMETFDCLPLAALLNQQFLCVHGGMSPEITSLDDIRKLDRFTEPPAFGPVCDLLWSDPSEDYGNEKTLEHYTHNTVRGCSYFYSYPAVCEFLQNNNLLSIIRAHEAQDAGYRMYRKSQATGFPSLITIFSAPNYLDVYNNKAAVLKYENNVMNIRQFNCSPHPYWLPNFMDVFTWSLPFVGEKVTEMLVNVLNICSDDELISDDEAEDHYIPSYQKGSTTVRKEIIRNKIRAIGKMARVFSILRQESESVLTLKGLTPTGTLPLGVLSGGKQTIETATVEAVEAREAIRGFSLQHKIRSFEEARGLDRINERMPPRKDSIHAGGPMKSVTSAHSHAAHRSDQGKKAHS

SEQ ID NO: 68855 - protein, 153 aa, Homo sapiens
  Payload ID: 13693
  Gene Symbol: PPP3CC
  Gene Name: protein phosphatase 3, catalytic subunit, gamma isozyme
  ENSP ID: ENSP00000428358
ARPAGSWSLEEAEGTMSGRRFHLSTTDRVIKAVPFPPTQRLTFKEVFENGKPKVDVLKNHLVKEGRLEEEVALKIINDGAAILRQEKTMIEVDAPITVCGDIHGQFFDLMKLFEVGGSPSNTRYLFLGDYVDRGYFSIEVKIKLDMLGLLYCL

SEQ ID NO: 68856 - protein, 202 aa, Homo sapiens
  Payload ID: 13693
  Gene Symbol: PPP3CC
  Gene Name: protein phosphatase 3, catalytic subunit, gamma isozyme
  ENSP ID: ENSP00000428390
  MOD_RES (1)..(1): Any amino acid
XCVLYLWSLKINHPKTLFLLRGNHECRHLTDYFTFKQECRIKYSEQVYDACMETFDCLPLAALLNQQFLCVHGGMSPEITSLDDIRKLDRFTEPPAFGPVCDLLWSDPSEDYGNEKTLEHYTHNTVRGCSYFYSYPAVCEFLQNNNLLSIIRAHEAQDAGYRMYRKSQATGFPSLITIFSAPNYLDVYNNKESATHSFDYPQ

SEQ ID NO: 68857 - protein, 326 aa, Homo sapiens
  Payload ID: 13693
  Gene Symbol: PPP3CC
  Gene Name: protein phosphatase 3, catalytic subunit, gamma isozyme
  ENSP ID: ENSP00000429379
MSGRRFHLSTTDRVIKAVPFPPTQRLTFKEVFENGKPKVDVLKNHLVKEGRLEEEVALKIINDGAAILRQEKTMIEVDAPITVCGDIHGQFFDLMKLFEVGGSPSNTRYLFLGDYVDRGYFSIECVLYLWSLKINHPKTLFLLRGNHECRHLTDYFTFKQECRIKYSEQVYDACMETFDCLPLAALLNQQFLCVHGGMSPEITSLDDIRKLDRFTEPPAFGPVCDLLWSDPSEDYGNEKTLEHYTHNTVRGCSYFYSYPAVCEFLQNNNLLSIIRAHEAQDAGYRMYRKSQATGFPSLITIFSAPNYLDVYNNKGKGIQQYLSLNL

SEQ ID NO: 68858 - protein, 134 aa, Homo sapiens
  Payload ID: 13693
  Gene Symbol: PPP3CC
  Gene Name: protein phosphatase 3, catalytic subunit, gamma isozyme
  ENSP ID: ENSP00000430555
METFDCLPLAALLNQQFLCVHGGMSPEITSLDDIRKLDRFTEPPAFGPVCDLLWSDPSEDYGNEKTLEHYTHNTVRGCSYFYSYPAVCEFLQNNNLLSIIRAHEAQDAGYRMYRKSQATGFPSLITIFSAPNYL

SEQ ID NO: 68859 - protein, 209 aa, Homo sapiens
  Payload ID: 13693
  Gene Symbol: PPP3CC
  Gene Name: protein phosphatase 3, catalytic subunit, gamma isozyme
  ENSP ID: ENSP00000430783
  MOD_RES (1)..(1): Any amino acid
XLCGQRLFQYRGRIKYSEQVYDACMETFDCLPLAALLNQQFLCVHGGMSPEITSLDDIRKLDRFTEPPAFGPVCDLLWSDPSEDYGNEKTLEHYTHNTVRGCSYFYSYPAVCEFLQNNNLLSIIRAHEAQDAGYRMYRKSQATGFPSLITIFSAPNYLDVYNNKAAVLKYENNVMNIRQFNCSPHPYWLPNFMDVFTWSLPFVGEKGKR

SEQ ID NO: 68860 - protein, 170 aa, Homo sapiens
  Payload ID: 13694
  Gene Symbol: PPP3R1
  Gene Name: protein phosphatase 3, regulatory subunit B, alpha
  Uniprot ID: P63098
  ENSP ID: ENSP00000234310
MGNEASYPLEMCSHFDADEIKRLGKRFKKLDLDNSGSLSVEEFMSLPELQQNPLVQRVIDIFDTDGNGEVDFKEFIEGVSQFSVKGDKEQKLRFAFRIYDMDKDGYISNGELFQVLKMMVGNNLKDTQLQQIVDKTIINADKDGDGRISFEEFCAVVGGLDIHKKMVVDV

SEQ ID NO: 68861 - protein, 160 aa, Homo sapiens
  Payload ID: 13694
  Gene Symbol: PPP3R1
  Gene Name: protein phosphatase 3, regulatory subunit B, alpha
  ENSP ID: ENSP00000387148
MCSHFDADEIKRLGKRFKKLDLDNSGSLSVEEFMSLPELQQNPLVQRVIDIFDTDGNGEVDFKEFIEGVSQFSVKGDKEQKLRFAFRIYDMDKDGYISNGELFQVLKMMVGNNLKDTQLQQIVDKTIINADKDGDGRISFEEFCAVVGGLDIHKKMVVDV

SEQ ID NO: 68862 - protein, 189 aa, Homo sapiens
  Payload ID: 13694
  Gene Symbol: PPP3R1
  Gene Name: protein phosphatase 3, regulatory subunit B, alpha
  ENSP ID: ENSP00000387216
MQPQCPLRRESCGMELCGKKGNEASYPLEMCSHFDADEIKRLGKRFKKLDLDNSGSLSVEEFMSLPELQQNPLVQRVIDIFDTDGNGEVDFKEFIEGVSQFSVKGDKEQKLRFAFRIYDMDKDGYISNGELFQVLKMMVGNNLKDTQLQQIVDKTIINADKDGDGRISFEEFCAVVGGLDIHKKMVVDV

SEQ ID NO: 68863 - protein, 173 aa, Homo sapiens
  Payload ID: 13695
  Gene Symbol: PPP3R2
  Gene Name: protein phosphatase 3, regulatory subunit B, beta
  Uniprot ID: Q96LZ3
  ENSP ID: ENSP00000363939
MSTMGNEASYPAEMCSHFDNDEIKRLGRRFKKLDLDKSGSLSVEEFMSLPELRHNPLVRRVIDVFDTDGDGEVDFKEFILGTSQFSVKGDEEQKLRFAFSIYDMDKDGYISNGELFQVLKMMVGNNLTDWQLQQLVDKTIIILDKDGDGKISFEEFSAVVRDLEIHKKLVLIV

SEQ ID NO: 68864 - protein, 307 aa, Homo sapiens
  Payload ID: 13696
  Gene Symbol: PPP4C
  Gene Name: protein phosphatase 4, catalytic subunit
  Uniprot ID: P60510
  ENSP ID: ENSP00000279387
MAEISDLDRQIEQLRRCELIKESEVKALCAKAREILVEESNVQRVDSPVTVCGDIHGQFYDLKELFRVGGDVPETNYLFMGDFVDRGFYSVETFLLLLALKVRYPDRITLIRGNHESRQITQVYGFYDECLRKYGSVTVWRYCTEIFDYLSLSAIIDGKIFCVHGGLSPSIQTLDQIRTIDRKQEVPHDGPMCDLLWSDPEDTTGWGVSPRGAGYLFGSDVVAQFNAANDIDMICRAHQLVMEGYKWHFNETVLTVWSAPNYCYRCGNVAAILELDEHLQKDFIIFEAAPQETRGIPSKKPVADYFL

SEQ ID NO: 68865 - protein, 50 aa, Homo sapiens
  Payload ID: 13696
  Gene Symbol: PPP4C
  Gene Name: protein phosphatase 4, catalytic subunit
  ENSP ID: ENSP00000455394
MAEISDLDRQIEQLRRCELIKESEVKALCAKARCAATSMDNSMTSKSCSE

SEQ ID NO: 68866 - protein, 307 aa, Homo sapiens; identical to SEQ ID NO: 68864
  Payload ID: 13696
  Gene Symbol: PPP4C
  Gene Name: protein phosphatase 4, catalytic subunit
  Uniprot ID: P60510
  ENSP ID: ENSP00000455995

SEQ ID NO: 68867 - protein, 267 aa, Homo sapiens
  Payload ID: 13696
  Gene Symbol: PPP4C
  Gene Name: protein phosphatase 4, catalytic subunit
  ENSP ID: ENSP00000457089
MAEISDLDRQIEQLRRCELIKESEVKALCAKAREILVEESNVQRVDSPVTVCGDIHGQFYDLKELFRVRYPDRITLIRGNHESRQITQVYGFYDECLRKYGSVTVWRYCTEIFDYLSLSAIIDGKIFCVHGGLSPSIQTLDQIRTIDRKQEVPHDGPMCDLLWSDPEDTTGWGVSPRGAGYLFGSDVVAQFNAANDIDMICRAHQLVMEGYKWHFNETVLTVWSAPNYCYRCGNVAAILELDEHLQKDFIIFEAAPQETRGIPSKKP

SEQ ID NO: 68868 - protein, 203 aa, Homo sapiens
  Payload ID: 13696
  Gene Symbol: PPP4C
  Gene Name: protein phosphatase 4, catalytic subunit
  ENSP ID: ENSP00000457915
MAEISDLDRQIEQLRRCELIKESEVKALCAKAREILVEESNVQRVDSPVTVCGDIHGQFYDLKELFRVRYPDRITLIRGNHESRQITQVYGFYDECLRKYGSVTVWRYCTEIFDYLSLSAIIDGKIFCVHGGLSPSIQTLDQIRTIDRKQEVPHDGPMCDLLWSDPEDTTGWGVSPRGAGYLFGSDVVAQFNAANDIDMICRA

SEQ ID NO: 68869 - protein, 56 aa, Homo sapiens
  Payload ID: 13696
  Gene Symbol: PPP4C
  Gene Name: protein phosphatase 4, catalytic subunit
  ENSP ID: ENSP00000458079
MAEISDLDRQIEQLRRCELIKESEVKALCAKARSGIGLGWPGCGDPGLLLSPERSW

SEQ ID NO: 68870 - protein, 120 aa, Homo sapiens
  Payload ID: 13696
  Gene Symbol: PPP4C
  Gene Name: protein phosphatase 4, catalytic subunit
  ENSP ID: ENSP00000461609
MAEISDLDRQIEQLRRCELIKESEVKALCAKAREILVEESNVQRVDSPVTVCGDIHGQFYDLKELFRVGGDVPETNYLFMGDFVDRGFYSVETFLLLLALKVAVPGFCTPNLGDLGPGLS

SEQ ID NO: 68871 - protein, 50 aa, Homo sapiens; identical to SEQ ID NO: 68865
  Payload ID: 13696
  Gene Symbol: PPP4C
  Gene Name: protein phosphatase 4, catalytic subunit
  ENSP ID: ENSP00000486140

SEQ ID NO: 68872 - protein, 84 aa, Homo sapiens
  Payload ID: 13697
  Gene Symbol: PPP4R1
  Gene Name: protein phosphatase 4, regulatory subunit 1
  ENSP ID: ENSP00000285124
MADLSLLQEDLQEDADGSLDFVSQDEMLTPLGRLDKYAASENIFNRTNCESGADGTGASHRTVLSRKPAFNTICFFKILTTYCG

SEQ ID NO: 68873 - protein, 933 aa, Homo sapiens
  Payload ID: 13697
  Gene Symbol: PPP4R1
  Gene Name: protein phosphatase 4, regulatory subunit 1
  Uniprot ID: Q8TF05
  ENSP ID: ENSP00000383401
MADLSLLQEDLQEDADGSLDFVSQDEMLTPLGRLDKYAASENIFNRQMVARSLLDTLREVCDDERDCIAVLERISRLADDSEPTVRAELMEQVPHIALFCQENRPSIPYAFSKFLLPIVVRYLADQNNQVRKTSQAALLALLEQELIERFDVETKVCPVLIELTAPDSNDDVKTEAVAIMCKMAPMVGKDITERLILPRFCEMCCDCRMFHVRKVCAANFGDICSVVGQQATEEMLLPRFFQLCSDNVWGVRKACAECFMAVSCATCQEIRRTKLSALFINLISDPSRWVRQAAFQSLGPFISTFANPSSSGQYFKEESKSSEEMSVENKNRTRDQEAPEDVQVRPEDTPSDLSVSNSSVILENTMEDHAAEASGKPLGEISVPLDSSLLCTLSSESHQEAASNENDKKPGNYKSMLRPEVGTTSQDSALLDQELYNSFHFWRTPLPEIDLDIELEQNSGGKPSPEGPEEESEGPVPSSPNITMATRKELEEMIENLEPHIDDPDVKAQVEVLSAALRASSLDAHEETISIEKRSDLQDELDINELPNCKINQEDSVPLISDAVENMDSTLHYIHSDSDLSNNSSFSPDEERRTKVQDVVPQALLDQYLSMTDPSRAQTVDTEIAKHCAYSLPGVALTLGRQNWHCLRETYETLASDMQWKVRRTLAFSIHELAVILGDQLTAADLVPIFNGFLKDLDEVRIGVLKHLHDFLKLLHIDKRREYLYQLQEFLVTDNSRNWRFRAELAEQLILLLELYSPRDVYDYLRPIALNLCADKVSSVRWISYKLVSEMVKKLHAATPPTFGVDLINELVENFGRCPKWSGRQAFVFVCQTVIEDDCLPMDQFAVHLMPHLLTLANDRVPNVRVLLAKTLRQTLLEKDYFLASASCHQEAVEQTIMALQMDRDSDVKYFASIHPASTKISEDAMSTASSTY

SEQ ID NO: 68874 - protein, 950 aa, Homo sapiens
  Payload ID: 13697
  Gene Symbol: PPP4R1
  Gene Name: protein phosphatase 4, regulatory subunit 1
  Uniprot ID: Q8TF05
  ENSP ID: ENSP00000383402
MADLSLLQEDLQEDADGFGVDDYSSESDVIIIPSALDFVSQDEMLTPLGRLDKYAASENIFNRQMVARSLLDTLREVCDDERDCIAVLERISRLADDSEPTVRAELMEQVPHIALFCQENRPSIPYAFSKFLLPIVVRYLADQNNQVRKTSQAALLALLEQELIERFDVETKVCPVLIELTAPDSNDDVKTEAVAIMCKMAPMVGKDITERLILPRFCEMCCDCRMFHVRKVCAANFGDICSVVGQQATEEMLLPRFFQLCSDNVWGVRKACAECFMAVSCATCQEIRRTKLSALFINLISDPSRWVRQAAFQSLGPFISTFANPSSSGQYFKEESKSSEEMSVENKNRTRDQEAPEDVQVRPEDTPSDLSVSNSSVILENTMEDHAAEASGKPLGEISVPLDSSLLCTLSSESHQEAASNENDKKPGNYKSMLRPEVGTTSQDSALLDQELYNSFHFWRTPLPEIDLDIELEQNSGGKPSPEGPEEESEGPVPSSPNITMATRKELEEMIENLEPHIDDPDVKAQVEVLSAALRASSLDAHEETISIEKRSDLQDELDINELPNCKINQEDSVPLISDAVENMDSTLHYIHSDSDLSNNSSFSPDEERRTKVQDVVPQALLDQYLSMTDPSRAQTVDTEIAKHCAYSLPGVALTLGRQNWHCLRETYETLASDMQWKVRRTLAFSIHELAVILGDQLTAADLVPIFNGFLKDLDEVRIGVLKHLHDFLKLLHIDKRREYLYQLQEFLVTDNSRNWRFRAELAEQLILLLELYSPRDVYDYLRPIALNLCADKVSSVRWISYKLVSEMVKKLHAATPPTFGVDLINELVENFGRCPKWSGRQAFVFVCQTVIEDDCLPMDQFAVHLMPHLLTLANDRVPNVRVLLAKTLRQTLLEKDYFLASASCHQEAVEQTIMALQMDRDSDVKYFASIHPASTKISEDAMSTASSTY

SEQ ID NO: 68875 - protein, 97 aa, Homo sapiens
  Payload ID: 13697
  Gene Symbol: PPP4R1
  Gene Name: protein phosphatase 4, regulatory subunit 1
  ENSP ID: ENSP00000462161
MLTPLGRLDKYAASENIFNRQMVARSLLDTLREVCDDERDCIAVLERISRLADDSEPTVRAELMEQVPHIALFCQENRPSIPYAFSKFLLPIVVRYL

SEQ ID NO: 68876 - protein, 143 aa, Homo sapiens
  Payload ID: 13697
  Gene Symbol: PPP4R1
  Gene Name: protein phosphatase 4, regulatory subunit 1
  ENSP ID: ENSP00000462399
MLTPLGRLDKYAASENIFNRQMVARSLLDTLREVCDDERDCIAVLERISRLADDSEPTVRAELMEQVPHIALFCQENRPSIPYAFSKFLLPIVVRYLADQNNQVRKTSQAALLALLEQELIERFDVETKVCPVLIELTAPDSN

SEQ ID NO: 68877 - protein, 17 aa, Homo sapiens
  Payload ID: 13697
  Gene Symbol: PPP4R1
  Gene Name: protein phosphatase 4, regulatory subunit 1
  ENSP ID: ENSP00000462485
MADLSLLQEDLQEDADG

SEQ ID NO: 68878 - protein, 101 aa, Homo sapiens
  Payload ID: 13697
  Gene Symbol: PPP4R1
  Gene Name: protein phosphatase 4, regulatory subunit 1
  ENSP ID: ENSP00000462621
MADLSLLQEDLQEDADGFGVDDYSSESDVIIIPSALDFVSQDEMLTPLGRLDKYAASENIFNRTNCESGADGTGASHRTVLSRKPAFNTICFFKILTTYCG

SEQ ID NO: 68879 - protein, 135 aa, Homo sapiens
  Payload ID: 13697
  Gene Symbol: PPP4R1
  Gene Name: protein phosphatase 4, regulatory subunit 1
  ENSP ID: ENSP00000463345
MLTPLGRLDKYAASENIFNRQMVARSLLDTLREVCDDERDCIAVLERISRLADDSEPTVRAELMEQVPHIALFCQENRPSIPYAFSKFLLPIVVRYLADQNNQVRKTSQAALLALLEQELIERFDVETKVCPVLI

SEQ ID NO: 68880 - protein, 151 aa, Homo sapiens
  Payload ID: 13697
  Gene Symbol: PPP4R1
  Gene Name: protein phosphatase 4, regulatory subunit 1
  ENSP ID: ENSP00000463459
MLTPLGRLDKYAASENIFNRQMVARSLLDTLREVCDDERDCIAVLERISRLADDSEPTVRAELMEQVPHIALFCQENRPSIPYAFSKFLLPIVVRYLADQNNQVRKTSQAALLALLEQELIERFDVETKVCPVLIELTAPDSNDDVKTEAV

SEQ ID NO: 68881 - protein, 190 aa, Homo sapiens
  Payload ID: 13697
  Gene Symbol: PPP4R1
  Gene Name: protein phosphatase 4, regulatory subunit 1
  ENSP ID: ENSP00000463909
MTLSVNHPAAGPWALLAATWRGPRAGGEAALPPRGGGTPAPTTSEPPPAPDRRRHLSLLQEDLQEDADGSLDFVSQDEMLTPLGRLDKYAASENIFNRQMVARSLLDTLREVCDDERDCIAVLERISRLADDSEPTVRAELMEQVPHIALFCQENRPSIPYAFSKFLLPIVVRYLADQNNQVRKTSQAAL

SEQ ID NO: 68882 - protein, 75 aa, Homo sapiens
  Payload ID: 13697
  Gene Symbol: PPP4R1
  Gene Name: protein phosphatase 4, regulatory subunit 1
  ENSP ID: ENSP00000464394
MADLSLLQEDLQEDADGSLDFVSQDEMLTPLGRLDKYAASENIFNRYRPGAVTHACNPSTLGGQDKWWPGVCSIP

SEQ ID NO: 68883 - protein, 417 aa, Homo sapiens
  Payload ID: 13698
  Gene Symbol: PPP4R2
  Gene Name: protein phosphatase 4, regulatory subunit 2
  Uniprot ID: Q9NY27
  ENSP ID: ENSP00000349124
MDVERLQEALKDFEKRGKKEVCPVLDQFLCHVAKTGETMIQWSQFKGYFIFKLEKVMDDFRTSAPEPRGPPNPNVEYIPFDEMKERILKIVTGFNGIPFTIQRLCELLTDPRRNYTGTDKFLRGVEKNVMVVSCVYPSSEKNNSNSLNRMNGVMFPGNSPSYTERSNINGPGTPRPLNRPKVSLSAPMTTNGLPESTDSKEANLQQNEEKNHSDSSTSESEVSSVSPLKNKHPDEDAVEAEGHEVKRLRFDKEGEVRETASQTTSSEISSVMVGETEASSSSQDKDKDSRCTRQHCTEEDEEEDEEEEEESFMTSREMIPERKNQEKESDDALTVNEETSEENNQMEESDVSQAEKDLLHSEGSENEGPVSSSSSDCRETEELVGSNSSKTGEILSESSMENDDEATEVTDEPMEQD

SEQ ID NO: 68884 - protein, 116 aa, Homo sapiens
  Payload ID: 13698
  Gene Symbol: PPP4R2
  Gene Name: protein phosphatase 4, regulatory subunit 2
  ENSP ID: ENSP00000418568
MDVERLQEALKDFEKRGKKEVCPVLDQFLCHVAKTGETIIPFTIQRLCELLTDPRRNYTGTDKFLRGVEKNVMVVSCVYPSSEKNNSNSLNRMNGVMFPGNSPSYTESPHDNKWVA

SEQ ID NO: 68885 - protein, 69 aa, Homo sapiens
  Payload ID: 13698
  Gene Symbol: PPP4R2
  Gene Name: protein phosphatase 4, regulatory subunit 2
  ENSP ID: ENSP00000418675
MDVERLQEALKDFEKRGKKEVCPVLDQFLCHVAKTGETMLASKPWPQVIHLPQLPKLRGLQIRDGVSPC

SEQ ID NO: 68886 - protein, 226 aa, Homo sapiens
  Payload ID: 13698
  Gene Symbol: PPP4R2
  Gene Name: protein phosphatase 4, regulatory subunit 2
  ENSP ID: ENSP00000418750
MDVERLQEALKDFEKRGKKEVCPVLDQFLCHVAKTGETMIQWSQFKGYFIFKLEKVMDDFRTSAPEPRGPPNPNVEYIPFDEMKERILKIVTGFNGIPFTIQRLCELLTDPRRNYTGTDKFLRGVEKNVMVVSCVYPSSESNINGPGTPRPLNRPKVSLSAPMTTNGLPESTDSKEANLQQNEEKNHSDSSTSESEVSSVSPLKNKHPDEDAVEAEGHEVKRLRFD

SEQ ID NO: 68887 - protein, 143 aa, Homo sapiens
  Payload ID: 13698
  Gene Symbol: PPP4R2
  Gene Name: protein phosphatase 4, regulatory subunit 2
  ENSP ID: ENSP00000419055
  MOD_RES (1)..(1): Any amino acid
XGPGTPRPLNRPKVSLSAPMTTNGLPESTDSKEANLQQNEEKNHSDSSTSESEVSSVSPLKNKHPDEDAVEAEGHEVKRLRFDKEGEVRETASQTTSSEISSVMVGETEASSSSQDKDKDSRCTRQHCTEEDEEEDEEEEEGI

SEQ ID NO: 68888 - protein, 62 aa, Homo sapiens
  Payload ID: 13698
  Gene Symbol: PPP4R2
  Gene Name: protein phosphatase 4, regulatory subunit 2
  ENSP ID: ENSP00000420098
MIQWSQFKGYFIFKLEKVMDDFRTSAPEPRGPPNPNVEYIPFDEMKERILKIVTGFNGIPFT

SEQ ID NO: 68889 - protein, 150 aa, Homo sapiens
  Payload ID: 13699
  Gene Symbol: PPP4R3A
  Gene Name: protein phosphatase 4, regulatory subunit 3A
  ENSP ID: ENSP00000450432
MTDTRRRVKVYTLNEDRQWDDRGTGHVSSGYVERLKGMSLLVRAESDGSLLLESKINPNTAYQKQQDTLIVWSEAENYDLALSFQEKAGCDEIWEKICQVQGKDPSVDITQDLVDESEEERFDDMSSPGLELPSCELSRLEEIAELVASS

SEQ ID NO: 68890 - protein, 543 aa, Homo sapiens
  Payload ID: 13699
  Gene Symbol: PPP4R3A
  Gene Name: protein phosphatase 4, regulatory subunit 3A
  ENSP ID: ENSP00000450473
  MOD_RES (1)..(1): Any amino acid
XGTMTDTRRRVKVYTLNEDRQWDDRGTGHVSSGYVERLKGMSLLVRAESDGSLLLESKINPNTAYQKQQDTLIVWSEAENYDLALSFQEKAGCDEIWEKICQVQGKDPSVDITQDLVDESEEERFDDMSSPGLELPSCELSRLEEIAELVASSLPSPLRREKLALALENEGYIKKLLELFHVCEDLENIEGLHHLYEIIKGIFLLNRTALFEVMFSEECIMDVIGCLEYDPALSQPRKHREFLTKTAKFKEVIPISDPELKQKIHQTYRVQYIQDMVLPTPSVFEENMLSTLHSFIFFNKVEIVGMLQEDEKFLTDLFAQLTDEATDEEKRQELVNFLKEFCAFSQTLQPQNRDAFFKTLSNMGILPALEVILGMDDTQVRSAATDIFSYLVEYNPSMVREFVMQEAQQNDDDILLINLIIEHMICDTDPELGGAVQLMGLLRTLVDPENMLATANKTEKTEFLGFFYKHCMHVLTAPLLANTTEDKPSKDDFQTAQLLALVLELLTFCVEHHTYHIKNYIINKDILRRVLVLMASKHAFLAL

SEQ ID NO: 68891 - protein, 820 aa, Homo sapiens
  Payload ID: 13699
  Gene Symbol: PPP4R3A
  Gene Name: protein phosphatase 4, regulatory subunit 3A
  Uniprot ID: Q6IN85
  ENSP ID: ENSP00000450864
MTDTRRRVKVYTLNEDRQWDDRGTGHVSSGYVERLKGMSLLVRAESDGSLLLESKINPNTAYQKQQDTLIVWSEAENYDLALSFQEKAGCDEIWEKICQVQGKDPSVDITQDLVDESEEERFDDMSSPGLELPSCELSRLEEIAELVASSLPSPLRREKLALALENEGYIKKLLELFHVCEDLENIEGLHHLYEIIKGIFLLNRTALFEVMFSEECIMDVIGCLEYDPALSQPRKHREFLTKTAKFKEVIPISDPELKQKIHQTYRVQYIQDMVLPTPSVFEENMLSTLHSFIFFNKVEIVGMLQEDEKFLTDLFAQLTDEATDEEKRQELVNFLKEFCAFSQTLQPQNRDAFFKTLSNMGILPALEVILGMDDTQVRSAATDIFSYLVEYNPSMVREFVMQEAQQNDDDILLINLIIEHMICDTDPELGGAVQLMGLLRTLVDPENMLATANKTEKTEFLGFFYKHCMHVLTAPLLANTTEDKPSKDDFQTAQLLALVLELLTFCVEHHTYHIKNYIINKDILRRVLVLMASKHAFLALCALRFKRKIIGLKDEFYNRYIMKSFLFEPVVKAFLNNGSRYNLMNSAIIEMFEFIRVEDIKSLTAHVIENYWKALEDVDYVQTFKGLKLRFEQQRERQDNPKLDSMRSILRNHRYRRDARTLEDEEEMWFNTDEDDMEDGEAVVSPSDKTKNDDDIMDPISKFMERKKLKESEEKEVLLKTNLSGRQSPSFKLSLSSGTKTNLTSQSSTTNLPGSPGSPGSPGSPGSPGSVPKNTSQTAAITTKGGLVGLVDYPDDDEDDDEDEDKEDTLPLSKKAKFDS

SEQ ID NO: 68892 - protein, 833 aa, Homo sapiens
  Payload ID: 13699
  Gene Symbol: PPP4R3A
  Gene Name: protein phosphatase 4, regulatory subunit 3A
  Uniprot ID: Q6IN85
  ENSP ID: ENSP00000450883
MTDTRRRVKVYTLNEDRQWDDRGTGHVSSGYVERLKGMSLLVRAESDGSLLLESKINPNTAYQKQQDTLIVWSEAENYDLALSFQEKAGCDEIWEKICQVQGKDPSVDITQDLVDESEEERFDDMSSPGLELPSCELSRLEEIAELVASSLPSPLRREKLALALENEGYIKKLLELFHVCEDLENIEGLHHLYEIIKGIFLLNRTALFEVMFSEECIMDVIGCLEYDPALSQPRKHREFLTKTAKFKEVIPISDPELKQKIHQTYRVQYIQDMVLPTPSVFEENMLSTLHSFIFFNKVEIVGMLQEDEKFLTDLFAQLTDEATDEEKRQELVNFLKEFCAFSQTLQPQNRDAFFKTLSNMGILPALEVILGMDDTQVRSAATDIFSYLVEYNPSMVREFVMQEAQQNDDVSKKLTEQKITSKDILLINLIIEHMICDTDPELGGAVQLMGLLRTLVDPENMLATANKTEKTEFLGFFYKHCMHVLTAPLLANTTEDKPSKDDFQTAQLLALVLELLTFCVEHHTYHIKNYIINKDILRRVLVLMASKHAFLALCALRFKRKIIGLKDEFYNRYIMKSFLFEPVVKAFLNNGSRYNLMNSAIIEMFEFIRVEDIKSLTAHVIENYWKALEDVDYVQTFKGLKLRFEQQRERQDNPKLDSMRSILRNHRYRRDARTLEDEEEMWFNTDEDDMEDGEAVVSPSDKTKNDDDIMDPISKFMERKKLKESEEKEVLLKTNLSGRQSPSFKLSLSSGTKTNLTSQSSTTNLPGSPGSPGSPGSPGSPGSVPKNTSQTAAITTKGGLVGLVDYPDDDEDDDEDEDKEDTLPLSKKAKFDS

SEQ ID NO: 68893 - protein, 594 aa, Homo sapiens
  Payload ID: 13699
  Gene Symbol: PPP4R3A
  Gene Name: protein phosphatase 4, regulatory subunit 3A
  Uniprot ID: Q6IN85
  ENSP ID: ENSP00000450891
MTDTRRRVKVYTLNEDRQWDDRGTGHVSSGYVERLKGMSLLVRAESDGSLLLESKINPNTAYQKQQEDEKFLTDLFAQLTDEATDEEKRQELVNFLKEFCAFSQTLQPQNRDAFFKTLSNMGILPALEVILGMDDTQVRSAATDIFSYLVEYNPSMVREFVMQEAQQNDDVSKKLTEQKITSKDILLINLIIEHMICDTDPELGGAVQLMGLLRTLVDPENMLATANKTEKTEFLGFFYKHCMHVLTAPLLANTTEDKPSKDDFQTAQLLALVLELLTFCVEHHTYHIKNYIINKDILRRVLVLMASKHAFLALCALRFKRKIIGLKDEFYNRYIMKSFLFEPVVKAFLNNGSRYNLMNSAIIEMFEFIRVEDIKSLTAHVIENYWKALEDVDYVQTFKGLKLRFEQQRERQDNPKLDSMRSILRNHRYRRDARTLEDEEEMWFNTDEDDMEDGEAVVSPSDKTKNDDDIMDPISKFMERKKLKESEEKEVLLKTNLSGRQSPSFKLSLSSGTKTNLTSQSSTTNLPGSPGSPGSPGSPGSPGSVPKNTSQTAAITTKGGLVGLVDYPDDDEDDDEDEDKEDTLPLSKKAKFDS

SEQ ID NO: 68894 - protein, 199 aa, Homo sapiens
  Payload ID: 13699
  Gene Symbol: PPP4R3A
  Gene Name: protein phosphatase 4, regulatory subunit 3A
  ENSP ID: ENSP00000451841
  MOD_RES (1)..(1): Any amino acid
XLFEVMFSEECIMDVIGCLEYDPALSQPRKHREFLTKTAKFKEVIPISDPELKQKIHQTYRVQYIQDMVLPTPSVFEENMLSTLHSFIFFNKVEIVGMLQEDEKFLTDLFAQLTDEATDEEKRQELPQNRDAFFKTLSNMGILPALEVILGMDDTQVRSAATDIFSYLVEYNPSMVREFVMQEAQQNDDVSKKLTEQKI

SEQ ID NO: 68895 - protein, 99 aa, Homo sapiens
  Payload ID: 13699
  Gene Symbol: PPP4R3A
  Gene Name: protein phosphatase 4, regulatory subunit 3A
  ENSP ID: ENSP00000451939
MTDTRRRVKVYTLNEDRQWDDRGTGHVSSGYVERLKGMSLLVRAESDGSLLLESKINPNTAYQKQQDTLIVWSEAENYDLALSFQEKAGCDEIWEKICQ

SEQ ID NO: 68896 - protein, 190 aa, Homo sapiens
  Payload ID: 13699
  Gene Symbol: PPP4R3A
  Gene Name: protein phosphatase 4, regulatory subunit 3A
  ENSP ID: ENSP00000452257
MTDTRRRVKVYTLNEDRQWDDRGTGHVSSGYVERLKGMSLLVRAESDGSLLLESKINPNTAYQKQQEDEKFLTDLFAQLTDEATDEEKRQELVNFLKEFCAFSQTLQPQNRDAFFKTLSNMGILPALEVILGMDDTQVRSAATDIFSYLVEYNPSMVREFVMQEAQQNDDVSKKLTEQKITSKDILLINL

SEQ ID NO: 68897 - protein, 706 aa, Homo sapiens
  Payload ID: 13699
  Gene Symbol: PPP4R3A
  Gene Name: protein phosphatase 4, regulatory subunit 3A
  ENSP ID: ENSP00000452596
MTDTRRRVKVYTLNEDRQWDDRGTGHVSSGYVERLKGMSLLVRAESDGSLLLESKINPNTAYQKQQDTLIVWSEAENYDLALSFQEKAGCDEIWEKICQVQGKDPSVDITQDLVDESEEERFDDMSSPGLELPSCELSRLEEIAELVASSLPSPLRREKLALALENEGYIKKLLELFHVCEDLENIEGLHHLYEIIKGIFLLNRTALFEVMFSEECIMDVIGCLEYDPALSQPRKHREFLTKTAKFKEVIPISDPELKQKIHQTYRVQYIQDMVLPTPSVFEENMLSTLHSFIFFNKVEIVGMLQEDEKFLTDLFAQLTDEATDEEKRQELVNFLKEFCAFSQTLQPQNRDAFFKTLSNMGILPALEVILGMDDTQVRSAATDIFSYLVEYNPSMVREFVMQEAQQNDDDILLINLIIEHMICDTDPELGGAVQLMGLLRTLVDPENMLATANKTEKTEFLGFFYKHCMHVLTAPLLANTTEDKPSKDDFQTAQLLALVLELLTFCVEHHTYHIKNYIINKDILRRVLVLMASKHAFLALCALRFKRKIIGLKDEFYNRYIMKSFLFEPVVKAFLNNGSRYNLMNSAIIEMFEFIRVEDIKSLTAHVIENYWKALEDVDYVQTFKGLKLRFEQQRERQDNPKLDSMRSILRNHRYRRDARTLEDEEEMWFNTDEDDMEDGEAVVSPSDKTKNDDDIMDPISKFMER

SEQ ID NO: 68898 - protein, 764 aa, Homo sapiens
  Payload ID: 13700
  Gene Symbol: PPP4R3B
  Gene Name: protein phosphatase 4, regulatory subunit 3B
  Uniprot ID: Q5MIZ7
  ENSP ID: ENSP00000478677
MSDTRRRVKVYTLNEDRQWDDRGTGHVSSTYVEELKGMSLLVRAESDGSLLLESKINPNTAYQKQQDTLIVWSEAENYDLALSFQEKAGCDEIWEKICQVQGKDPSVEVTQDLIDESEEERFEEMPETSHLIDLPTCELNKLEEIADLVTSVLSSPIRREKLALALENEGYIKKLLQLFQACENLENTEGLHHLYEIIRGILFLNKATLFEVMFSDECIMDVVGCLEYDPALAQPKRHREFLTKTAKFKEVIPITDSELRQKIHQTYRVQYIQDIILPTPSVFEENFLSTLTSFIFFNKVEIVSMLQEDEKFLSEVFAQLTDEATDDDKRRELVNFFKEFCAFSQTLQPQNRDAFFKTLAKLGILPALEIVMGMDDLQVRSAATDIFSYLVEFSPSMVREFVMQEAQQSDDDILLINVVIEQMICDTDPELGGAVQLMGLLRTLIDPENMLATTNKTEKSEFLNFFYNHCMHVLTAPLLTNTSEDKCEKDNIVGSNKNNTICPGALRFMRRIIGLKDEFYNRYITKGNLFEPVINALLDNGTRYNLLNSAVIELFEFIRVEDIKSLTAHIVENFYKALESIEYVQTFKGLKTKYEQEKDRQNQKLNSVPSILRSNRFRRDAKALEEDEEMWFNEDEEEEGKAVVAPVEKPKPEDDFPDNYEKFMETKKAKESEDKENLPKRTSPGGFKFTFSHSASAANGTNSKSVVAQIPPATSNGSSSKTTNLPTSVTATKGSLVGLVDYPDDEEEDEEEESSPRKRPRLGS

SEQ ID NO: 68899 - protein, 849 aa, Homo sapiens
  Payload ID: 13700
  Gene Symbol: PPP4R3B
  Gene Name: protein phosphatase 4, regulatory subunit 3B
  Uniprot ID: Q5MIZ7
  ENSP ID: ENSP00000483228
MSDTRRRVKVYTLNEDRQWDDRGTGHVSSTYVEELKGMSLLVRAESDGSLLLESKINPNTAYQKQQDTLIVWSEAENYDLALSFQEKAGCDEIWEKICQVQGKDPSVEVTQDLIDESEEERFEEMPETSHLIDLPTCELNKLEEIADLVTSVLSSPIRREKLALALENEGYIKKLLQLFQACENLENTEGLHHLYEIIRGILFLNKATLFEVMFSDECIMDVVGCLEYDPALAQPKRHREFLTKTAKFKEVIPITDSELRQKIHQTYRVQYIQDIILPTPSVFEENFLSTLTSFIFFNKVEIVSMLQEDEKFLSEVFAQLTDEATDDDKRRELVNFFKEFCAFSQTLQPQNRDAFFKTLAKLGILPALEIVMGMDDLQVRSAATDIFSYLVEFSPSMVREFVMQEAQQSDDDILLINVVIEQMICDTDPELGGAVQLMGLLRTLIDPENMLATTNKTEKSEFLNFFYNHCMHVLTAPLLTNTSEDKCEKDFFLKHYRYSWSFICTPSHSHSHSTPSSSISQDNIVGSNKNNTICPDNYQTAQLLALILELLTFCVEHHTYHIKNYIMNKDLLRRVLVLMNSKHTFLALCALRFMRRIIGLKDEFYNRYITKGNLFEPVINALLDNGTRYNLLNSAVIELFEFIRVEDIKSLTAHIVENFYKALESIEYVQTFKGLKTKYEQEKDRQNQKLNSVPSILRSNRFRRDAKALEEDEEMWFNEDEEEEGKAVVAPVEKPKPEDDFPDNYEKFMETKKAKESEDKENLPKRTSPGGFKFTFSHSASAANGTNSKSVVAQIPPATSNGSSSKTTNLPTSVTATKGSLVGLVDYPDDEEEDEEEESSPRKRPRLGS

SEQ ID NO: 68900 - protein, 817 aa, Homo sapiens
  Payload ID: 13700
  Gene Symbol: PPP4R3B
  Gene Name: protein phosphatase 4, regulatory subunit 3B
  Uniprot ID: Q5MIZ7
  ENSP ID: ENSP00000484116
MSDTRRRVKVYTLNEDRQWDDRGTGHVSSTYVEELKGMSLLVRAESDGSLLLESKINPNTAYQKQQDTLIVWSEAENYDLALSFQEKAGCDEIWEKICQVQGKDPSVEVTQDLIDESEEERFEEMPETSHLIDLPTCELNKLEEIADLVTSVLSSPIRREKLALALENEGYIKKLLQLFQACENLENTEGLHHLYEIIRGILFLNKATLFEVMFSDECIMDVVGCLEYDPALAQPKRHREFLTKTAKFKEVIPITDSELRQKIHQTYRVQYIQDIILPTPSVFEENFLSTLTSFIFFNKVEIVSMLQEDEKFLSEVFAQLTDEATDDDKRRELVNFFKEFCAFSQTLQPQNRDAFFKTLAKLGILPALEIVMGMDDLQVRSAATDIFSYLVEFSPSMVREFVMQEAQQSDDDILLINVVIEQMICDTDPELGGAVQLMGLLRTLIDPENMLATTNKTEKSEFLNFFYNHCMHVLTAPLLTNTSEDKCEKDNIVGSNKNNTICPDNYQTAQLLALILELLTFCVEHHTYHIKNYIMNKDLLRRVLVLMNSKHTFLALCALRFMRRIIGLKDEFYNRYITKGNLFEPVINALLDNGTRYNLLNSAVIELFEFIRVEDIKSLTAHIVENFYKALESIEYVQTFKGLKTKYEQEKDRQNQKLNSVPSILRSNRFRRDAKALEEDEEMWFNEDEEEEGKAVVAPVEKPKPEDDFPDNYEKFMETKKAKESEDKENLPKRTSPGGFKFTFSHSASAANGTNSKSVVAQIPPATSNGSSSKTTNLPTSVTATKGSLVGLVDYPDDEEEDEEEESSPRKRPRLGS

SEQ ID NO: 68901 - protein, 873 aa, Homo sapiens
  Payload ID: 13701
  Gene Symbol: PPP4R4
  Gene Name: protein phosphatase 4, regulatory subunit 4
  Uniprot ID: Q6NUP7
  ENSP ID: ENSP00000305924
MHPPPPAAAMDFSQNSLFGYMEDLQELTIIERPVRRSLKTPEEIERLTVDEDLSDIERAVYLLSAGQDVQGTSVIANLPFLMRQNPTETLRRVLPKVREALHVAGVEMQLTAAMSFLTILQDESVSIHAYTHSFLQVILLHLEHRDTGVSNAWLETLLSVIEVLPKETLRHEILNPLVSKAQLSQTVQSRLVSCKILGKLTNKFDAHTIKREILPLVKSLCQDVEYEVRSCMCRQLENIAQGIGTELTKSVVLPELIELSRDEGSSVRLAAFETLVNLLDIFDTDDRSQTILPLVKSFCEKSFKADESILISLSFHLGKLCHGLYGIFTPDQHLRFLEFYKKLCTLGLQQENGHNENQIPPQILEQEKKYISVRKNCAYNFPAMIVFVDPKNFHMELYSTFFCLCHDPEVPVRYTIAICFYEVSKLLNSGVYLIHKELITLLQDESLEVLDALIDHLPEILELMSTGGESSVQENKLSSLPDLIPALTAAEQRAAASLKWRTHEKLLQKYACLPHVISSDQIYYRFLQRMFTIMMTNNVLPVQKAASRTLCIFLRYNRKQEQRHEVIQKLIEQLGQGKSYWNRLRFLDTCEFIIEIFSKSFFCKYFFLPAIELTHDPVANVRMKLCYLLPKVKSTLKIPADKHLLQQLEMCVRKLLCQEKDKDVLAIVKRTVLELDRMEMSMDAFQKKFYEKDLLDQEKEREELLLLEMEQLEKEKQQNDGRPMSDKMFEKKRRDTKTPTQSLPKNIPISVPGPSSVTPSTSKEIKKSKLIRSQSFNNQAFHAKYGNLEKCASKSSTTGYTTSVSGLGKTSVLSLADDSFRTRNASSVPSSFSPNTPLPSTSRGTGNSVDPKSSGSKDTQPRKATLKSRKSNP

SEQ ID NO: 68902 - protein, 120 aa, Homo sapiens
  Payload ID: 13701
  Gene Symbol: PPP4R4
  Gene Name: protein phosphatase 4, regulatory subunit 4
  Uniprot ID: Q6NUP7
  ENSP ID: ENSP00000330831
MHPPPPAAAMDFSQNSLFGYMEDLQELTIIERPVRRSLKTPEEIERLTVDEDLSDIERAVYLLSAGQDVQGTSVIANLPFLMRQNPTETLRRVLPKVRVHEDAHLFIQRVWISHMFVQRV

SEQ ID NO: 68903 - protein, 57 aa, Homo sapiens
  Payload ID: 13701
  Gene Symbol: PPP4R4
  Gene Name: protein phosphatase 4, regulatory subunit 4
  ENSP ID: ENSP00000451543
MRQNPTETLRRVLPKVREALHVAGVEMQLTAAMSFLTILQDESVSIHAYTHSFLQVI

SEQ ID NO: 68904 - protein, 113 aa, Homo sapiens
  Payload ID: 13701
  Gene Symbol: PPP4R4
  Gene Name: protein phosphatase 4, regulatory subunit 4
  ENSP ID: ENSP00000451556
MRQNPTETLRRVLPKVREALHVAGVEMQLTAAMSFLTILQDESVSIHAYTHSFLQVILLHLEHRDTGVSNAWLETLLSVIEVLPKETLRHEILNPLVSKAQLSQTVQSRLVSC

SEQ ID NO: 68905 - protein, 62 aa, Homo sapiens
  Payload ID: 13701
  Gene Symbol: PPP4R4
  Gene Name: protein phosphatase 4, regulatory subunit 4
  ENSP ID: ENSP00000452121
MRQNPTETLRRVLPKVRCLPRSMRMHTYLSREYGSHICLSRGCDSVEENTYWKPCMLQEWKC

SEQ ID NO: 68906 - protein, 873 aa, Homo sapiens; identical to SEQ ID NO: 68901
  Payload ID: 13701
  Gene Symbol: PPP4R4
  Gene Name: protein phosphatase 4, regulatory subunit 4
  Uniprot ID: Q6NUP7
  ENSP ID: ENSP00000480902

SEQ ID NO: 68907 - protein, 120 aa, Homo sapiens; identical to SEQ ID NO: 68902
  Payload ID: 13701
  Gene Symbol: PPP4R4
  Gene Name: protein phosphatase 4, regulatory subunit 4
  Uniprot ID: Q6NUP7
  ENSP ID: ENSP00000482849

SEQ ID NO: 68908 - protein, 113 aa, Homo sapiens; identical to SEQ ID NO: 68904
  Payload ID: 13701
  Gene Symbol: PPP4R4
  Gene Name: protein phosphatase 4, regulatory subunit 4
  ENSP ID: ENSP00000486247

SEQ ID NO: 68909 - protein, 62 aa, Homo sapiens; identical to SEQ ID NO: 68905
  Payload ID: 13701
  Gene Symbol: PPP4R4
  Gene Name: protein phosphatase 4, regulatory subunit 4
  ENSP ID: ENSP00000487248

SEQ ID NO: 68910 - protein, 57 aa, Homo sapiens; identical to SEQ ID NO: 68903
  Payload ID: 13701
  Gene Symbol: PPP4R4
  Gene Name: protein phosphatase 4, regulatory subunit 4
  ENSP ID: ENSP00000487271

SEQ ID NO: 68911 - protein, 499 aa, Homo sapiens
  Payload ID: 13702
  Gene Symbol: PPP5C
  Gene Name: protein phosphatase 5, catalytic subunit
  Uniprot ID: P53041
  ENSP ID: ENSP00000012443
MAMAEGERTECAEPPRDEPPADGALKRAEELKTQANDYFKAKDYENAIKFYSQAIELNPSNAIYYGNRSLAYLRTECYGYALGDATRAIELDKKYIKGYYRRAASNMALGKFRAALRDYETVVKVKPHDKDAKMKYQECNKIVKQKAFERAIAGDEHKRSVVDSLDIESMTIEDEYSGPKLEDGKVTISFMKELMQWYKDQKKLHRKCAYQILVQVKEVLSKLSTLVETTLKETEKITVCGDTHGQFYDLLNIFELNGLPSETNPYIFNGDFVDRGSFSVEVILTLFGFKLLYPDHFHLLRGNHETDNMNQIYGFEGEVKAKYTAQMYELFSEVFEWLPLAQCINGKVLIMHGGLFSEDGVTLDDIRKIERNRQPPDSGPMCDLLWSDPQPQNGRSISKRGVSCQFGPDVTKAFLEENNLDYIIRSHEVKAEGYEVAHGGRCVTVFSAPNYCDQMGNKASYIHLQGSDLRPQFHQFTAVPHPNVKPMAYANTLLQLGMM

SEQ ID NO: 68912 - protein, 371 aa, Homo sapiens
  Payload ID: 13702
  Gene Symbol: PPP5C
  Gene Name: protein phosphatase 5, catalytic subunit
  ENSP ID: ENSP00000375786
MALGKFRAALRDYETVVKVKPHDKDAKMKYQECNKIVKQKAFERAIAGDEHKRSVVDSLDIESMTIEDEYSGPKLEDGKVTISFMKELMQWYKDQKKLHRKCAYQTEKITVCGDTHGQFYDLLNIFELNGLPSETNPYIFNGDFVDRGSFSVEVILTLFGFKLLYPDHFHLLRGNHETDNMNQIYGFEGEVKAKYTAQMYELFSEVFEWLPLAQCINGKVLIMHGGLFSEDGVTLDDIRKIERNRQPPDSGPMCDLLWSDPQPQNGRSISKRGVSCQFGPDVTKAFLEENNLDYIIRSHEVKAEGYEVAHGGRCVTVFSAPNYCDQMGNKASYIHLQGSDLRPQFHQFTAVPHPNVKPMAYANTLLQLGMM

SEQ ID NO: 68913 - protein, 485 aa, Homo sapiens
  Payload ID: 13702
  Gene Symbol: PPP5C
  Gene Name: protein phosphatase 5, catalytic subunit
  ENSP ID: ENSP00000434329
  MOD_RES (1)..(1): Any amino acid
XMAEGERTECAEPPRDEPPADGALKRAEELKTQANDYFKAKDYENAIKFYSQAIELNPSNAIYYGNRSLAYLRTECYGYALGDATRAIELDKKYIKGYYRRAASNMALGKFRAALRDYETVVKVKPHDKDAKMKYQECNKIVKQKAFERAIAGDEHKRSVVDSLDIESMTIEDEYSGPKLEDGKVTISFMKELMQWYKDQKKLHRKCAYQILVQVKEVLSKLSTLVETTLKETEKITVCGDTHGQFYDLLNIFELNGLPSETNPYIFNGDFVDRGSFSVEVILTLFGFKLLYPDHFHLLRGNHETDNMNQIYGFEGEVKAKYTAQMYELFSEVFEWLPLAQCINGKVLIMHGGLFSEDGVTLDDIRKIERNRQPPDSGPMCDLLWSDPQPQNGRSISKRGVSCQFGPDVTKAFLEENNLDYIIRSHEVKAEGYEVAHGGRCVTVFSAPNYCDQMGNKASYIHLQGSDLRPQFHQFTAVGRPSSGS

SEQ ID NO: 68914 - protein, 305 aa, Homo sapiens
  Payload ID: 13703
  Gene Symbol: PPP6C
  Gene Name: protein phosphatase 6, catalytic subunit
  Uniprot ID: O00743
  ENSP ID: ENSP00000362648
MAPLDLDKYVEIARLCKYLPENDLKRLCDYVCDLLLEESNVQPVSTPVTVCGDIHGQFYDLCELFRTGGQVPDTNYIFMGDFVDRGYYSLETFTYLLALKAKWPDRITLLRGNHESRQITQVYGFYDECQTKYGNANAWRYCTKVFDMLTVAALIDEQILCVHGGLSPDIKTLDQIRTIERNQEIPHKGAFCDLVWSDPEDVDTWAISPRGAGWLFGAKVTNEFVHINNLKLICRAHQLVHEGYKFMFDEKLVTVWSAPNYCYRCGNIASIMVFKDVNTREPKLFRAVPDSERVIPPRTTTPYFL

SEQ ID NO: 68915 - protein, 342 aa, Homo sapiens
  Payload ID: 13703
  Gene Symbol: PPP6C
  Gene Name: protein phosphatase 6, catalytic subunit
  Uniprot ID: O00743
  ENSP ID: ENSP00000392147
MAPLDLDKYVEIARLCKYLPENDLKVSPICGLAPSGCGAPAGRPFLSPGPPPVFHFLRFLKERLCDYVCDLLLEESNVQPVSTPVTVCGDIHGQFYDLCELFRTGGQVPDTNYIFMGDFVDRGYYSLETFTYLLALKAKWPDRITLLRGNHESRQITQVYGFYDECQTKYGNANAWRYCTKVFDMLTVAALIDEQILCVHGGLSPDIKTLDQIRTIERNQEIPHKGAFCDLVWSDPEDVDTWAISPRGAGWLFGAKVTNEFVHINNLKLICRAHQLVHEGYKFMFDEKLVTVWSAPNYCYRCGNIASIMVFKDVNTREPKLFRAVPDSERVIPPRTTTPYFL

SEQ ID NO: 68916 - protein, 283 aa, Homo sapiens
  Payload ID: 13703
  Gene Symbol: PPP6C
  Gene Name: protein phosphatase 6, catalytic subunit
  Uniprot ID: O00743
  ENSP ID: ENSP00000411744
MAPLDLDKYVEIARLCKYLPENDLKRLCDYVCDLLLEESNVQPVSTPVTVCGDIHGQGDFVDRGYYSLETFTYLLALKAKWPDRITLLRGNHESRQITQVYGFYDECQTKYGNANAWRYCTKVFDMLTVAALIDEQILCVHGGLSPDIKTLDQIRTIERNQEIPHKGAFCDLVWSDPEDVDTWAISPRGAGWLFGAKVTNEFVHINNLKLICRAHQLVHEGYKFMFDEKLVTVWSAPNYCYRCGNIASIMVFKDVNTREPKLFRAVPDSERVIPPRTTTPYFL

SEQ ID NO: 68917 - protein, 125 aa, Homo sapiens
  Payload ID: 13703
  Gene Symbol: PPP6C
  Gene Name: protein phosphatase 6, catalytic subunit
  ENSP ID: ENSP00000416287
MFLLPRLQLLGQMRLCDYVCDLLLEESNVQPVSTPVTVCGDIHGQFYDLCELFRTGGQVPDTNYIFMGDFVDRGYYSLETFTYLLALKAKWPDRITLLRGNHESRQITQVYGFYDECQTKYGNAN

SEQ ID NO: 68918 - protein, 881 aa, Homo sapiens
  Payload ID: 13704
  Gene Symbol: PPP6R1
  Gene Name: protein phosphatase 6, regulatory subunit 1
  Uniprot ID: Q9UPN7
  ENSP ID: ENSP00000414202
MFWKFDLHTSSHLDTLLEREDLSLPELLDEEDVLQECKVVNRKLLDFLLQPPHLQAMVAWVTQEPPDSGEERLRYKYPSVACEILTSDVPQINDALGADESLLNRLYGFLQSTGSLNPLLASFFSKVMGILINRKTDQLVSFLRKKDDFVDLLLQHIGTSAIMDLLLRLLTCVERPQLRQDVVNWLNEEKIVQRLIEQIHPSKDENQHSNASQSLCDIIRLSREQMIQVQDSPEPDQLLATLEKQETIEQLLSNMFEGEQSQSVIVSGIQVLLTLLEPRRPRSESVTVNSFFSSVDGQLELLAQGALESTVSSVGALHALRPRLSCFHQLLLEPPKLEPLQMTWGMLAPPLGNTRLHVVKLLASALSANDAALTHELLALDVPNTMLDLFFHYVFNNFLHAQVEGCVSTMLSLGPPPDSSPETPIQNPVVKHLLQQCRLVERILTSWEENDRVQCAGGPRKGYMGHLTRVAGALVQNTEKGPNAEQLRQLLKELPSEQQEQWEAFVSGPLAETNKKNMVDLVNTHHLHSSSDDEDDRLKEFNFPEEAVLQQAFMDFQMQRMTSAFIDHFGFNDEEFGEQEESVNAPFDKTANITFSLNADDENPNANLLEICYKDRIQQFDDDEEEEDEEEAQGSGESDGEDGAWQGSQLARGARLGQPPGVRSGGSTDSEDEEEEDEEEEEDEEGIGCAARGGATPLSYPSPGPQPPGPSWTATFDPVPTDAPTSPRVSGEEELHTGPPAPQGPLSVPQGLPTQSLASPPARDALQLRSQDPTPPSAPQEATEGSKVTEPSAPCQALVSIGDLQATFHGIRSAPSSSDSATRDPSTSVPASGAHQPPQTTEGEKSPEPLGLPQSQSAQALTPPPIPNGSAPEGPASPGSQ

SEQ ID NO: 68919 - protein, 157 aa, Homo sapiens
  Payload ID: 13704
  Gene Symbol: PPP6R1
  Gene Name: protein phosphatase 6, regulatory subunit 1
  ENSP ID: ENSP00000466332
MFWKFDLHTSSHLDTLLEREDLSLPELLDEEDVLQECKVVNRKLLDFLLQPPHLQAMVAWVTQEPPDSGEERLRYKYPSVACEILTSDVPQINDALGADESLLNRLYGFLQSTGSLNPLLASFFSKVMGILINRKTDQLVSFLRKKDDFVDLLLQHI

SEQ ID NO: 68920 - protein, 881 aa, Homo sapiens; identical to SEQ ID NO: 68918
  Payload ID: 13704
  Gene Symbol: PPP6R1
  Gene Name: protein phosphatase 6, regulatory subunit 1
  Uniprot ID: Q9UPN7
  ENSP ID: ENSP00000467521

SEQ ID NO: 68921 - protein, 966 aa, Homo sapiens
  Payload ID: 13705
  Gene Symbol: PPP6R2
  Gene Name: protein phosphatase 6, regulatory subunit 2
  Uniprot ID: O75170
  ENSP ID: ENSP00000216061
MFWKFDLNTTSHVDKLLDKEHVTLQELMDEDDILQECKAQNQKLLDFLCRQQCMEELVSLITQDPPLDMEEKVRFKYPNTACELLTCDVPQISDRLGGDESLLSLLYDFLDHEPPLNPLLASFFSKTIGNLIARKTEQVITFLKKKDKFISLVLKHIGTSALMDLLLRLVSCVEPAGLRQDVLHWLNEEKVIQRLVELIHPSQDEDRQSNASQTLCDIVRLGRDQGSQLQEALEPDPLLTALESQDCVEQLLKNMFDGDRTESCLVSGTQVLLTLLETRRVGTEGLVDSFSQGLERSYAVSSSVLHGIEPRLKDFHQLLLNPPKKKAILTTIGVLEEPLGNARLHGARLMAALLHTNTPSINQELCRLNTMDLLLDLFFKYTWNNFLHFQVELCIAAILSHAAREERTEASGSESRVEPPHENGNRSLETPQPAASLPDNTMVTHLFQKCCLVQRILEAWEANDHTQAAGGMRRGNMGHLTRIANAVVQNLERGPVQTHISEVIRGLPADCRGRWESFVEETLTETNRRNTVDLVSTHHLHSSSEDEDIEGAFPNELSLQQAFSDYQIQQMTANFVDQFGFNDEEFADQDDNINAPFDRIAEINFNIDADEDSPSAALFEACCSDRIQPFDDDEDEDIWEDSDTRCAARVMARPRFGAPHASESCSKNGPERGGQDGKASLEAHRDAPGAGAPPAPGKKEAPPVEGDSEGAMWTAVFDEPANSTPTAPGVVRDVGSSVWAAGTSAPEEKGWAKFTDFQPFCCSESGPRCSSPVDTECSHAEGSRSQGPEKASQASYFAVSPASPCAWNVCVTRKAPLLASDSSSSGGSHSEDGDQKAASAMDAVSRGPGREAPPLPTVARTEEAVGRVGCADSRLLSPACPAPKEVTAAPAVAVPPEATVAITTALSKAGPAIPTPAVSSALAVAVPLGPIMAVTAAPAMVATLGTVTKDGKTDAPPEGAALNGPV

SEQ ID NO: 68922 - protein, 927 aa, Homo sapiens
  Payload ID: 13705
  Gene Symbol: PPP6R2
  Gene Name: protein phosphatase 6, regulatory subunit 2
  Uniprot ID: O75170
  ENSP ID: ENSP00000352051
MFWKFDLNTTSHVDKLLDKEHVTLQELMDEDDILQECKAQNQKLLDFLCRQQCMEELVSLITQDPPLDMEEKVRFKYPNTACELLTCDVPQISDRLGGDESLLSLLYDFLDHEPPLNPLLASFFSKTIGNLIARKTEQVITFLKKKDKFISLVLKHIGTSALMDLLLRLVSCVEPAGLRQDVLHWLNEEKVIQRLVELIHPSQDEDRQSNASQTLCDIVRLGRDQGSQLQEALEPDPLLTALESQDCVEQLLKNMFDGDRTESCLVSGTQVLLTLLETRRVGTEGLVDSFSQGLERSYAVSSSVLHGIEPRLKDFHQLLLNPPKKKAILTTIGVLEEPLGNARLHGARLMAALLHTNTPSINQELCRLNTMDLLLDLFFKYTWNNFLHFQVELCIAAILSHAAREERTEASGSESRVEPPHENGNRSLETPQPAASLPDNTMVTHLFQKCCLVQRILEAWEANDHTQAAGGMRRGNMGHLTRIANAVVQNLERGPVQTHISEVIRGLPADCRGRWESFVEETLTETNRRNTVDLAFSDYQIQQMTANFVDQFGFNDEEFADQDDNINAPFDRIAEINFNIDADEDSPSAALFEACCSDRIQPFDDDEDEDIWEDSDTRCAARVMARPRFGAPHASESCSKNGPERGGQDGKASLEAHRDAPGAGAPPAPGKKEAPPVEGDSEAGAMWTAVFDEPANSTPTAPGVVRDVGSSVWAAGTSAPEEKGWAKFTDFQPFCCSESGPRCSSPVDTECSHAEGSRSQGPEKAFSPASPCAWNVCVTRKAPLLASDSSSSGGSHSEDGDQKAASAMDAVSRGPGREAPPLPTVARTEEAVGRVGCADSRLLSPACPAPKEVTAAPAVAVPPEATVAITTALSKAGPAIPTPAVSSALAVAVPLGPIMAVTAAPAMVATLGTVTKDGQMPRQKELP

SEQ ID NO: 68923 - protein, 933 aa, Homo sapiens
  Payload ID: 13705
  Gene Symbol: PPP6R2
  Gene Name: protein phosphatase 6, regulatory subunit 2
  Uniprot ID: O75170
  ENSP ID: ENSP00000379090
MFWKFDLNTTSHVDKLLDKEHVTLQELMDEDDILQECKAQNQKLLDFLCRQQCMEELVSLITQDPPLDMEEKVRFKYPNTACELLTCDVPQISDRLGGDESLLSLLYDFLDHEPPLNPLLASFFSKTIGNLIARKTEQVITFLKKKDKFISLVLKHIGTSALMDLLLRLVSCVEPAGLRQDVLHWLNEEKVIQRLVELIHPSQDEDRQSNASQTLCDIVRLGRDQGSQLQEALEPDPLLTALESRQDCVEQLLKNMFDGDRTESCLVSGTQVLLTLLETRRVGTEGLVDSFSQGLERSYAVSSSVLHGIEPRLKDFHQLLLNPPKKKAILTTIGVLEEPLGNARLHGARLMAALLHTNTPSINQELCRLNTMDLLLDLFFKYTWNNFLHFQVELCIAAILSHAAREERTEASGSESRVEPPHENGNRSLETPQPAASLPDNTMVTHLFQKCCLVQRILEAWEANDHTQAAGGMRRGNMGHLTRIANAVVQNLERGPVQTHISEVIRGLPADCRGRWESFVEETLTETNRRNTVDLAFSDYQIQQMTANFVDQFGFNDEEFADQDDNINAPFDRIAEINFNIDADEDSPSAALFEACCSDRIQPFDDDEDEDIWEDSDTRCAARVMARPRFGAPHASESCSKNGPERGGQDGKASLEAHRDAPGAGAPPAPGKKEAPPVEGDSEGAMWTAVFDEPANSTPTAPGVVRDVGSSVWAAGTSAPEEKGWAKFTDFQPFCCSESGPRCSSPVDTECSHAEGSRSQGPEKAFSPASPCAWNVCVTRKAPLLASDSSSSGGSHSEDGDQKAASAMDAVSRGPGREAPPLPTVARTEEAVGRVGCADSRLLSPACPAPKEVTAAPAVAVPPEATVAITTALSKAGPAIPTPAVSSALAVAVPLGPIMAVTAAPAMVATLGTVTKDGKTDAPPEGAALNGPV

SEQ ID NO: 68924 - protein, 932 aa, Homo sapiens
  Payload ID: 13705
  Gene Symbol: PPP6R2
  Gene Name: protein phosphatase 6, regulatory subunit 2
  Uniprot ID: O75170
  ENSP ID: ENSP00000379093
MFWKFDLNTTSHVDKLLDKEHVTLQELMDEDDILQECKAQNQKLLDFLCRQQCMEELVSLITQDPPLDMEEKVRFKYPNTACELLTCDVPQISDRLGGDESLLSLLYDFLDHEPPLNPLLASFFSKTIGNLIARKTEQVITFLKKKDKFISLVLKHIGTSALMDLLLRLVSCVEPAGLRQDVLHWLNEEKVIQRLVELIHPSQDEDRQSNASQTLCDIVRLGRDQGSQLQEALEPDPLLTALESQDCVEQLLKNMFDGDRTESCLVSGTQVLLTLLETRRVGTEGLVDSFSQGLERSYAVSSSVLHGIEPRLKDFHQLLLNPPKKKAILTTIGVLEEPLGNARLHGARLMAALLHTNTPSINQELCRLNTMDLLLDLFFKYTWNNFLHFQVELCIAAILSHAAREERTEASGSESRVEPPHENGNRSLETPQPAASLPDNTMVTHLFQKCCLVQRILEAWEANDHTQAAGGMRRGNMGHLTRIANAVVQNLERGPVQTHISEVIRGLPADCRGRWESFVEETLTETNRRNTVDLAFSDYQIQQMTANFVDQFGFNDEEFADQDDNINAPFDRIAEINFNIDADEDSPSAALFEACCSDRIQPFDDDEDEDIWEDSDTRCAARVMARPRFGAPHASESCSKNGPERGGQDGKASLEAHRDAPGAGAPPAPGKKEAPPVEGDSEGAMWTAVFDEPANSTPTAPGVVRDVGSSVWAAGTSAPEEKGWAKFTDFQPFCCSESGPRCSSPVDTECSHAEGSRSQGPEKAFSPASPCAWNVCVTRKAPLLASDSSSSGGSHSEDGDQKAASAMDAVSRGPGREAPPLPTVARTEEAVGRVGCADSRLLSPACPAPKEVTAAPAVAVPPEATVAITTALSKAGPAIPTPAVSSALAVAVPLGPIMAVTAAPAMVATLGTVTKDGKTDAPPEGAALNGPV

SEQ ID NO: 68925 - protein, 685 aa, Homo sapiens
  Payload ID: 13705
  Gene Symbol: PPP6R2
  Gene Name: protein phosphatase 6, regulatory subunit 2
  ENSP ID: ENSP00000384532
  MOD_RES (1)..(1): Any amino acid
XLETRRVGTEGLVDSFSQGLERSYAVSSSVLHGIEPRLKDFHQLLLNPPKKKAILTTIGVLEEPLGNARLHGARLMAALLHTNTPSINQELCRLNTMDLLLDLFFKYTWNNFLHFQVELCIAAILSHAAREERTEASGSESRVEPPHENGNRSLETPQPAASLPDNTMVTHLFQKCCLVQRILEAWEANDHTQAAGGMRRGNMGHLTRIANAVVQNLERGPVQTHISEVIRGLPADCRGRWESFVEETLTETNRRNTVDLVSTHHLHSSSEDEDIEGAFPNELSLQQAFSDYQIQQMTANFVDQFGFNDEEFADQDDNINAPFDRIAEINFNIDADEDSPSAALFEACCSDRIQPFDDDEDEDIWEDSDTRCAARVMARPRFGAPHASESCSKNGPERGGQDGKASLEAHRDAPGAGAPPAPGKKEAPPVEGDSEGAMWTAVFDEPANSTPTAPGVVRDVGSSVWAAGTSAPEEKGWAKFTDFQPFCCSESGPRCSSPVDTECSHAEGSRSQGPEKAFSPASPCAWNVCVTRKAPLLASDSSSSGGSHSEDGDQKAASAMDAVSRGPGREAPPLPTVARTEEAVGRVGCADSRLLSPACPAPKEVTAAPAVAVPPEATVAITTALSKAGPAIPTPAVSSALAVAVPLGPIMAVTAAPAMVATLGTVTKDGKTDAPPEGAALNGPV

SEQ ID NO: 68926 - protein, 562 aa, Homo sapiens
  Payload ID: 13705
  Gene Symbol: PPP6R2
  Gene Name: protein phosphatase 6, regulatory subunit 2
  ENSP ID: ENSP00000391595
  MOD_RES (1)..(1): Any amino acid
XLLLDLFFKYTWNNFLHFQVELCIAAILSHAAREERTEASGSESRVEPPHENGNRSLETPQPAASLPDNTMVTHLFQKCCLVQRILEAWEANDHTQAAGGMRRGNMGHLTRIANAVVQNLERGPVQTHISEVIRGLPADCRGRWESFVEETLTETNRRNTVDLAFSDYQIQQMTANFVDQFGFNDEEFADQDDNINAPFDRIAEINFNIDADEDSPSAALFEACCSDRIQPFDDDEDEDIWEDSDTRCAARVMARPRFGAPHASESCSKNGPERGGQDGKASLEAHRDAPGAGAPPAPGKKEAPPVEGDSEAGAMWTAVFDEPANSTPTAPGVVRDVGSSVWAAGTSAPEEKGWAKFTDFQPFCCSESGPRCSSPVDTECSHAEGSRSQGPEKAFSPASPCAWNVCVTRKAPLLASDSSSSGGSHSEDGDQKAASAMDAVSRGPGREAPPLPTVARTEEAVGRVGCADSRLLSPACPAPKEVTAAPAVAVPPEATVAITTALSKAGPAIPTPAVSSALAVAVPLGPIMAVTAAPAMVATLGTVTKDGKTDAPPEGAALNGPV

SEQ ID NO: 68927 - protein, 959 aa, Homo sapiens
  Payload ID: 13705
  Gene Symbol: PPP6R2
  Gene Name: protein phosphatase 6, regulatory subunit 2
  Uniprot ID: O75170
  ENSP ID: ENSP00000478417
MFWKFDLNTTSHVDKLLDKEHVTLQELMDEDDILQECKAQNQKLLDFLCRQQCMEELVSLITQDPPLDMEEKVRFKYPNTACELLTCDVPQISDRLGGDESLLSLLYDFLDHEPPLNPLLASFFSKTIGNLIARKTEQVITFLKKKDKFISLVLKHIGTSALMDLLLRLVSCVEPAGLRQDVLHWLNEEKVIQRLVELIHPSQDEDRQSNASQTLCDIVRLGRDQGSQLQEALEPDPLLTALESQDCVEQLLKNMFDGDRTESCLVSGTQVLLTLLETRRVGTEGLVDSFSQGLERSYAVSSSVLHGIEPRLKDFHQLLLNPPKKKAILTTIGVLEEPLGNARLHGARLMAALLHTNTPSINQELCRLNTMDLLLDLFFKYTWNNFLHFQVELCIAAILSHAAREERTEASGSESRVEPPHENGNRSLETPQPAASLPDNTMVTHLFQKCCLVQRILEAWEANDHTQAAGGMRRGNMGHLTRIANAVVQNLERGPVQTHISEVIRGLPADCRGRWESFVEETLTETNRRNTVDLVSTHHLHSSSEDEDIEGAFPNELSLQQAFSDYQIQQMTANFVDQFGFNDEEFADQDDNINAPFDRIAEINFNIDADEDSPSAALFEACCSDRIQPFDDDEDEDIWEDSDTRCAARVMARPRFGAPHASESCSKNGPERGGQDGKASLEAHRDAPGAGAPPAPGKKEAPPVEGDSEGAMWTAVFDEPANSTPTAPGVVRDVGSSVWAAGTSAPEEKGWAKFTDFQPFCCSESGPRCSSPVDTECSHAEGSRSQGPEKAFSPASPCAWNVCVTRKAPLLASDSSSSGGSHSEDGDQKAASAMDAVSRGPGREAPPLPTVARTEEAVGRVGCADSRLLSPACPAPKEVTAAPAVAVPPEATVAITTALSKAGPAIPTPAVSSALAVAVPLGPIMAVTAAPAMVATLGTVTKDGKTDAPPEGAALNGPV

SEQ ID NO: 68928 - protein, 793 aa, Homo sapiens
  Payload ID: 13706
  Gene Symbol: PPP6R3
  Gene Name: protein phosphatase 6, regulatory subunit 3
  Uniprot ID: Q5H9R7
  ENSP ID: ENSP00000265636
MFWKFDLHSSSHIDTLLEREDVTLKELMDEEDVLQECKAQNRKLIEFLLKAECLEDLVSFIIEEPPQDMDEKIRYKYPNISCELLTSDVSQMNDRLGEDESLLMKLYSFLLNDSPLNPLLASFFSKVLSILISRKPEQIVDFLKKKHDFVDLIIKHIGTSAIMDLLLRLLTCIEPPQPRQDVLNWLNEEKIIQRLVEIVHPSQEEDRHSNASQSLCEIVRLSRDQMLQIQNSTEPDPLLATLEKQEIIEQLLSNIFHKEKNESAIVSAIQILLTLLETRRPTFEGHIEICPPGMSHSACSVNKSVLEAIRGRLGSFHELLLEPPKNMFFKYTWNNFLHTQVEICIALILASPFENTENATITDQDSTGDNLLLKHLFQKCQLIERILEAWEMNEKKQAEGGRRHGYMGHLTRIANCIVHSTDKGPNSALVQQLIKDLPDEVRERWETFCTSSLGETNKRNTVDLAFSDYQMQQMTSNFIDQFGFNDEKFADQDDIGNVSFDRVSDINFTLNTNESGNIALFEACCKERIQQFDDGGSDEEDIWEEKHIAFTPESQRRSSSGSTDSEESTDSEEEDGAKQDLFEPSSANTEDKMEVDLSEPPNWSANFDVPMETTHGAPLDSVGSDVWSTEEPMPTKETGWASFSEFTSSLSTKDSLRSNSPVEMETSTEPMDPLTPSAAALAVQPEAAGSVAMEASSDGEEDAESTDKVTETVMNGGMKETLSLTVDAKTETAVFKSEEGKLSTSQDAACKDAEECPETAEAKCAAPRPPSSSPEQRTGQPSAPGDTSVNGPV

SEQ ID NO: 68929 - protein, 827 aa, Homo sapiens
  Payload ID: 13706
  Gene Symbol: PPP6R3
  Gene Name: protein phosphatase 6, regulatory subunit 3
  ENSP ID: ENSP00000265637
MFWKFDLHSSSHIDTLLEREDVTLKELMDEEDVLQECKAQNRKLIEFLLKAECLEDLVSFIIEEPPQDMDEKIRYKYPNISCELLTSDVSQMNDRLGEDESLLMKLYSFLLNDSPLNPLLASFFSKVLSILISRKPEQIVDFLKKKHDFVDLIIKHIGTSAIMDLLLRLLTCIEPPQPRQDVLNWLNEEKIIQRLVEIVHPSQEEDRHSNASQSLCEIVRLSRDQMLQIQNSTEPDPLLATLEKQEIIEQLLSNIFHKEKNESAIVSAIQILLTLLETRRPTFEGHIEICPPGMSHSACSVNKSVLEAIRGRLGSFHELLLEPPKKSVMKTTWGVLDPPVGNTRLNVIRLISSLLQTNTSSINGDLMELNSIGVILNMFFKYTWNNFLHTQVEICIALILASPFENTENATITDQDSTGDNLLLKHLFQKCQLIERILEAWEMNEKKQAEGGRRHGYMGHLTRIANCIVHSTDKGPNSALVQQLIKDLPDEVRERWETFCTSSLGETNKRNTVDLFGFNDEKFADQDDIGNVSFDRVSDINFTLNTNESGNIALFEACCKERIQQFDDGGSDEEDIWEEKHIAFTPESQRRSSSGSTDSEESTDSEEEDGAKQDLFEPSSANTEDKMEVDLSEPPNWSANFDVPMETTHGAPLDSVGSDVWSTEEPMPTKETGWASFSEFTSSLSTKDSLRSNSPVEMETSTEPMDPLTPSAAALAVQPEAAGSVAMEASSDGEEDAESTDKVTETVMNGGMKETLSLTVDAKTETAVFKSEEGKLSTSQDAACKDAEECPETAEAKCAAPRPPSSSPEQRTGQPSAPGDTSVNGPV

SEQ ID NO: 68930 - protein, 873 aa, Homo sapiens
  Payload ID: 13706
  Gene Symbol: PPP6R3
  Gene Name: protein phosphatase 6, regulatory subunit 3
  Uniprot ID: Q5H9R7
  ENSP ID: ENSP00000377389
MFWKFDLHSSSHIDTLLEREDVTLKELMDEEDVLQECKAQNRKLIEFLLKAECLEDLVSFIIEEPPQDMDEKIRYKYPNISCELLTSDVSQMNDRLGEDESLLMKLYSFLLNDSPLNPLLASFFSKVLSILISRKPEQIVDFLKKKHDFVDLIIKHIGTSAIMDLLLRLLTCIEPPQPRQDVLNWLNEEKIIQRLVEIVHPSQEEDRHSNASQSLCEIVRLSRDQMLQIQNSTEPDPLLATLEKQEIIEQLLSNIFHKEKNESAIVSAIQILLTLLETRRPTFEGHIEICPPGMSHSACSVNKSVLEAIRGRLGSFHELLLEPPKKSVMKTTWGVLDPPVGNTRLNVIRLISSLLQTNTSSINGDLMELNSIGVILNMFFKYTWNNFLHTQVEICIALILASPFENTENATITDQDSTGDNLLLKHLFQKCQLIERILEAWEMNEKKQAEGGRRHGYMGHLTRIANCIVHSTDKGPNSALVQQLIKDLPDEVRERWETFCTSSLGETNKRNTVDLVTTCHIHSSSDDEIDFKETGFSQDSSLQQAFSDYQMQQMTSNFIDQFGFNDEKFADQDDIGNVSFDRVSDINFTLNTNESGNIALFEACCKERIQQFDDGGSDEEDIWEEKHIAFTPESQRRSSSGSTDSEESTDSEEEDGAKQDLFEPSSANTEDKMEVDLSEPPNWSANFDVPMETTHGAPLDSVGSDVWSTEEPMPTKETGWASFSEFTSSLSTKDSLRSNSPVEMETSTEPMDPLTPSAAALAVQPEAAGSVAMEASSDGEEDAESTDKVTETVMNGGMKETLSLTVDAKTETAVFKSEEGKLSTSQDAACKDAEECPETAEAKCAAPRPPSSSPEQRTGQPSAPGDTSVNGPV

SEQ ID NO: 68931 - protein, 879 aa, Homo sapiens
  Payload ID: 13706
  Gene Symbol: PPP6R3
  Gene Name: protein phosphatase 6, regulatory subunit 3
  Uniprot ID: Q5H9R7
  ENSP ID: ENSP00000377390
MFWKFDLHSSSHIDTLLEREDVTLKELMDEEDVLQECKAQNRKLIEFLLKAECLEDLVSFIIEEPPQDMDEKIRYKYPNISCELLTSDVSQMNDRLGEDESLLMKLYSFLLNDSPLNPLLASFFSKVLSILISRKPEQIVDFLKKKHDFVDLIIKHIGTSAIMDLLLRLLTCIEPPQPRQDVLNWLNEEKIIQRLVEIVHPSQEEDRHSNASQSLCEIVRLSRDQMLQIQNSTEPDPLLATLEKQEIIEQLLSNIFHKEKNESAIVSAIQILLTLLETRRPTFEGHIEICPPGMSHSACSVNKSVLEAIRGRLGSFHELLLEPPKKSVMKTTWGVLDPPVGNTRLNVIRLISSLLQTNTSSINGDLMELNSIGVILNMFFKYTWNNFLHTQVEICIALILASPFENTENATITDQDSTGDNLLLKHLFQKCQLIERILEAWEMNEKKQAEGGRRHGYMGHLTRIANCIVHSTDKGPNSALVQQLIKDLPDEVRERWETFCTSSLGETNKRNTVDLVTTCHIHSSSDDEIDFKETGFSQDSSLQQAFSDYQMQQMTSNFIDQFGFNDEKFADQDDIGNVSFDRVSDINFTLNTNESGNIALFEACCKERIQQFDDGGSDEEDIWEEKHIAFTPESQRRSSSGSTDSEESTDSEEEDGAKQDLFEPSSANTEDKMEVDLSEPPNWSANFDVPMETTHGAPLDSVGSDVWSTEEPMPTKETGWASFSEFTSSLSTKDSLRSNSPVEMETSTEPMDPLTPSAAALAVQPEAAGSVAMEASSDGEEDAESTDKVTETVMNGGMKETLSLTVDAKTETAVFKRVLKSYREEGKLSTSQDAACKDAEECPETAEAKCAAPRPPSSSPEQRTGQPSAPGDTSVNGPV

SEQ ID NO: 68932 - protein, 844 aa, Homo sapiens
  Payload ID: 13706
  Gene Symbol: PPP6R3
  Gene Name: protein phosphatase 6, regulatory subunit 3
  Uniprot ID: Q5H9R7
  ENSP ID: ENSP00000431415
MFWKFDLHSSSHIDTLLEREDVTLKELMDEEDVLQECKAQNRKLIEFLLKAECLEDLVSFIIEEPPQDMDEKIRYKYPNISCELLTSDVSQMNDRLGEDESLLMKLYSFLLNDSPLNPLLASFFSKVLSILISRKPEQIVDFLKKKHDFVDLIIKHIGTSAIMDLLLRLLTCIEPPQPRQDVLNWLNEEKIIQRLVEIVHPSQEEDRHSNASQSLCEIVRLSRDQMLQIQNSTEPDPLLATLEKQEIIEQLLSNIFHKEKNESAIVSAIQILLTLLETRRPTFEGHIEICPPGMSHSACSVNKSVLEAIRGRLGSFHELLLEPPKKSVMKTTWGVLDPPVGNTRLNVIRLISSLLQTNTSSINGDLMELNSIGVILNMFFKYTWNNFLHTQVEICIALILASPFENTENATITDQDSTGDNLLLKHLFQKCQLIERILEAWEMNEKKQAEGGRRHGYMGHLTRIANCIVHSTDKGPNSALVQQLIKDLPDEVRERWETFCTSSLGETNKRNTVDLAFSDYQMQQMTSNFIDQFGFNDEKFADQDDIGNVSFDRVSDINFTLNTNESGNIALFEACCKERIQQFDDGGSDEEDIWEEKHIAFTPESQRRSSSGSTDSEESTDSEEEDGAKQDLFEPSSANTEDKMEVDLSEPPNWSANFDVPMETTHGAPLDSVGSDVWSTEEPMPTKETGWASFSEFTSSLSTKDSLRSNSPVEMETSTEPMDPLTPSAAALAVQPEAAGSVAMEASSDGEEDAESTDKVTETVMNGGMKETLSLTVDAKTETAVFKSEEGKLSTSQDAACKDAEECPETAEAKCAAPRPPSSSPEQRTGQPSAPGDTSVNGPV

SEQ ID NO: 68933 - protein, 140 aa, Homo sapiens
  Payload ID: 13706
  Gene Symbol: PPP6R3
  Gene Name: protein phosphatase 6, regulatory subunit 3
  ENSP ID: ENSP00000431738
MNDRLGEDESLLMKLYSFLLNDSPLNPLLASFFSKVLSILISRKPEQIVDFLKKKHDFVDLIIKHIGTSAIMDLLLRLLTCIEPPQPRQDVLNWLNEEKIIQRLVEIVHPSQEEDRHSNASQSLCEIVRLSRDQMLQIQN

SEQ ID NO: 68934 - protein, 186 aa, Homo sapiens
  Payload ID: 13706
  Gene Symbol: PPP6R3
  Gene Name: protein phosphatase 6, regulatory subunit 3
  ENSP ID: ENSP00000432837
MFWKFDLHSSSHIDTLLEREDVTLKELMDEEDVLQECKAQNRKLIEFLLKAECLEDLVSFIIEEPPQDMDEKIRYKYPNISCELLTSDVSQMNDRLGEDESLLMKLYSFLLNDSPLNPLLASFFSKVLSILISRKPEQIVDFLKKKHDFVDLIIKHIGTSAIMDLLLRLLTCIEPPQPRQDVLNWL

SEQ ID NO: 68935 - protein, 867 aa, Homo sapiens
  Payload ID: 13706
  Gene Symbol: PPP6R3
  Gene Name: protein phosphatase 6, regulatory subunit 3
  Uniprot ID: Q5H9R7
  ENSP ID: ENSP00000433058
MFWKFDLHSSSHIDTLLEREDVTLKELMDEEDVLQECKAQNRKLIEFLLKAECLEDLVSFIIEEPPQDMDEKIRYKYPNISCELLTSDVSQMNDRLGEDESLLMKLYSFLLNDSPLNPLLASFFSKVLSILISRKPEQIVDFLKKKHDFVDLIIKHIGTSAIMDLLLRLLTCIEPPQPRQDVLNWLNEEKIIQRLVEIVHPSQEEDRHSNASQSLCEIVRLSRDQMLQIQNSTEPDPLLATLEKQEIIEQLLSNIFHKEKNESAIVSAIQILLTLLETRRPTFEGHIEICPPGMSHSACSVNKSVLEAIRGRLGSFHELLLEPPKKSVMKTTWGVLDPPVGNTRLNVIRLISSLLQTNTSSINGDLMELNSIGVILNMFFKYTWNNFLHTQVEICIALILASPFENTENATITDQDSTGDNLLLKHLFQKCQLIERILEAWEMNEKKQAEGGRRHGYMGHLTRIANCIVHSTDKGPNSALVQQLIKDLPDEVRERWETFCTSSLGETNKRNTVDLVTTCHIHSSSDDEIDFKETGFSQDSSLQQMQQMTSNFIDQFGFNDEKFADQDDIGNVSFDRVSDINFTLNTNESGNIALFEACCKERIQQFDDGGSDEEDIWEEKHIAFTPESQRRSSSGSTDSEESTDSEEEDGAKQDLFEPSSANTEDKMEVDLSEPPNWSANFDVPMETTHGAPLDSVGSDVWSTEEPMPTKETGWASFSEFTSSLSTKDSLRSNSPVEMETSTEPMDPLTPSAAALAVQPEAAGSVAMEASSDGEEDAESTDKVTETVMNGGMKETLSLTVDAKTETAVFKSEEGKLSTSQDAACKDAEECPETAEAKCAAPRPPSSSPEQRTGQPSAPGDTSVNGPV

SEQ ID NO: 68936 - protein, 75 aa, Homo sapiens
  Payload ID: 13706
  Gene Symbol: PPP6R3
  Gene Name: protein phosphatase 6, regulatory subunit 3
  ENSP ID: ENSP00000433551
MFWKFDLHSSSHIDTLLEREDVTLKELMDEEDVLQECKAQNRKLIEFLLKAECLEDLVSFIIEEPPQDMDEKIRY

SEQ ID NO: 68937 - protein, 838 aa, Homo sapiens
  Payload ID: 13706
  Gene Symbol: PPP6R3
  Gene Name: protein phosphatase 6, regulatory subunit 3
  ENSP ID: ENSP00000433565
MFWKFDLHSSSHIDTLLEREDVTLKELMDEEDVLQECKAQNRKLIEFLLKAECLEDLVSFIIEEPPQDMDEKIRYKYPNISCELLTSDVSQMNDRLGEDESLLMKLYSFLLNDSPLNPLLASFFSKVLSILISRKPEQIVDFLKKKHDFVDLIIKHIGTSAIMDLLLRLLTCIEPPQPRQDVLNWLNEEKIIQRLVEIVHPSQEEDRHSNASQSLCEIVRLSRDQMLQIQNSTEPDPLLATLEKQEIIEQLLSNIFHKEKNESAIVSAIQILLTLLETRRPTFEGHIEICPPGMSHSACSVNKSVLEAIRGRLGSFHELLLEPPKKSVMKTTWGVLDPPVGNTRLNVIRLISSLLQTNTSSINGDLMELNSIGVILNMFFKYTWNNFLHTQVEICIALILASPFENTENATITDQDSTGDNLLLKHLFQKCQLIERILEAWEMNEKKQAEGGRRHGYMGHLTRIANCIVHSTDKGPNSALVQQLIKDLPDEVRERWETFCTSSLGETNKRNTVDLMQQMTSNFIDQFGFNDEKFADQDDIGNVSFDRVSDINFTLNTNESGNIALFEACCKERIQQFDDGGSDEEDIWEEKHIAFTPESQRRSSSGSTDSEESTDSEEEDGAKQDLFEPSSANTEDKMEVDLSEPPNWSANFDVPMETTHGAPLDSVGSDVWSTEEPMPTKETGWASFSEFTSSLSTKDSLRSNSPVEMETSTEPMDPLTPSAAALAVQPEAAGSVAMEASSDGEEDAESTDKVTETVMNGGMKETLSLTVDAKTETAVFKSEEGKLSTSQDAACKDAEECPETAEAKCAAPRPPSSSPEQRTGQPSAPGDTSVNGPV

SEQ ID NO: 68938 - protein, 39 aa, Homo sapiens
  Payload ID: 13706
  Gene Symbol: PPP6R3
  Gene Name: protein phosphatase 6, regulatory subunit 3
  ENSP ID: ENSP00000433768
MFWKFDLHSSSHIDTLLEREDVTLKELMDEEDVLQECKA

SEQ ID NO: 68939 - protein, 51 aa, Homo sapiens
  Payload ID: 13706
  Gene Symbol: PPP6R3
  Gene Name: protein phosphatase 6, regulatory subunit 3
  ENSP ID: ENSP00000433853
  MOD_RES (1)..(1): Any amino acid
XEECPETAEAKCAAPRPPSSSPEQSASDACLLLLRTGQPSAPGDTSVNGPV

SEQ ID NO: 68940 - protein, 112 aa, Homo sapiens
  Payload ID: 13706
  Gene Symbol: PPP6R3
  Gene Name: protein phosphatase 6, regulatory subunit 3
  ENSP ID: ENSP00000434426
  MOD_RES (1)..(1): Any amino acid
XKQAEGGRRHGYMGHLTRIANCIVHSTDKGPNSALVQQLIKDLPDEVRERWETFCTSSLGETNKRNTVDLVTTCHIHSSSDDEIDFKETGFSQDSSLQQKNTPTFIALWLCK

SEQ ID NO: 68941 - protein, 641 aa, Homo sapiens
  Payload ID: 13706
  Gene Symbol: PPP6R3
  Gene Name: protein phosphatase 6, regulatory subunit 3
  ENSP ID: ENSP00000434429
MNDRLGEDESLLMKLYSFLLNDSPLNPLLASFFSKVLSILISRKPEQIVDFLKKKHDFVDLIIKHIGTSAIMDLLLRLLTCIEPPQPRQDVLNKSVMKTTWGVLDPPVGNTRLNVIRLISSLLQTNTSSINGDLMELNSIGVILNMFFKYTWNNFLHTQVEICIALILASPFENTENATITDQDSTGDNLLLKHLFQKCQLIERILEAWEMNEKKQAEGGRRHGYMGHLTRIANCIVHSTDKGPNSALVQQLIKDLPDEVRERWETFCTSSLGETNKRNTVDLVTTCHIHSSSDDEIDFKETGFSQDSSLQQAFSDYQMQQMTSNFIDQFGFNDEKFADQDDIGNVSFDRVSDINFTLNTNESGNIALFEACCKERIQQFDDGGSDEEDIWEEKHIAFTPESQRRSSSGSTDSEESTDSEEEDGAKQDLFEPSSANTEDKMEVDLSEPPNWSANFDVPMETTHGAPLDSVGSDVWSTEEPMPTKETGWASFSEFTSSLSTKDSLRSNSPVEMETSTEPMDPLTPSAAALAVQPEAAGSVAMEASSDGEEDAESTDKVTETVMNGGMKETLSLTVDAKTETAVFKSEEGKLSTSQDAACKDAEECPETAEAKCAAPRPPSSSPEQRTGQPSAPGDTSVNGPV

SEQ ID NO: 68942 - protein, 580 aa, Homo sapiens
  Payload ID: 13706
  Gene Symbol: PPP6R3
  Gene Name: protein phosphatase 6, regulatory subunit 3
  ENSP ID: ENSP00000436209
QILLTLLETRRPTFEGHIEICPPGMSHSACSVNKSVLEAIRGRLGSFHELLLEPPKLFLLQKSVMKTTWGVLDPPVGNTRLNVIRLISSLLQTNTSSINGDLMELNSIGVILNMFFKYTWNNFLHTQVEICIALILASPFENTENATITDQDSTGDNLLLKHLFQKCQLIERILEAWEMNEKKQAEGGRRHGYMGHLTRIANCIVHSTDKGPNSALVQQLIKDLPDEVRERWETFCTSSLGETNKRNTVDLAFSDYQMQQMTSNFIDQFGFNDEKFADQDDIGNVSFDRVSDINFTLNTNESGNIALFEACCKERIQQFDDGGSDEEDIWEEKHIAFTPESQRRSSSGSTDSEESTDSEEEDGAKQDLFEPSSANTEDKMEVDLSEPPNWSANFDVPMETTHGAPLDSVGSDVWSTEEPMPTKETGWASFSEFTSSLSTKDSLRSNSPVEMETSTEPMDPLTPSAAALAVQPEAAGSVAMEASSDGEEDAESTDKVTETVMNGGMKETLSLTVDAKTETAVFKSEEGKLSTSQDAACKDAEECPETAEAKCAAPRPPSSSPEQRTGQPSAPGDTSVNGPV

SEQ ID NO: 68943 - protein, 109 aa, Homo sapiens
  Payload ID: 13706
  Gene Symbol: PPP6R3
  Gene Name: protein phosphatase 6, regulatory subunit 3
  ENSP ID: ENSP00000436601
  MOD_RES (1)..(1): Any amino acid
XSPVEMETSTEPMDPLTPSAAALAVQPEAAGSVAMEASSDGEEDAESTDKVTETVMNGGMKETLSLTVDAKTETAVFKRFFDTFTESAVLLTCSRGHIIPPNSSFLGVF

SEQ ID NO: 68944 - protein, 8 aa, Homo sapiens
  Payload ID: 13706
  Gene Symbol: PPP6R3
  Gene Name: protein phosphatase 6, regulatory subunit 3
  ENSP ID: ENSP00000436789
MFWKFDLH

SEQ ID NO: 68945 - protein, 791 aa, Homo sapiens
  Payload ID: 13706
  Gene Symbol: PPP6R3
  Gene Name: protein phosphatase 6, regulatory subunit 3
  Uniprot ID: Q5H9R7
  ENSP ID: ENSP00000437329
MFWKFDLHSSSHIDTLLEREDVTLKELMDEEDVLQECKAQNRKLIEFLLKAECLEDLVSFIIEEPPQDMDEKIRYKYPNISCELLTSDVSQMNDRLGEDESLLMKLYSFLLNDSPLNPLLASFFSKVLSILISRKPEQIVDFLKKKHDFVDLIIKHIGTSAIMDLLLRLLTCIEPPQPRQDVLNWLNEEKIIQRLVEIVHPSQEEDRHSNASQSLCEIVRLSRDQMLQIQNSTEPDPLLATLEKQEIIEQLLSNIFHKEKNESAIVSAIQILLTLLETRRPTFEGHIEICPPGMSHSACSVNKSVLEAIRGRLGSFHELLLEPPKNMFFKYTWNNFLHTQVEICIALILASPFENTENATITDQDSTGDNLLLKHLFQKCQLIERILEAWEMNEKKQAEGGRRHGYMGHLTRIANCIVHSTDKGPNSALVQQLIKDLPDEVRERWETFCTSSLGETNKRNTVDLAFSDYQMQQMTSNFIDQFGFNDEKFADQDDIGNVSFDRVSDINFTLNTNESGNIALFEACCKERIQQFDDGGSDEEDIWEEKHIAFTPESQRRSSSGSTDSEESTDSEEEDGAKQDLFEPSSANTEDKMEVDLSEPPNWSANFDVPMETTHGAPLDSVGSDVWSTEEPMPTKETGWASFSEFTSSLSTKDSLRSNSPVEMETSTEPMDPLTPSAAALAVQPEAAGSVAMEASSDGEEDAESTDKVTETVMNGGMKETLSLTVDAKTETAVFKSEEGKLSTSQDAACKDAEECPETAEAKCAAPRPPSSSPEQSGVEIPALPGQWSQQ

SEQ ID NO: 68946 - protein, 386 aa, Homo sapiens
  Payload ID: 13707
  Gene Symbol: PPME1
  Gene Name: protein phosphatase methylesterase 1
  Uniprot ID: Q9Y570
  ENSP ID: ENSP00000329867
MSALEKSMHLGRLPSRPPLPGSGGSQSGAKMRMGPGRKRDFSPVPWSQYFESMEDVEVENETGKDTFRVYKSGSEGPVLLLLHGGGHSALSWAVFTAAIISRVQCRIVALDLRSHGETKVKNPEDLSAETMAKDVGNVVEAMYGDLPPPIMLIGHSMGGAIAVHTASSNLVPSLLGLCMIDVVEGTAMDALNSMQNFLRGRPKTFKSLENAIEWSVKSGQIRNLESARVSMVGQVKQCEGITSPEGSKSIVEGIIEEEEEDEEGSESISKRKKEDDMETKKDHPYTWRIELAKTEKYWDGWFRGLSNLFLSCPIPKLLLLAGVDRLDKDLTIGQMQGKFQMQVLPQCGHAVHEDAPDKVAEAVATFLIRHRFAEPIGGFQCVFPGC

SEQ ID NO: 68947 - protein, 400 aa, Homo sapiens
  Payload ID: 13707
  Gene Symbol: PPME1
  Gene Name: protein phosphatase methylesterase 1
  Uniprot ID: Q9Y570
  ENSP ID: ENSP00000381461
MSALEKSMHLGRLPSRPPLPGSGGSQSGAKMRMGPGRKRDFSPVPWSQYFESMEDVEVENETGKDTFRVYKSGSEGPVLLLLHGGGHSALSWAVFTAAIISRVQCRIVALDLRSHGETKVKNPEDLSAETMAKDVGNVVEAMYGDLPPPIMLIGHSMGGAIAVHTASSNLVPSLLGLCMIDVVEGTAMDALNSMQNFLRGRPKTFKSLENAIEWSVKSGQIRNLESARVSMVGQVKQCEGITSPEGSKSIVEGIIEEEEEDEEGSESISKRKKEDDMEGLPSETQNLLLFLQTKKDHPYTWRIELAKTEKYWDGWFRGLSNLFLSCPIPKLLLLAGVDRLDKDLTIGQMQGKFQMQVLPQCGHAVHEDAPDKVAEAVATFLIRHRFAEPIGGFQCVFPGC

SEQ ID NO: 68948 - protein, 135 aa, Homo sapiens
  Payload ID: 13707
  Gene Symbol: PPME1
  Gene Name: protein phosphatase methylesterase 1
  ENSP ID: ENSP00000484654
MSGHLPWAEARLLQGPPAPSPATEQPRLNTAHAQSHRPKPMELFLIIKFNHFHNWFLEVCSAPLLFKPTASLCHLWISHHSTQKHYSLASPVFAFFQLPRHSTVACPYCPGTPFPRAGRGSVLKPIFSVTVLGDV

SEQ ID NO: 68949 - protein, 591 aa, Homo sapiens
  Payload ID: 13708
  Gene Symbol: PPEF1
  Gene Name: protein phosphatase, EF-hand calcium binding domain 1
  Uniprot ID: O14829
  ENSP ID: ENSP00000341892
MGCSSSSTKTRRSDTSLRAALIIQNWYRGYKARLKARQHYALTIFQSIEYADEQGQMQLSTFFSFMLENYTHIHKEELELRNQSLESEQDMRDRWDYVDSIDVPDSYNGPRLQFPLTCTDIDLLLEAFKEQQILHAHYVLEVLFETKKVLKQMPNFTHIQTSPSKEVTICGDLHGKLDDLFLIFYKNGLPSERNPYVFNGDFVDRGKNSIEILMILCVSFLVYPNDLHLNRGNHEDFMMNLRYGFTKEILHKYKLHGKRILQILEEFYAWLPIGTIVDNEILVIHGGISETTDLNLLHRVERNKMKSVLIPPTETNRDHDTDSKHNKVGVTFNAHGRIKTNGSPTEHLTEHEWEQVVTIFSASNYYEEGSNRGAYIKLCSGTTPRFFQYQVTKATCFQPLRQRVDTMENSAIKILRERVISRKSDLTRAFQLQDHRKSGKLSVSQWAFCMENILGLNLPWRSLSSNLVNIDQNGNVEYMSSFQNIRIEKPVQEAHSTLVETLYRYRSDLEIIFNAIDTDHSGLISVEEFRAMWKLFSSHYNVHIDDSQVNKLANIMDLNKDGSIDFNEFLKAFYVVHRYEDLMKPDVTNLG

SEQ ID NO: 68950 - protein, 653 aa, Homo sapiens
  Payload ID: 13708
  Gene Symbol: PPEF1
  Gene Name: protein phosphatase, EF-hand calcium binding domain 1
  Uniprot ID: O14829
  ENSP ID: ENSP00000354871
MGCSSSSTKTRRSDTSLRAALIIQNWYRGYKARLKARQHYALTIFQSIEYADEQGQMQLSTFFSFMLENYTHIHKEELELRNQSLESEQDMRDRWDYVDSIDVPDSYNGPRLQFPLTCTDIDLLLEAFKEQQILHAHYVLEVLFETKKVLKQMPNFTHIQTSPSKEVTICGDLHGKLDDLFLIFYKNGLPSERNPYVFNGDFVDRGKNSIEILMILCVSFLVYPNDLHLNRGNHEDFMMNLRYGFTKEILHKYKLHGKRILQILEEFYAWLPIGTIVDNEILVIHGGISETTDLNLLHRVERNKMKSVLIPPTETNRDHDTDSKHNKVGVTFNAHGRIKTNGSPTEHLTEHEWEQIIDILWSDPRGKNGCFPNTCRGGGCYFGPDVTSKILNKYQLKMLIRSHECKPEGYEICHDGKVVTIFSASNYYEEGSNRGAYIKLCSGTTPRFFQYQVTKATCFQPLRQRVDTMENSAIKILRERVISRKSDLTRAFQLQDHRKSGKLSVSQWAFCMENILGLNLPWRSLSSNLVNIDQNGNVEYMSSFQNIRIEKPVQEAHSTLVETLYRYRSDLEIIFNAIDTDHSGLISVEEFRAMWKLFSSHYNVHIDDSQVNKLANIMDLNKDGSIDFNEFLKAFYVVHRYEDLMKPDVTNLG

SEQ ID NO: 68951 - protein, 178 aa, Homo sapiens
  Payload ID: 13708
  Gene Symbol: PPEF1
  Gene Name: protein phosphatase, EF-hand calcium binding domain 1
  ENSP ID: ENSP00000418623
MPNFTHIQTSPSKEVTICGDLHGKLDDLFLIFYKNGLPSERNPYVFNGDFVDRGKNSIEILMILCVSFLVYPNDLHLNRGNHEDFMMNLRYGFTKEILHKYKLHGKRILQILEEFYAWLPIGTIVDNEILVIHGGISETTDLNLLHRVERNKMKSVLIPPTETNRDHDTDSKHNKVGV

SEQ ID NO: 68952 - protein, 115 aa, Homo sapiens
  Payload ID: 13708
  Gene Symbol: PPEF1
  Gene Name: protein phosphatase, EF-hand calcium binding domain 1
  ENSP ID: ENSP00000419273
EKVTLLVLSNFKTTENQAHSTLVETLYRYRSDLEIIFNAIDTDHSGLISVEEFRAMWKLFSSHYNVHIDDSQVNKLANIMDLNKDGSIDFNEFLKAFYVVHRYEDLMKPDVTNLG

SEQ ID NO: 68953 - protein, 96 aa, Homo sapiens
  Payload ID: 13708
  Gene Symbol: PPEF1
  Gene Name: protein phosphatase, EF-hand calcium binding domain 1
  ENSP ID: ENSP00000419948
MRDRWDYVDSIDVPDSYNGPRLQFPLTCTDIDLLLEAFKEQQILHAHYVLEVLFETKKVLKQMPNFTHIQTSPSKEVTICGDLHGKLDDLFLIFYK

SEQ ID NO: 68954 - protein, 753 aa, Homo sapiens
  Payload ID: 13709
  Gene Symbol: PPEF2
  Gene Name: protein phosphatase, EF-hand calcium binding domain 2
  Uniprot ID: O14830
  ENSP ID: ENSP00000286719
MGSGTSTQHHFAFQNAERAFKAAALIQRWYRRYVARLEMRRRCTWSIFQSIEYAGQQDQVKLHDFFSYLMDHFIPSSHNDRDFLTRIFTEDRFAQDSEMKKCSDYESIEVPDSYTGPRLSFPLLPDHATALVEAFRLKQQLHARYVLNLLYETKKHLVQLPNINRVSTCYSEEITVCGDLHGQLDDLIFIFYKNGLPSPERSYVFNGDFVDRGKDSVEILMILFAFMLVYPKEFHLNRGNHEDHMVNLRYGFTKEVMNKYKVHGKEILRTLQDVFCWLPLATLIDEKVLILHGGVSDITDLELLDKIERSKIVSTMRCKTRQKSEKQMEEKRRANQKSSAQGPIPWFLPESRSLPSSPLRLGSYKAQKTSRSSSIPCSGSLDGRELSRQVRSSVELELERCRQQAGLLVTGEKEEPSRSASEADSEAGELRKPTQEEWRQVVDILWSDPMAQEGCKANTIRGGGCYFGPDVTQQLLQKYNMQFLIRSHECKPEGYEFCHNRKVLTIFSASNYYEVGSNRGAYVKLGPALTPHIVQYQANKVTHTLTMRQRISRVEESALRALREKLFAHSSDLLSEFKKHDADKVGLITLSDWAAAVESVLHLGLPWRMLRPQLVNSSADNMLEYKSWLKNLAKEQLSRENIQSSLLETLYRNRSNLETIFRIIDSDHSGFISLDEFRQTWKLFSSHMNIDITDDCICDLARSIDFNKDGHIDINEFLEAFRLVEKSCPEGDASECPQATNAKDSGCSSPGAH

SEQ ID NO: 68955 - protein, 139 aa, Homo sapiens
  Payload ID: 13709
  Gene Symbol: PPEF2
  Gene Name: protein phosphatase, EF-hand calcium binding domain 2
  ENSP ID: ENSP00000426186
MGSGTSTQHHFAFQNAERAFKAAALIQRWYRRYVARLEMRRRCTWSIFQSIEYAGQQDQVKLHDFFSYLMDHFIPSSHNDRDFLTRIFTEDRFAQDSEMKKCSDYESIEVPDSYTGPRLSFPLLPDHATALVEAFRLKQ

SEQ ID NO: 68956 - protein, 598 aa, Homo sapiens
  Payload ID: 13709
  Gene Symbol: PPEF2
  Gene Name: protein phosphatase, EF-hand calcium binding domain 2
  Uniprot ID: O14830
  ENSP ID: ENSP00000483398
MGSGTSTQHHFAFQNAERAFKAAALIQRWYRRYVARLEMRRRCTWSIFQSIEYAGQQDQVKLHDFFSYLMDHFIPSSHNDRDFLTRIFTEDRFAQDSEMKKCSDYESIEVPDSYTGPRLSFPLLPDHATALVEAFRLKQQLHARYVLNLLYETKKHLVQLPNINRVSTCYSEEITVCGDLHGQLDDLIFIFYKNGLPSPERSYVFNGDFVDRGKDSVEILMILFAFMLVYPKEFHLNRGNHEDHMVNLRYGFTKEVMNKYKVHGKEILRTLQDVFCWLPLATLIDEKVLILHGGVSDITDLELLDKIERSKIVSTMRCKTRQKSEKQMEEKRRANQKSSAQGPIPWFLPESRSLPSSPLRLGSYKAQKTSRSSSIPCSGSLDGRELSRQVRSSVELELERCRQQAGLLVTGEKEEPSRSASEADSEAGELRKPTQEEWRQVVDILWSDPMAQEGCKANTIRGGGCYFGPDVTQQLLQKYNMQFLIRSHECKPEGYEFCHNRKVLTIFSASNYYEVGSNRGAYVKLGPALTPHIVQYQANKVTHTLTMRQRISRVEESALRALREKLFAHSSDLLSEFKKHDADKVGLASSQLCYYQQK

SEQ ID NO: 68957 - protein, 324 aa, Homo sapiens
  Payload ID: 13710
  Gene Symbol: PPM1A
  Gene Name: protein phosphatase, Mg2+/Mn2+ dependent, 1A
  Uniprot ID: P35813
  ENSP ID: ENSP00000314850
MGAFLDKPKMEKHNAQGQGNGLRYGLSSMQGWRVEMEDAHTAVIGLPSGLESWSFFAVYDGHAGSQVAKYCCEHLLDHITNNQDFKGSAGAPSVENVKNGIRTGFLEIDEHMRVMSEKKHGADRSGSTAVGVLISPQHTYFINCGDSRGLLCRNRKVHFFTQDHKPSNPLEKERIQNAGGSVMIQRVNGSLAVSRALGDFDYKCVHGKGPTEQLVSPEPEVHDIERSEEDDQFIILACDGIWDVMGNEELCDFVRSRLEVTDDLEKVCNEVVDTCLYKGSRDNMSVILICFPNAPKVSPEAVKKEAELDKYLECRVEGGSFNKK

SEQ ID NO: 68958 - protein, 455 aa, Homo sapiens
  Payload ID: 13710
  Gene Symbol: PPM1A
  Gene Name: protein phosphatase, Mg2+/Mn2+ dependent, 1A
  Uniprot ID: P35813
  ENSP ID: ENSP00000327255
MFCSGRKWVAEATICTKLMKREKRRMGKRRAKKAKREEKKKGGERRRNEKRGNQMKRMCERKKYETDLEDQDIMGAFLDKPKMEKHNAQGQGNGLRYGLSSMQGWRVEMEDAHTAVIGLPSGLESWSFFAVYDGHAGSQVAKYCCEHLLDHITNNQDFKGSAGAPSVENVKNGIRTGFLEIDEHMRVMSEKKHGADRSGSTAVGVLISPQHTYFINCGDSRGLLCRNRKVHFFTQDHKPSNPLEKERIQNAGGSVMIQRVNGSLAVSRALGDFDYKCVHGKGPTEQLVSPEPEVHDIERSEEDDQFIILACDGIWDVMGNEELCDFVRSRLEVTDDLEKVCNEVVDTCLYKGSRDNMSVILICFPNAPKVSPEAVKKEAELDKYLECRVEEIIKKQGEGVPDLVHVMRTLASENIPSLPPGGELASKRNVIEAVYNRLNPYKNDDTDSTSTDDMW

SEQ ID NO: 68959 - protein, 382 aa, Homo sapiens
  Payload ID: 13710
  Gene Symbol: PPM1A
  Gene Name: protein phosphatase, Mg2+/Mn2+ dependent, 1A
  Uniprot ID: P35813
  ENSP ID: ENSP00000378514
MGAFLDKPKMEKHNAQGQGNGLRYGLSSMQGWRVEMEDAHTAVIGLPSGLESWSFFAVYDGHAGSQVAKYCCEHLLDHITNNQDFKGSAGAPSVENVKNGIRTGFLEIDEHMRVMSEKKHGADRSGSTAVGVLISPQHTYFINCGDSRGLLCRNRKVHFFTQDHKPSNPLEKERIQNAGGSVMIQRVNGSLAVSRALGDFDYKCVHGKGPTEQLVSPEPEVHDIERSEEDDQFIILACDGIWDVMGNEELCDFVRSRLEVTDDLEKVCNEVVDTCLYKGSRDNMSVILICFPNAPKVSPEAVKKEAELDKYLECRVEEIIKKQGEGVPDLVHVMRTLASENIPSLPPGGELASKRNVIEAVYNRLNPYKNDDTDSTSTDDMW

SEQ ID NO: 68960 - protein, 128 aa, Homo sapiens
  Payload ID: 13710
  Gene Symbol: PPM1A
  Gene Name: protein phosphatase, Mg2+/Mn2+ dependent, 1A
  ENSP ID: ENSP00000431453
MGAFLDKPKMEKHNAQGQGNGLRYGLSSMQGWRVEMEDAHTAVIGLPSGLESWSFFAVYDGHAGSQVAKYCCEHLLDHITNNQDFKGSAGAPSVENVKNGIRTGFLEIDEHMRVMSEKKHGADRSGST

SEQ ID NO: 68961 - protein, 187 aa, Homo sapiens
  Payload ID: 13710
  Gene Symbol: PPM1A
  Gene Name: protein phosphatase, Mg2+/Mn2+ dependent, 1A
  ENSP ID: ENSP00000435398
MGAFLDKPKMEKHNAQGQGNGLRYGLSSMQGWRVEMEDAHTAVIGLPSGLESWSFFAVYDGHAGSQVAKYCCEHLLDHITNNQDFKGSAGAPSVENVKNGIRTGFLEIDEHMRVMSEKKHGADRSGSTAVGVLISPQHTYFINCGDSRGLLCRNRKVHFFTQDHKPSNPLEKERIQNAGGSVMIQRV

SEQ ID NO: 68962 - protein, 148 aa, Homo sapiens
  Payload ID: 13710
  Gene Symbol: PPM1A
  Gene Name: protein phosphatase, Mg2+/Mn2+ dependent, 1A
  ENSP ID: ENSP00000435575
MGAFLDKPKMEKHNAQGQGNGLRYGLSSMQGWRVEMEDAHTAVIGLPSGLESWSFFAVYDGHAGSQVAKYCCEHLLDHITNNQDFKGSAGAPSVENVKNGIRTGFLEIDEHMRVMSEKKHGADRSGSTAVGVLISPQHTYFINCGDSR

SEQ ID NO: 68963 - protein, 164 aa, Homo sapiens
  Payload ID: 13710
  Gene Symbol: PPM1A
  Gene Name: protein phosphatase, Mg2+/Mn2+ dependent, 1A
  ENSP ID: ENSP00000436445
MFCSGRKWVAEATICTKLMKREKRRMGKRRAKKAKREEKKKGGERRRNEKRGNQMKRMCERKKYETDLEDQDIMGAFLDKPKMEKHNAQGQGNGLRYGLSSMQGKSRQHECDFDLFSKCTQSIARSSEEGGRVGQVPGMQSRRNHKEAGGRRPRLSPCDAHISE

SEQ ID NO: 68964 - protein, 93 aa, Homo sapiens
  Payload ID: 13710
  Gene Symbol: PPM1A
  Gene Name: protein phosphatase, Mg2+/Mn2+ dependent, 1A
  ENSP ID: ENSP00000437200
MFCSGRKWVAEATICTKLMKREKRRMGKRRAKKAKREEKKKGGERRRNEKRGNQMKRMCERKKYETVLCFEKFRSTDNTSAVMRLSLYSRTDL

SEQ ID NO: 68965 - protein, 479 aa, Homo sapiens
  Payload ID: 13711
  Gene Symbol: PPM1B
  Gene Name: protein phosphatase, Mg2+/Mn2+ dependent, 1B
  Uniprot ID: O75688
  ENSP ID: ENSP00000282412
MGAFLDKPKTEKHNAHGAGNGLRYGLSSMQGWRVEMEDAHTAVVGIPHGLEDWSFFAVYDGHAGSRVANYCSTHLLEHITTNEDFRAAGKSGSALELSVENVKNGIRTGFLKIDEYMRNFSDLRNGMDRSGSTAVGVMISPKHIYFINCGDSRAVLYRNGQVCFSTQDHKPCNPREKERIQNAGGSVMIQRVNGSLAVSRALGDYDYKCVDGKGPTEQLVSPEPEVYEILRAEEDEFIILACDGIWDVMSNEELCEYVKSRLEVSDDLENVCNWVVDTCLHKGSRDNMSIVLVCFSNAPKVSDEAVKKDSELDKHLESRVEEIMEKSGEEGMPDLAHVMRILSAENIPNLPPGGGLAGKRNVIEAVYSRLNPHRESDGASDEAEESGSQGKLVEALRQMRINHRGNYRQLLEEMLTSYRLAKVEGEESPAEPAATATSSNSDAGNPVTMQESHTESESGLAELDSSNEDAGTKMSGEKI

SEQ ID NO: 68966 - protein, 192 aa, Homo sapiens
  Payload ID: 13711
  Gene Symbol: PPM1B
  Gene Name: protein phosphatase, Mg2+/Mn2+ dependent, 1B
  Uniprot ID: O75688
  ENSP ID: ENSP00000326089
MSIVLVCFSNAPKVSDEAVKKDSELDKHLESRVEEIMEKSGEEGMPDLAHVMRILSAENIPNLPPGGGLAGKRNVIEAVYSRLNPHRESDGASDEAEESGSQGKLVEALRQMRINHRGNYRQLLEEMLTSYRLAKVEGEESPAEPAATATSSNSDAGNPVTMQESHTESESGLAELDSSNEDAGTKMSGEKI

SEQ ID NO: 68967 - protein, 387 aa, Homo sapiens
  Payload ID: 13711
  Gene Symbol: PPM1B
  Gene Name: protein phosphatase, Mg2+/Mn2+ dependent, 1B
  Uniprot ID: O75688
  ENSP ID: ENSP00000367813
MGAFLDKPKTEKHNAHGAGNGLRYGLSSMQGWRVEMEDAHTAVVGIPHGLEDWSFFAVYDGHAGSRVANYCSTHLLEHITTNEDFRAAGKSGSALELSVENVKNGIRTGFLKIDEYMRNFSDLRNGMDRSGSTAVGVMISPKHIYFINCGDSRAVLYRNGQVCFSTQDHKPCNPREKERIQNAGGSVMIQRVNGSLAVSRALGDYDYKCVDGKGPTEQLVSPEPEVYEILRAEEDEFIILACDGIWDVMSNEELCEYVKSRLEVSDDLENVCNWVVDTCLHKGSRDNMSIVLVCFSNAPKVSDEAVKKDSELDKHLESRVEEIMEKSGEEGMPDLAHVMRILSAENIPNLPPGGGLAGKRNVIEAVYSRLNPHRESDGGAGDLEDPW

SEQ ID NO: 68968 - protein, 303 aa, Homo sapiens
  Payload ID: 13711
  Gene Symbol: PPM1B
  Gene Name: protein phosphatase, Mg2+/Mn2+ dependent, 1B
  ENSP ID: ENSP00000386982
MGAFLDKPKTEKHNAHGAGNGLRYGLSSMQGWRVEMEDAHTAVVGIPHGLEDWSFFAVYDGHAGSRVANYCSTHLLEHITTNEDFRAAGKSGSALELSVENVKNGIRTGFLKIDEYMRNFSDLRNGMDRSGSTAVGVMISPKHIYFINCGDSRAVLYRNGQVCFSTQDHKPCNPREKERIQNAGGSVMIQRVNGSLAVSRALGDYDYKCVDGKGPTEQLVSPEPEVSDEAVKKDSELDKHLESRVEEIMEKSGEEGMPDLAHVMRILSAENIPNLPPGGGLAGKRNVIEAVYSRLNPHRESDG

SEQ ID NO: 68969 - protein, 380 aa, Homo sapiens
  Payload ID: 13711
  Gene Symbol: PPM1B
  Gene Name: protein phosphatase, Mg2+/Mn2+ dependent, 1B
  Uniprot ID: O75688
  ENSP ID: ENSP00000387287
MGAFLDKPKTEKHNAHGAGNGLRYGLSSMQGWRVEMEDAHTAVVGIPHGLEDWSFFAVYDGHAGSRVANYCSTHLLEHITTNEDFRAAGKSGSALELSVENVKNGIRTGFLKIDEYMRNFSDLRNGMDRSGSTAVGVMISPKHIYFINCGDSRAVLYRNGQVCFSTQDHKPCNPREKERIQNAGGSVMIQRVNGSLAVSRALGDYDYKCVDGKGPTEQLVSPEPEVYEILRAEEDEFIILACDGIWDVMSNEELCEYVKSRLEVSDDLENVCNWVVDTCLHKGSRDNMSIVLVCFSNAPKVSDEAVKKDSELDKHLESRVEEIMEKSGEEGMPDLAHVMRILSAENIPNLPPGGGLAGKRNVIEAVYSRLNPHRESDGQK

SEQ ID NO: 68970 - protein, 378 aa, Homo sapiens
  Payload ID: 13711
  Gene Symbol: PPM1B
  Gene Name: protein phosphatase, Mg2+/Mn2+ dependent, 1B
  ENSP ID: ENSP00000390087
MGAFLDKPKTEKHNAHGAGNGLRYGLSSMQGWRVEMEDAHTAVVGIPHGLEDWSFFAVYDGHAGSRVANYCSTHLLEHITTNEDFRAAGKSGSALELSVENVKNGIRTGFLKIDEYMRNFSDLRNGMDRSGSTAVGVMISPKHIYFINCGDSRAVLYRNGQVCFSTQDHKPCNPREKERIQNAGGSVMIQRVNGSLAVSRALGDYDYKCVDGKGPTEQLVSPEPEVYEILRAEEDEFIILACDGIWDVMSNEELCEYVKSRLEVSDDLENVCNWVVDTCLHKGSRDNMSIVLVCFSNAPKVSDEAVKKDSELDKHLESRVEEIMEKSGEEGMPDLAHVMRILSAENIPNLPPGGGLAGKRNVIEAVYSRLNPHRESDG

SEQ ID NO: 68971 - protein, 605 aa, Homo sapiens
  Payload ID: 13712
  Gene Symbol: PPM1D
  Gene Name: protein phosphatase, Mg2+/Mn2+ dependent, 1D
  Uniprot ID: O15297
  ENSP ID: ENSP00000306682
MAGLYSLGVSVFSDQGGRKYMEDVTQIVVEPEPTAEEKPSPRRSLSQPLPPRPSPAALPGGEVSGKGPAVAAREARDPLPDAGASPAPSRCCRRRSSVAFFAVCDGHGGREAAQFAREHLWGFIKKQKGFTSSEPAKVCAAIRKGFLACHLAMWKKLAEWPKTMTGLPSTSGTTASVVIIRGMKMYVAHVGDSGVVLGIQDDPKDDFVRAVEVTQDHKPELPKERERIEGLGGSVMNKSGVNRVVWKRPRLTHNGPVRRSTVIDQIPFLAVARALGDLWSYDFFSGEFVVSPEPDTSVHTLDPQKHKYIILGSDGLWNMIPPQDAISMCQDQEEKKYLMGEHGQSCAKMLVNRALGRWRQRMLRADNTSAIVICISPEVDNQGNFTNEDELYLNLTDSPSYNSQETCVMTPSPCSTPPVKSLEEDPWPRVNSKDHIPALVRSNAFSENFLEVSAEIARENVQGVVIPSKDPEPLEENCAKALTLRIHDSLNNSLPIGLVPTNSTNTVMDQKNLKMSTPGQMKAQEIERTPPTNFKRTLEESNSGPLMKKHRRNGLSRSSGAQPASLPTTSQRKNSVKLTMRRRLRGQKKIGNPLLHQHRKTVCVC

SEQ ID NO: 68972 - protein, 430 aa, Homo sapiens
  Payload ID: 13712
  Gene Symbol: PPM1D
  Gene Name: protein phosphatase, Mg2+/Mn2+ dependent, 1D
  Uniprot ID: O15297
  ENSP ID: ENSP00000376720
MAGLYSLGVSVFSDQGGRKYMEDVTQIVVEPEPTAEEKPSPRRSLSQPLPPRPSPAALPGGEVSGKGPAVAAREARDPLPDAGASPAPSRCCRRRSSVAFFAVCDGHGGREAAQFAREHLWGFIKKQKGFTSSEPAKVCAAIRKGFLACHLAMWKKLAEWPKTMTGLPSTSGTTASVVIIRGMKMYVAHVGDSGVVLGIQDDPKDDFVRAVEVTQDHKPELPKERERIEGLGGSVMNKSGVNRVVWKRPRLTHNGPVRRSTVIDQIPFLAVARALGDLWSYDFFSGEFVVSPEPDTSVHTLDPQKHKYIILGSDGLWNMIPPQDAISMCQDQEEKKYLMGEHGQSCAKMLVNRALGRWRQRMLRADNTSAIVICISPEVDNQGNFTNEDELYLNLTDSPSYNSQETCVMTPSPCSTPPVKDFGFELDSRK

SEQ ID NO: 68973 - protein, 125 aa, Homo sapiens
  Payload ID: 13712
  Gene Symbol: PPM1D
  Gene Name: protein phosphatase, Mg2+/Mn2+ dependent, 1D
  ENSP ID: ENSP00000465168
MMEPVHSAWATEEKTEWPKTMTGLPSTSGTTASVVIIRGMKMYVAHVGDSGVVLGIQDDPKDDFVRAVEVTQDHKPELPKERERIEGLGGSVMNKSGVNRVVWKRPRLTHNGPVRRSTVIDQIPF

SEQ ID NO: 68974 - protein, 430 aa, Homo sapiens; identical to SEQ ID NO: 68972
  Payload ID: 13712
  Gene Symbol: PPM1D
  Gene Name: protein phosphatase, Mg2+/Mn2+ dependent, 1D
  Uniprot ID: O15297
  ENSP ID: ENSP00000486573

SEQ ID NO: 68975 - protein, 755 aa, Homo sapiens
  Payload ID: 13713
  Gene Symbol: PPM1E
  Gene Name: protein phosphatase, Mg2+/Mn2+ dependent, 1E
  Uniprot ID: Q8WY54
  ENSP ID: ENSP00000312411
MAGCIPEEKTYRRFLELFLGEFRGPCGGGEPEPEPEPEPEPEPESEPEPEPELVEAEAAEASVEEPGEEAATVAATEEGDQEQDPEPEEEAAVEGEEEEEGAATAAAAPGHSAVPPPPPQLPPLPPLPRPLSERITREEVEGESLDLCLQQLYKYNCPSFLAAALARATSDEVLQSDLSAHYIPKETDGTEGTVEIETVKLARSVFSKLHEICCSWVKDFPLRRRPQLYYETSIHAIKNMRRKMEDKHVCIPDFNMLFNLEDQEEQAYFAVFDGHGGVDAAIYASIHLHVNLVRQEMFPHDPAEALCRAFRVTDERFVQKAARESLRCGTTGVVTFIRGNMLHVAWVGDSQVMLVRKGQAVELMKPHKPDREDEKQRIEALGGCVVWFGAWRVNGSLSVSRAIGDAEHKPYICGDADSASTVLDGTEDYLILACDGFYDTVNPDEAVKVVSDHLKENNGDSSMVAHKLVASARDAGSSDNITVIVVFLRDMNKAVNVSEESDWTENSFQGGQEDGGDDKENHGECKRPWPQHQCSAPADLGYDGRVDSFTDRTSLSPGSQINVLEDPGYLDLTQIEASKPHSAQFLLPVEMFGPGAPKKANLINELMMEKKSVQSSLPEWSGAGEFPTAFNLGSTGEQIYRMQSLSPVCSGLENEQFKSPGNRVSRLSHLRHHYSKKWHRFRFNPKFYSFLSAQEPSHKIGTSLSSLTGSGKRNRIRSSLPWRQNSWKGYSENMRKLRKTHDIPCPDLPWSYKIE

SEQ ID NO: 68976 - protein, 454 aa, Homo sapiens
  Payload ID: 13714
  Gene Symbol: PPM1F
  Gene Name: protein phosphatase, Mg2+/Mn2+ dependent, 1F
  Uniprot ID: P49593
  ENSP ID: ENSP00000263212
MSSGAPQKSSPMASGAEETPGFLDTLLQDFPALLNPEDPLPWKAPGTVLSQEEVEGELAELAMGFLGSRKAPPPLAAALAHEAVSQLLQTDLSEFRKLPREEEEEEEDDDEEEKAPVTLLDAQSLAQSFFNRLWEVAGQWQKQVPLAARASQRQWLVSIHAIRNTRRKMEDRHVSLPSFNQLFGLSDPVNRAYFAVFDGHGGVDAARYAAVHVHTNAARQPELPTDPEGALREAFRRTDQMFLRKAKRERLQSGTTGVCALIAGATLHVAWLGDSQVILVQQGQVVKLMEPHRPERQDEKARIEALGGFVSHMDCWRVNGTLAVSRAIGDVFQKPYVSGEADAASRALTGSEDYLLLACDGFFDVVPHQEVVGLVQSHLTRQQGSGLRVAEELVAAARERGSHDNITVMVVFLRDPQELLEGGNQGEGDPQAEGRRQDLPSSLPEPETQAPPRS

SEQ ID NO: 68977 - protein, 361 aa, Homo sapiens
  Payload ID: 13714
  Gene Symbol: PPM1F
  Gene Name: protein phosphatase, Mg2+/Mn2+ dependent, 1F
  ENSP ID: ENSP00000380632
MSSGAPQKSSPMASGAEETPGFLDTLLQDFPALLNPEDPLPWKAPGTVLSQEEVEGELAELAMGFLGSRKAPPPLAAALAHEAVSQLLQTDLSEFRKLPREEEEEEEDDDEEEKAPVTLLDAQSLAQSFFNRLWEVAGQWQKQVPLAARASQRQWLVSIHAIRNTRRKMEDRHVSLPSFNQLFGLSDPVNRAYFAVFDGHGGVDAARYAAVHVHTNAARQPELPTDPEGALREAFRRTDQMFLRKAKRERLQSGTTGVCALIAGATLHVAWLGDSQVILVQQGQVVKLMEPHRPERQDEKARIEALGGFVSHMDCWRVNGTLAVSRAIGESQRGRPKWEKVSRKPRPRVWPAAHQGFREAV

SEQ ID NO: 68978 - protein, 286 aa, Homo sapiens
  Payload ID: 13714
  Gene Symbol: PPM1F
  Gene Name: protein phosphatase, Mg2+/Mn2+ dependent, 1F
  ENSP ID: ENSP00000384930
MEDRHVSLPSFNQLFGLSDPVNRAYFAVFDGHGGVDAARYAAVHVHTNAARQPELPTDPEGALREAFRRTDQMFLRKAKRERLQSGTTGVCALIAGATLHVAWLGDSQVILVQQGQVVKLMEPHRPERQDEKARIEALGGFVSHMDCWRVNGTLAVSRAIGDVFQKPYVSGEADAASRALTGSEDYLLLACDGFFDVVPHQEVVGLVQSHLTRQQGSGLRVAEELVAAARERGSHDNITVMVVFLRDPQELLEGGNQGEGDPQAEGRRQDLPSSLPEPETQAPPRS

SEQ ID NO: 68979 - protein, 82 aa, Homo sapiens
  Payload ID: 13714
  Gene Symbol: PPM1F
  Gene Name: protein phosphatase, Mg2+/Mn2+ dependent, 1F
  ENSP ID: ENSP00000388350
MGLCPSTRETAPPAVLDAQSLAQSFFNRLWEVAGQWQKQVPLAARASQRQWLVSIHAIRNTRRKMEDRHVSLPSFNQLFGLS

SEQ ID NO: 68980 - protein, 89 aa, Homo sapiens
  Payload ID: 13714
  Gene Symbol: PPM1F
  Gene Name: protein phosphatase, Mg2+/Mn2+ dependent, 1F
  ENSP ID: ENSP00000392372
MEDRHVSLPSFNQLFGLSDPVNRAYFAVFDGHGGVDAARYAAVHVHTNAARQPELPTDPEGALREAFRRTDQMFLRKAKRERLQSGTTG

SEQ ID NO: 68981 - protein, 546 aa, Homo sapiens
  Payload ID: 13715
  Gene Symbol: PPM1G
  Gene Name: protein phosphatase, Mg2+/Mn2+ dependent, 1G
  Uniprot ID: O15355
  ENSP ID: ENSP00000342778
MGAYLSQPNTVKCSGDGVGAPRLPLPYGFSAMQGWRVSMEDAHNCIPELDSETAMFSVYDGHGGEEVALYCAKYLPDIIKDQKAYKEGKLQKALEDAFLAIDAKLTTEEVIKELAQIAGRPTEDEDEKEKVADEDDVDNEEAALLHEEATMTIEELLTRYGQNCHKGPPHSKSGGGTGEEPGSQGLNGEAGPEDSTRETPSQENGPTAKAYTGFSSNSERGTEAGQVGEPGIPTGEAGPSCSSASDKLPRVAKSKFFEDSEDESDEAEEEEEDSEECSEEEDGYSSEEAENEEDEDDTEEAEEDDEEEEEEMMVPGMEGKEEPGSDSGTTAVVALIRGKQLIVANAGDSRCVVSEAGKALDMSYDHKPEDEVELARIKNAGGKVTMDGRVNGGLNLSRAIGDHFYKRNKNLPPEEQMISALPDIKVLTLTDDHEFMVIACDGIWNVMSSQEVVDFIQSKISQRDENGELRLLSSIVEELLDQCLAPDTSGDGTGCDNMTCIIICFKPRNTAELQPESGKRKLEEVLSTEGAEENGNSDKKKKAKRD

SEQ ID NO: 68982 - protein, 514 aa, Homo sapiens
  Payload ID: 13716
  Gene Symbol: PPM1H
  Gene Name: protein phosphatase, Mg2+/Mn2+ dependent, 1H
  Uniprot ID: Q9ULR3
  ENSP ID: ENSP00000228705
MLTRVKSAVANFMGGIMAGSSGSEHGGGSCGGSDLPLRFPYGRPEFLGLSQDEVECSADHIARPILILKETRRLPWATGYAEVINAGKSTHNEDQASCEVLTVKKKAGAVTSTPNRNSSKRRSSLPNGEGLQLKENSESEGVSCHYWSLFDGHAGSGAAVVASRLLQHHITEQLQDIVDILKNSAVLPPTCLGEEPENTPANSRTLTRAASLRGGVGAPGSPSTPPTRFFTEKKIPHECLVIGALESAFKEMDLQIERERSSYNISGGCTALIVICLLGKLYVANAGDSRAIIIRNGEIIPMSSEFTPETERQRLQYLAFMQPHLLGNEFTHLEFPRRVQRKELGKKMLYRDFNMTGWAYKTIEDEDLKFPLIYGEGKKARVMATIGVTRGLGDHDLKVHDSNIYIKPFLSSAPEVRIYDLSKYDHGSDDVLILATDGLWDVLSNEEVAEAITQFLPNCDPDDPHRYTLAAQDLVMRARGVLKDRGWRISNDRLGSGDDISVYVIPLIHGNKLS

SEQ ID NO: 68983 - protein, 505 aa, Homo sapiens
  Payload ID: 13717
  Gene Symbol: PPM1J
  Gene Name: protein phosphatase, Mg2+/Mn2+ dependent, 1J
  Uniprot ID: Q5JR12
  ENSP ID: ENSP00000308926
MLNRVRSAVAHLVSSGGAPPPRPKSPDLPNAASAPPAAAPEAPRSPPAKAGSGSATPAKAVEARASFSRPTFLQLSPGGLRRADDHAGRAVQSPPDTGRRLPWSTGYAEVINAGKSRHNEDQACCEVVYVEGRRSVTGVPREPSRGQGLCFYYWGLFDGHAGGGAAEMASRLLHRHIREQLKDLVEILQDPSPPPLCLPTTPGTPDSSDPSHLLGPQSCWSSQKEVSHESLVVGAVENAFQLMDEQMARERRGHQVEGGCCALVVIYLLGKVYVANAGDSRAIIVRNGEIIPMSREFTPETERQRLQLLGFLKPELLGSEFTHLEFPRRVLPKELGQRMLYRDQNMTGWAYKKIELEDLRFPLVCGEGKKARVMATIGVTRGLGDHSLKVCSSTLPIKPFLSCFPEVRVYDLTQYEHCPDDVLVLGTDGLWDVTTDCEVAATVDRVLSAYEPNDHSRYTALAQALVLGARGTPRDRGWRLPNNKLGSGDDISVFVIPLGGPGSYS

SEQ ID NO: 68984 - protein, 150 aa, Homo sapiens
  Payload ID: 13717
  Gene Symbol: PPM1J
  Gene Name: protein phosphatase, Mg2+/Mn2+ dependent, 1J
  ENSP ID: ENSP00000474145
MLNRVRSAVAHLVSSGGAPPPRPKSPDLPNAASAPPAAAPEAPRSPPAKAGSGSATPAKAVEARASFSRPTFLQLSPGGLRRADDHAGRAVQSPPDTGRRLPWSTGYAETLFCPRARRAESPAKDELASSPSRPGSLKAKGHQCWQESAQ

SEQ ID NO: 68985 - protein, 298 aa, Homo sapiens
  Payload ID: 13717
  Gene Symbol: PPM1J
  Gene Name: protein phosphatase, Mg2+/Mn2+ dependent, 1J
  ENSP ID: ENSP00000474405
  MOD_RES (1)..(1): Any amino acid
XGAPPPRPKSPDLPNAASAPPAAAPEAPRSPPAKAGSGSATPAKAVEARASFSRPTFLQLSPGGLRRADDHAGRAVQSPPDTGRRLPWSTGYAEVINAGKSRHNEDQACCEVVYVEGRRSVTGVPREPSRGQGLCFYYWGLFDGHAGGGAAEMASRLLHRHIREQLKDLVEILQDPSPPPLCLPTTPGTPDSSDPSHLLGPQSCWSSQKEVSHESLVVGAVENAFQLMQDEQMARERRGHQVEGGCCALVVIYLLGKVYVANAGDSRAIIVRNGEIIPMSREFTPETERQRLQLLGLL

SEQ ID NO: 68986 - protein, 299 aa, Homo sapiens
  Payload ID: 13717
  Gene Symbol: PPM1J
  Gene Name: protein phosphatase, Mg2+/Mn2+ dependent, 1J
  Uniprot ID: Q5JR12
  ENSP ID: ENSP00000475711
MASRLLHRHIREQLKDLKEVSHESLVVGAVENAFQLMDEQMARERRGHQVEGGCCALVVIYLLGKVYVANAGDSRAIIVRNGEIIPMSREFTPETERQRLQLLGFLKPELLGSEFTHLEFPRRVLPKELGQRMLYRDQNMTGWAYKKIELEDLRFPLVCGEGKKARVMATIGVTRGLGDHSLKVCSSTLPIKPFLSCFPEVRVYDLTQYEHCPDDVLVLGTDGLWDVTTDCEVAATVDRVLSAYEPNDHSRYTALAQALVLGARGTPRDRGWRLPNNKLGSGDDISVFVIPLGGPGSYS

SEQ ID NO: 68987 - protein, 327 aa, Homo sapiens
  Payload ID: 13718
  Gene Symbol: PPM1K
  Gene Name: protein phosphatase, Mg2+/Mn2+ dependent, 1K
  ENSP ID: ENSP00000295908
MSTAALITLVRSGGNQVRRRVLLSSRLLQDDRRVTPTCHSSTSEPRCSRFDPDGSGSPATWDNFGIWDNRIDEPILLPPSIKYGKPIPKISLENVGCASQIGKRKENEDRFDFAQLTDEVLYFAVYDGHGGPAAADFCHTHMEKCIMDLLPKEKNLETLLTLAFLEIDKAFSSHARLSADATLLTSGTTATVALLRDGIELVVASVGDSRAILCRKGKPMKLTIDHTPERKDEKERIKKCGGFVAWNSLGQPHVNGRLAMTRSIGDLDLKTSGVIAEPETKRIKAIQYGTEDNSTAVVVPFGAWGKYKNSEINFSFSRSFASSGRWA

SEQ ID NO: 68988 - protein, 153 aa, Homo sapiens
  Payload ID: 13718
  Gene Symbol: PPM1K
  Gene Name: protein phosphatase, Mg2+/Mn2+ dependent, 1K
  ENSP ID: ENSP00000476452
MKLTIDHTPERKDEKERIKKCGGFVAWNSLGQPHVNGRLAMTRSIGDLDLKTSGVIAEPETKRIKLHHADDSFLVLTTDGINFMVNSQEICDFVNQCHDPNEAAHAVTEQAIQYGTEDNSTAVVVPFGAWGKYKNSEINFSFSRSFASSGRWA

SEQ ID NO: 68989 - protein, 21 aa, Homo sapiens
  Payload ID: 13718
  Gene Symbol: PPM1K
  Gene Name: protein phosphatase, Mg2+/Mn2+ dependent, 1K
  ENSP ID: ENSP00000476789
MKLTIDHTPERKDEKERIKKC

SEQ ID NO: 68990 - protein, 130 aa, Homo sapiens
  Payload ID: 13718
  Gene Symbol: PPM1K
  Gene Name: protein phosphatase, Mg2+/Mn2+ dependent, 1K
  ENSP ID: ENSP00000477051
MSTAALITLVRSGGNQVRRRVLLSSRLLQDDRRVTPTCHSSTSEPRCSRFDPDGSGSPATWDNFGIWDNRIDEPILLPPSIKYGKPIPKISLENVGCASQIGKRKENEDRFDFAQLTDEVLYFAVYDGHG

SEQ ID NO: 68991 - protein, 5 aa, Homo sapiens
  Payload ID: 13718
  Gene Symbol: PPM1K
  Gene Name: protein phosphatase, Mg2+/Mn2+ dependent, 1K
  ENSP ID: ENSP00000477211
MSTAA

SEQ ID NO: 68992 - protein, 182 aa, Homo sapiens
  Payload ID: 13718
  Gene Symbol: PPM1K
  Gene Name: protein phosphatase, Mg2+/Mn2+ dependent, 1K
  ENSP ID: ENSP00000477241
MSTAALITLVRSGGNQVRRRVLLSSRLLQDDRRVTPTCHSSTSEPRCSRFDPDGSGSPATWDNFGIWDNRIDEPILLPPSIKYGKPIPKISLENVGCASQIGKRKENEDRFDFAQLTDEVLYFAVYDGHGGPAAADFCHTHMEKCIMDLLPKEKNLETLLTLAFLEIDKAFSSHARLSADGM

SEQ ID NO: 68993 - protein, 372 aa, Homo sapiens
  Payload ID: 13718
  Gene Symbol: PPM1K
  Gene Name: protein phosphatase, Mg2+/Mn2+ dependent, 1K
  Uniprot ID: Q8N3J5
  ENSP ID: ENSP00000477341
MSTAALITLVRSGGNQVRRRVLLSSRLLQDDRRVTPTCHSSTSEPRCSRFDPDGSGSPATWDNFGIWDNRIDEPILLPPSIKYGKPIPKISLENVGCASQIGKRKENEDRFDFAQLTDEVLYFAVYDGHGGPAAADFCHTHMEKCIMDLLPKEKNLETLLTLAFLEIDKAFSSHARLSADATLLTSGTTATVALLRDGIELVVASVGDSRAILCRKGKPMKLTIDHTPERKDEKERIKKCGGFVAWNSLGQPHVNGRLAMTRSIGDLDLKTSGVIAEPETKRIKLHHADDSFLVLTTDGINFMVNSQEICDFVNQCHDPNEAAHAVTEQAIQYGTEDNSTAVVVPFGAWGKYKNSEINFSFSRSFASSGRWA

SEQ ID NO: 68994 - protein, 233 aa, Homo sapiens
  Payload ID: 13719
  Gene Symbol: PPM1L
  Gene Name: protein phosphatase, Mg2+/Mn2+ dependent, 1L
  Uniprot ID: Q5SGD2
  ENSP ID: ENSP00000295839
MPAFSTTAAEYVKSRLPEALKQHLQDYEKDKENSVLSYQTILEQQILSIDREMLEKLTVSYDEAGTTCLIALLSDKDLTVANVGDSRGVLCDKDGNAIPLSHDHKPYQLKERKRIKRAGGFISFNGSWRVQGILAMSRSLGDYPLKNLNVVIPDPDILTFDLDKLQPEFMILASDGLWDAFSNEEAVRFIKERLDEPHFGAKSIVLQSFYRGCPDNITVMVVKFRNSSKTEEQ

SEQ ID NO: 68995 - protein, 360 aa, Homo sapiens
  Payload ID: 13719
  Gene Symbol: PPM1L
  Gene Name: protein phosphatase, Mg2+/Mn2+ dependent, 1L
  Uniprot ID: Q5SGD2
  ENSP ID: ENSP00000417659
MIEDTMTLLSLLGRIMRYFLLRPETLFLLCISLALWSYFFHTDEVKTIVKSSRDAVKMVKGKVAEIMQNDRLGGLDVLEAEFSKTWEFKNHNVAVYSIQGRRDHMEDRFEVLTDLANKTHPSIFGIFDGHGGETAAEYVKSRLPEALKQHLQDYEKDKENSVLSYQTILEQQILSIDREMLEKLTVSYDEAGTTCLIALLSDKDLTVANVGDSRGVLCDKDGNAIPLSHDHKPYQLKERKRIKRAGGFISFNGSWRVQGILAMSRSLGDYPLKNLNVVIPDPDILTFDLDKLQPEFMILASDGLWDAFSNEEAVRFIKERLDEPHFGAKSIVLQSFYRGCPDNITVMVVKFRNSSKTEEQ

SEQ ID NO: 68996 - protein, 194 aa, Homo sapiens
  Payload ID: 13719
  Gene Symbol: PPM1L
  Gene Name: protein phosphatase, Mg2+/Mn2+ dependent, 1L
  Uniprot ID: Q5SGD2
  ENSP ID: ENSP00000420354
MIEDTMTLLSLLGRIMRYFLLRPETLFLLCISLALWSYFFHTDEVKTIVKSSRDAVKMVKGKVAEIMQNDRLGGLDVLEAEFSKTWEFKNHNVAVYSIQGRRDHMEDRFEVLTDLANKTHPSIFGIFDGHGGETAAEYVKSRLPEALKQHLQDYEKDKENSVLSYQTILEQQILSIDREMLEKLTVSYDEAVTF

SEQ ID NO: 68997 - protein, 181 aa, Homo sapiens
  Payload ID: 13719
  Gene Symbol: PPM1L
  Gene Name: protein phosphatase, Mg2+/Mn2+ dependent, 1L
  Uniprot ID: Q5SGD2
  ENSP ID: ENSP00000420746
MLEKLTVSYDEAGTTCLIALLSDKDLTVANVGDSRGVLCDKDGNAIPLSHDHKPYQLKERKRIKRAGGFISFNGSWRVQGILAMSRSLGDYPLKNLNVVIPDPDILTFDLDKLQPEFMILASDGLWDAFSNEEAVRFIKERLDEPHFGAKSIVLQSFYRGCPDNITVMVVKFRNSSKTEEQ

SEQ ID NO: 68998 - protein, 270 aa, Homo sapiens
  Payload ID: 13720
  Gene Symbol: PPM1M
  Gene Name: protein phosphatase, Mg2+/Mn2+ dependent, 1M
  Uniprot ID: Q96MI6
  ENSP ID: ENSP00000296487
MHLNGRCICPSDPQFVEEKGIRAEDLVIGALESAFQECDEVIGRELEASGQMGGCTALVAVSLQGKLYMANAGDSRAILVRRDEIRPLSFEFTPETERQRIQQLAFVYPELLAGEFTRLEFPRRLKGDDLGQKVLFRDHHMSGWSYKRVEKSDLKYPLIHGQGRQARLLGTLAVSRGLGDHQLRVLDTNIQLKPFLLSVPQVTVLDVDQLELQEDDVVVMATDGLWDVLSNEQVAWLVRSFLPGNQEDPHRYCSCWGPAWAWVGASSKPK

SEQ ID NO: 68999 - protein, 459 aa, Homo sapiens
  Payload ID: 13720
  Gene Symbol: PPM1M
  Gene Name: protein phosphatase, Mg2+/Mn2+ dependent, 1M
  ENSP ID: ENSP00000319894
MSAGWFRRRFLPGEPLPAPRPPGPHASPVPYRRPRFLRGSSSSPGAADASRRPDSRPVRSPARGRTLPWNAGYAEIINAEKSEFNEDQAACGKLCIRRCEFGAEEEWLTLCPEEFLTGHYWALFDGHGGPAAAILAANTLHSCLRRQLEAVVEGLVATQPPMHLNGRCICPSDPQFVEEKGIRAEDLVIGALESAFQECDEVIGRELEASGQMGGCTALVAVSLQGKLYMANAGDSRAILVRRDEIRPLSFEFTPETERQRIQQLAFVYPELLAGEFTRLEFPRRLKGDDLGQKVLFRDHHMSGWSYKRVEKSDLKYPLIHGQGRQARLLGTLAVSRGLGDHQLRVLDTNIQLKPFLLSVPQVTVLDVDQLELQEDDVVVMATDGLWDVLSNEQVAWLVRSFLPGNQEDPHRFSKLAQMLIHSTQGKEDSLTEEGQVSYDDVSVFVIPLHSQGQESSDH

SEQ ID NO: 69000 - protein, 247 aa, Homo sapiens
  Payload ID: 13720
  Gene Symbol: PPM1M
  Gene Name: protein phosphatase, Mg2+/Mn2+ dependent, 1M
  Uniprot ID: Q96MI6
  ENSP ID: ENSP00000387046
MGGCTALVAVSLQGKLYMANAGDSRAILVRRDEIRPLSFEFTPETERQRIQQLAFVYPELLAGEFTRLEFPRRLKGDDLGQKVLFRDHHMSGWSYKRVEKSDLKYPLIHGQGRQARLLGTLAVSRGLGDHQLRVLDTNIQLKPFLLSVPQVTVLDVDQLELQEDDVVVMATDGLWDVLSNEQVAWLVRSFLPGNQEDPHRFSKLAQMLIHSTQGKEDSLTEEGQVSYDDVSVFVIPLHSQGQESSDH

SEQ ID NO: 69001 - protein, 121 aa, Homo sapiens
  Payload ID: 13720
  Gene Symbol: PPM1M
  Gene Name: protein phosphatase, Mg2+/Mn2+ dependent, 1M
  ENSP ID: ENSP00000412344
  MOD_RES (1)..(1): Any amino acid
XLLGTLAVSRGLGDHQLRVLDTNIQLKPFLLSVPQVTVLDVDQLELQEDDVVVMATDGLWDVLSNEQVAWLVRSFLPGNQEDPHSLSAGWSSQVLKAGPDADTQHTGKGRQSHRGRAGVLR

SEQ ID NO: 69002 - protein, 257 aa, Homo sapiens
  Payload ID: 13720
  Gene Symbol: PPM1M
  Gene Name: protein phosphatase, Mg2+/Mn2+ dependent, 1M
  ENSP ID: ENSP00000413556
  MOD_RES (1)..(1): Any amino acid
XPGPHASPVPYRRPRFLRGSSSSPGAADASRRPDSRPVRSPARGRTLPWNAGYAEIINAEKSEFNEDQAACGKLCIRRCEFGAEEEWLTLCPEEDEVIGRELEASGQMGGCTALVAVSLQGKLYMANAGDSRAILVRRDEIRPLSFEFTPETERQRIQQLAFVYPELLAGEFTRLEFPRRLKGDDLGQKVLFRDHHMSGWSYKRVEKSDLKYPLIHGQGRQARLLGTLAVSRGLGDHQLRVLDTNIQLKPFLLSVPQ

SEQ ID NO: 69003 - protein, 112 aa, Homo sapiens
  Payload ID: 13721
  Gene Symbol: PPM1N
  Gene Name: protein phosphatase, Mg2+/Mn2+ dependent, 1N (putative)
  Uniprot ID: Q8N819
  ENSP ID: ENSP00000379961
MTCILVCFPGAPRPSEEAIRRELALDAALGCRIAELCASAQKPPSLNTVFRTLASEDIPDLPPGGGLDCKATVIAEVYSQICQVSEECGEKGQDGAGKSNPTHLGSALDMEA

SEQ ID NO: 69004 - protein, 137 aa, Homo sapiens
  Payload ID: 13721
  Gene Symbol: PPM1N
  Gene Name: protein phosphatase, Mg2+/Mn2+ dependent, 1N (putative)
  ENSP ID: ENSP00000379962
MTCILVCFPGAPRPSEEAIRRELALDAALGCRIAELCASAQKPPSLNTVFRTLASEDIPDLPPGGGLDCKSQKSAERRGRMGLGSPTPRIWAQPWTWRPDSCCPLGILCFSGASTELKKKTDPFPNYMYQRKEGRPM

SEQ ID NO: 69005 - protein, 112 aa, Homo sapiens; identical to SEQ ID NO: 69003
  Payload ID: 13721
  Gene Symbol: PPM1N
  Gene Name: protein phosphatase, Mg2+/Mn2+ dependent, 1N (putative)
  Uniprot ID: Q8N819
  ENSP ID: ENSP00000379963

SEQ ID NO: 69006 - protein, 112 aa, Homo sapiens; identical to SEQ ID NO: 69003
  Payload ID: 13721
  Gene Symbol: PPM1N
  Gene Name: protein phosphatase, Mg2+/Mn2+ dependent, 1N (putative)
  Uniprot ID: Q8N819
  ENSP ID: ENSP00000384318

SEQ ID NO: 69007 - protein, 140 aa, Homo sapiens
  Payload ID: 13721
  Gene Symbol: PPM1N
  Gene Name: protein phosphatase, Mg2+/Mn2+ dependent, 1N (putative)
  ENSP ID: ENSP00000384809
MTCILVCFPGAPRPSEEAIRRELALDAALGCRIAELCASAQKPPSLNTVFRTLASEDIPDLPPGGGLDCKSARSQKSAERRGRMGLGSPTPRIWAQPWTWRPDSCCPLGILCFSGASTELKKKTDPFPNYMYQRKEGRPM

SEQ ID NO: 69008 - protein, 130 aa, Homo sapiens
  Payload ID: 13721
  Gene Symbol: PPM1N
  Gene Name: protein phosphatase, Mg2+/Mn2+ dependent, 1N (putative)
  ENSP ID: ENSP00000389871
MTCILVCFPGAPRPSEEAIRRELALDAALGCRIAELCASAQKPPSLNTVFRTLASEDIPDLPPGGGLDCKRGRMGLGSPTPRIWAQPWTWRPDSCCPLGILCFSGASTELKKKTDPFPNYMYQRKEGRPM

SEQ ID NO: 69009 - protein, 430 aa, Homo sapiens
  Payload ID: 13721
  Gene Symbol: PPM1N
  Gene Name: protein phosphatase, Mg2+/Mn2+ dependent, 1N (putative)
  Uniprot ID: Q8N819
  ENSP ID: ENSP00000397050
MAVLARQLQRLLWTACKKKEREKEGREEEEEEEAGRRAPEGPRSLLTAPRRAQRPHGGAEASGGLRFGASAAQGWRARMEDAHCTWLSLPGLPPGWALFAVLDGHGGARAARFGARHLPGHVLQELGPEPSEPEGVREALRRAFLSADERLRSLWPRVETGGCTAVVLLVSPRFLYLAHCGDSRAVLSRAGAVAFSTEDHRPLRPRERERIHAAGGTIRRRRVEGSLAVSRALGDFTYKEAPGRPPELQLVSAEPEVAALARQAEDEFMLLASDGVWDTVSGAALAGLVASRLRLGLAPELLCAQLLDTCLCKGSLDNMTCILVCFPGAPRPSEEAIRRELALDAALGCRIAELCASAQKPPSLNTVFRTLASEDIPDLPPGGGLDCKATVIAEVYSQICQVSEECGEKGQDGAGKSNPTHLGSALDMEA

SEQ ID NO: 69010 - protein, 374 aa, Homo sapiens
  Payload ID: 13721
  Gene Symbol: PPM1N
  Gene Name: protein phosphatase, Mg2+/Mn2+ dependent, 1N (putative)
  ENSP ID: ENSP00000409511
  MOD_RES (1)..(1): Any amino acid
XLTAPRRAQRPHGGAEASGGLRFGASAAQGWRARMEDAHCTWLSLPGLPPGWALFAVLDGHGGARAARFGARHLPGHVLQELGPEPSEPEGVREALRRAFLSADERLRSLWPRVETGGCTAVVLLVSPRFLYLAHCGDSRAVLSRAGAVAFSTEDHRPLRPRERERIHAAGGTIRRRRVEGSLAVSRALGDFTYKEAPGRPPELQLVSAEPEVAALARQAEDEFMLLASDGVWDTVSGAALAGLVASRLRLGLAPELLCAQLLDTCLCKVLGAWRGTFGAWCSRGREPRGFGEEGFDREARVKLAKEGIGLKRRAWPEVGRAKIQGRSLRDALRHGRVSGRDLRERAWSFGKGRFWVVGAGPEVLISAGRWKSR

SEQ ID NO: 69011 - protein, 402 aa, Homo sapiens
  Payload ID: 13722
  Gene Symbol: PTAR1
  Gene Name: protein prenyltransferase alpha subunit repeat containing 1
  Uniprot ID: Q7Z6K3
  ENSP ID: ENSP00000344299
MAETSEEVAVLVQRVVKDITNAFRRNPHIDEIGLIPCPEARYNRSPIVLVENKLGVESWCVKFLLPYVHNKLLLYRTRKQWLNRDELIDVTCTLLLLNPDFTTAWNVRKELILSGTLNPIKDLHLGKLALTKFPKSPETWIHRRWVLQQLIQETSLPSFVTKGNLGTIPTERAQRLIQEEMEVCGEAAGRYPSNYNAWSHRIWVLQHLAKLDVKILLDELSSTKHWASMHVSDHSGFHYRQFLLKSLISQTVIDSSVMEQNPLRSEPALVPPKDEEAAVSTEEPRINLPHLLEEEVEFSTDLIDSYPGHETLWCHRRHIFYLQHHLNAGSQLSQAMEVDGLNDSSKQGYSQETKRLKRTPVPDSLGLEMEHRFIDQVLSTCRNVEQARFASAYRKWLVTLSQ

SEQ ID NO: 69012 - protein, 350 aa, Homo sapiens
  Payload ID: 13722
  Gene Symbol: PTAR1
  Gene Name: protein prenyltransferase alpha subunit repeat containing 1
  ENSP ID: ENSP00000366405
MAETSEEVAVLVQRVVKDITNAFRRNPHMKELILSGTLNPIKDLHLGKLALTKFPKSPETWIHRRWVLQQLIQETSLPSFVTKGNLGTIPTERAQRLIQEEMEVCGEAAGRYPSNYNAWSHRIWVLQHLAKLDVKILLDELSSTKHWASMHVSDHSGFHYRQFLLKSLISQTVIDSSVMEQNPLRSEPALVPPKDEEAAVSTEEPRINLPHLLEEEVEFSTDLIDSYPGHETLWCHRRHIFYLQHHLNGRFPHSMTQLSPADSPGGTLSDLHLIPAGSQLSQAMEVDGLNDSSKQGYSQETKRLKRTPVPDSLGLEMEHRFIDQVLSTCRNVEQARFASAYRKWLVTLSQ

SEQ ID NO: 69013 - protein, 168 aa, Homo sapiens
  Payload ID: 13722
  Gene Symbol: PTAR1
  Gene Name: protein prenyltransferase alpha subunit repeat containing 1
  ENSP ID: ENSP00000405943
  MOD_RES (1)..(1): Any amino acid
XSGFHYRQFLLKSLISQTVIDSSVMEQNPLRSEPALVPPKDEEAAVSTEEPRINLPHLLEEEVEFSTDLIDSYPGHETLWCHRRHIFYLQHHLNGSQLSQAMEVDGLNDSSKQGYSQETKRLKRTPVPDSLGLEMEHRFIDQVLSTCRNVEQARFASAYRKWLVTLSQ

SEQ ID NO: 69014 - protein, 29 aa, Homo sapiens
  Payload ID: 13722
  Gene Symbol: PTAR1
  Gene Name: protein prenyltransferase alpha subunit repeat containing 1
  ENSP ID: ENSP00000440164
MAETSEEVAVLVQRVVKDITNAFRRNPHM

SEQ ID NO: 69015 - protein, 522 aa, Homo sapiens
  Payload ID: 13723
  Gene Symbol:
  Gene Name: Protein RCC2  [Source:UniProtKB/Swiss-Prot
  Acc:Q9P258]
  Uniprot ID: Q9P258
  ENSP ID: ENSP00000486099
MPRKKAAAAAWEEPSSGNGTARAGPRKRGGPAGRKRERPERCSSSSGGGSSGDEDGLELDGAPGGGKRAARPATAGKAGGAAVVITEPEHTKERVKLEGSKCKGQLLIFGATNWDLIGRKEVPKQQAAYRNLGQNLWGPHRYGCLAGVRVRTVVSGSCAAHSLLITTEGKLWSWGRNEKGQLGHGDTKRVEAPRLIEGLSHEVIVSAACGRNHTLALTETGSVFAFGENKMGQLGLGNQTDAVPSPAQIMYNGQPITKMACGAEFSMIMDCKGNLYSFGCPEYGQLGHNSDGKFIARAQRIEYDCELVPRRVAIFIEKTKDGQILPVPNVVVRDVACGANHTLVLDSQKRVFSWGFGGYGRLGHAEQKDEMVPRLVKLFDFPGRGASQIYAGYTCSFAVSEVGGLFFWGATNTSRESTMYPKAVQDLCGWRIRSLACGKSSIIVAADESTISWGPSPTFGELGYGDHKPKSSTAAQEVKTLDGIFSEQVAMGYSHSLVIARDESETEKEKIKKLPEYNPRTL

SEQ ID NO: 69016 - protein, 522 aa, Homo sapiens; identical to SEQ ID NO: 69015
  Payload ID: 13723
  Gene Symbol:
  Gene Name: Protein RCC2  [Source:UniProtKB/Swiss-Prot
  Acc:Q9P258]
  Uniprot ID: Q9P258
  ENSP ID: ENSP00000486447

SEQ ID NO: 69017 - protein, 606 aa, Homo sapiens
  Payload ID: 13724
  Gene Symbol: PRC1
  Gene Name: protein regulator of cytokinesis 1
  Uniprot ID: O43663
  ENSP ID: ENSP00000354679
MRRSEVLAEESIVCLQKALNHLREIWELIGIPEDQRLQRTEVVKKHIKELLDMMIAEEESLKERLIKSISVCQKELNTLCSELHVEPFQEEGETTILQLEKDLRTQVELMRKQKKERKQELKLLQEQDQELCEILCMPHYDIDSASVPSLEELNQFRQHVTTLRETKASRREEFVSIKRQIILCMEALDHTPDTSFERDVVCEDEDAFCLSLENIATLQKLLRQLEMQKSQNEAVCEGLRTQIRELWDRLQIPEEEREAVATIMSGSKAKVRKALQLEVDRLEELKMQNMKKVIEAIRVELVQYWDQCFYSQEQRQAFAPFCAEDYTESLLQLHDAEIVRLKNYYEVHKELFEGVQKWEETWRLFLEFERKASDPNRFTNRGGNLLKEEKQRAKLQKMLPKLEEELKARIELWEQEHSKAFMVNGQKFMEYVAEQWEMHRLEKERAKQERQLKNKKQTETEMLYGSAPRTPSKRRGLAPNTPGKARKLNTTTMSNATANSSIRPIFGGTVYHSPVSRLPPSGSKPVAASTCSGKKTPRTGRHGANKENLELNGSILSGGYPGSAPLQRNFSINSVASTYSEFARELSKASKSDATSGILNSTNIQS

SEQ ID NO: 69018 - protein, 620 aa, Homo sapiens
  Payload ID: 13724
  Gene Symbol: PRC1
  Gene Name: protein regulator of cytokinesis 1
  Uniprot ID: O43663
  ENSP ID: ENSP00000377793
MRRSEVLAEESIVCLQKALNHLREIWELIGIPEDQRLQRTEVVKKHIKELLDMMIAEEESLKERLIKSISVCQKELNTLCSELHVEPFQEEGETTILQLEKDLRTQVELMRKQKKERKQELKLLQEQDQELCEILCMPHYDIDSASVPSLEELNQFRQHVTTLRETKASRREEFVSIKRQIILCMEALDHTPDTSFERDVVCEDEDAFCLSLENIATLQKLLRQLEMQKSQNEAVCEGLRTQIRELWDRLQIPEEEREAVATIMSGSKAKVRKALQLEVDRLEELKMQNMKKVIEAIRVELVQYWDQCFYSQEQRQAFAPFCAEDYTESLLQLHDAEIVRLKNYYEVHKELFEGVQKWEETWRLFLEFERKASDPNRFTNRGGNLLKEEKQRAKLQKMLPKLEEELKARIELWEQEHSKAFMVNGQKFMEYVAEQWEMHRLEKERAKQERQLKNKKQTETEMLYGSAPRTPSKRRGLAPNTPGKARKLNTTTMSNATANSSIRPIFGGTVYHSPVSRLPPSGSKPVAASTCSGKKTPRTGRHGANKENLELNGSILSGGYPGSAPLQRNFSINSVASTYSEFAKDPSLSDSSTVGLQRELSKASKSDATSGILNSTNIQS

SEQ ID NO: 69019 - protein, 525 aa, Homo sapiens
  Payload ID: 13724
  Gene Symbol: PRC1
  Gene Name: protein regulator of cytokinesis 1
  Uniprot ID: O43663
  ENSP ID: ENSP00000409549
MRRSEVLAEESIVCLQKALNHLREIWELIGIPEDQRLQRTEVVKKHIKEEGETTILQLEKDLRTQVELMRKQKKERKQELKLLQEQDQELCEILCMPHYDIDSASVPSLEELNQFRQHVTTLRETKASRREEFVSIKRQIILCMEALDHTPDTSFERDVVCEDEDAFCLSLENIATLQKLLRQLEMQKSQNEAVCEGLRTQIRELWDRLQIPEEEREAVATIMSGSKAKVRKALQLEVDRLEELKMQNMKKVIEAIRVELVQYWDQCFYSQEQRQAFAPFCAEDYTESLLQLHDAEIVRLKNYYEVHKELFEGVQKWEETWRLFLEFERKASDPNRFTNRGGNLLKEEKQRAKLQKMLPKLEEELKARIELWEQEHSKAFMVNGQKFMEYVAEQWEMHRLEKERAKQERQLKNKKQTETEMLYGSAPRTPSKRRGLAPNTPGKARKLNTTTMSNATANSSIRPIFGGTVYHSPVSRLPPSGSKPVAASTCSGKKTPRTGRHGANKENLELNGSILSARTFKGFQI

SEQ ID NO: 69020 - protein, 238 aa, Homo sapiens
  Payload ID: 13724
  Gene Symbol: PRC1
  Gene Name: protein regulator of cytokinesis 1
  ENSP ID: ENSP00000451344
  MOD_RES (1)..(1): Any amino acid
XLLKEEKQRAKLQKMLPKLEEELKARIELWEQEHSKAFMVNGQKFMEYVAEQWEMHRLEKERAKQERQLKNKKQTETEMLYGSAPRTPSKRRGLAPNTPGKARKLNTTTMSNATANSSIRPIFGGTVYHSPVSRLPPSGSKPVAASTCSGKKTPRTGRHGANKENLELNGSILSGGYPGSAPLQRNFSINSVASTYSEFAKDPSLSDSSTVGLQDSLPPEENVFVCPKLRWPALLPKR

SEQ ID NO: 69021 - protein, 195 aa, Homo sapiens
  Payload ID: 13724
  Gene Symbol: PRC1
  Gene Name: protein regulator of cytokinesis 1
  ENSP ID: ENSP00000453063
  MOD_RES (1)..(1): Any amino acid
XYSQEQRQAFAPFCAEDYTESLLQLHDAEIVRLKNYYEVHKELFEGVQKWEETWRLFLEFERKASDPNRFTNRGGNLLKEEKQRAKLQKMLPKLEEELKARIELWEQEHSKAFMVNGQKFMEYVAEQWEMHRLEKERAKQERQLKNKKQTETEMLYGSAPRTPSKRRGLAPNTPGKARKPVAASTCSGKKTPRTG

SEQ ID NO: 69022 - protein, 110 aa, Homo sapiens
  Payload ID: 13724
  Gene Symbol: PRC1
  Gene Name: protein regulator of cytokinesis 1
  ENSP ID: ENSP00000453117
MRRSEVLAEESIVCLQKALNHLREIWELIGIPEDQRLQRTEVVKKHIKELLDMMIAEEESLKERLIKSISVCQKELNTLCSELHVEPFQEFTWNLITVVRCLIQEEGETT

SEQ ID NO: 69023 - protein, 154 aa, Homo sapiens
  Payload ID: 13724
  Gene Symbol: PRC1
  Gene Name: protein regulator of cytokinesis 1
  ENSP ID: ENSP00000453455
MRRSEVLAEESIVCLQKALNHLREIWELIGIPEDQRLQRTEVVKKHIKEEGETTILQLEKDLRTQVELMRKQKKERKQELKLLQEQDQELCEILCMPHYDIDSASVPSLEELNQFRQHVTTLRETKASRREEFVSIKRQIILCMEALDHTPDTS

SEQ ID NO: 69024 - protein, 64 aa, Homo sapiens
  Payload ID: 13724
  Gene Symbol: PRC1
  Gene Name: protein regulator of cytokinesis 1
  ENSP ID: ENSP00000453977
  MOD_RES (1)..(1): Any amino acid
XSIRPIFGGTVYHSPVSRLPPSGSKPVAASTCSGKKTPRTGRHGANKENLELNGSILSEGSVPL

SEQ ID NO: 69025 - protein, 46 aa, Homo sapiens
  Payload ID: 13724
  Gene Symbol: PRC1
  Gene Name: protein regulator of cytokinesis 1
  ENSP ID: ENSP00000456737
RLPPSGSKPVAASTCSGKKTPRTGRHGANKENLELNGSILSGQPSS

SEQ ID NO: 69026 - protein, 231 aa, Homo sapiens
  Payload ID: 13725
  Gene Symbol: PROS1
  Gene Name: protein S (alpha)
  ENSP ID: ENSP00000330021
MRVLGGRCGALLACLLLVLPVSEANFCLYFRNDFIYNRACISVLVGLSGCNFFYSICFLSKQQASQVLVRKRRANSLLEETKQGNLERECIEELCNKEEAREVFENDPETDYFYPKYLVCLRSFQTGLFTAARQSTNAYPDLRSCVNAIPDQCSPLPCNEDGYMSCKDGKASFTCTCKPGWQGEKCEFDINECKDPSNINGGCSQICDNTPGSYHCSCKNGFVMLSNKKDC

SEQ ID NO: 69027 - protein, 676 aa, Homo sapiens
  Payload ID: 13725
  Gene Symbol: PROS1
  Gene Name: protein S (alpha)
  Uniprot ID: P07225
  ENSP ID: ENSP00000377783
MRVLGGRCGALLACLLLVLPVSEANFLSKQQASQVLVRKRRANSLLEETKQGNLERECIEELCNKEEAREVFENDPETDYFYPKYLVCLRSFQTGLFTAARQSTNAYPDLRSCVNAIPDQCSPLPCNEDGYMSCKDGKASFTCTCKPGWQGEKCEFDINECKDPSNINGGCSQICDNTPGSYHCSCKNGFVMLSNKKDCKDVDECSLKPSICGTAVCKNIPGDFECECPEGYRYNLKSKSCEDIDECSENMCAQLCVNYPGGYTCYCDGKKGFKLAQDQKSCEVVSVCLPLNLDTKYELLYLAEQFAGVVLYLKFRLPEISRFSAEFDFRTYDSEGVILYAESIDHSAWLLIALRGGKIEVQLKNEHTSKITTGGDVINNGLWNMVSVEELEHSISIKIAKEAVMDINKPGPLFKPENGLLETKVYFAGFPRKVESELIKPINPRLDGCIRSWNLMKQGASGIKEIIQEKQNKHCLVTVEKGSYYPGSGIAQFHIDYNNVSSAEGWHVNVTLNIRPSTGTGVMLALVSGNNTVPFAVSLVDSTSEKSQDILLSVENTVIYRIQALSLCSDQQSHLEFRVNRNNLELSTPLKIETISHEDLQRQLAVLDKAMKAKVATYLGGLPDVPFSATPVNAFYNGCMEVNINGVQLDLDEAISKHNDIRAHSCPSVWKKTKNS

SEQ ID NO: 69028 - protein, 545 aa, Homo sapiens
  Payload ID: 13725
  Gene Symbol: PROS1
  Gene Name: protein S (alpha)
  ENSP ID: ENSP00000385794
MSCKDGKASFTCTCKPGWQGEKCEFDINECKDPSNINGGCSQICDNTPGSYHCSCKNGFVMLSNKKDCKDVDECSLKPSICGTAVCKNIPGDFECECPEGYRYNLKSKSCEDIDECSENMCAQLCVNYPGGYTCYCDGKKGFKLAQDQKSCEVVSVCLPLNLDTKYELLYLAEQFAGVVLYLKFRLPEISRFSAEFDFRTYDSEGVILYAESIDHSAWLLIALRGGKIEVQLKNEHTSKITTGGDVINNGLWNMVSVEELEHSISIKIAKEAVMDINKPGPLFKPENGLLETKVYFAGFPRKVESELIKPINPRLDGCIRSWNLMKQGASGIKEIIQEKQNKHCLVTVEKGSYYPGSGIAQFHIDYNNVSSAEGWHVNVTLNIRPSTGTGVMLALVSGNNTVPFAVSLVDSTSEKSQDILLSVENTVIYRIQALSLCSDQQSHLEFRVNRNNLELSTPLKIETISHEDLQRQLAVLDKAMKAKVATYLGGLPDVPFSATPVNAFYNGCMEVNINGVQLDLDEAISKHNDIRAHSCPSVWKKTKNS

SEQ ID NO: 69029 - protein, 56 aa, Homo sapiens
  Payload ID: 13725
  Gene Symbol: PROS1
  Gene Name: protein S (alpha)
  ENSP ID: ENSP00000419616
MSCKDGKASFTCTCKPGWQGEKCEFDINECKDPSNINGGCSQICDNTPGSYHCSCK

SEQ ID NO: 69030 - protein, 424 aa, Homo sapiens
  Payload ID: 13726
  Gene Symbol: PSKH1
  Gene Name: protein serine kinase H1
  Uniprot ID: P11801
  ENSP ID: ENSP00000291041
MGCGTSKVLPEPPKDVQLDLVKKVEPFSGTKSDVYKHFITEVDSVGPVKAGFPAASQYAHPCPGPPTAGHTEPPSEPPRRARVAKYRAKFDPRVTAKYDIKALIGRGSFSRVVRVEHRATRQPYAIKMIETKYREGREVCESELRVLRRVRHANIIQLVEVFETQERVYMVMELATGGELFDRIIAKGSFTERDATRVLQMVLDGVRYLHALGITHRDLKPENLLYYHPGTDSKIIITDFGLASARKKGDDCLMKTTCGTPEYIAPEVLVRKPYTNSVDMWALGVIAYILLSGTMPFEDDNRTRLYRQILRGKYSYSGEPWPSVSNLAKDFIDRLLTVDPGARMTALQALRHPWVVSMAASSSMKNLHRSISQNLLKRASSRCQSTKSAQSTRSSRSTRSNKSRRVRERELRELNLRYQQQYNG

SEQ ID NO: 69031 - protein, 353 aa, Homo sapiens
  Payload ID: 13726
  Gene Symbol: PSKH1
  Gene Name: protein serine kinase H1
  ENSP ID: ENSP00000482880
MGCGTSKVLPEPPKDVQLDLVKKVEPFSGTKSDVYKHFITEVDSVGPVKAGFPAASQYAHPCPGPPTAGHTEPPSEPPRRARVAKYRAKFDPRVTAKYDIKALIGRGSFSRVVRVEHRATRQPYAIKMIETKYREGREVCESELRVLRRVRHANIIQLVEVFETQERVYMVMELATGGELFDRIIAKGSFTERDATRVLQMVLDGVRYLHALGITHRDLKPENLLYYHPGTDSKIIITDFGLASARKKGDDCLMKTTCGTPEYIAPEVLVRKPYTNSVDMWALGVIAYILLSGTMPFEDDNRTRLYRQILRGKYSYSGEVSLSCPCPGCWGGTCGGRYILQLSVRGMSSGPCS

SEQ ID NO: 69032 - protein, 385 aa, Homo sapiens
  Payload ID: 13727
  Gene Symbol: PSKH2
  Gene Name: protein serine kinase H2
  Uniprot ID: Q96QS6
  ENSP ID: ENSP00000276616
MGCGASRKVVPGPPALAWAKHEGQNQAGVGGAGPGPEAAAQAAQRIQVARFRAKFDPRVLARYDIKALIGTGSFSRVVRVEQKTTKKPFAIKVMETREREGREACVSELSVLRRVSHRYIVQLMEIFETEDQVYMVMELATGGELFDRLIAQGSFTERDAVRILQMVADGIRYLHALQITHRNLKPENLLYYHPGEESKILITDFGLAYSGKKSGDWTMKTLCGTPEYIAPEVLLRKPYTSAVDMWALGVITYALLSGFLPFDDESQTRLYRKILKGKYNYTGEPWPSISHLAKDFIDKLLILEAGHRMSAGQALDHPWVITMAAGSSMKNLQRAISRNLMQRASPHSQSPGSAQSSKSHYSHKSRHMWSKRNLRIVESPLSALL

SEQ ID NO: 69033 - protein, 947 aa, Homo sapiens
  Payload ID: 13728
  Gene Symbol:
  Gene Name: Protein SOGA3  [Source:UniProtKB/Swiss-Prot
  Acc:Q5TF21]
  Uniprot ID: Q5TF21
  ENSP ID: ENSP00000455908
MSQPPIGGAAPATAAASPAAAATEARLHPEGSSRKQQRAQSPARPRDSSLRQTIAATRSPVGAGTKLNSVRQQQLQQQQQQGNKTGSRTGPPASIRGGGGGAEKATPLAPKGAAPGAVQPVAGAEAAPAATLAALGGRRPGPPEEPPRELESVPSKLGEPPPLGEGGGGGGEGGGAGGGSGEREGGAPQPPPPRGWRGKGVRAQQRGGSGGEGASPSPSSSSAGKTPGTGSRNSGSGVAGGGSGGGGSYWKEGCLQSELIQFHLKKERAAAAAAAAQMHAKNGGGSSSRSSPVSGPPAVCETLAVASASPMAAAAEGPQQSAEGSASGGGMQAAAPPSSQPHPQQLQEQEEMQEEMEKLREENETLKNEIDELRTEMDEMRDTFFEEDACQLQEMRHELERANKNCRILQYRLRKAERKRLRYAQTGEIDGELLRSLEQDLKVAKDVSVRLHHELENVEEKRTTTEDENEKLRQQLIEVEIAKQALQNELEKMKELSLKRRGSKDLPKSEKKAQQTPTEEDNEDLKCQLQFVKEEAALMRKKMAKIDKEKDRFEHELQKYRSFYGDLDSPLPKGEAGGPPSTREAELKLRLRLVEEEANILGRKIVELEVENRGLKAELDDLRGDDFNGSANPLMREQSESLSELRQHLQLVEDETELLRRNVADLEEQNKRITAELNKYKYKSGGHDSARHHDNAKTEALQEELKAARLQINELSGKVMQLQYENRVLMSNMQRYDLASHLGIRGSPRDSDAESDAGKKESDDDSRPPHRKREGPIGGESDSEEVRNIRCLTPTRSFYPAPGPWPKSFSDRQQMKDIRSEAERLGKTIDRLIADTSTIITEARIYVANGDLFGLMDEEDDGSRIREHELLYRINAQMKAFRKELQTFIDRLEVPKSADDRGAEEPISVSQMFQPIILLILILVLFSSLSYTTIFKLVFLFTLFFVL

SEQ ID NO: 69034 - protein, 291 aa, Homo sapiens
  Payload ID: 13728
  Gene Symbol:
  Gene Name: Protein SOGA3  [Source:UniProtKB/Swiss-Prot
  Acc:Q5TF21]
  ENSP ID: ENSP00000456172
  MOD_RES (1)..(1): Any amino acid
XETELLRRNVADLEEQNKRITAELNKYKYKSGGHDSARHHDNAKTEALQEELKAARLQINELSGKVMQLQYENRVLMSNMQRYDLASHLGIRGSPRDSDAESDAGKKESDDDSRPPHRKREGPIGGESDSEEVRNIRCLTPTRSFYPAPGPWPKSFSDRQQMKDIRSEAERLGKTIDRLIADTSTIITEARIYVANGDLFGLMDEEDDGSRIREHELLYRINAQMKAFRKELQTFIDRLEVPKSADDRGAEEPISMFQPIILLILILVLFSSLSYTTIFKLVFLFTLFFVL

SEQ ID NO: 69035 - protein, 97 aa, Homo sapiens
  Payload ID: 13728
  Gene Symbol:
  Gene Name: Protein SOGA3  [Source:UniProtKB/Swiss-Prot
  Acc:Q5TF21]
  ENSP ID: ENSP00000456668
  MOD_RES (1)..(1): Any amino acid
XLFGLMDEEDDGSRIREHELLYRINAQMKAFRKELQTFIDRLEVPKSADDRGAEEPISVSQMFQPIILLILILVLFSSLSYTTIFKLVFLFTLFFVL

SEQ ID NO: 69036 - protein, 1065 aa, Homo sapiens
  Payload ID: 13729
  Gene Symbol: PTK2
  Gene Name: protein tyrosine kinase 2
  Uniprot ID: Q05397
  ENSP ID: ENSP00000341189
MAAAYLDPNLNHTPNSSTKTHLGTGMERSPGAMERVLKVFHYFESNSEPTTWASIIRHGDATDVRGIIQKIVDSHKVKHVACYGFRLSHLRSEEVHWLHVDMGVSSVREKYELAHPPEEWKYELRIRYLPKGFLNQFTEDKPTLNFFYQQVKSDYMLEIADQVDQEIALKLGCLEIRRSYWEMRGNALEKKSNYEVLEKDVGLKRFFPKSLLDSVKAKTLRKLIQQTFRQFANLNREESILKFFEILSPVYRFDKECFKCALGSSWIISVELAIGPEEGISYLTDKGCNPTHLADFTQVQTIQYSNSEDKDRKGMLQLKIAGAPEPLTVTAPSLTIAENMADLIDGYCRLVNGTSQSFIIRPQKEGERALPSIPKLANSEKQGMRTHAVSVSETDDYAEIIDEEDTYTMPSTRDYEIQRERIELGRCIGEGQFGDVHQGIYMSPENPALAVAIKTCKNCTSDSVREKFLQEALTMRQFDHPHIVKLIGVITENPVWIIMELCTLGELRSFLQVRKYSLDLASLILYAYQLSTALAYLESKRFVHRDIAARNVLVSSNDCVKLGDFGLSRYMEDSTYYKASKGKLPIKWMAPESINFRRFTSASDVWMFGVCMWEILMHGVKPFQGVKNNDVIGRIENGERLPMPPNCPPTLYSLMTKCWAYDPSRRPRFTELKAQLSTILEEEKAQQEERMRMESRRQATVSWDSGGSDEAPPKPSRPGYPSPRSSEGFYPSPQHMVQTNHYQVSGYPGSHGITAMAGSIYPGQASLLDQTDSWNHRPQEIAMWQPNVEDSTVLDLRGIGQVLPTHLMEERLIRQQQEMEEDQRWLEKEERFLKPDVRLSRGSIDREDGSLQGPIGNQHIYQPVGKPGKEEKNWAERNPAAPPKKPPRPGAPGHLGSLASLSSPADSYNEGVKPWRLQPQEISPPPTANLDRSNDKVYENVTGLVKAVIEMSSKIQPAPPEEYVPMVKEVGLALRTLLATVDETIPLLPASTHREIEMAQKLLNSDLGELINKMKLAQQYVMTSLQQEYKKQMLTAAHALAVDAKNLLDVIDQARLKMLGQTRPH

SEQ ID NO: 69037 - protein, 1006 aa, Homo sapiens
  Payload ID: 13729
  Gene Symbol: PTK2
  Gene Name: protein tyrosine kinase 2
  Uniprot ID: Q05397
  ENSP ID: ENSP00000378644
MAAAYLDPNLNHTPNSSTKTHLGTGMERSPGAMERVLKVFHYFESNSEPTTWASIIRHGDATDVRGIIQKIVDSHKVKHVACYGFRLSHLRSEEVHWLHVDMGVSSVREKYELAHPPEEWKYELRIRYLPKGFLNQFTEDKPTLNFFYQQVKSDYMLEIADQVDQEIALKLGCLEIRRSYWEMRGNALEKKSNYEVLEKDVGLKRFFPKSLLDSVKAKTLRKLIQQTFRQFANLNREESILKFFEILSPVYRFDKECFKCALGSSWIISVELAIGPEEGISYLTDKGCNPTHLADFTQVQTIQYSNSEDKDRKGMLQLKIAGAPEPLTVTAPSLTIAENMADLIDGYCRLVNGTSQSFIIRPQKEGERALPSIPKLANSEKQGMRTHAVSVSETDDYAEIIDEEDTYTMPSTRDYEIQRERIELGRCIGEGQFGDVHQGIYMSPENPALAVAIKTCKNCTSDSVREKFLQEALTMRQFDHPHIVKLIGVITENPVWIIMELCTLGELRSFLQVRKYSLDLASLILYAYQLSTALAYLESKRFVHRDIAARNVLVSSNDCVKLGDFGLSRYMEDSTYYKASKGKLPIKWMAPESINFRRFTSASDVWMFGVCMWEILMHGVKPFQGVKNNDVIGRIENGERLPMPPNCPPTLYSLMTKCWAYDPSRRPRFTELKAQLSTILEEEKAQQEERMRMESRRQATVSWDSGGSDEAPPKPSRPGYPSPRSSEGFYPSPQHMVQTNHYQDSTVLDLRGIGQVLPTHLMEERLIRQQQEMEEDQRWLEKEERFLKPDVRLSRGSIDREDGSLQGPIGNQHIYQPVGKPDPAAPPKKPPRPGAPGHLGSLASLSSPADSYNEGVKLQPQEISPPPTANLDRSNDKVYENVTGLVKAVIEMSSKIQPAPPEEYVPMVKEVGLALRTLLATVDETIPLLPASTHREIEMAQKLLNSDLGELINKMKLAQQYVMTSLQQEYKKQMLTAAHALAVDAKNLLDVIDQARLKMLGQTRPH

SEQ ID NO: 69038 - protein, 362 aa, Homo sapiens
  Payload ID: 13729
  Gene Symbol: PTK2
  Gene Name: protein tyrosine kinase 2
  ENSP ID: ENSP00000403416
MRMESRRQATVSWDSGGSDEAPPKPSRPGYPSPRSSEGFYPSPQHMVQTNHYQVSGYPGSHGITAMAGSIYPGQASLLDQTDSWNHRPQEIAMWQPNVEDSTVLDLRGIGQVLPTHLMEERLIRQQQEMEEDQRWLEKEERFLKPDVRLSRGSIDREDGSLQGPIGNQHIYQPVGKPDPAAPPKKPPRPGAPGHLGSLASLSSPADSYNEGVKLQPQEISPPPTANLDRSNDKVYENVTGLVKAVIEMSSKIQPAPPEEYVPMVKEVGLALRTLLATVDETIPLLPASTHREIEMAQKLLNSDLGELINKMKLAQQYVMTSLQQEYKKQMLTAAHALAVDAKNLLDVIDQARLKMLGQTRPH

SEQ ID NO: 69039 - protein, 59 aa, Homo sapiens
  Payload ID: 13729
  Gene Symbol: PTK2
  Gene Name: protein tyrosine kinase 2
  ENSP ID: ENSP00000427762
MGVSSVREKYELAHPPEEWKYELRIRYLPKGFLNQFTEDKPTLNFFYQQVKSDYMLEIA

SEQ ID NO: 69040 - protein, 133 aa, Homo sapiens
  Payload ID: 13729
  Gene Symbol: PTK2
  Gene Name: protein tyrosine kinase 2
  ENSP ID: ENSP00000427774
MRMESRRQATVSWDSGGSDEAPPKPSRPGYPSPRSSEGFYPSPQHMVQTNHYQVSGYPGSHGITAMAGSIYPGQASLLDQTDSWNHRPQEIAMWQPNVEDSTVLDLRGIGQVLPTHLMEERLIRQQQEMEEDQ

SEQ ID NO: 69041 - protein, 119 aa, Homo sapiens
  Payload ID: 13729
  Gene Symbol: PTK2
  Gene Name: protein tyrosine kinase 2
  ENSP ID: ENSP00000427795
MAAAYLDPNLNHTPNSSTKTHLGTGMERSPGAMERVLKVFHYFESNSEPTTWASIIRHGDATDVRGIIQKIVDSHKVKHVACYGFRLSHLRSEEVHWLHVDMGVSSVREKYELAHPPEE

SEQ ID NO: 69042 - protein, 66 aa, Homo sapiens
  Payload ID: 13729
  Gene Symbol: PTK2
  Gene Name: protein tyrosine kinase 2
  ENSP ID: ENSP00000427825
MAAAYLDPNLNHTPNSSTKTHLGTGMERSPGAMERVLKVFHYFESNSEPTTWASIIRHGDATDVRI

SEQ ID NO: 69043 - protein, 121 aa, Homo sapiens
  Payload ID: 13729
  Gene Symbol: PTK2
  Gene Name: protein tyrosine kinase 2
  ENSP ID: ENSP00000427904
MAAAYLDPNLNHTPNSSTKTHLGTGMERSPGAMERVLKVFHYFESNSEPTTWASIIRHGDATDVRGIIQKIVDSHKVKHVACYGFRLSHLRSEEVHWLHVDMGVSSVREKYELAHPPEEWK

SEQ ID NO: 69044 - protein, 72 aa, Homo sapiens
  Payload ID: 13729
  Gene Symbol: PTK2
  Gene Name: protein tyrosine kinase 2
  ENSP ID: ENSP00000427972
TIAENMADLIDGYCRLVNGTSQSFIIRPQKEGERALPSIPKLANSEKQGMRTHAVSVSAQSWRKRRLSKKSA

SEQ ID NO: 69045 - protein, 168 aa, Homo sapiens
  Payload ID: 13729
  Gene Symbol: PTK2
  Gene Name: protein tyrosine kinase 2
  ENSP ID: ENSP00000428232
MKYQEVRCLTSFNISVSFPAETDDYAEIIDEEDTYTMPSKSYGIDEARDYEIQRERIELGRCIGEGQFGDVHQGIYMSPENPALAVAIKTCKNCTSDSVREKFLQEALTMRQFDHPHIVKLIGVITENPVWIIMELCTLGELRSFLQVRKYSLDLASLILYAYQLSTA

SEQ ID NO: 69046 - protein, 72 aa, Homo sapiens
  Payload ID: 13729
  Gene Symbol: PTK2
  Gene Name: protein tyrosine kinase 2
  ENSP ID: ENSP00000428380
MKYQEVRCLTSFNISVSFPAETDDYAEIIDEEDTYTMPSTRDYEIQRERIELGRCIGEGQFGDVHQGIYMSP

SEQ ID NO: 69047 - protein, 124 aa, Homo sapiens
  Payload ID: 13729
  Gene Symbol: PTK2
  Gene Name: protein tyrosine kinase 2
  ENSP ID: ENSP00000428482
MKYQEVRCLTSFNISVSFPAETDDYAEIIDEEDTYTMPSTRDYEIQRERIELGRCIGEGQFGDVHQGIYMSPENPALAVAIKTCKNCTSDSVREKFLQEASEVIFASKEIQFGSSIFDPVCLSA

SEQ ID NO: 69048 - protein, 724 aa, Homo sapiens
  Payload ID: 13729
  Gene Symbol: PTK2
  Gene Name: protein tyrosine kinase 2
  ENSP ID: ENSP00000428492
IAENMADLIDGYCRLVNGTSQSFIIRPQKEGERALPSIPKLANSEKQGMRTHAVSVSETDDYAEIIDEEDTYTMPSKSYGIDEARDYEIQRERIELGRCIGEGQFGDVHQGIYMSPENPALAVAIKTCKNCTSDSVREKFLQEALTMRQFDHPHIVKLIGVITENPVWIIMELCTLGELRSFLQVRKYSLDLASLILYAYQLSTALAYLESKRFVHRDIAARNVLVSSNDCVKLGDFGLSRYMEDSTYYKASKGKLPIKWMAPESINFRRFTSASDVWMFGVCMWEILMHGVKPFQGVKNNDVIGRIENGERLPMPPNCPPTLYSLMTKCWAYDPSRRPRFTELKAQLSTILEEEKAQQEERMRMESRRQATVSWDSGGSDEAPPKPSRPGYPSPRSSEGFYPSPQHMVQTNHYQVSGYPGSHGITAMAGSIYPGQASLLDQTDSWNHRPQEIAMWQPNVEDSTVLDLRGIGQVLPTHLMEERLIRQQQEMEEDQRWLEKEERFLKPDVRLSRGSIDREDGSLQGPIGNQHIYQPVGKPDPAAPPKKPPRPGAPGHLGSLASLSSPADSYNEGVKLQPQEISPPPTANLDRSNDKVYENVTGLVKAVIEMSSKIQPAPPEEYVPMVKEVGLALRTLLATVDETIPLLPASTHREIEMAQKLLNSDLGELINKMKLAQQYVMTSLQQEYKKQMLTAAHALAVDAKNLLDVIDQARLKMLGQTRPH

SEQ ID NO: 69049 - protein, 66 aa, Homo sapiens; identical to SEQ ID NO: 69042
  Payload ID: 13729
  Gene Symbol: PTK2
  Gene Name: protein tyrosine kinase 2
  ENSP ID: ENSP00000428570

SEQ ID NO: 69050 - protein, 128 aa, Homo sapiens
  Payload ID: 13729
  Gene Symbol: PTK2
  Gene Name: protein tyrosine kinase 2
  ENSP ID: ENSP00000428593
AENMADLIDGYCRLVNGTSQSFIIRPQKEGERALPSIPKLANSEKQGMRTHAVSVSETDDYAEIIDEEDTYTMPSTRDYEIQRERIELGRCIGEGQFGDVHQGGPGLLNLKLSSAQSWRKRRLSKKSA

SEQ ID NO: 69051 - protein, 156 aa, Homo sapiens
  Payload ID: 13729
  Gene Symbol: PTK2
  Gene Name: protein tyrosine kinase 2
  ENSP ID: ENSP00000428792
MAAAYLDPNLNHTPNSSTKTHLGTGMERSPGAMERVLKVFHYFESNSEPTTWASIIRHGDATDVRGIIQKIVDSHKVKHVACYGFRLSHLRSEEVHWLHVDMGVSSVREKYELAHPPEEWKYELRIRYLPKGFLNQFTEDKPTLNFFYQQVKSDYM

SEQ ID NO: 69052 - protein, 122 aa, Homo sapiens
  Payload ID: 13729
  Gene Symbol: PTK2
  Gene Name: protein tyrosine kinase 2
  ENSP ID: ENSP00000429001
MAAAYLDPNLNHTPNSSTKTHLGTGMERSPGAMERVLKVFHYFESNSEPTTWASIIRHGDATDVRVKSDYMLEIADQVDQEIALKLGCLEIRKDVGLKRFFPKSLLDSVKAKTLRKLIQQTF

SEQ ID NO: 69053 - protein, 319 aa, Homo sapiens
  Payload ID: 13729
  Gene Symbol: PTK2
  Gene Name: protein tyrosine kinase 2
  ENSP ID: ENSP00000429023
  MOD_RES (1)..(1): Any amino acid
XEKKSNYEVLEKDVGLKRFFPKSLLDSVKAKTLRKLIQQTFRQFANLNREESILKFFEILSPVYRFDKECFKCALGSSWIISVELAIGPEEGISYLTDKGCNPTHLADFTQVQTIQYSNSEDKDRKGMLQLKIAGAPEPLTVTAPSLTIAENMADLIDGYCRLVNGTSQSFIIRPQKEGERALPSIPKLANSEKQGMRTHAVSVSETDDYAEIIDEEDTYTMPSTRDYEIQRERIELGRCIGEGQFGDVHQGIYMSPENPALAVAIKTCKNCTSDSVREKFLQEACHYTSLHWNWCRYISDPNVDAAQTPGMQSNNASV

SEQ ID NO: 69054 - protein, 14 aa, Homo sapiens
  Payload ID: 13729
  Gene Symbol: PTK2
  Gene Name: protein tyrosine kinase 2
  ENSP ID: ENSP00000429028
MLLELAGQEALKPA

SEQ ID NO: 69055 - protein, 1096 aa, Homo sapiens
  Payload ID: 13729
  Gene Symbol: PTK2
  Gene Name: protein tyrosine kinase 2
  ENSP ID: ENSP00000429082
MLLELAGQEALKPAGAIYMEKSGCSPFPVCWAKEYDRYLASSKIMAAAYLDPNLNHTPNSSTKTHLGTGMERSPGAMERVLKVFHYFESNSEPTTWASIIRHGDATDVRGIIQKIVDSHKVKHVACYGFRLSHLRSEEVHWLHVDMGVSSVREKYELAHPPEEWKYELRIRYLPKGFLNQFTEDKPTLNFFYQQVKSDYMLEIADQVDQEIALKLGCLEIRRSYWEMRGNALEKKSNYEVLEKDVGLKRFFPKSLLDSVKAKTLRKLIQQTFRQFANLNREESILKFFEILSPVYRFDKECFKCALGSSWIISVELAIGPEEGISYLTDKGCNPTHLADFTQVQTIQYSNSEDKDRKGMLQLKIAGAPEPLTVTAPSLTIAENMADLIDGYCRLVNGTSQSFIIRPQKEGERALPSIPKLANSEKQGMRTHAVSVSETDDYAEIIDEEDTYTMPSTRDYEIQRERIELGRCIGEGQFGDVHQGIYMSPENPALAVAIKTCKNCTSDSVREKFLQEALTMRQFDHPHIVKLIGVITENPVWIIMELCTLGELRSFLQVRKYSLDLASLILYAYQLSTALAYLESKRFVHRDIAARNVLVSSNDCVKLGDFGLSRYMEDSTYYKASKGKLPIKWMAPESINFRRFTSASDVWMFGVCMWEILMHGVKPFQGVKNNDVIGRIENGERLPMPPNCPPTLYSLMTKCWAYDPSRRPRFTELKAQLSTILEEEKAQQEERMRMESRRQATVSWDSGGSDEAPPKPSRPGYPSPRSSEGFYPSPQHMVQTNHYQVSGYPGSHGITAMAGSIYPGQASLLDQTDSWNHRPQEIAMWQPNVEDSTVLDLRGIGQVLPTHLMEERLIRQQQEMEEDQRWLEKEERFLKPDVRLSRGSIDREDGSLQGPIGNQHIYQPVGKPDPAAPPKKPPRPGAPGHLGSLASLSSPADSYNEGVKLQPQEISPPPTANLDRSNDKVYENVTGLVKAVIEMSSKIQPAPPEEYVPMVKEVGLALRTLLATVDETIPLLPASTHREIEMAQKLLNSDLGELINKMKLAQQYVMTSLQQEYKKQMLTAAHALAVDAKNLLDVIDQARLKMLGQTRPH

SEQ ID NO: 69056 - protein, 1096 aa, Homo sapiens; identical to SEQ ID NO: 69055
  Payload ID: 13729
  Gene Symbol: PTK2
  Gene Name: protein tyrosine kinase 2
  ENSP ID: ENSP00000429129

SEQ ID NO: 69057 - protein, 680 aa, Homo sapiens
  Payload ID: 13729
  Gene Symbol: PTK2
  Gene Name: protein tyrosine kinase 2
  ENSP ID: ENSP00000429170
MKYQEVRCLTSFNISVSFPAETDDYAEIIDEEDTYTMPSTRDYEIQRERIELGRCIGEGQFGDVHQGIYMSPENPALAVAIKTCKNCTSDSVREKFLQEALTMRQFDHPHIVKLIGVITENPVWIIMELCTLGELRSFLQVRKYSLDLASLILYAYQLSTALAYLESKRFVHRDIAARNVLVSSNDCVKLGDFGLSRYMEDSTYYKASKGKLPIKWMAPESINFRRFTSASDVWMFGVCMWEILMHGVKPFQGVKNNDVIGRIENGERLPMPPNCPPTLYSLMTKCWAYDPSRRPRFTELKAQLSTILEEEKAQQEERMRMESRRQATVSWDSGGSDEAPPKPSRPGYPSPRSSEGFYPSPQHMVQTNHYQVSGYPGSHGITAMAGSIYPGQASLLDQTDSWNHRPQEIAMWQPNVEDSTVLDLRGIGQVLPTHLMEERLIRQQQEMEEDQRWLEKEERFLKPDVRLSRGSIDREDGSLQGPIGNQHIYQPVGKPDPAAPPKKPPRPGAPGHLGSLASLSSPADSYNEGVKLQPQEISPPPTANLDRSNDKVYENVTGLVKAVIEMSSKIQPAPPEEYVPMVKEVGLALRTLLATVDETIPLLPASTHREIEMAQKLLNSDLGELINKMKLAQQYVMTSLQQEYKKQMLTAAHALAVDAKNLLDVIDQARLKMLGQTRPH

SEQ ID NO: 69058 - protein, 65 aa, Homo sapiens
  Payload ID: 13729
  Gene Symbol: PTK2
  Gene Name: protein tyrosine kinase 2
  ENSP ID: ENSP00000429409
MAAAYLDPNLNHTPNSSTKTHLGTGMERSPGAMERVLKVFHYFESNSEPTTWASIIRHGDATDVR

SEQ ID NO: 69059 - protein, 67 aa, Homo sapiens
  Payload ID: 13729
  Gene Symbol: PTK2
  Gene Name: protein tyrosine kinase 2
  ENSP ID: ENSP00000429437
MRLRFCISSQEYNINNAESFSASYPETYDVQGMFQLTNWTLTSEGRLDTTPVGDSFAQAVLPRQPPE

SEQ ID NO: 69060 - protein, 1052 aa, Homo sapiens
  Payload ID: 13729
  Gene Symbol: PTK2
  Gene Name: protein tyrosine kinase 2
  Uniprot ID: Q05397
  ENSP ID: ENSP00000429474
MAAAYLDPNLNHTPNSSTKTHLGTGMERSPGAMERVLKVFHYFESNSEPTTWASIIRHGDATDVRGIIQKIVDSHKVKHVACYGFRLSHLRSEEVHWLHVDMGVSSVREKYELAHPPEEWKYELRIRYLPKGFLNQFTEDKPTLNFFYQQVKSDYMLEIADQVDQEIALKLGCLEIRRSYWEMRGNALEKKSNYEVLEKDVGLKRFFPKSLLDSVKAKTLRKLIQQTFRQFANLNREESILKFFEILSPVYRFDKECFKCALGSSWIISVELAIGPEEGISYLTDKGCNPTHLADFTQVQTIQYSNSEDKDRKGMLQLKIAGAPEPLTVTAPSLTIAENMADLIDGYCRLVNGTSQSFIIRPQKEGERALPSIPKLANSEKQGMRTHAVSVSETDDYAEIIDEEDTYTMPSTRDYEIQRERIELGRCIGEGQFGDVHQGIYMSPENPALAVAIKTCKNCTSDSVREKFLQEALTMRQFDHPHIVKLIGVITENPVWIIMELCTLGELRSFLQVRKYSLDLASLILYAYQLSTALAYLESKRFVHRDIAARNVLVSSNDCVKLGDFGLSRYMEDSTYYKASKGKLPIKWMAPESINFRRFTSASDVWMFGVCMWEILMHGVKPFQGVKNNDVIGRIENGERLPMPPNCPPTLYSLMTKCWAYDPSRRPRFTELKAQLSTILEEEKAQQEERMRMESRRQATVSWDSGGSDEAPPKPSRPGYPSPRSSEGFYPSPQHMVQTNHYQVSGYPGSHGITAMAGSIYPGQASLLDQTDSWNHRPQEIAMWQPNVEDSTVLDLRGIGQVLPTHLMEERLIRQQQEMEEDQRWLEKEERFLKPDVRLSRGSIDREDGSLQGPIGNQHIYQPVGKPDPAAPPKKPPRPGAPGHLGSLASLSSPADSYNEGVKLQPQEISPPPTANLDRSNDKVYENVTGLVKAVIEMSSKIQPAPPEEYVPMVKEVGLALRTLLATVDETIPLLPASTHREIEMAQKLLNSDLGELINKMKLAQQYVMTSLQQEYKKQMLTAAHALAVDAKNLLDVIDQARLKMLGQTRPH

SEQ ID NO: 69061 - protein, 120 aa, Homo sapiens
  Payload ID: 13729
  Gene Symbol: PTK2
  Gene Name: protein tyrosine kinase 2
  ENSP ID: ENSP00000429530
MAAAYLDPNLNHTPNSSTKTHLGTGMERSPGAMERVLKVFHYFESNSEPTTWASIIRHGDATDVRGIIQKIVDSHKVKHVACYGFRLSHLRSEEVHWLHVDMGVSSVREKYELAHPPEEW

SEQ ID NO: 69062 - protein, 67 aa, Homo sapiens
  Payload ID: 13729
  Gene Symbol: PTK2
  Gene Name: protein tyrosine kinase 2
  ENSP ID: ENSP00000429702
MRMESRRQATVSWDSGGSDEAPPKPSRPGYPSPRSSEGFYPSPQHMVQTNHYQVSGYPGSHGITAMA

SEQ ID NO: 69063 - protein, 66 aa, Homo sapiens; identical to SEQ ID NO: 69042
  Payload ID: 13729
  Gene Symbol: PTK2
  Gene Name: protein tyrosine kinase 2
  ENSP ID: ENSP00000429895

SEQ ID NO: 69064 - protein, 107 aa, Homo sapiens
  Payload ID: 13729
  Gene Symbol: PTK2
  Gene Name: protein tyrosine kinase 2
  ENSP ID: ENSP00000429907
MAAAYLDPNLNHTPNSSTKTHLGTGMERSPGAMERVLKVFHYFESNSEPTTWASIIRHGDATDVRGIIQKIVDSHKVKHVACYGFRLSHLRSEEVHWLHVDMGVSSV

SEQ ID NO: 69065 - protein, 1052 aa, Homo sapiens; identical to SEQ ID NO: 69060
  Payload ID: 13729
  Gene Symbol: PTK2
  Gene Name: protein tyrosine kinase 2
  Uniprot ID: Q05397
  ENSP ID: ENSP00000429911

SEQ ID NO: 69066 - protein, 1017 aa, Homo sapiens
  Payload ID: 13729
  Gene Symbol: PTK2
  Gene Name: protein tyrosine kinase 2
  ENSP ID: ENSP00000429929
  MOD_RES (1)..(1): Any amino acid
XYDRYLASSKIMAAAYLDPNLNHTPNSSTKTHLGTGMERSPGAMERVLKVFHYFESNSEPTTWASIIRHGDATDVRGIIQKIVDSHKVKHVACYGFRLSHLRSEEVHWLHVDMGVSSVREKYELAHPPEEWKYELRIRYLPKGFLNQFTEDKPTLNFFYQQVKSDYMLEIADQVDQEIALKLGCLEIRRSYWEMRGNALEKKSNYEVLEKDVGLKRFFPKSLLDSVKAKTLRKLIQQTFRQFANLNREESILKFFEILSPVYRFDKECFKCALGSSWIISVELAIGPEEGISYLTDKGCNPTHLADFTQVQTIQYSNSEDKDRKGMLQLKIAGAPEPLTVTAPSLTIAENMADLIDGYCRLVNGTSQSFIIRPQKEGERALPSIPKLANSEKQGMRTHAVSVSETDDYAEIIDEEDTYTMPSTRDYEIQRERIELGRCIGEGQFGDVHQGIYMSPENPALAVAIKTCKNCTSDSVREKFLQEALTMRQFDHPHIVKLIGVITENPVWIIMELCTLGELRSFLQVRKYSLDLASLILYAYQLSTALAYLESKRFVHRDIAARNVLVSSNDCVKLGDFGLSRYMEDSTYYKASKGKLPIKWMAPESINFRRFTSASDVWMFGVCMWEILMHGVKPFQGVKNNDVIGRIENGERLPMPPNCPPTLYSLMTKCWAYDPSRRPRFTELKAQLSTILEEEKAQQEERMRMESRRQATVSWDSGGSDEAPPKPSRPGYPSPRSSEGFYPSPQHMVQTNHYQDSTVLDLRGIGQVLPTHLMEERLIRQQQEMEEDQRWLEKEERFLKPDVRLSRGSIDREDGSLQGPIGNQHIYQPVGKPDPAAPPKKPPRPGAPGHLGSLASLSSPADSYNEGVKLQPQEISPPPTANLDRSNDKVYENVTGLVKAVIEMSSKIQPAPPEEYVPMVKEVGLALRTLLATVDETIPLLPASTHREIEMAQKLLNSDLGELINKMKLAQQYVMTSLQQEYKKQMLTAAHALAVDAKNLLDVIDQARLKMLGQTRPH

SEQ ID NO: 69067 - protein, 79 aa, Homo sapiens
  Payload ID: 13729
  Gene Symbol: PTK2
  Gene Name: protein tyrosine kinase 2
  ENSP ID: ENSP00000429958
MKYQEVRCLTSFNISVSFPAETDDYAEIIDEEDTYTMPSTRDYEIQRERIELGRCIGEGQFGDVHQGIYMSPVCVCGRY

SEQ ID NO: 69068 - protein, 51 aa, Homo sapiens
  Payload ID: 13729
  Gene Symbol: PTK2
  Gene Name: protein tyrosine kinase 2
  ENSP ID: ENSP00000430037
MAAAYLDPNLNHTPNSSTKTHLGTGMERSPGAMERVLKVFHYFESNSEPTT

SEQ ID NO: 69069 - protein, 117 aa, Homo sapiens
  Payload ID: 13729
  Gene Symbol: PTK2
  Gene Name: protein tyrosine kinase 2
  ENSP ID: ENSP00000430044
MAAAYLDPNLNHTPNSSTKTHLGTGMERSPGAMERVLKVFHYFESNSEPTTWASIIRHGDATDVRGIIQKIVDSHKVKHVACYGFRLSHLRSEEVHWLHVDMGVSSVREKYELAHPP

SEQ ID NO: 69070 - protein, 121 aa, Homo sapiens; identical to SEQ ID NO: 69043
  Payload ID: 13729
  Gene Symbol: PTK2
  Gene Name: protein tyrosine kinase 2
  ENSP ID: ENSP00000430277

SEQ ID NO: 69071 - protein, 753 aa, Homo sapiens
  Payload ID: 13729
  Gene Symbol: PTK2
  Gene Name: protein tyrosine kinase 2
  ENSP ID: ENSP00000430603
AENMADLIDGYCRLVNGTSQSFIIRPQKEGERALPSIPKLANSEKQGMRTHAVSVSGVSHCQHKVKKARRFLPLVFCSHDPPSTDEISGDETDDYAEIIDEEDTYTMPSTRDYEIQRERIELGRCIGEGQFGDVHQGIYMSPENPALAVAIKTCKNCTSDSVREKFLQEALTMRQFDHPHIVKLIGVITENPVWIIMELCTLGELRSFLQVRKYSLDLASLILYAYQLSTALAYLESKRFVHRDIAARNVLVSSNDCVKLGDFGLSRYMEDSTYYKASKGKLPIKWMAPESINFRRFTSASDVWMFGVCMWEILMHGVKPFQGVKNNDVIGRIENGERLPMPPNCPPTLYSLMTKCWAYDPSRRPRFTELKAQLSTILEEEKAQQEERMRMESRRQATVSWDSGGSDEAPPKPSRPGYPSPRSSEGFYPSPQHMVQTNHYQVSGYPGSHGITAMAGSIYPGQASLLDQTDSWNHRPQEIAMWQPNVEDSTVLDLRGIGQVLPTHLMEERLIRQQQEMEEDQRWLEKEERFLKPDVRLSRGSIDREDGSLQGPIGNQHIYQPVGKPDPAAPPKKPPRPGAPGHLGSLASLSSPADSYNEGVKPWRLQPQEISPPPTANLDRSNDKVYENVTGLVKAVIEMSSKIQPAPPEEYVPMVKEVGLALRTLLATVDETIPLLPASTHREIEMAQKLLNSDLGELINKMKLAQQYVMTSLQQEYKKQMLTAAHALAVDAKNLLDVIDQARLKMLGQTRPH

SEQ ID NO: 69072 - protein, 120 aa, Homo sapiens
  Payload ID: 13729
  Gene Symbol: PTK2
  Gene Name: protein tyrosine kinase 2
  ENSP ID: ENSP00000430828
MRLRFCISSQEYNINNAESFSASYPETYDVQGMFQLTNWTLTSEGRLDTTPVGDSFIEMAQKLLNSDLGELINKMKLAQQYVMTSLQQEYKKQMLTAAHALAVDAKNLLDVIDQARLKML

SEQ ID NO: 69073 - protein, 115 aa, Homo sapiens
  Payload ID: 13729
  Gene Symbol: PTK2
  Gene Name: protein tyrosine kinase 2
  ENSP ID: ENSP00000430916
MSSKIQPAPPEEYVPMVKEVGLALRTLLATVDETIPLLPASTHREIEMAQKLLNSDLGELINKMKLAQQYVMTSLQQEYKKQMLTAAHALAVDAKNLLDVIDQARLKMLGQTRPH

SEQ ID NO: 69074 - protein, 117 aa, Homo sapiens; identical to SEQ ID NO: 69069
  Payload ID: 13729
  Gene Symbol: PTK2
  Gene Name: protein tyrosine kinase 2
  ENSP ID: ENSP00000430951

SEQ ID NO: 69075 - protein, 8 aa, Homo sapiens
  Payload ID: 13729
  Gene Symbol: PTK2
  Gene Name: protein tyrosine kinase 2
  ENSP ID: ENSP00000431023
MLLELAGQ

SEQ ID NO: 69076 - protein, 132 aa, Homo sapiens
  Payload ID: 13729
  Gene Symbol: PTK2
  Gene Name: protein tyrosine kinase 2
  ENSP ID: ENSP00000431106
MRMESRRQATVSWDSGGSDEAPPKPSRPGYPSPRSSEGFYPSPQHMVQTNHYQVSGYPGSHGITAMAGSIYPGQASLLDQTDSWNHRPQEIAMWQPNVEDSTVLDLRGIGQVLPTHLMEERLIRQQQEMEED

SEQ ID NO: 69077 - protein, 1009 aa, Homo sapiens
  Payload ID: 13730
  Gene Symbol: PTK2B
  Gene Name: protein tyrosine kinase 2 beta
  Uniprot ID: Q14289
  ENSP ID: ENSP00000332816
MSGVSEPLSRVKLGTLRRPEGPAEPMVVVPVDVEKEDVRILKVCFYSNSFNPGKNFKLVKCTVQTEIREIITSILLSGRIGPNIRLAECYGLRLKHMKSDEIHWLHPQMTVGEVQDKYECLHVEAEWRYDLQIRYLPEDFMESLKEDRTTLLYFYQQLRNDYMQRYASKVSEGMALQLGCLELRRFFKDMPHNALDKKSNFELLEKEVGLDLFFPKQMQENLKPKQFRKMIQQTFQQYASLREEECVMKFFNTLAGFANIDQETYRCELIQGWNITVDLVIGPKGIRQLTSQDAKPTCLAEFKQIRSIRCLPLEEGQAVLQLGIEGAPQALSIKTSSLAEAENMADLIDGYCRLQGEHQGSLIIHPRKDGEKRNSLPQIPMLNLEARRSHLSESCSIESDIYAEIPDETLRRPGGPQYGIAREDVVLNRILGEGFFGEVYEGVYTNHKGEKINVAVKTCKKDCTLDNKEKFMSEAVIMKNLDHPHIVKLIGIIEEEPTWIIMELYPYGELGHYLERNKNSLKVLTLVLYSLQICKAMAYLESINCVHRDIAVRNILVASPECVKLGDFGLSRYIEDEDYYKASVTRLPIKWMSPESINFRRFTTASDVWMFAVCMWEILSFGKQPFFWLENKDVIGVLEKGDRLPKPDLCPPVLYTLMTRCWDYDPSDRPRFTELVCSLSDVYQMEKDIAMEQERNARYRTPKILEPTAFQEPPPKPSRPKYRPPPQTNLLAPKLQFQVPEGLCASSPTLTSPMEYPSPVNSLHTPPLHRHNVFKRHSMREEDFIQPSSREEAQQLWEAEKVKMRQILDKQQKQMVEDYQWLRQEEKSLDPMVYMNDKSPLTPEKEVGYLEFTGPPQKPPRLGAQSIQPTANLDRTDDLVYLNVMELVRAVLELKNELCQLPPEGYVVVVKNVGLTLRKLIGSVDDLLPSLPSSSRTEIEGTQKLLNKDLAELINKMRLAQQNAVTSLSEECKRQMLTASHTLAVDAKNLLDAVDQAKVLANLAHPPAE

SEQ ID NO: 69078 - protein, 596 aa, Homo sapiens
  Payload ID: 13730
  Gene Symbol: PTK2B
  Gene Name: protein tyrosine kinase 2 beta
  ENSP ID: ENSP00000380634
MGRTALEQQSTLLLFQQGWNITVDLVIGPKGIRQLTSQDAKPTCLAEFKQIRSIRCLPLEEGQAVLQLGIEGAPQALSIKTSSLAEAENMADLIDGYCRLQGEHQGSLIIHPRKDGEKRNSLPQIPMLNLEARRSHLSESCSIESDIYAEIPDETLRRPGGPQYGIAREDVVLNRILGEGFFGEVYEGVYTNHKGEKINVAVKTCKKDCTLDNKEKFMSEAVIMKNLDHPHIVKLIGIIEEEPTWIIMELYPYGELGHYLERNKNSLKVLTLVLYSLQICKAMAYLESINCVHRDIAVRNILVASPECVKLGDFGLSRYIEDEDYYKASVTRLPIKWMSPESINFRRFTTASDVWMFAVCMWEILSFGKQPFFWLENKDVIGVLEKGDRLPKPDLCPPVLYTLMTRCWDYDPSDRPRFTELVCSLSDVYQMEKDIAMEQERNARYRTPKILEPTAFQEPPPKPSRPKYRPPPQTNLLAPKLQFQEEDFIQPSSREEAQQLWEAEKVKMRQILDKQQKQMVEDYQWLRQEEKSLDPMVYMNDKSPLTPEKEVGYRECSRPSSGGFLLAPCAEPPSLPTAQGREQRSLSAFPAASAMI

SEQ ID NO: 69079 - protein, 1009 aa, Homo sapiens; identical to SEQ ID NO: 69077
  Payload ID: 13730
  Gene Symbol: PTK2B
  Gene Name: protein tyrosine kinase 2 beta
  Uniprot ID: Q14289
  ENSP ID: ENSP00000380638

SEQ ID NO: 69080 - protein, 967 aa, Homo sapiens
  Payload ID: 13730
  Gene Symbol: PTK2B
  Gene Name: protein tyrosine kinase 2 beta
  Uniprot ID: Q14289
  ENSP ID: ENSP00000391995
MSGVSEPLSRVKLGTLRRPEGPAEPMVVVPVDVEKEDVRILKVCFYSNSFNPGKNFKLVKCTVQTEIREIITSILLSGRIGPNIRLAECYGLRLKHMKSDEIHWLHPQMTVGEVQDKYECLHVEAEWRYDLQIRYLPEDFMESLKEDRTTLLYFYQQLRNDYMQRYASKVSEGMALQLGCLELRRFFKDMPHNALDKKSNFELLEKEVGLDLFFPKQMQENLKPKQFRKMIQQTFQQYASLREEECVMKFFNTLAGFANIDQETYRCELIQGWNITVDLVIGPKGIRQLTSQDAKPTCLAEFKQIRSIRCLPLEEGQAVLQLGIEGAPQALSIKTSSLAEAENMADLIDGYCRLQGEHQGSLIIHPRKDGEKRNSLPQIPMLNLEARRSHLSESCSIESDIYAEIPDETLRRPGGPQYGIAREDVVLNRILGEGFFGEVYEGVYTNHKGEKINVAVKTCKKDCTLDNKEKFMSEAVIMKNLDHPHIVKLIGIIEEEPTWIIMELYPYGELGHYLERNKNSLKVLTLVLYSLQICKAMAYLESINCVHRDIAVRNILVASPECVKLGDFGLSRYIEDEDYYKASVTRLPIKWMSPESINFRRFTTASDVWMFAVCMWEILSFGKQPFFWLENKDVIGVLEKGDRLPKPDLCPPVLYTLMTRCWDYDPSDRPRFTELVCSLSDVYQMEKDIAMEQERNARYRTPKILEPTAFQEPPPKPSRPKYRPPPQTNLLAPKLQFQEEDFIQPSSREEAQQLWEAEKVKMRQILDKQQKQMVEDYQWLRQEEKSLDPMVYMNDKSPLTPEKEVGYLEFTGPPQKPPRLGAQSIQPTANLDRTDDLVYLNVMELVRAVLELKNELCQLPPEGYVVVVKNVGLTLRKLIGSVDDLLPSLPSSSRTEIEGTQKLLNKDLAELINKMRLAQQNAVTSLSEECKRQMLTASHTLAVDAKNLLDAVDQAKVLANLAHPPAE

SEQ ID NO: 69081 - protein, 213 aa, Homo sapiens
  Payload ID: 13730
  Gene Symbol: PTK2B
  Gene Name: protein tyrosine kinase 2 beta
  ENSP ID: ENSP00000416174
MSGVSEPLSRVKLGTLRRPEGPAEPMVVVPVDVEKEDVRILKVCFYSNSFNPGKNFKLVKCTVQTEIREIITSILLSGRIGPNIRLAECYGLRLKHMKSDEIHWLHPQMTVGEVQDKYECLHVEAEWRYDLQIRYLPEDFMESLKEDRTTLLYFYQQLRNDYMQRYASKVSEGMALQLGCLELRRFFKDMPHNALDKKSNFELLEKEVGLDLF

SEQ ID NO: 69082 - protein, 967 aa, Homo sapiens; identical to SEQ ID NO: 69080
  Payload ID: 13730
  Gene Symbol: PTK2B
  Gene Name: protein tyrosine kinase 2 beta
  Uniprot ID: Q14289
  ENSP ID: ENSP00000427931

SEQ ID NO: 69083 - protein, 184 aa, Homo sapiens
  Payload ID: 13730
  Gene Symbol: PTK2B
  Gene Name: protein tyrosine kinase 2 beta
  ENSP ID: ENSP00000428271
MSGVSEPLSRVKLGTLRRPEGPAEPMVVVPVDVEKEDVRILKVCFYSNSFNPGKNFKLVKCTVQTEIREIITSILLSGRIGPNIRLAECYGLRLKHMKSDEIHWLHPQMTVGEVQDKYECLHVEAEWRYDLQIRYLPEDFMESLKEDRTTLLYFYQQLRNDYMQRYASKVSEGMALQLGCLELR

SEQ ID NO: 69084 - protein, 194 aa, Homo sapiens
  Payload ID: 13730
  Gene Symbol: PTK2B
  Gene Name: protein tyrosine kinase 2 beta
  ENSP ID: ENSP00000428837
  MOD_RES (1)..(1): Any amino acid
XRKMIQQTFQQYASLREEECVMKFFNTLAGFANIDQETYRCELIQGWNITVDLVIGPKGIRQLTSQDAKPTCLAEFKQIRSIRCLPLEEGQAVLQLGIEGAPQALSIKTSSLAEAENMADLIDGYCRLQDGEKRNSLPQIPMLNLEARRSHLSESCSIESDIYAEIPDETLRRPGGPQYGIAREDVVLNRILGE

SEQ ID NO: 69085 - protein, 68 aa, Homo sapiens
  Payload ID: 13730
  Gene Symbol: PTK2B
  Gene Name: protein tyrosine kinase 2 beta
  ENSP ID: ENSP00000429694
MSGVSEPLSRVKLGTLRRPEGPAEPMVVVPVDVEKEDVRILKVCFYSNSFNPGKNFKLVKCTVQTEIR

SEQ ID NO: 69086 - protein, 103 aa, Homo sapiens
  Payload ID: 13730
  Gene Symbol: PTK2B
  Gene Name: protein tyrosine kinase 2 beta
  ENSP ID: ENSP00000430404
MSGVSEPLSRVKLGTLRRPEGPAEPMVVVPVDVEKEDVRILKVCFYSNSFNPGKNFKLVKCTVQTEIREIITSILLSGRIGPNIRLAECYGLRLKHMKSDEIH

SEQ ID NO: 69087 - protein, 134 aa, Homo sapiens
  Payload ID: 13731
  Gene Symbol: PTK6
  Gene Name: protein tyrosine kinase 6
  Uniprot ID: Q13882
  ENSP ID: ENSP00000217185
MVSRDQAHLGPKYVGLWDFKSRTDEELSFRAGDVFHVARKEEQWWWATLLDEAGGAVAQGYVPHNYLAERETVESEPAGHAGCAALQDLAACRGPAAPERGGVLPQPARACELPQGPEPVPRPAAGRALPEARA

SEQ ID NO: 69088 - protein, 451 aa, Homo sapiens
  Payload ID: 13731
  Gene Symbol: PTK6
  Gene Name: protein tyrosine kinase 6
  Uniprot ID: Q13882
  ENSP ID: ENSP00000442460
MVSRDQAHLGPKYVGLWDFKSRTDEELSFRAGDVFHVARKEEQWWWATLLDEAGGAVAQGYVPHNYLAERETVESEPWFFGCISRSEAVRRLQAEGNATGAFLIRVSEKPSADYVLSVRDTQAVRHYKIWRRAGGRLHLNEAVSFLSLPELVNYHRAQSLSHGLRLAAPCRKHEPEPLPHWDDWERPREEFTLCRKLGSGYFGEVFEGLWKDRVQVAIKVISRDNLLHQQMLQSEIQAMKKLRHKHILALYAVVSVGDPVYIITELMAKGSLLELLRDSDEKVLPVSELLDIAWQVAEGMCYLESQNYIHRDLAARNILVGENTLCKVGDFGLARLIKEDVYLSHDHNIPYKWTAPEALSRGHYSTKSDVWSFGILLHEMFSRGQVPYPGMSNHEAFLRVDAGYRMPCPLECPPSVHKLMLTCWCRDPEQRPCFKALRERLSSFTSYENPT

SEQ ID NO: 69089 - protein, 816 aa, Homo sapiens
  Payload ID: 13732
  Gene Symbol: PTK7
  Gene Name: protein tyrosine kinase 7 (inactive)
  Uniprot ID: Q13308
  ENSP ID: ENSP00000230418
MGAARGSPARPRRLPLLSVLLLPLLGGTQTAIVFIKQPSSQDALQGRRALLRCEVEAPGPVHVYWLLDGAPVQDTERRFAQGSSLSFAAVDRLQDSGTFQCVARDDVTGEEARSANASFNIKWIEAGPVVLKHPASEAEIQPQTQVTLRCHIDGHPRPTYQWFRDGTPLSDGQSNHTVSSKERNLTLRPAGPEHSGLYSCCAHSAFGQACSSQNFTLSIADESFARVVLAPQDVVVARYEEAMFHCQFSAQPPPSLQWLFEDETPITNRSRPPHLRRATVFANGSLLLTQVRPRNAGIYRCIGQGQRGPPIILEATLHLAEIEDMPLFEPRVFTAGSEERVTCLPPKGLPEPSVWWEHAGVRLPTHGRVYQKGHELVLANIAESDAGVYTCHAANLAGQRRQDVNITVATVPSWLKKPQDSQLEEGKPGYLDCLTQATPKPTVVWYRNQMLISEDSRFEVFKNGTLRINSVEVYDGTWYRCMSSTPAGSIEAQARVQVLEKLKFTPPPQPQQCMEFDKEATVPCSATGREKPTIKWERADGSSLPEWVTDNAGTLHFARVTRDDAGNYTCIASNGPQGQIRAHVQLTVAVFITFKVEPERTTVYQGHTALLQCEAQGDPKPLIQWKGKDRILDPTKLGPRMHIFQNGSLVIHDVAPEDSGRYTCIAGNSCNIKHTEAPLYVVDKPVPEESEGPGSPPPYKMIQTIGLSVGAAVAYIIAVLGLMFYCKKRCKAKRLQKQPEGEEPEMECLNGGPLQNGQPSAEIQEEVALTSLGSGPAATNKRHSTSDKMHFPRSSLQPITTLGRPQAVPEDFQEQG

SEQ ID NO: 69090 - protein, 1070 aa, Homo sapiens
  Payload ID: 13732
  Gene Symbol: PTK7
  Gene Name: protein tyrosine kinase 7 (inactive)
  Uniprot ID: Q13308
  ENSP ID: ENSP00000230419
MGAARGSPARPRRLPLLSVLLLPLLGGTQTAIVFIKQPSSQDALQGRRALLRCEVEAPGPVHVYWLLDGAPVQDTERRFAQGSSLSFAAVDRLQDSGTFQCVARDDVTGEEARSANASFNIKWIEAGPVVLKHPASEAEIQPQTQVTLRCHIDGHPRPTYQWFRDGTPLSDGQSNHTVSSKERNLTLRPAGPEHSGLYSCCAHSAFGQACSSQNFTLSIADESFARVVLAPQDVVVARYEEAMFHCQFSAQPPPSLQWLFEDETPITNRSRPPHLRRATVFANGSLLLTQVRPRNAGIYRCIGQGQRGPPIILEATLHLAEIEDMPLFEPRVFTAGSEERVTCLPPKGLPEPSVWWEHAGVRLPTHGRVYQKGHELVLANIAESDAGVYTCHAANLAGQRRQDVNITVATVPSWLKKPQDSQLEEGKPGYLDCLTQATPKPTVVWYRNQMLISEDSRFEVFKNGTLRINSVEVYDGTWYRCMSSTPAGSIEAQARVQVLEKLKFTPPPQPQQCMEFDKEATVPCSATGREKPTIKWERADGSSLPEWVTDNAGTLHFARVTRDDAGNYTCIASNGPQGQIRAHVQLTVAVFITFKVEPERTTVYQGHTALLQCEAQGDPKPLIQWKGKDRILDPTKLGPRMHIFQNGSLVIHDVAPEDSGRYTCIAGNSCNIKHTEAPLYVVDKPVPEESEGPGSPPPYKMIQTIGLSVGAAVAYIIAVLGLMFYCKKRCKAKRLQKQPEGEEPEMECLNGGPLQNGQPSAEIQEEVALTSLGSGPAATNKRHSTSDKMHFPRSSLQPITTLGKSEFGEVFLAKAQGLEEGVAETLVLVKSLQSKDEQQQLDFRRELEMFGKLNHANVVRLLGLCREAEPHYMVLEYVDLGDLKQFLRISKSKDEKLKSQPLSTKQKVALCTQVALGMEHLSNNRFVHKDLAARNCLVSAQRQVKVSALGLSKDVYNSEYYHFRQAWVPLRWMSPEAILEGDFSTKSDVWAFGVLMWEVFTHGEMPHGGQADDEVLADLQAGKARLPQPEGCPSKLYRLMQRCWALSPKDRPSFSEIASALGDSTVDSKP

SEQ ID NO: 69091 - protein, 940 aa, Homo sapiens
  Payload ID: 13732
  Gene Symbol: PTK7
  Gene Name: protein tyrosine kinase 7 (inactive)
  Uniprot ID: Q13308
  ENSP ID: ENSP00000325462
MGAARGSPARPRRLPLLSVLLLPLLGGTQTAIVFIKQPSSQDALQGRRALLRCEVEAPGPVHVYWLLDGAPVQDTERRFAQGSSLSFAAVDRLQDSGTFQCVARDDVTGEEARSANASFNIKWIEAGPVVLKHPASEAEIQPQTQVTLRCHIDGHPRPTYQWFRDGTPLSDGQSNHTVSSKERNLTLRPAGPEHSGLYSCCAHSAFGQACSSQNFTLSIADESFARVVLAPQDVVVARYEEAMFHCQFSAQPPPSLQWLFEDETPITNRSRPPHLRRATVFANGSLLLTQVRPRNAGIYRCIGQGQRGPPIILEATLHLAEIEDMPLFEPRVFTAGSEERVTCLPPKGLPEPSVWWEHAGVRLPTHGRVYQKGHELVLANIAESDAGVYTCHAANLAGQRRQDVNITVANGSSLPEWVTDNAGTLHFARVTRDDAGNYTCIASNGPQGQIRAHVQLTVAVFITFKVEPERTTVYQGHTALLQCEAQGDPKPLIQWKGKDRILDPTKLGPRMHIFQNGSLVIHDVAPEDSGRYTCIAGNSCNIKHTEAPLYVVDKPVPEESEGPGSPPPYKMIQTIGLSVGAAVAYIIAVLGLMFYCKKRCKAKRLQKQPEGEEPEMECLNGGPLQNGQPSAEIQEEVALTSLGSGPAATNKRHSTSDKMHFPRSSLQPITTLGKSEFGEVFLAKAQGLEEGVAETLVLVKSLQSKDEQQQLDFRRELEMFGKLNHANVVRLLGLCREAEPHYMVLEYVDLGDLKQFLRISKSKDEKLKSQPLSTKQKVALCTQVALGMEHLSNNRFVHKDLAARNCLVSAQRQVKVSALGLSKDVYNSEYYHFRQAWVPLRWMSPEAILEGDFSTKSDVWAFGVLMWEVFTHGEMPHGGQADDEVLADLQAGKARLPQPEGCPSKLYRLMQRCWALSPKDRPSFSEIASALGDSTVDSKP

SEQ ID NO: 69092 - protein, 1030 aa, Homo sapiens
  Payload ID: 13732
  Gene Symbol: PTK7
  Gene Name: protein tyrosine kinase 7 (inactive)
  Uniprot ID: Q13308
  ENSP ID: ENSP00000325992
MGAARGSPARPRRLPLLSVLLLPLLGGTQTAIVFIKQPSSQDALQGRRALLRCEVEAPGPVHVYWLLDGAPVQDTERRFAQGSSLSFAAVDRLQDSGTFQCVARDDVTGEEARSANASFNIKWIEAGPVVLKHPASEAEIQPQTQVTLRCHIDGHPRPTYQWFRDGTPLSDGQSNHTVSSKERNLTLRPAGPEHSGLYSCCAHSAFGQACSSQNFTLSIADESFARVVLAPQDVVVARYEEAMFHCQFSAQPPPSLQWLFEDETPITNRSRPPHLRRATVFANGSLLLTQVRPRNAGIYRCIGQGQRGPPIILEATLHLAEIEDMPLFEPRVFTAGSEERVTCLPPKGLPEPSVWWEHAGVRLPTHGRVYQKGHELVLANIAESDAGVYTCHAANLAGQRRQDVNITVATVPSWLKKPQDSQLEEGKPGYLDCLTQATPKPTVVWYRNQMLISEDSRFEVFKNGTLRINSVEVYDGTWYRCMSSTPAGSIEAQARVQVLDGSSLPEWVTDNAGTLHFARVTRDDAGNYTCIASNGPQGQIRAHVQLTVAVFITFKVEPERTTVYQGHTALLQCEAQGDPKPLIQWKGKDRILDPTKLGPRMHIFQNGSLVIHDVAPEDSGRYTCIAGNSCNIKHTEAPLYVVDKPVPEESEGPGSPPPYKMIQTIGLSVGAAVAYIIAVLGLMFYCKKRCKAKRLQKQPEGEEPEMECLNGGPLQNGQPSAEIQEEVALTSLGSGPAATNKRHSTSDKMHFPRSSLQPITTLGKSEFGEVFLAKAQGLEEGVAETLVLVKSLQSKDEQQQLDFRRELEMFGKLNHANVVRLLGLCREAEPHYMVLEYVDLGDLKQFLRISKSKDEKLKSQPLSTKQKVALCTQVALGMEHLSNNRFVHKDLAARNCLVSAQRQVKVSALGLSKDVYNSEYYHFRQAWVPLRWMSPEAILEGDFSTKSDVWAFGVLMWEVFTHGEMPHGGQADDEVLADLQAGKARLPQPEGCPSKLYRLMQRCWALSPKDRPSFSEIASALGDSTVDSKP

SEQ ID NO: 69093 - protein, 1014 aa, Homo sapiens
  Payload ID: 13732
  Gene Symbol: PTK7
  Gene Name: protein tyrosine kinase 7 (inactive)
  Uniprot ID: Q13308
  ENSP ID: ENSP00000326029
MGAARGSPARPRRLPLLSVLLLPLLGGTQTAIVFIKQPSSQDALQGRRALLRCEVEAPGPVHVYWLLDGAPVQDTERRFAQGSSLSFAAVDRLQDSGTFQCVARDDVTGEEARSANASFNIKWIEAGPVVLKHPASEAEIQPQTQVTLRCHIDGHPRPTYQWFRDGTPLSDGQSNHTVSSKERNLTLRPAGPEHSGLYSCCAHSAFGQACSSQNFTLSIADESFARVVLAPQDVVVARYEEAMFHCQFSAQPPPSLQWLFEDETPITNRSRPPHLRRATVFANGSLLLTQVRPRNAGIYRCIGQGQRGPPIILEATLHLAEIEDMPLFEPRVFTAGSEERVTCLPPKGLPEPSVWWEHAGVRLPTHGRVYQKGHELVLANIAESDAGVYTCHAANLAGQRRQDVNITVATVPSWLKKPQDSQLEEGKPGYLDCLTQATPKPTVVWYRNQMLISEDSRFEVFKNGTLRINSVEVYDGTWYRCMSSTPAGSIEAQARVQVLEKLKFTPPPQPQQCMEFDKEATVPCSATGREKPTIKWERADGSSLPEWVTDNAGTLHFARVTRDDAGNYTCIASNGPQGQIRAHVQLTVAVFITFKVEPERTTVYQGHTALLQCEAQGDPKPLIQWKDKPVPEESEGPGSPPPYKMIQTIGLSVGAAVAYIIAVLGLMFYCKKRCKAKRLQKQPEGEEPEMECLNGGPLQNGQPSAEIQEEVALTSLGSGPAATNKRHSTSDKMHFPRSSLQPITTLGKSEFGEVFLAKAQGLEEGVAETLVLVKSLQSKDEQQQLDFRRELEMFGKLNHANVVRLLGLCREAEPHYMVLEYVDLGDLKQFLRISKSKDEKLKSQPLSTKQKVALCTQVALGMEHLSNNRFVHKDLAARNCLVSAQRQVKVSALGLSKDVYNSEYYHFRQAWVPLRWMSPEAILEGDFSTKSDVWAFGVLMWEVFTHGEMPHGGQADDEVLADLQAGKARLPQPEGCPSKLYRLMQRCWALSPKDRPSFSEIASALGDSTVDSKP

SEQ ID NO: 69094 - protein, 139 aa, Homo sapiens
  Payload ID: 13732
  Gene Symbol: PTK7
  Gene Name: protein tyrosine kinase 7 (inactive)
  ENSP ID: ENSP00000417607
MGAARGSPARPRRLPLLSVLLLPLLGGTQTAIVFIKQPSSQDALQGRRALLRCEVEAPGPVHVYWLLDGAPVQDTERRFAQGSSLSFAAVDRLQDSGTFQCVARDDVTGEEARSANASFNIKCESQGGCAQSPCQTLND

SEQ ID NO: 69095 - protein, 84 aa, Homo sapiens
  Payload ID: 13732
  Gene Symbol: PTK7
  Gene Name: protein tyrosine kinase 7 (inactive)
  ENSP ID: ENSP00000418386
MVARVSGLIVTLLSSSFPGGPLQNGQPSAEIQEEVALTSLGSGPAATNKRHSTSDKMHFPRSSLQPITTLGRPQAVPEDFQEQG

SEQ ID NO: 69096 - protein, 25 aa, Homo sapiens
  Payload ID: 13732
  Gene Symbol: PTK7
  Gene Name: protein tyrosine kinase 7 (inactive)
  ENSP ID: ENSP00000418462
  MOD_RES (1)..(1): Any amino acid
XEHGTEAIFVAAVGIRPSHHAAAQS

SEQ ID NO: 69097 - protein, 25 aa, Homo sapiens
  Payload ID: 13732
  Gene Symbol: PTK7
  Gene Name: protein tyrosine kinase 7 (inactive)
  ENSP ID: ENSP00000418545
TEHGTEAIFVAAVGIRPSHHAAAQS

SEQ ID NO: 69098 - protein, 1078 aa, Homo sapiens
  Payload ID: 13732
  Gene Symbol: PTK7
  Gene Name: protein tyrosine kinase 7 (inactive)
  Uniprot ID: Q13308
  ENSP ID: ENSP00000418754
MGSFLSGEKRPSAPTVGSAMEKKEFPTPPGRVGPGTQTAIVFIKQPSSQDALQGRRALLRCEVEAPGPVHVYWLLDGAPVQDTERRFAQGSSLSFAAVDRLQDSGTFQCVARDDVTGEEARSANASFNIKWIEAGPVVLKHPASEAEIQPQTQVTLRCHIDGHPRPTYQWFRDGTPLSDGQSNHTVSSKERNLTLRPAGPEHSGLYSCCAHSAFGQACSSQNFTLSIADESFARVVLAPQDVVVARYEEAMFHCQFSAQPPPSLQWLFEDETPITNRSRPPHLRRATVFANGSLLLTQVRPRNAGIYRCIGQGQRGPPIILEATLHLAEIEDMPLFEPRVFTAGSEERVTCLPPKGLPEPSVWWEHAGVRLPTHGRVYQKGHELVLANIAESDAGVYTCHAANLAGQRRQDVNITVATVPSWLKKPQDSQLEEGKPGYLDCLTQATPKPTVVWYRNQMLISEDSRFEVFKNGTLRINSVEVYDGTWYRCMSSTPAGSIEAQARVQVLEKLKFTPPPQPQQCMEFDKEATVPCSATGREKPTIKWERADGSSLPEWVTDNAGTLHFARVTRDDAGNYTCIASNGPQGQIRAHVQLTVAVFITFKVEPERTTVYQGHTALLQCEAQGDPKPLIQWKGKDRILDPTKLGPRMHIFQNGSLVIHDVAPEDSGRYTCIAGNSCNIKHTEAPLYVVDKPVPEESEGPGSPPPYKMIQTIGLSVGAAVAYIIAVLGLMFYCKKRCKAKRLQKQPEGEEPEMECLNGGPLQNGQPSAEIQEEVALTSLGSGPAATNKRHSTSDKMHFPRSSLQPITTLGKSEFGEVFLAKAQGLEEGVAETLVLVKSLQSKDEQQQLDFRRELEMFGKLNHANVVRLLGLCREAEPHYMVLEYVDLGDLKQFLRISKSKDEKLKSQPLSTKQKVALCTQVALGMEHLSNNRFVHKDLAARNCLVSAQRQVKVSALGLSKDVYNSEYYHFRQAWVPLRWMSPEAILEGDFSTKSDVWAFGVLMWEVFTHGEMPHGGQADDEVLADLQAGKARLPQPEGCPSKLYRLMQRCWALSPKDRPSFSEIASALGDSTVDSKP

SEQ ID NO: 69099 - protein, 459 aa, Homo sapiens
  Payload ID: 13732
  Gene Symbol: PTK7
  Gene Name: protein tyrosine kinase 7 (inactive)
  ENSP ID: ENSP00000419037
MGAARGSPARPRRLPLLSVLLLPLLGGTQTAIVFIKQPSSQDALQGRRALLRCEVEAPGPVHVYWLLDGAPVQDTERRFAQGSSLSFAAVDRLQDSGTFQCVARDDVTGEEARSANASFNIKWIEAGPVVLKHPASEAEIQPQTQVTLRCHIDGHPRPTYQWFRDGTPLSDGQSNHTVSSKERNLTLRPAGPEHSGLYSCCAHSAFGQACSSQNFTLSIADESFARVVLAPQDVVVARYEEAMFHCQFSAQPPPSLQWLFEDETPITNRSRPPHLRRATVFANGSLLLTQVRPRNAGIYRCIGQGQRGPPIILEATLHLAEIEDMPLFEPRVFTAGSEERVTCLPPKGLPEPSVWWEHAGVRLPTHGRVYQKGHELVLANIAESDAGVYTCHAANLAGQRRQDVNITVASEHLCPEGQGEVEGNTGLGVMDRGFPGTHLRSSQFWALQAWESVHYWESV

SEQ ID NO: 69100 - protein, 25 aa, Homo sapiens
  Payload ID: 13732
  Gene Symbol: PTK7
  Gene Name: protein tyrosine kinase 7 (inactive)
  ENSP ID: ENSP00000419096
TEHGTEAIFVAAVGIRPSHHAAAQS

SEQ ID NO: 69101 - protein, 269 aa, Homo sapiens
  Payload ID: 13732
  Gene Symbol: PTK7
  Gene Name: protein tyrosine kinase 7 (inactive)
  ENSP ID: ENSP00000420165
FSAQPPPSLQWLFEDETPITNRSRPPHLRRATVFANGSLLLTQVRPRNAGIYRCIGQGQRGPPIILEATLHLAEIEDMPLFEPRVFTAGSEERVTCLPPKGLPEPSVWWEHAGVRLPTHGRVYQKGHELVLANIAESDAGVYTCHAANLAGQRRQDVNITVASEHLCPEGQGEVEGNTGLGVMDRGFPAVPSWLKKPQDSQLEEGKPGYLDCLTQATPKPTVVWYRNQMLISEDSRFEVFKNGTLRINSVEVYDGTWYRCMSSTPAGSI

SEQ ID NO: 69102 - protein, 257 aa, Homo sapiens
  Payload ID: 13732
  Gene Symbol: PTK7
  Gene Name: protein tyrosine kinase 7 (inactive)
  ENSP ID: ENSP00000420186
MVARVSGLIVTLLSSSFPGGPLQNGQPSAEIQEEVALTSLGSGPAATNKRHSTSDKMHFPRSSLQPITTLGKSEFGEVFLAKAQGLEEGVAETLVLVKSLQSKDEQQQLDFRRELEMFGKLNHANVVRLLGLCREAEPHYMVLEYVDLGDLKQFLRISKSKDEKLKSQPLSTKQKVALCTQVALGMEHLSNNRFVHKDLAARNCLVSAQRQVKVSALGLSKDVYNSEYYHFRQAWVPLRWMSPEAILEGDFSTKSDV

SEQ ID NO: 69103 - protein, 157 aa, Homo sapiens
  Payload ID: 13732
  Gene Symbol: PTK7
  Gene Name: protein tyrosine kinase 7 (inactive)
  ENSP ID: ENSP00000420322
MGAARGSPARPRRLPLLSVLLLPLLGGTQTAIVFIKQPSSQDALQGRRALLRCEVEAPGPVHVYWLLDGAPVQDTERRFAQGSSLSFAAVDRLQDSGTFQCVARDDVTGEEARSANASFNIKWIEAGPVVLKHPASEAEIQPQTQVTLRCHIDGHPR

SEQ ID NO: 69104 - protein, 365 aa, Homo sapiens
  Payload ID: 13732
  Gene Symbol: PTK7
  Gene Name: protein tyrosine kinase 7 (inactive)
  ENSP ID: ENSP00000420765
  MOD_RES (1)..(1): Any amino acid
XEHAGVRLPTHGRVYQKGHELVLANIAESDAGVYTCHAANLAGQRRQDVNITVATVPSWLKKPQDSQLEEGKPGYLDCLTQATPKPTVVWYRNQMLISEDSRFEVFLAKAQGLEEGVAETLVLVKSLQSKDEQQQLDFRRELEMFGKLNHANVVRLLGLCREAEPHYMVLEYVDLGDLKQFLRISKSKDEKLKSQPLSTKQKVALCTQVALGMEHLSNNRFVHKDLAARNCLVSAQRQVKVSALGLSKDVYNSEYYHFRQAWVPLRWMSPEAILEGDFSTKSDVWAFGVLMWEVFTHGEMPHGGQADDEVLADLQAGKARLPQPEGCPSKLYRLMQRCWALSPKDRPSFSEIASALGDSTVDSKP

SEQ ID NO: 69105 - protein, 806 aa, Homo sapiens
  Payload ID: 13733
  Gene Symbol: PTPDC1
  Gene Name: protein tyrosine phosphatase domain containing 1
  Uniprot ID: A2A3K4
  ENSP ID: ENSP00000288976
MQVQDATRRPSAVRFLSSFLQGRRHSTSDPVLRLQQARRGSGLGSGSATKLLSSSSLQVMVAVSSVSHAEGNPTFPERKRNLERPTPKYTKVGERLRHVIPGHMACSMACGGRACKYENPARWSEQEQAIKGVYSSWVTDNILAMARPSSELLEKYHIIDQFLSHGIKTIINLQRPGEHASCGNPLEQESGFTYLPEAFMEAGIYFYNFGWKDYGVASLTTILDMVKVMTFALQEGKVAIHCHAGLGRTGVLIACYLVFATRMTADQAIIFVRAKRPNSIQTRGQLLCVREFTQFLTPLRNIFSCCDPKAHAVTLPQYLIRQRHLLHGYEARLLKHVPKIIHLVCKLLLDLAENRPVMMKDVSEGPGLSAEIEKTMSEMVTMQLDKELLRHDSDVSNPPNPTAVAADFDNRGMIFSNEQQFDPLWKRRNVECLQPLTHLKRRLSYSDSDLKRAENLLEQGETPQTVPAQILVGHKPRQQKLISHCYIPQSPEPDLHKEALVRSTLSFWSQSKFGGLEGLKDNGSPIFHGRIIPKEAQQSGAFSADVSGSHSPGEPVSPSFANVHKDPNPAHQQVSHCQCKTHGVGSPGSVRQNSRTPRSPLDCGSSPKAQFLVEHETQDSKDLSEAASHSALQSELSAEARRILAAKALANLNESVEKEELKRKVEMWQKELNSRDGAWERICGERDPFILCSLMWSWVEQLKEPVITKEDVDMLVDRRADAAEALFLLEKGQHQTILCVLHCIVNLQTIPVDVEEAFLAHAIKAFTKVNFDSENGPTVYNTLKKIFKHTLEEKRKMTKDGPKPGL

SEQ ID NO: 69106 - protein, 754 aa, Homo sapiens
  Payload ID: 13733
  Gene Symbol: PTPDC1
  Gene Name: protein tyrosine phosphatase domain containing 1
  Uniprot ID: A2A3K4
  ENSP ID: ENSP00000364509
MAAGVLPQNEQPYSTLVNNSECVANMKGNLERPTPKYTKVGERLRHVIPGHMACSMACGGRACKYENPARWSEQEQAIKGVYSSWVTDNILAMARPSSELLEKYHIIDQFLSHGIKTIINLQRPGEHASCGNPLEQESGFTYLPEAFMEAGIYFYNFGWKDYGVASLTTILDMVKVMTFALQEGKVAIHCHAGLGRTGVLIACYLVFATRMTADQAIIFVRAKRPNSIQTRGQLLCVREFTQFLTPLRNIFSCCDPKAHAVTLPQYLIRQRHLLHGYEARLLKHVPKIIHLVCKLLLDLAENRPVMMKDVSEGPGLSAEIEKTMSEMVTMQLDKELLRHDSDVSNPPNPTAVAADFDNRGMIFSNEQQFDPLWKRRNVECLQPLTHLKRRLSYSDSDLKRAENLLEQGETPQTVPAQILVGHKPRQQKLISHCYIPQSPEPDLHKEALVRSTLSFWSQSKFGGLEGLKDNGSPIFHGRIIPKEAQQSGAFSADVSGSHSPGEPVSPSFANVHKDPNPAHQQVSHCQCKTHGVGSPGSVRQNSRTPRSPLDCGSSPKAQFLVEHETQDSKDLSEAASHSALQSELSAEARRILAAKALANLNESVEKEELKRKVEMWQKELNSRDGAWERICGERDPFILCSLMWSWVEQLKEPVITKEDVDMLVDRRADAAEALFLLEKGQHQTILCVLHCIVNLQTIPVDVEEAFLAHAIKAFTKVNFDSENGPTVYNTLKKIFKHTLEEKRKMTKDGPKPGL

SEQ ID NO: 69107 - protein, 808 aa, Homo sapiens
  Payload ID: 13733
  Gene Symbol: PTPDC1
  Gene Name: protein tyrosine phosphatase domain containing 1
  ENSP ID: ENSP00000477817
MQVQDATRRPSAVRFLSSFLQGRRHSTSDPVLRLQQARRGSGLGSGSATKLLSSSSLQVMVAVSSVSHAEGNPTFPERKSKGNLERPTPKYTKVGERLRHVIPGHMACSMACGGRACKYENPARWSEQEQAIKGVYSSWVTDNILAMARPSSELLEKYHIIDQFLSHGIKTIINLQRPGEHASCGNPLEQESGFTYLPEAFMEAGIYFYNFGWKDYGVASLTTILDMVKVMTFALQEGKVAIHCHAGLGRTGVLIACYLVFATRMTADQAIIFVRAKRPNSIQTRGQLLCVREFTQFLTPLRNIFSCCDPKAHAVTLPQYLIRQRHLLHGYEARLLKHVPKIIHLVCKLLLDLAENRPVMMKDVSEGPGLSAEIEKTMSEMVTMQLDKELLRHDSDVSNPPNPTAVAADFDNRGMIFSNEQQFDPLWKRRNVECLQPLTHLKRRLSYSDSDLKRAENLLEQGETPQTVPAQILVGHKPRQQKLISHCYIPQSPEPDLHKEALVRSTLSFWSQSKFGGLEGLKDNGSPIFHGRIIPKEAQQSGAFSADVSGSHSPGEPVSPSFANVHKDPNPAHQQVSHCQCKTHGVGSPGSVRQNSRTPRSPLDCGSSPKAQFLVEHETQDSKDLSEAASHSALQSELSAEARRILAAKALANLNESVEKEELKRKVEMWQKELNSRDGAWERICGERDPFILCSLMWSWVEQLKEPVITKEDVDMLVDRRADAAEALFLLEKGQHQTILCVLHCIVNLQTIPVDVEEAFLAHAIKAFTKVNFDSENGPTVYNTLKKIFKHTLEEKRKMTKDGPKPGL

SEQ ID NO: 69108 - protein, 173 aa, Homo sapiens
  Payload ID: 13734
  Gene Symbol: PTP4A1
  Gene Name: protein tyrosine phosphatase type IVA, member 1
  Uniprot ID: Q93096
  ENSP ID: ENSP00000359685
MARMNRPAPVEVTYKNMRFLITHNPTNATLNKFIEELKKYGVTTIVRVCEATYDTTLVEKEGIHVLDWPFDDGAPPSNQIVDDWLSLVKIKFREEPGCCIAVHCVAGLGRAPVLVALALIEGGMKYEDAVQFIRQKRRGAFNSKQLLYLEKYRPKMRLRFKDSNGHRNNCCIQ

SEQ ID NO: 69109 - protein, 44 aa, Homo sapiens
  Payload ID: 13734
  Gene Symbol: PTP4A1
  Gene Name: protein tyrosine phosphatase type IVA, member 1
  ENSP ID: ENSP00000462406
MIRPQSSMSKHIPQFCGVLGHTFMEFLKGSGDYCQAQHDLYADK

SEQ ID NO: 69110 - protein, 173 aa, Homo sapiens; identical to SEQ ID NO: 69108
  Payload ID: 13734
  Gene Symbol: PTP4A1
  Gene Name: protein tyrosine phosphatase type IVA, member 1
  Uniprot ID: Q93096
  ENSP ID: ENSP00000485687

SEQ ID NO: 69111 - protein, 148 aa, Homo sapiens
  Payload ID: 13734
  Gene Symbol: PTP4A1
  Gene Name: protein tyrosine phosphatase type IVA, member 1
  ENSP ID: ENSP00000487586
MARMNRPAPVEVTYKNMRFLITHNPTNATLNKFIEELKKYGVTTIVRVCEATYDTTLVEKEGIHVLDWPFDDGAPPSNQIVDDWLSLVKIKFREEPGCCIAVHCVAGLGRKRRGAFNSKQLLYLEKYRPKMRLRFKDSNGHRNNCCIQ

SEQ ID NO: 69112 - protein, 167 aa, Homo sapiens
  Payload ID: 13735
  Gene Symbol: PTP4A2
  Gene Name: protein tyrosine phosphatase type IVA, member 2
  Uniprot ID: Q12974
  ENSP ID: ENSP00000344909
MNRPAPVEISYENMRFLITHNPTNATLNKFTEELKKYGVTTLVRVCDATYDKAPVEKEGIHVLDWPFDDGAPPPNQIVDDWLNLLKTKFREEPGCCVAVHCVAGLGRAPVLVALALIECGMKYEDAVQFIRQKRRGAFNSKQLLYLEKYRPKMRLRFRDTNGHCCVQ

SEQ ID NO: 69113 - protein, 136 aa, Homo sapiens
  Payload ID: 13735
  Gene Symbol: PTP4A2
  Gene Name: protein tyrosine phosphatase type IVA, member 2
  Uniprot ID: Q12974
  ENSP ID: ENSP00000409260
MNRPAPVEISYENMRFLITHNPTNATLNKFTEDWPFDDGAPPPNQIVDDWLNLLKTKFREEPGCCVAVHCVAGLGRAPVLVALALIECGMKYEDAVQFIRQKRRGAFNSKQLLYLEKYRPKMRLRFRDTNGHCCVQ

SEQ ID NO: 69114 - protein, 66 aa, Homo sapiens
  Payload ID: 13735
  Gene Symbol: PTP4A2
  Gene Name: protein tyrosine phosphatase type IVA, member 2
  ENSP ID: ENSP00000433050
MNRPAPVEISYENMRFLITHNPTNATLNKFTEELKKYGVTTLVRVCDATYDKAPVEKEGIHVLMAE

SEQ ID NO: 69115 - protein, 22 aa, Homo sapiens
  Payload ID: 13735
  Gene Symbol: PTP4A2
  Gene Name: protein tyrosine phosphatase type IVA, member 2
  ENSP ID: ENSP00000433375
MNRPAPVEISYENMRFLITHNP

SEQ ID NO: 69116 - protein, 69 aa, Homo sapiens
  Payload ID: 13735
  Gene Symbol: PTP4A2
  Gene Name: protein tyrosine phosphatase type IVA, member 2
  ENSP ID: ENSP00000433800
MNRPAPVEISYENMRFLITHNPTNATLNKFTEELKKYGVTTLVRVCDATYDKAPVEKEGIHVLVHFREY

SEQ ID NO: 69117 - protein, 73 aa, Homo sapiens
  Payload ID: 13735
  Gene Symbol: PTP4A2
  Gene Name: protein tyrosine phosphatase type IVA, member 2
  ENSP ID: ENSP00000435941
MNRPAPVEISYENMRFLITHNPTNATLNKFTEELKKYGVTTLVRVCDATYDKAPVEKEGIHVLGTCAGCTCFD

SEQ ID NO: 69118 - protein, 63 aa, Homo sapiens
  Payload ID: 13735
  Gene Symbol: PTP4A2
  Gene Name: protein tyrosine phosphatase type IVA, member 2
  ENSP ID: ENSP00000437251
MNRPAPVEISYENMRFLITHNPTNATLNKFTEELKKYGVTTLVRVCDATYDKAPVEKEGIHVL

SEQ ID NO: 69119 - protein, 167 aa, Homo sapiens; identical to SEQ ID NO: 69112
  Payload ID: 13735
  Gene Symbol: PTP4A2
  Gene Name: protein tyrosine phosphatase type IVA, member 2
  Uniprot ID: Q12974
  ENSP ID: ENSP00000473259

SEQ ID NO: 69120 - protein, 142 aa, Homo sapiens
  Payload ID: 13735
  Gene Symbol: PTP4A2
  Gene Name: protein tyrosine phosphatase type IVA, member 2
  Uniprot ID: Q12974
  ENSP ID: ENSP00000473490
MNRPAPVEISYENMRFLITHNPTNATLNKFTEELKKYGVTTLVRVCDATYDKAPVEKEGIHVLDWPFDDGAPPPNQIVDDWLNLLKTKFREEPGCCVAVHCVAGLGRKRRGAFNSKQLLYLEKYRPKMRLRFRDTNGHCCVQ

SEQ ID NO: 69121 - protein, 69 aa, Homo sapiens; identical to SEQ ID NO: 69116
  Payload ID: 13735
  Gene Symbol: PTP4A2
  Gene Name: protein tyrosine phosphatase type IVA, member 2
  ENSP ID: ENSP00000486151

SEQ ID NO: 69122 - protein, 66 aa, Homo sapiens; identical to SEQ ID NO: 69114
  Payload ID: 13735
  Gene Symbol: PTP4A2
  Gene Name: protein tyrosine phosphatase type IVA, member 2
  ENSP ID: ENSP00000486246

SEQ ID NO: 69123 - protein, 148 aa, Homo sapiens
  Payload ID: 13736
  Gene Symbol: PTP4A3
  Gene Name: protein tyrosine phosphatase type IVA, member 3
  Uniprot ID: O75365
  ENSP ID: ENSP00000331730
MARMNRPAPVEVSYKHMRFLITHNPTNATLSTFIEDLKKYGATTVVRVCEVTYDKTPLEKDGITVVDWPFDDGAPPPGKVVEDWLSLVKAKFCEAPGSCVAVHCVAGLGRKRRGAINSKQLTYLEKYRPKQRLRFKDPHTHKTRCCVM

SEQ ID NO: 69124 - protein, 173 aa, Homo sapiens
  Payload ID: 13736
  Gene Symbol: PTP4A3
  Gene Name: protein tyrosine phosphatase type IVA, member 3
  Uniprot ID: O75365
  ENSP ID: ENSP00000332274
MARMNRPAPVEVSYKHMRFLITHNPTNATLSTFIEDLKKYGATTVVRVCEVTYDKTPLEKDGITVVDWPFDDGAPPPGKVVEDWLSLVKAKFCEAPGSCVAVHCVAGLGRAPVLVALALIESGMKYEDAIQFIRQKRRGAINSKQLTYLEKYRPKQRLRFKDPHTHKTRCCVM

SEQ ID NO: 69125 - protein, 70 aa, Homo sapiens
  Payload ID: 13736
  Gene Symbol: PTP4A3
  Gene Name: protein tyrosine phosphatase type IVA, member 3
  ENSP ID: ENSP00000428725
MARMNRPAPVEVSYKHMRFLITHNPTNATLSTFIEDLKKYGATTVVRVCEVTYDKTPLEKDGITVVDWPF

SEQ ID NO: 69126 - protein, 148 aa, Homo sapiens; identical to SEQ ID NO: 69123
  Payload ID: 13736
  Gene Symbol: PTP4A3
  Gene Name: protein tyrosine phosphatase type IVA, member 3
  Uniprot ID: O75365
  ENSP ID: ENSP00000428758

SEQ ID NO: 69127 - protein, 173 aa, Homo sapiens; identical to SEQ ID NO: 69124
  Payload ID: 13736
  Gene Symbol: PTP4A3
  Gene Name: protein tyrosine phosphatase type IVA, member 3
  Uniprot ID: O75365
  ENSP ID: ENSP00000428976

SEQ ID NO: 69128 - protein, 87 aa, Homo sapiens
  Payload ID: 13736
  Gene Symbol: PTP4A3
  Gene Name: protein tyrosine phosphatase type IVA, member 3
  ENSP ID: ENSP00000430332
MARMNRPAPVEVSYKHMRFLITHNPTNATLSTFIESGMKYEDAIQFIRQKRRGAINSKQLTYLEKYRPKQRLRFKDPHTHKTRCCVM

SEQ ID NO: 69129 - protein, 148 aa, Homo sapiens; identical to SEQ ID NO: 69123
  Payload ID: 13736
  Gene Symbol: PTP4A3
  Gene Name: protein tyrosine phosphatase type IVA, member 3
  Uniprot ID: O75365
  ENSP ID: ENSP00000481205

SEQ ID NO: 69130 - protein, 173 aa, Homo sapiens; identical to SEQ ID NO: 69124
  Payload ID: 13736
  Gene Symbol: PTP4A3
  Gene Name: protein tyrosine phosphatase type IVA, member 3
  Uniprot ID: O75365
  ENSP ID: ENSP00000484500

SEQ ID NO: 69131 - protein, 173 aa, Homo sapiens; identical to SEQ ID NO: 69124
  Payload ID: 13736
  Gene Symbol: PTP4A3
  Gene Name: protein tyrosine phosphatase type IVA, member 3
  Uniprot ID: O75365
  ENSP ID: ENSP00000487595

SEQ ID NO: 69132 - protein, 148 aa, Homo sapiens; identical to SEQ ID NO: 69123
  Payload ID: 13736
  Gene Symbol: PTP4A3
  Gene Name: protein tyrosine phosphatase type IVA, member 3
  Uniprot ID: O75365
  ENSP ID: ENSP00000487610

SEQ ID NO: 69133 - protein, 70 aa, Homo sapiens; identical to SEQ ID NO: 69125
  Payload ID: 13736
  Gene Symbol: PTP4A3
  Gene Name: protein tyrosine phosphatase type IVA, member 3
  ENSP ID: ENSP00000487861

SEQ ID NO: 69134 - protein, 137 aa, Homo sapiens
  Payload ID: 13737
  Gene Symbol: PTPMT1
  Gene Name: protein tyrosine phosphatase, mitochondrial 1
  Uniprot ID: Q8WUK0
  ENSP ID: ENSP00000325882
MAATALLEAGLARVLFYPTLLYTLFRGKVPGRAHRDWYHRIDPTVLLGALPLRSLTRQLVQDENVRGVITMNEEYETRFLCNSSQVHKWSPEEAVRAIAKIRSYIHIRPGQLDVLKEFHKQITARATKDGTFVISKT

SEQ ID NO: 69135 - protein, 201 aa, Homo sapiens
  Payload ID: 13737
  Gene Symbol: PTPMT1
  Gene Name: protein tyrosine phosphatase, mitochondrial 1
  Uniprot ID: Q8WUK0
  ENSP ID: ENSP00000325958
MAATALLEAGLARVLFYPTLLYTLFRGKVPGRAHRDWYHRIDPTVLLGALPLRSLTRQLVQDENVRGVITMNEEYETRFLCNSSQEWKRLGVEQLRLSTVDMTGIPTLDNLQKGVQFALKYQSLGQCVYVHCKAGRSRSATMVAAYLIQVHKWSPEEAVRAIAKIRSYIHIRPGQLDVLKEFHKQITARATKDGTFVISKT

SEQ ID NO: 69136 - protein, 151 aa, Homo sapiens
  Payload ID: 13737
  Gene Symbol: PTPMT1
  Gene Name: protein tyrosine phosphatase, mitochondrial 1
  Uniprot ID: Q8WUK0
  ENSP ID: ENSP00000410272
MAATALLEAGLARVLFYPTLLYTLFRGKVPGRAHRDWYHRIDPTVLLGALPLRSLTRQVSRAGEPGPLPRPRRSVPVGPLGSPPSLLSHLFASAAGTGRERARGDHHERGVRDEVPVQLFTGAQMESRGGCKSHRQDPVIHPHQAWPAGCS

SEQ ID NO: 69137 - protein, 168 aa, Homo sapiens
  Payload ID: 13737
  Gene Symbol: PTPMT1
  Gene Name: protein tyrosine phosphatase, mitochondrial 1
  ENSP ID: ENSP00000436160
MAATALLEAGLARVLFYPTLLYTLFRGKVPGRAHRDWYHRIDPTVLLGALPLRSLTRQVSRAGEPGPLPRPRRSVPVGPLGSPPSLLSHLFASAAGTGRERARGDHHERGVRDEVPVQLFTGVEETRSRAAAAQHSRHDWDPHLGQPPEGSPICSQVPVAGPVCLRAL

SEQ ID NO: 69138 - protein, 435 aa, Homo sapiens
  Payload ID: 13738
  Gene Symbol: PTPN1
  Gene Name: protein tyrosine phosphatase, non-receptor type 1
  Uniprot ID: P18031
  ENSP ID: ENSP00000360683
MEMEKEFEQIDKSGSWAAIYQDIRHEASDFPCRVAKLPKNKNRNRYRDVSPFDHSRIKLHQEDNDYINASLIKMEEAQRSYILTQGPLPNTCGHFWEMVWEQKSRGVVMLNRVMEKGSLKCAQYWPQKEEKEMIFEDTNLKLTLISEDIKSYYTVRQLELENLTTQETREILHFHYTTWPDFGVPESPASFLNFLFKVRESGSLSPEHGPVVVHCSAGIGRSGTFCLADTCLLLMDKRKDPSSVDIKKVLLEMRKFRMGLIQTADQLRFSYLAVIEGAKFIMGDSSVQDQWKELSHEDLEPPPEHIPPPPRPPKRILEPHNGKCREFFPNHQWVKEETQEDKDCPIKEEKGSPLNAAPYGIESMSQDTEVRSRVVGGSLRGAQAASPAKGEPSLPEKDEDHALSYWKPFLVNMCVATVLTAGAYLCYRFLFNSNT

SEQ ID NO: 69139 - protein, 362 aa, Homo sapiens
  Payload ID: 13738
  Gene Symbol: PTPN1
  Gene Name: protein tyrosine phosphatase, non-receptor type 1
  ENSP ID: ENSP00000437732
MEEAQRSYILTQGPLPNTCGHFWEMVWEQKSRGVVMLNRVMEKGSLKCAQYWPQKEEKEMIFEDTNLKLTLISEDIKSYYTVRQLELENLTTQETREILHFHYTTWPDFGVPESPASFLNFLFKVRESGSLSPEHGPVVVHCSAGIGRSGTFCLADTCLLLMDKRKDPSSVDIKKVLLEMRKFRMGLIQTADQLRFSYLAVIEGAKFIMGDSSVQDQWKELSHEDLEPPPEHIPPPPRPPKRILEPHNGKCREFFPNHQWVKEETQEDKDCPIKEEKGSPLNAAPYGIESMSQDTEVRSRVVGGSLRGAQAASPAKGEPSLPEKDEDHALSYWKPFLVNMCVATVLTAGAYLCYRFLFNSNT

SEQ ID NO: 69140 - protein, 593 aa, Homo sapiens [sequence omitted]

SEQ ID NO: 69141 - protein, 460 aa, Homo sapiens
  Payload ID: 13739
  Gene Symbol: PTPN11
  Gene Name: protein tyrosine phosphatase, non-receptor type 11
  Uniprot ID: Q06124
  ENSP ID: ENSP00000376376
MTSRRWFHPNITGVEAENLLLTRGVDGSFLARPSKSNPGDFTLSVRRNGAVTHIKIQNTGDYYDLYGGEKFATLAELVQYYMEHHGQLKEKNGDVIELKYPLNCADPTSERWFHGHLSGKEAEKLLTEKGKHGSFLVRESQSHPGDFVLSVRTGDDKGESNDGKSKVTHVMIRCQELKYDVGGGERFDSLTDLVEHYKKNPMVETLGTVLQLKQPLNTTRINAAEIESRVRELSKLAETTDKVKQGFWEEFETLQQQECKLLYSRKEGQRQENKNKNRYKNILPFDHTRVVLHDGDPNEPVSDYINANIIMPEFETKCNNSKPKKSYIATQGCLQNTVNDFWRMVFQENSRVIVMTTKEVERGKSKCVKYWPDEYALKEYGVMRVRNVKESAAHDYTLRELKLSKVGQGNTERTVWQYHFRTWPDHGVPSDPGGVLDFLEEVHHKQESIMDAGPVVVHCR

SEQ ID NO: 69142 - protein, 108 aa, Homo sapiens
  Payload ID: 13739
  Gene Symbol: PTPN11
  Gene Name: protein tyrosine phosphatase, non-receptor type 11
  ENSP ID: ENSP00000437013
  MOD_RES (1)..(1): Any amino acid
XKGESNDGKSKVTHVMIRCQELKYDVGGGERFDSLTDLVEHYKKNPMVETLGTVLQLKQPLNTTRINAAEIESRVRELSKLAETTDKVKQGFWEEFEFAENDGFQLHP

SEQ ID NO: 69143 - protein, 196 aa, Homo sapiens
  Payload ID: 13739
  Gene Symbol: PTPN11
  Gene Name: protein tyrosine phosphatase, non-receptor type 11
  ENSP ID: ENSP00000489541
TVNDFWRMVFQENSRVIVMTTKEVERGKSKCVKYWPDEYALKEYGVMRVRNVKESAAHDYTLRELKLSKVGQFFLALLQGNTERTVWQYHFRTWPDHGVPSDPGGVLDFLEEVHHKQESIMDAGPVVVHCSAGIGRTGTFIVIDILIDIIREKGVDCDIDVPKTIQMVRSQRSGMVQTEAQYRFIYMAVQHYIETL

SEQ ID NO: 69144 - protein, 597 aa, Homo sapiens
  Payload ID: 13739
  Gene Symbol: PTPN11
  Gene Name: protein tyrosine phosphatase, non-receptor type 11
  ENSP ID: ENSP00000489597
MTSRRWFHPNITGVEAENLLLTRGVDGSFLARPSKSNPGDFTLSVRRNGAVTHIKIQNTGDYYDLYGGEKFATLAELVQYYMEHHGQLKEKNGDVIELKYPLNCADPTSERWFHGHLSGKEAEKLLTEKGKHGSFLVRESQSHPGDFVLSVRTGDDKGESNDGKSKVTHVMIRCQELKYDVGGGERFDSLTDLVEHYKKNPMVETLGTVLQLKQPLNTTRINAAEIESRVRELSKLAETTDKVKQGFWEEFETLQQQECKLLYSRKEGQRQENKNKNRYKNILPFDHTRVVLHDGDPNEPVSDYINANIIMPEFETKCNNSKPKKSYIATQGCLQNTVNDFWRMVFQENSRVIVMTTKEVERGKSKCVKYWPDEYALKEYGVMRVRNVKESAAHDYTLRELKLSKVGQALLQGNTERTVWQYHFRTWPDHGVPSDPGGVLDFLEEVHHKQESIMDAGPVVVHCSAGIGRTGTFIVIDILIDIIREKGVDCDIDVPKTIQMVRSQRSGMVQTEAQYRFIYMAVQHYIETLQRRIEEEQKSKRKGHEYTNIKYSLADQTSGDQSPLPPCTPTPPCAEMREDSARVYENVGLMQQQKSFR

SEQ ID NO: 69145 - protein, 780 aa, Homo sapiens
  Payload ID: 13740
  Gene Symbol: PTPN12
  Gene Name: protein tyrosine phosphatase, non-receptor type 12
  Uniprot ID: Q05209
  ENSP ID: ENSP00000248594
MEQVEILRKFIQRVQAMKSPDHNGEDNFARDFMRLRRLSTKYRTEKIYPTATGEKEENVKKNRYKDILPFDHSRVKLTLKTPSQDSDYINANFIKGVYGPKAYVATQGPLANTVIDFWRMIWEYNVVIIVMACREFEMGRKKCERYWPLYGEDPITFAPFKISCEDEQARTDYFIRTLLLEFQNESRRLYQFHYVNWPDHDVPSSFDSILDMISLMRKYQEHEDVPICIHCSAGCGRTGAICAIDYTWNLLKAGKIPEEFNVFNLIQEMRTQRHSAVQTKEQYELVHRAIAQLFEKQLQLYEIHGAQKIADGVNEINTENMVSSIEPEKQDSPPPKPPRTRSCLVEGDAKEEILQPPEPHPVPPILTPSPPSAFPTVTTVWQDNDRYHPKPVLHMVSSEQHSADLNRNYSKSTELPGKNESTIEQIDKKLERNLSFEIKKVPLQEGPKSFDGNTLLNRGHAIKIKSASPCIADKISKPQELSSDLNVGDTSQNSCVDCSVTQSNKVSVTPPEESQNSDTPPRPDRLPLDEKGHVTWSFHGPENAIPIPDLSEGNSSDINYQTRKTVSLTPSPTTQVETPDLVDHDNTSPLFRTPLSFTNPLHSDDSDSDERNSDGAVTQNKTNISTASATVSAATSTESISTRKVLPMSIARHNIAGTTHSGAEKDVDVSEDSPPPLPERTPESFVLASEHNTPVRSEWSELQSQERSEQKKSEGLITSENEKCDHPAGGIHYEMCIECPPTFSDKREQISENPTEATDIGFGNRCGKPKGPRDPPSEWT

SEQ ID NO: 69146 - protein, 234 aa, Homo sapiens
  Payload ID: 13740
  Gene Symbol: PTPN12
  Gene Name: protein tyrosine phosphatase, non-receptor type 12
  ENSP ID: ENSP00000385079
NSCVDCSVTQSNKVSVTPPEESQNSDTPPRPDRLPLDEKGHVTWSFHGPENAIPIPDLSEGNSSDINYQTRKTVSLTPSPTTQVETPDLVDHDNTSPLFRTPLSFTNPLHSDDSDSDERNSDGAVTQNKTNISTASATVSAATSTESISTRKVLPMSIARHNIAGTTHSGAEKDTPVRSEWSELQSQERSEQKKSEGLITSENEKCDHPAGGIHYEMCIECPPTFSDKREQISE

SEQ ID NO: 69147 - protein, 661 aa, Homo sapiens
  Payload ID: 13740
  Gene Symbol: PTPN12
  Gene Name: protein tyrosine phosphatase, non-receptor type 12
  Uniprot ID: Q05209
  ENSP ID: ENSP00000392429
MIWEYNVVIIVMACREFEMGRKKCERYWPLYGEDPITFAPFKISCEDEQARTDYFIRTLLLEFQNESRRLYQFHYVNWPDHDVPSSFDSILDMISLMRKYQEHEDVPICIHCSAGCGRTGAICAIDYTWNLLKAGKIPEEFNVFNLIQEMRTQRHSAVQTKEQYELVHRAIAQLFEKQLQLYEIHGAQKIADGVNEINTENMVSSIEPEKQDSPPPKPPRTRSCLVEGDAKEEILQPPEPHPVPPILTPSPPSAFPTVTTVWQDNDRYHPKPVLHMVSSEQHSADLNRNYSKSTELPGKNESTIEQIDKKLERNLSFEIKKVPLQEGPKSFDGNTLLNRGHAIKIKSASPCIADKISKPQELSSDLNVGDTSQNSCVDCSVTQSNKVSVTPPEESQNSDTPPRPDRLPLDEKGHVTWSFHGPENAIPIPDLSEGNSSDINYQTRKTVSLTPSPTTQVETPDLVDHDNTSPLFRTPLSFTNPLHSDDSDSDERNSDGAVTQNKTNISTASATVSAATSTESISTRKVLPMSIARHNIAGTTHSGAEKDVDVSEDSPPPLPERTPESFVLASEHNTPVRSEWSELQSQERSEQKKSEGLITSENEKCDHPAGGIHYEMCIECPPTFSDKREQISENPTEATDIGFGNRCGKPKGPRDPPSEWT

SEQ ID NO: 69148 - protein, 86 aa, Homo sapiens
  Payload ID: 13740
  Gene Symbol: PTPN12
  Gene Name: protein tyrosine phosphatase, non-receptor type 12
  ENSP ID: ENSP00000392526
MIWEYNVVIIVMACREFEMGRKKCERYWPLYGEDPITFAPFKISCEDEQARTDYFIRTLLLEFQNESRRLYQFHYVNWPDHDVPSS

SEQ ID NO: 69149 - protein, 113 aa, Homo sapiens
  Payload ID: 13740
  Gene Symbol: PTPN12
  Gene Name: protein tyrosine phosphatase, non-receptor type 12
  ENSP ID: ENSP00000397364
MIWEYNVVIIVMACREFEMGRKKCERYWPLYGEDPITFAPFKISCEDEQARTDYFIRTLLLEFQNESRRLYQFHYVNWPDHDVPSSFDSILDMISLMRKYQEHEDVPICIHCS

SEQ ID NO: 69150 - protein, 650 aa, Homo sapiens
  Payload ID: 13740
  Gene Symbol: PTPN12
  Gene Name: protein tyrosine phosphatase, non-receptor type 12
  Uniprot ID: Q05209
  ENSP ID: ENSP00000397991
MACREFEMGRKKCERYWPLYGEDPITFAPFKISCEDEQARTDYFIRTLLLEFQNESRRLYQFHYVNWPDHDVPSSFDSILDMISLMRKYQEHEDVPICIHCSAGCGRTGAICAIDYTWNLLKAGKIPEEFNVFNLIQEMRTQRHSAVQTKEQYELVHRAIAQLFEKQLQLYEIHGAQKIADGVNEINTENMVSSIEPEKQDSPPPKPPRTRSCLVEGDAKEEILQPPEPHPVPPILTPSPPSAFPTVTTVWQDNDRYHPKPVLHMVSSEQHSADLNRNYSKSTELPGKNESTIEQIDKKLERNLSFEIKKVPLQEGPKSFDGNTLLNRGHAIKIKSASPCIADKISKPQELSSDLNVGDTSQNSCVDCSVTQSNKVSVTPPEESQNSDTPPRPDRLPLDEKGHVTWSFHGPENAIPIPDLSEGNSSDINYQTRKTVSLTPSPTTQVETPDLVDHDNTSPLFRTPLSFTNPLHSDDSDSDERNSDGAVTQNKTNISTASATVSAATSTESISTRKVLPMSIARHNIAGTTHSGAEKDVDVSEDSPPPLPERTPESFVLASEHNTPVRSEWSELQSQERSEQKKSEGLITSENEKCDHPAGGIHYEMCIECPPTFSDKREQISENPTEATDIGFGNRCGKPKGPRDPPSEWT

SEQ ID NO: 69151 - protein, 45 aa, Homo sapiens
  Payload ID: 13740
  Gene Symbol: PTPN12
  Gene Name: protein tyrosine phosphatase, non-receptor type 12
  ENSP ID: ENSP00000404050
MIWEYNVVIIVMACREFEMGRKKCERYWPLYGEDPITFAPFKISC

SEQ ID NO: 69152 - protein, 17 aa, Homo sapiens
  Payload ID: 13740
  Gene Symbol: PTPN12
  Gene Name: protein tyrosine phosphatase, non-receptor type 12
  ENSP ID: ENSP00000413449
MIWEYNVVIIVMACREF

SEQ ID NO: 69153 - protein, 43 aa, Homo sapiens
  Payload ID: 13740
  Gene Symbol: PTPN12
  Gene Name: protein tyrosine phosphatase, non-receptor type 12
  ENSP ID: ENSP00000428735
  MOD_RES (1)..(1): Any amino acid
XVEILRKFIQRVQAMKSPDHNGEDNFARDFMMELCRPGWSAVV

SEQ ID NO: 69154 - protein, 214 aa, Homo sapiens
  Payload ID: 13740
  Gene Symbol: PTPN12
  Gene Name: protein tyrosine phosphatase, non-receptor type 12
  ENSP ID: ENSP00000430726
  MOD_RES (1)..(1): Any amino acid
XSTKYRTEKIYPTATGEKEENVKKNRYKDILPFDHSRVKLTLKTPSQDSDYINANFIKGVYGPKAYVATQGPLANTVIDFWRMIWEYNVVIIVMACREFEMGREDEQARTDYFIRTLLLEFQNESRRLYQFHYVNWPDHDVPSSFDSILDMISLMRKYQEHEDVPICIHCSAGCGRTGAICAIDYTWNLLKAGKIPEEFNVFNLIQEMRTQRHS

SEQ ID NO: 69155 - protein, 2294 aa, Homo sapiens
  Payload ID: 13741
  Gene Symbol: PTPN13
  Gene Name: protein tyrosine phosphatase, non-receptor type 13 (APO-1/CD95 (Fas)-associated phosphatase)
  Uniprot ID: Q12923
  ENSP ID: ENSP00000322675
MHVSLAEALEVRGGPLQEEEIWAVLNQSAESLQELFRKVSLADPAALGFIISPWSLLLLPSGSVSFTDENISNQDLRAFTAPEVLQNQSLTSLSDVEKIHIYSLGMTLYWGADYEVPQSQPIKLGDHLNSILLGMCEDVIYARVSVRTVLDACSAHIRNSNCAPSFSYVKHLVKLVLGNLSGTDQLSCNSEQKPDRSQAIRDRLRGKGLPTGRSSTSDVLDIQKPPLSHQTFLNKGLSKSMGFLSIKDTQDENYFKDILSDNSGREDSENTFSPYQFKTSGPEKKPIPGIDVLSKKKIWASSMDLLCTADRDFSSGETATYRRCHPEAVTVRTSTTPRKKEARYSDGSIALDIFGPQKMDPIYHTRELPTSSAISSALDRIRERQKKLQVLREAMNVEEPVRRYKTYHGDVFSTSSESPSIISSESDFRQVRRSEASKRFESSSGLPGVDETLSQGQSQRPSRQYETPFEGNLINQEIMLKRQEEELMQLQAKMALRQSRLSLYPGDTIKASMLDITRDPLREIALETAMTQRKLRNFFGPEFVKMTIEPFISLDLPRSILTKKGKNEDNRRKVNIMLLNGQRLELTCDTKTICKDVFDMVVAHIGLVEHHLFALATLKDNEYFFVDPDLKLTKVAPEGWKEEPKKKTKATVNFTLFFRIKFFMDDVSLIQHTLTCHQYYLQLRKDILEERMHCDDETSLLLASLALQAEYGDYQPEVHGVSYFRMEHYLPARVMEKLDLSYIKEELPKLHNTYVGASEKETELEFLKVCQRLTEYGVHFHRVHPEKKSQTGILLGVCSKGVLVFEVHNGVRTLVLRFPWRETKKISFSKKKITLQNTSDGIKHGFQTDNSKICQYLLHLCSYQHKFQLQMRARQSNQDAQDIDVLHKRWSIVSSPEREITLVNLKKDAKYGLGFQIIGGEKMGRLDLGIFISSVAPGGPADLDGCLKPGDRLISVNSVSLEGVSHHAAIEILQNAPEDVTLVISQPKEKISKVPSTPVHLTNEMKNYMKKSSYMQDSAIDSSSKDHHWSRGTLRHISENSFGPSGGLREGSLSSQDSRTESASLSQSQVNGFFASHLGDQTWQESQHGSPSPSVISKATEKETFTDSNQSKTKKPGISDVTDYSDRGDSDMDEATYSSSQDHQTPKQESSSSVNTSNKMNFKTFSSSPPKPGDIFEVELAKNDNSLGISVTGGVNTSVRHGGIYVKAVIPQGAAESDGRIHKGDRVLAVNGVSLEGATHKQAVETLRNTGQVVHLLLEKGQSPTSKEHVPVTPQCTLSDQNAQGQGPEKVKKTTQVKDYSFVTEENTFEVKLFKNSSGLGFSFSREDNLIPEQINASIVRVKKLFPGQPAAESGKIDVGDVILKVNGASLKGLSQQEVISALRGTAPEVFLLLCRPPPGVLPEIDTALLTPLQSPAQVLPNSSKDSSQPSCVEQSTSSDENEMSDKSKKQCKSPSRRDSYSDSSGSGEDDLVTAPANISNSTWSSALHQTLSNMVSQAQSHHEAPKSQEDTICTMFYYPQKIPNKPEFEDSNPSPLPPDMAPGQSYQPQSESASSSSMDKYHIHHISEPTRQENWTPLKNDLENHLEDFELEVELLITLIKSEKGSLGFTVTKGNQRIGCYVHDVIQDPAKSDGRLKPGDRLIKVNDTDVTNMTHTDAVNLLRAASKTVRLVIGRVLELPRIPMLPHLLPDITLTCNKEELGFSLCGGHDSLYQVVYISDINPRSVAAIEGNLQLLDVIHYVNGVSTQGMTLEEVNRALDMSLPSLVLKATRNDLPVVPSSKRSAVSAPKSTKGNGSYSVGSCSQPALTPNDSFSTVAGEEINEISYPKGKCSTYQIKGSPNLTLPKESYIQEDDIYDDSQEAEVIQSLLDVVDEEAQNLLNENNAAGYSCGPGTLKMNGKLSEERTEDTDCDGSPLPEYFTEATKMNGCEEYCEEKVKSESLIQKPQEKKTDDDEITWGNDELPIERTNHEDSDKDHSFLTNDELAVLPVVKVLPSGKYTGANLKSVIRVLRGLLDQGIPSKELENLQELKPLDQCLIGQTKENRRKNRYKNILPYDATRVPLGDEGGYINASFIKIPVGKEEFVYIACQGPLPTTVGDFWQMIWEQKSTVIAMMTQEVEGEKIKCQRYWPNILGKTTMVSNRLRLALVRMQQLKGFVVRAMTLEDIQTREVRHISHLNFTAWPDHDTPSQPDDLLTFISYMRHIHRSGPIITHCSAGIGRSGTLICIDVVLGLISQDLDFDISDLVRCMRLQRHGMVQTEDQYIFCYQVILYVLTRLQAEEEQKQQPQLLK

SEQ ID NO: 69156 - protein, 2490 aa, Homo sapiens
  Payload ID: 13741
  Gene Symbol: PTPN13
  Gene Name: protein tyrosine phosphatase, non-receptor type 13 (APO-1/CD95 (Fas)-associated phosphatase)
  Uniprot ID: Q12923
  ENSP ID: ENSP00000394794
MHVSLAEALEVRGGPLQEEEIWAVLNQSAESLQELFRKVSLADPAALGFIISPWSLLLLPSGSVSFTDENISNQDLRAFTAPEVLQNQSLTSLSDVEKIHIYSLGMTLYWGADYEVPQSQPIKLGDHLNSILLGMCEDVIYARVSVRTVLDACSAHIRNSNCAPSFSYVKHLVKLVLGNLSGTDQLSCNSEQKPDRSQAIRDRLRGKGLPTGRSSTSDVLDIQKPPLSHQTFLNKGLSKSMGFLSIKDTQDENYFKDILSDNSGREDSENTFSPYQFKTSGPEKKPIPGIDVLSKKKIWASSMDLLCTADRDFSSGETATYRRCHPEAVTVRTSTTPRKKEARYSDGSIALDIFGPQKMDPIYHTRELPTSSAISSALDRIRERQKKLQVLREAMNVEEPVRRYKTYHGDVFSTSSESPSIISSESDFRQVRRSEASKRFESSSGLPGVDETLSQGQSQRPSRQYETPFEGNLINQEIMLKRQEEELMQLQAKMALRQSRLSLYPGDTIKASMLDITRDPLREIALETAMTQRKLRNFFGPEFVKMTIEPFISLDLPRSILTKKGKNEDNRRKVNIMLLNGQRLELTCDTKTICKDVFDMVVAHIGLVEHHLFALATLKDNEYFFVDPDLKLTKVAPEGWKEEPKKKTKATVNFTLFFRIKFFMDDVSLIQHTLTCHQYYLQLRKDILEERMHCDDETSLLLASLALQAEYGDYQPEVHGVSYFRMEHYLPARVMEKLDLSYIKEELPKLHNTYVGASEKETELEFLKVCQRLTEYGVHFHRVHPEKKSQTGILLGVCSKGVLVFEVHNGVRTLVLRFPWRETKKISFSKKKITLQNTSDGIKHGFQTDNSKICQYLLHLCSYQHKFQLQMRARQSNQDAQDIERASFRSLNLQAESVRGFNMGRAISTGSLASSTLNKLAVRPLSVQAEILKRLSCSELSLYQPLQNSSKEKNDKASWEEKPREMSKSYHDLSQASLYPHRKNVIVNMEPPPQTVAELVGKPSHQMSRSDAESLAGVTKLNNSKSVASLNRSPERRKHESDSSSIEDPGQAYVLGMTMHSSGNSSSQVPLKENDVLHKRWSIVSSPEREITLVNLKKDAKYGLGFQIIGGEKMGRLDLGIFISSVAPGGPADLDGCLKPGDRLISVNSVSLEGVSHHAAIEILQNAPEDVTLVISQPKEKISKVPSTPVHLTNEMKNYMKKSSYMQDSAIDSSSKDHHWSRGTLRHISENSFGPSGGLREGSLSSQDSRTESASLSQSQVNGFFASHLGDQTWQESQHGSPSPSVISKATEKETFTDSNQSKTKKPGISDVTDYSDRGDSDMDEATYSSSQDHQTPKQESSSSVNTSNKMNFKTFSSSPPKPGDIFEVELAKNDNSLGISVTVLFDKGGVNTSVRHGGIYVKAVIPQGAAESDGRIHKGDRVLAVNGVSLEGATHKQAVETLRNTGQVVHLLLEKGQSPTSKEHVPVTPQCTLSDQNAQGQGPEKVKKTTQVKDYSFVTEENTFEVKLFKNSSGLGFSFSREDNLIPEQINASIVRVKKLFPGQPAAESGKIDVGDVILKVNGASLKGLSQQEVISALRGTAPEVFLLLCRPPPGVLPEIDTALLTPLQSPAQVLPNSSKDSSQPSCVEQSTSSDENEMSDKSKKQCKSPSRRDSYSDSSGSGEDDLVTAPANISNSTWSSALHQTLSNMVSQAQSHHEAPKSQEDTICTMFYYPQKIPNKPEFEDSNPSPLPPDMAPGQSYQPQSESASSSSMDKYHIHHISEPTRQENWTPLKNDLENHLEDFELEVELLITLIKSEKGSLGFTVTKGNQRIGCYVHDVIQDPAKSDGRLKPGDRLIKVNDTDVTNMTHTDAVNLLRAASKTVRLVIGRVLELPRIPMLPHLLPDITLTCNKEELGFSLCGGHDSLYQVVYISDINPRSVAAIEGNLQLLDVIHYVNGVSTQGMTLEEVNRALDMSLPSLVLKATRNDLPVVPSSKRSAVSAPKSTKGNGSYSVGSCSQPALTPNDSFSTVAGEEINEISYPKGKCSTYQIKGSPNLTLPKESYIQEDDIYDDSQEAEVIQSLLDVVDEEAQNLLNENNAAGYSCGPGTLKMNGKLSEERTEDTDCDGSPLPEYFTEATKMNGCEEYCEEKVKSESLIQKPQEKKTDDDEITWGNDELPIERTNHEDSDKDHSFLTNDELAVLPVVKVLPSGKYTGANLKSVIRVLRGLLDQGIPSKELENLQELKPLDQCLIGQTKENRRKNRYKNILPYDATRVPLGDEGGYINASFIKIPVGKEEFVYIACQGPLPTTVGDFWQMIWEQKSTVIAMMTQEVEGEKIKCQRYWPNILGKTTMVSNRLRLALVRMQQLKGFVVRAMTLEDIQTREVRHISHLNFTAWPDHDTPSQPDDLLTFISYMRHIHRSGPIITHCSAGIGRSGTLICIDVVLGLISQDLDFDISDLVRCMRLQRHGMVQTEDQYIFCYQVILYVLTRLQAEEEQKQQPQLLK

SEQ ID NO: 69157 - protein, 2485 aa, Homo sapiens
  Payload ID: 13741
  Gene Symbol: PTPN13
  Gene Name: protein tyrosine phosphatase, non-receptor type 13 (APO-1/CD95 (Fas)-associated phosphatase)
  Uniprot ID: Q12923
  ENSP ID: ENSP00000407249
MHVSLAEALEVRGGPLQEEEIWAVLNQSAESLQELFRKVSLADPAALGFIISPWSLLLLPSGSVSFTDENISNQDLRAFTAPEVLQNQSLTSLSDVEKIHIYSLGMTLYWGADYEVPQSQPIKLGDHLNSILLGMCEDVIYARVSVRTVLDACSAHIRNSNCAPSFSYVKHLVKLVLGNLSGTDQLSCNSEQKPDRSQAIRDRLRGKGLPTGRSSTSDVLDIQKPPLSHQTFLNKGLSKSMGFLSIKDTQDENYFKDILSDNSGREDSENTFSPYQFKTSGPEKKPIPGIDVLSKKKIWASSMDLLCTADRDFSSGETATYRRCHPEAVTVRTSTTPRKKEARYSDGSIALDIFGPQKMDPIYHTRELPTSSAISSALDRIRERQKKLQVLREAMNVEEPVRRYKTYHGDVFSTSSESPSIISSESDFRQVRRSEASKRFESSSGLPGVDETLSQGQSQRPSRQYETPFEGNLINQEIMLKRQEEELMQLQAKMALRQSRLSLYPGDTIKASMLDITRDPLREIALETAMTQRKLRNFFGPEFVKMTIEPFISLDLPRSILTKKGKNEDNRRKVNIMLLNGQRLELTCDTKTICKDVFDMVVAHIGLVEHHLFALATLKDNEYFFVDPDLKLTKVAPEGWKEEPKKKTKATVNFTLFFRIKFFMDDVSLIQHTLTCHQYYLQLRKDILEERMHCDDETSLLLASLALQAEYGDYQPEVHGVSYFRMEHYLPARVMEKLDLSYIKEELPKLHNTYVGASEKETELEFLKVCQRLTEYGVHFHRVHPEKKSQTGILLGVCSKGVLVFEVHNGVRTLVLRFPWRETKKISFSKKKITLQNTSDGIKHGFQTDNSKICQYLLHLCSYQHKFQLQMRARQSNQDAQDIERASFRSLNLQAESVRGFNMGRAISTGSLASSTLNKLAVRPLSVQAEILKRLSCSELSLYQPLQNSSKEKNDKASWEEKPREMSKSYHDLSQASLYPHRKNVIVNMEPPPQTVAELVGKPSHQMSRSDAESLAGVTKLNNSKSVASLNRSPERRKHESDSSSIEDPGQAYVLGMTMHSSGNSSSQVPLKENDVLHKRWSIVSSPEREITLVNLKKDAKYGLGFQIIGGEKMGRLDLGIFISSVAPGGPADLDGCLKPGDRLISVNSVSLEGVSHHAAIEILQNAPEDVTLVISQPKEKISKVPSTPVHLTNEMKNYMKKSSYMQDSAIDSSSKDHHWSRGTLRHISENSFGPSGGLREGSLSSQDSRTESASLSQSQVNGFFASHLGDQTWQESQHGSPSPSVISKATEKETFTDSNQSKTKKPGISDVTDYSDRGDSDMDEATYSSSQDHQTPKQESSSSVNTSNKMNFKTFSSSPPKPGDIFEVELAKNDNSLGISVTGGVNTSVRHGGIYVKAVIPQGAAESDGRIHKGDRVLAVNGVSLEGATHKQAVETLRNTGQVVHLLLEKGQSPTSKEHVPVTPQCTLSDQNAQGQGPEKVKKTTQVKDYSFVTEENTFEVKLFKNSSGLGFSFSREDNLIPEQINASIVRVKKLFPGQPAAESGKIDVGDVILKVNGASLKGLSQQEVISALRGTAPEVFLLLCRPPPGVLPEIDTALLTPLQSPAQVLPNSSKDSSQPSCVEQSTSSDENEMSDKSKKQCKSPSRRDSYSDSSGSGEDDLVTAPANISNSTWSSALHQTLSNMVSQAQSHHEAPKSQEDTICTMFYYPQKIPNKPEFEDSNPSPLPPDMAPGQSYQPQSESASSSSMDKYHIHHISEPTRQENWTPLKNDLENHLEDFELEVELLITLIKSEKGSLGFTVTKGNQRIGCYVHDVIQDPAKSDGRLKPGDRLIKVNDTDVTNMTHTDAVNLLRAASKTVRLVIGRVLELPRIPMLPHLLPDITLTCNKEELGFSLCGGHDSLYQVVYISDINPRSVAAIEGNLQLLDVIHYVNGVSTQGMTLEEVNRALDMSLPSLVLKATRNDLPVVPSSKRSAVSAPKSTKGNGSYSVGSCSQPALTPNDSFSTVAGEEINEISYPKGKCSTYQIKGSPNLTLPKESYIQEDDIYDDSQEAEVIQSLLDVVDEEAQNLLNENNAAGYSCGPGTLKMNGKLSEERTEDTDCDGSPLPEYFTEATKMNGCEEYCEEKVKSESLIQKPQEKKTDDDEITWGNDELPIERTNHEDSDKDHSFLTNDELAVLPVVKVLPSGKYTGANLKSVIRVLRGLLDQGIPSKELENLQELKPLDQCLIGQTKENRRKNRYKNILPYDATRVPLGDEGGYINASFIKIPVGKEEFVYIACQGPLPTTVGDFWQMIWEQKSTVIAMMTQEVEGEKIKCQRYWPNILGKTTMVSNRLRLALVRMQQLKGFVVRAMTLEDIQTREVRHISHLNFTAWPDHDTPSQPDDLLTFISYMRHIHRSGPIITHCSAGIGRSGTLICIDVVLGLISQDLDFDISDLVRCMRLQRHGMVQTEDQYIFCYQVILYVLTRLQAEEEQKQQPQLLK

SEQ ID NO: 69158 - protein, 2466 aa, Homo sapiens
  Payload ID: 13741
  Gene Symbol: PTPN13
  Gene Name: protein tyrosine phosphatase, non-receptor type 13 (APO-1/CD95 (Fas)-associated phosphatase)
  Uniprot ID: Q12923
  ENSP ID: ENSP00000408368
MHVSLAEALEVRGGPLQEEEIWAVLNQSAESLQELFRKVSLADPAALGFIISPWSLLLLPSGSVSFTDENISNQDLRAFTAPEVLQNQSLTSLSDVEKIHIYSLGMTLYWGADYEVPQSQPIKLGDHLNSILLGMCEDVIYARVSVRTVLDACSAHIRNSNCAPSFSYVKHLVKLVLGNLSGTDQLSCNSEQKPDRSQAIRDRLRGKGLPTGRSSTSDVLDIQKPPLSHQTFLNKGLSKSMGFLSIKDTQDENYFKDILSDNSGREDSENTFSPYQFKTSGPEKKPIPGIDVLSKKKIWASSMDLLCTADRDFSSGETATYRRCHPEAVTVRTSTTPRKKEARYSDGSIALDIFGPQKMDPIYHTRELPTSSAISSALDRIRERQKKLQVLREAMNVEEPVRRYKTYHGDVFSTSSESPSIISSESDFRQVRRSEASKRFESSSGLPGVDETLSQGQSQRPSRQYETPFEGNLINQEIMLKRQEEELMQLQAKMALRQSRLSLYPGDTIKASMLDITRDPLREIALETAMTQRKLRNFFGPEFVKMTIEPFISLDLPRSILTKKGKNEDNRRKVNIMLLNGQRLELTCDTKTICKDVFDMVVAHIGLVEHHLFALATLKDNEYFFVDPDLKLTKVAPEGWKEEPKKKTKATVNFTLFFRIKFFMDDVSLIQHTLTCHQYYLQLRKDILEERMHCDDETSLLLASLALQAEYGDYQPEVHGVSYFRMEHYLPARVMEKLDLSYIKEELPKLHNTYVGASEKETELEFLKVCQRLTEYGVHFHRVHPEKKSQTGILLGVCSKGVLVFEVHNGVRTLVLRFPWRETKKISFSKKKITLQNTSDGIKHGFQTDNSKICQYLLHLCSYQHKFQLQMRARQSNQDAQDIERASFRSLNLQAESVRGFNMGRAISTGSLASSTLNKLAVRPLSVQAEILKRLSCSELSLYQPLQNSSKEKNDKASWEEKPREMSKSYHDLSQASLYPHRKNVIVNMEPPPQTVAELVGKPSHQMSRSDAESLAGVTKLNNSKSVASLNRSPERRKHESDSSSIEDPGQAYVLDVLHKRWSIVSSPEREITLVNLKKDAKYGLGFQIIGGEKMGRLDLGIFISSVAPGGPADLDGCLKPGDRLISVNSVSLEGVSHHAAIEILQNAPEDVTLVISQPKEKISKVPSTPVHLTNEMKNYMKKSSYMQDSAIDSSSKDHHWSRGTLRHISENSFGPSGGLREGSLSSQDSRTESASLSQSQVNGFFASHLGDQTWQESQHGSPSPSVISKATEKETFTDSNQSKTKKPGISDVTDYSDRGDSDMDEATYSSSQDHQTPKQESSSSVNTSNKMNFKTFSSSPPKPGDIFEVELAKNDNSLGISVTGGVNTSVRHGGIYVKAVIPQGAAESDGRIHKGDRVLAVNGVSLEGATHKQAVETLRNTGQVVHLLLEKGQSPTSKEHVPVTPQCTLSDQNAQGQGPEKVKKTTQVKDYSFVTEENTFEVKLFKNSSGLGFSFSREDNLIPEQINASIVRVKKLFPGQPAAESGKIDVGDVILKVNGASLKGLSQQEVISALRGTAPEVFLLLCRPPPGVLPEIDTALLTPLQSPAQVLPNSSKDSSQPSCVEQSTSSDENEMSDKSKKQCKSPSRRDSYSDSSGSGEDDLVTAPANISNSTWSSALHQTLSNMVSQAQSHHEAPKSQEDTICTMFYYPQKIPNKPEFEDSNPSPLPPDMAPGQSYQPQSESASSSSMDKYHIHHISEPTRQENWTPLKNDLENHLEDFELEVELLITLIKSEKGSLGFTVTKGNQRIGCYVHDVIQDPAKSDGRLKPGDRLIKVNDTDVTNMTHTDAVNLLRAASKTVRLVIGRVLELPRIPMLPHLLPDITLTCNKEELGFSLCGGHDSLYQVVYISDINPRSVAAIEGNLQLLDVIHYVNGVSTQGMTLEEVNRALDMSLPSLVLKATRNDLPVVPSSKRSAVSAPKSTKGNGSYSVGSCSQPALTPNDSFSTVAGEEINEISYPKGKCSTYQIKGSPNLTLPKESYIQEDDIYDDSQEAEVIQSLLDVVDEEAQNLLNENNAAGYSCGPGTLKMNGKLSEERTEDTDCDGSPLPEYFTEATKMNGCEEYCEEKVKSESLIQKPQEKKTDDDEITWGNDELPIERTNHEDSDKDHSFLTNDELAVLPVVKVLPSGKYTGANLKSVIRVLRGLLDQGIPSKELENLQELKPLDQCLIGQTKENRRKNRYKNILPYDATRVPLGDEGGYINASFIKIPVGKEEFVYIACQGPLPTTVGDFWQMIWEQKSTVIAMMTQEVEGEKIKCQRYWPNILGKTTMVSNRLRLALVRMQQLKGFVVRAMTLEDIQTREVRHISHLNFTAWPDHDTPSQPDDLLTFISYMRHIHRSGPIITHCSAGIGRSGTLICIDVVLGLISQDLDFDISDLVRCMRLQRHGMVQTEDQYIFCYQVILYVLTRLQAEEEQKQQPQLLK

SEQ ID NO: 69159 - protein, 139 aa, Homo sapiens
  Payload ID: 13741
  Gene Symbol: PTPN13
  Gene Name: protein tyrosine phosphatase, non-receptor type 13 (APO-1/CD95 (Fas)-associated phosphatase)
  ENSP ID: ENSP00000422835
MHVSLAEALEVRGGPLQEEEIWAVLNQSAESLQELFRKVSLADPAALGFIISPWSLLLLPSGSVSFTDENISNQDLRAFTAPEVLQNQSLTSLSDVEKIHIYSLGMTLYWGADYEVPQSQPIKLGDHLNSILLGMCEDV

SEQ ID NO: 69160 - protein, 227 aa, Homo sapiens
  Payload ID: 13741
  Gene Symbol: PTPN13
  Gene Name: protein tyrosine phosphatase, non-receptor type 13 (APO-1/CD95 (Fas)-associated phosphatase)
  ENSP ID: ENSP00000423531
MHVSLAEALEVRGGPLQEEEIWAVLNQSAESLQELFRKVSLADPAALGFIISPWSLLLLPSGSVSFTDENISNQDLRAFTAPEVLQNQSLTSLSDVEKIHIYSLGMTLYWGADYEVPQSQPIKLGDHLNSILLGMCEDVIYARVSVRTVLDACSAHIRNSNCAPSFSYVKHLVKLVLGNLSGVFPKPSPLSLLLGTLLPSVSRESMLVSLPDFPKTWTLLVFLLFWI

SEQ ID NO: 69161 - protein, 2490 aa, Homo sapiens; identical to SEQ ID NO: 69156
  Payload ID: 13741
  Gene Symbol: PTPN13
  Gene Name: protein tyrosine phosphatase, non-receptor type 13 (APO-1/CD95 (Fas)-associated phosphatase)
  Uniprot ID: Q12923
  ENSP ID: ENSP00000426626

SEQ ID NO: 69162 - protein, 1187 aa, Homo sapiens
  Payload ID: 13742
  Gene Symbol: PTPN14
  Gene Name: protein tyrosine phosphatase, non-receptor type 14
  Uniprot ID: Q15678
  ENSP ID: ENSP00000355923
MPFGLKLRRTRRYNVLSKNCFVTRIRLLDSNVIECTLSVESTGQECLEAVAQRLELRETHYFGLWFLSKSQQARWVELEKPLKKHLDKFANEPLLFFGVMFYVPNVSWLQQEATRYQYYLQVKKDVLEGRLRCTLDQVIRLAGLAVQADFGDYNQFDSQDFLREYVLFPMDLALEEAVLEELTQKVAQEHKAHSGILPAEAELMYINEVERLDGFGQEIFPVKDNHGNCVHLGIFFMGIFVRNRIGRQAVIYRWNDMGNITHNKSTILVELINKEETALFHTDDIENAKYISRLFATRHKFYKQNKICTEQSNSPPPIRRQPTWSRSSLPRQQPYILPPVHVQCGEHYSETHTSQDSIFHGNEEALYCNSHNSLDLNYLNGTVTNGSVCSVHSVNSLNCSQSFIQASPVSSNLSIPGSDIMRADYIPSHRHSAIIVPSYRPTPDYETVMRQMKRGILHTDSQSQSLRNLNIINTHAYNQPEDLVYSQPEMRERHPYTVPYGPQGVYSNKLVSPSDQRNPKNNVVPSKPGASAISHTVSTPELANMQLQGSHNYSTAHMLKNYLFRPPPPYPRPRPATSTPDLASHRHKYVSGSSPDLVTRKVQLSVKTFQEDSSPVVHQSLQEVSEPLTATKHHGTVNKRHSLEVMNSMVRGMEAMTLKSLHLPMARRNTLREQGPPEEGSGSHEVPQLPQYHHKKTFSDATMLIHSSESEEEEEEAPESVPQIPMLREKMEYSAQLQAALARIPNKPPPEYPGPRKSVSNGALRQDQASLPPAMARARVLRHGPAKAISMSRTDPPAVNGASLGPSISEPDLTSVKERVKKEPVKERPVSEMFSLEDSIIEREMMIRNLEKQKMAGLEAQKRPLMLAALNGLSVARVSGREENRVDATRVPMDERFRTLKKKLEEGMVFTEYEQIPKKKANGIFSTAALPENAERSRIREVVPYEENRVELIPTKENNTGYINASHIKVVVGGAEWHYIATQGPLPHTCHDFWQMVWEQGVNVIAMVTAEEEGGRTKSHRYWPKLGSKHSSATYGKFKVTTKFRTDSVCYATTGLKVKHLLSGQERTVWHLQYTDWPDHGCPEDVQGFLSYLEEIQSVRRHTNSMLEGTKNRHPPIVVHCSAGVGRTGVLILSELMIYCLEHNEKVEVPMMLRLLREQRMFMIQTIAQYKFVYQVLIQFLQNSRLI

SEQ ID NO: 69163 - protein, 211 aa, Homo sapiens
  Payload ID: 13742
  Gene Symbol: PTPN14
  Gene Name: protein tyrosine phosphatase, non-receptor type 14
  ENSP ID: ENSP00000443330
MPFGLKLRRTRRYNVLSKNCFVTRIRLLDSNVIECTLSVESTGQECLEAVAQRLELRETHYFGLWFLSKSQQARWVELEKPLKKHLDKFANEPLLFFGVMFYVPNVSWLQQEATRYQYYLQVKKDVLEGRLRCTLDQVIRLAGLAVQADFGDYNQFDSQDFLREYVLFPMDLALEEAVLEELTQKVAQEHKAHRTIMETVYTLAFSLWGFS

SEQ ID NO: 69164 - protein, 460 aa, Homo sapiens
  Payload ID: 13743
  Gene Symbol: PTPN18
  Gene Name: protein tyrosine phosphatase, non-receptor type 18 (brain-derived)
  Uniprot ID: Q99952
  ENSP ID: ENSP00000175756
MSRSLDSARSFLERLEARGGREGAVLAGEFSDIQACSAAWKADGVCSTVAGSRPENVRKNRYKDVLPYDQTRVILSLLQEEGHSDYINGNFIRGVDGSLAYIATQGPLPHTLLDFWRLVWEFGVKVILMACREIENGRKRCERYWAQEQEPLQTGLFCITLIKEKWLNEDIMLRTLKVTFQKESRSVYQLQYMSWPDRGVPSSPDHMLAMVEEARRLQGSGPEPLCVHCSAGCGRTGVLCTVDYVRQLLLTQMIPPDFSLFDVVLKMRKQRPAAVQTEEQYRFLYHTVAQMFCSTLQNASPHYQNIKENCAPLYDDALFLRTPQALLAIPRPPGGVLRSISVPGSPGHAMADTYAVVQKRGAPAGAGSGTQTGTGTGTGARSAEEAPLYSKVTPRAQRPGAHAEDARGTLPGRVPADQSPAGSGAYEDVAGGAQTGGLGFNLRIGRPKGPRDPPAEWTRV

SEQ ID NO: 69165 - protein, 353 aa, Homo sapiens
  Payload ID: 13743
  Gene Symbol: PTPN18
  Gene Name: protein tyrosine phosphatase, non-receptor type 18 (brain-derived)
  Uniprot ID: Q99952
  ENSP ID: ENSP00000310092
MSRSLDSARSFLERLEARGGREGAVLAGEFSKRCERYWAQEQEPLQTGLFCITLIKEKWLNEDIMLRTLKVTFQKESRSVYQLQYMSWPDRGVPSSPDHMLAMVEEARRLQGSGPEPLCVHCSAGCGRTGVLCTVDYVRQLLLTQMIPPDFSLFDVVLKMRKQRPAAVQTEEQYRFLYHTVAQMFCSTLQNASPHYQNIKENCAPLYDDALFLRTPQALLAIPRPPGGVLRSISVPGSPGHAMADTYAVVQKRGAPAGAGSGTQTGTGTGTGARSAEEAPLYSKVTPRAQRPGAHAEDARGTLPGRVPADQSPAGSGAYEDVAGGAQTGGLGFNLRIGRPKGPRDPPAEWTRV

SEQ ID NO: 69166 - protein, 269 aa, Homo sapiens
  Payload ID: 13743
  Gene Symbol: PTPN18
  Gene Name: protein tyrosine phosphatase, non-receptor type 18 (brain-derived)
  ENSP ID: ENSP00000387031
  MOD_RES (1)..(1): Any amino acid
XDRGVPSSPDHMLAMVEEARRLQGSGPEPLCVHCSAGCGRTGVLCTVDYVRQLLLTQMIPPDFSLFDVVLKMRKQRPAAVQTEEQYRFLYHTVAQMFCSTLQNASPHYQNIKENCAPLYDDALFLRTPQALLAIPRPPGGVLRSISVPGSPGHAMADTYAVVQKRGAPAGAGSGTQTGTGTGTGARSAEEAPLYSKVTPRAQRPGAHAEDARGTLPGRVPADQSPAGSGAYEDVAGGAQTGGLGFNLRIGRPKGPRDPPAEWTRVSLDL

SEQ ID NO: 69167 - protein, 48 aa, Homo sapiens
  Payload ID: 13743
  Gene Symbol: PTPN18
  Gene Name: protein tyrosine phosphatase, non-receptor type 18 (brain-derived)
  ENSP ID: ENSP00000411750
MSRSLDSARSFLERLEARGGREGAVLAGEFSEGRGCSRAKRNTEAVAW

SEQ ID NO: 69168 - protein, 415 aa, Homo sapiens
  Payload ID: 13744
  Gene Symbol: PTPN2
  Gene Name: protein tyrosine phosphatase, non-receptor type 2
  Uniprot ID: P17706
  ENSP ID: ENSP00000311857
MPTTIEREFEELDTQRRWQPLYLEIRNESHDYPHRVAKFPENRNRNRYRDVSPYDHSRVKLQNAENDYINASLVDIEEAQRSYILTQGPLPNTCCHFWLMVWQQKTKAVVMLNRIVEKESVKCAQYWPTDDQEMLFKETGFSVKLLSEDVKSYYTVHLLQLENINSGETRTISHFHYTTWPDFGVPESPASFLNFLFKVRESGSLNPDHGPAVIHCSAGIGRSGTFSLVDTCLVLMEKGDDINIKQVLLNMRKYRMGLIQTPDQLRFSYMAIIEGAKCIKGDSSIQKRWKELSKEDLSPAFDHSPNKIMTEKYNGNRIGLEEEKLTGDRCTGLSSKMQDTMEENSESALRKRIREDRKATTAQKVQQMKQRLNENERKRKRWLYWQPILTKMGFMSVILVGAFVGWTLFFQQNAL

SEQ ID NO: 69169 - protein, 387 aa, Homo sapiens
  Payload ID: 13744
  Gene Symbol: PTPN2
  Gene Name: protein tyrosine phosphatase, non-receptor type 2
  Uniprot ID: P17706
  ENSP ID: ENSP00000320298
MPTTIEREFEELDTQRRWQPLYLEIRNESHDYPHRVAKFPENRNRNRYRDVSPYDHSRVKLQNAENDYINASLVDIEEAQRSYILTQGPLPNTCCHFWLMVWQQKTKAVVMLNRIVEKESVKCAQYWPTDDQEMLFKETGFSVKLLSEDVKSYYTVHLLQLENINSGETRTISHFHYTTWPDFGVPESPASFLNFLFKVRESGSLNPDHGPAVIHCSAGIGRSGTFSLVDTCLVLMEKGDDINIKQVLLNMRKYRMGLIQTPDQLRFSYMAIIEGAKCIKGDSSIQKRWKELSKEDLSPAFDHSPNKIMTEKYNGNRIGLEEEKLTGDRCTGLSSKMQDTMEENSESALRKRIREDRKATTAQKVQQMKQRLNENERKRKRPRLTDT

SEQ ID NO: 69170 - protein, 353 aa, Homo sapiens
  Payload ID: 13744
  Gene Symbol: PTPN2
  Gene Name: protein tyrosine phosphatase, non-receptor type 2
  Uniprot ID: P17706
  ENSP ID: ENSP00000320546
MPTTIEREFEELDTQRRWQPLYLEIRNESHDYPHRVAKFPENRNRNRYRDVSPYDHSRVKLQNAENDYINASLVDIEEAQRSYILTQGPLPNTCCHFWLMVWQQKTKAVVMLNRIVEKESVKCAQYWPTDDQEMLFKETGFSVKLLSEDVKSYYTVHLLQLENINSGETRTISHFHYTTWPDFGVPESPASFLNFLFKVRESGSLNPDHGPAVIHCSAGIGRSGTFSLVDTCLVLMEKGDDINIKQVLLNMRKYRMGLIQTPDQLRFSYMAIIEGAKCIKGDSSIQKRWKELSKEDLSPAFDHSPNKIMTEKYNGNRIGLEEEKLTGDRCTGLSSKMQDTMEENSERPRLTDT

SEQ ID NO: 69171 - protein, 151 aa, Homo sapiens
  Payload ID: 13744
  Gene Symbol: PTPN2
  Gene Name: protein tyrosine phosphatase, non-receptor type 2
  ENSP ID: ENSP00000464719
  MOD_RES (1)..(1): Any amino acid
XKYRMGLIQTPDQLRFSYMAIIEGAKCIKGDSSIQKRWKELSKEDLSPAFDHSPNKIMTEKYNGNRIGLEEEKLTGDRCTGLSSKMQDTMEENSESALRKRIREDRKATTAQKVQQMKQRLNENERKRKRHRLLLIHQISAVKNFSYFEFS

SEQ ID NO: 69172 - protein, 112 aa, Homo sapiens
  Payload ID: 13744
  Gene Symbol: PTPN2
  Gene Name: protein tyrosine phosphatase, non-receptor type 2
  ENSP ID: ENSP00000464937
  MOD_RES (1)..(1): Any amino acid
XKRWKELSKEDLSPAFDHSPNKIMTEKYNGNRIGLEEEKLTGDRCTGLSSKMQDTMEENSESALRKRIREDRKATTAQKVQQMKQRLNENERKRKSFPHFKKKSKQRNKSFS

SEQ ID NO: 69173 - protein, 68 aa, Homo sapiens
  Payload ID: 13744
  Gene Symbol: PTPN2
  Gene Name: protein tyrosine phosphatase, non-receptor type 2
  ENSP ID: ENSP00000466206
MVWQQKTKAVVMLNRIVEKESVKCAQYWPTDDQEMLFKETGFSVKLLSEDVKSYYTVHLLQLENINVR

SEQ ID NO: 69174 - protein, 410 aa, Homo sapiens
  Payload ID: 13744
  Gene Symbol: PTPN2
  Gene Name: protein tyrosine phosphatase, non-receptor type 2
  Uniprot ID: P17706
  ENSP ID: ENSP00000466936
MPTTIEREFEELDTQRRWQPLYLEIRNESHDYPHRVAKFPENRNRNRYRDVSPYDHSRVKLQNAENDYINASLVDIEEAQRSYILTQGPLPNTCCHFWLMVWQQKTKAVVMLNRIVEKESVKCAQYWPTDDQEMLFKETGFSVKLLSEDVKSYYTVHLLQLENINYIENLWITLYLKLLMLDVKRSLKSGETRTISHFHYTTWPDFGVPESPASFLNFLFKVRESGSLNPDHGPAVIHCSAGIGRSGTFSLVDTCLVLMEKGDDINIKQVLLNMRKYRMGLIQTPDQLRFSYMAIIEGAKCIKGDSSIQKRWKELSKEDLSPAFDHSPNKIMTEKYNGNRIGLEEEKLTGDRCTGLSSKMQDTMEENSESALRKRIREDRKATTAQKVQQMKQRLNENERKRKRPRLTDT

SEQ ID NO: 69175 - protein, 146 aa, Homo sapiens
  Payload ID: 13744
  Gene Symbol: PTPN2
  Gene Name: protein tyrosine phosphatase, non-receptor type 2
  ENSP ID: ENSP00000467043
  MOD_RES (1)..(1): Any amino acid
XEEAQRSYILTQGPLPNTCCHFWLMVWQQKTKAVVMLNRIVEKESKRWKELSKEDLSPAFDHSPNKIMTEKYNGNRIGLEEEKLTGDRCTGLSSKMQDTMEENSESALRKRIREDRKATTAQKVQQMKQRLNENERKRKRPRLTDT

SEQ ID NO: 69176 - protein, 386 aa, Homo sapiens
  Payload ID: 13744
  Gene Symbol: PTPN2
  Gene Name: protein tyrosine phosphatase, non-receptor type 2
  ENSP ID: ENSP00000467823
MYGKDGKGTNWMDQGDMECRMQEIDDHSRVKLQNAENDYINASLVDIEEAQRSYILTQGPLPNTCCHFWLMVWQQKTKAVVMLNRIVEKESVKCAQYWPTDDQEMLFKETGFSVKLLSEDVKSYYTVHLLQLENINSGETRTISHFHYTTWPDFGVPESPASFLNFLFKVRESGSLNPDHGPAVIHCSAGIGRSGTFSLVDTCLVLMEKGDDINIKQVLLNMRKYRMGLIQTPDQLRFSYMAIIEGAKCIKGDSSIQKRWKELSKEDLSPAFDHSPNKIMTEKYNGNRIGLEEEKLTGDRCTGLSSKMQDTMEENSESALRKRIREDRKATTAQKVQQMKQRLNENERKRKRWLYWQPILTKMGFMSVILVGAFVGWTLFFQQNAL

SEQ ID NO: 69177 - protein, 42 aa, Homo sapiens
  Payload ID: 13744
  Gene Symbol: PTPN2
  Gene Name: protein tyrosine phosphatase, non-receptor type 2
  ENSP ID: ENSP00000468012
MPTTIEREFEELDTQRRWQPLYLMITVVLNCKMLRMIILMPV

SEQ ID NO: 69178 - protein, 165 aa, Homo sapiens
  Payload ID: 13744
  Gene Symbol: PTPN2
  Gene Name: protein tyrosine phosphatase, non-receptor type 2
  ENSP ID: ENSP00000468155
MPTTIEREFEELDTQRRWQPLYLEIRNESHDYPHRVAKFPENRNRNRYRDVSPYDHSRVKLQNAENDYINASLVDIEEAQRSYILTQGPLPNTCCHFWLMVWQQKTKAVVMLNRIVEKESVKCAQYWPTDDQEMLFKETGFSVKLLSEDVKSYYTVHLLQLENIN

SEQ ID NO: 69179 - protein, 42 aa, Homo sapiens; identical to SEQ ID NO: 69177
  Payload ID: 13744
  Gene Symbol: PTPN2
  Gene Name: protein tyrosine phosphatase, non-receptor type 2
  ENSP ID: ENSP00000468408

SEQ ID NO: 69180 - protein, 339 aa, Homo sapiens
  Payload ID: 13745
  Gene Symbol: PTPN20
  Gene Name: protein tyrosine phosphatase, non-receptor type 20
  Uniprot ID: Q4JDL3
  ENSP ID: ENSP00000363335
MWTARGPFRRDRWSSEDEEAAGPSQALSPLLSDTRKIVSEGELDQLAQIRPLIFNFHEQTAIKDCLKILEEKTAAYDIMQEFMALELKNLPGEFNSGNQPSNREKNRYRDILPYDSTRVPLGKSKDYINASYIRIVNCGEEYFYIATQGPLLSTIDDFWQMVLENNSNVIAMITREIEGGIIKCYHYWPISLKKPLELKHFRVFLENYQILQYFIIRMFQVVEKSTGTSHSVKQLQFTKWPDHGTPASADSFIKYIRYARKSHLTGPMVVHCSAGIGRTGVFLCVDVVFCAIVKNCSFNIMDIVAQMREQRSGMVQTKEQYHFCYDIVLEVLRKLLTLD

SEQ ID NO: 69181 - protein, 420 aa, Homo sapiens
  Payload ID: 13745
  Gene Symbol: PTPN20
  Gene Name: protein tyrosine phosphatase, non-receptor type 20
  Uniprot ID: Q4JDL3
  ENSP ID: ENSP00000363459
MSSPRDFRAEPVNDYEGNDSEAEDLNFRETLPSSSQENTPRSKVFENKVNSEKVKLSLRNFPHNDYEDVFEEPSESGSDPSMWTARGPFRRDRWSSEDEEAAGPSQALSPLLSDTRKIVSEGELDQLAQIRPLIFNFHEQTAIKDCLKILEEKTAAYDIMQEFMALELKNLPGEFNSGNQPSNREKNRYRDILPYDSTRVPLGKSKDYINASYIRIVNCGEEYFYIATQGPLLSTIDDFWQMVLENNSNVIAMITREIEGGIIKCYHYWPISLKKPLELKHFRVFLENYQILQYFIIRMFQVVEKSTGTSHSVKQLQFTKWPDHGTPASADSFIKYIRYARKSHLTGPMVVHCSAGIGRTGVFLCVDVVFCAIVKNCSFNIMDIVAQMREQRSGMVQTKEQYHFCYDIVLEVLRKLLTLD

SEQ ID NO: 69182 - protein, 64 aa, Homo sapiens
  Payload ID: 13745
  Gene Symbol: PTPN20
  Gene Name: protein tyrosine phosphatase, non-receptor type 20
  ENSP ID: ENSP00000363462
MWTARGPFRRDRWSSEDEEAAGPSQALSPLLSVQHHGYSGPNERTTFWHGSNEGAVSLLLRYCA

SEQ ID NO: 69183 - protein, 226 aa, Homo sapiens
  Payload ID: 13745
  Gene Symbol: PTPN20
  Gene Name: protein tyrosine phosphatase, non-receptor type 20
  Uniprot ID: Q4JDL3
  ENSP ID: ENSP00000363466
MSSPRDFRAEPVNDYEGNDSEAEDLNFRETLPSSSQENTPRSKVFENKVNSEKVKLSLRNFPHNDYEDVFEEPSESGSDPSMWTARGPFRRDRWSSEDEEAAGPSQALSPLLSDTRKIVSEGELDQLAQIRPLIFNFHEQTAIKDCLKILEEKTAAYDIMQEFMALELKNLPGEFNSGNQPSNREKNRYRDILPFQHHGYSGPNERTTFWHGSNEGAVSLLLRYCA

SEQ ID NO: 69184 - protein, 339 aa, Homo sapiens; identical to SEQ ID NO: 69180
  Payload ID: 13745
  Gene Symbol: PTPN20
  Gene Name: protein tyrosine phosphatase, non-receptor type 20
  Uniprot ID: Q4JDL3
  ENSP ID: ENSP00000379071

SEQ ID NO: 69185 - protein, 64 aa, Homo sapiens; identical to SEQ ID NO: 69182
  Payload ID: 13745
  Gene Symbol: PTPN20
  Gene Name: protein tyrosine phosphatase, non-receptor type 20
  ENSP ID: ENSP00000379072

SEQ ID NO: 69186 - protein, 145 aa, Homo sapiens
  Payload ID: 13745
  Gene Symbol: PTPN20
  Gene Name: protein tyrosine phosphatase, non-receptor type 20
  Uniprot ID: Q4JDL3
  ENSP ID: ENSP00000379075
MWTARGPFRRDRWSSEDEEAAGPSQALSPLLSDTRKIVSEGELDQLAQIRPLIFNFHEQTAIKDCLKILEEKTAAYDIMQEFMALELKNLPGEFNSGNQPSNREKNRYRDILPFQHHGYSGPNERTTFWHGSNEGAVSLLLRYCA

SEQ ID NO: 69187 - protein, 228 aa, Homo sapiens
  Payload ID: 13745
  Gene Symbol: PTPN20
  Gene Name: protein tyrosine phosphatase, non-receptor type 20
  Uniprot ID: Q4JDL3
  ENSP ID: ENSP00000379077
MIDDSTRVPLGKSKDYINASYIRIVNCGEEYFYIATQGPLLSTIDDFWQMVLENNSNVIAMITREIEGGIIKCYHYWPISLKKPLELKHFRVFLENYQILQYFIIRMFQVVEKSTGTSHSVKQLQFTKWPDHGTPASADSFIKYIRYARKSHLTGPMVVHCSAGIGRTGVFLCVDVVFCAIVKNCSFNIMDIVAQMREQRSGMVQTKEQYHFCYDIVLEVLRKLLTLD

SEQ ID NO: 69188 - protein, 126 aa, Homo sapiens
  Payload ID: 13745
  Gene Symbol: PTPN20
  Gene Name: protein tyrosine phosphatase, non-receptor type 20
  ENSP ID: ENSP00000396009
MWTARGPFRRDRWSSEDEEAAGPSQALSPLLSDTRKIVSEGELDQLAQIRPLIFNFHEQTAIKDCLKILEEKTAAYDIMQEFMALELKNLPGEFNSGNQPSNREKNRYRDILPFQHHGYSGPNERT

SEQ ID NO: 69189 - protein, 62 aa, Homo sapiens
  Payload ID: 13745
  Gene Symbol: PTPN20
  Gene Name: protein tyrosine phosphatase, non-receptor type 20
  ENSP ID: ENSP00000403444
MWTARGPFRRDRWSSEDEEAAGPSQALSPLLSGLEHLRILVSVGGPGTNSLQIQRDNSSTSI

SEQ ID NO: 69190 - protein, 206 aa, Homo sapiens
  Payload ID: 13745
  Gene Symbol: PTPN20
  Gene Name: protein tyrosine phosphatase, non-receptor type 20
  Uniprot ID: Q4JDL3
  ENSP ID: ENSP00000420995
MSSPRDFRAEPVNDYEGNDSEAEDLNFRETLPSSSQENTPRSKVFENKVNSEKVKLSLRNFPHNDYEDVFEEPSESGSDPSMWTARGPFRRDRWSSEDEEAAGPSQALSPLLSDTRKIVSEGELDQLAQIRPLIFNFHEQTAIKDCLKILEEKTAAYDIMQEFMFNIMDIVAQMREQRSGMVQTKEQYHFCYDIVLEVLRKLLTLD

SEQ ID NO: 69191 - protein, 145 aa, Homo sapiens
  Payload ID: 13745
  Gene Symbol: PTPN20
  Gene Name: protein tyrosine phosphatase, non-receptor type 20
  Uniprot ID: Q4JDL3
  ENSP ID: ENSP00000421404
MSSPRDFRAEPVNDYEGNDSEAEDLNFRETLPSSSQENTPRSKVFENKVNSEKVKLSLRNFPHNDYEDVFEEPSESGSDPSMWTARGPFRRDRWSSEDEEAAGPSQALSPLLSVQHHGYSGPNERTTFWHGSNEGAVSLLLRYCA

SEQ ID NO: 69192 - protein, 104 aa, Homo sapiens
  Payload ID: 13745
  Gene Symbol: PTPN20
  Gene Name: protein tyrosine phosphatase, non-receptor type 20
  Uniprot ID: Q4JDL3
  ENSP ID: ENSP00000421453
MWTARGPFRRDRWSSEDEEAAGPSQALSPLLSDTRKIVSEGELDQLAQIRPLIFNFHEQTAIKDCLKILEEKTAAYDIMQEFMMIQHAFLLEKARTTSMLVILE

SEQ ID NO: 69193 - protein, 339 aa, Homo sapiens; identical to SEQ ID NO: 69180
  Payload ID: 13745
  Gene Symbol: PTPN20
  Gene Name: protein tyrosine phosphatase, non-receptor type 20
  Uniprot ID: Q4JDL3
  ENSP ID: ENSP00000421921

SEQ ID NO: 69194 - protein, 68 aa, Homo sapiens
  Payload ID: 13745
  Gene Symbol: PTPN20
  Gene Name: protein tyrosine phosphatase, non-receptor type 20
  ENSP ID: ENSP00000422384
MSSPRDFRAEPVNDYEGNDSEAEDLNFRETLPSSSQENTPRSKVFENKVNSEKVKLSLRNFPHNDYED

SEQ ID NO: 69195 - protein, 197 aa, Homo sapiens
  Payload ID: 13745
  Gene Symbol: PTPN20
  Gene Name: protein tyrosine phosphatase, non-receptor type 20
  Uniprot ID: Q4JDL3
  ENSP ID: ENSP00000422839
MWTARGPFRRDRWSSEDEEAAGPSQALSPLLSDTRKIVSEGELDQLAQIRPLIFNFHEQTAIKDCLKILEEKTAAYDIMQEFMTGTSHSVKQLQFTKWPDHGTPASADSFIKYIRYARKSHLTGPMVVHCSAGIGRTGVFLCVDVVFCAIVKNCSFNIMDIVAQMREQRSGMVQTKEQYHFCYDIVLEVLRKLLTLD

SEQ ID NO: 69196 - protein, 145 aa, Homo sapiens; identical to SEQ ID NO: 69186
  Payload ID: 13745
  Gene Symbol: PTPN20
  Gene Name: protein tyrosine phosphatase, non-receptor type 20
  Uniprot ID: Q4JDL3
  ENSP ID: ENSP00000423819

SEQ ID NO: 69197 - protein, 411 aa, Homo sapiens
  Payload ID: 13745
  Gene Symbol: PTPN20
  Gene Name: protein tyrosine phosphatase, non-receptor type 20
  Uniprot ID: Q4JDL3
  ENSP ID: ENSP00000424283
MIVNDYEGNDSEAEDLNFRETLPSSSQENTPRSKVFENKVNSEKVKLSLRNFPHNDYEDVFEEPSESGSDPSMWTARGPFRRDRWSSEDEEAAGPSQALSPLLSDTRKIVSEGELDQLAQIRPLIFNFHEQTAIKDCLKILEEKTAAYDIMQEFMALELKNLPGEFNSGNQPSNREKNRYRDILPYDSTRVPLGKSKDYINASYIRIVNCGEEYFYIATQGPLLSTIDDFWQMVLENNSNVIAMITREIEGGIIKCYHYWPISLKKPLELKHFRVFLENYQILQYFIIRMFQVVEKSTGTSHSVKQLQFTKWPDHGTPASADSFIKYIRYARKSHLTGPMVVHCSAGIGRTGVFLCVDVVFCAIVKNCSFNIMDIVAQMREQRSGMVQTKEQYHFCYDIVLEVLRKLLTLD

SEQ ID NO: 69198 - protein, 145 aa, Homo sapiens; identical to SEQ ID NO: 69186
  Payload ID: 13745
  Gene Symbol: PTPN20
  Gene Name: protein tyrosine phosphatase, non-receptor type 20
  Uniprot ID: Q4JDL3
  ENSP ID: ENSP00000424491

SEQ ID NO: 69199 - protein, 226 aa, Homo sapiens; identical to SEQ ID NO: 69183
  Payload ID: 13745
  Gene Symbol: PTPN20
  Gene Name: protein tyrosine phosphatase, non-receptor type 20
  Uniprot ID: Q4JDL3
  ENSP ID: ENSP00000425012

SEQ ID NO: 69200 - protein, 217 aa, Homo sapiens
  Payload ID: 13745
  Gene Symbol: PTPN20
  Gene Name: protein tyrosine phosphatase, non-receptor type 20
  Uniprot ID: Q4JDL3
  ENSP ID: ENSP00000425362
MIVNDYEGNDSEAEDLNFRETLPSSSQENTPRSKVFENKVNSEKVKLSLRNFPHNDYEDVFEEPSESGSDPSMWTARGPFRRDRWSSEDEEAAGPSQALSPLLSDTRKIVSEGELDQLAQIRPLIFNFHEQTAIKDCLKILEEKTAAYDIMQEFMALELKNLPGEFNSGNQPSNREKNRYRDILPFQHHGYSGPNERTTFWHGSNEGAVSLLLRYCA

SEQ ID NO: 69201 - protein, 269 aa, Homo sapiens
  Payload ID: 13745
  Gene Symbol: PTPN20
  Gene Name: protein tyrosine phosphatase, non-receptor type 20
  Uniprot ID: Q4JDL3
  ENSP ID: ENSP00000425912
MIVNDYEGNDSEAEDLNFRETLPSSSQENTPRSKVFENKVNSEKVKLSLRNFPHNDYEDVFEEPSESGSDPSMWTARGPFRRDRWSSEDEEAAGPSQALSPLLSDTRKIVSEGELDQLAQIRPLIFNFHEQTAIKDCLKILEEKTAAYDIMQEFMTGTSHSVKQLQFTKWPDHGTPASADSFIKYIRYARKSHLTGPMVVHCSAGIGRTGVFLCVDVVFCAIVKNCSFNIMDIVAQMREQRSGMVQTKEQYHFCYDIVLEVLRKLLTLD

SEQ ID NO: 69202 - protein, 339 aa, Homo sapiens; identical to SEQ ID NO: 69180
  Payload ID: 13745
  Gene Symbol: PTPN20
  Gene Name: protein tyrosine phosphatase, non-receptor type 20
  Uniprot ID: Q4JDL3
  ENSP ID: ENSP00000426355

SEQ ID NO: 69203 - protein, 62 aa, Homo sapiens
  Payload ID: 13745
  Gene Symbol: PTPN20
  Gene Name: protein tyrosine phosphatase, non-receptor type 20
  ENSP ID: ENSP00000426681
MWTARGPFRRDRWSSEDEEAAGPSQALSPLLSVFHSPVEGHCVASRFWQLWIKVLQIFTNFV

SEQ ID NO: 69204 - protein, 136 aa, Homo sapiens
  Payload ID: 13745
  Gene Symbol: PTPN20
  Gene Name: protein tyrosine phosphatase, non-receptor type 20
  Uniprot ID: Q4JDL3
  ENSP ID: ENSP00000427676
MIVNDYEGNDSEAEDLNFRETLPSSSQENTPRSKVFENKVNSEKVKLSLRNFPHNDYEDVFEEPSESGSDPSMWTARGPFRRDRWSSEDEEAAGPSQALSPLLSVQHHGYSGPNERTTFWHGSNEGAVSLLLRYCA

SEQ ID NO: 69205 - protein, 64 aa, Homo sapiens; identical to SEQ ID NO: 69182
  Payload ID: 13745
  Gene Symbol: PTPN20
  Gene Name: protein tyrosine phosphatase, non-receptor type 20
  ENSP ID: ENSP00000477675

SEQ ID NO: 69206 - protein, 64 aa, Homo sapiens; identical to SEQ ID NO: 69182
  Payload ID: 13745
  Gene Symbol: PTPN20
  Gene Name: protein tyrosine phosphatase, non-receptor type 20
  ENSP ID: ENSP00000479990

SEQ ID NO: 69207 - protein, 64 aa, Homo sapiens; identical to SEQ ID NO: 69182
  Payload ID: 13745
  Gene Symbol: PTPN20
  Gene Name: protein tyrosine phosphatase, non-receptor type 20
  ENSP ID: ENSP00000480504

SEQ ID NO: 69208 - protein, 1174 aa, Homo sapiens [sequence omitted]

SEQ ID NO: 69209 - protein, 61 aa, Homo sapiens
  Payload ID: 13746
  Gene Symbol: PTPN21
  Gene Name: protein tyrosine phosphatase, non-receptor type 21
  ENSP ID: ENSP00000443951
MPLPFGLKLKRTRRYTVSSKSCLVARIQLLNNEFVEFTLSVESTGQESLEAVAQRLELREG

SEQ ID NO: 69210 - protein, 128 aa, Homo sapiens
  Payload ID: 13746
  Gene Symbol: PTPN21
  Gene Name: protein tyrosine phosphatase, non-receptor type 21
  ENSP ID: ENSP00000450847
ATTGLKMKHLLTGQERTVWHLQYTDWPEHGCPEDLKGFLSYLEEIQSVRRHTNSTSDPQSPNPPLLVHCSAGHPESAGHAEATENDAGADSLPVHICVQSPHPVPEKLQAHLSSHNFLRGQSCEAFTA

SEQ ID NO: 69211 - protein, 195 aa, Homo sapiens
  Payload ID: 13746
  Gene Symbol: PTPN21
  Gene Name: protein tyrosine phosphatase, non-receptor type 21
  ENSP ID: ENSP00000451401
MPLPFGLKLKRTRRYTVSSKSCLVARIQLLNNEFVEFTLSVESTGQESLEAVAQRLELREVTYFSLWYYNKQNQRRWVDLEKPLKKQLDKYALEPTVYFGVVFYVPSVSQLQQEITRYQYYLQLKKDILEGSIPCTLEQAIQLAGLAVQADFGDFDQYESQDFLQKFALFPVGWLQDEKVLEEATQKVALLHQKY

SEQ ID NO: 69212 - protein, 1174 aa, Homo sapiens [sequence omitted]

SEQ ID NO: 69213 - protein, 807 aa, Homo sapiens
  Payload ID: 13747
  Gene Symbol: PTPN22
  Gene Name: protein tyrosine phosphatase, non-receptor type 22 (lymphoid)
  ENSP ID: ENSP00000352833
MDQREILQKFLDEAQSKKITKEEFANEFLKLKRQSTKYKADKTYPTTVAEKPKNIKKNRYKDILPYDYSRVELSLITSDEDSSYINANFIKGVYGPKAYIATQGPLSTTLLDFWRMIWEYSVLIIVMACMEYEMGKKKCERYWAEPGEMQLEFGPFSVSCEAEKRKSDYIIRTLKVKFNSETRTIYQFHYKNWPDHDVPSSIDPILELIWDVRCYQEDDSVPICIHCSAGCGRTGVICAIDYTWMLLKDGIIPENFSVFSLIREMRTQRPSLVQTQEQYELVYNAVLELFKRQMDVIRDKHSGTESQAKHCIPEKNHTLQADSYSPNLPKSTTKAAKMMNQQRTKMEIKESSSFDFRTSEISAKEELVLHPAKSSTSFDFLELNYSFDKNADTTMKWQTKAFPIVGEPLQKHQSLDLGSLLFEGCSNSKPVNAAGRYFNSKVPITRTKSTPFELIQQRETKEVDSKENFSYLESQPHDSCFVEMQAQKVMHVSSAELNYSLPYDSKHQIRNASNVKHHDSSALGVYSYIPLVENPYFSSWPPSGTSSKMSLDLPEKQDGTVFPSSLLPTSSTSLFSYYNSHDSLSLNSPTNISSLLNQESAVLATAPRIDDEIPPPLPVWTPESFIVVEEAGEFSPNVPKSLSSAVKVKIGTSLEWGGTSEPKKFDDSVILRPSKSVKLRSPKSELHQDRSSPPPPLPERTLESFFLADEDCMQAQSIETYSTSYPDTMENSTSSKQTLKTPGKSFTRSKSLKILRNMKKSICNSCPPNKPAESVQSNNSSSFLNFGFANRFSKPKGPRNPPPTWNI

SEQ ID NO: 69214 - protein, 795 aa, Homo sapiens
  Payload ID: 13747
  Gene Symbol: PTPN22
  Gene Name: protein tyrosine phosphatase, non-receptor type 22 (lymphoid)
  ENSP ID: ENSP00000388229
MDQREILQKFLDEAQSKKITKEEFANEFLKLKRQSTKYKADKTYPTTVAEKPKNIKKNRYKDILPYDYSRVELSLITSDEDSSYINANFIKGVYGPKAYIATQGPLSTTLLDFWRMIWEYSVLIIVMACMEYEMGKKKCERYWAEPGEMQLEFGPFSVSCEAEKRKSDYIIRTLKVKFNSETRTIYQFHYKNWPDHDVPSSIDPILELIWDVRCYQEDDSVPICIHCSAGCGRTGVICAIDYTWMLLKDGIIPENFSVFSLIREMRTQRPSLVQTQEQYELVYNAVLELFKRQMDVIRDKHSGTESQAKHCIPEKNHTLQADSYSPNLPKSTTKAAKMMNQQRTKMEIKESSSFDFRTSEISAKEELVLHPAKSSTSFDFLELNYSFDKNADTTMKWQTKAFPIVGEPLQKHQSLDLGSLLFEGCSNSKPVNAAGRYFNSKVPITRTKSTPFELIQQRETKEVDSKENFSYLESQPHDSCFVEMQAQKVMHVSSAELNYSLPYDSKHQIRNASNVKHHDSSALGVYSYIPLVENPYFSSWPPSGTSSKMSLDLPEKQDGTVFPSSLLPTSSTSLFSYYNSHDSLSLNSPTNISSLLNQESAVLATAPRIDDEIPPPLPVWTPESFIVVEEAGEFSPNVPKSLSSAVKVKIGTSLEWGGTSEPKKFDDSVILRPSKSVKLRSPKSELHQDRSSPPPPLPERTLESFFLADEDCMQAQSIETYSTSYPDTMENSTSSKQTLKTPGKSFTRSKSLKILRNMKKSICNSCPPNKPAESVQSNNSSSFLNFGMCVILLKS

SEQ ID NO: 69215 - protein, 135 aa, Homo sapiens
  Payload ID: 13747
  Gene Symbol: PTPN22
  Gene Name: protein tyrosine phosphatase, non-receptor type 22 (lymphoid)
  ENSP ID: ENSP00000431249
MDQREILQKFLDEAQSKKITKEEFANEFLKLKRQSTKYKADKTYPTTVAEKPKNIKKNRYKDILPYDYSRVELSLITSDEDSSYINANFIKGVYGPKAYIATQGPLSTTLLDFWRMIWEYSVLCWLWKDWCYLCY

SEQ ID NO: 69216 - protein, 668 aa, Homo sapiens
  Payload ID: 13747
  Gene Symbol: PTPN22
  Gene Name: protein tyrosine phosphatase, non-receptor type 22 (lymphoid)
  ENSP ID: ENSP00000432674
MDQREILQKFLDEAQSKKITKEEFANEFLKLKRQSTKYKADKTYPTTVAEKPKNIKKNRYKDILPYDYSRVELSLITSDEDSSYINANFIKGVYGPKAYIATQGPLSTTLLDFWRMIWEYSVLIIPENFSVFSLIREMRTQRPSLVQTQEQYELVYNAVLELFKRQMDVIRDKHSGTESQAKHCIPEKNHTLQADSYSPNLPKSTTKAAKMMNQQRTKMEIKESSSFDFRTSEISAKEELVLHPAKSSTSFDFLELNYSFDKNADTTMKWQTKAFPIVGEPLQKHQSLDLGSLLFEGCSNSKPVNAAGRYFNSKVPITRTKSTPFELIQQRETKEVDSKENFSYLESQPHDSCFVEMQAQKVMHVSSAELNYSLPYDSKHQIRNASNVKHHDSSALGVYSYIPLVENPYFSSWPPSGTSSKMSLDLPEKQDGTVFPSSLLPTSSTSLFSYYNSHDSLSLNSPTNISSLLNQESAVLATAPRIDDEIPPPLPVWTPESFIVVEEAGEFSPNVPKSLSSAVKVKIGTSLEWGGTSEPKKFDDSVILRPSKSVKLRSPKSELHQDRSSPPPPLPERTLESFFLADEDCMQAQSIETYSTSYPDTMENSTSSKQTLKTPGKSFTRSKSLKILRNMKKSICNSCPPNKPAESVQSNNSSSFLNFGMCVILLKS

SEQ ID NO: 69217 - protein, 179 aa, Homo sapiens
  Payload ID: 13747
  Gene Symbol: PTPN22
  Gene Name: protein tyrosine phosphatase, non-receptor type 22 (lymphoid)
  Uniprot ID: Q9Y2R2
  ENSP ID: ENSP00000433141
MDQREILQKFLDEAQSKKITKEEFANEFLKLKRQSTKYKADKTYPTTVAEKPKNIKKNRYKDILPYDYSRVELSLITSDEDSSYINANFIKGVYGPKAYIATQGPLSTTLLDFWRMIWEYSVLIIVMACMEYEMGKEAEKRKSDYIIRTLKVKFNSVSVILAHQTSLQNLFSQITPAHF

SEQ ID NO: 69218 - protein, 92 aa, Homo sapiens
  Payload ID: 13747
  Gene Symbol: PTPN22
  Gene Name: protein tyrosine phosphatase, non-receptor type 22 (lymphoid)
  ENSP ID: ENSP00000434932
MDQREILQKFLDEAQSKKITKEEFANEFLGLALSPRLECRGLIIAHCRLDFLDSSDPPASASQSAEITTMSHHTWPEKAFWTSLNRSNLLLS

SEQ ID NO: 69219 - protein, 752 aa, Homo sapiens
  Payload ID: 13747
  Gene Symbol: PTPN22
  Gene Name: protein tyrosine phosphatase, non-receptor type 22 (lymphoid)
  ENSP ID: ENSP00000435176
MDQREILQKFLDEAQSKKITKEEFANEFLKLKRQSTKYKADKTYPTTVAEKPKNIKKNRYKDILPYDYSRVELSLITSDEDSSYINANFIKGVYGPKAYIATQGPLSTTLLDFWRMIWEYSVLIIVMACMEYEMGKKKCERYWAEPGEMQLEFGPFSVSCEAEKRKSDYIIRTLKVKFNSETRTIYQFHYKNWPDHDVPSSIDPILELIWDVRCYQEDDSVPICIHCSAGCGRTGVICAIDYTWMLLKDGSQAKHCIPEKNHTLQADSYSPNLPKSTTKAAKMMNQQRTKMEIKESSSFDFRTSEISAKEELVLHPAKSSTSFDFLELNYSFDKNADTTMKWQTKAFPIVGEPLQKHQSLDLGSLLFEGCSNSKPVNAAGRYFNSKVPITRTKSTPFELIQQRETKEVDSKENFSYLESQPHDSCFVEMQAQKVMHVSSAELNYSLPYDSKHQIRNASNVKHHDSSALGVYSYIPLVENPYFSSWPPSGTSSKMSLDLPEKQDGTVFPSSLLPTSSTSLFSYYNSHDSLSLNSPTNISSLLNQESAVLATAPRIDDEIPPPLPVWTPESFIVVEEAGEFSPNVPKSLSSAVKVKIGTSLEWGGTSEPKKFDDSVILRPSKSVKLRSPKSELHQDRSSPPPPLPERTLESFFLADEDCMQAQSIETYSTSYPDTMENSTSSKQTLKTPGKSFTRSKSLKILRNMKKSICNSCPPNKPAESVQSNNSSSFLNFGFANRFSKPKGPRNPPPTWNI

SEQ ID NO: 69220 - protein, 783 aa, Homo sapiens
  Payload ID: 13747
  Gene Symbol: PTPN22
  Gene Name: protein tyrosine phosphatase, non-receptor type 22 (lymphoid)
  ENSP ID: ENSP00000439372
MDQREILQKFLDEAQSKKITKEEFANEFLKLKRQSTKYKADKTYPTTVAEKPKNIKKNRYKDILPYDYSRVELSLITSDEDSSYINANFIKGVYGPKAYIATQGPLSTTLLDFWRMIWEYSVLIIVMACMEYEMGKEAEKRKSDYIIRTLKVKFNSETRTIYQFHYKNWPDHDVPSSIDPILELIWDVRCYQEDDSVPICIHCSAGCGRTGVICAIDYTWMLLKDGIIPENFSVFSLIREMRTQRPSLVQTQEQYELVYNAVLELFKRQMDVIRDKHSGTESQAKHCIPEKNHTLQADSYSPNLPKSTTKAAKMMNQQRTKMEIKESSSFDFRTSEISAKEELVLHPAKSSTSFDFLELNYSFDKNADTTMKWQTKAFPIVGEPLQKHQSLDLGSLLFEGCSNSKPVNAAGRYFNSKVPITRTKSTPFELIQQRETKEVDSKENFSYLESQPHDSCFVEMQAQKVMHVSSAELNYSLPYDSKHQIRNASNVKHHDSSALGVYSYIPLVENPYFSSWPPSGTSSKMSLDLPEKQDGTVFPSSLLPTSSTSLFSYYNSHDSLSLNSPTNISSLLNQESAVLATAPRIDDEIPPPLPVWTPESFIVVEEAGEFSPNVPKSLSSAVKVKIGTSLEWGGTSEPKKFDDSVILRPSKSVKLRSPKSELHQDRSSPPPPLPERTLESFFLADEDCMQAQSIETYSTSYPDTMENSTSSKQTLKTPGKSFTRSKSLKILRNMKKSICNSCPPNKPAESVQSNNSSSFLNFGFANRFSKPKGPRNPPPTWNI

SEQ ID NO: 69221 - protein, 1636 aa, Homo sapiens
  Payload ID: 13748
  Gene Symbol: PTPN23
  Gene Name: protein tyrosine phosphatase, non-receptor type 23
  Uniprot ID: Q9H3S7
  ENSP ID: ENSP00000265562
MEAVPRMPMIWLDLKEAGDFHFQPAVKKFVLKNYGENPEAYNEELKKLELLRQNAVRVPRDFEGCSVLRKYLGQLHYLQSRVPMGSGQEAAVPVTWTEIFSGKSVAHEDIKYEQACILYNLGALHSMLGAMDKRVSEEGMKVSCTHFQCAAGAFAYLREHFPQAYSVDMSRQILTLNVNLMLGQAQECLLEKSMLDNRKSFLVARISAQVVDYYKEACRALENPDTASLLGRIQKDWKKLVQMKIYYFAAVAHLHMGKQAEEQQKFGERVAYFQSALDKLNEAIKLAKGQPDTVQDALRFTMDVIGGKYNSAKKDNDFIYHEAVPALDTLQPVKGAPLVKPLPVNPTDPAVTGPDIFAKLVPMAAHEASSLYSEEKAKLLREMMAKIEDKNEVLDQFMDSMQLDPETVDNLDAYSHIPPQLMEKCAALSVRPDTVRNLVQSMQVLSGVFTDVEASLKDIRDLLEEDELLEQKFQEAVGQAGAISITSKAELAEVRREWAKYMEVHEKASFTNSELHRAMNLHVGNLRLLSGPLDQVRAALPTPALSPEDKAVLQNLKRILAKVQEMRDQRVSLEQQLRELIQKDDITASLVTTDHSEMKKLFEEQLKKYDQLKVYLEQNLAAQDRVLCALTEANVQYAAVRRVLSDLDQKWNSTLQTLVASYEAYEDLMKKSQEGRDFYADLESKVAALLERTQSTCQAREAARQQLLDRELKKKPPPRPTAPKPLLPRREESEAVEAGDPPEELRSLPPDMVAGPRLPDTFLGSATPLHFPPSPFPSSTGPGPHYLSGPLPPGTYSGPTQLIQPRAPGPHAMPVAPGPALYPAPAYTPELGLVPRSSPQHGVVSSPYVGVGPAPPVAGLPSAPPPQFSGPELAMAVRPATTTVDSIQAPIPSHTAPRPNPTPAPPPPCFPVPPPQPLPTPYTYPAGAKQPIPAQHHFSSGIPAGFPAPRIGPQPQPHPQPHPSQAFGPQPPQQPLPLQHPHLFPPQAPGLLPPQSPYPYAPQPGVLGQPPPPLHTQLYPGPAQDPLPAHSGALPFPSPGPPQPPHPPLAYGPAPSTRPMGPQAAPLTIRGPSSAGQSTPSPHLVPSPAPSPGPGPVPPRPPAAEPPPCLRRGAAAADLLSSSPESQHGGTQSPGGGQPLLQPTKVDAAEGRRPQALRLIERDPYEHPERLRQLQQELEAFRGQLGDVGALDTVWRELQDAQEHDARGRSIAIARCYSLKNRHQDVMPYDSNRVVLRSGKDDYINASCVEGLSPYCPPLVATQAPLPGTAADFWLMVHEQKVSVIVMLVSEAEMEKQKVARYFPTERGQPMVHGALSLALSSVRSTETHVERVLSLQFRDQSLKRSLVHLHFPTWPELGLPDSPSNLLRFIQEVHAHYLHQRPLHTPIIVHCSSGVGRTGAFALLYAAVQEVEAGNGIPELPQLVRRMRQQRKHMLQEKLHLRFCYEAVVRHVEQVLQRHGVPPPCKPLASASISQKNHLPQDSQDLVLGGDVPISSIQATIAKLSIRPPGGLESPVASLPGPAEPPGLPPASLPESTPIPSSSPPPLSSPLPEAPQPKEEPPVPEAPSSGPPSSSLELLASLTPEAFSLDSSLRGKQRMSKHNFLQAHNGQGLRATRPSDDPLSLLDPLWTLNKT

SEQ ID NO: 69222 - protein, 169 aa, Homo sapiens
  Payload ID: 13748
  Gene Symbol: PTPN23
  Gene Name: protein tyrosine phosphatase, non-receptor type 23
  ENSP ID: ENSP00000396328
MEAVPRMPMIWLDLKEAGDFHFQPAVKKNAVRVPRDFEGCSVLRKYLGQLHYLQSRVPMGSGQEAAVPVTWTEIFSGKSVAHEDIKYEQACILYNLGALHSMLGAMDKRVSEECAAGAFAYLREHFPQAYSVDMSRQILTLNVNLMLGQAQECLLEKSMLDNRKSFLVA

SEQ ID NO: 69223 - protein, 64 aa, Homo sapiens
  Payload ID: 13748
  Gene Symbol: PTPN23
  Gene Name: protein tyrosine phosphatase, non-receptor type 23
  ENSP ID: ENSP00000473266
MEAVPRMPMIWLDLKEAGDFHFQPAVKKFVLKNYGENPEAYNEELKKLELLRQDRDLLRQVCGP

SEQ ID NO: 69224 - protein, 839 aa, Homo sapiens
  Payload ID: 13749
  Gene Symbol: PTPN3
  Gene Name: protein tyrosine phosphatase, non-receptor type 3
  ENSP ID: ENSP00000262539
MTSRLRALGGRINNIRTSELPKEKTRSEVICSIHFLDGVVQTFKVTKQDTGQVLLDMVHNHLGVTEKEYFGLQHDDDSVDSPRWLEASKAIRKQLKGGFPCTLHFRVRFFIPDPNTLQQEQTRHLYFLQLKMDICEGRLTCPLNSAVVLASYAVQSHFGDYNSSIHHPGYLSDSHFIPDQNEDFLTKVESLHEQHSGLKQSEAESCYINIARTLDFYGVELHSGRDLHNLDLMIGIASAGVAVYRKYICTSFYPWVNILKISFKRKKFFIHQRQKQAESREHIVAFNMLNYRSCKNLWKSCVEHHTFFQAKKLLPQEKNVLSQYWTMGSRNTKKSVNNQYCKKVIGGMVWNPAMRRSLSVEHLETKSLPSRSPPITPNWRSPRLRHEIRKPRHSSADNLANEMTYITETEDVFYTYKGSLAPQDSDSEVSQNRSPHQESLSENNPAQSYLTQKSSSSVSPSSNAPGSCSPDGVDQQLLDDFHRVTKGGSTEDASQYYCDKNDNGDSYLVLIRITPDEDGKFGFNLKGGVDQKMPLVVSRINPESPADTCIPKLNEGDQIVLINGRDISEHTHDQVVMFIKASRESHSRELALVIRRRAVRSFADFKSEDELNQLFPEAIFPMCPEGGDTLEGSMAQLKKGLESGTVLIQFEQLYRKKPGLAITFAKLPQNLDKNRYKDVLPYDTTRVLLQGNEDYINASYVNMEIPAANLVNKYIATQGPLPHTCAQFWQVVWDQKLSLIVMLTTLTERGRTKCHQYWPDPPDVMNHGGFHIQCQSEDCTIAYVSREMLVTNTQVSRSLRGTVEGQVLNQRPLSSQVVTLLGVHSVCTWQACQPGKNTQ

SEQ ID NO: 69225 - protein, 913 aa, Homo sapiens
  Payload ID: 13749
  Gene Symbol: PTPN3
  Gene Name: protein tyrosine phosphatase, non-receptor type 3
  Uniprot ID: P26045
  ENSP ID: ENSP00000363667
MTSRLRALGGRINNIRTSELPKEKTRSEVICSIHFLDGVVQTFKVTKQDTGQVLLDMVHNHLGVTEKEYFGLQHDDDSVDSPRWLEASKAIRKQLKGGFPCTLHFRVRFFIPDPNTLQQEQTRHLYFLQLKMDICEGRLTCPLNSAVVLASYAVQSHFGDYNSSIHHPGYLSDSHFIPDQNEDFLTKVESLHEQHSGLKQSEAESCYINIARTLDFYGVELHSGRDLHNLDLMIGIASAGVAVYRKYICTSFYPWVNILKISFKRKKFFIHQRQKQAESREHIVAFNMLNYRSCKNLWKSCVEHHTFFQAKKLLPQEKNVLSQYWTMGSRNTKKSVNNQYCKKVIGGMVWNPAMRRSLSVEHLETKSLPSRSPPITPNWRSPRLRHEIRKPRHSSADNLANEMTYITETEDVFYTYKGSLAPQDSDSEVSQNRSPHQESLSENNPAQSYLTQKSSSSVSPSSNAPGSCSPDGVDQQLLDDFHRVTKGGSTEDASQYYCDKNDNGDSYLVLIRITPDEDGKFGFNLKGGVDQKMPLVVSRINPESPADTCIPKLNEGDQIVLINGRDISEHTHDQVVMFIKASRESHSRELALVIRRRAVRSFADFKSEDELNQLFPEAIFPMCPEGGDTLEGSMAQLKKGLESGTVLIQFEQLYRKKPGLAITFAKLPQNLDKNRYKDVLPYDTTRVLLQGNEDYINASYVNMEIPAANLVNKYIATQGPLPHTCAQFWQVVWDQKLSLIVMLTTLTERGRTKCHQYWPDPPDVMNHGGFHIQCQSEDCTIAYVSREMLVTNTQTGEEHTVTHLQYVAWPDHGVPDDSSDFLEFVNYVRSLRVDSEPVLVHCSAGIGRTGVLVTMETAMCLTERNLPIYPLDIVRKMRDQRAMMVQTSSQYKFVCEAILRVYEEGLVQMLDPS

SEQ ID NO: 69226 - protein, 737 aa, Homo sapiens
  Payload ID: 13749
  Gene Symbol: PTPN3
  Gene Name: protein tyrosine phosphatase, non-receptor type 3
  Uniprot ID: P26045
  ENSP ID: ENSP00000395384
MDICEGRLTCPLNSAVVLASYAVQSHFGDYNSSIHHPGYLSDSHFIPDQNEDFLTKVESLHEQHSGLKQSEAESCYINIARTLDFYGVELHSGRDLHNLDLMIGIASAGVAVYRKYICTSFYPWVNILKISFKRKKFFIHQRQKQAESREHIVAFNMLNYRSCKNLWKSCVEHHTFFQAKKLLPQEKNVLSQYWTMGSRNTKKRSPRLRHEIRKPRHSSADNLANEMTYITETEDVFYTYKGSLAPQDSDSEVSQNRSPHQESLSENNPAQSYLTQKSSSSVSPSSNAPGSCSPDGVDQQLLDDFHRVTKGGSTEDASQYYCDKNDNGDSYLVLIRITPDEDGKFGFNLKGGVDQKMPLVVSRINPESPADTCIPKLNEGDQIVLINGRDISEHTHDQVVMFIKASRESHSRELALVIRRRAVRSFADFKSEDELNQLFPEAIFPMCPEGGDTLEGSMAQLKKGLESGTVLIQFEQLYRKKPGLAITFAKLPQNLDKNRYKDVLPYDTTRVLLQGNEDYINASYVNMEIPAANLVNKYIATQGPLPHTCAQFWQVVWDQKLSLIVMLTTLTERGRTKCHQYWPDPPDVMNHGGFHIQCQSEDCTIAYVSREMLVTNTQTGEEHTVTHLQYVAWPDHGVPDDSSDFLEFVNYVRSLRVDSEPVLVHCSAGIGRTGVLVTMETAMCLTERNLPIYPLDIVRKMRDQRAMMVQTSSQYKFVCEAILRVYEEGLVQMLDPS

SEQ ID NO: 69227 - protein, 782 aa, Homo sapiens
  Payload ID: 13749
  Gene Symbol: PTPN3
  Gene Name: protein tyrosine phosphatase, non-receptor type 3
  Uniprot ID: P26045
  ENSP ID: ENSP00000416654
MDICEGRLTCPLNSAVVLASYAVQSHFGDYNSSIHHPGYLSDSHFIPDQNEDFLTKVESLHEQHSGLKQSEAESCYINIARTLDFYGVELHSGRDLHNLDLMIGIASAGVAVYRKYICTSFYPWVNILKISFKRKKFFIHQRQKQAESREHIVAFNMLNYRSCKNLWKSCVEHHTFFQAKKLLPQEKNVLSQYWTMGSRNTKKSVNNQYCKKVIGGMVWNPAMRRSLSVEHLETKSLPSRSPPITPNWRSPRLRHEIRKPRHSSADNLANEMTYITETEDVFYTYKGSLAPQDSDSEVSQNRSPHQESLSENNPAQSYLTQKSSSSVSPSSNAPGSCSPDGVDQQLLDDFHRVTKGGSTEDASQYYCDKNDNGDSYLVLIRITPDEDGKFGFNLKGGVDQKMPLVVSRINPESPADTCIPKLNEGDQIVLINGRDISEHTHDQVVMFIKASRESHSRELALVIRRRAVRSFADFKSEDELNQLFPEAIFPMCPEGGDTLEGSMAQLKKGLESGTVLIQFEQLYRKKPGLAITFAKLPQNLDKNRYKDVLPYDTTRVLLQGNEDYINASYVNMEIPAANLVNKYIATQGPLPHTCAQFWQVVWDQKLSLIVMLTTLTERGRTKCHQYWPDPPDVMNHGGFHIQCQSEDCTIAYVSREMLVTNTQTGEEHTVTHLQYVAWPDHGVPDDSSDFLEFVNYVRSLRVDSEPVLVHCSAGIGRTGVLVTMETAMCLTERNLPIYPLDIVRKMRDQRAMMVQTSSQYKFVCEAILRVYEEGLVQMLDPS

SEQ ID NO: 69228 - protein, 926 aa, Homo sapiens
  Payload ID: 13750
  Gene Symbol: PTPN4
  Gene Name: protein tyrosine phosphatase, non-receptor type 4 (megakaryocyte)
  Uniprot ID: P29074
  ENSP ID: ENSP00000263708
MTSRFRLPAGRTYNVRASELARDRQHTEVVCNILLLDNTVQAFKVNKHDQGQVLLDVVFKHLDLTEQDYFGLQLADDSTDNPRWLDPNKPIRKQLKRGSPYSLNFRVKFFVSDPNKLQEEYTRYQYFLQIKQDILTGRLPCPSNTAALLASFAVQSELGDYDQSENLSGYLSDYSFIPNQPQDFEKEIAKLHQQHIGLSPAEAEFNYLNTARTLELYGVEFHYARDQSNNEIMIGVMSGGILIYKNRVRMNTFPWLKIVKISFKCKQFFIQLRKELHESRETLLGFNMVNYRACKNLWKACVEHHTFFRLDRPLPPQKNFFAHYFTLGSKFRYCGRTEVQSVQYGKEKANKDRVFARSPSKPLARKLMDWEVVSRNSISDDRLETQSLPSRSPPGTPNHRNSTFTQEGTRLRPSSVGHLVDHMVHTSPSEVFVNQRSPSSTQANSIVLESSPSQETPGDGKPPALPPKQSKKNSWNQIHYSHSQQDLESHINETFDIPSSPEKPTPNGGIPHDNLVLIRMKPDENGRFGFNVKGGYDQKMPVIVSRVAPGTPADLCVPRLNEGDQVVLINGRDIAEHTHDQVVLFIKASCERHSGELMLLVRPNAVYDVVEEKLENEPDFQYIPEKAPLDSVHQDDHSLRESMIQLAEGLITGTVLTQFDQLYRKKPGMTMSCAKLPQNISKNRYRDISPYDATRVILKGNEDYINANYINMEIPSSSIINQYIACQGPLPHTCTDFWQMTWEQGSSMVVMLTTQVERGRVKCHQYWPEPTGSSSYGCYQVTCHSEEGNTAYIFRKMTLFNQEKNESRPLTQIQYIAWPDHGVPDDSSDFLDFVCHVRNKRAGKEEPVVVHCSAGIGRTGVLITMETAMCLIECNQPVYPLDIVRTMRDQRAMMIQTPSQYRFVCEAILKVYEEGFVKPLTTSTNK

SEQ ID NO: 69229 - protein, 197 aa, Homo sapiens
  Payload ID: 13750
  Gene Symbol: PTPN4
  Gene Name: protein tyrosine phosphatase, non-receptor type 4 (megakaryocyte)
  ENSP ID: ENSP00000387457
RNSISDDRLETQSLPSRSPPGTPNHRNSTFTQEGTRLRPSSVGHLVDHMVHTSPSEVFVNQRSPSSTQANSIVLESSPSQETPGDGKPPALPPKQSKKNSWNQIHYSHSQQDLESHINETFDIPSSPEKPTPNGGIPHDNLVLIRMKPDENGRFGFNVKGGYDQKMPVIVSRVAPGTPVSYLNVSNKSCFQEYVLIL

SEQ ID NO: 69230 - protein, 219 aa, Homo sapiens
  Payload ID: 13750
  Gene Symbol: PTPN4
  Gene Name: protein tyrosine phosphatase, non-receptor type 4 (megakaryocyte)
  ENSP ID: ENSP00000394706
  MOD_RES (1)..(1): Any amino acid
XSIINQYIACQGPLPHTCTDFWQMTWEQGSSMVVMLTTQVERGRVKCHQYWPEPTGSSSYGCYQVTCHSEEGNTAYIFRKMTLFNQEKNESRPLTQIQYIAWPDHGVPDDSSDFLDFVCHVRNKRAGKEEPVVVHCSAGIGRTGVLITMETAMCLIECNQPVYPLDIVRTMRDQRAMMIQTPFCFLYFIFQSQYRFVCEAILKVYEEGFVKPLTTSTNK

SEQ ID NO: 69231 - protein, 135 aa, Homo sapiens
  Payload ID: 13750
  Gene Symbol: PTPN4
  Gene Name: protein tyrosine phosphatase, non-receptor type 4 (megakaryocyte)
  ENSP ID: ENSP00000395603
  MOD_RES (1)..(1): Any amino acid
XELGDYDQSENLSGYLSDYSFIPNQPQDFEKEIAKLHQQHIGLSPAEAEFNYLNTARTLELYGVEFHYARDQSNNEIMIGVMSGGILIYKNRVRMNTFPWLKIVKISFKCKQFFIQLRKELVSTDLIIIDINEAF

SEQ ID NO: 69232 - protein, 75 aa, Homo sapiens
  Payload ID: 13750
  Gene Symbol: PTPN4
  Gene Name: protein tyrosine phosphatase, non-receptor type 4 (megakaryocyte)
  ENSP ID: ENSP00000405763
MTSRFRLPAGRTYNVRASELARDRQHTEVVCNILLLDNTVQAFKVNKHDQGQVLLDVVFKHLDLTEQDYFGLQLA

SEQ ID NO: 69233 - protein, 121 aa, Homo sapiens
  Payload ID: 13750
  Gene Symbol: PTPN4
  Gene Name: protein tyrosine phosphatase, non-receptor type 4 (megakaryocyte)
  ENSP ID: ENSP00000411364
RWLDPNKPIRKQLKRGSPYSLNFRVKFFVSDPNKLQEEYTRYQYFLQIKQDILTGRLPCPSNTAALLASFAVQSELGDYDQSENLSGYLSDYSFIPNQPQDFEKEIAKLHQQHMIRVTMKL

SEQ ID NO: 69234 - protein, 161 aa, Homo sapiens
  Payload ID: 13750
  Gene Symbol: PTPN4
  Gene Name: protein tyrosine phosphatase, non-receptor type 4 (megakaryocyte)
  ENSP ID: ENSP00000438445
MTSRFRLPAGRTYNVRASELARDRQHTEVVCNILLLDNTVQAFKVNKHDQGQVLLDVVFKHLDLTEQDYFGLQLADDSTDNPRWLDPNKPIRKQLKKLLLLILGGSPYSLNFRVKFFVSDPNKLQEEYTRYQYFLQIKQDILTGRLPCPSNTAALLASFAV

SEQ ID NO: 69235 - protein, 565 aa, Homo sapiens
  Payload ID: 13751
  Gene Symbol: PTPN5
  Gene Name: protein tyrosine phosphatase, non-receptor type 5 (striatum-enriched)
  Uniprot ID: P54829
  ENSP ID: ENSP00000351342
MNYEGARSERENHAADDSEGGALDMCCSERLPGLPQPIVMEALDEAEGLQDSQREMPPPPPPSPPSDPAQKPPPRGAGSHSLTVRSSLCLFAASQFLLACGVLWFSGYGHIWSQNATNLVSSLLTLLKQLEPTAWLDSGTWGVPSLLLVFLSVGLVLVTTLVWHLLRTPPEPPTPLPPEDRRQSVSRQPSFTYSEWMEEKIEDDFLDLDPVPETPVFDCVMDIKPEADPTSLTVKSMGLQERRGSNVSLTLDMCTPGCNEEGFGYLMSPREESAREYLLSASRVLQAEELHEKALDPFLLQAEFFEIPMNFVDPKEYDIPGLVRKNRYKTILPNPHSRVCLTSPDPDDPLSSYINANYIRGYGGEEKVYIATQGPIVSTVADFWRMVWQEHTPIIVMITNIEEMNEKCTEYWPEEQVAYDGVEITVQKVIHTEDYRLRLISLKSGTEERGLKHYWFTSWPDQKTPDRAPPLLHLVREVEEAAQQEGPHCAPIIVHCSAGIGRTGCFIATSICCQQLRQEGVVDILKTTCQLRQDRGGMIQTCEQYQFVHHVMSLYEKQLSHQSPE

SEQ ID NO: 69236 - protein, 171 aa, Homo sapiens
  Payload ID: 13751
  Gene Symbol: PTPN5
  Gene Name: protein tyrosine phosphatase, non-receptor type 5 (striatum-enriched)
  ENSP ID: ENSP00000379469
MWPRWKGEGVPLSVFFLCSSSFHLISISGLVCELKEFTHTWGGPLSPRQSGTEERGLKHYWFTSWPDQKTPDRAPPLLHLVREVEEAAQQEGPHCAPIIVHCSAGIGRTGCFIATSICCQQLRQEGVVDILKTTCQLRQDRGGMIQTCEQYQFVHHVMSLYEKQLSHQSPE

SEQ ID NO: 69237 - protein, 541 aa, Homo sapiens
  Payload ID: 13751
  Gene Symbol: PTPN5
  Gene Name: protein tyrosine phosphatase, non-receptor type 5 (striatum-enriched)
  Uniprot ID: P54829
  ENSP ID: ENSP00000379471
MCCSERLPGLPQPIVMEALDEAEGLQDSQREMPPPPPPSPPSDPAQKPPPRGAGSHSLTVRSSLCLFAASQFLLACGVLWFSGYGHIWSQNATNLVSSLLTLLKQLEPTAWLDSGTWGVPSLLLVFLSVGLVLVTTLVWHLLRTPPEPPTPLPPEDRRQSVSRQPSFTYSEWMEEKIEDDFLDLDPVPETPVFDCVMDIKPEADPTSLTVKSMGLQERRGSNVSLTLDMCTPGCNEEGFGYLMSPREESAREYLLSASRVLQAEELHEKALDPFLLQAEFFEIPMNFVDPKEYDIPGLVRKNRYKTILPNPHSRVCLTSPDPDDPLSSYINANYIRGYGGEEKVYIATQGPIVSTVADFWRMVWQEHTPIIVMITNIEEMNEKCTEYWPEEQVAYDGVEITVQKVIHTEDYRLRLISLKSGTEERGLKHYWFTSWPDQKTPDRAPPLLHLVREVEEAAQQEGPHCAPIIVHCSAGIGRTGCFIATSICCQQLRQEGVVDILKTTCQLRQDRGGMIQTCEQYQFVHHVMSLYEKQLSHQSPE

SEQ ID NO: 69238 - protein, 533 aa, Homo sapiens
  Payload ID: 13751
  Gene Symbol: PTPN5
  Gene Name: protein tyrosine phosphatase, non-receptor type 5 (striatum-enriched)
  Uniprot ID: P54829
  ENSP ID: ENSP00000379473
MNYEGARSERENHAADDSEGGALDMCCSERLPGLPQPIVMEALDEAEGLQDSQREMPPPPPPSPPSDPAQKPPPRGAGSHSLTVRSSLCLFAASQFLLEPTAWLDSGTWGVPSLLLVFLSVGLVLVTTLVWHLLRTPPEPPTPLPPEDRRQSVSRQPSFTYSEWMEEKIEDDFLDLDPVPETPVFDCVMDIKPEADPTSLTVKSMGLQERRGSNVSLTLDMCTPGCNEEGFGYLMSPREESAREYLLSASRVLQAEELHEKALDPFLLQAEFFEIPMNFVDPKEYDIPGLVRKNRYKTILPNPHSRVCLTSPDPDDPLSSYINANYIRGYGGEEKVYIATQGPIVSTVADFWRMVWQEHTPIIVMITNIEEMNEKCTEYWPEEQVAYDGVEITVQKVIHTEDYRLRLISLKSGTEERGLKHYWFTSWPDQKTPDRAPPLLHLVREVEEAAQQEGPHCAPIIVHCSAGIGRTGCFIATSICCQQLRQEGVVDILKTTCQLRQDRGGMIQTCEQYQFVHHVMSLYEKQLSHQSPE

SEQ ID NO: 69239 - protein, 369 aa, Homo sapiens
  Payload ID: 13751
  Gene Symbol: PTPN5
  Gene Name: protein tyrosine phosphatase, non-receptor type 5 (striatum-enriched)
  ENSP ID: ENSP00000435056
MEEKIEDDFLDLDPVPETPVFDCVMDIKPEADPTSLTVKSMGLQERRGSNVSLTLDMCTPGCNEEGFGYLMSPREESAREYLLSASRVLQAEELHEKALDPFLLQAEFFEIPMNFVDPKEYDIPGLVRKNRYKTILPNPHSRVCLTSPDPDDPLSSYINANYIRGYGGEEKVYIATQGPIVSTVADFWRMVWQEHTPIIVMITNIEEMNEKCTEYWPEEQVAYDGVEITVQKVIHTEDYRLRLISLKSGTEERGLKHYWFTSWPDQKTPDRAPPLLHLVREVEEAAQQEGPHCAPIIVHCSAGIGRTGCFIATSICCQQLRQEGVVDILKTTCQLRQDRGGMIQTCEQYQFVHHVMSLYEKQLSHQSPE

SEQ ID NO: 69240 - protein, 595 aa, Homo sapiens
  Payload ID: 13752
  Gene Symbol: PTPN6
  Gene Name: protein tyrosine phosphatase, non-receptor type 6
  Uniprot ID: P29350
  ENSP ID: ENSP00000326010
MVRWFHRDLSGLDAETLLKGRGVHGSFLARPSRKNQGDFSLSVRVGDQVTHIRIQNSGDFYDLYGGEKFATLTELVEYYTQQQGVLQDRDGTIIHLKYPLNCSDPTSERWYHGHMSGGQAETLLQAKGEPWTFLVRESLSQPGDFVLSVLSDQPKAGPGSPLRVTHIKVMCEGGRYTVGGLETFDSLTDLVEHFKKTGIEEASGAFVYLRQPYYATRVNAADIENRVLELNKKQESEDTAKAGFWEEFESLQKQEVKNLHQRLEGQRPENKGKNRYKNILPFDHSRVILQGRDSNIPGSDYINANYIKNQLLGPDENAKTYIASQGCLEATVNDFWQMAWQENSRVIVMTTREVEKGRNKCVPYWPEVGMQRAYGPYSVTNCGEHDTTEYKLRTLQVSPLDNGDLIREIWHYQYLSWPDHGVPSEPGGVLSFLDQINQRQESLPHAGPIIVHCSAGIGRTGTIIVIDMLMENISTKGLDCDIDIQKTIQMVRAQRSGMVQTEAQYKFIYVAIAQFIETTKKKLEVLQSQKGQESEYGNITYPPAMKNAHAKASRTSSKHKEDVYENLHTKNKREEKVKKQRSADKEKSKGSLKRK

SEQ ID NO: 69241 - protein, 597 aa, Homo sapiens
  Payload ID: 13752
  Gene Symbol: PTPN6
  Gene Name: protein tyrosine phosphatase, non-receptor type 6
  Uniprot ID: P29350
  ENSP ID: ENSP00000382376
MLSRGWFHRDLSGLDAETLLKGRGVHGSFLARPSRKNQGDFSLSVRVGDQVTHIRIQNSGDFYDLYGGEKFATLTELVEYYTQQQGVLQDRDGTIIHLKYPLNCSDPTSERWYHGHMSGGQAETLLQAKGEPWTFLVRESLSQPGDFVLSVLSDQPKAGPGSPLRVTHIKVMCEGGRYTVGGLETFDSLTDLVEHFKKTGIEEASGAFVYLRQPYYATRVNAADIENRVLELNKKQESEDTAKAGFWEEFESLQKQEVKNLHQRLEGQRPENKGKNRYKNILPFDHSRVILQGRDSNIPGSDYINANYIKNQLLGPDENAKTYIASQGCLEATVNDFWQMAWQENSRVIVMTTREVEKGRNKCVPYWPEVGMQRAYGPYSVTNCGEHDTTEYKLRTLQVSPLDNGDLIREIWHYQYLSWPDHGVPSEPGGVLSFLDQINQRQESLPHAGPIIVHCSAGIGRTGTIIVIDMLMENISTKGLDCDIDIQKTIQMVRAQRSGMVQTEAQYKFIYVAIAQFIETTKKKLEVLQSQKGQESEYGNITYPPAMKNAHAKASRTSSKHKEDVYENLHTKNKREEKVKKQRSADKEKSKGSLKRK

SEQ ID NO: 69242 - protein, 624 aa, Homo sapiens
  Payload ID: 13752
  Gene Symbol: PTPN6
  Gene Name: protein tyrosine phosphatase, non-receptor type 6
  Uniprot ID: P29350
  ENSP ID: ENSP00000391592
MVRWFHRDLSGLDAETLLKGRGVHGSFLARPSRKNQGDFSLSVRVGDQVTHIRIQNSGDFYDLYGGEKFATLTELVEYYTQQQGVLQDRDGTIIHLKYPLNCSDPTSERWYHGHMSGGQAETLLQAKGEPWTFLVRESLSQPGDFVLSVLSDQPKAGPGSPLRVTHIKVMCEGGRYTVGGLETFDSLTDLVEHFKKTGIEEASGAFVYLRQPYYATRVNAADIENRVLELNKKQESEDTAKAGFWEEFESLQKQEVKNLHQRLEGQRPENKGKNRYKNILPFDHSRVILQGRDSNIPGSDYINANYIKNQLLGPDENAKTYIASQGCLEATVNDFWQMAWQENSRVIVMTTREVEKGRNKCVPYWPEVGMQRAYGPYSVTNCGEHDTTEYKLRTLQVSPLDNGDLIREIWHYQYLSWPDHGVPSEPGGVLSFLDQINQRQESLPHAGPIIVHCSAGIGRTGTIIVIDMLMENISTKGLDCDIDIQKTIQMVRAQRSGMVQTEAQYKFIYVAIAQFIETTKKKLEVLQSQKGQESEYGNITYPPAMKNAHAKASRTSSKSLESSAGTVAASPVRRGGQRGLPVPGPPVLSPDLHQLPVLAPLHPAADTRRMCMRTCTLRTRGRRK

SEQ ID NO: 69243 - protein, 165 aa, Homo sapiens
  Payload ID: 13752
  Gene Symbol: PTPN6
  Gene Name: protein tyrosine phosphatase, non-receptor type 6
  ENSP ID: ENSP00000438740
MVRWFHRDLSGLDAETLLKGRGVHGSFLARPSRKNQGDFSLSVRVGDQVTHIRIQNSGDFYDLYGGEKFATLTELVEYYTQQQGVLQDRDGTIIHLKYPLNCSDPTSERWYHGHMSGGQAETLLQAKGEPWTFLVRESLSQPGDFVLSVLSDQPKAGPGSPLRVT

SEQ ID NO: 69244 - protein, 144 aa, Homo sapiens
  Payload ID: 13752
  Gene Symbol: PTPN6
  Gene Name: protein tyrosine phosphatase, non-receptor type 6
  ENSP ID: ENSP00000440114
MVRVGDQVTHIRIQNSGDFYDLYGGEKFATLTELVEYYTQQQGVLQDRDGTIIHLKYPLNCSDPTSERWYHGHMSGGQAETLLQAKGEPWTFLVRESLSQPGDFVLSVLSDQPKAGPGSPLRVTHIKVMCEGGRYTVGGLETFD

SEQ ID NO: 69245 - protein, 60 aa, Homo sapiens
  Payload ID: 13752
  Gene Symbol: PTPN6
  Gene Name: protein tyrosine phosphatase, non-receptor type 6
  ENSP ID: ENSP00000441044
MVRWFHRDLSGLDAETLLKGRGVHGSFLARPSRKNQGDFSLSVRTQGISMTCMEGRSLRL

SEQ ID NO: 69246 - protein, 130 aa, Homo sapiens
  Payload ID: 13752
  Gene Symbol: PTPN6
  Gene Name: protein tyrosine phosphatase, non-receptor type 6
  ENSP ID: ENSP00000443393
MLSRGCTSSFPAPPSSPEAPRMVRWFHRDLSGLDAETLLKGRGVHGSFLARPSRKNQGDFSLSVRVGDQVTHIRIQNSGDFYDLYGGEKFATLTELVEYYTQQQGVLQDRDGTIIHLKYPLNCSDPTSER

SEQ ID NO: 69247 - protein, 58 aa, Homo sapiens
  Payload ID: 13752
  Gene Symbol: PTPN6
  Gene Name: protein tyrosine phosphatase, non-receptor type 6
  ENSP ID: ENSP00000444805
MLSRGWFHRDLSGLDAETLLKGRGVHGSFLARPSRKNQGDFSLSVRTATAPSSTSSTR

SEQ ID NO: 69248 - protein, 150 aa, Homo sapiens
  Payload ID: 13752
  Gene Symbol: PTPN6
  Gene Name: protein tyrosine phosphatase, non-receptor type 6
  ENSP ID: ENSP00000445646
MVRWFHRDLSGLDAETLLKGRGVHGSFLARPSRKNQGDFSLSVRVGDQVTHIRIQNSGDFYDLYGGEKFATLTELVEYYTQQQGVLQDRDGTIIHLKYPLNCSDPTSERWYHGHMSGGQAETLLQAPRSGSPTSRSCARVDATQWVVWRP

SEQ ID NO: 69249 - protein, 56 aa, Homo sapiens
  Payload ID: 13752
  Gene Symbol: PTPN6
  Gene Name: protein tyrosine phosphatase, non-receptor type 6
  ENSP ID: ENSP00000446345
MVRWFHRDLSGLDAETLLKGRGVHGSFLARPSRKNQGDFSLSVRTATAPSSTSSTR

SEQ ID NO: 69250 - protein, 72 aa, Homo sapiens
  Payload ID: 13752
  Gene Symbol: PTPN6
  Gene Name: protein tyrosine phosphatase, non-receptor type 6
  ENSP ID: ENSP00000476175
MVRWFHRDLSGLDAETLLKGRGVHGSFLARPSRKNQGDFSLSVRTSADPCPPASTPAPTGLTAWCPAGWGIR

SEQ ID NO: 69251 - protein, 465 aa, Homo sapiens
  Payload ID: 13753
  Gene Symbol: PTPN7
  Gene Name: protein tyrosine phosphatase, non-receptor type 7
  Uniprot ID: P35236
  ENSP ID: ENSP00000309116
MVGKAWPLTHSQGTGPWAPEGHRREAADPWWQRQQAQEGRMQLGCAWVAARRGGGRKLASWSLLSPQRQTDRQTDSWQEAAWGPQLLQQTSWLSEPPLGPAPHLSMVQAHGGRSRAQPLTLSLGAAMTQPPPEKTPAKKHVRLQERRGSNVALMLDVRSLGAVEPICSVNTPREVTLHFLRTAGHPLTRWALQRQPPSPKQLEEEFLKIPSNFVSPEDLDIPGHASKDRYKTILPNPQSRVCLGRAQSQEDGDYINANYIRGYDGKEKVYIATQGPMPNTVSDFWEMVWQEEVSLIVMLTQLREGKEKCVHYWPTEEETYGPFQIRIQDMKECPEYTVRQLTIQYQEERRSVKHILFSAWPDHQTPESAGPLLRLVAEVEESPETAAHPGPIVVHCSAGIGRTGCFIATRIGCQQLKARGEVDILGIVCQLRLDRGGMIQTAEQYQFLHHTLALYAGQLPEEPSP

SEQ ID NO: 69252 - protein, 399 aa, Homo sapiens
  Payload ID: 13753
  Gene Symbol: PTPN7
  Gene Name: protein tyrosine phosphatase, non-receptor type 7
  Uniprot ID: P35236
  ENSP ID: ENSP00000356248
MGASFWPIRQAREQQRRALSFRQTSWLSEPPLGPAPHLSMVQAHGGRSRAQPLTLSLGAAMTQPPPEKTPAKKHVRLQERRGSNVALMLDVRSLGAVEPICSVNTPREVTLHFLRTAGHPLTRWALQRQPPSPKQLEEEFLKIPSNFVSPEDLDIPGHASKDRYKTILPNPQSRVCLGRAQSQEDGDYINANYIRGYDGKEKVYIATQGPMPNTVSDFWEMVWQEEVSLIVMLTQLREGKEKCVHYWPTEEETYGPFQIRIQDMKECPEYTVRQLTIQYQEERRSVKHILFSAWPDHQTPESAGPLLRLVAEVEESPETAAHPGPIVVHCSAGIGRTGCFIATRIGCQQLKARGEVDILGIVCQLRLDRGGMIQTAEQYQFLHHTLALYAGQLPEEPSP

SEQ ID NO: 69253 - protein, 153 aa, Homo sapiens
  Payload ID: 13753
  Gene Symbol: PTPN7
  Gene Name: protein tyrosine phosphatase, non-receptor type 7
  ENSP ID: ENSP00000406042
MVQAHGGRSRAQPLTLSLGAAMTQPPPEKTPAKKHVRLQESGGLCLQAGLQCGSDAGRSVPGGRRTHLLCEHTPGGHPTLSAHCWTPPYPLGPSAPATQPQATGRRILEDPFKLCQPRRPGHPWPRLQGPIQDHLAKSPEPCLSRPGTEPGGR

SEQ ID NO: 69254 - protein, 140 aa, Homo sapiens
  Payload ID: 13753
  Gene Symbol: PTPN7
  Gene Name: protein tyrosine phosphatase, non-receptor type 7
  ENSP ID: ENSP00000417350
MVQAHGGRSRAQPLTLSLGAAMTQPPPEKTPAKKHVRLQERRGSNVALMLDVRSLGAVEPICSVNTPREVTLHFLRTAGHPLTRWALQRQPPSPKQLEEEFLKIPSNFVSPEDLDIPGHASKDRYKTILPNPQSRVCLGR

SEQ ID NO: 69255 - protein, 102 aa, Homo sapiens
  Payload ID: 13753
  Gene Symbol: PTPN7
  Gene Name: protein tyrosine phosphatase, non-receptor type 7
  ENSP ID: ENSP00000417410
MVQAHGGRSRAQPLTLSLGAAMTQPPPEKTPAKKHVRLQERRGSNVALMLDVRSLGAVEPICSVNTPREVTLHFLRTAGHPLTRWALQRQPPSPKQLEEEFL

SEQ ID NO: 69256 - protein, 122 aa, Homo sapiens
  Payload ID: 13753
  Gene Symbol: PTPN7
  Gene Name: protein tyrosine phosphatase, non-receptor type 7
  ENSP ID: ENSP00000418129
MPNTVSDFWEMVWQEEVSLIVMLTQLREGKEKCVHYWPTEEETYGPFQIRIQDMKECPEYTVRQLTIQYQEERRSVKHILFSAWPDHQTPESAGPLLRLVAEVEESPETAAHPGPIVVHCRC

SEQ ID NO: 69257 - protein, 441 aa, Homo sapiens
  Payload ID: 13753
  Gene Symbol: PTPN7
  Gene Name: protein tyrosine phosphatase, non-receptor type 7
  ENSP ID: ENSP00000418416
KRRRAASMNRLGCWPARSLPRSGRGSGQRSLGLGGHPSGPRHPGTPAAKRTWESPGVRARDCPLSTSWLSEPPLGPAPHLSMVQAHGGRSRAQPLTLSLGAAMTQPPPEKTPAKKHVRLQERRGSNVALMLDVRSLGAVEPICSVNTPREVTLHFLRTAGHPLTRWALQRQPPSPKQLEEEFLKIPSNFVSPEDLDIPGHASKDRYKTILPNPQSRVCLGRAQSQEDGDYINANYIRGYDGKEKVYIATQGPMPNTVSDFWEMVWQEEVSLIVMLTQLREGKEKCVHYWPTEEETYGPFQIRIQDMKECPEYTVRQLTIQYQEERRSVKHILFSAWPDHQTPESAGPLLRLVAEVEESPETAAHPGPIVVHCSAGIGRTGCFIATRIGCQQLKARGEVDILGIVCQLRLDRGGMIQTAEQYQFLHHTLALYAGQLPEEPSP

SEQ ID NO: 69258 - protein, 153 aa, Homo sapiens
  Payload ID: 13753
  Gene Symbol: PTPN7
  Gene Name: protein tyrosine phosphatase, non-receptor type 7
  ENSP ID: ENSP00000418837
MVQAHGGRSRAQPLTLSLGAAMTQPPPEKTPAKKHVRLQERRGSNVALMLDVRSLGAVEPICSVNTPREVTLHFLRTAGHPLTRWALQRQPPSPKQLEEEFLIPSNFVSPEDLDIPGHASKDRYKTILPNPQSRVCLGRAQSQEDGDYINANY

SEQ ID NO: 69259 - protein, 116 aa, Homo sapiens
  Payload ID: 13753
  Gene Symbol: PTPN7
  Gene Name: protein tyrosine phosphatase, non-receptor type 7
  ENSP ID: ENSP00000419196
MVQAHGGRSRAQPLTLSLGAAMTQPPPEKTPAKKHVRLQERRGSNVALMLDVRSLGAVEPICSVNTPREVTLHFLRTAGHPLTRWALQRQPPSPKQLEEEFLKRKPMDPSRSASRT

SEQ ID NO: 69260 - protein, 140 aa, Homo sapiens
  Payload ID: 13753
  Gene Symbol: PTPN7
  Gene Name: protein tyrosine phosphatase, non-receptor type 7
  ENSP ID: ENSP00000419523
MVQAHGGRSRAQPLTLSLGAAMTQPPPEKTPAKKHVRLQERTHLLCEHTPGGHPTLSAHCWTPPYPLGPSAPATQPQATGRRILEDPFKLCQPRRPGHPWPRLQGPIQDHLAKSPEPCLSRPGTEPGGRRLHQCQLHPRL

SEQ ID NO: 69261 - protein, 76 aa, Homo sapiens
  Payload ID: 13753
  Gene Symbol: PTPN7
  Gene Name: protein tyrosine phosphatase, non-receptor type 7
  ENSP ID: ENSP00000419733
MVQAHGGRSRAQPLTLSLGAAMTQPPPEKTPAKKHVRLQERRSLQTLSAPKTWTSLATPPRTDTRPSCQIPRAVSV

SEQ ID NO: 69262 - protein, 163 aa, Homo sapiens
  Payload ID: 13753
  Gene Symbol: PTPN7
  Gene Name: protein tyrosine phosphatase, non-receptor type 7
  ENSP ID: ENSP00000419993
MTQPPPEKTPAKKHVRLQERRGSNVALMLDVRSLGAVEPICSVNTPREVTLHFLRTAGHPLTRWALQRQPPSPKQLEEEFLKIPSNFVSPEDLDIPGHASKDRYKTILPNPQSRVCLGRAQSQEDGDYINANYIRGYDGKEKVYIATQGPMPNTVSDFWEMVW

SEQ ID NO: 69263 - protein, 154 aa, Homo sapiens
  Payload ID: 13753
  Gene Symbol: PTPN7
  Gene Name: protein tyrosine phosphatase, non-receptor type 7
  ENSP ID: ENSP00000420434
MVQAHGGRSRAQPLTLSLGAAMTQPPPEKTPAKKHVRLQERRGSNVALMLDVRSLGAVEPICSVNTPREVTLHFLRTAGHPLTRWALQRQPPSPKQLEEEFLKIPSNFVSPEDLDIPGHASKDRYKTILPNPQSRVCLGRAQSQEDGDYINANY

SEQ ID NO: 69264 - protein, 360 aa, Homo sapiens
  Payload ID: 13753
  Gene Symbol: PTPN7
  Gene Name: protein tyrosine phosphatase, non-receptor type 7
  Uniprot ID: P35236
  ENSP ID: ENSP00000420506
MVQAHGGRSRAQPLTLSLGAAMTQPPPEKTPAKKHVRLQERRGSNVALMLDVRSLGAVEPICSVNTPREVTLHFLRTAGHPLTRWALQRQPPSPKQLEEEFLKIPSNFVSPEDLDIPGHASKDRYKTILPNPQSRVCLGRAQSQEDGDYINANYIRGYDGKEKVYIATQGPMPNTVSDFWEMVWQEEVSLIVMLTQLREGKEKCVHYWPTEEETYGPFQIRIQDMKECPEYTVRQLTIQYQEERRSVKHILFSAWPDHQTPESAGPLLRLVAEVEESPETAAHPGPIVVHCSAGIGRTGCFIATRIGCQQLKARGEVDILGIVCQLRLDRGGMIQTAEQYQFLHHTLALYAGQLPEEPSP

SEQ ID NO: 69265 - protein, 116 aa, Homo sapiens; identical to SEQ ID NO: 69259
  Payload ID: 13753
  Gene Symbol: PTPN7
  Gene Name: protein tyrosine phosphatase, non-receptor type 7
  ENSP ID: ENSP00000485691

SEQ ID NO: 69266 - protein, 583 aa, Homo sapiens
  Payload ID: 13754
  Gene Symbol: PTPN9
  Gene Name: protein tyrosine phosphatase, non-receptor type 9
  ENSP ID: ENSP00000303554
MAPELTPEEEQATKQFLEEINKWTVQYNVSPLSWNVAVKFLMARKFDVLRAIELFHSYRETRRKEGIVKLKPHEEPLRSEILSGKFTILNVRDPTGASIALFTARLHHPHKSVQHVVLQALFYLLDRAVDSFETQRNGLVFIYDMCGSNYANFELDLGKKVLNLLKGAFPARLKKVLIVGAPIWFRVPYSIISLLLKDKVRERIQILKTSEVTQHLPRECLPENLGGYVKIDLATWNFQFLPQVNGHPDPFDEIILFSLPPALDWDSVHVPGPHAMTIQELVDYVNARQKQGIYEEYEDIRRENPVGTFHCSMSPGNLEKNRYGDVPCLDQTRVKLTKRSGHTQTDYINASFMDGYKQKNAYIGTQGPLENTYRDFWLMVWEQKVLVIVMTTRFEEGGRRKCGQYWPLEKDSRIRFGFLTVTNLGVENMNHYKKTTLEIHNTEERQKRQVTHFQFLSWPDYGVPSSAASLIDFLRVVRNQQSLAVSNMGARSKGQCPEPPIVVHCSAGIGRTGTFCSLDICLAQLEELGTLNVFQTVSRMRTQRAFSIQTPEQYYFCYKAILEFAEKEGMVSSGQNLLAVESQ

SEQ ID NO: 69267 - protein, 174 aa, Homo sapiens
  Payload ID: 13754
  Gene Symbol: PTPN9
  Gene Name: protein tyrosine phosphatase, non-receptor type 9
  ENSP ID: ENSP00000455934
VKLKPHEEPLRSEILSGKFTILNVRDPTGASIALFTARLHHPHKSVQHVVLQALFYLLDRAVDSFETQRNGLVFIYDMCGSNYANFELDLGKKVLNLLKLPFSSTDLEKPQHSSMENIQHLEQTSPKASSLKCDKLLSSFPSKMQQFISGPKCPRSFYQQIKNHSRKTPVISTK

SEQ ID NO: 69268 - protein, 593 aa, Homo sapiens
  Payload ID: 13754
  Gene Symbol: PTPN9
  Gene Name: protein tyrosine phosphatase, non-receptor type 9
  Uniprot ID: P43378
  ENSP ID: ENSP00000482732
MEPATAPRPDMAPELTPEEEQATKQFLEEINKWTVQYNVSPLSWNVAVKFLMARKFDVLRAIELFHSYRETRRKEGIVKLKPHEEPLRSEILSGKFTILNVRDPTGASIALFTARLHHPHKSVQHVVLQALFYLLDRAVDSFETQRNGLVFIYDMCGSNYANFELDLGKKVLNLLKGAFPARLKKVLIVGAPIWFRVPYSIISLLLKDKVRERIQILKTSEVTQHLPRECLPENLGGYVKIDLATWNFQFLPQVNGHPDPFDEIILFSLPPALDWDSVHVPGPHAMTIQELVDYVNARQKQGIYEEYEDIRRENPVGTFHCSMSPGNLEKNRYGDVPCLDQTRVKLTKRSGHTQTDYINASFMDGYKQKNAYIGTQGPLENTYRDFWLMVWEQKVLVIVMTTRFEEGGRRKCGQYWPLEKDSRIRFGFLTVTNLGVENMNHYKKTTLEIHNTEERQKRQVTHFQFLSWPDYGVPSSAASLIDFLRVVRNQQSLAVSNMGARSKGQCPEPPIVVHCSAGIGRTGTFCSLDICLAQLEELGTLNVFQTVSRMRTQRAFSIQTPEQYYFCYKAILEFAEKEGMVSSGQNLLAVESQ

SEQ ID NO: 69269 - protein, 793 aa, Homo sapiens
  Payload ID: 13755
  Gene Symbol: PTPRA
  Gene Name: protein tyrosine phosphatase, receptor type, A
  Uniprot ID: P18433
  ENSP ID: ENSP00000216877
MDSWFILVLLGSGLICVSANNATTVAPSVGITRLINSSTAEPVKEEAKTSNPTSSLTSLSVAPTFSPNITLGPTYLTTVNSSDSDNGTTRTASTNSIGITISPNGTWLPDNQFTDARTEPWEGNSSTAATTPETFPPSDETPIIAVMVALSSLLVIVFIIIVLYMLRFKKYKQAGSHSNSFRLSNGRTEDVEPQSVPLLARSPSTNRKYPPLPVDKLEEEINRRMADDNKLFREEFNALPACPIQATCEAASKEENKEKNRYVNILPYDHSRVHLTPVEGVPDSDYINASFINGYQEKNKFIAAQGPKEETVNDFWRMIWEQNTATIVMVTNLKERKECKCAQYWPDQGCWTYGNIRVSVEDVTVLVDYTVRKFCIQQVGDMTNRKPQRLITQFHFTSWPDFGVPFTPIGMLKFLKKVKACNPQYAGAIVVHCSAGVGRTGTFVVIDAMLDMMHTERKVDVYGFVSRIRAQRCQMVQTDMQYVFIYQALLEHYLYGDTELEVTSLETHLQKIYNKIPGTSNNGLEEEFKKLTSIKIQNDKMRTGNLPANMKKNRVLQIIPYEFNRVIIPVKRGEENTDYVNASFIDGYRQKDSYIASQGPLLHTIEDFWRMIWEWKSCSIVMLTELEERGQEKCAQYWPSDGLVSYGDITVELKKEEECESYTVRDLLVTNTRENKSRQIRQFHFHGWPEVGIPSDGKGMISIIAAVQKQQQQSGNHPITVHCSAGAGRTGTFCALSTVLERVKAEGILDVFQTVKSLRLQRPHMVQTLEQYEFCYKVVQEYIDAFSDYANFK

SEQ ID NO: 69270 - protein, 793 aa, Homo sapiens; identical to SEQ ID NO: 69269
  Payload ID: 13755
  Gene Symbol: PTPRA
  Gene Name: protein tyrosine phosphatase, receptor type, A
  Uniprot ID: P18433
  ENSP ID: ENSP00000314568

SEQ ID NO: 69271 - protein, 793 aa, Homo sapiens; identical to SEQ ID NO: 69269
  Payload ID: 13755
  Gene Symbol: PTPRA
  Gene Name: protein tyrosine phosphatase, receptor type, A
  Uniprot ID: P18433
  ENSP ID: ENSP00000348468

SEQ ID NO: 69272 - protein, 802 aa, Homo sapiens
  Payload ID: 13755
  Gene Symbol: PTPRA
  Gene Name: protein tyrosine phosphatase, receptor type, A
  Uniprot ID: P18433
  ENSP ID: ENSP00000369756
MDSWFILVLLGSGLICVSANNATTVAPSVGITRLINSSTAEPVKEEAKTSNPTSSLTSLSVAPTFSPNITLGPTYLTTVNSSDSDNGTTRTASTNSIGITISPNGTWLPDNQFTDARTEPWEGNSSTAATTPETFPPSGNSDSKDRRDETPIIAVMVALSSLLVIVFIIIVLYMLRFKKYKQAGSHSNSFRLSNGRTEDVEPQSVPLLARSPSTNRKYPPLPVDKLEEEINRRMADDNKLFREEFNALPACPIQATCEAASKEENKEKNRYVNILPYDHSRVHLTPVEGVPDSDYINASFINGYQEKNKFIAAQGPKEETVNDFWRMIWEQNTATIVMVTNLKERKECKCAQYWPDQGCWTYGNIRVSVEDVTVLVDYTVRKFCIQQVGDMTNRKPQRLITQFHFTSWPDFGVPFTPIGMLKFLKKVKACNPQYAGAIVVHCSAGVGRTGTFVVIDAMLDMMHTERKVDVYGFVSRIRAQRCQMVQTDMQYVFIYQALLEHYLYGDTELEVTSLETHLQKIYNKIPGTSNNGLEEEFKKLTSIKIQNDKMRTGNLPANMKKNRVLQIIPYEFNRVIIPVKRGEENTDYVNASFIDGYRQKDSYIASQGPLLHTIEDFWRMIWEWKSCSIVMLTELEERGQEKCAQYWPSDGLVSYGDITVELKKEEECESYTVRDLLVTNTRENKSRQIRQFHFHGWPEVGIPSDGKGMISIIAAVQKQQQQSGNHPITVHCSAGAGRTGTFCALSTVLERVKAEGILDVFQTVKSLRLQRPHMVQTLEQYEFCYKVVQEYIDAFSDYANFK

SEQ ID NO: 69273 - protein, 802 aa, Homo sapiens; identical to SEQ ID NO: 69272
  Payload ID: 13755
  Gene Symbol: PTPRA
  Gene Name: protein tyrosine phosphatase, receptor type, A
  Uniprot ID: P18433
  ENSP ID: ENSP00000382787

SEQ ID NO: 69274 - protein, 138 aa, Homo sapiens
  Payload ID: 13755
  Gene Symbol: PTPRA
  Gene Name: protein tyrosine phosphatase, receptor type, A
  ENSP ID: ENSP00000390775
MDSWFILVLLGSGLICVSANNATTVAPSVGITRLINSSTAEPVKEEAKTSNPTSSLTSLSVAPTFSPNITLGPTYLTTVNSSDSDNGTTRTASTNSIGITISPNGTWLPDNQFTDARTEPWEGNSSTAATTPETFPPS

SEQ ID NO: 69275 - protein, 175 aa, Homo sapiens
  Payload ID: 13755
  Gene Symbol: PTPRA
  Gene Name: protein tyrosine phosphatase, receptor type, A
  ENSP ID: ENSP00000394132
MDSWFILVLLGSGLICVSANNATTVAPSVGITRLINSSTAEPVKEEAKTSNPTSSLTSLSVAPTFSPNITLGPTYLTTVNSSDSDNGTTRTASTNSIGITISPNGTWLPDNQFTDARTEPWEGNSSTAATTPETFPPSGNSDSKDRRDETPIIAVMVALSSLLVIVFIIIVLYML

SEQ ID NO: 69276 - protein, 253 aa, Homo sapiens
  Payload ID: 13755
  Gene Symbol: PTPRA
  Gene Name: protein tyrosine phosphatase, receptor type, A
  ENSP ID: ENSP00000414089
MDSWFILVLLGSGLICVSANNATTVAPSVGITRLINSSTAEPVKEEAKTSNPTSSLTSLSVAPTFSPNITLGPTYLTTVNSSDSDNGTTRTASTNSIGITISPNGTWLPDNQFTDARTEPWEGNSSTAATTPETFPPSDETPIIAVMVALSSLLVIVFIIIVLYMLRFKKYKQAGSHSNSFRLSNGRTEDVEPQSVPLLARSPSTNRKYPPLPVDKLEEEINRRMADDNKLFREEFNALPACPIQATCEAASK

SEQ ID NO: 69277 - protein, 1997 aa, Homo sapiens
  Payload ID: 13756
  Gene Symbol: PTPRB
  Gene Name: protein tyrosine phosphatase, receptor type, B
  Uniprot ID: P23467
  ENSP ID: ENSP00000261266
MLSHGAGLALWITLSLLQTGLAEPERCNFTLAESKASSHSVSIQWRILGSPCNFSLIYSSDTLGAALCPTFRIDNTTYGCNLQDLQAGTIYNFRIISLDEERTVVLQTDPLPPARFGVSKEKTTSTSLHVWWTPSSGKVTSYEVQLFDENNQKIQGVQIQESTSWNEYTFFNLTAGSKYNIAITAVSGGKRSFSVYTNGSTVPSPVKDIGISTKANSLLISWSHGSGNVERYRLMLMDKGILVHGGVVDKHATSYAFHGLTPGYLYNLTVMTEAAGLQNYRWKLVRTAPMEVSNLKVTNDGSLTSLKVKWQRPPGNVDSYNITLSHKGTIKESRVLAPWITETHFKELVPGRLYQVTVSCVSGELSAQKMAVGRTFPDKVANLEANNNGRMRSLVVSWSPPAGDWEQYRILLFNDSVVLLNITVGKEETQYVMDDTGLVPGRQYEVEVIVESGNLKNSERCQGRTVPLAVLQLRVKHANETSLSIMWQTPVAEWEKYIISLADRDLLLIHKSLSKDAKEFTFTDLVPGRKYMATVTSISGDLKNSSSVKGRTVPAQVTDLHVANQGMTSSLFTNWTQAQGDVEFYQVLLIHENVVIKNESISSETSRYSFHSLKSGSLYSVVVTTVSGGISSRQVVVEGRTVPSSVSGVTVNNSGRNDYLSVSWLLAPGDVDNYEVTLSHDGKVVQSLVIAKSVRECSFSSLTPGRLYTVTITTRSGKYENHSFSQERTVPDKVQGVSVSNSARSDYLRVSWVHATGDFDHYEVTIKNKNNFIQTKSIPKSENECVFVQLVPGRLYSVTVTTKSGQYEANEQGNGRTIPEPVKDLTLRNRSTEDLHVTWSGANGDVDQYEIQLLFNDMKVFPPFHLVNTATEYRFTSLTPGRQYKILVLTISGDVQQSAFIEGFTVPSAVKNIHISPNGATDSLTVNWTPGGGDVDSYTVSAFRHSQKVDSQTIPKHVFEHTFHRLEAGEQYQIMIASVSGSLKNQINVVGRTVPASVQGVIADNAYSSYSLIVSWQKAAGVAERYDILLLTENGILLRNTSEPATTKQHKFEDLTPGKKYKIQILTVSGGLFSKEAQTEGRTVPAAVTDLRITENSTRHLSFRWTASEGELSWYNIFLYNPDGNLQERAQVDPLVQSFSFQNLLQGRMYKMVIVTHSGELSNESFIFGRTVPASVSHLRGSNRNTTDSLWFNWSPASGDFDFYELILYNPNGTKKENWKDKDLTEWRFQGLVPGRKYVLWVVTHSGDLSNKVTAESRTAPSPPSLMSFADIANTSLAITWKGPPDWTDYNDFELQWLPRDALTVFNPYNNRKSEGRIVYGLRPGRSYQFNVKTVSGDSWKTYSKPIFGSVRTKPDKIQNLHCRPQNSTAIACSWIPPDSDFDGYSIECRKMDTQEVEFSRKLEKEKSLLNIMMLVPHKRYLVSIKVQSAGMTSEVVEDSTITMIDRPPPPPPHIRVNEKDVLISKSSINFTVNCSWFSDTNGAVKYFTVVVREADGSDELKPEQQHPLPSYLEYRHNASIRVYQTNYFASKCAENPNSNSKSFNIKLGAEMESLGGKCDPTQQKFCDGPLKPHTAYRISIRAFTQLFDEDLKEFTKPLYSDTFFSLPITTESEPLFGAIEGVSAGLFLIGMLVAVVALLICRQKVSHGRERPSARLSIRRDRPLSVHLNLGQKGNRKTSCPIKINQFEGHFMKLQADSNYLLSKEYEELKDVGRNQSCDIALLPENRGKNRYNNILPYDATRVKLSNVDDDPCSDYINASYIPGNNFRREYIVTQGPLPGTKDDFWKMVWEQNVHNIVMVTQCVEKGRVKCDHYWPADQDSLYYGDLILQMLSESVLPEWTIREFKICGEEQLDAHRLIRHFHYTVWPDHGVPETTQSLIQFVRTVRDYINRSPGAGPTVVHCSAGVGRTGTFIALDRILQQLDSKDSVDIYGAVHDLRLHRVHMVQTECQYVYLHQCVRDVLRARKLRSEQENPLFPIYENVNPEYHRDPVYSRH

SEQ ID NO: 69278 - protein, 2215 aa, Homo sapiens
  Payload ID: 13756
  Gene Symbol: PTPRB
  Gene Name: protein tyrosine phosphatase, receptor type, B
  Uniprot ID: P23467
  ENSP ID: ENSP00000334928
MEAEFYMVILTCLIFRNSEGFQIVHVQKQQCLFKNEKVVVGSCNRTIQNQQWMWTEDEKLLHVKSALCLAISNSSRGPSRSAILDRCSQAPRWTCYDQEGFLEVENASLFLQKQGSRVVVKKARKYLHSWMKIDVNKEGKLVNESLCLQKAGLGAEVSVRSTRNTAPPQILTTFNAVPDGLVFLIRNTTEAFIRNAAENYSQNSSERQHPNLHMTGITDTSWVLSTTQPFSSTTEETGLAEPERCNFTLAESKASSHSVSIQWRILGSPCNFSLIYSSDTLGAALCPTFRIDNTTYGCNLQDLQAGTIYNFRIISLDEERTVVLQTDPLPPARFGVSKEKTTSTSLHVWWTPSSGKVTSYEVQLFDENNQKIQGVQIQESTSWNEYTFFNLTAGSKYNIAITAVSGGKRSFSVYTNGSTVPSPVKDIGISTKANSLLISWSHGSGNVERYRLMLMDKGILVHGGVVDKHATSYAFHGLTPGYLYNLTVMTEAAGLQNYRWKLVRTAPMEVSNLKVTNDGSLTSLKVKWQRPPGNVDSYNITLSHKGTIKESRVLAPWITETHFKELVPGRLYQVTVSCVSGELSAQKMAVGRTFPDKVANLEANNNGRMRSLVVSWSPPAGDWEQYRILLFNDSVVLLNITVGKEETQYVMDDTGLVPGRQYEVEVIVESGNLKNSERCQGRTVPLAVLQLRVKHANETSLSIMWQTPVAEWEKYIISLADRDLLLIHKSLSKDAKEFTFTDLVPGRKYMATVTSISGDLKNSSSVKGRTVPAQVTDLHVANQGMTSSLFTNWTQAQGDVEFYQVLLIHENVVIKNESISSETSRYSFHSLKSGSLYSVVVTTVSGGISSRQVVVEGRTVPSSVSGVTVNNSGRNDYLSVSWLLAPGDVDNYEVTLSHDGKVVQSLVIAKSVRECSFSSLTPGRLYTVTITTRSGKYENHSFSQERTVPDKVQGVSVSNSARSDYLRVSWVHATGDFDHYEVTIKNKNNFIQTKSIPKSENECVFVQLVPGRLYSVTVTTKSGQYEANEQGNGRTIPEPVKDLTLRNRSTEDLHVTWSGANGDVDQYEIQLLFNDMKVFPPFHLVNTATEYRFTSLTPGRQYKILVLTISGDVQQSAFIEGFTVPSAVKNIHISPNGATDSLTVNWTPGGGDVDSYTVSAFRHSQKVDSQTIPKHVFEHTFHRLEAGEQYQIMIASVSGSLKNQINVVGRTVPASVQGVIADNAYSSYSLIVSWQKAAGVAERYDILLLTENGILLRNTSEPATTKQHKFEDLTPGKKYKIQILTVSGGLFSKEAQTEGRTVPAAVTDLRITENSTRHLSFRWTASEGELSWYNIFLYNPDGNLQERAQVDPLVQSFSFQNLLQGRMYKMVIVTHSGELSNESFIFGRTVPASVSHLRGSNRNTTDSLWFNWSPASGDFDFYELILYNPNGTKKENWKDKDLTEWRFQGLVPGRKYVLWVVTHSGDLSNKVTAESRTAPSPPSLMSFADIANTSLAITWKGPPDWTDYNDFELQWLPRDALTVFNPYNNRKSEGRIVYGLRPGRSYQFNVKTVSGDSWKTYSKPIFGSVRTKPDKIQNLHCRPQNSTAIACSWIPPDSDFDGYSIECRKMDTQEVEFSRKLEKEKSLLNIMMLVPHKRYLVSIKVQSAGMTSEVVEDSTITMIDRPPPPPPHIRVNEKDVLISKSSINFTVNCSWFSDTNGAVKYFTVVVREADGSDELKPEQQHPLPSYLEYRHNASIRVYQTNYFASKCAENPNSNSKSFNIKLGAEMESLGGKCDPTQQKFCDGPLKPHTAYRISIRAFTQLFDEDLKEFTKPLYSDTFFSLPITTESEPLFGAIEGVSAGLFLIGMLVAVVALLICRQKVSHGRERPSARLSIRRDRPLSVHLNLGQKGNRKTSCPIKINQFEGHFMKLQADSNYLLSKEYEELKDVGRNQSCDIALLPENRGKNRYNNILPYDATRVKLSNVDDDPCSDYINASYIPGNNFRREYIVTQGPLPGTKDDFWKMVWEQNVHNIVMVTQCVEKGRVKCDHYWPADQDSLYYGDLILQMLSESVLPEWTIREFKICGEEQLDAHRLIRHFHYTVWPDHGVPETTQSLIQFVRTVRDYINRSPGAGPTVVHCSAGVGRTGTFIALDRILQQLDSKDSVDIYGAVHDLRLHRVHMVQTECQYVYLHQCVRDVLRARKLRSEQENPLFPIYENVNPEYHRDPVYSRH

SEQ ID NO: 69279 - protein, 919 aa, Homo sapiens
  Payload ID: 13756
  Gene Symbol: PTPRB
  Gene Name: protein tyrosine phosphatase, receptor type, B
  ENSP ID: ENSP00000393028
MEAEFYMVILTCLIFRNSEGFQIVHVQKQQCLFKNEKVVVGSCNRTIQNQQWMWTEDEKLLHVKSALCLAISNSSRGPSRSAILDRCSQAPRWTCYDQEGFLEVENASLFLQKQGSRVVVKKARKYLHSWMKIDVNKEGKLVNESLCLQKAGLGAEVSVRSTRNTAPPQILTTFNAVPDGLVFLIRNTTEAFIRNAAENYSQNSSERQHPNLHMTGITDTSWVLSTTQPFSSTTEETGLAEPERCNFTLAESKASSHSVSIQWRILGSPCNFSLIYSSDTLGAALCPTFRIDNTTYGCNLQDLQAGTIYNFRIISLDEERTVVLQTDPLPPARFGVSKEKTTSTSLHVWWTPSSGKVTSYEVQLFDENNQKIQGVQIQESTSWNEYTFFNLTAGSKYNIAITAVSGGKRSFSVYTNGSTVPSPVKDIGISTKANSLLISWSHGSGNVERYRLMLMDKGILVHGGVVDKHATSYAFHGLTPGYLYNLTVMTEAAGLQNYRWKLVRTAPMEVSNLKVTNDGSLTSLKVKWQRPPGNVDSYNITLSHKGTIKESRVLAPWITETHFKELVPGRLYQVTVSCVSGELSAQKMAVGRTFPDKVANLEANNNGRMRSLVVSWSPPAGDWEQYRILLFNDSVVLLNITVGKEETQYVMDDTGLVPGRQYEVEVIVESGNLKNSERCQGRTVPLAVLQLRVKHANETSLSIMWQTPVAEWEKYIISLADRDLLLIHKSLSKDAKEFTFTDLVPGRKYMATVTSISGDLKNSSSVKGRTVPAQVTDLHVANQGMTSSLFTNWTQAQGDVEFYQVLLIHENVVIKNESISSETSRYSFHSLKSGSLYSVVVTTVSGGISSRQVVVEGRTVPDKVQGVSVSNSARSDYLRVSWVHATGDFDHYEVTIKNKNNFIQTKAFPSQKTNVYLFS

SEQ ID NO: 69280 - protein, 1907 aa, Homo sapiens
  Payload ID: 13756
  Gene Symbol: PTPRB
  Gene Name: protein tyrosine phosphatase, receptor type, B
  Uniprot ID: P23467
  ENSP ID: ENSP00000438927
MLSHGAGLALWITLSLLQTGLAEPERCNFTLAESKASSHSVSIQWRILGSPCNFSLIYSSDTLGAALCPTFRIDNTTYGCNLQDLQAGTIYNFRIISLDEERTVVLQTDPLPPARFGVSKEKTTSTSLHVWWTPSSGKVTSYEVQLFDENNQKIQGVQIQESTSWNEYTFFNLTAGSKYNIAITAVSGGKRSFSVYTNGSTVPSPVKDIGISTKANSLLISWSHGSGNVERYRLMLMDKGILVHGGVVDKHATSYAFHGLTPGYLYNLTVMTEAAGLQNYRWKLVRTAPMEVSNLKVTNDGSLTSLKVKWQRPPGNVDSYNITLSHKGTIKESRVLAPWITETHFKELVPGRLYQVTVSCVSGELSAQKMAVGRTFPDKVANLEANNNGRMRSLVVSWSPPAGDWEQYRILLFNDSVVLLNITVGKEETQYVMDDTGLVPGRQYEVEVIVESGNLKNSERCQGRTVPLAVLQLRVKHANETSLSIMWQTPVAEWEKYIISLADRDLLLIHKSLSKDAKEFTFTDLVPGRKYMATVTSISGDLKNSSSVKGRTVPAQVTDLHVANQGMTSSLFTNWTQAQGDVEFYQVLLIHENVVIKNESISSETSRYSFHSLKSGSLYSVVVTTVSGGISSRQVVVEGRTVPSSVSGVTVNNSGRNDYLSVSWLLAPGDVDNYEVTLSHDGKVVQSLVIAKSVRECSFSSLTPGRLYTVTITTRSGKYENHSFSQERTVPDKVQGVSVSNSARSDYLRVSWVHATGDFDHYEVTIKNKNNFIQTKSIPKSENECVFVQLVPGRLYSVTVTTKSGQYEANEQGNGRTIPEPVKDLTLRNRSTEDLHVTWSGANGDVDQYEIQLLFNDMKVFPPFHLVNTATEYRFTSLTPGRQYKILVLTISGDVQQSAFIEGFTVPSAVKNIHISPNGATDSLTVNWTPGGGDVDSYTVSAFRHSQKVDSQTIPKHVFEHTFHRLEAGEQYQIMIASVSGSLKNQINVVGRTVPAAVTDLRITENSTRHLSFRWTASEGELSWYNIFLYNPDGNLQERAQVDPLVQSFSFQNLLQGRMYKMVIVTHSGELSNESFIFGRTVPASVSHLRGSNRNTTDSLWFNWSPASGDFDFYELILYNPNGTKKENWKDKDLTEWRFQGLVPGRKYVLWVVTHSGDLSNKVTAESRTAPSPPSLMSFADIANTSLAITWKGPPDWTDYNDFELQWLPRDALTVFNPYNNRKSEGRIVYGLRPGRSYQFNVKTVSGDSWKTYSKPIFGSVRTKPDKIQNLHCRPQNSTAIACSWIPPDSDFDGYSIECRKMDTQEVEFSRKLEKEKSLLNIMMLVPHKRYLVSIKVQSAGMTSEVVEDSTITMIDRPPPPPPHIRVNEKDVLISKSSINFTVNCSWFSDTNGAVKYFTVVVREADGSDELKPEQQHPLPSYLEYRHNASIRVYQTNYFASKCAENPNSNSKSFNIKLGAEMESLGGKCDPTQQKFCDGPLKPHTAYRISIRAFTQLFDEDLKEFTKPLYSDTFFSLPITTESEPLFGAIEGVSAGLFLIGMLVAVVALLICRQKVSHGRERPSARLSIRRDRPLSVHLNLGQKGNRKTSCPIKINQFEGHFMKLQADSNYLLSKEYEELKDVGRNQSCDIALLPENRGKNRYNNILPYDATRVKLSNVDDDPCSDYINASYIPGNNFRREYIVTQGPLPGTKDDFWKMVWEQNVHNIVMVTQCVEKGRVKCDHYWPADQDSLYYGDLILQMLSESVLPEWTIREFKICGEEQLDAHRLIRHFHYTVWPDHGVPETTQSLIQFVRTVRDYINRSPGAGPTVVHCSAGVGRTGTFIALDRILQQLDSKDSVDIYGAVHDLRLHRVHMVQTECQYVYLHQCVRDVLRARKLRSEQENPLFPIYENVNPEYHRDPVYSRH

SEQ ID NO: 69281 - protein, 103 aa, Homo sapiens
  Payload ID: 13756
  Gene Symbol: PTPRB
  Gene Name: protein tyrosine phosphatase, receptor type, B
  ENSP ID: ENSP00000446934
  MOD_RES (1)..(1): Any amino acid
XLWITLSLLQTGLAEPERCNFTLAESKASSHSVSIQWRILGSPCNFSLIYSSDTLGAALCPTFRIDNTTYGCNLQDLQAGTIYNFRIISLDEERTVVLQTGKG

SEQ ID NO: 69282 - protein, 1407 aa, Homo sapiens
  Payload ID: 13756
  Gene Symbol: PTPRB
  Gene Name: protein tyrosine phosphatase, receptor type, B
  ENSP ID: ENSP00000446982
MEAEFYMVILTCLIFRNSEGFQIVHVQKQQCLFKNEKVVVGSCNRTIQNQQWMWTEDEKLLHVKSALCLAFIRNAAENYSQNSSERQHPNLHMTGITDTSWVLSTTQPFSSTTEETGLAEPERCNFTLAESKASSHSVSIQWRILGSPCNFSLIYSSDTLGAALCPTFRIDNTTYGCNLQDLQAGTIYNFRIISLDEERTVVLQTDPLPPARFGVSKEKTTSTSLHVWWTPSSGKVTSYEVQLFDENNQKIQGVQIQESTSWNEYTFFNLTAGSKYNIAITAVSGGKRSFSVYTNGSTVPSPVKDIGISTKANSLLISWSHGSGNVERYRLMLMDKGILVHGGVVDKHATSYAFHGLTPGYLYNLTVMTEAAGLQNYRWKLVRTAPMEVSNLKVTNDGSLTSLKVKWQRPPGNVDSYNITLSHKGTIKESRVLAPWITETHFKELVPGRLYQVTVSCVSGELSAQKMAVGRTFPDKVANLEANNNGRMRSLVVSWSPPAGDWEQYRILLFNDSVVLLNITVGKEETQYVMDDTGLVPGRQYEVEVIVESGNLKNSERCQGRTVPLAVLQLRVKHANETSLSIMWQTPVAEWEKYIISLADRDLLLIHKSLSKDAKEFTFTDLVPGRKYMATVTSISGDLKNSSSVKGRTVPAQVTDLHVANQGMTSSLFTNWTQAQGDVEFYQVLLIHENVVIKNESISSETSRYSFHSLKSGSLYSVVVTTVSGGISSRQVVVEGRTVPSSVSGVTVNNSGRNDYLSVSWLLAPGDVDNYEVTLSHDGKVVQSLVIAKSVRECSFSSLTPGRLYTVTITTRSGKYENHSFSQERTVPDKVQGVSVSNSARSDYLRVSWVHATGDFDHYEVTIKNKNNFIQTKSIPKSENECVFVQLVPGRLYSVTVTTKSGQYEANEQGNGRTIPEPVKDLTLRNRSTEDLHVTWSGANGDVDQYEIQLLFNDMKVFPPFHLVNTATEYRFTSLTPGRQYKILVLTISGDVQQSAFIEGFTVPSAVKNIHISPNGATDSLTVNWTPGGGDVDSYTVSAFRHSQKVDSQTIPKHVFEHTFHRLEAGEQYQIMIASVSGSLKNQINVVGRTVPASVQGVIADNAYSSYSLIVSWQKAAGVAERYDILLLTENGILLRNTSEPATTKQHKFEDLTPGKKYKIQILTVSGGLFSKEAQTEGRTVPAAVTDLRITENSTRHLSFRWTASEGELSWYNIFLYNPDGNLQERAQVDPLVQSFSFQNLLQGRMYKMVIVTHSGELSNESFIFGRTVPASVSHLRGSNRNTTDSLWFNWSPASGDFDFYELILYNPNGTKKENWKDKDLTEWRFQGLVPGRKYVLWVVTHSGDLSNKVTAESRTAPSPPSLMSFADIANTSLAITWKGPPDWTDYNDFELQWLPRDALTVFNPYN

SEQ ID NO: 69283 - protein, 1907 aa, Homo sapiens
  Payload ID: 13756
  Gene Symbol: PTPRB
  Gene Name: protein tyrosine phosphatase, receptor type, B
  Uniprot ID: P23467
  ENSP ID: ENSP00000447302
MLSHGAGLALWITLSLLQTGLAEPERCNFTLAESKASSHSVSIQWRILGSPCNFSLIYSSDTLGAALCPTFRIDNTTYGCNLQDLQAGTIYNFRIISLDEERTVVLQTDPLPPARFGVSKEKTTSTSLHVWWTPSSGKVTSYEVQLFDENNQKIQGVQIQESTSWNEYTFFNLTAGSKYNIAITAVSGGKRSFSVYTNGSTVPSPVKDIGISTKANSLLISWSHGSGNVERYRLMLMDKGILVHGGVVDKHATSYAFHGLTPGYLYNLTVMTEAAGLQNYRWKLVRTAPMEVSNLKVTNDGSLTSLKVKWQRPPGNVDSYNITLSHKGTIKESRVLAPWITETHFKELVPGRLYQVTVSCVSGELSAQKMAVGRTFPLAVLQLRVKHANETSLSIMWQTPVAEWEKYIISLADRDLLLIHKSLSKDAKEFTFTDLVPGRKYMATVTSISGDLKNSSSVKGRTVPAQVTDLHVANQGMTSSLFTNWTQAQGDVEFYQVLLIHENVVIKNESISSETSRYSFHSLKSGSLYSVVVTTVSGGISSRQVVVEGRTVPSSVSGVTVNNSGRNDYLSVSWLLAPGDVDNYEVTLSHDGKVVQSLVIAKSVRECSFSSLTPGRLYTVTITTRSGKYENHSFSQERTVPDKVQGVSVSNSARSDYLRVSWVHATGDFDHYEVTIKNKNNFIQTKSIPKSENECVFVQLVPGRLYSVTVTTKSGQYEANEQGNGRTIPEPVKDLTLRNRSTEDLHVTWSGANGDVDQYEIQLLFNDMKVFPPFHLVNTATEYRFTSLTPGRQYKILVLTISGDVQQSAFIEGFTVPSAVKNIHISPNGATDSLTVNWTPGGGDVDSYTVSAFRHSQKVDSQTIPKHVFEHTFHRLEAGEQYQIMIASVSGSLKNQINVVGRTVPASVQGVIADNAYSSYSLIVSWQKAAGVAERYDILLLTENGILLRNTSEPATTKQHKFEDLTPGKKYKIQILTVSGGLFSKEAQTEGRTVPAAVTDLRITENSTRHLSFRWTASEGELSWYNIFLYNPDGNLQERAQVDPLVQSFSFQNLLQGRMYKMVIVTHSGELSNESFIFGRTVPASVSHLRGSNRNTTDSLWFNWSPASGDFDFYELILYNPNGTKKENWKDKDLTEWRFQGLVPGRKYVLWVVTHSGDLSNKVTAESRTAPSPPSLMSFADIANTSLAITWKGPPDWTDYNDFELQWLPRDALTVFNPYNNRKSEGRIVYGLRPGRSYQFNVKTVSGDSWKTYSKPIFGSVRTKPDKIQNLHCRPQNSTAIACSWIPPDSDFDGYSIECRKMDTQEVEFSRKLEKEKSLLNIMMLVPHKRYLVSIKVQSAGMTSEVVEDSTITMIDRPPPPPPHIRVNEKDVLISKSSINFTVNCSWFSDTNGAVKYFTVVVREADGSDELKPEQQHPLPSYLEYRHNASIRVYQTNYFASKCAENPNSNSKSFNIKLGAEMESLGGKCDPTQQKFCDGPLKPHTAYRISIRAFTQLFDEDLKEFTKPLYSDTFFSLPITTESEPLFGAIEGVSAGLFLIGMLVAVVALLICRQKVSHGRERPSARLSIRRDRPLSVHLNLGQKGNRKTSCPIKINQFEGHFMKLQADSNYLLSKEYEELKDVGRNQSCDIALLPENRGKNRYNNILPYDATRVKLSNVDDDPCSDYINASYIPGNNFRREYIVTQGPLPGTKDDFWKMVWEQNVHNIVMVTQCVEKGRVKCDHYWPADQDSLYYGDLILQMLSESVLPEWTIREFKICGEEQLDAHRLIRHFHYTVWPDHGVPETTQSLIQFVRTVRDYINRSPGAGPTVVHCSAGVGRTGTFIALDRILQQLDSKDSVDIYGAVHDLRLHRVHMVQTECQYVYLHQCVRDVLRARKLRSEQENPLFPIYENVNPEYHRDPVYSRH

SEQ ID NO: 69284 - protein, 2127 aa, Homo sapiens
  Payload ID: 13756
  Gene Symbol: PTPRB
  Gene Name: protein tyrosine phosphatase, receptor type, B
  ENSP ID: ENSP00000448058
MEAEFYMVILTCLIFRNSEGFQIVHVQKQQCLFKNEKVVVGSCNRTIQNQQWMWTEDEKLLHVKSALCLAISNSSRGPSRSAILDRCSQAPRWTCYDQEGFLEVENASLFLQKQGSRVVVKKARKYLHSWMKIDVNKEGKLVNESLCLQKAGLGAEVSVRSTRNTAPPQILTTFNAVPDGLVFLIRNTTEAFIRNAAENYSQNSSERQHPNLHMTGITDTSWVLSTTQPFSSTTEETGLAEPERCNFTLAESKASSHSVSIQWRILGSPCNFSLIYSSDTLGAALCPTFRIDNTTYGCNLQDLQAGTIYNFRIISLDEERTVVLQTDPLPPARFGVSKEKTTSTSLHVWWTPSSGKVTSYEVQLFDENNQKIQGVQIQESTSWNEYTFFNLTAGSKYNIAITAVSGGKRSFSVYTNGSTVPSPVKDIGISTKANSLLISWSHGSGNVERYRLMLMDKGILVHGGVVDKHATSYAFHGLTPGYLYNLTVMTEAAGLQNYRWKLVRTAPMEVSNLKVTNDGSLTSLKVKWQRPPGNVDSYNITLSHKGTIKESRVLAPWITETHFKELVPGRLYQVTVSCVSGELSAQKMAVGRTFPDKVANLEANNNGRMRSLVVSWSPPAGDWEQYRILLFNDSVVLLNITVGKEETQYVMDDTGLVPGRQYEVEVIVESGNLKNSERCQGRTVPLAVLQLRVKHANETSLSIMWQTPVAEWEKYIISLADRDLLLIHKSLSKDAKEFTFTDLVPGRKYMATVTSISGDLKNSSSVKGRTVPAQVTDLHVANQGMTSSLFTNWTQAQGDVEFYQVLLIHENVVIKNESISSETSRYSFHSLKSGSLYSVVVTTVSGGISSRQVVVEGRTVPDKVQGVSVSNSARSDYLRVSWVHATGDFDHYEVTIKNKNNFIQTKSIPKSENECVFVQLVPGRLYSVTVTTKSGQYEANEQGNGRTIPEPVKDLTLRNRSTEDLHVTWSGANGDVDQYEIQLLFNDMKVFPPFHLVNTATEYRFTSLTPGRQYKILVLTISGDVQQSAFIEGFTVPSAVKNIHISPNGATDSLTVNWTPGGGDVDSYTVSAFRHSQKVDSQTIPKHVFEHTFHRLEAGEQYQIMIASVSGSLKNQINVVGRTVPASVQGVIADNAYSSYSLIVSWQKAAGVAERYDILLLTENGILLRNTSEPATTKQHKFEDLTPGKKYKIQILTVSGGLFSKEAQTEGRTVPAAVTDLRITENSTRHLSFRWTASEGELSWYNIFLYNPDGNLQERAQVDPLVQSFSFQNLLQGRMYKMVIVTHSGELSNESFIFGRTVPASVSHLRGSNRNTTDSLWFNWSPASGDFDFYELILYNPNGTKKENWKDKDLTEWRFQGLVPGRKYVLWVVTHSGDLSNKVTAESRTAPSPPSLMSFADIANTSLAITWKGPPDWTDYNDFELQWLPRDALTVFNPYNNRKSEGRIVYGLRPGRSYQFNVKTVSGDSWKTYSKPIFGSVRTKPDKIQNLHCRPQNSTAIACSWIPPDSDFDGYSIECRKMDTQEVEFSRKLEKEKSLLNIMMLVPHKRYLVSIKVQSAGMTSEVVEDSTITMIDRPPPPPPHIRVNEKDVLISKSSINFTVNCSWFSDTNGAVKYFTVVVREADGSDELKPEQQHPLPSYLEYRHNASIRVYQTNYFASKCAENPNSNSKSFNIKLGAEMESLGGKCDPTQQKFCDGPLKPHTAYRISIRAFTQLFDEDLKEFTKPLYSDTFFSLPITTESEPLFGAIEGVSAGLFLIGMLVAVVALLICRQKVSHGRERPSARLSIRRDRPLSVHLNLGQKGNRKTSCPIKINQFEGHFMKLQADSNYLLSKEYEELKDVGRNQSCDIALLPENRGKNRYNNILPYDATRVKLSNVDDDPCSDYINASYIPGNNFRREYIVTQGPLPGTKDDFWKMVWEQNVHNIVMVTQCVEKGRVKCDHYWPADQDSLYYGDLILQMLSESVLPEWTIREFKICGEEQLDAHRLIRHFHYTVWPDHGVPETTQSLIQFVRTVRDYINRSPGAGPTVVHCSAGVGRTGTFIALDRILQQLDSKDSVDIYGAVHDLRLHRVHMVQTECQYVYLHQCVRDVLRARKLRSEQENPLFPIYENVNPEYHRDPVYSRH

SEQ ID NO: 69285 - protein, 1583 aa, Homo sapiens
  Payload ID: 13756
  Gene Symbol: PTPRB
  Gene Name: protein tyrosine phosphatase, receptor type, B
  ENSP ID: ENSP00000448349
MEAEFYMVILTCLIFRNSGFQIVHVQKQQCLFKNEKVVVGSCNRTIQNQQWMWTEDEKLLHVKSALCLAISNSSRGPSRSAILDRCSQAPRWTCYDQEGFLEVENASLFLQKQGSRVVVKKARKYLHSWMKIDVNKEGKLVNESLCLQKAGLGAEVSVRSTRNTAPPQILTTFNAVPDGLVFLIRNTTEAFIRNAAENYSQNSSERQHPNLHMTGITDTSWVLSTTQPFSSTTEETGLAEPERCNFTLAESKASSHSVSIQWRILGSPCNFSLIYSSDTLGAALCPTFRIDNTTYGCNLQDLQAGTIYNFRIISLDEERTVVLQTDPLPPARFGVSKEKTTSTSLHVWWTPSSGKVTSYEVQLFDENNQKIQGVQIQESTSWNEYTFFNLTAGSKYNIAITAVSGGKRSFSVYTNGSTVPSPVKDIGISTKANSLLISWSHGSGNVERYRLMLMDKGILVHGGVVDKHATSYAFHGLTPGYLYNLTVMTEAAGLQNYRWKLVRTAPMEVSNLKVTNDGSLTSLKVKWQRPPGNVDSYNITLSHKGTIKESRVLAPWITETHFKELVPGRLYQVTVSCVSGELSAQKMAVGRTFPDKVANLEANNNGRMRSLVVSWSPPAGDWEQYRILLFNDSVVLLNITVGKEETQYVMDDTGLVPGRQYEVEVIVESGNLKNSERCQGRTVPLAVLQLRVKHANETSLSIMWQTPVAEWEKYIISLADRDLLLIHKSLSKDAKEFTFTDLVPGRKYMATVTSISGDLKNSSSVKGRTVPAQVTDLHVANQGMTSSLFTNWTQAQGDVEFYQVLLIHENVVIKNESISSETSRYSFHSLKSGSLYSVVVTTVSGGISSRQVVVEGRTVPSSVSGVTVNNSGRNDYLSVSWLLAPGDVDNYEVTLSHDGKVVQSLVIAKSVRECSFSSLTPGRLYTVTITTRSGKYENHSFSQERTVPDKVQGVSVSNSARSDYLRVSWVHATGDFDHYEVTIKNKNNFIQTKSIPKSENECVFVQLVPGRLYSVTVTTKSGQYEANEQGNGRTIPEPVKDLTLRNRSTEDLHVTWSGANGDVDQYEIQLLFNDMKVFPPFHLVNTATEYRFTSLTPGRQYKILVLTISGDVQQSAFIEGFTVPSAVKNIHISPNGATDSLTVNWTPGGGDVDSYTVSAFRHSQKVDSQTIPKHVFEHTFHRLEAGEQYQIMIASVSGSLKNQINVVGRTVPASVQGVIADNAYSSYSLIVSWQKAAGVAERYDILLLTENGILLRNTSEPATTKQHKFEDLTPGKKYKIQILTVSGGLFSKEAQTEGRTVPAAVTDLRITENSTRHLSFRWTASEGELSWYNIFLYNPDGNLQERAQVDPLVQSFSFQNLLQGRMYKMVIVTHSGELSNESFIFGRTVPASVSHLRGSNRNTTDSLWFNWSPASGDFDFYELILYNPNGTKKENWKDKDLTEWRFQGLVPGRKYVLWVVTHSGDLSNKVTAESRTAPSPPSLMSFADIANTSLAITWKGPPDWTDYNDFELQWLPRDALTVFNPYNNRKSEGRIVYGLRPGRSYQFNVKTVSGDSWKTYSKPIFGSVRTSMTCFATLISQME

SEQ ID NO: 69286 - protein, 1145 aa, Homo sapiens
  Payload ID: 13757
  Gene Symbol: PTPRC
  Gene Name: protein tyrosine phosphatase, receptor type, C
  ENSP ID: ENSP00000306782
MTMYLWLKLLAFGFAFLDTEVFVTGQSPTPSPTDAYLNASETTTLSPSGSAVISTTTIATTPSKPTCDEKYANITVDYLYNKETKLFTAKLNVNENVECGNNTCTNNEVHNLTECKNASVSISHNSCTAPDKTLILDVPPGVEKFQLHDCTQVEKADTTICLKWKNIETFTCDTQNITYRFQCGNMIFDNKEIKLENLEPEHEYKCDSEILYNNHKFTNASKIIKTDFGSPGEPQIIFCRSEAAHQGVITWNPPQRSFHNFTLCYIKETEKDCLNLDKNLIKYDLQNLKPYTKYVLSLHAYIIAKVQRNGSAAMCHFTTKSAPPSQVWNMTVSMTSDNSMHVKCRPPRDRNGPHERYHLEVEAGNTLVRNESHKNCDFRVKDLQYSTDYTFKAYFHNGDYPGEPFILHHSTSYNSKALIAFLAFLIIVTSIALLVVLYKIYDLHKKRSCNLDEQQELVERDDEKQLMNVEPIHADILLETYKRKIADEGRLFLAEFQSIPRVFSKFPIKEARKPFNQNKNRYVDILPYDYNRVELSEINGDAGSNYINASYIDGFKEPRKYIAAQGPRDETVDDFWRMIWEQKATVIVMVTRCEEGNRNKCAEYWPSMEEGTRAFGDVVVKINQHKRCPDYIIQKLNIVNKKEKATGREVTHIQFTSWPDHGVPEDPHLLLKLRRRVNAFSNFFSGPIVVHCSAGVGRTGTYIGIDAMLEGLEAENKVDVYGYVVKLRRQRCLMVQVEAQYILIHQALVEYNQFGETEVNLSELHPYLHNMKKRDPPSEPSPLEAEFQRLPSYRSWRTQHIGNQEENKSKNRNSNVIPYDYNRVPLKHELEMSKESEHDSDESSDDDSDSEEPSKYINASFIMSYWKPEVMIAAQGPLKETIGDFWQMIFQRKVKVIVMLTELKHGDQEICAQYWGEGKQTYGDIEVDLKDTDKSSTYTLRVFELRHSKRKDSRTVYQYQYTNWSVEQLPAEPKELISMIQVVKQKLPQKNSSEGNKHHKSTPLLIHCRDGSQQTGIFCALLNLLESAETEEVVDIFQVVKALRKARPGMVSTFEQYQFLYDVIASTYPAQNGQVKKNNHQEDKIEFDNEVDKVKQDANCVNPLGAPEKLPEAKEQAEGSEPTSGTEGPEHSVNGPASPALNQGS

SEQ ID NO: 69287 - protein, 36 aa, Homo sapiens
  Payload ID: 13757
  Gene Symbol: PTPRC
  Gene Name: protein tyrosine phosphatase, receptor type, C
  ENSP ID: ENSP00000356334
MTMYLWLKLLAFGFAFLDTEVFVTGQSPTPSPTGKN

SEQ ID NO: 69288 - protein, 735 aa, Homo sapiens
  Payload ID: 13757
  Gene Symbol: PTPRC
  Gene Name: protein tyrosine phosphatase, receptor type, C
  ENSP ID: ENSP00000356337
MTMYLWLKLLAFGFAFLDTEVFVTGQSPTPSPTGVSSVQTPHLPTHADSQTPSAGTDTQTFSGSAANAKLNPTPGSNAISDVPGERSTASTFPTDPVSPLTTTLSLAHHSSAALPARTSNTTITANTSDAYLNASETTTLSPSGSAVISTTTIATTPSKPTCDEKYANITVDYLYNKETKLFTAKLNVNENVECGNNTCTNNEVHNLTECKNASVSISHNSCTAPDKTLILDVPPGVEKFQLHDCTQVEKADTTICLKWKNIETFTCDTQNITYRFQCGNMIFDNKEIKLENLEPEHEYKCDSEILYNNHKFTNASKIIKTDFGSPGEPQIIFCRSEAAHQGVITWNPPQRSFHNFTLCYIKETEKDCLNLDKNLIKYDLQNLKPYTKYVLSLHAYIIAKVQRNGSAAMCHFTTKSAPPSQVWNMTVSMTSDNSMHVKCRPPRDRNGPHERYHLEVEAGNTLVRNESHKNCDFRVKDLQYSTDYTFKAYFHNGDYPGEPFILHHSTSYNSKALIAFLAFLIIVTSIALLVVLYKIYDLHKKRSCNLDEQQELVERDDEKQLMNVEPIHADILLETYKRKIADEGRLFLAEFQSIPRVFSKFPIKEARKPFNQNKNRYVDILPYDYNRVELSEINGDAGSNYINASYIDGFKEPRKYIAAQGPRDETVDDFWRMIWEQKATVIVMVTRCEEGNRNKCAEYWPSMEEGTRAFGDVVVKINQHKRCPDYIIQKLNIVN

SEQ ID NO: 69289 - protein, 148 aa, Homo sapiens
  Payload ID: 13757
  Gene Symbol: PTPRC
  Gene Name: protein tyrosine phosphatase, receptor type, C
  ENSP ID: ENSP00000356349
MTMYLWLKLLAFGFAFLDTEVFVTGQSPTPSPTDAYLNASETTTLSPSGSAVISTTTIATTPSKPTCDEKYANITVDYLYNKETKLFTAKLNVNENVECGNNTCTNNEVHNLTECKNASVSISHNSCTAPDKTLILDVPPGVEKFQLH

SEQ ID NO: 69290 - protein, 118 aa, Homo sapiens
  Payload ID: 13757
  Gene Symbol: PTPRC
  Gene Name: protein tyrosine phosphatase, receptor type, C
  ENSP ID: ENSP00000393360
MTMYLWLKLLAFGFAFLDTEVFVTGQSPTPSPTGLTTAKMPSVPLSSDPLPTHTTAFSPASTFERENDFSETTTSLSPDNTSTQVSPDSLDNASAFNTTGVSSVQTPHLPTHADSQTP

SEQ ID NO: 69291 - protein, 87 aa, Homo sapiens
  Payload ID: 13757
  Gene Symbol: PTPRC
  Gene Name: protein tyrosine phosphatase, receptor type, C
  ENSP ID: ENSP00000405494
MTMYLWLKLLAFGFAFLDTEVFVTGQSPTPSPTGHLQAEEQGSQSKSPNLKSREADSSAFSWWPKAREPLTNHWSKSKSPKAEELGV

SEQ ID NO: 69292 - protein, 1306 aa, Homo sapiens
  Payload ID: 13757
  Gene Symbol: PTPRC
  Gene Name: protein tyrosine phosphatase, receptor type, C
  ENSP ID: ENSP00000411355
MTMYLWLKLLAFGFAFLDTEVFVTGQSPTPSPTGLTTAKMPSVPLSSDPLPTHTTAFSPASTFERENDFSETTTSLSPDNTSTQVSPDSLDNASAFNTTGVSSVQTPHLPTHADSQTPSAGTDTQTFSGSAANAKLNPTPGSNAISDVPGERSTASTFPTDPVSPLTTTLSLAHHSSAALPARTSNTTITANTSDAYLNASETTTLSPSGSAVISTTTIATTPSKPTCDEKYANITVDYLYNKETKLFTAKLNVNENVECGNNTCTNNEVHNLTECKNASVSISHNSCTAPDKTLILDVPPGVEKFQLHDCTQVEKADTTICLKWKNIETFTCDTQNITYRFQCGNMIFDNKEIKLENLEPEHEYKCDSEILYNNHKFTNASKIIKTDFGSPGEPQIIFCRSEAAHQGVITWNPPQRSFHNFTLCYIKETEKDCLNLDKNLIKYDLQNLKPYTKYVLSLHAYIIAKVQRNGSAAMCHFTTKSAPPSQVWNMTVSMTSDNSMHVKCRPPRDRNGPHERYHLEVEAGNTLVRNESHKNCDFRVKDLQYSTDYTFKAYFHNGDYPGEPFILHHSTSYNSKALIAFLAFLIIVTSIALLVVLYKIYDLHKKRSCNLDEQQELVERDDEKQLMNVEPIHADILLETYKRKIADEGRLFLAEFQSIPRVFSKFPIKEARKPFNQNKNRYVDILPYDYNRVELSEINGDAGSNYINASYIDGFKEPRKYIAAQGPRDETVDDFWRMIWEQKATVIVMVTRCEEGNRNKCAEYWPSMEEGTRAFGDVVVKINQHKRCPDYIIQKLNIVNKKEKATGREVTHIQFTSWPDHGVPEDPHLLLKLRRRVNAFSNFFSGPIVVHCSAGVGRTGTYIGIDAMLEGLEAENKVDVYGYVVKLRRQRCLMVQVEAQYILIHQALVEYNQFGETEVNLSELHPYLHNMKKRDPPSEPSPLEAEFQRLPSYRSWRTQHIGNQEENKSKNRNSNVIPYDYNRVPLKHELEMSKESEHDSDESSDDDSDSEEPSKYINASFIMSYWKPEVMIAAQGPLKETIGDFWQMIFQRKVKVIVMLTELKHGDQEICAQYWGEGKQTYGDIEVDLKDTDKSSTYTLRVFELRHSKRKDSRTVYQYQYTNWSVEQLPAEPKELISMIQVVKQKLPQKNSSEGNKHHKSTPLLIHCRDGSQQTGIFCALLNLLESAETEEVVDIFQVVKALRKARPGMVSTFEQYQFLYDVIASTYPAQNGQVKKNNHQEDKIEFDNEVDKVKQDANCVNPLGAPEKLPEAKEQAEGSEPTSGTEGPEHSVNGPASPALNQGS

SEQ ID NO: 69293 - protein, 600 aa, Homo sapiens
  Payload ID: 13757
  Gene Symbol: PTPRC
  Gene Name: protein tyrosine phosphatase, receptor type, C
  ENSP ID: ENSP00000433536
MTMYLWLKLLAFGFAFLDTEVFVTGQSPTPSPTGVSSVQTPHLPTHADSQTPSAGTDTQTFSGSAANAKLNPTPGSNAISDAYLNASETTTLSPSGSAVISTTTIATTPSKPTCDEKYANITVDYLYNKETKLFTAKLNVNENVECGNNTCTNNEVHNLTECKNASVSISHNSCTAPDKTLILDVPPGVEKFQLHDCTQVEKADTTICLKWKNIETFTCDTQNITYRFQCGNMIFDNKEIKLENLEPEHEYKCDSEILYNNHKFTNASKIIKTDFGSPGEPQIIFCRSEAAHQGVITWNPPQRSFHNFTLCYIKETEKDCLNLDKNLIKYDLQNLKPYTKYVLSLHAYIIAKVQRNGSAAMCHFTTKSAPPSQVWNMTVSMTSDNSMHVKCRPPRDRNGPHERYHLEVEAGNTLVRNESHKNCDFRVKDLQYSTDYTFKAYFHNGDYPGEPFILHHSTSYNSKALIAFLAFLIIVTSIALLVVLYKIYDLHKKRSCNLDEQQELVERDDEKQLMNVEPIHADILLETYKRKIADEGRLFLAEFQSIPRVFSKFPIKEARKPFNQNKNRYVDILPYDYNRVELSEINGDAGSNYINASYID

SEQ ID NO: 69294 - protein, 34 aa, Homo sapiens
  Payload ID: 13757
  Gene Symbol: PTPRC
  Gene Name: protein tyrosine phosphatase, receptor type, C
  ENSP ID: ENSP00000458191
MYLWLKLLAFGFAFLDTEVFVTGQSPTPSPTGKN

SEQ ID NO: 69295 - protein, 571 aa, Homo sapiens
  Payload ID: 13757
  Gene Symbol: PTPRC
  Gene Name: protein tyrosine phosphatase, receptor type, C
  Uniprot ID: P08575
  ENSP ID: ENSP00000458322
MYLWLKLLAFGFAFLDTEVFVTGQSPTPSPTGLTTAKMPSVPLSSDPLPTHTTAFSPASTFERENDFSETTTSLSPDNTSTQVSPDSLDNASAFNTTGVSSVQTPHLPTHADSQTPSAGTDTQTFSGSAANAKLNPTPGSNAISDVPGERSTASTFPTDPVSPLTTTLSLAHHSSAALPARTSNTTITANTSDAYLNASETTTLSPSGSAVISTTTIATTPSKPTCDEKYANITVDYLYNKETKLFTAKLNVNENVECGNNTCTNNEVHNLTECKNASVSISHNSCTAPDKTLILDVPPGVEKFQLHDCTQVEKADTTICLKWKNIETFTCDTQNITYRFQCGNMIFDNKEIKLENLEPEHEYKCDSEILYNNHKFTNASKIIKTDFGSPGEPQIIFCRSEAAHQGVITWNPPQRSFHNFTLCYIKETEKDCLNLDKNLIKYDLQNLKPYTKYVLSLHAYIIAKVQRNGSAAMCHFTTKSAPPSQVWNMTVSMTSDNSMHVKCRPPRDRNGPHERYHLEVEAGNTLVRNESHKNCDFRVKDLQYSTDYTFKAYFHNGDYPGEPFILHHSTS

SEQ ID NO: 69296 - protein, 85 aa, Homo sapiens
  Payload ID: 13757
  Gene Symbol: PTPRC
  Gene Name: protein tyrosine phosphatase, receptor type, C
  ENSP ID: ENSP00000458418
MYLWLKLLAFGFAFLDTEVFVTGQSPTPSPTGHLQAEEQGSQSKSPNLKSREADSSAFSWWPKAREPLTNHWSKSKSPKAEELGV

SEQ ID NO: 69297 - protein, 505 aa, Homo sapiens
  Payload ID: 13757
  Gene Symbol: PTPRC
  Gene Name: protein tyrosine phosphatase, receptor type, C
  ENSP ID: ENSP00000458662
MYLWLKLLAFGFAFLDTEVFVTGQSPTPSPTGVSSVQTPHLPTHADSQTPSAGTDTQTFSGSAANAKLNPTPGSNAISDVPGERSTASTFPTDPVSPLTTTLSLAHHSSAALPARTSNTTITANTSDAYLNASETTTLSPSGSAVISTTTIATTPSKPTCDEKYANITVDYLYNKETKLFTAKLNVNENVECGNNTCTNNEVHNLTECKNASVSISHNSCTAPDKTLILDVPPGVEKFQLHDCTQVEKADTTICLKWKNIETFTCDTQNITYRFQCGNMIFDNKEIKLENLEPEHEYKCDSEILYNNHKFTNASKIIKTDFGSPGEPQIIFCRSEAAHQGVITWNPPQRSFHNFTLCYIKETEKDCLNLDKNLIKYDLQNLKPYTKYVLSLHAYIIAKVQRNGSAAMCHFTTKSAPPSQVWNMTVSMTSDNSMHVKCRPPRDRNGPHERYHLEVEAGNTLVRNESHKNCDFRVKDLQYSTDYTFKAYFHNGDYPGEPFILHHSTS

SEQ ID NO: 69298 - protein, 146 aa, Homo sapiens
  Payload ID: 13757
  Gene Symbol: PTPRC
  Gene Name: protein tyrosine phosphatase, receptor type, C
  ENSP ID: ENSP00000458846
MYLWLKLLAFGFAFLDTEVFVTGQSPTPSPTDAYLNASETTTLSPSGSAVISTTTIATTPSKPTCDEKYANITVDYLYNKETKLFTAKLNVNENVECGNNTCTNNEVHNLTECKNASVSISHNSCTAPDKTLILDVPPGVEKFQLH

SEQ ID NO: 69299 - protein, 410 aa, Homo sapiens
  Payload ID: 13757
  Gene Symbol: PTPRC
  Gene Name: protein tyrosine phosphatase, receptor type, C
  Uniprot ID: P08575
  ENSP ID: ENSP00000461074
MYLWLKLLAFGFAFLDTEVFVTGQSPTPSPTDAYLNASETTTLSPSGSAVISTTTIATTPSKPTCDEKYANITVDYLYNKETKLFTAKLNVNENVECGNNTCTNNEVHNLTECKNASVSISHNSCTAPDKTLILDVPPGVEKFQLHDCTQVEKADTTICLKWKNIETFTCDTQNITYRFQCGNMIFDNKEIKLENLEPEHEYKCDSEILYNNHKFTNASKIIKTDFGSPGEPQIIFCRSEAAHQGVITWNPPQRSFHNFTLCYIKETEKDCLNLDKNLIKYDLQNLKPYTKYVLSLHAYIIAKVQRNGSAAMCHFTTKSAPPSQVWNMTVSMTSDNSMHVKCRPPRDRNGPHERYHLEVEAGNTLVRNESHKNCDFRVKDLQYSTDYTFKAYFHNGDYPGEPFILHHSTS

SEQ ID NO: 69300 - protein, 457 aa, Homo sapiens
  Payload ID: 13757
  Gene Symbol: PTPRC
  Gene Name: protein tyrosine phosphatase, receptor type, C
  ENSP ID: ENSP00000461347
MYLWLKLLAFGFAFLDTEVFVTGQSPTPSPTGVSSVQTPHLPTHADSQTPSAGTDTQTFSGSAANAKLNPTPGSNAISDAYLNASETTTLSPSGSAVISTTTIATTPSKPTCDEKYANITVDYLYNKETKLFTAKLNVNENVECGNNTCTNNEVHNLTECKNASVSISHNSCTAPDKTLILDVPPGVEKFQLHDCTQVEKADTTICLKWKNIETFTCDTQNITYRFQCGNMIFDNKEIKLENLEPEHEYKCDSEILYNNHKFTNASKIIKTDFGSPGEPQIIFCRSEAAHQGVITWNPPQRSFHNFTLCYIKETEKDCLNLDKNLIKYDLQNLKPYTKYVLSLHAYIIAKVQRNGSAAMCHFTTKSAPPSQVWNMTVSMTSDNSMHVKCRPPRDRNGPHERYHLEVEAGNTLVRNESHKNCDFRVKDLQYSTDYTFKAYFHNGDYPGEPFILHHSTS

SEQ ID NO: 69301 - protein, 116 aa, Homo sapiens
  Payload ID: 13757
  Gene Symbol: PTPRC
  Gene Name: protein tyrosine phosphatase, receptor type, C
  ENSP ID: ENSP00000461712
MYLWLKLLAFGFAFLDTEVFVTGQSPTPSPTGLTTAKMPSVPLSSDPLPTHTTAFSPASTFERENDFSETTTSLSPDNTSTQVSPDSLDNASAFNTTGVSSVQTPHLPTHADSQTP

SEQ ID NO: 69302 - protein, 753 aa, Homo sapiens
  Payload ID: 13757
  Gene Symbol: PTPRC
  Gene Name: protein tyrosine phosphatase, receptor type, C
  ENSP ID: ENSP00000469141
MTMYLWLKLLAFGFAFLDTEVFVTGQSPTPSPTGLTTAKMPSVPLSSDPLPTHTTAFSPASTFERENDFSETTTSLSPDNTSTQVSPDSLDNASAFNTTGVSSVQTPHLPTHADSQTPSAGTDTQTFSGSAANAKLNPTPGSNAISDAYLNASETTTLSPSGSAVISTTTIATTPSKPTCDEKYANITVDYLYNKETKLFTAKLNVNENVECGNNTCTNNEVHNLTECKNASVSISHNSCTAPDKTLILDVPPGVEKFQLHDCTQVEKADTTICLKWKNIETFTCDTQNITYRFQCGNMIFDNKEIKLENLEPEHEYKCDSEILYNNHKFTNASKIIKTDFGSPGEPQIIFCRSEAAHQGVITWNPPQRSFHNFTLCYIKETEKDCLNLDKNLIKYDLQNLKPYTKYVLSLHAYIIAKVQRNGSAAMCHFTTKSAPPSQVWNMTVSMTSDNSMHVKCRPPRDRNGPHERYHLEVEAGNTLVRNESHKNCDFRVKDLQYSTDYTFKAYFHNGDYPGEPFILHHSTSYNSKALIAFLAFLIIVTSIALLVVLYKIYDLHKKRSCNLDEQQELVERDDEKQLMNVEPIHADILLETYKRKIADEGRLFLAEFQSIPRVFSKFPIKEARKPFNQNKNRYVDILPYDYNRVELSEINGDAGSNYINASYIDGFKEPRKYIAAQGPRDETVDDFWRMIWEQKATVIVMVTRCEEGNRNKCAEYWPSMEEGTRAFGDVVVKINQHKRCPDYIIQKLNIVN

SEQ ID NO: 69303 - protein, 523 aa, Homo sapiens
  Payload ID: 13757
  Gene Symbol: PTPRC
  Gene Name: protein tyrosine phosphatase, receptor type, C
  ENSP ID: ENSP00000482203
MYLWLKLLAFGFAFLDTEVFVTGQSPTPSPTGLTTAKMPSVPLSSDPLPTHTTAFSPASTFERENDFSETTTSLSPDNTSTQVSPDSLDNASAFNTTGVSSVQTPHLPTHADSQTPSAGTDTQTFSGSAANAKLNPTPGSNAISDAYLNASETTTLSPSGSAVISTTTIATTPSKPTCDEKYANITVDYLYNKETKLFTAKLNVNENVECGNNTCTNNEVHNLTECKNASVSISHNSCTAPDKTLILDVPPGVEKFQLHDCTQVEKADTTICLKWKNIETFTCDTQNITYRFQCGNMIFDNKEIKLENLEPEHEYKCDSEILYNNHKFTNASKIIKTDFGSPGEPQIIFCRSEAAHQGVITWNPPQRSFHNFTLCYIKETEKDCLNLDKNLIKYDLQNLKPYTKYVLSLHAYIIAKVQRNGSAAMCHFTTKSAPPSQVWNMTVSMTSDNSMHVKCRPPRDRNGPHERYHLEVEAGNTLVRNESHKNCDFRVKDLQYSTDYTFKAYFHNGDYPGEPFILHHSTS

SEQ ID NO: 69304 - protein, 91 aa, Homo sapiens
  Payload ID: 13757
  Gene Symbol: PTPRC
  Gene Name: protein tyrosine phosphatase, receptor type, C
  ENSP ID: ENSP00000483380
  MOD_RES (1)..(1): Any amino acid
XKLLAFGFAFLDTEVFGKAQHLPPLVFHQYRRLTFPRTQTRRRPLLELTRRHSAAPPPMQNSTLPQAAMLSQMSQERGVQPAPFLQTQFPH

SEQ ID NO: 69305 - protein, 206 aa, Homo sapiens
  Payload ID: 13758
  Gene Symbol: PTPRCAP
  Gene Name: protein tyrosine phosphatase, receptor type, C-associated protein
  Uniprot ID: Q14761
  ENSP ID: ENSP00000325589
MALPCTLGLGMLLALPGALGSGGSAEDSVGSSSVTVVLLLLLLLLLATGLALAWRRLSRDSGGYYHPARLGAALWGRTRRLLWASPPGRWLQARAELGSTDNDLERQEDEQDTDYDHVADGGLQADPGEGEQQCGEASSPEQVPVRAEEARDSDTEGDLVLGSPGPASAGGSAEALLSDLHAFAGSAAWDDSARAAGGQGLHVTAL

SEQ ID NO: 69306 - protein, 1506 aa, Homo sapiens
  Payload ID: 13759
  Gene Symbol: PTPRD
  Gene Name: protein tyrosine phosphatase, receptor type, D
  Uniprot ID: P23468
  ENSP ID: ENSP00000347373
MVHVARLLLLLLTFFLRTDAETPPRFTRTPVDQTGVSGGVASFICQATGDPRPKIVWNKKGKKVSNQRFEVIEFDDGSGSVLRIQPLRTPRDEAIYECVASNNVGEISVSTRLTVLREDQIPRGFPTIDMGPQLKVVERTRTATMLCAASGNPDPEITWFKDFLPVDTSNNNGRIKQLRSESIGGTPIRGALQIEQSEESDQGKYECVATNSAGTRYSAPANLYVRELREVRRVPPRFSIPPTNHEIMPGGSVNITCVAVGSPMPYVKWMLGAEDLTPEDDMPIGRNVLELNDVRQSANYTCVAMSTLGVIEAIAQITVKALPKPPGTPVVTESTATSITLTWDSGNPEPVSYYIIQHKPKNSEELYKEIDGVATTRYSVAGLSPYSDYEFRVVAVNNIGRGPPSEPVLTQTSEQAPSSAPRDVQARMLSSTTILVQWKEPEEPNGQIQGYRVYYTMDPTQHVNNWMKHNVADSQITTIGNLVPQKTYSVKVLAFTSIGDGPLSSDIQVITQTGVPGQPLNFKAEPESETSILLSWTPPRSDTIANYELVYKDGEHGEEQRITIEPGTSYRLQGLKPNSLYYFRLAARSPQGLGASTAEISARTMQSMFAKNFHVKAVMKTSVLLSWEIPENYNSAMPFKILYDDGKMVEEVDGRATQKLIVNLKPEKSYSFVLTNRGNSAGGLQHRVTAKTAPDVLRTKPAFIGKTNLDGMITVQLPEVPANENIKGYYIIIVPLKKSRGKFIKPWESPDEMELDELLKEISRKRRSIRYGREVELKPYIAAHFDVLPTEFTLGDDKHYGGFTNKQLQSGQEYVFFVLAVMEHAESKMYATSPYSDPVVSMDLDPQPITDEEEGLIWVVGPVLAVVFIICIVIAILLYKSSKPDRKRAESDSRKSSIPNNKEIPSHHPTDPVELRRLNFQTPGMASHPPIPILELADHIERLKANDNLKFSQEYESIDPGQQFTWEHSNLEVNKPKNRYANVIAYDHSRVLLSAIEGIPGSDYVNANYIDGYRKQNAYIATQGSLPETFGDFWRMIWEQRSATVVMMTKLEERSRVKCDQYWPSRGTETHGLVQVTLLDTVELATYCVRTFALYKNGSSEKREVRQFQFTAWPDHGVPEHPTPFLAFLRRVKTCNPPDAGPMVVHCSAGVGRTGCFIVIDAMLERIKHEKTVDIYGHVTLMRAQRNYMVQTEDQYIFIHDALLEAVTCGNTEVPARNLYAYIQKLTQIETGENVTGMELEFKRLASSKAHTSRFISANLPCNKFKNRLVNIMPYESTRVCLQPIRGVEGSDYINASFIDGYRQQKAYIATQGPLAETTEDFWRMLWEHNSTIVVMLTKLREMGREKCHQYWPAERSARYQYFVVDPMAEYNMPQYILREFKVTDARDGQSRTVRQFQFTDWPEQGVPKSGEGFIDFIGQVHKTKEQFGQDGPISVHCSAGVGRTGVFITLSIVLERMRYEGVVDIFQTVKMLRTQRPAMVQTEDQYQFSYRAALEYLGSFDHYAT

SEQ ID NO: 69307 - protein, 1912 aa, Homo sapiens
  Payload ID: 13759
  Gene Symbol: PTPRD
  Gene Name: protein tyrosine phosphatase, receptor type, D
  Uniprot ID: P23468
  ENSP ID: ENSP00000348812
MVHVARLLLLLLTFFLRTDAETPPRFTRTPVDQTGVSGGVASFICQATGDPRPKIVWNKKGKKVSNQRFEVIEFDDGSGSVLRIQPLRTPRDEAIYECVASNNVGEISVSTRLTVLREDQIPRGFPTIDMGPQLKVVERTRTATMLCAASGNPDPEITWFKDFLPVDTSNNNGRIKQLRSESIGGTPIRGALQIEQSEESDQGKYECVATNSAGTRYSAPANLYVRELREVRRVPPRFSIPPTNHEIMPGGSVNITCVAVGSPMPYVKWMLGAEDLTPEDDMPIGRNVLELNDVRQSANYTCVAMSTLGVIEAIAQITVKALPKPPGTPVVTESTATSITLTWDSGNPEPVSYYIIQHKPKNSEELYKEIDGVATTRYSVAGLSPYSDYEFRVVAVNNIGRGPPSEPVLTQTSEQAPSSAPRDVQARMLSSTTILVQWKEPEEPNGQIQGYRVYYTMDPTQHVNNWMKHNVADSQITTIGNLVPQKTYSVKVLAFTSIGDGPLSSDIQVITQTGVPGQPLNFKAEPESETSILLSWTPPRSDTIANYELVYKDGEHGEEQRITIEPGTSYRLQGLKPNSLYYFRLAARSPQGLGASTAEISARTMQSKPSAPPQDISCTSPSSTSILVSWQPPPVEKQNGIITEYSIKYTAVDGEDDKPHEILGIPSDTTKYLLEQLEKWTEYRITVTAHTDVGPGPESLSVLIRTNEDVPSGPPRKVEVEAVNSTSVKVSWRSPVPNKQHGQIRGYQVHYVRMENGEPKGQPMLKDVMLADAQWEFDDTTEHDMIISGLQPETSYSLTVTAYTTKGDGARSKPKLVSTTGAVPGKPRLVINHTQMNTALIQWHPPVDTFGPLQGYRLKFGRKDMEPLTTLEFSEKEDHFTATDIHKGASYVFRLSARNKVGFGEEMVKEISIPEEVPTGFPQNLHSEGTTSTSVQLSWQPPVLAERNGIITKYTLLYRDINIPLLPMEQLIVPADTTMTLTGLKPDTTYDVKVRAHTSKGPGPYSPSVQFRTLPVDQVFAKNFHVKAVMKTSVLLSWEIPENYNSAMPFKILYDDGKMVEEVDGRATQKLIVNLKPEKSYSFVLTNRGNSAGGLQHRVTAKTAPDVLRTKPAFIGKTNLDGMITVQLPEVPANENIKGYYIIIVPLKKSRGKFIKPWESPDEMELDELLKEISRKRRSIRYGREVELKPYIAAHFDVLPTEFTLGDDKHYGGFTNKQLQSGQEYVFFVLAVMEHAESKMYATSPYSDPVVSMDLDPQPITDEEEGLIWVVGPVLAVVFIICIVIAILLYKRKRAESDSRKSSIPNNKEIPSHHPTDPVELRRLNFQTPGMASHPPIPILELADHIERLKANDNLKFSQEYESIDPGQQFTWEHSNLEVNKPKNRYANVIAYDHSRVLLSAIEGIPGSDYVNANYIDGYRKQNAYIATQGSLPETFGDFWRMIWEQRSATVVMMTKLEERSRVKCDQYWPSRGTETHGLVQVTLLDTVELATYCVRTFALYKNGSSEKREVRQFQFTAWPDHGVPEHPTPFLAFLRRVKTCNPPDAGPMVVHCSAGVGRTGCFIVIDAMLERIKHEKTVDIYGHVTLMRAQRNYMVQTEDQYIFIHDALLEAVTCGNTEVPARNLYAYIQKLTQIETGENVTGMELEFKRLASSKAHTSRFISANLPCNKFKNRLVNIMPYESTRVCLQPIRGVEGSDYINASFIDGYRQQKAYIATQGPLAETTEDFWRMLWEHNSTIVVMLTKLREMGREKCHQYWPAERSARYQYFVVDPMAEYNMPQYILREFKVTDARDGQSRTVRQFQFTDWPEQGVPKSGEGFIDFIGQVHKTKEQFGQDGPISVHCSAGVGRTGVFITLSIVLERMRYEGVVDIFQTVKMLRTQRPAMVQTEDQYQFSYRAALEYLGSFDHYAT

SEQ ID NO: 69308 - protein, 1912 aa, Homo sapiens; identical to SEQ ID NO: 69307
  Payload ID: 13759
  Gene Symbol: PTPRD
  Gene Name: protein tyrosine phosphatase, receptor type, D
  Uniprot ID: P23468
  ENSP ID: ENSP00000370593

SEQ ID NO: 69309 - protein, 1505 aa, Homo sapiens
  Payload ID: 13759
  Gene Symbol: PTPRD
  Gene Name: protein tyrosine phosphatase, receptor type, D
  Uniprot ID: P23468
  ENSP ID: ENSP00000380731
MVHVARLLLLLLTFFLRTDAETPPRFTRTPVDQTGVSGGVASFICQATGDPRPKIVWNKKGKKVSNQRFEVIEFDDGSGSVLRIQPLRTPRDEAIYECVASNNVGEISVSTRLTVLREDQIPRGFPTIDMGPQLKVVERTRTATMLCAASGNPDPEITWFKDFLPVDTSNNNGRIKQLRSESIGALQIEQSEESDQGKYECVATNSAGTRYSAPANLYVRVRRVPPRFSIPPTNHEIMPGGSVNITCVAVGSPMPYVKWMLGAEDLTPEDDMPIGRNVLELNDVRQSANYTCVAMSTLGVIEAIAQITVKALPKPPGTPVVTESTATSITLTWDSGNPEPVSYYIIQHKPKNSEELYKEIDGVATTRYSVAGLSPYSDYEFRVVAVNNIGRGPPSEPVLTQTSEQAPSSAPRDVQARMLSSTTILVQWKEPEEPNGQIQGYRVYYTMDPTQHVNNWMKHNVADSQITTIGNLVPQKTYSVKVLAFTSIGDGPLSSDIQVITQTGVPGQPLNFKAEPESETSILLSWTPPRSDTIANYELVYKDGEHGEEQRITIEPGTSYRLQGLKPNSLYYFRLAARSPQGLGASTAEISARTMQSMFAKNFHVKAVMKTSVLLSWEIPENYNSAMPFKILYDDGKMVEEVDGRATQKLIVNLKPEKSYSFVLTNRGNSAGGLQHRVTAKTAPDVLRTKPAFIGKTNLDGMITVQLPEVPANENIKGYYIIIVPLKKSRGKFIKPWESPDEMELDELLKEISRKRRSIRYGREVELKPYIAAHFDVLPTEFTLGDDKHYGGFTNKQLQSGQEYVFFVLAVMEHAESKMYATSPYSDPVVSMDLDPQPITDEEEGLIWVVGPVLAVVFIICIVIAILLYKRKRAESDSRKSSIPNNKEIPSHHPTDPVELRRLNFQTPGSDDSGYPGNLHSSSMASHPPIPILELADHIERLKANDNLKFSQEYESIDPGQQFTWEHSNLEVNKPKNRYANVIAYDHSRVLLSAIEGIPGSDYVNANYIDGYRKQNAYIATQGSLPETFGDFWRMIWEQRSATVVMMTKLEERSRVKCDQYWPSRGTETHGLVQVTLLDTVELATYCVRTFALYKNGSSEKREVRQFQFTAWPDHGVPEHPTPFLAFLRRVKTCNPPDAGPMVVHCSAGVGRTGCFIVIDAMLERIKHEKTVDIYGHVTLMRAQRNYMVQTEDQYIFIHDALLEAVTCGNTEVPARNLYAYIQKLTQIETGENVTGMELEFKRLASSKAHTSRFISANLPCNKFKNRLVNIMPYESTRVCLQPIRGVEGSDYINASFIDGYRQQKAYIATQGPLAETTEDFWRMLWEHNSTIVVMLTKLREMGREKCHQYWPAERSARYQYFVVDPMAEYNMPQYILREFKVTDARDGQSRTVRQFQFTDWPEQGVPKSGEGFIDFIGQVHKTKEQFGQDGPISVHCSAGVGRTGVFITLSIVLERMRYEGVVDIFQTVKMLRTQRPAMVQTEDQYQFSYRAALEYLGSFDHYAT

SEQ ID NO: 69310 - protein, 1502 aa, Homo sapiens
  Payload ID: 13759
  Gene Symbol: PTPRD
  Gene Name: protein tyrosine phosphatase, receptor type, D
  Uniprot ID: P23468
  ENSP ID: ENSP00000380735
MVHVARLLLLLLTFFLRTDAETPPRFTRTPVDQTGVSGGVASFICQATGDPRPKIVWNKKGKKVSNQRFEVIEFDDGSGSVLRIQPLRTPRDEAIYECVASNNVGEISVSTRLTVLREDQIPRGFPTIDMGPQLKVVERTRTATMLCAASGNPDPEITWFKDFLPVDTSNNNGRIKQLRSGGTPIRGALQIEQSEESDQGKYECVATNSAGTRYSAPANLYVRELREVRRVPPRFSIPPTNHEIMPGGSVNITCVAVGSPMPYVKWMLGAEDLTPEDDMPIGRNVLELNDVRQSANYTCVAMSTLGVIEAIAQITVKALPKPPGTPVVTESTATSITLTWDSGNPEPVSYYIIQHKPKNSEELYKEIDGVATTRYSVAGLSPYSDYEFRVVAVNNIGRGPPSEPVLTQTSEQAPSSAPRDVQARMLSSTTILVQWKEPEEPNGQIQGYRVYYTMDPTQHVNNWMKHNVADSQITTIGNLVPQKTYSVKVLAFTSIGDGPLSSDIQVITQTGVPGQPLNFKAEPESETSILLSWTPPRSDTIANYELVYKDGEHGEEQRITIEPGTSYRLQGLKPNSLYYFRLAARSPQGLGASTAEISARTMQSMFAKNFHVKAVMKTSVLLSWEIPENYNSAMPFKILYDDGKMVEEVDGRATQKLIVNLKPEKSYSFVLTNRGNSAGGLQHRVTAKTAPDVLRTKPAFIGKTNLDGMITVQLPEVPANENIKGYYIIIVPLKKSRGKFIKPWESPDEMELDELLKEISRKRRSIRYGREVELKPYIAAHFDVLPTEFTLGDDKHYGGFTNKQLQSGQEYVFFVLAVMEHAESKMYATSPYSDPVVSMDLDPQPITDEEEGLIWVVGPVLAVVFIICIVIAILLYKSKPDRKRAESDSRKSSIPNNKEIPSHHPTDPVELRRLNFQTPGMASHPPIPILELADHIERLKANDNLKFSQEYESIDPGQQFTWEHSNLEVNKPKNRYANVIAYDHSRVLLSAIEGIPGSDYVNANYIDGYRKQNAYIATQGSLPETFGDFWRMIWEQRSATVVMMTKLEERSRVKCDQYWPSRGTETHGLVQVTLLDTVELATYCVRTFALYKNGSSEKREVRQFQFTAWPDHGVPEHPTPFLAFLRRVKTCNPPDAGPMVVHCSAGVGRTGCFIVIDAMLERIKHEKTVDIYGHVTLMRAQRNYMVQTEDQYIFIHDALLEAVTCGNTEVPARNLYAYIQKLTQIETGENVTGMELEFKRLASSKAHTSRFISANLPCNKFKNRLVNIMPYESTRVCLQPIRGVEGSDYINASFIDGYRQQKAYIATQGPLAETTEDFWRMLWEHNSTIVVMLTKLREMGREKCHQYWPAERSARYQYFVVDPMAEYNMPQYILREFKVTDARDGQSRTVRQFQFTDWPEQGVPKSGEGFIDFIGQVHKTKEQFGQDGPISVHCSAGVGRTGVFITLSIVLERMRYEGVVDIFQTVKMLRTQRPAMVQTEDQYQFSYRAALEYLGSFDHYAT

SEQ ID NO: 69311 - protein, 1505 aa, Homo sapiens [sequence omitted]

SEQ ID NO: 69312 - protein, 1505 aa, Homo sapiens
  Payload ID: 13759
  Gene Symbol: PTPRD
  Gene Name: protein tyrosine phosphatase, receptor type, D
  Uniprot ID: P23468
  ENSP ID: ENSP00000417093
MVHVARLLLLLLTFFLRTDAETPPRFTRTPVDQTGVSGGVASFICQATGDPRPKIVWNKKGKKVSNQRFEVIEFDDGSGSVLRIQPLRTPRDEAIYECVASNNVGEISVSTRLTVLREDQIPRGFPTIDMGPQLKVVERTRTATMLCAASGNPDPEITWFKDFLPVDTSNNNGRIKQLRSESIGGTPIRGALQIEQSEESDQGKYECVATNSAGTRYSAPANLYVRELREVRRVPPRFSIPPTNHEIMPGGSVNITCVAVGSPMPYVKWMLGAEDLTPEDDMPIGRNVLELNDVRQSANYTCVAMSTLGVIEAIAQITVKALPKPPGTPVVTESTATSITLTWDSGNPEPVSYYIIQHKPKNSEELYKEIDGVATTRYSVAGLSPYSDYEFRVVAVNNIGRGPPSEPVLTQTSEQAPSSAPRDVQARMLSSTTILVQWKEPEEPNGQIQGYRVYYTMDPTQHVNNWMKHNVADSQITTIGNLVPQKTYSVKVLAFTSIGDGPLSSDIQVITQTGVPGQPLNFKAEPESETSILLSWTPPRSDTIANYELVYKDGEHGEEQRITIEPGTSYRLQGLKPNSLYYFRLAARSPQGLGASTAEISARTMQSMFAKNFHVKAVMKTSVLLSWEIPENYNSAMPFKILYDDGKMVEEVDGRATQKLIVNLKPEKSYSFVLTNRGNSAGGLQHRVTAKTAPDVLRTKPAFIGKTNLDGMITVQLPEVPANENIKGYYIIIVPLKKSRGKFIKPWESPDEMELDELLKEISRKRRSIRYGREVELKPYIAAHFDVLPTEFTLGDDKHYGGFTNKQLQSGQEYVFFVLAVMEHAESKMYATSPYSDPVVSMDLDPQPITDEEEGLIWVVGPVLAVVFIICIVIAILLYKSKPDRKRAESDSRKSSIPNNKEIPSHHPTDPVELRRLNFQTPGMASHPPIPILELADHIERLKANDNLKFSQEYESIDPGQQFTWEHSNLEVNKPKNRYANVIAYDHSRVLLSAIEGIPGSDYVNANYIDGYRKQNAYIATQGSLPETFGDFWRMIWEQRSATVVMMTKLEERSRVKCDQYWPSRGTETHGLVQVTLLDTVELATYCVRTFALYKNGSSEKREVRQFQFTAWPDHGVPEHPTPFLAFLRRVKTCNPPDAGPMVVHCSAGVGRTGCFIVIDAMLERIKHEKTVDIYGHVTLMRAQRNYMVQTEDQYIFIHDALLEAVTCGNTEVPARNLYAYIQKLTQIETGENVTGMELEFKRLASSKAHTSRFISANLPCNKFKNRLVNIMPYESTRVCLQPIRGVEGSDYINASFIDGYRQQKAYIATQGPLAETTEDFWRMLWEHNSTIVVMLTKLREMGREKCHQYWPAERSARYQYFVVDPMAEYNMPQYILREFKVTDARDGQSRTVRQFQFTDWPEQGVPKSGEGFIDFIGQVHKTKEQFGQDGPISVHCSAGVGRTGVFITLSIVLERMRYEGVVDIFQTVKMLRTQRPAMVQTEDQYQFSYRAALEYLGSFDHYAT

SEQ ID NO: 69313 - protein, 202 aa, Homo sapiens
  Payload ID: 13759
  Gene Symbol: PTPRD
  Gene Name: protein tyrosine phosphatase, receptor type, D
  ENSP ID: ENSP00000417661
MVHVARLLLLLLTFFLRTDAETPPRFTRTPVDQTGVSGGVASFICQATGDPRPKIVWNKKGKKVSNQRFEVIEFDDGSGSVLRIQPLRTPRDEAIYECVASNNVGEISVSTRLTVLREDQIPRGFPTIDMGPQLKVVERTRTATMLCAASGNPDPEITWFKDFLPVDTSNNNGRIKQLRSGTDFSPSSLSLLLNGWSMFVMS

SEQ ID NO: 69314 - protein, 93 aa, Homo sapiens
  Payload ID: 13759
  Gene Symbol: PTPRD
  Gene Name: protein tyrosine phosphatase, receptor type, D
  ENSP ID: ENSP00000417890
MVHVARLLLLLLTFFLRTDAETPPRFTRTPVDQTGVSGGVASFICQATGDPRPKIVWNKKGKKVSNQRFEVIEFDDGSGSVLRIQPLRTPRDE

SEQ ID NO: 69315 - protein, 1912 aa, Homo sapiens; identical to SEQ ID NO: 69307
  Payload ID: 13759
  Gene Symbol: PTPRD
  Gene Name: protein tyrosine phosphatase, receptor type, D
  Uniprot ID: P23468
  ENSP ID: ENSP00000438164

SEQ ID NO: 69316 - protein, 1496 aa, Homo sapiens
  Payload ID: 13759
  Gene Symbol: PTPRD
  Gene Name: protein tyrosine phosphatase, receptor type, D
  ENSP ID: ENSP00000440515
MVHVARLLLLLLTFFLRTDAETPPRFTRTPVDQTGVSGGVASFICQATGDPRPKIVWNKKGKKVSNQRFEVIEFDDGSGSVLRIQPLRTPRDEAIYECVASNNVGEISVSTRLTVLREDQIPRGFPTIDMGPQLKVVERTRTATMLCAASGNPDPEITWFKDFLPVDTSNNNGRIKQLRSESIGALQIEQSEESDQGKYECVATNSAGTRYSAPANLYVRELREVRRVPPRFSIPPTNHEIMPGGSVNITCVAVGSPMPYVKWMLGAEDLTPEDDMPIGRNVLELNDVRQSANYTCVAMSTLGVIEAIAQITVKALPKPPGTPVVTESTATSITLTWDSGNPEPVSYYIIQHKPKNSEELYKEIDGVATTRYSVAGLSPYSDYEFRVVAVNNIGRGPPSEPVLTQTSEQAPSSAPRDVQARMLSSTTILVQWKEPEEPNGQIQGYRVYYTMDPTQHVNNWMKHNVADSQITTIGNLVPQKTYSVKVLAFTSIGDGPLSSDIQVITQTGVPGQPLNFKAEPESETSILLSWTPPRSDTIANYELVYKDGEHGEEQRITIEPGTSYRLQGLKPNSLYYFRLAARSPQGLGASTAEISARTMQSTVFAKNFHVKAVMKTSVLLSWEIPENYNSAMPFKILYDDGKMVEEVDGRATQKLIVNLKPEKSYSFVLTNRGNSAGGLQHRVTAKTAPDVLRTKPAFIGKTNLDGMITVQLPEVPANENIKGYYIIIVPLKKSRGKFIKPWESPDEMELDELLKEISRKRRSIRYGREVELKPYIAAHFDVLPTEFTLGDDKHYGGFTNKQLQSGQEYVFFVLAVMEHAESKMYATSPYSDPVVSMDLDPQPITDEEEGLIWVVGPVLAVVFIICIVIAILLYKRKRAESDSRKSSIPNNKEIPSHHPTDPVELRRLNFQTPGMASHPPIPILELADHIERLKANDNLKFSQEYESIDPGQQFTWEHSNLEVNKPKNRYANVIAYDHSRVLLSAIEGIPGSDYVNANYIDGYRKQNAYIATQGSLPETFGDFWRMIWEQRSATVVMMTKLEERSRVKCDQYWPSRGTETHGLVQVTLLDTVELATYCVRTFALYKNGSSEKREVRQFQFTAWPDHGVPEHPTPFLAFLRRVKTCNPPDAGPMVVHCSAGVGRTGCFIVIDAMLERIKHEKTVDIYGHVTLMRAQRNYMVQTEDQYIFIHDALLEAVTCGNTEVPARNLYAYIQKLTQIETGENVTGMELEFKRLASSKAHTSRFISANLPCNKFKNRLVNIMPYESTRVCLQPIRGVEGSDYINASFIDGYRQQKAYIATQGPLAETTEDFWRMLWEHNSTIVVMLTKLREMGREKCHQYWPAERSARYQYFVVDPMAEYNMPQYILREFKVTDARDGQSRTVRQFQFTDWPEQGVPKSGEGFIDFIGQVHKTKEQFGQDGPISVHCSAGVGRTGVFITLSIVLERMRYEGVVDIFQTVKMLRTQRPAMVQTEDQYQFSYRAALEYLGSFDHYAT

SEQ ID NO: 69317 - protein, 700 aa, Homo sapiens
  Payload ID: 13760
  Gene Symbol: PTPRE
  Gene Name: protein tyrosine phosphatase, receptor type, E
  Uniprot ID: P23469
  ENSP ID: ENSP00000254667
MEPLCPLLLVGFSLPLARALRGNETTADSNETTTTSGPPDPGASQPLLAWLLLPLLLLLLVLLLAAYFFRFRKQRKAVVSTSDKKMPNGILEEQEQQRVMLLSRSPSGPKKYFPIPVEHLEEEIRIRSADDCKQFREEFNSLPSGHIQGTFELANKEENREKNRYPNILPNDHSRVILSQLDGIPCSDYINASYIDGYKEKNKFIAAQGPKQETVNDFWRMVWEQKSATIVMLTNLKERKEEKCHQYWPDQGCWTYGNIRVCVEDCVVLVDYTIRKFCIQPQLPDGCKAPRLVSQLHFTSWPDFGVPFTPIGMLKFLKKVKTLNPVHAGPIVVHCSAGVGRTGTFIVIDAMMAMMHAEQKVDVFEFVSRIRNQRPQMVQTDMQYTFIYQALLEYYLYGDTELDVSSLEKHLQTMHGTTTHFDKIGLEEEFRKLTNVRIMKENMRTGNLPANMKKARVIQIIPYDFNRVILSMKRGQEYTDYINASFIDGYRQKDYFIATQGPLAHTVEDFWRMIWEWKSHTIVMLTEVQEREQDKCYQYWPTEGSVTHGEITIEIKNDTLSEAISIRDFLVTLNQPQARQEEQVRVVRQFHFHGWPEIGIPAEGKGMIDLIAAVQKQQQQTGNHPITVHCSAGAGRTGTFIALSNILERVKAEGLLDVFQAVKSLRLQRPHMVQTLEQYEFCYKVVQDFIDIFSDYANFK

SEQ ID NO: 69318 - protein, 642 aa, Homo sapiens
  Payload ID: 13760
  Gene Symbol: PTPRE
  Gene Name: protein tyrosine phosphatase, receptor type, E
  Uniprot ID: P23469
  ENSP ID: ENSP00000303350
MSNRSSFSRLTWFRKQRKAVVSTSDKKMPNGILEEQEQQRVMLLSRSPSGPKKYFPIPVEHLEEEIRIRSADDCKQFREEFNSLPSGHIQGTFELANKEENREKNRYPNILPNDHSRVILSQLDGIPCSDYINASYIDGYKEKNKFIAAQGPKQETVNDFWRMVWEQKSATIVMLTNLKERKEEKCHQYWPDQGCWTYGNIRVCVEDCVVLVDYTIRKFCIQPQLPDGCKAPRLVSQLHFTSWPDFGVPFTPIGMLKFLKKVKTLNPVHAGPIVVHCSAGVGRTGTFIVIDAMMAMMHAEQKVDVFEFVSRIRNQRPQMVQTDMQYTFIYQALLEYYLYGDTELDVSSLEKHLQTMHGTTTHFDKIGLEEEFRKLTNVRIMKENMRTGNLPANMKKARVIQIIPYDFNRVILSMKRGQEYTDYINASFIDGYRQKDYFIATQGPLAHTVEDFWRMIWEWKSHTIVMLTEVQEREQDKCYQYWPTEGSVTHGEITIEIKNDTLSEAISIRDFLVTLNQPQARQEEQVRVVRQFHFHGWPEIGIPAEGKGMIDLIAAVQKQQQQTGNHPITVHCSAGAGRTGTFIALSNILERVKAEGLLDVFQAVKSLRLQRPHMVQTLEQYEFCYKVVQDFIDIFSDYANFK

SEQ ID NO: 69319 - protein, 140 aa, Homo sapiens
  Payload ID: 13760
  Gene Symbol: PTPRE
  Gene Name: protein tyrosine phosphatase, receptor type, E
  ENSP ID: ENSP00000410540
MEPLCPLLLVGFSLPLARALRGNETTADSNETTTTSGPPDPGASQPLLAWLLLPLLLLLLVLLLAAYFFRFRKQRKAVVSTSDKKMPNGILEEQEQQRVMLLSRSPSGPKKYFPIPVEHLEEEIRIRSADDCKQFREEFN

SEQ ID NO: 69320 - protein, 153 aa, Homo sapiens
  Payload ID: 13760
  Gene Symbol: PTPRE
  Gene Name: protein tyrosine phosphatase, receptor type, E
  ENSP ID: ENSP00000416939
MEPLCPLLLVGFSLPLARALRGNETTADSNETTTTSGPPDPGASQPLLAWLLLPLLLLLLVLLLAAYFFRFRKQRKAVVSTSDKKMPNGILEEQEQQRVMLLSRSPSGPKKYFPIPVEHLEEEIRIRSADDCKQFREEFNSLPSGHIQGTFEL

SEQ ID NO: 69321 - protein, 536 aa, Homo sapiens
  Payload ID: 13760
  Gene Symbol: PTPRE
  Gene Name: protein tyrosine phosphatase, receptor type, E
  ENSP ID: ENSP00000473761
MSNRSSFSRLTWFRKQRKAVVSTSDKKMPNGILEEQEQQRVMLLSRSPSGPKKYFPIPVEHLEEEIRIRSADDCKQFREEFNSLPSGHIQGTFELANKEENREKNRYPNILPNDHSRVILSQLDGIPCSDYINASYIDGYKEKNKFIAAQGPKQETVNDFWRMVWEQKSATIVMLTNLKERKEEKCHQYWPDQGCWTYGNIRVCVEDCVVLVDYTIRKFCIQPQLPDGCKAPRLVSQLHFTSWPDFGVPFTPIGMLKFLKKVKTLNPVHAGPIVVHCSAGVGRTGTFIVIDAMMAMMHAEQKVDVFEFVSRIRNQRPQMVQTDMQYTFIYQALLEYYLYGDTELDVSSLEKHLQTMHGTTTHFDKIGLEEEFRKLTNVRIMKENMRTGNLPANMKKARVIQIIPCKAPVAWLGQGWGGAGAGGFHPGEAIDRLPLCTRVKSRVSSGLRLRAPVCCTKCQVEKTPVKHQLTQTVLHGSQASCFGYELADAGGQPRLISGEGFTEAGDLRQARLGIPCLIPCLPKPGQRPASPLHRGA

SEQ ID NO: 69322 - protein, 149 aa, Homo sapiens
  Payload ID: 13760
  Gene Symbol: PTPRE
  Gene Name: protein tyrosine phosphatase, receptor type, E
  ENSP ID: ENSP00000474102
MEPLCPLLLVGFSLPLARALRGNETTADSNETTTTSGPPDPGASQPLLAWLLLPLLLLLLVLLLAAYFFRFRKQRKAVVSTSDKKMPNGILEEQAKGDAAQQVTLRAQEVFSHPRGAPGGGDPYQIRRRLQAVSGGVQLIAIWTHTRNF

SEQ ID NO: 69323 - protein, 107 aa, Homo sapiens
  Payload ID: 13760
  Gene Symbol: PTPRE
  Gene Name: protein tyrosine phosphatase, receptor type, E
  ENSP ID: ENSP00000474830
RLPAAAGLAATAAAAPPPRAPSRRLLLQEAEESCGQHQRQEDAQRNLGGARAAKGDAAQQVTLRAQEVFSHPRGAPGGGDPYQIRRRLQAVSGGVQLIAIWTHTRNF

SEQ ID NO: 69324 - protein, 118 aa, Homo sapiens
  Payload ID: 13760
  Gene Symbol: PTPRE
  Gene Name: protein tyrosine phosphatase, receptor type, E
  ENSP ID: ENSP00000475063
MSNRSSFSRLTWFRKQRKAVVSTSDKKMPNGILEEQEQQRVMLLSRSPSGPKKYFPIPVEHLEEEIRIRSADDCKQFREEFNSLPSGHIQGTFELANKEENREKNRYPNILPRLQREE

SEQ ID NO: 69325 - protein, 1907 aa, Homo sapiens
  Payload ID: 13761
  Gene Symbol: PTPRF
  Gene Name: protein tyrosine phosphatase, receptor type, F
  Uniprot ID: P10586
  ENSP ID: ENSP00000353030
MAPEPAPGRTMVPLVPALVMLGLVAGAHGDSKPVFIKVPEDQTGLSGGVASFVCQATGEPKPRITWMKKGKKVSSQRFEVIEFDDGAGSVLRIQPLRVQRDEAIYECTATNSLGEINTSAKLSVLEEEQLPPGFPSIDMGPQLKVVEKARTATMLCAAGGNPDPEISWFKDFLPVDPATSNGRIKQLRSGALQIESSEESDQGKYECVATNSAGTRYSAPANLYVRVRRVAPRFSIPPSSQEVMPGGSVNLTCVAVGAPMPYVKWMMGAEELTKEDEMPVGRNVLELSNVVRSANYTCVAISSLGMIEATAQVTVKALPKPPIDLVVTETTATSVTLTWDSGNSEPVTYYGIQYRAAGTEGPFQEVDGVATTRYSIGGLSPFSEYAFRVLAVNSIGRGPPSEAVRARTGEQAPSSPPRRVQARMLSASTMLVQWEPPEEPNGLVRGYRVYYTPDSRRPPNAWHKHNTDAGLLTTVGSLLPGITYSLRVLAFTAVGDGPPSPTIQVKTQQGVPAQPADFQAEVESDTRIQLSWLLPPQERIIMYELVYWAAEDEDQQHKVTFDPTSSYTLEDLKPDTLYRFQLAARSDMGVGVFTPTIEARTAQSTPSAPPQKVMCVSMGSTTVRVSWVPPPADSRNGVITQYSVAYEAVDGEDRGRHVVDGISREHSSWDLVGLEKWTEYRVWVRAHTDVGPGPESSPVLVRTDEDVPSGPPRKVEVEPLNSTAVHVYWKLPVPSKQHGQIRGYQVTYVRLENGEPRGLPIIQDVMLAEAQWRPEESEDYETTISGLTPETTYSVTVAAYTTKGDGARSKPKIVTTTGAVPGRPTMMISTTAMNTALLQWHPPKELPGELLGYRLQYCRADEARPNTIDFGKDDQHFTVTGLHKGTTYIFRLAAKNRAGLGEEFEKEIRTPEDLPSGFPQNLHVTGLTTSTTELAWDPPVLAERNGRIISYTVVFRDINSQQELQNITTDTRFTLTGLKPDTTYDIKVRAWTSKGSGPLSPSIQSRTMPVEQVFAKNFRVAAAMKTSVLLSWEVPDSYKSAVPFKILYNGQSVEVDGHSMRKLIADLQPNTEYSFVLMNRGSSAGGLQHLVSIRTAPDLLPHKPLPASAYIEDGRFDLSMPHVQDPSLVRWFYIVVVPIDRVGGSMLTPRWSTPEELELDELLEAIEQGGEEQRRRRRQAERLKPYVAAQLDVLPETFTLGDKKNYRGFYNRPLSPDLSYQCFVLASLKEPMDQKRYASSPYSDEIVVQVTPAQQQEEPEMLWVTGPVLAVILIILIVIAILLFKRKRTHSPSSKDEQSIGLKDSLLAHSSDPVEMRRLNYQTPGMRDHPPIPITDLADNIERLKANDGLKFSQEYESIDPGQQFTWENSNLEVNKPKNRYANVIAYDHSRVILTSIDGVPGSDYINANYIDGYRKQNAYIATQGPLPETMGDFWRMVWEQRTATVVMMTRLEEKSRVKCDQYWPARGTETCGLIQVTLLDTVELATYTVRTFALHKSGSSEKRELRQFQFMAWPDHGVPEYPTPILAFLRRVKACNPLDAGPMVVHCSAGVGRTGCFIVIDAMLERMKHEKTVDIYGHVTCMRSQRNYMVQTEDQYVFIHEALLEAATCGHTEVPARNLYAHIQKLGQVPPGESVTAMELEFKLLASSKAHTSRFISANLPCNKFKNRLVNIMPYELTRVCLQPIRGVEGSDYINASFLDGYRQQKAYIATQGPLAESTEDFWRMLWEHNSTIIVMLTKLREMGREKCHQYWPAERSARYQYFVVDPMAEYNMPQYILREFKVTDARDGQSRTIRQFQFTDWPEQGVPKTGEGFIDFIGQVHKTKEQFGQDGPITVHCSAGVGRTGVFITLSIVLERMRYEGVVDMFQTVKTLRTQRPAMVQTEDQYQLCYRAALEYLGSFDHYAT

SEQ ID NO: 69326 - protein, 979 aa, Homo sapiens
  Payload ID: 13761
  Gene Symbol: PTPRF
  Gene Name: protein tyrosine phosphatase, receptor type, F
  ENSP ID: ENSP00000361484
TYVRLENGEPRGLPIIQDVMLAEAQWRPEESEDYETTISGLTPETTYSVTVAAYTTKGDGARSKPKIVTTTGAVFAKNFRVAAAMKTSVLLSWEVPDSYKSAVPFKILYNGQSVEVDGHSMRKLIADLQPNTEYSFVLMNRGSSAGGLQHLVSIRTAPDLLPHKPLPASAYIEDGRFDLSMPHVQDPSLVRWFYIVVVPIDRVGGSMLTPRWSTPEELELDELLEAIEQGGEEQRRRRRQAERLKPYVAAQLDVLPETFTLGDKKNYRGFYNRPLSPDLSYQCFVLASLKEPMDQKRYASSPYSDEIVVQVTPAQQQEEPEMLWVTGPVLAVILIILIVIAILLFKRKRTHSPSSKDEQSIGLKDSLLAHSSDPVEMRRLNYQTPGSSVPSCPNTSSMRDHPPIPITDLADNIERLKANDGLKFSQEYESIDPGQQFTWENSNLEVNKPKNRYANVIAYDHSRVILTSIDGVPGSDYINANYIDGYRKQNAYIATQGPLPETMGDFWRMVWEQRTATVVMMTRLEEKSRVKCDQYWPARGTETCGLIQVTLLDTVELATYTVRTFALHKSGSSEKRELRQFQFMAWPDHGVPEYPTPILAFLRRVKACNPLDAGPMVVHCSAGVGRTGCFIVIDAMLERMKHEKTVDIYGHVTCMRSQRNYMVQTEDQYVFIHEALLEAATCGHTEVPARNLYAHIQKLGQVPPGESVTAMELEFKLLASSKAHTSRFISANLPCNKFKNRLVNIMPYELTRVCLQPIRGVEGSDYINASFLDGYRQQKAYIATQGPLAESTEDFWRMLWEHNSTIIVMLTKLREMGREKCHQYWPAERSARYQYFVVDPMAEYNMPQYILREFKVTDARDGQSRTIRQFQFTDWPEQGVPKTGEGFIDFIGQVHKTKEQFGQDGPITVHCSAGVGRTGVFITLSIVLERMRYEGVVDMFQTVKTLRTQRPAMVQTEDQYQLCYRAALEYLGSFDHYAT

SEQ ID NO: 69327 - protein, 1291 aa, Homo sapiens
  Payload ID: 13761
  Gene Symbol: PTPRF
  Gene Name: protein tyrosine phosphatase, receptor type, F
  ENSP ID: ENSP00000391764
  MOD_RES (1)..(1): Any amino acid
XSVTLTWDSGNSEPVTYYGIQYRAAGTEGPFQEVDGVATTRYSIGGLSPFSEYAFRVLAVNSIGRGPPSEAVRARTGEQAPSSPPRRVQARMLSASTMLVQWEPPEEPNGLVRGYRVYYTPDSRRPPNAWHKHNTDAGLLTTVGSLLPGITYSLRVLAFTAVGDGPPSPTIQVKTQQGVPAQPADFQAEVESDTRIQLSWLLPPQERIIMYELVYWAAEDEDQQHKVTFDPTSSYTLEDLKPDTLYRFQLAARSDMGVGVFTPTIEARTAQSMPSGPPRKVEVEPLNSTAVHVYWKLPVPSKQHGQIRGYQVTYVRLENGEPRGLPIIQDVMLAEAQWRPEESEDYETTISGLTPETTYSVTVAAYTTKGDGARSKPKIVTTTGAVFAKNFRVAAAMKTSVLLSWEVPDSYKSAVPFKILYNGQSVEVDGHSMRKLIADLQPNTEYSFVLMNRGSSAGGLQHLVSIRTAPDLLPHKPLPASAYIEDGRFDLSMPHVQDPSLVRWFYIVVVPIDRVGGSMLTPRWSTPEELELDELLEAIEQGGEEQRRRRRQAERLKPYVAAQLDVLPETFTLGDKKNYRGFYNRPLSPDLSYQCFVLASLKEPMDQKRYASSPYSDEIVVQVTPAQQQEEPEMLWVTGPVLAVILIILIVIAILLFKRKRTHSPSSKDEQSIGLKDSLLAHSSDPVEMRRLNYQTPGSSVPSCPNTSSMRDHPPIPITDLADNIERLKANDGLKFSQEYESIDPGQQFTWENSNLEVNKPKNRYANVIAYDHSRVILTSIDGVPGSDYINANYIDGYRKQNAYIATQGPLPETMGDFWRMVWEQRTATVVMMTRLEEKSRVKCDQYWPARGTETCGLIQVTLLDTVELATYTVRTFALHKSGSSEKRELRQFQFMAWPDHGVPEYPTPILAFLRRVKACNPLDAGPMVVHCSAGVGRTGCFIVIDAMLERMKHEKTVDIYGHVTCMRSQRNYMVQTEDQYVFIHEALLEAATCGHTEVPARNLYAHIQKLGQVPPGESVTAMELEFKLLASSKAHTSRFISANLPCNKFKNRLVNIMPYELTRVCLQPIRGVEGSDYINASFLDGYRQQKAYIATQGPLAESTEDFWRMLWEHNSTIIVMLTKLREMGREKCHQYWPAERSARYQYFVVDPMAEYNMPQYILREFKVTDARDGQSRTIRQFQFTDWPEQGVPKTGEGFIDFIGQVHKTKEQFGQDGPITVHCSAGVGRTGVFITLSIVLERMRYEGVVDMFQTVKTLRTQRPAMVQTEDQYQLCYRAALEYLGSFDHYAT

SEQ ID NO: 69328 - protein, 1898 aa, Homo sapiens
  Payload ID: 13761
  Gene Symbol: PTPRF
  Gene Name: protein tyrosine phosphatase, receptor type, F
  Uniprot ID: P10586
  ENSP ID: ENSP00000398822
MAPEPAPGRTMVPLVPALVMLGLVAGAHGDSKPVFIKVPEDQTGLSGGVASFVCQATGEPKPRITWMKKGKKVSSQRFEVIEFDDGAGSVLRIQPLRVQRDEAIYECTATNSLGEINTSAKLSVLEEEQLPPGFPSIDMGPQLKVVEKARTATMLCAAGGNPDPEISWFKDFLPVDPATSNGRIKQLRSGALQIESSEESDQGKYECVATNSAGTRYSAPANLYVRVRRVAPRFSIPPSSQEVMPGGSVNLTCVAVGAPMPYVKWMMGAEELTKEDEMPVGRNVLELSNVVRSANYTCVAISSLGMIEATAQVTVKALPKPPIDLVVTETTATSVTLTWDSGNSEPVTYYGIQYRAAGTEGPFQEVDGVATTRYSIGGLSPFSEYAFRVLAVNSIGRGPPSEAVRARTGEQAPSSPPRRVQARMLSASTMLVQWEPPEEPNGLVRGYRVYYTPDSRRPPNAWHKHNTDAGLLTTVGSLLPGITYSLRVLAFTAVGDGPPSPTIQVKTQQGVPAQPADFQAEVESDTRIQLSWLLPPQERIIMYELVYWAAEDEDQQHKVTFDPTSSYTLEDLKPDTLYRFQLAARSDMGVGVFTPTIEARTAQSTPSAPPQKVMCVSMGSTTVRVSWVPPPADSRNGVITQYSVAYEAVDGEDRGRHVVDGISREHSSWDLVGLEKWTEYRVWVRAHTDVGPGPESSPVLVRTDEDVPSGPPRKVEVEPLNSTAVHVYWKLPVPSKQHGQIRGYQVTYVRLENGEPRGLPIIQDVMLAEAQETTISGLTPETTYSVTVAAYTTKGDGARSKPKIVTTTGAVPGRPTMMISTTAMNTALLQWHPPKELPGELLGYRLQYCRADEARPNTIDFGKDDQHFTVTGLHKGTTYIFRLAAKNRAGLGEEFEKEIRTPEDLPSGFPQNLHVTGLTTSTTELAWDPPVLAERNGRIISYTVVFRDINSQQELQNITTDTRFTLTGLKPDTTYDIKVRAWTSKGSGPLSPSIQSRTMPVEQVFAKNFRVAAAMKTSVLLSWEVPDSYKSAVPFKILYNGQSVEVDGHSMRKLIADLQPNTEYSFVLMNRGSSAGGLQHLVSIRTAPDLLPHKPLPASAYIEDGRFDLSMPHVQDPSLVRWFYIVVVPIDRVGGSMLTPRWSTPEELELDELLEAIEQGGEEQRRRRRQAERLKPYVAAQLDVLPETFTLGDKKNYRGFYNRPLSPDLSYQCFVLASLKEPMDQKRYASSPYSDEIVVQVTPAQQQEEPEMLWVTGPVLAVILIILIVIAILLFKRKRTHSPSSKDEQSIGLKDSLLAHSSDPVEMRRLNYQTPGMRDHPPIPITDLADNIERLKANDGLKFSQEYESIDPGQQFTWENSNLEVNKPKNRYANVIAYDHSRVILTSIDGVPGSDYINANYIDGYRKQNAYIATQGPLPETMGDFWRMVWEQRTATVVMMTRLEEKSRVKCDQYWPARGTETCGLIQVTLLDTVELATYTVRTFALHKSGSSEKRELRQFQFMAWPDHGVPEYPTPILAFLRRVKACNPLDAGPMVVHCSAGVGRTGCFIVIDAMLERMKHEKTVDIYGHVTCMRSQRNYMVQTEDQYVFIHEALLEAATCGHTEVPARNLYAHIQKLGQVPPGESVTAMELEFKLLASSKAHTSRFISANLPCNKFKNRLVNIMPYELTRVCLQPIRGVEGSDYINASFLDGYRQQKAYIATQGPLAESTEDFWRMLWEHNSTIIVMLTKLREMGREKCHQYWPAERSARYQYFVVDPMAEYNMPQYILREFKVTDARDGQSRTIRQFQFTDWPEQGVPKTGEGFIDFIGQVHKTKEQFGQDGPITVHCSAGVGRTGVFITLSIVLERMRYEGVVDMFQTVKTLRTQRPAMVQTEDQYQLCYRAALEYLGSFDHYAT

SEQ ID NO: 69329 - protein, 1553 aa, Homo sapiens
  Payload ID: 13761
  Gene Symbol: PTPRF
  Gene Name: protein tyrosine phosphatase, receptor type, F
  ENSP ID: ENSP00000408952
  MOD_RES (1)..(1): Any amino acid
XEPVTYYGIQYRAAGTEGPFQEVDGVATTRYSIGGLSPFSEYAFRVLAVNSIGRGPPSEAVRARTGEQAPSSPPRRVQARMLSASTMLVQWEPPEEPNGLVRGYRVYYTPDSRRPPNAWHKHNTDAGLLTTVGSLLPGITYSLRVLAFTAVGDGPPSPTIQVKTQQGVPAQPADFQAEVESDTRIQLSWLLPPQERIIMYELVYWAAEDEDQQHKVTFDPTSSYTLEDLKPDTLYRFQLAARSDMGVGVFTPTIEARTAQSTPSAPPQKVMCVSMGSTTVRVSWVPPPADSRNGVITQYSVAYEAVDGEDRGRHVVDGISREHSSWDLVGLEKWTEYRVWVRAHTDVGPGPESSPVLVRTDEDVPSGPPRKVEVEPLNSTAVHVYWKLPVPSKQHGQIRGYQVTYVRLENGEPRGLPIIQDVMLAEAQETTISGLTPETTYSVTVAAYTTKGDGARSKPKIVTTTVPGRPTMMISTTAMNTALLQWHPPKELPGELLGYRLQYCRADEARPNTIDFGKDDQHFTVTGLHKGTTYIFRLAAKNRAGLGEEFEKEIRTPEDLPSGFPQNLHVTGLTTSTTELAWDPPVLAERNGRIISYTVVFRDINSQQELQNITTDTRFTLTGLKPDTTYDIKVRAWTSKGSGPLSPSIQSRTMPVEQVFAKNFRVAAAMKTSVLLSWEVPDSYKSAVPFKILYNGQSVEVDGHSMRKLIADLQPNTEYSFVLMNRGSSAGGLQHLVSIRTAPDLLPHKPLPASAYIEDGRFDLSMPHVQDPSLVRWFYIVVVPIDRVGGSMLTPRWSTPEELELDELLEAIEQGGEEQRRRRRQAERLKPYVAAQLDVLPETFTLGDKKNYRGFYNRPLSPDLSYQCFVLASLKEPMDQKRYASSPYSDEIVVQVTPAQQQEEPEMLWVTGPVLAVILIILIVIAILLFKRKRTHSPSSKDEQSIGLKDSLLAHSSDPVEMRRLNYQTPGMRDHPPIPITDLADNIERLKANDGLKFSQEYESIDPGQQFTWENSNLEVNKPKNRYANVIAYDHSRVILTSIDGVPGSDYINANYIDGYRKQNAYIATQGPLPETMGDFWRMVWEQRTATVVMMTRLEEKSRVKCDQYWPARGTETCGLIQVTLLDTVELATYTVRTFALHKSGSSEKRELRQFQFMAWPDHGVPEYPTPILAFLRRVKACNPLDAGPMVVHCSAGVGRTGCFIVIDAMLERMKHEKTVDIYGHVTCMRSQRNYMVQTEDQYVFIHEALLEAATCGHTEVPARNLYAHIQKLGQVPPGESVTAMELEFKLLASSKAHTSRFISANLPCNKFKNRLVNIMPYELTRVCLQPIRGVEGSDYINASFLDGYRQQKAYIATQGPLAESTEDFWRMLWEHNSTIIVMLTKLREMGREKCHQYWPAERSARYQYFVVDPMAEYNMPQYILREFKVTDARDGQSRTIRQFQFTDWPEQGVPKTGEGFIDFIGQVHKTKEQFGQDGPITVHCSAGVGRTGVFITLSIVLERMRYEGVVDMFQTVKTLRTQRPAMVQTEDQYQLCYRAALEYLGSFDHYAT

SEQ ID NO: 69330 - protein, 262 aa, Homo sapiens
  Payload ID: 13761
  Gene Symbol: PTPRF
  Gene Name: protein tyrosine phosphatase, receptor type, F
  ENSP ID: ENSP00000413306
MAPEPAPGRTMVPLVPALVMLGLVAGAHGDSKPVFIKVPEDQTGLSGGVASFVCQATGEPKPRITWMKKGKKVSSQRFEVIEFDDGAGSVLRIQPLRVQRDEAIYECTATNSLGEINTSAKLSVLEEEQLPPGFPSIDMGPQLKVVEKARTATMLCAAGGNPDPEISWFKDFLPVDPATSNGRIKQLRSGALQIESSEESDQGKYECVATNSAGTRYSAPANLYVRGLAAWARSPMGIWSHPIRLLGVCACVCAHTGTLICV

SEQ ID NO: 69331 - protein, 1332 aa, Homo sapiens
  Payload ID: 13761
  Gene Symbol: PTPRF
  Gene Name: protein tyrosine phosphatase, receptor type, F
  ENSP ID: ENSP00000416343
  MOD_RES (1)..(1): Any amino acid
XSLLPGITYSLRVLAFTAVGDGPPSPTIQVKTQQGVPAQPADFQAEVESDTRIQLSWLLPPQERIIMYELVYWAAEDEDQQHKVTFDPTSSYTLEDLKPDTLYRFQLAARSDMGVGVFTPTIEARTAQSMPSGPPRKVEVEPLNSTAVHVYWKLPVPSKQHGQIRGYQVTYVRLENGEPRGLPIIQDVMLAEAQETTISGLTPETTYSVTVAAYTTKGDGARSKPKIVTTTGAVPGRPTMMISTTAMNTALLQWHPPKELPGELLGYRLQYCRADEARPNTIDFGKDDQHFTVTGLHKGTTYIFRLAAKNRAGLGEEFEKEIRTPEDLPSGFPQNLHVTGLTTSTTELAWDPPVLAERNGRIISYTVVFRDINSQQELQNITTDTRFTLTGLKPDTTYDIKVRAWTSKGSGPLSPSIQSRTMPVEQVFAKNFRVAAAMKTSVLLSWEVPDSYKSAVPFKILYNGQSVEVDGHSMRKLIADLQPNTEYSFVLMNRGSSAGGLQHLVSIRTAPDLLPHKPLPASAYIEDGRFDLSMPHVQDPSLVRWFYIVVVPIDRVGGSMLTPRWSTPEELELDELLEAIEQGGEEQRRRRRQAERLKPYVAAQLDVLPETFTLGDKKNYRGFYNRPLSPDLSYQCFVLASLKEPMDQKRYASSPYSDEIVVQVTPAQQQEEPEMLWVTGPVLAVILIILIVIAILLFKRKRTHSPSSKDEQSIGLKDSLLAHSSDPVEMRRLNYQTPGSSVPSCPNTSSMRDHPPIPITDLADNIERLKANDGLKFSQEYESIDPGQQFTWENSNLEVNKPKNRYANVIAYDHSRVILTSIDGVPGSDYINANYIDGYRKQNAYIATQGPLPETMGDFWRMVWEQRTATVVMMTRLEEKSRVKCDQYWPARGTETCGLIQVTLLDTVELATYTVRTFALHKSGSSEKRELRQFQFMAWPDHGVPEYPTPILAFLRRVKACNPLDAGPMVVHCSAGVGRTGCFIVIDAMLERMKHEKTVDIYGHVTCMRSQRNYMVQTEDQYVFIHEALLEAATCGHTEVPARNLYAHIQKLGQVPPGESVTAMELEFKLLASSKAHTSRFISANLPCNKFKNRLVNIMPYELTRVCLQPIRGVEGSDYINASFLDGYRQQKAYIATQGPLAESTEDFWRMLWEHNSTIIVMLTKLREMGREKCHQYWPAERSARYQYFVVDPMAEYNMPQYILREFKVTDARDGQSRTIRQFQFTDWPEQGVPKTGEGFIDFIGQVHKTKEQFGQDGPITVHCSAGVGRTGVFITLSIVLERMRYEGVVDMFQTVKTLRTQRPAMVQTEDQYQLCYRAALEYLGSFDHYAT

SEQ ID NO: 69332 - protein, 262 aa, Homo sapiens; identical to SEQ ID NO: 69330
  Payload ID: 13761
  Gene Symbol: PTPRF
  Gene Name: protein tyrosine phosphatase, receptor type, F
  ENSP ID: ENSP00000483557

SEQ ID NO: 69333 - protein, 1202 aa, Homo sapiens
  Payload ID: 13762
  Gene Symbol: PPFIA1
  Gene Name: protein tyrosine phosphatase, receptor type, f polypeptide (PTPRF), interacting protein (liprin), alpha 1
  Uniprot ID: Q13136
  ENSP ID: ENSP00000253925
MMCEVMPTISEAEGPPGGGGGHGSGSPSQPDADSHFEQLMVSMLEERDRLLDTLRETQETLALTQGKLHEVGHERDSLQRQLNTALPQEFAALTKELNVCREQLLEREEEIAELKAERNNTRLLLEHLECLVSRHERSLRMTVVKRQAQSPAGVSSEVEVLKALKSLFEHHKALDEKVRERLRVALERCSLLEEELGATHKELMILKEQNNQKKTLTDGVLDINHEQENTPSTSGKRSSDGSLSHEEDLAKVIELQEIISKQSREQSQMKERLASLSSHVTELEEDLDTARKDLIKSEEMNTKLQRDVREAMAQKEDMEERITTLEKRYLAAQREATSVHDLNDKLENEIANKDSMHRQTEDKNRQLQERLELAEQKLQQTLRKAETLPEVEAELAQRVAALSKAEERHGNIEERLRQMEAQLEEKNQELQRARQREKMNEEHNKRLSDTVDKLLSESNERLQLHLKERMAALEDKNSLLREVESAKKQLEETQHDKDQLVLNIEALRAELDHMRLRGASLHHGRPHLGSVPDFRFPMADGHTDSYSTSAVLRRPQKGRLAALRDEPSKVQTLNEQDWERAQQASVLANVAQAFESDADVSDGEDDRDTLLSSVDLLSPSGQADAHTLAMMLQEQLDAINKEIRLIQEEKENTEQRAEEIESRVGSGSLDNLGRFRSMSSIPPYPASSLASSSPPGSGRSTPRRIPHSPAREVDRLGVMTLLPPSREEVRDDKTTIKCETSPPSSPRALRLDRLHKGALHTVSHEDIRDIRNSTGSQDGPVSNPSSSNSSQDSLHKAPKKKGIKSSIGRLFGKKEKGRPGQTGKEALGQAGVSETDNSSQDALGLSKLGGQAEKNRKLQKKHELLEEARRQGLPFAQWDGPTVVVWLELWVGMPAWYVAACRANVKSGAIMSALSDTEIQREIGISNPLHRLKLRLAIQEIMSLTSPSAPPTSRTTLAYGDMNHEWIGNEWLPSLGLPQYRSYFMECLVDARMLDHLTKKDLRGQLKMVDSFHRNSFQCGIMCLRRLNYDRKELERKREESQSEIKDVLVWSNDRVIRWILSIGLKEYANNLIESGVHGALLALDETFDFSALALLLQIPTQNTQARAVLEREFNNLLVMGTDRRFDEDDDKSFRRAPSWRKKFRPKDIRGLAAGSAETLPANFRVTSSMSSPSMQPKKMQMDGNVSGTQRLDSATVRTYSC

SEQ ID NO: 69334 - protein, 1185 aa, Homo sapiens
  Payload ID: 13762
  Gene Symbol: PPFIA1
  Gene Name: protein tyrosine phosphatase, receptor type, f polypeptide (PTPRF), interacting protein (liprin), alpha 1
  Uniprot ID: Q13136
  ENSP ID: ENSP00000374198
MMCEVMPTISEAEGPPGGGGGHGSGSPSQPDADSHFEQLMVSMLEERDRLLDTLRETQETLALTQGKLHEVGHERDSLQRQLNTALPQEFAALTKELNVCREQLLEREEEIAELKAERNNTRLLLEHLECLVSRHERSLRMTVVKRQAQSPAGVSSEVEVLKALKSLFEHHKALDEKVRERLRVALERCSLLEEELGATHKELMILKEQNNQKKTLTDGVLDINHEQENTPSTSGKRSSDGSLSHEEDLAKVIELQEIISKQSREQSQMKERLASLSSHVTELEEDLDTARKDLIKSEEMNTKLQRDVREAMAQKEDMEERITTLEKRYLAAQREATSVHDLNDKLENEIANKDSMHRQTEDKNRQLQERLELAEQKLQQTLRKAETLPEVEAELAQRVAALSKAEERHGNIEERLRQMEAQLEEKNQELQRARQREKMNEEHNKRLSDTVDKLLSESNERLQLHLKERMAALEDKNSLLREVESAKKQLEETQHDKDQLVLNIEALRAELDHMRLRGASLHHGRPHLGSVPDFRFPMADGHTDSYSTSAVLRRPQKGRLAALRDEPSKVQTLNEQDWERAQQASVLANVAQAFESDADVSDGEDDRDTLLSSVDLLSPSGQADAHTLAMMLQEQLDAINKEIRLIQEEKENTEQRAEEIESRVGSGSLDNLGRFRSMSSIPPYPASSLASSSPPGSGRSTPRRIPHSPAREVDRLGVMTLLPPSREEVRDDKTTIKCETSPPSSPRALRLDRLHKGALHTVSHEDIRDIRNSTGSQDGPVSNPSSSNSSQDSLHKAPKKKGIKSSIGRLFGKKEKGRPGQTGKEALGQAGVSETDNSSQDALGLSKLGGQAEKNRKLQKKHELLEEARRQGLPFAQWDGPTVVVWLELWVGMPAWYVAACRANVKSGAIMSALSDTEIQREIGISNPLHRLKLRLAIQEIMSLTSPSAPPTSRTTLAYGDMNHEWIGNEWLPSLGLPQYRSYFMECLVDARMLDHLTKKDLRGQLKMVDSFHRNSFQCGIMCLRRLNYDRKELERKREESQSEIKDVLVWSNDRVIRWILSIGLKEYANNLIESGVHGALLALDETFDFSALALLLQIPTQNTQARAVLEREFNNLLVMGTDRRFDEDDDKSFRRAPSWRKKFRPKDIRGLAAGSAETLPANFRVTSSMSSPSMQPKKMQMDGM

SEQ ID NO: 69335 - protein, 99 aa, Homo sapiens
  Payload ID: 13762
  Gene Symbol: PPFIA1
  Gene Name: protein tyrosine phosphatase, receptor type, f polypeptide (PTPRF), interacting protein (liprin), alpha 1
  ENSP ID: ENSP00000432065
MMCEVMPTISEAEGPPGGGGGHGSGSPSQPDADSHFEQLMVSMLEERDRLLDTLRETQETLALTQGKLHEVGHERDSLQRQLNTALPQEFAALTKELNV

SEQ ID NO: 69336 - protein, 158 aa, Homo sapiens
  Payload ID: 13762
  Gene Symbol: PPFIA1
  Gene Name: protein tyrosine phosphatase, receptor type, f polypeptide (PTPRF), interacting protein (liprin), alpha 1
  ENSP ID: ENSP00000432722
MMCEVMPTISEAEGPPGGGGGHGSGSPSQPDADSHFEQLMVSMLEERDRLLDTLRETQETLALTQGKLHEVGHERDSLQRQLNTALPQEFAALTKELNVCREQLLEREEEIAELKAERNNTRLLLEHLECLVSRHERSLRMTVVKRQAQSPAGVSSEV

SEQ ID NO: 69337 - protein, 33 aa, Homo sapiens
  Payload ID: 13762
  Gene Symbol: PPFIA1
  Gene Name: protein tyrosine phosphatase, receptor type, f polypeptide (PTPRF), interacting protein (liprin), alpha 1
  ENSP ID: ENSP00000432913
  MOD_RES (1)..(1): Any amino acid
XQNTGALQECTAPLQCSFPCVKLTWTVSAQIAG

SEQ ID NO: 69338 - protein, 237 aa, Homo sapiens
  Payload ID: 13762
  Gene Symbol: PPFIA1
  Gene Name: protein tyrosine phosphatase, receptor type, f polypeptide (PTPRF), interacting protein (liprin), alpha 1
  ENSP ID: ENSP00000433114
  MOD_RES (1)..(1): Any amino acid
XTVDKLLSESNERLQLHLKERMAALEDKNSLLREVESAKKQLEETQHDKDQLVLNIEALRAELDHMRLRGASLHHGRPHLGSVPDFRFPMADGHTDSYSTSAVLRRPQKGRLAALRDEPSKVRDDKTTIKCETSPPSSPRALRLDRLHKGALHTVSHEDIRDIRNSTGSQDGPVSNPSSSNSSQDSLHKAPKKKGIKSSIGRLFGKKEKGRPGQTGKEALGQAGVSETDNSSQDALG

SEQ ID NO: 69339 - protein, 583 aa, Homo sapiens
  Payload ID: 13762
  Gene Symbol: PPFIA1
  Gene Name: protein tyrosine phosphatase, receptor type, f polypeptide (PTPRF), interacting protein (liprin), alpha 1
  ENSP ID: ENSP00000433619
MMCEVMPTISEAEGPPGGGGGHGSGSPSQPDADSHFEQLMVSMLEERDRLLDTLRETQETLALTQGKLHEVGHERDSLQRQLNTALPQEFAALTKELNVCREQLLEREEEIAELKAERNNTRLLLEHLECLVSRHERSLRMTVVKRQAQSPAGVSSEVEVLKALKSLFEHHKALDEKVRERLRVALERCSLLEEELGATHKELMILKEQNNQKKTLTDGVLDINHEQENTPSTSGKRSSDGSLSHEEDLAKVIELQEIISKQSREQSQMKERLASLSSHVTELEEDLDTARKDLIKSEEMNTKLQRDVREAMAQKEDMEERITTLEKRYLAAQREATSVHDLNDKLENEIANKDSMHRQTEDKNRQLQERLELAEQKLQQTLRKAETLPEVEAELAQRVAALSKAEERHGNIEERLRQMEAQLEEKNQELQRARQREKMNEEHNKRLSDTVDKLLSESNERLQLHLKERMAALEDKNSLLREVESAKKQLEETQHDKDQLVLNIEALRAELDHMRLRADPTWAVSQISGSPWQTATQTPTAPVQCCGAHRKAGWQPCEMSLPRYKLLMSRIGNVPSKLVSWQM

SEQ ID NO: 69340 - protein, 389 aa, Homo sapiens
  Payload ID: 13762
  Gene Symbol: PPFIA1
  Gene Name: protein tyrosine phosphatase, receptor type, f polypeptide (PTPRF), interacting protein (liprin), alpha 1
  ENSP ID: ENSP00000434445
  MOD_RES (1)..(1): Any amino acid
XADVSDGEDDRDTLLSSVDLLSPSGQADAHTLAMMLQEQLDAINKEIRLIQEEKENTEQRAEEIESRVGSGSLDNLGRFRSMSSIPPYPASSLASSSPPGSGRSTPRRIPHSPAREVDRLGVMTLPSPDSFLIQTSGPHQSVVYSSTSPPSSTPCYSDSSQHAQLPPSREEVRDDKTTIKCETSPPSSPRALRLDRLHKGALHTVSHEDIRDIRNSTGSQDGPVSNPSSSNSSQDSLHKAPKKKGIKSSIGRLFGKKEKGRPGQTGKEALGQAGVSETDNSSQDALGLSKLGGQAEKNRKLQKKHELLEEARRQGLPFAQWDGPTVVVWLELWVGMPAWYVAACRANVKSGAIMSALSDTEIQREIGISNPLHRLKLRLAIQEIMSLTS

SEQ ID NO: 69341 - protein, 98 aa, Homo sapiens
  Payload ID: 13762
  Gene Symbol: PPFIA1
  Gene Name: protein tyrosine phosphatase, receptor type, f polypeptide (PTPRF), interacting protein (liprin), alpha 1
  ENSP ID: ENSP00000434692
  MOD_RES (1)..(1): Any amino acid
XTKGHSWLSCWVSRDSPCKLPGDFFYVFPLYAAKEDADGRLPTLLLQMIMQHLNPTKTTFWNPVESLILLILVIWTLRYFITEFLISEKFMNTIEKIF

SEQ ID NO: 69342 - protein, 387 aa, Homo sapiens
  Payload ID: 13762
  Gene Symbol: PPFIA1
  Gene Name: protein tyrosine phosphatase, receptor type, f polypeptide (PTPRF), interacting protein (liprin), alpha 1
  ENSP ID: ENSP00000435752
  MOD_RES (1)..(1): Any amino acid
XPSTSGKRSSDGSLSHEEDLAKVIELQEIISKQSREQSQMKERLASLSSHVTELEEDLDTARKDLIKSEEMNTKLQRDVREAMAQKEDMEERITTLEKRYLAAQREATSVHDLNDKLENEIANKDSMHRQTEDKNRQLQERLELAEQKLQQTLRKAETLPEVEAELAQRVAALSKSDLLSSGSSAAKEAKLLELTSKLRKAEERHGNIEERLRQMEAQLEEKNQELQRARQREKMNEEHNKRLSDTVDKLLSESNERLQLHLKERMAALEDKNSLLREVESAKKQLEETQHDKDQLVLNIEALRAELDHMRLRGASLHHGRPHLGSVPDFRFPMADGHTDSYSTSAVLRRPQKGRLAALRDEPSKARYKLLMSRIGNVPSKLVSWQM

SEQ ID NO: 69343 - protein, 46 aa, Homo sapiens
  Payload ID: 13762
  Gene Symbol: PPFIA1
  Gene Name: protein tyrosine phosphatase, receptor type, f polypeptide (PTPRF), interacting protein (liprin), alpha 1
  ENSP ID: ENSP00000435978
SQPSSGSGQTGRHDPSISRFIFNPDLRSPSVSSLLIHLPSQFHPML

SEQ ID NO: 69344 - protein, 97 aa, Homo sapiens
  Payload ID: 13762
  Gene Symbol: PPFIA1
  Gene Name: protein tyrosine phosphatase, receptor type, f polypeptide (PTPRF), interacting protein (liprin), alpha 1
  ENSP ID: ENSP00000437024
  MOD_RES (1)..(1): Any amino acid
XKQLEETQHDKDQLVLNIEALRAELDHMRLRADPTWAVSQISGSPWQTATQTPTAPVQCCGAHRKAGWQPCEMSLPRYKLLMSRIGNVPSKLVSWQM

SEQ ID NO: 69345 - protein, 1152 aa, Homo sapiens
  Payload ID: 13763
  Gene Symbol: PPFIA2
  Gene Name: protein tyrosine phosphatase, receptor type, f polypeptide (PTPRF), interacting protein (liprin), alpha 2
  Uniprot ID: O75334
  ENSP ID: ENSP00000327416
MIFSDMNTVSGSPKVHPPNGTRFYTFQEFAALTKELNACREQLLEKEEEISELKAERNNTRLLLEHLECLVSRHERSLRMTVVKRQAQSPSGVSSEVEVLKALKSLFEHHKALDEKIVALREQNVHIQRKMASSEGSTESEHLEGMEPGQKVHEKRLSNGSIDSTDETSQIVELQELLEKQNYEMAQMKERLAALSSRVGEVEQEAETARKDLIKTEEMNTKYQRDIREAMAQKEDMEERITTLEKRYLSAQRESTSIHDMNDKLENELANKEAILRQMEEKNRQLQERLELAEQKLQQTMRKAETLPEVEAELAQRIAALTKAEERHGNIEERMRHLEGQLEEKNQELQRARQREKMNEEHNKRLSDTVDRLLTESNERLQLHLKERMAALEEKNVLIQESETFRKNLEESLHDKERLAEEIEKLRSELDQLKMRTGSLIEPTIPRTHLDTSAELRYSVGSLVDSQSDYRTTKVIRRPRRGRMGVRRDEPKVKSLGDHEWNRTQQIGVLSSHPFESDTEMSDIDDDDRETIFSSMDLLSPSGHSDAQTLAMMLQEQLDAINKEIRLIQEEKESTELRAEEIENRVASVSLEGLNLARVHPGTSITASVTASSLASSSPPSGHSTPKLTPRSPAREMDRMGVMTLPSDLRKHRRKIAVVEEDGREDKATIKCETSPPPTPRALRMTHTLPSSYHNDARSSLSVSLEPESLGLGSANSSQDSLHKAPKKKGIKSSIGRLFGKKEKARLGQLRGFMETEAAAQESLGLGKLGTQAEKDRRLKKKHELLEEARRKGLPFAQWDGPTVVAWLELWLGMPAWYVAACRANVKSGAIMSALSDTEIQREIGISNPLHRLKLRLAIQEMVSLTSPSAPPTSRTPSGNVWVTHEEMENLAAPAKTKESEEGSWAQTLAYGDMNHEWIGNEWLPSLGLPQYRSYFMECLVDARMLDHLTKKDLRVHLKMVDSFHRTSLQYGIMCLKRLNYDRKELERRREASQHEIKDVLVWSNDRVIRWIQAIGLREYANNILESGVHGSLIALDENFDYSSLALLLQIPTQNTQARQILEREYNNLLALGTERRLDESDDKNFRRGSTWRRQFPPREVHGISMMPGSSETLPAGFRLTTTSGQSRKMTTDVASSRLQRLDNSTVRTYSC

SEQ ID NO: 69346 - protein, 1156 aa, Homo sapiens
  Payload ID: 13763
  Gene Symbol: PPFIA2
  Gene Name: protein tyrosine phosphatase, receptor type, f polypeptide (PTPRF), interacting protein (liprin), alpha 2
  Uniprot ID: O75334
  ENSP ID: ENSP00000385093
MIFSDMNTVSGSPKVHPPNGTRFYTFQEFAALTKELNACREQLLEKEEEISELKAERNNTRLLLEHLECLVSRHERSLRMTVVKRQAQSPSGVSSEVEVLKALKSLFEHHKALDEKVRERLRVSLERVSALEEELAAANQEIVALREQNVHIQRKMASSEGSTESEHLEGMEPGQKVHEKRLSNGSIDSTDETSQIVELQELLEKQNYEMAQMKERLAALSSRVGEVEQEAETARKDLIKTEEMNTKYQRDIREAMAQKEDMEERITTLEKRYLSAQRESTSIHDMNDKLENELANKEAILRQMEEKNRQLQERLELAEQKLQQTMRKAETLPEVEAELAQRIAALTKAEERHGNIEERMRHLEGQLEEKNQELQRARQREKMNEEHNKRLSDTVDRLLTESNERLQLHLKERMAALEEKNVLIQESETFRKNLEESLHDKERLAEEIEKLRSELDQLKMRTGSLIEPTIPRTHLDTSAELRYSVGSLVDSQSDYRTTKVIRRPRRGRMGVRRDEPKVKSLGDHEWNRTQQIGVLSSHPFESDTEMSDIDDDDRETIFSSMDLLSPSGHSDAQTLAMMLQEQLDAINKEIRLIQEEKESTELRAEEIENRVASVSLEGLNLARVHPGTSITASVTASSLASSSPPSGHSTPKLTPRSPAREMDRMGVMTLPSDLRKHRRKIAVVEEDGREDKATIKCETSPPPTPRALRMTHTLPSSYHNDARSSLSVSLEPESLGLGSANSSQDSLHKAPKKKGIKSSIGRLFGKKEKARLGQLRGFMETEAAAQESLGLGKLGTQAEKDRRLKKKHELLEEARRKGLPFAQWDGPTVVAWLELWLGMPAWYVAACRANVKSGAIMSALSDTEIQREIGISNPLHRLKLRLAIQEMVSLTSPSAPPTSRTKESEEGSWAQTLAYGDMNHEWIGNEWLPSLGLPQYRSYFMECLVDARMLDHLTKKDLRVHLKMVDSFHRTSLQYGIMCLKRLNYDRKELERRREASQHEIKDVLVWSNDRVIRWIQAIGLREYANNILESGVHGSLIALDENFDYSSLALLLQIPTQNTQARQILEREYNNLLALGTERRLDESDDKNFRRGSTWRRQFPPREVHGISMMPGSSETLPAGFRLTTTSGQSRKMTTDVASSRLQRLDNSTVRTYSC

SEQ ID NO: 69347 - protein, 1152 aa, Homo sapiens; identical to SEQ ID NO: 69345
  Payload ID: 13763
  Gene Symbol: PPFIA2
  Gene Name: protein tyrosine phosphatase, receptor type, f polypeptide (PTPRF), interacting protein (liprin), alpha 2
  Uniprot ID: O75334
  ENSP ID: ENSP00000388373

SEQ ID NO: 69348 - protein, 783 aa, Homo sapiens
  Payload ID: 13763
  Gene Symbol: PPFIA2
  Gene Name: protein tyrosine phosphatase, receptor type, f polypeptide (PTPRF), interacting protein (liprin), alpha 2
  Uniprot ID: O75334
  ENSP ID: ENSP00000438337
MRHLEGQLEEKNQELQRARQREKMNEEHNKRLSDTVDRLLTESNERLQLHLKERMAALEEKNVLIQESETFRKNLEESLHDKERLAEEIEKLRSELDQLKMRTGSLIEPTIPRTHLDTSAELRYSVGSLVDSQSDYRTTKVIRRPRRGRMGVRRDEPKVKSLGDHEWNRTQQIGVLSSHPFESDTEMSDIDDDDRETIFSSMDLLSPSGHSDAQTLAMMLQEQLDAINKEIRLIQEEKESTELRAEEIENRVASVSLEGLNLARVHPGTSITASVTASSLASSSPPSGHSTPKLTPRSPAREMDRMGVMTLPSDLRKHRRKIAVVEEDGREDKATIKCETSPPPTPRALRMTHTLPSSYHNDARSSLSVSLEPESLGLGSANSSQDSLHKAPKKKGIKSSIGRLFGKKEKARLGQLRGFMETEAAAQESLGLGKLGTQAEKDRRLKKKHELLEEARRKGLPFAQWDGPTVVAWLELWLGMPAWYVAACRANVKSGAIMSALSDTEIQREIGISNPLHRLKLRLAIQEMVSLTSPSAPPTSRTCPVFLQTLAYGDMNHEWIGNEWLPSLGLPQYRSYFMECLVDARMLDHLTKKDLRVHLKMVDSFHRTSLQYGIMCLKRLNYDRKELERRREASQHEIKDVLVWSNDRVIRWIQAIGLREYANNILESGVHGSLIALDENFDYSSLALLLQIPTQNTQARQILEREYNNLLALGTERRLDESDDKNFRRGSTWRRQFPPREVHGISMMPGSSETLPAGFRLTTTSGQSRKMTTDDGVFSVYST

SEQ ID NO: 69349 - protein, 443 aa, Homo sapiens
  Payload ID: 13763
  Gene Symbol: PPFIA2
  Gene Name: protein tyrosine phosphatase, receptor type, f polypeptide (PTPRF), interacting protein (liprin), alpha 2
  Uniprot ID: O75334
  ENSP ID: ENSP00000445532
MTHTLPSSYHNDARSSLSVSLEPESLGLGSANSSQDSLHKAPKKKGIKSSIGRLFGKKEKARLGQLRGFMETEAAAQESLGLGKLGTQAEKDRRLKKKHELLEEARRKGLPFAQWDGPTVVAWLELWLGMPAWYVAACRANVKSGAIMSALSDTEIQREIGISNPLHRLKLRLAIQEMVSLTSPSAPPTSRTCPVFLQTLAYGDMNHEWIGNEWLPSLGLPQYRSYFMECLVDARMLDHLTKKDLRVHLKMVDSFHRTSLQYGIMCLKRLNYDRKELERRREASQHEIKDVLVWSNDRVIRWIQAIGLREYANNILESGVHGSLIALDENFDYSSLALLLQIPTQNTQARQILEREYNNLLALGTERRLDESDDKNFRRGSTWRRQFPPREVHGISMMPGSSETLPAGFRLTTTSGQSRKMTTDVASSRLQRLDNSTVRTYSC

SEQ ID NO: 69350 - protein, 284 aa, Homo sapiens
  Payload ID: 13763
  Gene Symbol: PPFIA2
  Gene Name: protein tyrosine phosphatase, receptor type, f polypeptide (PTPRF), interacting protein (liprin), alpha 2
  ENSP ID: ENSP00000446555
  MOD_RES (1)..(1): Any amino acid
XHKALDEKVRERLRVSLERVSALEEELAAANQEIVALREQNVHIQRKMASSEGSTESEHLEGMEPGQKVHEKRLSNGSIDSTDETSQIVELQELLEKQNYEMAQMKERLAALSSRVGEVEQEAETARKDLIKTEEMNTKYQRDIREAMAQKEDMEERITTLEKRYLSAQRESTSIHDMNDKLENELANKEAILRQVQYLCLGFLLVCAFSSFSQNGMEEKNRQLQERLELAEQKLQQTMRKAETLPEVEAELAQRIAALTKAEERHGNIEERMRHLEGQLEEKN

SEQ ID NO: 69351 - protein, 188 aa, Homo sapiens
  Payload ID: 13763
  Gene Symbol: PPFIA2
  Gene Name: protein tyrosine phosphatase, receptor type, f polypeptide (PTPRF), interacting protein (liprin), alpha 2
  ENSP ID: ENSP00000447189
  MOD_RES (1)..(1): Any amino acid
XQAEKDRRLKKNTSGHELLEEARRKGLPFAQWDGPTVVAWLELWLGMPAWYVAACRANVKSGAIMSALSDTEIQREIGISNPLHRLKLRLAIQEMVSLTSPSAPPTSRTCPVFLQTLAYGDMNHEWIGNEWLPSLGLPQYRSYFMECLVDARMLDHLTKKDLRVHLKMVDSFHRTSLQYGIMCLKRLN

SEQ ID NO: 69352 - protein, 1104 aa, Homo sapiens
  Payload ID: 13763
  Gene Symbol: PPFIA2
  Gene Name: protein tyrosine phosphatase, receptor type, f polypeptide (PTPRF), interacting protein (liprin), alpha 2
  ENSP ID: ENSP00000447273
MTVVKRQAQSPSGVSSEVEVLKALKSLFEHHKALDEKVRERLRVSLERVSALEEELAAANQEIVALREQNVHIQRKMASSEGSTESEHLEGMEPGQKVHEKRLSNGSIDSTDETSQIVELQELLEKQNYEMAQMKERLAALSSRVGEVEQEAETARKDLIKTEEMNTKYQRDIREAMAQKEDMEERITTLEKRYLSAQRESTSIHDMNDKLENELANKEAILRQMEEKNRQLQERLELAEQKLQQTMRKAETLPEVEAELAQRIAALTKAEERHGNIEERMRHLEGQLEEKNQELQRARQREKMNEEHNKRLSDTVDRLLTESNERLQLHLKERMAALEEKNVLIQESETFRKNLEESLHDKERLAEEIEKLRSELDQLKMRTGSLIEPTIPRTHLDTSAELRYSVGSLVDSQSDYRTTKVIRRPRRGRMGVRRDEPKVKSLGDHEWNRTQQIGVLSSHPFESDTEMSDIDDDDRETIFSSMDLLSPSGHSDAQTLAMMLQEQLDAINKEIRLIQEEKESTELRAEEIENRVASVSLEGLNLARVHPGTSITASVTASSLASSSPPSGHSTPKLTPRSPAREMDRMGVMTLPSDLRKHRRKIAVVEEDGREDKATIKCETSPPPTPRALRMTHTLPSSYHNDARSSLSVSLEPESLGLGSANSSQDSLHKAPKKKGIKSSIGRLFGKKEKARLGQLRGFMETEAAAQESLGLGKLGTQAEKDRRLKKKHELLEEARRKGLPFAQWDGPTVVAWLELWLGMPAWYVAACRANVKSGAIMSALSDTEIQREIGISNPLHRLKLRLAIQEMVSLTSPSAPPTSRTPSGNVWVTHEEMENLAAPAKTKESEEGSWAQCPVFLQTLAYGDMNHEWIGNEWLPSLGLPQYRSYFMECLVDARMLDHLTKKDLRVHLKMVDSFHRTSLQYGIMCLKRLNYDRKELERRREASQHEIKDVLVWSNDRVIRWIQAIGLREYANNILESGVHGSLIALDENFDYSSLALLLQIPTQNTQARQILEREYNNLLALGTERRLDESDDKNFRRGSTWRRQFPPREVHGISMMPGSSETLPAGFRLTTTSGQSRKMTTDVASSRLQRLDNSTVRTYSC

SEQ ID NO: 69353 - protein, 124 aa, Homo sapiens
  Payload ID: 13763
  Gene Symbol: PPFIA2
  Gene Name: protein tyrosine phosphatase, receptor type, f polypeptide (PTPRF), interacting protein (liprin), alpha 2
  ENSP ID: ENSP00000447792
MRHLEGQLEEKNQELQRARQREKMNEEHNKRLSDTVDRLLTESNERLQLHLKERMAALEEKNVLIQESETFRKNLEESLHDKERLAEEIEKLRSELDQLKMRTGSLIEPTIPRTHLDTSAELRY

SEQ ID NO: 69354 - protein, 1236 aa, Homo sapiens
  Payload ID: 13763
  Gene Symbol: PPFIA2
  Gene Name: protein tyrosine phosphatase, receptor type, f polypeptide (PTPRF), interacting protein (liprin), alpha 2
  Uniprot ID: O75334
  ENSP ID: ENSP00000447868
MMCEVMPTINEDTPMSQRGSQSSGSDSDSHFEQLMVNMLDERDRLLDTLRETQESLSLAQQRLQDVIYDRDSLQRQLNSALPQDIESLTGGLAGSKGADPPEFAALTKELNACREQLLEKEEEISELKAERNNTRLLLEHLECLVSRHERSLRMTVVKRQAQSPSGVSSEVEVLKALKSLFEHHKALDEKVRERLRVSLERVSALEEELAAANQEIVALREQNVHIQRKMASSEGSTESEHLEGMEPGQKVHEKRLSNGSIDSTDETSQIVELQELLEKQNYEMAQMKERLAALSSRVGEVEQEAETARKDLIKTEEMNTKYQRDIREAMAQKEDMEERITTLEKRYLSAQRESTSIHDMNDKLENELANKEAILRQMEEKNRQLQERLELAEQKLQQTMRKAETLPEVEAELAQRIAALTKAEERHGNIEERMRHLEGQLEEKNQELQRARQREKMNEEHNKRLSDTVDRLLTESNERLQLHLKERMAALEEKNVLIQESETFRKNLEESLHDKERLAEEIEKLRSELDQLKMRTGSLIEPTIPRTHLDTSAELRYSVGSLVDSQSDYRTTKVIRRPRRGRMGVRRDEPKVKSLGDHEWNRTQQIGVLSSHPFESDTEMSDIDDDDRETIFSSMDLLSPSGHSDAQTLAMMLQEQLDAINKEIRLIQEEKESTELRAEEIENRVASVSLEGLNLARVHPGTSITASVTASSLASSSPPSGHSTPKLTPRSPAREMDRMGVMTLPSDLRKHRRKIAVVEEDGREDKATIKCETSPPPTPRALRMTHTLPSSYHNDARSSLSVSLEPESLGLGSANSSQDSLHKAPKKKGIKSSIGRLFGKKEKARLGQLRGFMETEAAAQESLGLGKLGTQAEKDRRLKKKHELLEEARRKGLPFAQWDGPTVVAWLELWLGMPAWYVAACRANVKSGAIMSALSDTEIQREIGISNPLHRLKLRLAIQEMVSLTSPSAPPTSRTKESEEGSWAQCPVFLQTLAYGDMNHEWIGNEWLPSLGLPQYRSYFMECLVDARMLDHLTKKDLRVHLKMVDSFHRTSLQYGIMCLKRLNYDRKELERRREASQHEIKDVLVWSNDRVIRWIQAIGLREYANNILESGVHGSLIALDENFDYSSLALLLQIPTQNTQARQILEREYNNLLALGTERRLDESDDKNFRRGSTWRRQFPPREVHGISMMPGSSETLPAGFRLTTTSGQSRKMTTDVASSRLQRLDNSTVRTYSC

SEQ ID NO: 69355 - protein, 121 aa, Homo sapiens
  Payload ID: 13763
  Gene Symbol: PPFIA2
  Gene Name: protein tyrosine phosphatase, receptor type, f polypeptide (PTPRF), interacting protein (liprin), alpha 2
  ENSP ID: ENSP00000447918
MMCEVMPTINEDTPMSQRGSQSSGSDSDSHFEQLMVNMLDERDRLLDTLRETQESLSLAQQRLQDVIYDRDSLQRQLNSALPQDIESLTGGLAGSKGADPPEFAALTKELNACREQLLEKE

SEQ ID NO: 69356 - protein, 265 aa, Homo sapiens
  Payload ID: 13763
  Gene Symbol: PPFIA2
  Gene Name: protein tyrosine phosphatase, receptor type, f polypeptide (PTPRF), interacting protein (liprin), alpha 2
  ENSP ID: ENSP00000448941
MFAAEERHGNIEERMRHLEGQLEEKNQELQRARQREKMNEEHNKRLSDTVDRLLTESNERLQLHLKERMAALEEKNVLIQESETFRKNLEESLHDKERLAEEIEKLRSELDQLKMRTGSLIEPTIPRTHLDTSAELRYSVGSLVDSQSDYRTTKVIRRPRRGRMGVRRDEPKVKSLGDHEWNRTQQIGVLSSHPFESDTEMSDIDDDDRETIFSSMDLLSPSGHSDAQTLAMMLQEQLDAINKEIRLIQEEKESTELRAEEIENR

SEQ ID NO: 69357 - protein, 1251 aa, Homo sapiens
  Payload ID: 13763
  Gene Symbol: PPFIA2
  Gene Name: protein tyrosine phosphatase, receptor type, f polypeptide (PTPRF), interacting protein (liprin), alpha 2
  Uniprot ID: O75334
  ENSP ID: ENSP00000449338
MMCEVMPTINEDTPMSQRGSQSSGSDSDSHFEQLMVNMLDERDRLLDTLRETQESLSLAQQRLQDVIYDRDSLQRQLNSALPQDIESLTGGLAGSKGADPPEFAALTKELNACREQLLEKEEEISELKAERNNTRLLLEHLECLVSRHERSLRMTVVKRQAQSPSGVSSEVEVLKALKSLFEHHKALDEKVRERLRVSLERVSALEEELAAANQEIVALREQNVHIQRKMASSEGSTESEHLEGMEPGQKVHEKRLSNGSIDSTDETSQIVELQELLEKQNYEMAQMKERLAALSSRVGEVEQEAETARKDLIKTEEMNTKYQRDIREAMAQKEDMEERITTLEKRYLSAQRESTSIHDMNDKLENELANKEAILRQMEEKNRQLQERLELAEQKLQQTMRKAETLPEVEAELAQRIAALTKAEERHGNIEERMRHLEGQLEEKNQELQRARQREKMNEEHNKRLSDTVDRLLTESNERLQLHLKERMAALEEKNVLIQESETFRKNLEESLHDKERLAEEIEKLRSELDQLKMRTGSLIEPTIPRTHLDTSAELRYSVGSLVDSQSDYRTTKVIRRPRRGRMGVRRDEPKVKSLGDHEWNRTQQIGVLSSHPFESDTEMSDIDDDDRETIFSSMDLLSPSGHSDAQTLAMMLQEQLDAINKEIRLIQEEKESTELRAEEIENRVASVSLEGLNLARVHPGTSITASVTASSLASSSPPSGHSTPKLTPRSPAREMDRMGVMTLPSDLRKHRRKIAVVEEDGREDKATIKCETSPPPTPRALRMTHTLPSSYHNDARSSLSVSLEPESLGLGSANSSQDSLHKAPKKKGIKSSIGRLFGKKEKARLGQLRGFMETEAAAQESLGLGKLGTQAEKDRRLKKKHELLEEARRKGLPFAQWDGPTVVAWLELWLGMPAWYVAACRANVKSGAIMSALSDTEIQREIGISNPLHRLKLRLAIQEMVSLTSPSAPPTSRTPSGNVWVTHEEMENLAAPAKTKESEEGSWAQTLAYGDMNHEWIGNEWLPSLGLPQYRSYFMECLVDARMLDHLTKKDLRVHLKMVDSFHRTSLQYGIMCLKRLNYDRKELERRREASQHEIKDVLVWSNDRVIRWIQAIGLREYANNILESGVHGSLIALDENFDYSSLALLLQIPTQNTQARQILEREYNNLLALGTERRLDESDDKNFRRGSTWRRQFPPREVHGISMMPGSSETLPAGFRLTTTSGQSRKMTTDVASSRLQRLDNSTVRTYSC

SEQ ID NO: 69358 - protein, 147 aa, Homo sapiens
  Payload ID: 13763
  Gene Symbol: PPFIA2
  Gene Name: protein tyrosine phosphatase, receptor type, f polypeptide (PTPRF), interacting protein (liprin), alpha 2
  ENSP ID: ENSP00000449469
MMCEVMPTINEDTPMSQRGSQSSGSDSDSHFEQLMVNMLDERDRLLDTLRETQESLSLAQQRLQDVIYDRDSLQRQLNSALPQEFAALTKELNACREQLLEKEEEISELKAERNNTRLLLEHLECLVSRHERSLRMTVVKRQAQSPS

SEQ ID NO: 69359 - protein, 188 aa, Homo sapiens
  Payload ID: 13763
  Gene Symbol: PPFIA2
  Gene Name: protein tyrosine phosphatase, receptor type, f polypeptide (PTPRF), interacting protein (liprin), alpha 2
  ENSP ID: ENSP00000449524
  MOD_RES (1)..(1): Any amino acid
XGKKEKARLGQLRGFMETEAAAQESLGLGKLGTQAEKDRRLKKNTSGHELLEEARRKGLPFAQWDGPTVVAWLELWLGMPAWYVAACRANVKSGAIMSALSDTEIQREIGISNPLHRLKLRLAIQEMVSLTSPSAPPTSRTKESEEGSWAQCPVFLQTLAYGDMNHEWIGNEWLPSLGLPQYRSYFME

SEQ ID NO: 69360 - protein, 1247 aa, Homo sapiens
  Payload ID: 13763
  Gene Symbol: PPFIA2
  Gene Name: protein tyrosine phosphatase, receptor type, f polypeptide (PTPRF), interacting protein (liprin), alpha 2
  ENSP ID: ENSP00000449558
MMCEVMPTINEDTPMSQRGSQSSGSDSDSHFEQLMVNMLDERDRLLDTLRETQESLSLAQQRLQDVIYDRDSLQRQLNSALPQDIESLTGGLAGSKGADPPEFAALTKELNACREQLLEKEEEISELKAERNNTRLLLEHLECLVSRHERSLRMTVVKRQAQSPSGVSSEVEVLKALKSLFEHHKALDEKVRERLRVSLERVSALEEELAAANQEIVALREQNVHIQRKMASSEGSTESEHLEGMEPGQKVHEKRLSNGSIDSTDETSQIVELQELLEKQNYEMAQMKERLAALSSRVGEVEQEAETARKDLIKTEEMNTKYQRDIREAMAQKEDMEERITTLEKRYLSAQRESTSIHDMNDKLENELANKEAILRQMEEKNRQLQERLELAEQKLQQTMRKAETLPEVEAELAQRIAALTKAEERHGNIEERMRHLEGQLEEKNQELQRARQREKMNEEHNKRLSDTVDRLLTESNERLQLHLKERMAALEEKNVLIQESETFRKNLEESLHDKERLAEEIEKLRSELDQLKMRTGSLIEPTIPRTHLDTSAELRYSVGSLVDSQSDYRTTKVIRRPRRGRMGVRRDEPKVKSLGDHEWNRTQQIGVLSSHPFESDTEMSDIDDDDRETIFSSMDLLSPSGHSDAQTLAMMLQEQLDAINKEIRLIQEEKESTELRAEEIENRVASVSLEGLNLARVHPGTSITASVTASSLASSSPPSGHSTPKLTPRSPAREMDRMGVMTLPSDLRKHRRKIAVVEEDGREDKATIKCETSPPPTPRALRMTHTLPSSYHNDARSSLSVSLEPESLGLGSANSSQDSLHKAPKKKGIKSSIGRLFGKKEKARLGQLRGFMETEAAAQESLGLGKLGTQAEKDRRLKKKHELLEEARRKGLPFAQWDGPTVVAWLELWLGMPAWYVAACRANVKSGAIMSALSDTEIQREIGISNPLHRLKLRLAIQEMVSLTSPSAPPTSRTPSGNVWVTHEEMENLAAPAKTKESEEGSWAQCPVFLQTLAYGDMNHEWIGNEWLPSLGLPQYRSYFMECLVDARMLDHLTKKDLRVHLKMVDSFHRTSLQYGIMCLKRLNYDRKELERRREASQHEIKDVLVWSNDRVIRWIQAIGLREYANNILESGVHGSLIALDENFDYSSLALLLQIPTQNTQARQILEREYNNLLALGTERRLDESDDKNFRRGSTWRRQFPPREVHGISMMPGSSETLPAGFRLTTTSGQSRKMTTDDGVFSVYST

SEQ ID NO: 69361 - protein, 81 aa, Homo sapiens
  Payload ID: 13763
  Gene Symbol: PPFIA2
  Gene Name: protein tyrosine phosphatase, receptor type, f polypeptide (PTPRF), interacting protein (liprin), alpha 2
  ENSP ID: ENSP00000449821
MRHLEGQLEEKNQELQRARQREKMNEEHNKRLSDTVDRLLTESNERLQLHLKERMAALEEKLAATRPARVMRAGYQFQSIN

SEQ ID NO: 69362 - protein, 1232 aa, Homo sapiens
  Payload ID: 13763
  Gene Symbol: PPFIA2
  Gene Name: protein tyrosine phosphatase, receptor type, f polypeptide (PTPRF), interacting protein (liprin), alpha 2
  Uniprot ID: O75334
  ENSP ID: ENSP00000450298
MMCEVMPTINEDTPMSQRGSQSSGSDSDSHFEQLMVNMLDERDRLLDTLRETQESLSLAQQRLQDVIYDRDSLQRQLNSALPQEFAALTKELNACREQLLEKEEEISELKAERNNTRLLLEHLECLVSRHERSLRMTVVKRQAQSPSGVSSEVEVLKALKSLFEHHKALDEKVRERLRVSLERVSALEEELAAANQEIVALREQNVHIQRKMASSEGSTESEHLEGMEPGQKVHEKRLSNGSIDSTDETSQIVELQELLEKQNYEMAQMKERLAALSSRVGEVEQEAETARKDLIKTEEMNTKYQRDIREAMAQKEDMEERITTLEKRYLSAQRESTSIHDMNDKLENELANKEAILRQMEEKNRQLQERLELAEQKLQQTMRKAETLPEVEAELAQRIAALTKAEERHGNIEERMRHLEGQLEEKNQELQRARQREKMNEEHNKRLSDTVDRLLTESNERLQLHLKERMAALEEKNVLIQESETFRKNLEESLHDKERLAEEIEKLRSELDQLKMRTGSLIEPTIPRTHLDTSAELRYSVGSLVDSQSDYRTTKVIRRPRRGRMGVRRDEPKVKSLGDHEWNRTQQIGVLSSHPFESDTEMSDIDDDDRETIFSSMDLLSPSGHSDAQTLAMMLQEQLDAINKEIRLIQEEKESTELRAEEIENRVASVSLEGLNLARVHPGTSITASVTASSLASSSPPSGHSTPKLTPRSPAREMDRMGVMTLPSDLRKHRRKIAVVEEDGREDKATIKCETSPPPTPRALRMTHTLPSSYHNDARSSLSVSLEPESLGLGSANSSQDSLHKAPKKKGIKSSIGRLFGKKEKARLGQLRGFMETEAAAQESLGLGKLGTQAEKDRRLKKNTSGHELLEEARRKGLPFAQWDGPTVVAWLELWLGMPAWYVAACRANVKSGAIMSALSDTEIQREIGISNPLHRLKLRLAIQEMVSLTSPSAPPTSRTPSGNVWVTHEEMENLAAPAKTKESEEGSWAQCPVFLQTLAYGDMNHEWIGNEWLPSLGLPQYRSYFMECLVDARMLDHLTKKDLRVHLKMVDSFHRTSLQYGIMCLKRLNYDRKELERRREASQHEIKDVLVWSNDRVIRWIQAIGLREYANNILESGVHGSLIALDENFDYSSLALLLQIPTQNTQARQILEREYNNLLALGTERRLDESDDKNFRRGSTWRRQFPPREVHGISMMPGSSETLPAGFRLTTTSGQSRKMTTDDGVFSVYST

SEQ ID NO: 69363 - protein, 1257 aa, Homo sapiens
  Payload ID: 13763
  Gene Symbol: PPFIA2
  Gene Name: protein tyrosine phosphatase, receptor type, f polypeptide (PTPRF), interacting protein (liprin), alpha 2
  Uniprot ID: O75334
  ENSP ID: ENSP00000450337
MMCEVMPTINEDTPMSQRGSQSSGSDSDSHFEQLMVNMLDERDRLLDTLRETQESLSLAQQRLQDVIYDRDSLQRQLNSALPQDIESLTGGLAGSKGADPPEFAALTKELNACREQLLEKEEEISELKAERNNTRLLLEHLECLVSRHERSLRMTVVKRQAQSPSGVSSEVEVLKALKSLFEHHKALDEKVRERLRVSLERVSALEEELAAANQEIVALREQNVHIQRKMASSEGSTESEHLEGMEPGQKVHEKRLSNGSIDSTDETSQIVELQELLEKQNYEMAQMKERLAALSSRVGEVEQEAETARKDLIKTEEMNTKYQRDIREAMAQKEDMEERITTLEKRYLSAQRESTSIHDMNDKLENELANKEAILRQMEEKNRQLQERLELAEQKLQQTMRKAETLPEVEAELAQRIAALTKAEERHGNIEERMRHLEGQLEEKNQELQRARQREKMNEEHNKRLSDTVDRLLTESNERLQLHLKERMAALEEKNVLIQESETFRKNLEESLHDKERLAEEIEKLRSELDQLKMRTGSLIEPTIPRTHLDTSAELRYSVGSLVDSQSDYRTTKVIRRPRRGRMGVRRDEPKVKSLGDHEWNRTQQIGVLSSHPFESDTEMSDIDDDDRETIFSSMDLLSPSGHSDAQTLAMMLQEQLDAINKEIRLIQEEKESTELRAEEIENRVASVSLEGLNLARVHPGTSITASVTASSLASSSPPSGHSTPKLTPRSPAREMDRMGVMTLPSDLRKHRRKIAVVEEDGREDKATIKCETSPPPTPRALRMTHTLPSSYHNDARSSLSVSLEPESLGLGSANSSQDSLHKAPKKKGIKSSIGRLFGKKEKARLGQLRGFMETEAAAQESLGLGKLGTQAEKDRRLKKKHELLEEARRKGLPFAQWDGPTVVAWLELWLGMPAWYVAACRANVKSGAIMSALSDTEIQREIGISNPLHRLKLRLAIQEMVSLTSPSAPPTSRTPSGNVWVTHEEMENLAAPAKTKESEEGSWAQCPVFLQTLAYGDMNHEWIGNEWLPSLGLPQYRSYFMECLVDARMLDHLTKKDLRVHLKMVDSFHRTSLQYGIMCLKRLNYDRKELERRREASQHEIKDVLVWSNDRVIRWIQAIGLREYANNILESGVHGSLIALDENFDYSSLALLLQIPTQNTQARQILEREYNNLLALGTERRLDESDDKNFRRGSTWRRQFPPREVHGISMMPGSSETLPAGFRLTTTSGQSRKMTTDVASSRLQRLDNSTVRTYSC

SEQ ID NO: 69364 - protein, 1194 aa, Homo sapiens
  Payload ID: 13764
  Gene Symbol: PPFIA3
  Gene Name: protein tyrosine phosphatase, receptor type, f polypeptide (PTPRF), interacting protein (liprin), alpha 3
  Uniprot ID: O75145
  ENSP ID: ENSP00000335614
MMCEVMPTISEDGRRGSALGPDEAGGELERLMVTMLTERERLLETLREAQDGLATAQLRLRELGHEKDSLQRQLSIALPQEFAALTKELNLCREQLLEREEEIAELKAERNNTRLLLEHLECLVSRHERSLRMTVVKRQAQSPGGVSSEVEVLKALKSLFEHHKALDEKVRERLRMALERVAVLEEELELSNQETLNLREQLSRRRSGLEEPGKDGDGQTLANGLGPGGDSNRRTAELEEALERQRAEVCQLRERLAVLCRQMSQLEEELGTAHRELGKAEEANSKLQRDLKEALAQREDMEERITTLEKRYLSAQREATSLHDANDKLENELASKESLYRQSEEKSRQLAEWLDDAKQKLQQTLQKAETLPEIEAQLAQRVAALNKAEERHGNFEERLRQLEAQLEEKNQELQRARQREKMNDDHNKRLSETVDKLLSESNERLQLHLKERMGALEEKNSLSEEIANMKKLQDELLLNKEQLLAEMERMQMEIDQLRGRPPSSYSRSLPGSALELRYSQAPTLPSGAHLDPYVAGSGRAGKRGRWSGVKEEPSKDWERSAPAGSIPPPFPGELDGSDEEEAEGMFGAELLSPSGQADVQTLAIMLQEQLEAINKEIKLIQEEKETTEQRAEELESRVSSSGLDSLGRYRSSCSLPPSLTTSTLASPSPPSSGHSTPRLAPPSPAREGTDKANHVPKEEAGAPRGEGPAIPGDTPPPTPRSARLERMTQALALQAGSLEDGGPPRGSEGTPDSLHKAPKKKSIKSSIGRLFGKKEKGRMGPPGRDSSSLAGTPSDETLATDPLGLAKLTGPGDKDRRNKRKHELLEEACRQGLPFAAWDGPTVVSWLELWVGMPAWYVAACRANVKSGAIMANLSDTEIQREIGISNPLHRLKLRLAIQEMVSLTSPSAPASSRTSTGNVWMTHEEMESLTATTKPETKEISWEQILAYGDMNHEWVGNDWLPSLGLPQYRSYFMESLVDARMLDHLNKKELRGQLKMVDSFHRVSLHYGIMCLKRLNYDRKDLERRREESQTQIRDVMVWSNERVMGWVSGLGLKEFATNLTESGVHGALLALDETFDYSDLALLLQIPTQNAQARQLLEKEFSNLISLGTDRRLDEDSAKSFSRSPSWRKMFREKDLRGVTPDSAEMLPPNFRSAAAGALGSPGLPLRKLQPEGQTSGSSRADGVSVRTYSC

SEQ ID NO: 69365 - protein, 277 aa, Homo sapiens
  Payload ID: 13764
  Gene Symbol: PPFIA3
  Gene Name: protein tyrosine phosphatase, receptor type, f polypeptide (PTPRF), interacting protein (liprin), alpha 3
  ENSP ID: ENSP00000473418
APASSRTSTGNVWMTHEEMESLTATTKPILAYGDMNHEWVGNDWLPSLGLPQYRSYFMESLVDARMLDHLNKKELRGQLKMVDSFHRVSLHYGIMCLKRLNYDRKDLERRREESQTQIRDVMVWSNERVMGWVSGLGLKEFATNLTESGVHGALLALDETFDYSDLALLLQIPTQNAQARQLLEKEFSNLISLGTDRRLDEDSAKSFSRSPSWRKMFREKDLRGVTPDSAEMLPPNFRSAAAGALGSPGLPLRKLQPEGQTSGSSRADGVSVRTYSC

SEQ ID NO: 69366 - protein, 243 aa, Homo sapiens
  Payload ID: 13764
  Gene Symbol: PPFIA3
  Gene Name: protein tyrosine phosphatase, receptor type, f polypeptide (PTPRF), interacting protein (liprin), alpha 3
  ENSP ID: ENSP00000473423
MNHEWVGNDWLPSLGLPQYRSYFMESLVDARMLDHLNKKELRGQLKMVDSFHRVSLHYGIMCLKRLNYDRKDLERRREESQTQIRDVMVWSNERVMGWVSGLGLKEFATNLTESGVHGALLALDETFDYSDLALLLQIPTQNAQARQLLEKEFSNLISLGTDRRLDEDSAKSFSRSPSWRKMFREKDLRGVTPDSAEMLPPNFRSAAAGALGSPGLPLRKLQPEGQTSGSSRADGVSVRTYSC

SEQ ID NO: 69367 - protein, 652 aa, Homo sapiens
  Payload ID: 13764
  Gene Symbol: PPFIA3
  Gene Name: protein tyrosine phosphatase, receptor type, f polypeptide (PTPRF), interacting protein (liprin), alpha 3
  ENSP ID: ENSP00000473470
MMCEVMPTISEDGRRGSALGPDEAGGELERLMVTMLTERERLLETLREAQDGLATAQLRLRELGHEKDSLQRQLSIALPQEFAALTKELNLCREQLLEREEEIAELKAERNNTRLLLEHLECLVSRHERSLRMTVVKRQAQSPGGVSSEVEVLKALKSLFEHHKALDEKVRERLRMALERVAVLEEELELSNQETLNLREQLSRRRSGLEEPGKDGDGQTLANGLGPGGDSNRRTAELEEALERQRAEVCQLRERLAVLCRQMSQLEEELGTAHRELGKAEEANSKLQRDLKEALAQREDMEERITTLEKRYLSAQREATSLHDANDKLENELASKESLYRQSEEKSRQLAEWLDDAKQKLQQTLQKAETLPEIEAQLAQRVAALNKAEERHGNFEERLRQLEAQLEEKNQELQRARQREKMNDDHNKRLSETVDKLLSESNERLQLHLKERMGALEEKNSLSEEIANMKKLQDELLLNKEQLLAEMERMQMEIDQLRGRPPSSYSRSLPGSALELRYSQAPTLPSGAHLDPYVAGSGRAGKRGRWSGVKEEPSKDWERSAPAGSIPPPFPGELDGSDEEEAEGMFGAELLSPSGQADVQTLAIMLQEQLEAINKEIKIMSLRRKLELHEGRGRPSQETPHHPLPALPVLRE

SEQ ID NO: 69368 - protein, 146 aa, Homo sapiens
  Payload ID: 13764
  Gene Symbol: PPFIA3
  Gene Name: protein tyrosine phosphatase, receptor type, f polypeptide (PTPRF), interacting protein (liprin), alpha 3
  ENSP ID: ENSP00000473621
MMCEVMPTISEDGRRGSALGPDEAGGELERLMVTMLTERERLLETLREAQDGLATAQLRLRELGHEKDSLQRQLSIALPQEFAALTKELNLCREQLLEREEEIAELKAERNNTRLLLEHLECLVSRHERSLRMTVVKRQAQSPGGV

SEQ ID NO: 69369 - protein, 1185 aa, Homo sapiens
  Payload ID: 13764
  Gene Symbol: PPFIA3
  Gene Name: protein tyrosine phosphatase, receptor type, f polypeptide (PTPRF), interacting protein (liprin), alpha 3
  Uniprot ID: O75145
  ENSP ID: ENSP00000473622
MMCEVMPTISEDGRRGSALGPDEAGGELERLMVTMLTERERLLETLREAQDGLATAQLRLRELGHEKDSLQRQLSIALPQEFAALTKELNLCREQLLEREEEIAELKAERNNTRLLLEHLECLVSRHERSLRMTVVKRQAQSPGGVSSEVEVLKALKSLFEHHKALDEKVRERLRMALERVAVLEEELELSNQETLNLREQLSRRRSGLEEPGKDGDGQTLANGLGPGGDSNRRTAELEEALERQRAEVCQLRERLAVLCRQMSQLEEELGTAHRELGKAEEANSKLQRDLKEALAQREDMEERITTLEKRYLSAQREATSLHDANDKLENELASKESLYRQSEEKSRQLAEWLDDAKQKLQQTLQKAETLPEIEAQLAQRVAALNKAEERHGNFEERLRQLEAQLEEKNQELQRARQREKMNDDHNKRLSETVDKLLSESNERLQLHLKERMGALEEKNSLSEEIANMKKLQDELLLNKEQLLAEMERMQMEIDQLRGRPPSSYSRSLPGSALELRYSQAPTLPSGAHLDPYVAGSGRAGKRGRWSGVKEEPSKDWERSAPAGSIPPPFPGELDGSDEEEAEGMFGAELLSPSGQADVQTLAIMLQEQLEAINKEIKLIQEEKETTEQRAEELESRVSSSGLDSLGRYRSSCSLPPSLTTSTLASPSPPSSGHSTPRLAPPSPAREGTDKANHVPKEEAGAPRGEGPAIPGDTPPPTPRSARLERMTQALALQAGSLEDGGPPRGSEGTPDSLHKAPKKKSIKSSIGRLFGKKEKGRMGPPGRDSSSLAGTPSDETLATDPLGLAKLTGPGDKDRRNKRKHELLEEACRQGLPFAAWDGPTVVSWLELWVGMPAWYVAACRANVKSGAIMANLSDTEIQREIGISNPLHRLKLRLAIQEMVSLTSPSAPASSRTSTGNVWMTHEEMESLTATTKPILAYGDMNHEWVGNDWLPSLGLPQYRSYFMESLVDARMLDHLNKKELRGQLKMVDSFHRVSLHYGIMCLKRLNYDRKDLERRREESQTQIRDVMVWSNERVMGWVSGLGLKEFATNLTESGVHGALLALDETFDYSDLALLLQIPTQNAQARQLLEKEFSNLISLGTDRRLDEDSAKSFSRSPSWRKMFREKDLRGVTPDSAEMLPPNFRSAAAGALGSPGLPLRKLQPEGQTSGSSRADGVSVRTYSC

SEQ ID NO: 69370 - protein, 701 aa, Homo sapiens
  Payload ID: 13765
  Gene Symbol: PPFIA4
  Gene Name: protein tyrosine phosphatase, receptor type, f polypeptide (PTPRF), interacting protein (liprin), alpha 4
  Uniprot ID: O75335
  ENSP ID: ENSP00000272198
MGSAADVRFSLGTTTHAPPGVHRRYSALREESAKDWETSPLPGMLAPAAGPAFDSDPEISDVDEDEPGGLVGSADVVSPSGHSDAQTLAMMLQEQLDAINEEIRMIQEEKESTELRAEEIETRVTSGSMEALNLKQLRKRGSIPTSLTALSLASASPPLSGRSTPKLTSRSAAQDLDRMGVMTLPSDLRKHRRKLLSPVSREENREDKATIKCETSPPSSPRTLRLEKLGHPALSQEEGKSALEDQGSNPSSSNSSQDSLHKGAKRKGIKSSIGRLFGKKEKGRLIQLSRDGATGHVLLTDSEFSMQEPMVPAKLGTQAEKDRRLKKKHQLLEDARRKGMPFAQWDGPTVVSWLELWVGMPAWYVAACRANVKSGAIMSALSDTEIQREIGISNALHRLKLRLAIQEMVSLTSPSAPPTSRTSSGNVWVTHEEMETLETSTKTDSEEGSWAQTLAYGDMNHEWIGNEWLPSLGLPQYRSYFMECLVDARMLDHLTKKDLRVHLKMVDSFHRTSLQYGIMCLKRLNYDRKELEKRREESQHEIKDVLVWTNDQVVHWVQSIGLRDYAGNLHESGVHGALLALDENFDHNTLALILQIPTQNTQARQVMEREFNNLLALGTDRKLDDGDDKVFRRAPSWRKRFRPREHHGRGGMLSASAETLPAGFRVSTLGTLQPPPAPPKKIMPEAHSHYLYGHMLSAFRD

SEQ ID NO: 69371 - protein, 692 aa, Homo sapiens
  Payload ID: 13765
  Gene Symbol: PPFIA4
  Gene Name: protein tyrosine phosphatase, receptor type, f polypeptide (PTPRF), interacting protein (liprin), alpha 4
  Uniprot ID: O75335
  ENSP ID: ENSP00000295706
MGSAADVRFSLGTTTHAPPGVHRRYSALREESAKDWETSPLPGMLAPAAGPAFDSDPEISDVDEDEPGGLVGSADVVSPSGHSDAQTLAMMLQEQLDAINEEIRMIQEEKESTELRAEEIETRVTSGSMEALNLKQLRKRGSIPTSLTALSLASASPPLSGRSTPKLTSRSAAQDLDRMGVMTLPSDLRKHRRKLLSPVSREENREDKATIKCETSPPSSPRTLRLEKLGHPALSQEEGKSALEDQGSNPSSSNSSQDSLHKGAKRKGIKSSIGRLFGKKEKGRLIQLSRDGATGHVLLTDSEFSMQEPMVPAKLGTQAEKDRRLKKKHQLLEDARRKGMPFAQWDGPTVVSWLELWVGMPAWYVAACRANVKSGAIMSALSDTEIQREIGISNALHRLKLRLAIQEMVSLTSPSAPPTSRTSSGNVWVTHEEMETLETSTKTTLAYGDMNHEWIGNEWLPSLGLPQYRSYFMECLVDARMLDHLTKKDLRVHLKMVDSFHRTSLQYGIMCLKRLNYDRKELEKRREESQHEIKDVLVWTNDQVVHWVQSIGLRDYAGNLHESGVHGALLALDENFDHNTLALILQIPTQNTQARQVMEREFNNLLALGTDRKLDDGDDKVFRRAPSWRKRFRPREHHGRGGMLSASAETLPAGFRVSTLGTLQPPPAPPKKIMPEAHSHYLYGHMLSAFRD

SEQ ID NO: 69372 - protein, 1186 aa, Homo sapiens
  Payload ID: 13765
  Gene Symbol: PPFIA4
  Gene Name: protein tyrosine phosphatase, receptor type, f polypeptide (PTPRF), interacting protein (liprin), alpha 4
  ENSP ID: ENSP00000356209
MCEVMPTINEGDRLGPPHGADADANFEQLMVNMLDEREKLLESLRESQETLAATQSRLQDAIHERDQLQRHLNSALPQEFATLTRELSMCREQLLEREEEISELKAERNNTRLLLEHLECLVSRHERSLRMTVVKRQAQSPSGVSSEVEVLKALKSLFEHHKALDEKVRERLRAALERVTTLEEQLAGAHQQVSALQQGAGVRDGAAEEEGTVELGPKRLWKEDTGRVEELQELLEKQNFELSQARERLVTLTTTVTELEEDLGTARRDLIKSEELSSKHQRDLREALAQKEDMEERITTLEKRYLAAQREATSIHDLNDKLENELANKESLHRQCEEKARHLQELLEVAEQKLQQTMRKAETLPEVEAELAQRIAALTKAEERHGNIEEHLRQLEGQLEEKNQELARVRQREKMNEDHNKRLSDTVDRLLSESNERLQLHLKERMAALEEKGRLSEEIEKLRQEVDQLKGRGGPFVDGVHSRSHMGSAADVRFSLGTTTHAPPGVHRRYSALREESAKDWETSPLPGMLAPAAGPAFDSDPEISDVDEDEPGGLVGSADVVSPSGHSDAQTLAMMLQEQLDAINEEIRMIQEEKESTELRAEEIETRVTSGSMEALNLKQLRKRGSIPTSLTALSLASASPPLSGRSTPKLTSRSAAQDLDRMGVMTLPSDLRKHRRKLLSPVSREENREDKATIKCETSPPSSPRTLRLEKLGHPALSQEEGKSALEDQGSNPSSSNSSQDSLHKGAKRKGIKSSIGRLFGKKEKGRLIQLSRDGATGHVLLTDSEFSMQEPMVPAKLGTQAEKDRRLKKKHQLLEDARRKGMPFAQWDGPTVVSWLELWVGMPAWYVAACRANVKSGAIMSALSDTEIQREIGISNALHRLKLRLAIQEMVSLTSPSAPPTSRTSSGNVWVTHEEMETLETSTKTDSEEGSWAQTLAYGDMNHEWIGNEWLPSLGLPQYRSYFMECLVDARMLDHLTKKDLRVHLKMVDSFHRTSLQYGIMCLKRLNYDRKELEKRREESQHEIKDVLVWTNDQVVHWVQSIGLRDYAGNLHESGVHGALLALDENFDHNTLALILQIPTQNTQARQVMEREFNNLLALGTDRKLDDGDDKVFRRAPSWRKRFRPREHHGRGGMLSASAETLPAGFRVSTLGTLQPPPAPPKKIMPEAHSHYLYGHMLSAFRD

SEQ ID NO: 69373 - protein, 1185 aa, Homo sapiens
  Payload ID: 13765
  Gene Symbol: PPFIA4
  Gene Name: protein tyrosine phosphatase, receptor type, f polypeptide (PTPRF), interacting protein (liprin), alpha 4
  Uniprot ID: O75335
  ENSP ID: ENSP00000402576
MCEVMPTINEGDRLGPPHGADADANFEQLMVNMLDEREKLLESLRESQETLAATQSRLQDAIHERDQLQRHLNSALPQEFATLTRELSMCREQLLEREEEISELKAERNNTRLLLEHLECLVSRHERSLRMTVVKRQAQSPSGVSSEVEVLKALKSLFEHHKALDEKVRERLRAALERVTTLEEQLAGAHQQVSALQQGAGVRDGAAEEEGTVELGPKRLWKEDTGRVEELQELLEKQNFELSQARERLVTLTTTVTELEEDLGTARRDLIKSEELSSKHQRDLREALAQKEDMEERITTLEKRYLAAQREATSIHDLNDKLENELANKESLHRQCEEKARHLQELLEVAEQKLQQTMRKAETLPEVEAELAQRIAALTKAEERHGNIEEHLRQLEGQLEEKNQELARTAVQVRQREKMNEDHNKRLSDTVDRLLSESNERLQLHLKERMAALEEKNTLIQELESSQRQIEEQHHHKGRLSEEIEKLRQEVDQLKGRGGPFVDGVHSRSHMGSAADVRFSLGTTTHAPPGVHRRYSALREESAKLALPLTVTLRSPTWMRMSQGVCCNLEYHSSGTLCGSSGPLPVPEMIQEEKESTELRAEEIETRVTSGSMEALNLKQLRKRGSIPTSLTALSLASASPPLSGRSTPKLTSRSAAQDLDRMGVMTLPSDLRKHRRKLLSPVSREENREDKATIKCETSPPSSPRTLRLEKLGHPALSQEEGKSALEDQGSNPSSSNSSQDSLHKGAKRKGIKSSIGRLFGKKEKGRLIQLSRDGATGHVLLTDSEFSMQEPMVPAKLGTQAEKDRRLKKKHQLLEDARRKGMPFAQWDGPTVVSWLELWVGMPAWYVAACRANVKSGAIMSALSDTEIQREIGISNALHRLKLRLAIQEMVSLTSPSAPPTSRTSSGNVWVTHEEMETLETSTKTDSEEGSWAQTLAYGDMNHEWIGNEWLPSLGLPQYRSYFMECLVDARMLDHLTKKDLRVHLKMVDSFHRTSLQYGIMCLKRLNYDRKELEKRREESQHEIKDVLVWTNDQVVHWVQSIGLRDYAGNLHESGVHGALLALDENFDHNTLALILQIPTQNTQARQVMEREFNNLLALGTDRKLDDGDDKVFRRAPSWRKRFRPREHHGRGGMLSASAETLPAGFRVSTLGTLQPPPAPPKKIMPEAHSHYLYGHMLSAFRD

SEQ ID NO: 69374 - protein, 953 aa, Homo sapiens
  Payload ID: 13765
  Gene Symbol: PPFIA4
  Gene Name: protein tyrosine phosphatase, receptor type, f polypeptide (PTPRF), interacting protein (liprin), alpha 4
  ENSP ID: ENSP00000470427
  MOD_RES (1)..(1): Any amino acid
XVTELEEDLGTARRDLIKSEELSSKHQRDLREALAQKEDMEERITTLEKRYLAAQREATSIHDLNDKLENELANKESLHRQCEEKARHLQELLEVAEQKLQQTMRKAETLPEVEAELAQRIAALTKAEERHGNIEEHLRQLEGQLEEKNQELARVRQREKMNEDHNKRLSDTVDRLLSESNERLQLHLKERMAALEEKNTLIQELESSQRQIEEQHHHKGRLSEEIEKLRQEVDQLKGRGGPFVDGVHSRSHMGSAADVRFSLGTTTHAPPGVHRRYSALREESAKDWETSPLPGMLAPAAGPAFDSDPEISDVDEDEPGGLVGSADVVSPSGHSDAQTLAMMLQEQLDAINEEIRMIQEEKESTELRAEEIETRVTSGSMEALNLKQLRKRGSIPTSLTALSLASASPPLSGRSTPKLTSRSAAQDLDRMGVMTLPSDLRKHRRKLLSPVSREENREDKATIKCETSPPSSPRTLRLEKLGHPALSQEEGKSALEDQGSNPSSSNSSQDSLHKGAKRKGIKSSIGRLFGKKEKGRLIQLSRDGATGHVLLTDSEFSMQEPMVPAKLGTQAEKDRRLKKKHQLLEDARRKGMPFAQWDGPTVVSWLELWVGMPAWYVAACRANVKSGAIMSALSDTEIQREIGISNALHRLKLRLAIQEMVSLTSPSAPPTSRTSSGNVWVTHEEMETLETSTKTDSEEGSWAQTLAYGDMNHEWIGNEWLPSLGLPQYRSYFMECLVDARMLDHLTKKDLRVHLKMVDSFHRTSLQYGIMCLKRLNYDRKELEKRREESQHEIKDVLVWTNDQVVHWVQSIGLRDYAGNLHESGVHGALLALDENFDHNTLALILQIPTQNTQARQVMEREFNNLLALGTDRKLDDGDDKVFRRAPSWRKRFRPREHHGRGGMLSASAETLPAGFRVSTLGTLQPPPAPPKKIMPEAHSHYLYGHMLSAFRD

SEQ ID NO: 69375 - protein, 692 aa, Homo sapiens; identical to SEQ ID NO: 69371
  Payload ID: 13765
  Gene Symbol: PPFIA4
  Gene Name: protein tyrosine phosphatase, receptor type, f polypeptide (PTPRF), interacting protein (liprin), alpha 4
  Uniprot ID: O75335
  ENSP ID: ENSP00000471264

SEQ ID NO: 69376 - protein, 191 aa, Homo sapiens
  Payload ID: 13765
  Gene Symbol: PPFIA4
  Gene Name: protein tyrosine phosphatase, receptor type, f polypeptide (PTPRF), interacting protein (liprin), alpha 4
  ENSP ID: ENSP00000472251
  MOD_RES (1)..(1): Any amino acid
XAKDWETSPLPGMLAPAAGPAFDSDPEISDVDEDEPGGLVGSADVVSPSGHSDAQTLAMMLQEQLDAINEEIRMIQEEKESTELRAEEIETRVTSGSMEALNLKQLRKRGSIPTSLTALSLASASPPLSGRSTPKLTSRSAAQDLDRMGVMTLPSDLRKHRRKLLDAAAREAWPPSPEPGRRQECLGGSGQ

SEQ ID NO: 69377 - protein, 1416 aa, Homo sapiens
  Payload ID: 13766
  Gene Symbol: PTPRG
  Gene Name: protein tyrosine phosphatase, receptor type, G
  Uniprot ID: P23470
  ENSP ID: ENSP00000295874
MRRLLEPCWWILFLKITSSVLHYVVCFPALTEGYVGALHENRHGSAVQIRRRKASGDPYWAYSGAYGPEHWVTSSVSCGGRHQSPIDILDQYARVGEEYQELQLDGFDNESSNKTWMKNTGKTVAILLKDDYFVSGAGLPGRFKAEKVEFHWGHSNGSAGSEHSINGRRFPVEMQIFFYNPDDFDSFQTAISENRIIGAMAIFFQVSPRDNSALDPIIHGLKGVVHHEKETFLDPFVLRDLLPASLGSYYRYTGSLTTPPCSEIVEWIVFRRPVPISYHQLEAFYSIFTTEQQDHVKSVEYLRNNFRPQQRLHDRVVSKSAVRDSWNHDMTDFLENPLGTEASKVCSSPPIHMKVQPLNQTALQVSWSQPETIYHPPIMNYMISYSWTKNEDEKEKTFTKDSDKDLKATISHVSPDSLYLFRVQAVCRNDMRSDFSQTMLFQANTTRIFQGTRIVKTGVPTASPASSADMAPISSGSSTWTSSGIPFSFVSMATGMGPSSSGSQATVASVVTSTLLAGLGFGGGGISSFPSTVWPTRLPTAASASKQAARPVLATTEALASPGPDGDSSPTKDGEGTEEGEKDEKSESEDGEREHEEDGEKDSEKKEKSGVTHAAEERNQTEPSPTPSSPNRTAEGGHQTIPGHEQDHTAVPTDQTGGRRDAGPGLDPDMVTSTQVPPTATEEQYAGSDPKRPEMPSKKPMSRGDRFSEDSRFITVNPAEKNTSGMISRPAPGRMEWIIPLIVVSALTFVCLILLIAVLVYWRKCFQTAHFYVEDSSSPRVVPNESIPIIPIPDDMEAIPVKQFVKHIGELYSNNQHGFSEDFEEVQRCTADMNITAEHSNHPENKHKNRYINILAYDHSRVKLRPLPGKDSKHSDYINANYVDGYNKAKAYIATQGPLKSTFEDFWRMIWEQNTGIIVMITNLVEKGRRKCDQYWPTENSEEYGNIIVTLKSTKIHACYTVRRFSIRNTKVKKGQKGNPKGRQNERVVIQYHYTQWPDMGVPEYALPVLTFVRRSSAARMPETGPVLVHCSAGVGRTGTYIVIDSMLQQIKDKSTVNVLGFLKHIRTQRNYLVQTEEQYIFIHDALLEAILGKETEVSSNQLHSYVNSILIPGVGGKTRLEKQFKLVTQCNAKYVECFSAQKECNKEKNRNSSVVPSERARVGLAPLPGMKGTDYINASYIMGYYRSNEFIITQHPLPHTTKDFWRMIWDHNAQIIVMLPDNQSLAEDEFVYWPSREESMNCEAFTVTLISKDRLCLSNEEQIIIHDFILEATQDDYVLEVRHFQCPKWPNPDAPISSTFELINVIKEEALTRDGPTIVHDEYGAVSAGMLCALTTLSQQLENENAVDVFQVAKMINLMRPGVFTDIEQYQFIYKAMLSLVSTKENGNGPMTVDKNGAVLIADESDPAESMESLV

SEQ ID NO: 69378 - protein, 1445 aa, Homo sapiens
  Payload ID: 13766
  Gene Symbol: PTPRG
  Gene Name: protein tyrosine phosphatase, receptor type, G
  Uniprot ID: P23470
  ENSP ID: ENSP00000418112
MRRLLEPCWWILFLKITSSVLHYVVCFPALTEGYVGALHENRHGSAVQIRRRKASGDPYWAYSGAYGPEHWVTSSVSCGGRHQSPIDILDQYARVGEEYQELQLDGFDNESSNKTWMKNTGKTVAILLKDDYFVSGAGLPGRFKAEKVEFHWGHSNGSAGSEHSINGRRFPVEMQIFFYNPDDFDSFQTAISENRIIGAMAIFFQVSPRDNSALDPIIHGLKGVVHHEKETFLDPFVLRDLLPASLGSYYRYTGSLTTPPCSEIVEWIVFRRPVPISYHQLEAFYSIFTTEQQDHVKSVEYLRNNFRPQQRLHDRVVSKSAVRDSWNHDMTDFLENPLGTEASKVCSSPPIHMKVQPLNQTALQVSWSQPETIYHPPIMNYMISYSWTKNEDEKEKTFTKDSDKDLKATISHVSPDSLYLFRVQAVCRNDMRSDFSQTMLFQANTTRIFQGTRIVKTGVPTASPASSADMAPISSGSSTWTSSGIPFSFVSMATGMGPSSSGSQATVASVVTSTLLAGLGFGGGGISSFPSTVWPTRLPTAASASKQAARPVLATTEALASPGPDGDSSPTKDGEGTEEGEKDEKSESEDGEREHEEDGEKDSEKKEKSGVTHAAEERNQTEPSPTPSSPNRTAEGGHQTIPGHEQDHTAVPTDQTGGRRDAGPGLDPDMVTSTQVPPTATEEQYAGSDPKRPEMPSKKPMSRGDRFSEDSRFITVNPAEKNTSGMISRPAPGRMEWIIPLIVVSALTFVCLILLIAVLVYWRGCNKIKSKGFPRRFREVPSSGERGEKGSRKCFQTAHFYVEDSSSPRVVPNESIPIIPIPDDMEAIPVKQFVKHIGELYSNNQHGFSEDFEEVQRCTADMNITAEHSNHPENKHKNRYINILAYDHSRVKLRPLPGKDSKHSDYINANYVDGYNKAKAYIATQGPLKSTFEDFWRMIWEQNTGIIVMITNLVEKGRRKCDQYWPTENSEEYGNIIVTLKSTKIHACYTVRRFSIRNTKVKKGQKGNPKGRQNERVVIQYHYTQWPDMGVPEYALPVLTFVRRSSAARMPETGPVLVHCSAGVGRTGTYIVIDSMLQQIKDKSTVNVLGFLKHIRTQRNYLVQTEEQYIFIHDALLEAILGKETEVSSNQLHSYVNSILIPGVGGKTRLEKQFKLVTQCNAKYVECFSAQKECNKEKNRNSSVVPSERARVGLAPLPGMKGTDYINASYIMGYYRSNEFIITQHPLPHTTKDFWRMIWDHNAQIIVMLPDNQSLAEDEFVYWPSREESMNCEAFTVTLISKDRLCLSNEEQIIIHDFILEATQDDYVLEVRHFQCPKWPNPDAPISSTFELINVIKEEALTRDGPTIVHDEYGAVSAGMLCALTTLSQQLENENAVDVFQVAKMINLMRPGVFTDIEQYQFIYKAMLSLVSTKENGNGPMTVDKNGAVLIADESDPAESMESLV

SEQ ID NO: 69379 - protein, 1354 aa, Homo sapiens
  Payload ID: 13766
  Gene Symbol: PTPRG
  Gene Name: protein tyrosine phosphatase, receptor type, G
  ENSP ID: ENSP00000480407
TGAYGPEHWVTSSVSCGGRHQSPIDILDQYARVGEEYQELQLDGFDNESSNKTWMKNTGKTVAILLKDDYFVSGAGLPGRFKAEKVEFHWGHSNGSAGSEHSINGRRFPVEMQIFFYNPDDFDSFQTAISENRIIGAMAIFFQVSPRDNSALDPIIHGLKGVVHHEKETFLDPFVLRDLLPASLGSYYRYTGSLTTPPCSEIVEWIVFRRPVPISYHQLEAFYSIFTTEQQDHVKSVEYLRNNFRPQQRLHDRVVSKSAVRDSWNHDMTDFLENPLGTEASKVCSSPPIHMKVQPLNQTALQVSWSQPETIYHPPIMNYMISYSWTKNEDEKEKTFTKDSDKDLKATISHVSPDSLYLFRVQAVCRNDMRSDFSQTMLFQANTTRIFQGTRIVKTGVPTASPASSADMAPISSGSSTWTSSGIPFSFVSMATGMGPSSSGSQATVASVVTSTLLAGLGFGGGGISSFPSTVWPTRLPTAASASKQAARPVLATTEALASPGPDGDSSPTKDGEGTEEGEKDEKSESEDGEREHEEDGEKDSEKKEKSGVTHAAEERNQTEPSPTPSSPNRTAEGGHQTIPGHEQDHTAVPTDQTGGRRDAGPGLDPDMVTSTQVPPTATEEQYAGSDPKRPEMPSKKPMSRGDRFSEDSRFITVNPAEKNTSGMISRPAPGRMEWIIPLIVVSALTFVCLILLIAVLVYWRKCFQTAHFYVEDSSSPRVVPNESIPIIPIPDDMEAIPVKQFVKHIGELYSNNQHGFSEDFEEVQRCTADMNITAEHSNHPENKHKNRYINILAYDHSRVKLRPLPGKDSKHSDYINANYVDGYNKAKAYIATQGPLKSTFEDFWRMIWEQNTGIIVMITNLVEKGRRKCDQYWPTENSEEYGNIIVTLKSTKIHACYTVRRFSIRNTKVKKGQKGNPKGRQNERVVIQYHYTQWPDMGVPEYALPVLTFVRRSSAARMPETGPVLVHCSAGVGRTGTYIVIDSMLQQIKDKSTVNVLGFLKHIRTQRNYLVQTEEQYIFIHDALLEAILGKETEVSSNQLHSYVNSILIPGVGGKTRLEKQFKLVTQCNAKYVECFSAQKECNKEKNRNSSVVPSERARVGLAPLPGMKGTDYINASYIMGYYRSNEFIITQHPLPHTTKDFWRMIWDHNAQIIVMLPDNQSLAEDEFVYWPSREESMNCEAFTVTLISKDRLCLSNEEQIIIHDFILEATQDDYVLEVRHFQCPKWPNPDAPISSTFELINVIKEEALTRDGPTIVHDEYGAVSAGMLCALTTLSQQLENENAVDVFQVAKMINLMRPGVFTDIEQYQFIYKAMLSLVSTKENGNGPMTVDKNGAVLIADESDPAESMESLV

SEQ ID NO: 69380 - protein, 1383 aa, Homo sapiens
  Payload ID: 13766
  Gene Symbol: PTPRG
  Gene Name: protein tyrosine phosphatase, receptor type, G
  ENSP ID: ENSP00000484346
TGAYGPEHWVTSSVSCGGRHQSPIDILDQYARVGEEYQELQLDGFDNESSNKTWMKNTGKTVAILLKDDYFVSGAGLPGRFKAEKVEFHWGHSNGSAGSEHSINGRRFPVEMQIFFYNPDDFDSFQTAISENRIIGAMAIFFQVSPRDNSALDPIIHGLKGVVHHEKETFLDPFVLRDLLPASLGSYYRYTGSLTTPPCSEIVEWIVFRRPVPISYHQLEAFYSIFTTEQQDHVKSVEYLRNNFRPQQRLHDRVVSKSAVRDSWNHDMTDFLENPLGTEASKVCSSPPIHMKVQPLNQTALQVSWSQPETIYHPPIMNYMISYSWTKNEDEKEKTFTKDSDKDLKATISHVSPDSLYLFRVQAVCRNDMRSDFSQTMLFQANTTRIFQGTRIVKTGVPTASPASSADMAPISSGSSTWTSSGIPFSFVSMATGMGPSSSGSQATVASVVTSTLLAGLGFGGGGISSFPSTVWPTRLPTAASASKQAARPVLATTEALASPGPDGDSSPTKDGEGTEEGEKDEKSESEDGEREHEEDGEKDSEKKEKSGVTHAAEERNQTEPSPTPSSPNRTAEGGHQTIPGHEQDHTAVPTDQTGGRRDAGPGLDPDMVTSTQVPPTATEEQYAGSDPKRPEMPSKKPMSRGDRFSEDSRFITVNPAEKNTSGMISRPAPGRMEWIIPLIVVSALTFVCLILLIAVLVYWRGCNKIKSKGFPRRFREVPSSGERGEKGSRKCFQTAHFYVEDSSSPRVVPNESIPIIPIPDDMEAIPVKQFVKHIGELYSNNQHGFSEDFEEVQRCTADMNITAEHSNHPENKHKNRYINILAYDHSRVKLRPLPGKDSKHSDYINANYVDGYNKAKAYIATQGPLKSTFEDFWRMIWEQNTGIIVMITNLVEKGRRKCDQYWPTENSEEYGNIIVTLKSTKIHACYTVRRFSIRNTKVKKGQKGNPKGRQNERVVIQYHYTQWPDMGVPEYALPVLTFVRRSSAARMPETGPVLVHCSAGVGRTGTYIVIDSMLQQIKDKSTVNVLGFLKHIRTQRNYLVQTEEQYIFIHDALLEAILGKETEVSSNQLHSYVNSILIPGVGGKTRLEKQFKLVTQCNAKYVECFSAQKECNKEKNRNSSVVPSERARVGLAPLPGMKGTDYINASYIMGYYRSNEFIITQHPLPHTTKDFWRMIWDHNAQIIVMLPDNQSLAEDEFVYWPSREESMNCEAFTVTLISKDRLCLSNEEQIIIHDFILEATQDDYVLEVRHFQCPKWPNPDAPISSTFELINVIKEEALTRDGPTIVHDEYGAVSAGMLCALTTLSQQLENENAVDVFQVAKMINLMRPGVFTDIEQYQFIYKAMLSLVSTKENGNGPMTVDKNGAVLIADESDPAESMESLV

SEQ ID NO: 69381 - protein, 937 aa, Homo sapiens
  Payload ID: 13767
  Gene Symbol: PTPRH
  Gene Name: protein tyrosine phosphatase, receptor type, H
  Uniprot ID: Q9HD43
  ENSP ID: ENSP00000263434
MAGAGGGLGVWGNLVLLGLCSWTGARAPAPNPGRNLTVETQTTSSISLSWEVPDGLDSQNSNYWVQCTGDGGTTETRNTTATNVTVDGLGPGSLYTCSVWVEKDGVNSSVGTVTTATAPNPVRNLTVEAQTNSSIALTWEVPDGPDPQNSTYGVEYTGDGGRAGTRSTAHTNITVDRLEPGCLYVFSVWVGKNGINSSRETRNATTAPNPVRNLHMETQTNSSIALCWEVPDGPYPQDYTYWVEYTGDGGGTETRNTTNTSVTAERLEPGTLYTFSVWAEKNGARGSRQNVSISTVPNAVTSLSKQDWTNSTIALRWTAPQGPGQSSYSYWVSWVREGMTDPRTQSTSGTDITLKELEAGSLYHLTVWAERNEVRGYNSTLTAATAPNEVTDLQNETQTKNSVMLWWKAPGDPHSQLYVYWVQWASKGHPRRGQDPQANWVNQTSRTNETWYKVEALEPGTLYNFTVWAERNDVASSTQSLCASTYPDTVTITSCVSTSAGYGVNLIWSCPQGGYEAFELEVGGQRGSQDRSSCGEAVSVLGLGPARSYPATITTIWDGMKVVSHSVVCHTESAGVIAGAFVGILLFLILVGLLIFFLKRRNKKKQQKPELRDLVFSSPGDIPAEDFADHVRKNERDSNCGFADEYQQLSLVGHSQSQMVASASENNAKNRYRNVLPYDWSRVPLKPIHEEPGSDYINASFMPGLWSPQEFIATQGPLPQTVGDFWRLVWEQQSHTLVMLTNCMEAGRVKCEHYWPLDSQPCTHGHLRVTLVGEEVMENWTVRELLLLQVEEQKTLSVRQFHYQAWPDHGVPSSPDTLLAFWRMLRQWLDQTMEGGPPIVHCSAGVGRTGTLIALDVLLRQLQSEGLLGPFSFVRKMRESRPLMVQTEAQYVFLHQCILRFLQQSAQAPAEKEVPYEDVENLIYENVAAIQAHKLEV

SEQ ID NO: 69382 - protein, 1115 aa, Homo sapiens
  Payload ID: 13767
  Gene Symbol: PTPRH
  Gene Name: protein tyrosine phosphatase, receptor type, H
  Uniprot ID: Q9HD43
  ENSP ID: ENSP00000365528
MAGAGGGLGVWGNLVLLGLCSWTGARAPAPNPGRNLTVETQTTSSISLSWEVPDGLDSQNSNYWVQCTGDGGTTETRNTTATNVTVDGLGPGSLYTCSVWVEKDGVNSSVGTVTTATAPNPVRNLRVEAQTNSSIALTWEVPDGPDPQNSTYGVEYTGDGGRAGTRSTAHTNITVDGLEPGCLYAFSMWVGKNGINSSRETRNATTAHNPVRNLRVEAQTTSSISLSWEVPDGTDPQNSTYCVQCTGDGGRTETRNTTDTRVTVDGLGPGSLYTCSVWVEKDGVNSSVEIVTSATAPNPVRNLTVEAQTNSSIALTWEVPDGPDPQNSTYGVEYTGDGGRAGTRSTAHTNITVDRLEPGCLYVFSVWVGKNGINSSRETRNATTAPNPVRNLHMETQTNSSIALCWEVPDGPYPQDYTYWVEYTGDGGGTETRNTTNTSVTAERLEPGTLYTFSVWAEKNGARGSRQNVSISTVPNAVTSLSKQDWTNSTIALRWTAPQGPGQSSYSYWVSWVREGMTDPRTQSTSGTDITLKELEAGSLYHLTVWAERNEVRGYNSTLTAATAPNEVTDLQNETQTKNSVMLWWKAPGDPHSQLYVYWVQWASKGHPRRGQDPQANWVNQTSRTNETWYKVEALEPGTLYNFTVWAERNDVASSTQSLCASTYPDTVTITSCVSTSAGYGVNLIWSCPQGGYEAFELEVGGQRGSQDRSSCGEAVSVLGLGPARSYPATITTIWDGMKVVSHSVVCHTESAGVIAGAFVGILLFLILVGLLIFFLKRRNKKKQQKPELRDLVFSSPGDIPAEDFADHVRKNERDSNCGFADEYQQLSLVGHSQSQMVASASENNAKNRYRNVLPYDWSRVPLKPIHEEPGSDYINASFMPGLWSPQEFIATQGPLPQTVGDFWRLVWEQQSHTLVMLTNCMEAGRVKCEHYWPLDSQPCTHGHLRVTLVGEEVMENWTVRELLLLQVEEQKTLSVRQFHYQAWPDHGVPSSPDTLLAFWRMLRQWLDQTMEGGPPIVHCSAGVGRTGTLIALDVLLRQLQSEGLLGPFSFVRKMRESRPLMVQTEAQYVFLHQCILRFLQQSAQAPAEKEVPYEDVENLIYENVAAIQAHKLEV

SEQ ID NO: 69383 - protein, 1337 aa, Homo sapiens
  Payload ID: 13768
  Gene Symbol: PTPRJ
  Gene Name: protein tyrosine phosphatase, receptor type, J
  Uniprot ID: Q12913
  ENSP ID: ENSP00000400010
MKPAAREARLPPRSPGLRWALPLLLLLLRLGQILCAGGTPSPIPDPSVATVATGENGITQISSTAESFHKQNGTGTPQVETNTSEDGESSGANDSLRTPEQGSNGTDGASQKTPSSTGPSPVFDIKAVSISPTNVILTWKSNDTAASEYKYVVKHKMENEKTITVVHQPWCNITGLRPATSYVFSITPGIGNETWGDPRVIKVITEPIPVSDLRVALTGVRKAALSWSNGNGTASCRVLLESIGSHEELTQDSRLQVNISGLKPGVQYNINPYLLQSNKTKGDPLGTEGGLDASNTERSRAGSPTAPVHDESLVGPVDPSSGQQSRDTEVLLVGLEPGTRYNATVYSQAANGTEGQPQAIEFRTNAIQVFDVTAVNISATSLTLIWKVSDNESSSNYTYKIHVAGETDSSNLNVSEPRAVIPGLRSSTFYNITVCPVLGDIEGTPGFLQVHTPPVPVSDFRVTVVSTTEIGLAWSSHDAESFQMHITQEGAGNSRVEITTNQSIIIGGLFPGTKYCFEIVPKGPNGTEGASRTVCNRTVPSAVFDIHVVYVTTTEMWLDWKSPDGASEYVYHLVIESKHGSNHTSTYDKAITLQGLIPGTLYNITISPEVDHVWGDPNSTAQYTRPSNVSNIDVSTNTTAATLSWQNFDDASPTYSYCLLIEKAGNSSNATQVVTDIGITDATVTELIPGSSYTVEIFAQVGDGIKSLEPGRKSFCTDPASMASFDCEVVPKEPALVLKWTCPPGANAGFELEVSSGAWNNATHLESCSSENGTEYRTEVTYLNFSTSYNISITTVSCGKMAAPTRNTCTTGITDPPPPDGSPNITSVSHNSVKVKFSGFEASHGPIKAYAVILTTGEAGHPSADVLKYTYEDFKKGASDTYVTYLIRTEEKGRSQSLSEVLKYEIDVGNESTTLGYYNGKLEPLGSYRACVAGFTNITFHPQNKGLIDGAESYVSFSRYSDAVSLPQDPGVICGAVFGCIFGALVIVTVGGFIFWRKKRKDAKNNEVSFSQIKPKKSKLIRVENFEAYFKKQQADSNCGFAEEYEDLKLVGISQPKYAAELAENRGKNRYNNVLPYDISRVKLSVQTHSTDDYINANYMPGYHSKKDFIATQGPLPNTLKDFWRMVWEKNVYAIIMLTKCVEQGRTKCEEYWPSKQAQDYGDITVAMTSEIVLPEWTIRDFTVKNIQTSESHPLRQFHFTSWPDHGVPDTTDLLINFRYLVRDYMKQSPPESPILVHCSAGVGRTGTFIAIDRLIYQIENENTVDVYGIVYDLRMHRPLMVQTEDQYVFLNQCVLDIVRSQKDSKVDLIYQNTTAMTIYENLAPVTTFGKTNGYIA

SEQ ID NO: 69384 - protein, 539 aa, Homo sapiens
  Payload ID: 13768
  Gene Symbol: PTPRJ
  Gene Name: protein tyrosine phosphatase, receptor type, J
  Uniprot ID: Q12913
  ENSP ID: ENSP00000409733
MKPAAREARLPPRSPGLRWALPLLLLLLRLGQILCAGGTPSPIPDPSVATVATGENGITQISSTAESFHKQNGTGTPQVETNTSEDGESSGANDSLRTPEQGSNGTDGASQKTPSSTGPSPVFDIKAVSISPTNVILTWKSNDTAASEYKYVVKHKMENEKTITVVHQPWCNITGLRPATSYVFSITPGIGNETWGDPRVIKVITEPIPVSDLRVALTGVRKAALSWSNGNGTASCRVLLESIGSHEELTQDSRLQVNISGLKPGVQYNINPYLLQSNKTKGDPLGTEGGLDASNTERSRAGSPTAPVHDESLVGPVDPSSGQQSRDTEVLLVGLEPGTRYNATVYSQAANGTEGQPQAIEFRTNAIQVFDVTAVNISATSLTLIWKVSDNESSSNYTYKIHVAGETDSSNLNVSEPRAVIPGLRSSTFYNITVCPVLGDIEGTPGFLQVHTPPVPVSDFRVTVVSTTEIGLAWSSHDAESFQMHITQEGAGNSRVEITTNQSIIIGGLFPGTKYCFEIVPKGPNGTEGASRTVCNRTG

SEQ ID NO: 69385 - protein, 120 aa, Homo sapiens
  Payload ID: 13768
  Gene Symbol: PTPRJ
  Gene Name: protein tyrosine phosphatase, receptor type, J
  ENSP ID: ENSP00000432686
MKPAAREARLPPRSPGLRWALPLLLLLLRLGQILCAGGRPSPVFDIKAVSISPTNVILTWKSNDTAASEYKYVVKHKMENEKTITVVHQPWCNITGLRPATSYVFSITPGIGNETWGDPR

SEQ ID NO: 69386 - protein, 146 aa, Homo sapiens
  Payload ID: 13768
  Gene Symbol: PTPRJ
  Gene Name: protein tyrosine phosphatase, receptor type, J
  ENSP ID: ENSP00000435618
MKPAAREARLPPRSPGLRWALPLLLLLLRLGQILCAGGTPSPIPDPSVATVATGENGITQISSTAESFHKQNGTGTPQVETNTSEDGESSGANDSLRTPEQGSNGTDGASQKTPSSTEPIPVSDLRVALTGVRKAALSWSNGNGTA

SEQ ID NO: 69387 - protein, 1338 aa, Homo sapiens [sequence omitted]

SEQ ID NO: 69388 - protein, 1342 aa, Homo sapiens
  Payload ID: 13768
  Gene Symbol: PTPRJ
  Gene Name: protein tyrosine phosphatase, receptor type, J
  ENSP ID: ENSP00000479342
MKPAAREARLPPRSPGLRWALPLLLLLLRLGQILCAGGTPSPIPDPSVATVATGENGITQISSTAESFHKQNGTGTPQVETNTSEDGESSGANDSLRTPEQGSNGTDGASQKTPSSTGPSPVFDIKAVSISPTNVILTWKSNDTAASEYKYVVKHKMENEKTITVVHQPWCNITGLRPATSYVFSITPGIGNETWGDPRVIKVITEPIPVSDLRVALTGVRKAALSWSNGNGTASCRVLLESIGSHEELTQDSRLQVNISGLKPGVQYNINPYLLQSNKTKGDPLGTEGGLDASNTERSRAGSPTAPVHDESLVGPVDPSSGQQSRDTEVLLVGLEPGTRYNATVYSQAANGTEGQPQAIEFRTNAIQVFDVTAVNISATSLTLIWKVSDNESSSNYTYKIHVAGETDSSNLNVSEPRAVIPGLRSSTFYNITVCPVLGDIEGTPGFLQVHTPPVPVSDFRVTVVSTTEIGLAWSSHDAESFQMHITQEGAGNSRVEITTNQSIIIGGLFPGTKYCFEIVPKGPNGTEGASRTVCNRTVPSAVFDIHVVYVTTTEMWLDWKSPDGASEYVYHLVIESKHGSNHTSTYDKAITLQGLIPGTLYNITISPEVDHVWGDPNSTAQYTRPSNVSNIDVSTNTTAATLSWQNFDDASPTYSYCLLIEKAGNSSNATQVVTDIGITDATVTELIPGSSYTVEIFAQVGDGIKSLEPGRKSFCTDPASMASFDCEVVPKEPALVLKWTCPPGANAGFELEVSSGAWNNATHLESCSSENGTEYRTEVTYLNFSTSYNISITTVSCGKMAAPTRNTCTTGITDPPPPDGSPNITSVSHNSVKVKFSGFEASHGPIKAYAVILTTGEAGHPSADVLKYTYEDFKKGASDTYVTYLIRTEEKGRSQSLSEVLKYEIDVGNESTTLGYYNGKLEPLGSYRCLLRACVAGFTNITFHPQNKGLIDGAESYVSFSRYSDAVSLPQDPGVICGAVFGCIFGALVIVTVGGFIFWRKKRKDAKNNEVSFSQIKSLKRSKLIRVENFEAYFKKQQADSNCGFAEEYEDLKLVGISQPKYAAELAENRGKNRYNNVLPYDISRVKLSVQTHSTDDYINANYMPGYHSKKDFIATQGPLPNTLKDFWRMVWEKNVYAIIMLTKCVEQGRTKCEEYWPSKQAQDYGDITVAMTSEIVLPEWTIRDFTVKNIQTSESHPLRQFHFTSWPDHGVPDTTDLLINFRYLVRDYMKQSPPESPILVHCSAGVGRTGTFIAIDRLIYQIENENTVDVYGIVYDLRMHRPLMVQTEDQYVFLNQCVLDIVRSQKDSKVDLIYQNTTAMTIYENLAPVTTFGKTNGYIA

SEQ ID NO: 69389 - protein, 1472 aa, Homo sapiens
  Payload ID: 13769
  Gene Symbol: PTPRK
  Gene Name: protein tyrosine phosphatase, receptor type, K
  ENSP ID: ENSP00000357190
MDTTAAAALPAFVALLLLSPWPLLGSAQGQFSAGGCTFDDGPGACDYHQDLYDDFEWVHVSAQEPHYLPPEMPQGSYMIVDSSDHDPGEKARLQLPTMKENDTHCIDFSYLLYSQKGLNPGTLNILVRVNKGPLANPIWNVTGFTGRDWLRAELAVSTFWPNEYQVIFEAEVSGGRSGYIAIDDIQVLSYPCDKSPHFLRLGDVEVNAGQNATFQCIATGRDAVHNKLWLQRRNGEDIPVAQTKNINHRRFAASFRLQEVTKTDQDLYRCVTQSERGSGVSNFAQLIVREPPRPIAPPQLLGVGPTYLLIQLNANSIIGDGPIILKEVEYRMTSGSWTETHAVNAPTYKLWHLDPDTEYEIRVLLTRPGEGGTGLPGPPLITRTKCAEPMRTPKTLKIAEIQARRIAVDWESLGYNITRCHTFNVTICYHYFRGHNESKADCLDMDPKAPQHVVNHLPPYTNVSLKMILTNPEGRKESEETIIQTDEDVPGPVPVKSLQGTSFENKIFLNWKEPLDPNGIITQYEISYSSIRSFDPAVPVAGPPQTVSNLWNSTHHVFMHLHPGTTYQFFIRASTVKGFGPATAINVTTNISAPTLPDYEGVDASLNETATTITVLLRPAQAKGAPISAYQIVVEELHPHRTKREAGAMECYQVPVTYQNAMSGGAPYYFAAELPPGNLPEPAPFTVGDNRTYQGFWNPPLAPRKGYNIYFQAMSSVEKETKTQCVRIATKAAATEEPEVIPDPAKQTDRVVKIAGISAGILVFILLLLVVILIVKKRRSYYSYSYYLKLAKKRKDAMGNTRQEMTHMVNAMDRSYADQSTLHAEDPLSITFMDQHNFSPRLPNDPLVPTAVLVPITDENHSATAESSRLLDVPRYLCEGTESPYQTGQLHPAIRVADLLQHINLMKTSDSYGFKEEYESFFEGQSASWDVAKKDQNRAKNRYGNIIAYDHSRVILQPVEDDPSSDYINANYIDIWLYRDGYQRPSHYIATQGPVHETVYDFWRMIWQEQSACIVMVTNLVEVGRVKCYKYWPDDTEVYGDFKVTCVEMEPLAEYVVRTFTLERRGYNEIREVKQFHFTGWPDHGVPYHATGLLSFIRRVKLSNPPSAGPIVVHCSAGAGRTGCYIVIDIMLDMAEREGVVDIYNCVKALRSRRINMVQTEEQYIFIHDAILEACLCGETAIPVCEFKAAYFDMIRIDSQTNSSHLKDEFQTLNSVTPRLQAEDCSIACLPRNHDKNRFMDMLPPDRCLPFLITIDGESSNYINAALMDSYRQPAAFIVTQYPLPNTVKDFWRLVYDYGCTSIVMLNEVDLSQGCPQYWPEEGMLRYGPIQVECMSCSMDCDVINRIFRICNLTRPQEGYLMVQQFQYLGWASHREVPGSKRSFLKLILQVEKWQEECEEGEGRTIIHCLNGGGRSGMFCAIGIVVEMVKRQNVVDVFHAVKTLRNSKPNMVEAPEQYRFCYDVALEYLESS

SEQ ID NO: 69390 - protein, 1458 aa, Homo sapiens
  Payload ID: 13769
  Gene Symbol: PTPRK
  Gene Name: protein tyrosine phosphatase, receptor type, K
  ENSP ID: ENSP00000357193
MDTTAAAALPAFVALLLLSPWPLLGSAQGQFSAGGCTFDDGPGACDYHQDLYDDFEWVHVSAQEPHYLPPEMPQGSYMIVDSSDHDPGEKARLQLPTMKENDTHCIDFSYLLYSQKGLNPGTLNILVRVNKGPLANPIWNVTGFTGRDWLRAELAVSTFWPNEYQVIFEAEVSGGRSGYIAIDDIQVLSYPCDKSPHFLRLGDVEVNAGQNATFQCIATGRDAVHNKLWLQRRNGEDIPVAQTKNINHRRFAASFRLQEVTKTDQDLYRCVTQSERGSGVSNFAQLIVREPPRPIAPPQLLGVGPTYLLIQLNANSIIGDGPIILKEVEYRMTSGSWTETHAVNAPTYKLWHLDPDTEYEIRVLLTRPGEGGTGLPGPPLITRTKCAEPMRTPKTLKIAEIQARRIAVDWESLGYNITRCHTFNVTICYHYFRGHNESKADCLDMDPKAPQHVVNHLPPYTNVSLKMILTNPEGRKESEETIIQTDEDVPGPVPVKSLQGTSFENKIFLNWKEPLDPNGIITQYEISYSSIRSFDPAVPVAGPPQTVSNLWNSTHHVFMHLHPGTTYQFFIRASTVKGFGPATAINVTTNISAPTLPDYEGVDASLNETATTITVLLRPAQAKGAPISAYQIVVEELHPHRTKREAGAMECYQVPVTYQNAMSGGAPYYFAAELPPGNLPEPAPFTVGDNRTYQGFWNPPLAPRKGYNIYFQAMSSVEKETKTQCVRIATKAAATEEPEVIPDPAKQTDRVVKIAGISAGILVFILLLLVVILIVKKSKLAKKRKDAMGNTRQEMTHMVNAMDRSYADQSTLHAEDPLSITFMDQHNFSPRLPNDPLVPTAVLDENHSATAESSRLLDVPRYLCEGTESPYQTGQLHPAIRVADLLQHINLMKTSDSYGFKEEYESFFEGQSASWDVAKKDQNRAKNRYGNIIAYDHSRVILQPVEDDPSSDYINANYIDIWLYRDGYQRPSHYIATQGPVHETVYDFWRMIWQEQSACIVMVTNLVEVGRVKCYKYWPDDTEVYGDFKVTCVEMEPLAEYVVRTFTLERRGYNEIREVKQFHFTGWPDHGVPYHATGLLSFIRRVKLSNPPSAGPIVVHCSAGAGRTGCYIVIDIMLDMAEREGVVDIYNCVKALRSRRINMVQTEEQYIFIHDAILEACLCGETAIPVCEFKAAYFDMIRIDSQTNSSHLKDEFQTLNSVTPRLQAEDCSIACLPRNHDKNRFMDMLPPDRCLPFLITIDGESSNYINAALMDSYRQPAAFIVTQYPLPNTVKDFWRLVYDYGCTSIVMLNEVDLSQGCPQYWPEEGMLRYGPIQVECMSCSMDCDVINRIFRICNLTRPQEGYLMVQQFQYLGWASHREVPGSKRSFLKLILQVEKWQEECEEGEGRTIIHCLNGGGRSGMFCAIGIVVEMVKRQNVVDVFHAVKTLRNSKPNMVEAPEQYRFCYDVALEYLESS

SEQ ID NO: 69391 - protein, 1446 aa, Homo sapiens
  Payload ID: 13769
  Gene Symbol: PTPRK
  Gene Name: protein tyrosine phosphatase, receptor type, K
  Uniprot ID: Q15262
  ENSP ID: ENSP00000357196
MDTTAAAALPAFVALLLLSPWPLLGSAQGQFSAGGCTFDDGPGACDYHQDLYDDFEWVHVSAQEPHYLPPEMPQGSYMIVDSSDHDPGEKARLQLPTMKENDTHCIDFSYLLYSQKGLNPGTLNILVRVNKGPLANPIWNVTGFTGRDWLRAELAVSTFWPNEYQVIFEAEVSGGRSGYIAIDDIQVLSYPCDKSPHFLRLGDVEVNAGQNATFQCIATGRDAVHNKLWLQRRNGEDIPVAQTKNINHRRFAASFRLQEVTKTDQDLYRCVTQSERGSGVSNFAQLIVREPPRPIAPPQLLGVGPTYLLIQLNANSIIGDGPIILKEVEYRMTSGSWTETHAVNAPTYKLWHLDPDTEYEIRVLLTRPGEGGTGLPGPPLITRTKCAEPMRTPKTLKIAEIQARRIAVDWESLGYNITRCHTFNVTICYHYFRGHNESKADCLDMDPKAPQHVVNHLPPYTNVSLKMILTNPEGRKESEETIIQTDEDVPGPVPVKSLQGTSFENKIFLNWKEPLDPNGIITQYEISYSSIRSFDPAVPVAGPPQTVSNLWNSTHHVFMHLHPGTTYQFFIRASTVKGFGPATAINVTTNISAPTLPDYEGVDASLNETATTITVLLRPAQAKGAPISAYQIVVEELHPHRTKREAGAMECYQVPVTYQNAMSGGAPYYFAAELPPGNLPEPAPFTVGDNRTYQGFWNPPLAPRKGYNIYFQAMSSVEKETKTQCVRIATKAAATEEPEVIPDPAKQTDRVVKIAGISAGILVFILLLLVVILIVKKSKLAKKRKDAMGNTRQEMTHMVNAMDRSYADQSTLHAEDPLSITFMDQHNFSPRYENHSATAESSRLLDVPRYLCEGTESPYQTGQLHPAIRVADLLQHINLMKTSDSYGFKEEYESFFEGQSASWDVAKKDQNRAKNRYGNIIAYDHSRVILQPVEDDPSSDYINANYIDIWLYRDGYQRPSHYIATQGPVHETVYDFWRMIWQEQSACIVMVTNLVEVGRVKCYKYWPDDTEVYGDFKVTCVEMEPLAEYVVRTFTLERRGYNEIREVKQFHFTGWPDHGVPYHATGLLSFIRRVKLSNPPSAGPIVVHCSAGAGRTGCYIVIDIMLDMAEREGVVDIYNCVKALRSRRINMVQTEEQYIFIHDAILEACLCGETAIPVCEFKAAYFDMIRIDSQTNSSHLKDEFQTLNSVTPRLQAEDCSIACLPRNHDKNRFMDMLPPDRCLPFLITIDGESSNYINAALMDSYRQPAAFIVTQYPLPNTVKDFWRLVYDYGCTSIVMLNEVDLSQGCPQYWPEEGMLRYGPIQVECMSCSMDCDVINRIFRICNLTRPQEGYLMVQQFQYLGWASHREVPGSKRSFLKLILQVEKWQEECEEGEGRTIIHCLNGGGRSGMFCAIGIVVEMVKRQNVVDVFHAVKTLRNSKPNMVEAPEQYRFCYDVALEYLESS

SEQ ID NO: 69392 - protein, 1439 aa, Homo sapiens
  Payload ID: 13769
  Gene Symbol: PTPRK
  Gene Name: protein tyrosine phosphatase, receptor type, K
  Uniprot ID: Q15262
  ENSP ID: ENSP00000357198
MDTTAAAALPAFVALLLLSPWPLLGSAQGQFSAGGCTFDDGPGACDYHQDLYDDFEWVHVSAQEPHYLPPEMPQGSYMIVDSSDHDPGEKARLQLPTMKENDTHCIDFSYLLYSQKGLNPGTLNILVRVNKGPLANPIWNVTGFTGRDWLRAELAVSTFWPNEYQVIFEAEVSGGRSGYIAIDDIQVLSYPCDKSPHFLRLGDVEVNAGQNATFQCIATGRDAVHNKLWLQRRNGEDIPVAQTKNINHRRFAASFRLQEVTKTDQDLYRCVTQSERGSGVSNFAQLIVREPPRPIAPPQLLGVGPTYLLIQLNANSIIGDGPIILKEVEYRMTSGSWTETHAVNAPTYKLWHLDPDTEYEIRVLLTRPGEGGTGLPGPPLITRTKCAEPMRTPKTLKIAEIQARRIAVDWESLGYNITRCHTFNVTICYHYFRGHNESKADCLDMDPKAPQHVVNHLPPYTNVSLKMILTNPEGRKESEETIIQTDEDVPGPVPVKSLQGTSFENKIFLNWKEPLDPNGIITQYEISYSSIRSFDPAVPVAGPPQTVSNLWNSTHHVFMHLHPGTTYQFFIRASTVKGFGPATAINVTTNISAPTLPDYEGVDASLNETATTITVLLRPAQAKGAPISAYQIVVEELHPHRTKREAGAMECYQVPVTYQNAMSGGAPYYFAAELPPGNLPEPAPFTVGDNRTYQGFWNPPLAPRKGYNIYFQAMSSVEKETKTQCVRIATKAATEEPEVIPDPAKQTDRVVKIAGISAGILVFILLLLVVILIVKKSKLAKKRKDAMGNTRQEMTHMVNAMDRSYADQSTLHAEDPLSITFMDQHNFSPRYENHSATAESSRLLDVPRYLCEGTESPYQTGQLHPAIRVADLLQHINLMKTSDSYGFKEEYESFFEGQSASWDVAKKDQNRAKNRYGNIIAYDHSRVILQPVEDDPSSDYINANYIDGYQRPSHYIATQGPVHETVYDFWRMIWQEQSACIVMVTNLVEVGRVKCYKYWPDDTEVYGDFKVTCVEMEPLAEYVVRTFTLERRGYNEIREVKQFHFTGWPDHGVPYHATGLLSFIRRVKLSNPPSAGPIVVHCSAGAGRTGCYIVIDIMLDMAEREGVVDIYNCVKALRSRRINMVQTEEQYIFIHDAILEACLCGETAIPVCEFKAAYFDMIRIDSQTNSSHLKDEFQTLNSVTPRLQAEDCSIACLPRNHDKNRFMDMLPPDRCLPFLITIDGESSNYINAALMDSYRQPAAFIVTQYPLPNTVKDFWRLVYDYGCTSIVMLNEVDLSQGCPQYWPEEGMLRYGPIQVECMSCSMDCDVINRIFRICNLTRPQEGYLMVQQFQYLGWASHREVPGSKRSFLKLILQVEKWQEECEEGEGRTIIHCLNGGGRSGMFCAIGIVVEMVKRQNVVDVFHAVKTLRNSKPNMVEAPEQYRFCYDVALEYLESS

SEQ ID NO: 69393 - protein, 1440 aa, Homo sapiens
  Payload ID: 13769
  Gene Symbol: PTPRK
  Gene Name: protein tyrosine phosphatase, receptor type, K
  Uniprot ID: Q15262
  ENSP ID: ENSP00000357209
MDTTAAAALPAFVALLLLSPWPLLGSAQGQFSAGGCTFDDGPGACDYHQDLYDDFEWVHVSAQEPHYLPPEMPQGSYMIVDSSDHDPGEKARLQLPTMKENDTHCIDFSYLLYSQKGLNPGTLNILVRVNKGPLANPIWNVTGFTGRDWLRAELAVSTFWPNEYQVIFEAEVSGGRSGYIAIDDIQVLSYPCDKSPHFLRLGDVEVNAGQNATFQCIATGRDAVHNKLWLQRRNGEDIPVAQTKNINHRRFAASFRLQEVTKTDQDLYRCVTQSERGSGVSNFAQLIVREPPRPIAPPQLLGVGPTYLLIQLNANSIIGDGPIILKEVEYRMTSGSWTETHAVNAPTYKLWHLDPDTEYEIRVLLTRPGEGGTGLPGPPLITRTKCAEPMRTPKTLKIAEIQARRIAVDWESLGYNITRCHTFNVTICYHYFRGHNESKADCLDMDPKAPQHVVNHLPPYTNVSLKMILTNPEGRKESEETIIQTDEDVPGPVPVKSLQGTSFENKIFLNWKEPLDPNGIITQYEISYSSIRSFDPAVPVAGPPQTVSNLWNSTHHVFMHLHPGTTYQFFIRASTVKGFGPATAINVTTNISAPTLPDYEGVDASLNETATTITVLLRPAQAKGAPISAYQIVVEELHPHRTKREAGAMECYQVPVTYQNAMSGGAPYYFAAELPPGNLPEPAPFTVGDNRTYQGFWNPPLAPRKGYNIYFQAMSSVEKETKTQCVRIATKAAATEEPEVIPDPAKQTDRVVKIAGISAGILVFILLLLVVILIVKKSKLAKKRKDAMGNTRQEMTHMVNAMDRSYADQSTLHAEDPLSITFMDQHNFSPRYENHSATAESSRLLDVPRYLCEGTESPYQTGQLHPAIRVADLLQHINLMKTSDSYGFKEEYESFFEGQSASWDVAKKDQNRAKNRYGNIIAYDHSRVILQPVEDDPSSDYINANYIDGYQRPSHYIATQGPVHETVYDFWRMIWQEQSACIVMVTNLVEVGRVKCYKYWPDDTEVYGDFKVTCVEMEPLAEYVVRTFTLERRGYNEIREVKQFHFTGWPDHGVPYHATGLLSFIRRVKLSNPPSAGPIVVHCSAGAGRTGCYIVIDIMLDMAEREGVVDIYNCVKALRSRRINMVQTEEQYIFIHDAILEACLCGETAIPVCEFKAAYFDMIRIDSQTNSSHLKDEFQTLNSVTPRLQAEDCSIACLPRNHDKNRFMDMLPPDRCLPFLITIDGESSNYINAALMDSYRQPAAFIVTQYPLPNTVKDFWRLVYDYGCTSIVMLNEVDLSQGCPQYWPEEGMLRYGPIQVECMSCSMDCDVINRIFRICNLTRPQEGYLMVQQFQYLGWASHREVPGSKRSFLKLILQVEKWQEECEEGEGRTIIHCLNGGGRSGMFCAIGIVVEMVKRQNVVDVFHAVKTLRNSKPNMVEAPEQYRFCYDVALEYLESS

SEQ ID NO: 69394 - protein, 77 aa, Homo sapiens
  Payload ID: 13769
  Gene Symbol: PTPRK
  Gene Name: protein tyrosine phosphatase, receptor type, K
  ENSP ID: ENSP00000376243
MDTTAAAALPAFVALLLLSPWPLLGSAQGQFSAVSVLVVGNFCCCCSAAVCHSIRHLSRTQNPGQDHEGRLKRWLYF

SEQ ID NO: 69395 - protein, 343 aa, Homo sapiens
  Payload ID: 13769
  Gene Symbol: PTPRK
  Gene Name: protein tyrosine phosphatase, receptor type, K
  ENSP ID: ENSP00000406825
  MOD_RES (1)..(1): Any amino acid
XKAAATEEPEVIPDPAKQTDRVVKIAGISAGILVFILLLLVVILIVKKRRSYYSYSYYLKLAKKRKDAMGNTRQEMTHMVNAMDRSYADQSTLHAEDPLSITFMDQHNFSPRLPNDPLVPTAVLDENHSATAESSRLLDVPRYLCEGTESPYQTGQLHPAIRVADLLQHINLMKTSDSYGFKEEYESFFEGQSASWDVAKKDQNRAKNRYGNIIAYDHSRVILQPVEDDPSSDYINANYIDGYQRPSHYIATQGPVHETVYDFWRMIWQEQSACIVMVTNLVEVGRVKCYKYWPDDTEVYGDFKVTCVEMEPLAEYVVRTFTLERRGYNEIREVKQFHFTGWP

SEQ ID NO: 69396 - protein, 260 aa, Homo sapiens
  Payload ID: 13769
  Gene Symbol: PTPRK
  Gene Name: protein tyrosine phosphatase, receptor type, K
  ENSP ID: ENSP00000408180
WRRHICIRNIRRSYYSYSYYLKLAKKRKDAMGNTRQEMTHMVNAMDRSYADQSTLHAEDPLSITFMDQHNFSPRLPNDPLVPTAVLVPITDENHSATAESSRLLDVPRYLCEGTESPYQTGQLHPAIRVADLLQHINLMKTSDSYGFKEEYESFFEGQSASWDVAKKDQNRAKNRYGNIIAYDHSRVILQPVEDDPSSDYINANYIDGYQRPSHYIATQGPVHETVYDFWRMIWQEQSACIVMVTNLVEVGRVKCYKYWP

SEQ ID NO: 69397 - protein, 20 aa, Homo sapiens
  Payload ID: 13769
  Gene Symbol: PTPRK
  Gene Name: protein tyrosine phosphatase, receptor type, K
  ENSP ID: ENSP00000432960
VHVSAQEPHYLPPEMPQGNI

SEQ ID NO: 69398 - protein, 1462 aa, Homo sapiens
  Payload ID: 13769
  Gene Symbol: PTPRK
  Gene Name: protein tyrosine phosphatase, receptor type, K
  Uniprot ID: Q15262
  ENSP ID: ENSP00000432973
MDTTAAAALPAFVALLLLSPWPLLGSAQGQFSAGGCTFDDGPGACDYHQDLYDDFEWVHVSAQEPHYLPPEMPQGSYMIVDSSDHDPGEKARLQLPTMKENDTHCIDFSYLLYSQKGLNPGTLNILVRVNKGPLANPIWNVTGFTGRDWLRAELAVSTFWPNEYQVIFEAEVSGGRSGYIAIDDIQVLSYPCDKSPHFLRLGDVEVNAGQNATFQCIATGRDAVHNKLWLQRRNGEDIPVAQTKNINHRRFAASFRLQEVTKTDQDLYRCVTQSERGSGVSNFAQLIVREPPRPIAPPQLLGVGPTYLLIQLNANSIIGDGPIILKEVEYRMTSGSWTETHAVNAPTYKLWHLDPDTEYEIRVLLTRPGEGGTGLPGPPLITRTKCAEPMRTPKTLKIAEIQARRIAVDWESLGYNITRCHTFNVTICYHYFRGHNESKADCLDMDPKAPQHVVNHLPPYTNVSLKMILTNPEGRKESEETIIQTDEDVPGPVPVKSLQGTSFENKIFLNWKEPLDPNGIITQYEISYSSIRSFDPAVPVAGPPQTVSNLWNSTHHVFMHLHPGTTYQFFIRASTVKGFGPATAINVTTNISAPTLPDYEGVDASLNETATTITVLLRPAQAKGAPISAYQIVVEELHPHRTKREAGAMECYQVPVTYQNAMSGGAPYYFAAELPPGNLPEPAPFTVGDNRTYQGFWNPPLAPRKGYNIYFQAMSSVEKETKTQCVRIATKAAATEEPEVIPDPAKQTDRVVKIAGISAGILVFILLLLVVILIVKKSKLAKKRKDAMGNTRQEMTHMVNAMDRSYADQSTLHAEDPLSITFMDQHNFSPRLPNDPLVPTAVLVPITDENHSATAESSRLLDVPRYLCEGTESPYQTGQLHPAIRVADLLQHINLMKTSDSYGFKEEYESFFEGQSASWDVAKKDQNRAKNRYGNIIAYDHSRVILQPVEDDPSSDYINANYIDIWLYRDGYQRPSHYIATQGPVHETVYDFWRMIWQEQSACIVMVTNLVEVGRVKCYKYWPDDTEVYGDFKVTCVEMEPLAEYVVRTFTLERRGYNEIREVKQFHFTGWPDHGVPYHATGLLSFIRRVKLSNPPSAGPIVVHCSAGAGRTGCYIVIDIMLDMAEREGVVDIYNCVKALRSRRINMVQTEEQYIFIHDAILEACLCGETAIPVCEFKAAYFDMIRIDSQTNSSHLKDEFQTLNSVTPRLQAEDCSIACLPRNHDKNRFMDMLPPDRCLPFLITIDGESSNYINAALMDSYRQPAAFIVTQYPLPNTVKDFWRLVYDYGCTSIVMLNEVDLSQGCPQYWPEEGMLRYGPIQVECMSCSMDCDVINRIFRICNLTRPQEGYLMVQQFQYLGWASHREVPGSKRSFLKLILQVEKWQEECEEGEGRTIIHCLNGGGRSGMFCAIGIVVEMVKRQNVVDVFHAVKTLRNSKPNMVEAPEQYRFCYDVALEYLESS

SEQ ID NO: 69399 - protein, 204 aa, Homo sapiens
  Payload ID: 13769
  Gene Symbol: PTPRK
  Gene Name: protein tyrosine phosphatase, receptor type, K
  ENSP ID: ENSP00000434058
  MOD_RES (1)..(1): Any amino acid
XNPGTLNILVRVNKGPLANPIWNVTGFTGRDWLRAELAVSTFWPNEYQRRNGEDIPVAQTKNINHRRFAASFRLQEVTKTDQDLYRCVTQSERGSGVSNFAQLIVREPPRPIAPPQLLGVGPTYLLIQLNANSIIGDGPIILKEVEYRMTSGSWTETHAVNAPTYKLWHLDPDTEYEIRVLLTRPGEGGTGLPGPPLITRTKCA

SEQ ID NO: 69400 - protein, 248 aa, Homo sapiens
  Payload ID: 13769
  Gene Symbol: PTPRK
  Gene Name: protein tyrosine phosphatase, receptor type, K
  ENSP ID: ENSP00000434116
MDTTAAAALPAFVALLLLSPWPLLGSAQGQFSAGGCTFDDGPGACDYHQDLYDDFEWVHVSAQEPHYLPPEMPQGSYMIVDSSDHDPGEKARLQLPTMKENDTHCIDFSYLLYSQKGLNPGTLNILVRVNKGPLANPIWNVTGFTGRDWLRAELAVSTFWPNEYQVIICTFLVYVLMSSVLTICVIHRCKYASHGNERLPSCLPHPHYWGSVIHRYTYASHGNERLPLFLPHPVDEEVFGDIGTKPSN

SEQ ID NO: 69401 - protein, 39 aa, Homo sapiens
  Payload ID: 13769
  Gene Symbol: PTPRK
  Gene Name: protein tyrosine phosphatase, receptor type, K
  ENSP ID: ENSP00000437299
MDTTAAAALPAFVALLLLSPWPLLGSAQGQFSAEKACSY

SEQ ID NO: 69402 - protein, 1462 aa, Homo sapiens; identical to SEQ ID NO: 69398
  Payload ID: 13769
  Gene Symbol: PTPRK
  Gene Name: protein tyrosine phosphatase, receptor type, K
  Uniprot ID: Q15262
  ENSP ID: ENSP00000477791

SEQ ID NO: 69403 - protein, 77 aa, Homo sapiens; identical to SEQ ID NO: 69394
  Payload ID: 13769
  Gene Symbol: PTPRK
  Gene Name: protein tyrosine phosphatase, receptor type, K
  ENSP ID: ENSP00000482183

SEQ ID NO: 69404 - protein, 1440 aa, Homo sapiens; identical to SEQ ID NO: 69393
  Payload ID: 13769
  Gene Symbol: PTPRK
  Gene Name: protein tyrosine phosphatase, receptor type, K
  Uniprot ID: Q15262
  ENSP ID: ENSP00000483766

SEQ ID NO: 69405 - protein, 1446 aa, Homo sapiens; identical to SEQ ID NO: 69391
  Payload ID: 13769
  Gene Symbol: PTPRK
  Gene Name: protein tyrosine phosphatase, receptor type, K
  Uniprot ID: Q15262
  ENSP ID: ENSP00000484742

SEQ ID NO: 69406 - protein, 314 aa, Homo sapiens
  Payload ID: 13769
  Gene Symbol: PTPRK
  Gene Name: protein tyrosine phosphatase, receptor type, K
  ENSP ID: ENSP00000485812
  MOD_RES (1)..(1): Any amino acid
XAATEEPEVIPDPAKQTDRVVKIAGISAGILVFILLLLVVILIVKKRRSYYSYSYYLKLAKKRKDAMGNTRQEMTHMVNAMDRSYADQSTLHAEDPLSITFMDQHNFSPRLPNDPLVPTAVLDENHSATAESSRLLDVPRYLCEGTESPYQTGQLHPAIRVADLLQHINLMKTSDSYGFKEEYESFFEGQSASWDVAKKDQNRAKNRYGNIIAYDHSRVILQPVEDDPSSDYINANYIDGYQRPSHYIATQGPVHETVYDFWRMIWQEQSACIVMVTNLVEVGRVKCYKYWPDDTEVYGDFKVTCVEMEPLAEY

SEQ ID NO: 69407 - protein, 39 aa, Homo sapiens; identical to SEQ ID NO: 69401
  Payload ID: 13769
  Gene Symbol: PTPRK
  Gene Name: protein tyrosine phosphatase, receptor type, K
  ENSP ID: ENSP00000485893

SEQ ID NO: 69408 - protein, 20 aa, Homo sapiens
  Payload ID: 13769
  Gene Symbol: PTPRK
  Gene Name: protein tyrosine phosphatase, receptor type, K
  ENSP ID: ENSP00000486036
VHVSAQEPHYLPPEMPQGNI

SEQ ID NO: 69409 - protein, 1439 aa, Homo sapiens; identical to SEQ ID NO: 69392
  Payload ID: 13769
  Gene Symbol: PTPRK
  Gene Name: protein tyrosine phosphatase, receptor type, K
  Uniprot ID: Q15262
  ENSP ID: ENSP00000486442

SEQ ID NO: 69410 - protein, 248 aa, Homo sapiens; identical to SEQ ID NO: 69400
  Payload ID: 13769
  Gene Symbol: PTPRK
  Gene Name: protein tyrosine phosphatase, receptor type, K
  ENSP ID: ENSP00000486448

SEQ ID NO: 69411 - protein, 1472 aa, Homo sapiens; identical to SEQ ID NO: 69389
  Payload ID: 13769
  Gene Symbol: PTPRK
  Gene Name: protein tyrosine phosphatase, receptor type, K
  ENSP ID: ENSP00000487005

SEQ ID NO: 69412 - protein, 1458 aa, Homo sapiens; identical to SEQ ID NO: 69390
  Payload ID: 13769
  Gene Symbol: PTPRK
  Gene Name: protein tyrosine phosphatase, receptor type, K
  ENSP ID: ENSP00000487066

SEQ ID NO: 69413 - protein, 204 aa, Homo sapiens; identical to SEQ ID NO: 69399
  Payload ID: 13769
  Gene Symbol: PTPRK
  Gene Name: protein tyrosine phosphatase, receptor type, K
  ENSP ID: ENSP00000487445
  MOD_RES (1)..(1): Any amino acid

SEQ ID NO: 69414 - protein, 260 aa, Homo sapiens; identical to SEQ ID NO: 69396
  Payload ID: 13769
  Gene Symbol: PTPRK
  Gene Name: protein tyrosine phosphatase, receptor type, K
  ENSP ID: ENSP00000487578

SEQ ID NO: 69415 - protein, 1452 aa, Homo sapiens
  Payload ID: 13770
  Gene Symbol: PTPRM
  Gene Name: protein tyrosine phosphatase, receptor type, M
  Uniprot ID: P28827
  ENSP ID: ENSP00000331418
MRGLGTCLATLAGLLLTAAGETFSGGCLFDEPYSTCGYSQSEGDDFNWEQVNTLTKPTSDPWMPSGSFMLVNASGRPEGQRAHLLLPQLKENDTHCIDFHYFVSSKSNSPPGLLNVYVKVNNGPLGNPIWNISGDPTRTWNRAELAISTFWPNFYQVIFEVITSGHQGYLAIDEVKVLGHPCTRTPHFLRIQNVEVNAGQFATFQCSAIGRTVAGDRLWLQGIDVRDAPLKEIKVTSSRRFIASFNVVNTTKRDAGKYRCMIRTEGGVGISNYAELVVKEPPVPIAPPQLASVGATYLWIQLNANSINGDGPIVAREVEYCTASGSWNDRQPVDSTSYKIGHLDPDTEYEISVLLTRPGEGGTGSPGPALRTRTKCADPMRGPRKLEVVEVKSRQITIRWEPFGYNVTRCHSYNLTVHYCYQVGGQEQVREEVSWDTENSHPQHTITNLSPYTNVSVKLILMNPEGRKESQELIVQTDEDLPGAVPTESIQGSTFEEKIFLQWREPTQTYGVITLYEITYKAVSSFDPEIDLSNQSGRVSKLGNETHFLFFGLYPGTTYSFTIRASTAKGFGPPATNQFTTKISAPSMPAYELETPLNQTDNTVTVMLKPAHSRGAPVSVYQIVVEEERPRRTKKTTEILKCYPVPIHFQNASLLNSQYYFAAEFPADSLQAAQPFTIGDNKTYNGYWNTPLLPYKSYRIYFQAASRANGETKIDCVQVATKGAATPKPVPEPEKQTDHTVKIAGVIAGILLFVIIFLGVVLVMKKRKLAKKRKETMSSTRQEMTVMVNSMDKSYAEQGTNCDEAFSFMDTHNLNGRSVSSPSSFTMKTNTLSTSVPNSYYPDETHTMASDTSSLVQSHTYKKREPADVPYQTGQLHPAIRVADLLQHITQMKCAEGYGFKEEYESFFEGQSAPWDSAKKDENRMKNRYGNIIAYDHSRVRLQTIEGDTNSDYINGNYIDGYHRPNHYIATQGPMQETIYDFWRMVWHENTASIIMVTNLVEVGRVKCCKYWPDDTEIYKDIKVTLIETELLAEYVIRTFAVEKRGVHEIREIRQFHFTGWPDHGVPYHATGLLGFVRQVKSKSPPSAGPLVVHCSAGAGRTGCFIVIDIMLDMAEREGVVDIYNCVRELRSRRVNMVQTEEQYVFIHDAILEACLCGDTSVPASQVRSLYYDMNKLDPQTNSSQIKEEFRTLNMVTPTLRVEDCSIALLPRNHEKNRCMDILPPDRCLPFLITIDGESSNYINAALMDSYKQPSAFIVTQHPLPNTVKDFWRLVLDYHCTSVVMLNDVDPAQLCPQYWPENGVHRHGPIQVEFVSADLEEDIISRIFRIYNAARPQDGYRMVQQFQFLGWPMYRDTPVSKRSFLKLIRQVDKWQEEYNGGEGRTVVHCLNGGGRSGTFCAISIVCEMLRHQRTVDVFHAVKTLRNNKPNMVDLLDQYKFCYEVALEYLNSG

SEQ ID NO: 69416 - protein, 1390 aa, Homo sapiens
  Payload ID: 13770
  Gene Symbol: PTPRM
  Gene Name: protein tyrosine phosphatase, receptor type, M
  ENSP ID: ENSP00000382927
MPSGSFMLVNASGRPEGQRAHLLLPQLKENDTHCIDFHYFVSSKSNSPPGLLNVYVKVNNGPLGNPIWNISGDPTRTWNRAELAISTFWPNFYQVIFEVITSGHQGYLAIDEVKVLGHPCTRTPHFLRIQNVEVNAGQFATFQCSAIGRTVAGDRLWLQGIDVRDAPLKEIKVTSSRRFIASFNVVNTTKRDAGKYRCMIRTEGGVGISNYAELVVKEPPVPIAPPQLASVGATYLWIQLNANSINGDGPIVAREVEYCTASGSWNDRQPVDSTSYKIGHLDPDTEYEISVLLTRPGEGGTGSPGPALRTRTKCADPMRGPRKLEVVEVKSRQITIRWEPFGYNVTRCHSYNLTVHYCYQVGGQEQVREEVSWDTENSHPQHTITNLSPYTNVSVKLILMNPEGRKESQELIVQTDEDLPGAVPTESIQGSTFEEKIFLQWREPTQTYGVITLYEITYKAVSSFDPEIDLSNQSGRVSKLGNETHFLFFGLYPGTTYSFTIRASTAKGFGPPATNQFTTKISAPSMPAYELETPLNQTDNTVTVMLKPAHSRGAPVSVYQIVVEEERPRRTKKTTEILKCYPVPIHFQNASLLNSQYYFAAEFPADSLQAAQPFTIGDNKTYNGYWNTPLLPYKSYRIYFQAASRANGETKIDCVQVATKGAATPKPVPEPEKQTDHTVKIAGVIAGILLFVIIFLGVVLVMKKRKLAKKRKETMSSTRQEMTVMVNSMDKSYAEQGTNCDEAFSFMDTHNLNGRSVSSPSSFTMKTNTLSTSVPNSYYPDETHTMASDTSSLVQSHTYKKREPADVPYQTGQLHPAIRVADLLQHITQMKCAEGYGFKEEYESFFEGQSAPWDSAKKDENRMKNRYGNIIAYDHSRVRLQTIEGDTNSDYINGNYIDGYHRPNHYIATQGPMQETIYDFWRMVWHENTASIIMVTNLVEVGRVKCCKYWPDDTEIYKDIKVTLIETELLAEYVIRTFAVEKRGVHEIREIRQFHFTGWPDHGVPYHATGLLGFVRQVKSKSPPSAGPLVVHCSAGAGRTGCFIVIDIMLDMAEREGVVDIYNCVRELRSRRVNMVQTEEQYVFIHDAILEACLCGDTSVPASQVRSLYYDMNKLDPQTNSSQIKEEFRTLNMVTPTLRVEDCSIALLPRNHEKNRCMDILPPDRCLPFLITIDGESSNYINAALMDSYKQPSAFIVTQHPLPNTVKDFWRLVLDYHCTSVVMLNDVDPAQLCPQYWPENGVHRHGPIQVEFVSADLEEDIISRIFRIYNAARPQDGYRMVQQFQFLGWPMYRDTPVSKRSFLKLIRQVDKWQEEYNGGEGRTVVHCLNGGGRSGTFCAISIVCEMLRHQRTVDVFHAVKTLRNNKPNMVDLLDQYKFCYEVALEYLNSG

SEQ ID NO: 69417 - protein, 279 aa, Homo sapiens
  Payload ID: 13770
  Gene Symbol: PTPRM
  Gene Name: protein tyrosine phosphatase, receptor type, M
  ENSP ID: ENSP00000382933
MNKLDPQTNSSQIKEEFRTLNMVTPTLRVEDCSIALLPRNHEKNRCMDILPPDRCLPFLITIDGESSNYINAALMDSYKQPSAFIVTQHPLPNTVKDFWRLVLDYHCTSVVMLNDVDPAQLCPQYWPENGVHRHGPIQVEFVSADLEEDIISRIFRIYNAARPQDGYRMVQQFQFLGWPMYRDTPVSKRSFLKLIRQVDKWQEEYNGGEGRTVVHCLNGGGRSGTFCAISIVCEMLRHQRTVDVFHAVKTLRNNKPNMVDLLDQYKFCYEVALEYLNSG

SEQ ID NO: 69418 - protein, 264 aa, Homo sapiens
  Payload ID: 13770
  Gene Symbol: PTPRM
  Gene Name: protein tyrosine phosphatase, receptor type, M
  ENSP ID: ENSP00000462176
  MOD_RES (1)..(1): Any amino acid
XEIDLSNQSGRVSKLGNETHFLFFGLYPGTTYSFTIRASTAKGFGPPATNQFTTKISAPSMPAYELETPLNQTDNTVTVMLKPAHSRGAPVSVYQIVVEEERPRRTKKTTEILKCYPVPIHFQNASLLNSQYYFAAEFPADSLQAAQPFTIGDNKTYNGYWNTPLLPYKSYRIYFQAASRANGETKIDCVQVATKAAIIVTQLTTPYIRIAPAAGDGQLTGAATPKPVPEPEKQTDHTVKIAGVIAGILLFVIIFLGVVLVMKK

SEQ ID NO: 69419 - protein, 238 aa, Homo sapiens
  Payload ID: 13770
  Gene Symbol: PTPRM
  Gene Name: protein tyrosine phosphatase, receptor type, M
  ENSP ID: ENSP00000462809
  MOD_RES (1)..(1): Any amino acid
XDIKVTLIETELLAEYVIRTFAVEKGGAGGEANCSPSREVSQRGVHEIREIRQFHFTGWPDHGVPYHATGLLGFVRQVKSKSPPSAGPLVVHCSAGAGRTGCFIVIDIMLDMAEREGVVDIYNCVRELRSRRVNMVQTEEQYVFIHDAILEACLCGDTSVPASQVRSLYYDMNKLDPQTNSSQIKEEFRTLNMVTPTLRVEDCSIALLPRNHEKNRCMDILPPDRCLPFLITIDGESS

SEQ ID NO: 69420 - protein, 1465 aa, Homo sapiens
  Payload ID: 13770
  Gene Symbol: PTPRM
  Gene Name: protein tyrosine phosphatase, receptor type, M
  Uniprot ID: P28827
  ENSP ID: ENSP00000463325
MRGLGTCLATLAGLLLTAAGETFSGGCLFDEPYSTCGYSQSEGDDFNWEQVNTLTKPTSDPWMPSGSFMLVNASGRPEGQRAHLLLPQLKENDTHCIDFHYFVSSKSNSPPGLLNVYVKVNNGPLGNPIWNISGDPTRTWNRAELAISTFWPNFYQVIFEVITSGHQGYLAIDEVKVLGHPCTRTPHFLRIQNVEVNAGQFATFQCSAIGRTVAGDRLWLQGIDVRDAPLKEIKVTSSRRFIASFNVVNTTKRDAGKYRCMIRTEGGVGISNYAELVVKEPPVPIAPPQLASVGATYLWIQLNANSINGDGPIVAREVEYCTASGSWNDRQPVDSTSYKIGHLDPDTEYEISVLLTRPGEGGTGSPGPALRTRTKCADPMRGPRKLEVVEVKSRQITIRWEPFGYNVTRCHSYNLTVHYCYQVGGQEQVREEVSWDTENSHPQHTITNLSPYTNVSVKLILMNPEGRKESQELIVQTDEDLPGAVPTESIQGSTFEEKIFLQWREPTQTYGVITLYEITYKAVSSFDPEIDLSNQSGRVSKLGNETHFLFFGLYPGTTYSFTIRASTAKGFGPPATNQFTTKISAPSMPAYELETPLNQTDNTVTVMLKPAHSRGAPVSVYQIVVEEERPRRTKKTTEILKCYPVPIHFQNASLLNSQYYFAAEFPADSLQAAQPFTIGDNKTYNGYWNTPLLPYKSYRIYFQAASRANGETKIDCVQVATKGAATPKPVPEPEKQTDHTVKIAGVIAGILLFVIIFLGVVLVMKKRKLAKKRKETMSSTRQEMTVMVNSMDKSYAEQGTNCDEAFSFMDTHNLNGRSVSSPSSFTMKTNTLSTSVPNSYYPDPFVPTAILVPINDETHTMASDTSSLVQSHTYKKREPADVPYQTGQLHPAIRVADLLQHITQMKCAEGYGFKEEYESFFEGQSAPWDSAKKDENRMKNRYGNIIAYDHSRVRLQTIEGDTNSDYINGNYIDGYHRPNHYIATQGPMQETIYDFWRMVWHENTASIIMVTNLVEVGRVKCCKYWPDDTEIYKDIKVTLIETELLAEYVIRTFAVEKRGVHEIREIRQFHFTGWPDHGVPYHATGLLGFVRQVKSKSPPSAGPLVVHCSAGAGRTGCFIVIDIMLDMAEREGVVDIYNCVRELRSRRVNMVQTEEQYVFIHDAILEACLCGDTSVPASQVRSLYYDMNKLDPQTNSSQIKEEFRTLNMVTPTLRVEDCSIALLPRNHEKNRCMDILPPDRCLPFLITIDGESSNYINAALMDSYKQPSAFIVTQHPLPNTVKDFWRLVLDYHCTSVVMLNDVDPAQLCPQYWPENGVHRHGPIQVEFVSADLEEDIISRIFRIYNAARPQDGYRMVQQFQFLGWPMYRDTPVSKRSFLKLIRQVDKWQEEYNGGEGRTVVHCLNGGGRSGTFCAISIVCEMLRHQRTVDVFHAVKTLRNNKPNMVDLLDQYKFCYEVALEYLNSG

SEQ ID NO: 69421 - protein, 173 aa, Homo sapiens
  Payload ID: 13770
  Gene Symbol: PTPRM
  Gene Name: protein tyrosine phosphatase, receptor type, M
  ENSP ID: ENSP00000463558
MGTLSLHPGIDVRDAPLKEIKVTSSRRFIASFNVVNTTKRDAGKYRCMIRTEGGVGISNYAELVVKEPPVPIAPPQLASVGATYLWIQLNANSINGDGPIVAREVEYCTASGSWNDRQPVDSTSYKIGHLDPDTEYEISVLLTRPGEGGTGSPGPALRTRTKCADPMRGPRKL

SEQ ID NO: 69422 - protein, 207 aa, Homo sapiens
  Payload ID: 13770
  Gene Symbol: PTPRM
  Gene Name: protein tyrosine phosphatase, receptor type, M
  ENSP ID: ENSP00000464128
HFQNASLLNSQYYFAAEFPADSLQAAQPFTIGDNKTYNGYWNTPLLPYKSYRIYFQAASRANGETKIDCVQVATKGAATPKPVPEPEKQTDHTVKIAGVIAGILLFVIIFLGVVLVMKKRKLAKKRKETMSSTRQEMTVMVNSMDKSYAEQGTNCDEAFSFMDTHNLNGRSVSSPSSFTMKTNTLSTSVPNSYYPDPFVPTAILELL

SEQ ID NO: 69423 - protein, 979 aa, Homo sapiens
  Payload ID: 13771
  Gene Symbol: PTPRN
  Gene Name: protein tyrosine phosphatase, receptor type, N
  Uniprot ID: Q16849
  ENSP ID: ENSP00000295718
MRRPRRPGGLGGSGGLRLLLCLLLLSSRPGGCSAVSAHGCLFDRRLCSHLEVCIQDGLFGQCQVGVGQARPLLQVTSPVLQRLQGVLRQLMSQGLSWHDDLTQYVISQEMERIPRLRPPEPRPRDRSGLAPKRPGPAGELLLQDIPTGSAPAAQHRLPQPPVGKGGAGASSSLSPLQAELLPPLLEHLLLPPQPPHPSLSYEPALLQPYLFHQFGSRDGSRVSEGSPGMVSVGPLPKAEAPALFSRTASKGIFGDHPGHSYGDLPGPSPAQLFQDSGLLYLAQELPAPSRARVPRLPEQGSSSRAEDSPEGYEKEGLGDRGEKPASPAVQPDAALQRLAAVLAGYGVELRQLTPEQLSTLLTLLQLLPKGAGRNPGGVVNVGADIKKTMEGPVEGRDTAELPARTSPMPGHPTASPTSSEVQQVPSPVSSEPPKAARPPVTPVLLEKKSPLGQSQPTVAGQPSARPAAEEYGYIVTDQKPLSLAAGVKLLEILAEHVHMSSGSFINISVVGPALTFRIRHNEQNLSLADVTQQAGLVKSELEAQTGLQILQTGVGQREEAAAVLPQTAHSTSPMRSVLLTLVALAGVAGLLVALAVALCVRQHARQQDKERLAALGPEGAHGDTTFEYQDLCRQHMATKSLFNRAEGPPEPSRVSSVSSQFSDAAQASPSSHSSTPSWCEEPAQANMDISTGHMILAYMEDHLRNRDRLAKEWQALCAYQAEPNTCATAQGEGNIKKNRHPDFLPYDHARIKLKVESSPSRSDYINASPIIEHDPRMPAYIATQGPLSHTIADFWQMVWESGCTVIVMLTPLVEDGVKQCDRYWPDEGASLYHVYEVNLVSEHIWCEDFLVRSFYLKNVQTQETRTLTQFHFLSWPAEGTPASTRPLLDFRRKVNKCYRGRSCPIIVHCSDGAGRTGTYILIDMVLNRMAKGVKEIDIAATLEHVRDQRPGLVRSKDQFEFALTAVAEEVNAILKALPQ

SEQ ID NO: 69424 - protein, 950 aa, Homo sapiens
  Payload ID: 13771
  Gene Symbol: PTPRN
  Gene Name: protein tyrosine phosphatase, receptor type, N
  Uniprot ID: Q16849
  ENSP ID: ENSP00000386638
MRRPRRPGGLGGSGGLRLLLCLLLLSSRPGGCSAVSAHGCLFDRRLCSHLEVCIQDGLFGQCQVGVGQARPLLQVTSPVLQRLQGVLRQLMSQGLSWHDDLTQYVISQEMERIPRLRPPEPRPRDRSGLAPKRPGPAGELLLQDIPTGSAPAAQHRLPQPPVGKGGAGASSSLSPLQAELLPPLLEHLLLPPQPPHPSLSYEPALLQPYLFHQFGSRDGSRVSEGSPGMVSVGPLPKAEAPALFSRTASKGIFGDHPGHSYGDLPGPSPAQLFQDSGLLYLAQELPAPSRARVPRLPEQGSSSRAEDSPEGYEKEGLGDRGEKPASPAVQPDAALQRLAAVLAGYGVELRQLTPEQLSTLLTLLQLLPKGAGRNPGGVVNVGADIKKTMEGPVEGRDTAELPARTSPMPGHPTASPTSSEVQQVPSPVSSEPPKAARPPVTPVLLEKKSPLGQSQPTVAGQPSARPAAEEYGYIVTDQNVVGPALTFRIRHNEQNLSLADVTQQAGLVKSELEAQTGLQILQTGVGQREEAAAVLPQTAHSTSPMRSVLLTLVALAGVAGLLVALAVALCVRQHARQQDKERLAALGPEGAHGDTTFEYQDLCRQHMATKSLFNRAEGPPEPSRVSSVSSQFSDAAQASPSSHSSTPSWCEEPAQANMDISTGHMILAYMEDHLRNRDRLAKEWQALCAYQAEPNTCATAQGEGNIKKNRHPDFLPYDHARIKLKVESSPSRSDYINASPIIEHDPRMPAYIATQGPLSHTIADFWQMVWESGCTVIVMLTPLVEDGVKQCDRYWPDEGASLYHVYEVNLVSEHIWCEDFLVRSFYLKNVQTQETRTLTQFHFLSWPAEGTPASTRPLLDFRRKVNKCYRGRSCPIIVHCSDGAGRTGTYILIDMVLNRMAKGVKEIDIAATLEHVRDQRPGLVRSKDQFEFALTAVAEEVNAILKALPQ

SEQ ID NO: 69425 - protein, 125 aa, Homo sapiens
  Payload ID: 13771
  Gene Symbol: PTPRN
  Gene Name: protein tyrosine phosphatase, receptor type, N
  ENSP ID: ENSP00000388429
MSQGLSWHDDLTQYVISQEMERIPRLRPPEPRPRDRSGLAPKRPGPAGELLLQDIPTGSAPAAQHRLPQPPVGKGGAGASSSLSPLQAELLPPLLEHLLLPPQPPHPSLSYEPALLQPYLFHQFG

SEQ ID NO: 69426 - protein, 889 aa, Homo sapiens
  Payload ID: 13771
  Gene Symbol: PTPRN
  Gene Name: protein tyrosine phosphatase, receptor type, N
  Uniprot ID: Q16849
  ENSP ID: ENSP00000392598
MSQGLSWHDDLTQYVISQEMERIPRLRPPEPRPRDRSGLAPKRPGPAGELLLQDIPTGSAPAAQHRLPQPPVGKGGAGASSSLSPLQAELLPPLLEHLLLPPQPPHPSLSYEPALLQPYLFHQFGSRDGSRVSEGSPGMVSVGPLPKAEAPALFSRTASKGIFGDHPGHSYGDLPGPSPAQLFQDSGLLYLAQELPAPSRARVPRLPEQGSSSRAEDSPEGYEKEGLGDRGEKPASPAVQPDAALQRLAAVLAGYGVELRQLTPEQLSTLLTLLQLLPKGAGRNPGGVVNVGADIKKTMEGPVEGRDTAELPARTSPMPGHPTASPTSSEVQQVPSPVSSEPPKAARPPVTPVLLEKKSPLGQSQPTVAGQPSARPAAEEYGYIVTDQKPLSLAAGVKLLEILAEHVHMSSGSFINISVVGPALTFRIRHNEQNLSLADVTQQAGLVKSELEAQTGLQILQTGVGQREEAAAVLPQTAHSTSPMRSVLLTLVALAGVAGLLVALAVALCVRQHARQQDKERLAALGPEGAHGDTTFEYQDLCRQHMATKSLFNRAEGPPEPSRVSSVSSQFSDAAQASPSSHSSTPSWCEEPAQANMDISTGHMILAYMEDHLRNRDRLAKEWQALCAYQAEPNTCATAQGEGNIKKNRHPDFLPYDHARIKLKVESSPSRSDYINASPIIEHDPRMPAYIATQGPLSHTIADFWQMVWESGCTVIVMLTPLVEDGVKQCDRYWPDEGASLYHVYEVNLVSEHIWCEDFLVRSFYLKNVQTQETRTLTQFHFLSWPAEGTPASTRPLLDFRRKVNKCYRGRSCPIIVHCSDGAGRTGTYILIDMVLNRMAKGVKEIDIAATLEHVRDQRPGLVRSKDQFEFALTAVAEEVNAILKALPQ

SEQ ID NO: 69427 - protein, 124 aa, Homo sapiens
  Payload ID: 13771
  Gene Symbol: PTPRN
  Gene Name: protein tyrosine phosphatase, receptor type, N
  ENSP ID: ENSP00000395379
MSQGLSWHDDLTQYVISQEMERIPRLRPPEPRPRDRSGLAPKRPGPAGELLLQDIPTGSAPAAQHRLPQPPVGKGGAGASSSLSPLQAELLPPLLEHLLLPPQPPHPSLSYEPALLQPYLFHQF

SEQ ID NO: 69428 - protein, 86 aa, Homo sapiens
  Payload ID: 13771
  Gene Symbol: PTPRN
  Gene Name: protein tyrosine phosphatase, receptor type, N
  ENSP ID: ENSP00000396464
MSQGLSWHDDLTQYVISQEMERIPRLRPPEPRPRDRSGLAPKRPGPAGELLLQDIPTGSAPAAQHRLPQPPVGKGGAGASSSLSPL

SEQ ID NO: 69429 - protein, 137 aa, Homo sapiens
  Payload ID: 13771
  Gene Symbol: PTPRN
  Gene Name: protein tyrosine phosphatase, receptor type, N
  ENSP ID: ENSP00000396842
  MOD_RES (1)..(1): Any amino acid
XWESGCTVIVMLTPLVEDGVKQCDRYWPDEGASLYHVYEVNLVSEHIWCEDFLVRSFYLKNVQTQETRTLTQFHFLSWPAEGTPASTRPLLDFRRKVNKCYRGRSCPIIVHCSDGAGRTGTYILIDMVLNRMAKGPV

SEQ ID NO: 69430 - protein, 67 aa, Homo sapiens
  Payload ID: 13771
  Gene Symbol: PTPRN
  Gene Name: protein tyrosine phosphatase, receptor type, N
  ENSP ID: ENSP00000397105
MSQGLSWHDDLTQYVISQEMERIPRLRPPEPRPRDRSGLAPKRPGPAGELLLQDIPTGSAPAAQHRL

SEQ ID NO: 69431 - protein, 166 aa, Homo sapiens
  Payload ID: 13771
  Gene Symbol: PTPRN
  Gene Name: protein tyrosine phosphatase, receptor type, N
  ENSP ID: ENSP00000408036
MRDEEGCLFDRRLCSHLEVCIQDGLFGQCQVGVGQARPLLQVTSPVLQRLQGVLRQLMSQGLSWHDDLTQYVISQEMERIPRLRPPEPRPRDRSGLAPKRPGPAGELLLQDIPTGSAPAAQHRLPQPPVGKGGAGASSSLSPLQAELLPPLLEHLLLPPQPPHPSL

SEQ ID NO: 69432 - protein, 52 aa, Homo sapiens
  Payload ID: 13771
  Gene Symbol: PTPRN
  Gene Name: protein tyrosine phosphatase, receptor type, N
  ENSP ID: ENSP00000475591
MRRPRRPGGLGGSGGLRLLLCLLLLSSRPGGCSAVSAHGSGEGHGVHVGRGT

SEQ ID NO: 69433 - protein, 986 aa, Homo sapiens
  Payload ID: 13772
  Gene Symbol: PTPRN2
  Gene Name: protein tyrosine phosphatase, receptor type, N polypeptide 2
  Uniprot ID: Q92932
  ENSP ID: ENSP00000374064
MGPPLPLLLLLLLLLPPRVLPAAPSSVPRGRQLPGRLGCLLEEGLCGASEACVNDGVFGRCQKVPAMDFYRYEVSPVALQRLRVALQKLSGTGFTWQDDYTQYVMDQELADLPKTYLRRPEASSPARPSKHSVGSERRYSREGGAALANALRRHLPFLEALSQAPASDVLARTHTAQDRPPAEGDDRFSESILTYVAHTSALTYPPGSRTQLREDLLPRTLGQLQPDELSPKVDSGVDRHHLMAALSAYAAQRPPAPPGEGSLEPQYLLRAPSRMPRPLLAPAAPQKWPSPLGDSEDPSSTGDGARIHTLLKDLQRQPAEVRGLSGLELDGMAELMAGLMQGVDHGVARGSPGRAALGESGEQADGPKATLRGDSFPDDGVQDDDDRLYQEVHRLSATLGGLLQDHGSRLLPGALPFARPLDMERKKSEHPESSLSSEEETAGVENVKSQTYSKDLLGQQPHSEPGAAAFGELQNQMPGPSKEEQSLPAGAQEALSDGLQLEVQPSEEEARGYIVTDREVLGPAVTFKVSANVQNVTTEDVEKATVDNKDKLEETSGLKILQTGVGSKSKLKFLPPQAEQEDSTKFIALTLVSLACILGVLLASGLIYCLRHSSQHRLKEKLSGLGGDPGADATAAYQELCRQRMATRPPDRPEGPHTSRISSVSSQFSDGPIPSPSARSSASSWSEEPVQSNMDISTGHMILSYMEDHLKNKNRLEKEWEALCAYQAEPNSSFVAQREENVPKNRSLAVLTYDHSRVLLKAENSHSHSDYINASPIMDHDPRNPAYIATQGPLPATVADFWQMVWESGCVVIVMLTPLAENGVRQCYHYWPDEGSNLYHIYEVNLVSEHIWCEDFLVRSFYLKNLQTNETRTVTQFHFLSWYDRGVPSSSRSLLDFRRKVNKCYRGRSCPIIVHCSDGAGRSGTYVLIDMVLNKMAKGAKEIDIAATLEHLRDQRPGMVQTKEQFEFALTAVAEEVNAILKALPQ

SEQ ID NO: 69434 - protein, 998 aa, Homo sapiens
  Payload ID: 13772
  Gene Symbol: PTPRN2
  Gene Name: protein tyrosine phosphatase, receptor type, N polypeptide 2
  Uniprot ID: Q92932
  ENSP ID: ENSP00000374067
MGPPLPLLLLLLLLLPPRVLPAAPSSVPRGRQLPGRLDGVFGRCQKVPAMDFYRYEVSPVALQRLRVALQKLSGTGFTWQDDYTQYVMDQELADLPKTYLRRPEASSPARPSKHSVGSERRYSREGGAALANALRRHLPFLEALSQAPASDVLARTHTAQDRPPAEGDDRFSESILTYVAHTSALTYPPGSRTQLREDLLPRTLGQLQPDELSPKVDSGVDRHHLMAALSAYAAQRPPAPPGEGSLEPQYLLRAPSRMPRPLLAPAAPQKWPSPLGDSEDPSSTGDGARIHTLLKDLQRQPAEVRGLSGLELDGMAELMAGLMQGVDHGVARGSPGRAALGESGEQADGPKATLRGDSFPDDGVQDDDDRLYQEVHRLSATLGGLLQDHGSRLLPGALPFARPLDMERKKSEHPESSLSSEEETAGVENVKSQTYSKDLLGQQPHSEPGAAAFGELQNQMPGPSKEEQSLPAGAQEALSDGLQLEVQPSEEEARGYIVTDRDPLRPEEGRRLVEDVARLLQVPSSAFADVEVLGPAVTFKVSANVQNVTTEDVEKATVDNKDKLEETSGLKILQTGVGSKSKLKFLPPQAEQEDSTKFIALTLVSLACILGVLLASGLIYCLRHSSQHRLKEKLSGLGGDPGADATAAYQELCRQRMATRPPDRPEGPHTSRISSVSSQFSDGPIPSPSARSSASSWSEEPVQSNMDISTGHMILSYMEDHLKNKNRLEKEWEALCAYQAEPNSSFVAQREENVPKNRSLAVLTYDHSRVLLKAENSHSHSDYINASPIMDHDPRNPAYIATQGPLPATVADFWQMVWESGCVVIVMLTPLAENGVRQCYHYWPDEGSNLYHIYEVNLVSEHIWCEDFLVRSFYLKNLQTNETRTVTQFHFLSWYDRGVPSSSRSLLDFRRKVNKCYRGRSCPIIVHCSDGAGRSGTYVLIDMVLNKMAKGAKEIDIAATLEHLRDQRPGMVQTKEQFEFALTAVAEEVNAILKALPQ

SEQ ID NO: 69435 - protein, 1015 aa, Homo sapiens
  Payload ID: 13772
  Gene Symbol: PTPRN2
  Gene Name: protein tyrosine phosphatase, receptor type, N polypeptide 2
  Uniprot ID: Q92932
  ENSP ID: ENSP00000374069
MGPPLPLLLLLLLLLPPRVLPAAPSSVPRGRQLPGRLGCLLEEGLCGASEACVNDGVFGRCQKVPAMDFYRYEVSPVALQRLRVALQKLSGTGFTWQDDYTQYVMDQELADLPKTYLRRPEASSPARPSKHSVGSERRYSREGGAALANALRRHLPFLEALSQAPASDVLARTHTAQDRPPAEGDDRFSESILTYVAHTSALTYPPGSRTQLREDLLPRTLGQLQPDELSPKVDSGVDRHHLMAALSAYAAQRPPAPPGEGSLEPQYLLRAPSRMPRPLLAPAAPQKWPSPLGDSEDPSSTGDGARIHTLLKDLQRQPAEVRGLSGLELDGMAELMAGLMQGVDHGVARGSPGRAALGESGEQADGPKATLRGDSFPDDGVQDDDDRLYQEVHRLSATLGGLLQDHGSRLLPGALPFARPLDMERKKSEHPESSLSSEEETAGVENVKSQTYSKDLLGQQPHSEPGAAAFGELQNQMPGPSKEEQSLPAGAQEALSDGLQLEVQPSEEEARGYIVTDRDPLRPEEGRRLVEDVARLLQVPSSAFADVEVLGPAVTFKVSANVQNVTTEDVEKATVDNKDKLEETSGLKILQTGVGSKSKLKFLPPQAEQEDSTKFIALTLVSLACILGVLLASGLIYCLRHSSQHRLKEKLSGLGGDPGADATAAYQELCRQRMATRPPDRPEGPHTSRISSVSSQFSDGPIPSPSARSSASSWSEEPVQSNMDISTGHMILSYMEDHLKNKNRLEKEWEALCAYQAEPNSSFVAQREENVPKNRSLAVLTYDHSRVLLKAENSHSHSDYINASPIMDHDPRNPAYIATQGPLPATVADFWQMVWESGCVVIVMLTPLAENGVRQCYHYWPDEGSNLYHIYEVNLVSEHIWCEDFLVRSFYLKNLQTNETRTVTQFHFLSWYDRGVPSSSRSLLDFRRKVNKCYRGRSCPIIVHCSDGAGRSGTYVLIDMVLNKMAKGAKEIDIAATLEHLRDQRPGMVQTKEQFEFALTAVAEEVNAILKALPQ

SEQ ID NO: 69436 - protein, 457 aa, Homo sapiens
  Payload ID: 13772
  Gene Symbol: PTPRN2
  Gene Name: protein tyrosine phosphatase, receptor type, N polypeptide 2
  ENSP ID: ENSP00000385464
TGFTWQDDYTQYVMDQELADLPKTYLRRPEASSPARPSKHSVGSERRYSREGGAALANALRRHLPFLEALSQAPASDVLARTHTAQDRPPAEGDDRFSESILTYVAHTSALTYPPGSRTQLREDLLPRTLGQLQPDELSPKVDSGVDRHHLMAALSAYAAQRPPAPPGEGSLEPQYLLRAPSRMPRPLLAPAAPQKWPSPLGDSEDPSSTGDGARIHTLLKDLQRQPAEVRGLSGLELDGMAELMAGLMQGVDHGVARGSPGRAALGESGEQADGPKATLRGDSFPDDGVQDDDDRLYQEVHRLSATLGGLLQDHGSRLLPGALPFARPLDMERKKSEHPESSLSSEEETAGVENVKSQTYSKDLLGQQPHSEPGAAAFGELQNQMPGPSKEEQSLPAGAQEALSDGLQLEVQPSEEEARGYIVTDRDPLRPEEGRRLVEDVARLLQVPSSAFADVE

SEQ ID NO: 69437 - protein, 977 aa, Homo sapiens
  Payload ID: 13772
  Gene Symbol: PTPRN2
  Gene Name: protein tyrosine phosphatase, receptor type, N polypeptide 2
  ENSP ID: ENSP00000387114
MGPPLPLLLLLLLLLPPRVLPAAPSSVPRGRQLPGRLGCLLEEGLCGASEACVNGFTWQDDYTQYVMDQELADLPKTYLRRPEASSPARPSKHSVGSERRYSREGGAALANALRRHLPFLEALSQAPASDVLARTHTAQDRPPAEGDDRFSESILTYVAHTSALTYPPGSRTQLREDLLPRTLGQLQPDELSPKVDSGVDRHHLMAALSAYAAQRPPAPPGEGSLEPQYLLRAPSRMPRPLLAPAAPQKWPSPLGDSEDPSSTGDGARIHTLLKDLQRQPAEVRGLSGLELDGMAELMAGLMQGVDHGVARGSPGRAALGESGEQADGPKATLRGDSFPDDGVQDDDDRLYQEVHRLSATLGGLLQDHGSRLLPGALPFARPLDMERKKSEHPESSLSSEEETAGVENVKSQTYSKDLLGQQPHSEPGAAAFGELQNQMPGPSKEEQSLPAGAQEALSDGLQLEVQPSEEEARGYIVTDRDPLRPEEGRRLVEDVARLLQVPSSAFADVEVLGPAVTFKVSANVQNVTTEDVEKATVDNKDKLEETSGLKILQTGVGSKSKLKFLPPQAEQEDSTKFIALTLVSLACILGVLLASGLIYCLRHSSQHRLKEKLSGLGGDPGADATAAYQELCRQRMATRPPDRPEGPHTSRISSVSSQFSDGPIPSPSARSSASSWSEEPVQSNMDISTGHMILSYMEDHLKNKNRLEKEWEALCAYQAEPNSSFVAQREENVPKNRSLAVLTYDHSRVLLKAENSHSHSDYINASPIMDHDPRNPAYIATQGPLPATVADFWQMVWESGCVVIVMLTPLAENGVRQCYHYWPDEGSNLYHIYEVNLVSEHIWCEDFLVRSFYLKNLQTNETRTVTQFHFLSWYDRGVPSSSRSLLDFRRKVNKCYRGRSCPIIVHCSDGAGRSGTYVLIDMVLNKMAKGAKEIDIAATLEHLRDQRPGMVQTKEQFEFALTAVAEEVNAILKALPQ

SEQ ID NO: 69438 - protein, 38 aa, Homo sapiens
  Payload ID: 13772
  Gene Symbol: PTPRN2
  Gene Name: protein tyrosine phosphatase, receptor type, N polypeptide 2
  ENSP ID: ENSP00000487683
  MOD_RES (1)..(1): Any amino acid
XGVFGRCQKVPAMDFYRYEVSPVALQRLRVALQKLSGT

SEQ ID NO: 69439 - protein, 38 aa, Homo sapiens; identical to SEQ ID NO: 69438
  Payload ID: 13772
  Gene Symbol: PTPRN2
  Gene Name: protein tyrosine phosphatase, receptor type, N polypeptide 2
  ENSP ID: ENSP00000488132
  MOD_RES (1)..(1): Any amino acid

SEQ ID NO: 69440 - protein, 38 aa, Homo sapiens; identical to SEQ ID NO: 69438
  Payload ID: 13772
  Gene Symbol: PTPRN2
  Gene Name: protein tyrosine phosphatase, receptor type, N polypeptide 2
  ENSP ID: ENSP00000488906
  MOD_RES (1)..(1): Any amino acid

SEQ ID NO: 69441 - protein, 1216 aa, Homo sapiens
  Payload ID: 13773
  Gene Symbol: PTPRO
  Gene Name: protein tyrosine phosphatase, receptor type, O
  Uniprot ID: Q16827
  ENSP ID: ENSP00000281171
MGHLPTGIHGARRLLPLLWLFVLFKNATAFHVTVQDDNNIVVSLEASDVISPASVYVVKITGESKNYFFEFEEFNSTLPPPVIFKASYHGLYYIITLVVVNGNVVTKPSRSITVLTKPLPVTSVSIYDYKPSPETGVLFEIHYPEKYNVFTRVNISYWEGKDFRTMLYKDFFKGKTVFNHWLPGMCYSNITFQLVSEATFNKSTLVEYSGVSHEPKQHRTAPYPPQNISVRIVNLNKNNWEEQSGNFPEESFMRSQDTIGKEKLFHFTEETPEIPSGNISSGWPDFNSSDYETTSQPYWWDSASAAPESEDEFVSVLPMEYENNSTLSETEKSTSGSFSFFPVQMILTWLPPKPPTAFDGFHIHIEREENFTEYLMVDEEAHEFVAELKEPGKYKLSVTTFSSSGSCETRKSQSAKSLSFYISPSGEWIEELTEKPQHVSVHVLSSTTALMSWTSSQENYNSTIVSVVSLTCQKQKESQRLEKQYCTQVNSSKPIIENLVPGAQYQVVIYLRKGPLIGPPSDPVTFAIVPTGIKDLMLYPLGPTAVVLSWTRPYLGVFRKYVVEMFYFNPATMTSEWTTYYEIAATVSLTASVRIANLLPAWYYNFRVTMVTWGDPELSCCDSSTISFITAPVAPEITSVEYFNSLLYISWTYGDDTTDLSHSRMLHWMVVAEGKKKIKKSVTRNVMTAILSLPPGDIYNLSVTACTERGSNTSMLRLVKLEPAPPKSLFAVNKTQTSVTLLWVEEGVADFFEVFCQQVGSSQKTKLQEPVAVSSHVVTISSLLPATAYNCSVTSFSHDSPSVPTFIAVSTMVTEMNPNVVVISVLAILSTLLIGLLLVTLIILRKKHLQMARECGAGTFVNFASLERDGKLPYNWRRSIFAFLTLLPSCLWTDYLLAFYINPWSKNGLKKRKLTNPVQLDDFDAYIKDMAKDSDYKFSLQFEELKLIGLDIPHFAADLPLNRCKNRYTNILPYDFSRVRLVSMNEEEGADYINANYIPGYNSPQEYIATQGPLPETRNDFWKMVLQQKSQIIVMLTQCNEKRRVKCDHYWPFTEEPIAYGDITVEMISEEEQDDWACRHFRINYADEMQDVMHFNYTAWPDHGVPTANAAESILQFVHMVRQQATKSKGPMIIHCSAGVGRTGTFIALDRLLQHIRDHEFVDILGLVSEMRSYRMSMVQTEEQYIFIHQCVQLMWMKKKQQFCISDVIYENVSKS

SEQ ID NO: 69442 - protein, 1188 aa, Homo sapiens
  Payload ID: 13773
  Gene Symbol: PTPRO
  Gene Name: protein tyrosine phosphatase, receptor type, O
  Uniprot ID: Q16827
  ENSP ID: ENSP00000343434
MGHLPTGIHGARRLLPLLWLFVLFKNATAFHVTVQDDNNIVVSLEASDVISPASVYVVKITGESKNYFFEFEEFNSTLPPPVIFKASYHGLYYIITLVVVNGNVVTKPSRSITVLTKPLPVTSVSIYDYKPSPETGVLFEIHYPEKYNVFTRVNISYWEGKDFRTMLYKDFFKGKTVFNHWLPGMCYSNITFQLVSEATFNKSTLVEYSGVSHEPKQHRTAPYPPQNISVRIVNLNKNNWEEQSGNFPEESFMRSQDTIGKEKLFHFTEETPEIPSGNISSGWPDFNSSDYETTSQPYWWDSASAAPESEDEFVSVLPMEYENNSTLSETEKSTSGSFSFFPVQMILTWLPPKPPTAFDGFHIHIEREENFTEYLMVDEEAHEFVAELKEPGKYKLSVTTFSSSGSCETRKSQSAKSLSFYISPSGEWIEELTEKPQHVSVHVLSSTTALMSWTSSQENYNSTIVSVVSLTCQKQKESQRLEKQYCTQVNSSKPIIENLVPGAQYQVVIYLRKGPLIGPPSDPVTFAIVPTGIKDLMLYPLGPTAVVLSWTRPYLGVFRKYVVEMFYFNPATMTSEWTTYYEIAATVSLTASVRIANLLPAWYYNFRVTMVTWGDPELSCCDSSTISFITAPVAPEITSVEYFNSLLYISWTYGDDTTDLSHSRMLHWMVVAEGKKKIKKSVTRNVMTAILSLPPGDIYNLSVTACTERGSNTSMLRLVKLEPAPPKSLFAVNKTQTSVTLLWVEEGVADFFEVFCQQVGSSQKTKLQEPVAVSSHVVTISSLLPATAYNCSVTSFSHDSPSVPTFIAVSTMVTEMNPNVVVISVLAILSTLLIGLLLVTLIILRKKHLQMARECGAGTFVNFASLERDGKLPYNWSKNGLKKRKLTNPVQLDDFDAYIKDMAKDSDYKFSLQFEELKLIGLDIPHFAADLPLNRCKNRYTNILPYDFSRVRLVSMNEEEGADYINANYIPGYNSPQEYIATQGPLPETRNDFWKMVLQQKSQIIVMLTQCNEKRRVKCDHYWPFTEEPIAYGDITVEMISEEEQDDWACRHFRINYADEMQDVMHFNYTAWPDHGVPTANAAESILQFVHMVRQQATKSKGPMIIHCSAGVGRTGTFIALDRLLQHIRDHEFVDILGLVSEMRSYRMSMVQTEEQYIFIHQCVQLMWMKKKQQFCISDVIYENVSKS

SEQ ID NO: 69443 - protein, 405 aa, Homo sapiens
  Payload ID: 13773
  Gene Symbol: PTPRO
  Gene Name: protein tyrosine phosphatase, receptor type, O
  Uniprot ID: Q16827
  ENSP ID: ENSP00000393449
MVTEMNPNVVVISVLAILSTLLIGLLLVTLIILRKKHLQMARECGAGTFVNFASLERDGKLPYNWRRSIFAFLTLLPSCLWTDYLLAFYINPWSKNGLKKRKLTNPVQLDDFDAYIKDMAKDSDYKFSLQFEELKLIGLDIPHFAADLPLNRCKNRYTNILPYDFSRVRLVSMNEEEGADYINANYIPGYNSPQEYIATQGPLPETRNDFWKMVLQQKSQIIVMLTQCNEKRRVKCDHYWPFTEEPIAYGDITVEMISEEEQDDWACRHFRINYADEMQDVMHFNYTAWPDHGVPTANAAESILQFVHMVRQQATKSKGPMIIHCSAGVGRTGTFIALDRLLQHIRDHEFVDILGLVSEMRSYRMSMVQTEEQYIFIHQCVQLMWMKKKQQFCISDVIYENVSKS

SEQ ID NO: 69444 - protein, 405 aa, Homo sapiens; identical to SEQ ID NO: 69443
  Payload ID: 13773
  Gene Symbol: PTPRO
  Gene Name: protein tyrosine phosphatase, receptor type, O
  Uniprot ID: Q16827
  ENSP ID: ENSP00000404188

SEQ ID NO: 69445 - protein, 377 aa, Homo sapiens
  Payload ID: 13773
  Gene Symbol: PTPRO
  Gene Name: protein tyrosine phosphatase, receptor type, O
  Uniprot ID: Q16827
  ENSP ID: ENSP00000437571
MVTEMNPNVVVISVLAILSTLLIGLLLVTLIILRKKHLQMARECGAGTFVNFASLERDGKLPYNWSKNGLKKRKLTNPVQLDDFDAYIKDMAKDSDYKFSLQFEELKLIGLDIPHFAADLPLNRCKNRYTNILPYDFSRVRLVSMNEEEGADYINANYIPGYNSPQEYIATQGPLPETRNDFWKMVLQQKSQIIVMLTQCNEKRRVKCDHYWPFTEEPIAYGDITVEMISEEEQDDWACRHFRINYADEMQDVMHFNYTAWPDHGVPTANAAESILQFVHMVRQQATKSKGPMIIHCSAGVGRTGTFIALDRLLQHIRDHEFVDILGLVSEMRSYRMSMVQTEEQYIFIHQCVQLMWMKKKQQFCISDVIYENVSKS

SEQ ID NO: 69446 - protein, 377 aa, Homo sapiens; identical to SEQ ID NO: 69445
  Payload ID: 13773
  Gene Symbol: PTPRO
  Gene Name: protein tyrosine phosphatase, receptor type, O
  Uniprot ID: Q16827
  ENSP ID: ENSP00000439234

SEQ ID NO: 69447 - protein, 597 aa, Homo sapiens
  Payload ID: 13773
  Gene Symbol: PTPRO
  Gene Name: protein tyrosine phosphatase, receptor type, O
  Uniprot ID: Q16827
  ENSP ID: ENSP00000444173
MGHLPTGIHGARRLLPLLWLFVLFKNATAFHVTVQDDNNIVVSLEASDVISPASVYVVKITGESKNYFFEFEEFNSTLPPPVIFKASYHGLYYIITLVVVNGNVVTKPSRSITVLTKPLPVTSVSIYDYKPSPETGVLFEIHYPEKYNVFTRVNISYWEGKDFRTMLYKDFFKGKTVFNHWLPGMCYSNITFQLVSEATFNKSTLVEYSGVSHEPKQHRTAPYPPQNISVRIVNLNKNNWEEQSGNFPEESFMRSQDTIGKEKLFHFTEETPEIPSGNISSGWPDFNSSDYETTSQPYWWDSASAAPESEDEFVSVLPMEYENNSTLSETEKSTSGSFSFFPVQMILTWLPPKPPTAFDGFHIHIEREENFTEYLMVDEEAHEFVAELKEPGKYKLSVTTFSSSGSCETRKSQSAKSLSFYISPSGEWIEELTEKPQHVSVHVLSSTTALMSWTSSQENYNSTIVSVVSLTCQKQKESQRLEKQYCTQVNSSKPIIENLVPGAQYQVVIYLRKGPLIGPPSDPVTFAIVPTGIKDLMLYPLGPTAVVLSWTRPYLGVFRKYVVEMFYFNPATMTSEWTTYYEIAATVSLTASVVIFP

SEQ ID NO: 69448 - protein, 88 aa, Homo sapiens
  Payload ID: 13773
  Gene Symbol: PTPRO
  Gene Name: protein tyrosine phosphatase, receptor type, O
  ENSP ID: ENSP00000445621
  MOD_RES (1)..(1): Any amino acid
XVTLLWVEEGVADFFEVFCQQVGSSQKTKLQEPVAVSSHVVTISSLLPATAYNCSVTSFSHDSPSVPTFIAVSTMGSVELVHLSILHP

SEQ ID NO: 69449 - protein, 116 aa, Homo sapiens
  Payload ID: 13773
  Gene Symbol: PTPRO
  Gene Name: protein tyrosine phosphatase, receptor type, O
  ENSP ID: ENSP00000446201
WKMVLQQKSQIIVMLTQCNEKRRVKCDHYWPFTEEPIAYGDITVEMISEEEQDDWACRHFRINYADEMQDVMHFNYTAWPDHGVPTANAAESILQFVHMVRQQATKSKGPMIIHCR

SEQ ID NO: 69450 - protein, 332 aa, Homo sapiens
  Payload ID: 13774
  Gene Symbol: PTPRQ
  Gene Name: protein tyrosine phosphatase, receptor type, Q
  ENSP ID: ENSP00000447522
MKHSRDPNAVTVSWPSARSLLDGYIISISSESLMREEILPSTKRTFTFNSLSPGTDFLISIMTNKGLKRSHPTVLMVSTYPDPSDLLIWGQEENTICLSWKLSEGGFEKFQISYCMPSRQEKLIKVIVYGNKAKVKKLTLGMDYMFQVKKVKGKGYSVSVMKKVPIKPEQPEKLRAFNISTHSFSLHWSLPSGHVERYQVDLVPDSGFVTIRDLGGGEYQVDVSNVVPGTRYDITISSISTTYTSPVTRIVTTNVTKPGPPVFLAGERVGSAGILLSWNTPPNPNGRIISYIVKYKEVCPWMQTVYTQVRSKPDSLEVLLTNLNPGTTYEIK

SEQ ID NO: 69451 - protein, 353 aa, Homo sapiens
  Payload ID: 13774
  Gene Symbol: PTPRQ
  Gene Name: protein tyrosine phosphatase, receptor type, Q
  ENSP ID: ENSP00000448844
MKHSRDPNAVTVSWPSARSLLDGYIISISSESLMREEILPSTKRTFTFNSLSPGTDFLISIMTNKGLKRSHPTVLMVSTYPDPSDLLIWGQEENTICLSWKLSEGGFEKFQISYCMPSRQEKLIKVIVYGNKAKVKKLTLGMDYMFQVKKVKGKGYSVSVMKKVPIKPSRICGLILKAVNISSNLMWNTTEINFTHYKIYISNRTFAKDCLIWEVVTEHTVTDVTPGVIYNIMVHRIRGNLGGCGMFTRVVAEPEQPEKLRAFNISTHSFSLHWSLPSGHVERYQVDLVPDSGFVTIRDLGGGEYQVDVSNVVPGTRYDITISSISTTYTSPVTRIVTTNVTKPGPPVFLAGE

SEQ ID NO: 69452 - protein, 283 aa, Homo sapiens
  Payload ID: 13774
  Gene Symbol: PTPRQ
  Gene Name: protein tyrosine phosphatase, receptor type, Q
  ENSP ID: ENSP00000449133
MHKLCCCFHAPSAAEFMKHSRDPNAVTVSWPSARSLLDGYIISISSESLMREEILPSTKRTFTFNSLSPGTDFLISIMTNKGLKRSHPTVLMVSTYPDPSDLLIWGQEENTICLSWKLSEGGFEKFQISYCMPSRQEKLIKVIVYGNKAKVKKLTLGMDYMFQVKKVKGKGYSVSVMKKVPIKPEQPEKLRAFNISTHSFSLHWSLPSGHVERYQVDLVPDSGFVTIRDLGGGEYQVDVSNVVPGTRYDITISSISTTYTSPVTRIVTTNVTKPGPPVFLAGE

SEQ ID NO: 69453 - protein, 146 aa, Homo sapiens
  Payload ID: 13774
  Gene Symbol: PTPRQ
  Gene Name: protein tyrosine phosphatase, receptor type, Q
  ENSP ID: ENSP00000449526
  MOD_RES (1)..(1): Any amino acid
XILSVTLCILSIILLGTAIFAFARIRQKQKEGGTYSPQDAEIIDTKLKLDQLITVADLELKDERLTRPISKKSFLQHVEELCTNNNLKFQEEFSELPKFLQDLSSTDADLPWNRAKNRFPNIKPYNNNRVKLIADASVPGSDYINA

SEQ ID NO: 69454 - protein, 2299 aa, Homo sapiens
  Payload ID: 13774
  Gene Symbol: PTPRQ
  Gene Name: protein tyrosine phosphatase, receptor type, Q
  ENSP ID: ENSP00000482885
MDFLIIFLLLFIGTSETQVDVSNVVPGTRYDITISSISTTYTSPVTRIVTTNVTKPGPPVFLAGERVGSAGILLSWNTPPNPNGRIISYIVKYKEVCPWMQTVYTQVRSKPDSLEVLLTNLNPGTTYEIKVAAENSAGIGVFSDPFLFQTAESAPGKVVNLTVEAYNASAVKLIWYLPRQPNGKITSFKISVKHARSGIVVKDVSIRVEDILTGKLPECNENSESFLWSTASPSPTLGRVTPPSRTTHSSSTLTQNEISSVWKEPISFVVTHLRPYTTYLFEVSAATTEAGYIDSTIVRTPESVPEGPPQNCVTGNITGKSFSILWDPPTIVTGKFSYRVELYGPSGRILDNSTKDLKFAFTNLTPFTMYDVYIAAETSAGTGPKSNISVFTPPDVPGAVFDLQLAEVESTQVRITWKKPRQPNGIINQYRVKVLVPETGIILENTLLTGNNEYINDPMAPEIVNIVEPMVGLYEGSAEMSSDLHSLATFIYNSHPDKNFPARNRAEDQTSPVVTTRNQYITDIAAEQLSYVIRRLVPFTEHMISVSAFTIMGEGPPTVLSVRTRQQVPSSIKIINYKNISSSSILLYWDPPEYPNGKITHYTIYAMELDTNRAFQITTIDNSFLITGLKKYTKYKMRVAASTHVGESSLSEENDIFVRTSEDEPESSPQDVEVIDVTADEIRLKWSPPEKPNGIIIAYEVLYKNIDTLYMKNTSTTDIILRNLRPHTLYNISVRSYTRFGHGNQVSSLLSVRTSETVPDSAPENITYKNISSGEIELSFLPPSSPNGIIQKYTIYLKRSNGNEERTINTTSLTQNIKVLKKYTQYIIEVSASTLKGEGVRSAPISILTEEDAPDSPPQDFSVKQLSGVTVKLSWQPPLEPNGIILYYTVYVWNRSSLKTINVTETSLELSDLDYNVEYSAYVTASTRFGDGKTRSNIISFQTPEGAPSDPPKDVYYANLSSSSIILFWTPPSKPNGIIQYYSVYYRNTSGTFMQNFTLHEVTNDFDNMTVSTIIDKLTIFSYYTFWLTASTSVGNGNKSSDIIEVYTDQDIPEGFVGNLTYESISSTAINVSWVPPAQPNGLVFYYVSLILQQTPRHVRPPLVTYERSIYFDNLEKYTDYILKITPSTEKGFSDTYTAQLYIKTEEDVPETSPIINTFKNLSSTSVLLSWDPPVKPNGAIISYDLTLQGPNENYSFITSDNYIILEELSPFTLYSFFAAARTRKGLGPSSILFFYTDESVPLAPPQNLTLINCTSDFVWLKWSPSPLPGGIVKVYSFKIHEHETDTIYYKNISGFKTEAKLVGLEPVSTYSIRVSAFTKVGNGNQFSNVVKFTTQESVPDVVQNMQCMATSWQSVLVKWDPPKKANGIITQYMVTVERNSTKVSPQDHMYTFIKLLANTSYVFKVRASTSAGEGDESTCHVSTLPETVPSVPTNIAFSDVQSTSATLTWIRPDTILGYFQNYKITTQLRAQKCKEWESEECVEYQKIQYLYEAHLTEETVYGLKKFRWYRFQVAASTNAGYGNASNWISTKTLPGPPDGPPENVHVVATSPFSISISWSEPAVITGPTCYLIDVKSVDNDEFNISFIKSNEENKTIEIKDLEIFTRYSVVITAFTGNISAAYVEGKSSAEMIVTTLESAPKDPPNNMTFQKIPDEVTKFQLTFLPPSQPNGNIQVYQALVYREDDPTAVQIHNLSIIQKTNTFVIAMLEGLKGGHTYNISVYAVNSAGAGPKVPMRITMDIKAPARPKTKPTPIYDATGKLLVTSTTITIRMPICYYSDDHGPIKNVQVLVTETGAQHDGNVTKWYDAYFNKARPYFTNEGFPNPPCTEGKTKFSGNEEIYIIGADNACMIPGNEDKICNGPLKPKKQYLFKFRATNIMGQFTDSDYSDPVKTLGEGLSERTVEIILSVTLCILSIILLGTAIFAFARIRQKQKEGGTYSPQDAEIIDTKLKLDQLITVADLELKDERLTRLLSYRKSIKPISKKSFLQHVEELCTNNNLKFQEEFSELPKFLQDLSSTDADLPWNRAKNRFPNIKPYNNNRVKLIADASVPGSDYINASYISGYLCPNEFIATQGPLPGTVGDFWRMVWETRAKTLVMLTQCFEKGRIRCHQYWPEDNKPVTVFGDIVITKLMEDVQIDWTIRDLKIERHGDCMTVRQCNFTAWPEHGVPENSAPLIHFVKLVRASRAHDTTPMIVHCSAGVGRTGVFIALDHLTQHINDHDFVDIYGLVAELRSERMCMVQNLAQYIFLHQCILDLLSNKGSNQPICFVNYSALQKMDSLDAMEGDVELEWEETTM

SEQ ID NO: 69455 - protein, 2332 aa, Homo sapiens
  Payload ID: 13774
  Gene Symbol: PTPRQ
  Gene Name: protein tyrosine phosphatase, receptor type, Q
  ENSP ID: ENSP00000483259
MKKVPIKPEQPEKLRAFNISTHSFSLHWSLPSGHVERYQVDLVPDSGFVTIRDLGGGEYQVDVSNVVPGTRYDITISSISTTYTSPVTRIVTTNVTKPGPPVFLAGERVGSAGILLSWNTPPNPNGRIISYIVKYKEVCPWMQTVYTQVRSKPDSLEVLLTNLNPGTTYEIKVAAENSAGIGVFSDPFLFQTAESAPGKVVNLTVEAYNASAVKLIWYLPRQPNGKITSFKISVKHARSGIVVKDVSIRVEDILTGKLPECNENSESFLWSTASPSPTLGRVTPPSRTTHSSSTLTQNEISSVWKEPISFVVTHLRPYTTYLFEVSAATTEAGYIDSTIVRTPESVPEGPPQNCVTGNITGKSFSILWDPPTIVTGKFSYRVELYGPSGRILDNSTKDLKFAFTNLTPFTMYDVYIAAETSAGTGPKSNISVFTPPDVPGAVFDLQLAEVESTQVRITWKKPRQPNGIINQYRVKVLVPETGIILENTLLTGNNEYINDPMAPEIVNIVEPMVGLYEGSAEMSSDLHSLATFIYNSHPDKNFPARNRAEDQTSPVVTTRNQYITDIAAEQLSYVIRRLVPFTEHMISVSAFTIMGEGPPTVLSVRTRQQVPSSIKIINYKNISSSSILLYWDPPEYPNGKITHYTIYAMELDTNRAFQITTIDNSFLITGLKKYTKYKMRVAASTHVGESSLSEENDIFVRTSEDEPESSPQDVEVIDVTADEIRLKWSPPEKPNGIIIAYEVLYKNIDTLYMKNTSTTDIILRNLRPHTLYNISVRSYTRFGHGNQVSSLLSVRTSETVPDSAPENITYKNISSGEIELSFLPPSSPNGIIQKYTIYLKRSNGNEERTINTTSLTQNIKVLKKYTQYIIEVSASTLKGEGVRSAPISILTEEDAPDSPPQDFSVKQLSGVTVKLSWQPPLEPNGIILYYTVYVWNRSSLKTINVTETSLELSDLDYNVEYSAYVTASTRFGDGKTRSNIISFQTPEGAPSDPPKDVYYANLSSSSIILFWTPPSKPNGIIQYYSVYYRNTSGTFMQNFTLHEVTNDFDNMTVSTIIDKLTIFSYYTFWLTASTSVGNGNKSSDIIEVYTDQDIPEGFVGNLTYESISSTAINVSWVPPAQPNGLVFYYVSLILQQTPRHVRPPLVTYERSIYFDNLEKYTDYILKITPSTEKGFSDTYTAQLYIKTEEDVPETSPIINTFKNLSSTSVLLSWDPPVKPNGAIISYDLTLQGPNENYSFITSDNYIILEELSPFTLYSFFAAARTRKGLGPSSILFFYTDESVPLAPPQNLTLINCTSDFVWLKWSPSPLPGGIVKVYSFKIHEHETDTIYYKNISGFKTEAKLVGLEPVSTYSIRVSAFTKVGNGNQFSNVVKFTTQESVPDVVQNMQCMATSWQSVLVKWDPPKKANGIITQYMVTVERNSTKVSPQDHMYTFIKLLANTSYVFKVRASTSAGEGDESTCHVSTLPETVPSVPTNIAFSDVQSTSATLTWIRPDTILGYFQNYKITTQLRAQKCKEWESEECVEYQKIQYLYEAHLTEETVYGLKKFRWYRFQVAASTNAGYGNASNWISTKTLPGPPDGPPENVHVVATSPFSISISWSEPAVITGPTCYLIDVKSVDNDEFNISFIKSNEENKTIEIKDLEIFTRYSVVITAFTGNISAAYVEGKSSAEMIVTTLESAPKDPPNNMTFQKIPDEVTKFQLTFLPPSQPNGNIQVYQALVYREDDPTAVQIHNLSIIQKTNTFVIAMLEGLKGGHTYNISVYAVNSAGAGPKVPMRITMDIKAPARPKTKPTPIYDATGKLLVTSTTITIRMPICYYSDDHGPIKNVQVLVTETGAQHDGNVTKWYDAYFNKARPYFTNEGFPNPPCTEGKTKFSGNEEIYIIGADNACMIPGNEDKICNGPLKPKKQYLFKFRATNIMGQFTDSDYSDPVKTLGEGLSERTVEIILSVTLCILSIILLGTAIFAFARIRQKQKEGGTYSPQDAEIIDTKLKLDQLITVADLELKDERLTRPISKKSFLQHVEELCTNNNLKFQEEFSELPKFLQDLSSTDADLPWNRAKNRFPNIKPYNNNRVKLIADASVPGSDYINASYISGYLCPNEFIATQGPLPGTVGDFWRMVWETRAKTLVMLTQCFEKGRIRCHQYWPEDNKPVTVFGDIVITKLMEDVQIDWTIRDLKIERHGDCMTVRQCNFTAWPEHGVPENSAPLIHFVKLVRASRAHDTTPMIVHCSAGVGRTGVFIALDHLTQHINDHDFVDIYGLVAELRSERMCMVQNLAQYIFLHQCILDLLSNKGSNQPICFVNYSALQKMDSLDAMEGDVELEWEETTM

SEQ ID NO: 69456 - protein, 657 aa, Homo sapiens
  Payload ID: 13775
  Gene Symbol: PTPRR
  Gene Name: protein tyrosine phosphatase, receptor type, R
  Uniprot ID: Q15256
  ENSP ID: ENSP00000283228
MRRAVCFPALCLLLNLHAAGCFSGNNDHFLAINQKKSGKPVFIYKHSQDIEKSLDIAPQKIYRHSYHSSSEAQVSKRHQIVNSAFPRPAYDPSLNLLAMDGQDLEVENLPIPAANVIVVTLQMDVNKLNITLLRIFRQGVAAALGLLPQQVHINRLIGKKNSIELFVSPINRKTGISDALPSEEVLRSLNINVLHQSLSQFGITEVSPEKNVLQGQHEADKIWSKEGFYAVVIFLSIFVIIVTCLMILYRLKERFQLSLRQDKEKNQEIHLSPITLQPALSEAKTVHSMVQPEQAPKVLNVVVDPQGRGAPEIKATTATSVCPSPFKMKPIGLQERRGSNVSLTLDMSSLGNIEPFVSIPTPREKVAMEYLQSASRILTRSQLRDVVASSHLLQSEFMEIPMNFVDPKEIDIPRHGTKNRYKTILPNPLSRVCLRPKNVTDSLSTYINANYIRGYSGKEKAFIATQGPMINTVDDFWQMVWQEDSPVIVMITKLKEKNEKCVLYWPEKRGIYGKVEVLVISVNECDNYTIRNLVLKQGSHTQHVKHYWYTSWPDHKTPDSAQPLLQLMLDVEEDRLASQGRGPVVVHCSAGIGRTGCFIATSIGCQQLKEEGVVDALSIVCQLRMDRGGMVQTSEQYEFVHHALCLYESRLSAETVQ

SEQ ID NO: 69457 - protein, 545 aa, Homo sapiens
  Payload ID: 13775
  Gene Symbol: PTPRR
  Gene Name: protein tyrosine phosphatase, receptor type, R
  Uniprot ID: Q15256
  ENSP ID: ENSP00000339605
MQSISKQTLQMDVNKLNITLLRIFRQGVAAALGLLPQQVHINRLIGKKNSIELFVSPINRKTGISDALPSEEVLRSLNINVLHQSLSQFGITEVSPEKNVLQGQHEADKIWSKEGFYAVVIFLSIFVIIVTCLMILYRLKERFQLSLRQDKEKNQEIHLSPITLQPALSEAKTVHSMVQPEQAPKVLNVVVDPQGRGAPEIKATTATSVCPSPFKMKPIGLQERRGSNVSLTLDMSSLGNIEPFVSIPTPREKVAMEYLQSASRILTRSQLRDVVASSHLLQSEFMEIPMNFVDPKEIDIPRHGTKNRYKTILPNPLSRVCLRPKNVTDSLSTYINANYIRGYSGKEKAFIATQGPMINTVDDFWQMVWQEDSPVIVMITKLKEKNEKCVLYWPEKRGIYGKVEVLVISVNECDNYTIRNLVLKQGSHTQHVKHYWYTSWPDHKTPDSAQPLLQLMLDVEEDRLASQGRGPVVVHCSAGIGRTGCFIATSIGCQQLKEEGVVDALSIVCQLRMDRGGMVQTSEQYEFVHHALCLYESRLSAETVQ

SEQ ID NO: 69458 - protein, 451 aa, Homo sapiens
  Payload ID: 13775
  Gene Symbol: PTPRR
  Gene Name: protein tyrosine phosphatase, receptor type, R
  Uniprot ID: Q15256
  ENSP ID: ENSP00000368054
MNQKNVLQGQHEADKIWSKEGFYAVVIFLSIFVIIVTCLMILYRLKERFQLSLRQDKEKNQEIHLSPITLQPALSEAKTVHSMVQPEQAPKVLNVVVDPQGRGAPEIKATTATSVCPSPFKMKPIGLQERRGSNVSLTLDMSSLGNIEPFVSIPTPREKVAMEYLQSASRILTRSQLRDVVASSHLLQSEFMEIPMNFVDPKEIDIPRHGTKNRYKTILPNPLSRVCLRPKNVTDSLSTYINANYIRGYSGKEKAFIATQGPMINTVDDFWQMVWQEDSPVIVMITKLKEKNEKCVLYWPEKRGIYGKVEVLVISVNECDNYTIRNLVLKQGSHTQHVKHYWYTSWPDHKTPDSAQPLLQLMLDVEEDRLASQGRGPVVVHCSAGIGRTGCFIATSIGCQQLKEEGVVDALSIVCQLRMDRGGMVQTSEQYEFVHHALCLYESRLSAETVQ

SEQ ID NO: 69459 - protein, 412 aa, Homo sapiens
  Payload ID: 13775
  Gene Symbol: PTPRR
  Gene Name: protein tyrosine phosphatase, receptor type, R
  Uniprot ID: Q15256
  ENSP ID: ENSP00000391750
MILYRLKERFQLSLRQDKEKNQEIHLSPITLQPALSEAKTVHSMVQPEQAPKVLNVVVDPQGRGAPEIKATTATSVCPSPFKMKPIGLQERRGSNVSLTLDMSSLGNIEPFVSIPTPREKVAMEYLQSASRILTRSQLRDVVASSHLLQSEFMEIPMNFVDPKEIDIPRHGTKNRYKTILPNPLSRVCLRPKNVTDSLSTYINANYIRGYSGKEKAFIATQGPMINTVDDFWQMVWQEDSPVIVMITKLKEKNEKCVLYWPEKRGIYGKVEVLVISVNECDNYTIRNLVLKQGSHTQHVKHYWYTSWPDHKTPDSAQPLLQLMLDVEEDRLASQGRGPVVVHCSAGIGRTGCFIATSIGCQQLKEEGVVDALSIVCQLRMDRGGMVQTSEQYEFVHHALCLYESRLSAETVQ

SEQ ID NO: 69460 - protein, 412 aa, Homo sapiens; identical to SEQ ID NO: 69459
  Payload ID: 13775
  Gene Symbol: PTPRR
  Gene Name: protein tyrosine phosphatase, receptor type, R
  Uniprot ID: Q15256
  ENSP ID: ENSP00000446943

SEQ ID NO: 69461 - protein, 141 aa, Homo sapiens
  Payload ID: 13775
  Gene Symbol: PTPRR
  Gene Name: protein tyrosine phosphatase, receptor type, R
  ENSP ID: ENSP00000448049
MNFVDPKEIDIPRHGTKNRYKTILPNPLSRVCLRPKNVTDSLSTYINANYIRGYSGKEKAFIATQGPMINTVDDFWQMVWQEDSPVIVMITKLKEKNEKRRLTGLAPAHTWHSTFPWAKLSGSRCPHPMTRACAGAITPPC

SEQ ID NO: 69462 - protein, 198 aa, Homo sapiens
  Payload ID: 13775
  Gene Symbol: PTPRR
  Gene Name: protein tyrosine phosphatase, receptor type, R
  ENSP ID: ENSP00000449616
MILYRLKERFQLSLRQDKEKNQEIHLSPITLQPALSEAKTVHSMVQPEQAPKVLNVVVDPQGRGAPEIKATTATSVCPSPFKMKPIGLQERRGSNVSLTLDMSSLGNIEPFVSIPTPREKVAMEYLQSASRILTRSQLRDVVASSHLLQSEFMEIPMNFVDPKEIDIPRHGTKNRYKTILPNPLSRVCLRPKNVTDSL

SEQ ID NO: 69463 - protein, 1501 aa, Homo sapiens
  Payload ID: 13776
  Gene Symbol: PTPRS
  Gene Name: protein tyrosine phosphatase, receptor type, S
  ENSP ID: ENSP00000262963
MAPTWGPGMVSVVGPMGLLVVLLVGGCAAEEPPRFIKEPKDQIGVSGGVASFVCQATGDPKPRVTWNKKGKKVNSQRFETIEFDESAGAVLRIQPLRTPRDENVYECVAQNSVGEITVHAKLTVLREDQLPSGFPNIDMGPQLKVVERTRTATMLCAASGNPDPEITWFKDFLPVDPSASNGRIKQLRSGALQIESSEETDQGKYECVATNSAGVRYSSPANLYVRVRRVAPRFSILPMSHEIMPGGNVNITCVAVGSPMPYVKWMQGAEDLTPEDDMPVGRNVLELTDVKDSANYTCVAMSSLGVIEAVAQITVKSLPKAPGTPMVTENTATSITITWDSGNPDPVSYYVIEYKSKSQDGPYQIKEDITTTRYSIGGLSPNSEYEIWVSAVNSIGQGPPSESVVTRTGEQAPASAPRNVQARMLSATTMIVQWEEPVEPNGLIRGYRVYYTMEPEHPVGNWQKHNVDDSLLTTVGSLLEDETYTVRVLAFTSVGDGPLSDPIQVKTQQGVPGQPMNLRAEARSETSITLSWSPPRQESIIKYELLFREGDHGREVGRTFDPTTSYVVEDLKPNTEYAFRLAARSPQGLGAFTPVVRQRTLQSISPKNFKVKMIMKTSVLLSWEFPDNYNSPTPYKIQYNGLTLDVDGRTTKKLITHLKPHTFYNFVLTNRGSSLGGLQQTVTAWTAFNLLNGKPSVAPKPDADGFIMVYLPDGQSPVPVQSYFIVMVPLRKSRGGQFLTPLGSPEDMDLEELIQDISRLQRRSLRHSRQLEVPRPYIAARFSVLPPTFHPGDQKQYGGFDNRGLEPGHRYVLFVLAVLQKSEPTFAASPFSDPFQLDNPDPQPIVDGEEGLIWVIGPVLAVVFIICIVIAILLYKKKPHSKRKDSEPRTKCLLNNADLAPHHPKDPVEMRRINFQTPGMLSHPPIPIADMAEHTERLKANDSLKLSQEYESIDPGQQFTWEHSNLEVNKPKNRYANVIAYDHSRVILQPIEGIMGSDYINANYVDGYRCQNAYIATQGPLPETFGDFWRMVWEQRSATIVMMTRLEEKSRIKCDQYWPNRGTETYGFIQVTLLDTIELATFCVRTFSLHKNGSSEKREVRQFQFTAWPDHGVPEYPTPFLAFLRRVKTCNPPDAGPIVVHCSAGVGRTGCFIVIDAMLERIKPEKTVDVYGHVTLMRSQRNYMVQTEDQYSFIHEALLEAVGCGNTEVPARSLYAYIQKLAQVEPGEHVTGMELEFKRLANSKAHTSRFISANLPCNKFKNRLVNIMPYESTRVCLQPIRGVEGSDYINASFIDGYRQQKAYIATQGPLAETTEDFWRMLWENNSTIVVMLTKLREMGREKCHQYWPAERSARYQYFVVDPMAEYNMPQYILREFKVTDARDGQSRTVRQFQFTDWPEQGVPKSGEGFIDFIGQVHKTKEQFGQDGPISVHCSAGVGRTGVFITLSIVLERMRYEGVVDIFQTVKMLRTQRPAMVQTEDEYQFCYQAALEYLGSFDHYAT

SEQ ID NO: 69464 - protein, 1910 aa, Homo sapiens
  Payload ID: 13776
  Gene Symbol: PTPRS
  Gene Name: protein tyrosine phosphatase, receptor type, S
  Uniprot ID: Q13332
  ENSP ID: ENSP00000269907
MAPTWGPGMVSVVGPMGLLVVLLVGGCAAEEPPRFIKEPKDQIGVSGGVASFVCQATGDPKPRVTWNKKGKKVNSQRFETIEFDESAGAVLRIQPLRTPRDENVYECVAQNSVGEITVHAKLTVLREDQLPSGFPNIDMGPQLKVVERTRTATMLCAASGNPDPEITWFKDFLPVDPSASNGRIKQLRSGALQIESSEETDQGKYECVATNSAGVRYSSPANLYVRVRRVAPRFSILPMSHEIMPGGNVNITCVAVGSPMPYVKWMQGAEDLTPEDDMPVGRNVLELTDVKDSANYTCVAMSSLGVIEAVAQITVKSLPKAPGTPMVTENTATSITITWDSGNPDPVSYYVIEYKSKSQDGPYQIKEDITTTRYSIGGLSPNSEYEIWVSAVNSIGQGPPSESVVTRTGEQAPASAPRNVQARMLSATTMIVQWEEPVEPNGLIRGYRVYYTMEPEHPVGNWQKHNVDDSLLTTVGSLLEDETYTVRVLAFTSVGDGPLSDPIQVKTQQGVPGQPMNLRAEARSETSITLSWSPPRQESIIKYELLFREGDHGREVGRTFDPTTSYVVEDLKPNTEYAFRLAARSPQGLGAFTPVVRQRTLQSKPSAPPQDVKCVSVRSTAILVSWRPPPPETHNGALVGYSVRYRPLGSEDPEPKEVNGIPPTTTQILLEALEKWTQYRITTVAHTEVGPGPESSPVVVRTDEDVPSAPPRKVEAEALNATAIRVLWRSPAPGRQHGQIRGYQVHYVRMEGAEARGPPRIKDVMLADAQEMVITNLQPETAYSITVAAYTMKGDGARSKPKVVVTKGAVLGRPTLSVQQTPEGSLLARWEPPAGTAEDQVLGYRLQFGREDSTPLATLEFPPSEDRYTASGVHKGATYVFRLAARSRGGLGEEAAEVLSIPEDTPRGHPQILEAAGNASAGTVLLRWLPPVPAERNGAIVKYTVAVREAGALGPARETELPAAAEPGAENALTLQGLKPDTAYDLQVRAHTRRGPGPFSPPVRYRTFLRDQVSPKNFKVKMIMKTSVLLSWEFPDNYNSPTPYKIQYNGLTLDVDGRTTKKLITHLKPHTFYNFVLTNRGSSLGGLQQTVTAWTAFNLLNGKPSVAPKPDADGFIMVYLPDGQSPVPVQSYFIVMVPLRKSRGGQFLTPLGSPEDMDLEELIQDISRLQRRSLRHSRQLEVPRPYIAARFSVLPPTFHPGDQKQYGGFDNRGLEPGHRYVLFVLAVLQKSEPTFAASPFSDPFQLDNPDPQPIVDGEEGLIWVIGPVLAVVFIICIVIAILLYKNKPDSKRKDSEPRTKCLLNNADLAPHHPKDPVEMRRINFQTPGMLSHPPIPIADMAEHTERLKANDSLKLSQEYESIDPGQQFTWEHSNLEVNKPKNRYANVIAYDHSRVILQPIEGIMGSDYINANYVDGYRCQNAYIATQGPLPETFGDFWRMVWEQRSATIVMMTRLEEKSRIKCDQYWPNRGTETYGFIQVTLLDTIELATFCVRTFSLHKNGSSEKREVRQFQFTAWPDHGVPEYPTPFLAFLRRVKTCNPPDAGPIVVHCSAGVGRTGCFIVIDAMLERIKPEKTVDVYGHVTLMRSQRNYMVQTEDQYSFIHEALLEAVGCGNTEVPARSLYAYIQKLAQVEPGEHVTGMELEFKRLANSKAHTSRFISANLPCNKFKNRLVNIMPYESTRVCLQPIRGVEGSDYINASFIDGYRQQKAYIATQGPLAETTEDFWRMLWENNSTIVVMLTKLREMGREKCHQYWPAERSARYQYFVVDPMAEYNMPQYILREFKVTDARDGQSRTVRQFQFTDWPEQGVPKSGEGFIDFIGQVHKTKEQFGQDGPISVHCSAGVGRTGVFITLSIVLERMRYEGVVDIFQTVKMLRTQRPAMVQTEDEYQFCYQAALEYLGSFDHYAT

SEQ ID NO: 69465 - protein, 1505 aa, Homo sapiens
  Payload ID: 13776
  Gene Symbol: PTPRS
  Gene Name: protein tyrosine phosphatase, receptor type, S
  ENSP ID: ENSP00000327313
MAPTWGPGMVSVVGPMGLLVVLLVGGCAAEEPPRFIKEPKDQIGVSGGVASFVCQATGDPKPRVTWNKKGKKVNSQRFETIEFDESAGAVLRIQPLRTPRDENVYECVAQNSVGEITVHAKLTVLREDQLPSGFPNIDMGPQLKVVERTRTATMLCAASGNPDPEITWFKDFLPVDPSASNGRIKQLRSGALQIESSEETDQGKYECVATNSAGVRYSSPANLYVRELREVRRVAPRFSILPMSHEIMPGGNVNITCVAVGSPMPYVKWMQGAEDLTPEDDMPVGRNVLELTDVKDSANYTCVAMSSLGVIEAVAQITVKSLPKAPGTPMVTENTATSITITWDSGNPDPVSYYVIEYKSKSQDGPYQIKEDITTTRYSIGGLSPNSEYEIWVSAVNSIGQGPPSESVVTRTGEQAPASAPRNVQARMLSATTMIVQWEEPVEPNGLIRGYRVYYTMEPEHPVGNWQKHNVDDSLLTTVGSLLEDETYTVRVLAFTSVGDGPLSDPIQVKTQQGVPGQPMNLRAEARSETSITLSWSPPRQESIIKYELLFREGDHGREVGRTFDPTTSYVVEDLKPNTEYAFRLAARSPQGLGAFTPVVRQRTLQSISPKNFKVKMIMKTSVLLSWEFPDNYNSPTPYKIQYNGLTLDVDGRTTKKLITHLKPHTFYNFVLTNRGSSLGGLQQTVTAWTAFNLLNGKPSVAPKPDADGFIMVYLPDGQSPVPVQSYFIVMVPLRKSRGGQFLTPLGSPEDMDLEELIQDISRLQRRSLRHSRQLEVPRPYIAARFSVLPPTFHPGDQKQYGGFDNRGLEPGHRYVLFVLAVLQKSEPTFAASPFSDPFQLDNPDPQPIVDGEEGLIWVIGPVLAVVFIICIVIAILLYKNKPDSKRKDSEPRTKCLLNNADLAPHHPKDPVEMRRINFQTPGMLSHPPIPIADMAEHTERLKANDSLKLSQEYESIDPGQQFTWEHSNLEVNKPKNRYANVIAYDHSRVILQPIEGIMGSDYINANYVDGYRCQNAYIATQGPLPETFGDFWRMVWEQRSATIVMMTRLEEKSRIKCDQYWPNRGTETYGFIQVTLLDTIELATFCVRTFSLHKNGSSEKREVRQFQFTAWPDHGVPEYPTPFLAFLRRVKTCNPPDAGPIVVHCSAGVGRTGCFIVIDAMLERIKPEKTVDVYGHVTLMRSQRNYMVQTEDQYSFIHEALLEAVGCGNTEVPARSLYAYIQKLAQVEPGEHVTGMELEFKRLANSKAHTSRFISANLPCNKFKNRLVNIMPYESTRVCLQPIRGVEGSDYINASFIDGYRQQKAYIATQGPLAETTEDFWRMLWENNSTIVVMLTKLREMGREKCHQYWPAERSARYQYFVVDPMAEYNMPQYILREFKVTDARDGQSRTVRQFQFTDWPEQGVPKSGEGFIDFIGQVHKTKEQFGQDGPISVHCSAGVGRTGVFITLSIVLERMRYEGVVDIFQTVKMLRTQRPAMVQTEDEYQFCYQAALEYLGSFDHYAT

SEQ ID NO: 69466 - protein, 1948 aa, Homo sapiens
  Payload ID: 13776
  Gene Symbol: PTPRS
  Gene Name: protein tyrosine phosphatase, receptor type, S
  Uniprot ID: Q13332
  ENSP ID: ENSP00000349932
MAPTWGPGMVSVVGPMGLLVVLLVGGCAAEEPPRFIKEPKDQIGVSGGVASFVCQATGDPKPRVTWNKKGKKVNSQRFETIEFDESAGAVLRIQPLRTPRDENVYECVAQNSVGEITVHAKLTVLREDQLPSGFPNIDMGPQLKVVERTRTATMLCAASGNPDPEITWFKDFLPVDPSASNGRIKQLRSETFESTPIRGALQIESSEETDQGKYECVATNSAGVRYSSPANLYVRELREVRRVAPRFSILPMSHEIMPGGNVNITCVAVGSPMPYVKWMQGAEDLTPEDDMPVGRNVLELTDVKDSANYTCVAMSSLGVIEAVAQITVKSLPKAPGTPMVTENTATSITITWDSGNPDPVSYYVIEYKSKSQDGPYQIKEDITTTRYSIGGLSPNSEYEIWVSAVNSIGQGPPSESVVTRTGEQAPASAPRNVQARMLSATTMIVQWEEPVEPNGLIRGYRVYYTMEPEHPVGNWQKHNVDDSLLTTVGSLLEDETYTVRVLAFTSVGDGPLSDPIQVKTQQGVPGQPMNLRAEARSETSITLSWSPPRQESIIKYELLFREGDHGREVGRTFDPTTSYVVEDLKPNTEYAFRLAARSPQGLGAFTPVVRQRTLQSKPSAPPQDVKCVSVRSTAILVSWRPPPPETHNGALVGYSVRYRPLGSEDPEPKEVNGIPPTTTQILLEALEKWTQYRITTVAHTEVGPGPESSPVVVRTDEDVPSAPPRKVEAEALNATAIRVLWRSPAPGRQHGQIRGYQVHYVRMEGAEARGPPRIKDVMLADAQWETDDTAEYEMVITNLQPETAYSITVAAYTMKGDGARSKPKVVVTKGAVLGRPTLSVQQTPEGSLLARWEPPAGTAEDQVLGYRLQFGREDSTPLATLEFPPSEDRYTASGVHKGATYVFRLAARSRGGLGEEAAEVLSIPEDTPRGHPQILEAAGNASAGTVLLRWLPPVPAERNGAIVKYTVAVREAGALGPARETELPAAAEPGAENALTLQGLKPDTAYDLQVRAHTRRGPGPFSPPVRYRTFLRDQVSPKNFKVKMIMKTSVLLSWEFPDNYNSPTPYKIQYNGLTLDVDGRTTKKLITHLKPHTFYNFVLTNRGSSLGGLQQTVTAWTAFNLLNGKPSVAPKPDADGFIMVYLPDGQSPVPVQSYFIVMVPLRKSRGGQFLTPLGSPEDMDLEELIQDISRLQRRSLRHSRQLEVPRPYIAARFSVLPPTFHPGDQKQYGGFDNRGLEPGHRYVLFVLAVLQKSEPTFAASPFSDPFQLDNPDPQPIVDGEEGLIWVIGPVLAVVFIICIVIAILLYKNKPDSKRKDSEPRTKCLLNNADLAPHHPKDPVEMRRINFQTPDSGLRSPLREPGFHFESMLSHPPIPIADMAEHTERLKANDSLKLSQEYESIDPGQQFTWEHSNLEVNKPKNRYANVIAYDHSRVILQPIEGIMGSDYINANYVDGYRCQNAYIATQGPLPETFGDFWRMVWEQRSATIVMMTRLEEKSRIKCDQYWPNRGTETYGFIQVTLLDTIELATFCVRTFSLHKNGSSEKREVRQFQFTAWPDHGVPEYPTPFLAFLRRVKTCNPPDAGPIVVHCSAGVGRTGCFIVIDAMLERIKPEKTVDVYGHVTLMRSQRNYMVQTEDQYSFIHEALLEAVGCGNTEVPARSLYAYIQKLAQVEPGEHVTGMELEFKRLANSKAHTSRFISANLPCNKFKNRLVNIMPYESTRVCLQPIRGVEGSDYINASFIDGYRQQKAYIATQGPLAETTEDFWRMLWENNSTIVVMLTKLREMGREKCHQYWPAERSARYQYFVVDPMAEYNMPQYILREFKVTDARDGQSRTVRQFQFTDWPEQGVPKSGEGFIDFIGQVHKTKEQFGQDGPISVHCSAGVGRTGVFITLSIVLERMRYEGVVDIFQTVKMLRTQRPAMVQTEDEYQFCYQAALEYLGSFDHYAT

SEQ ID NO: 69467 - protein, 128 aa, Homo sapiens
  Payload ID: 13776
  Gene Symbol: PTPRS
  Gene Name: protein tyrosine phosphatase, receptor type, S
  ENSP ID: ENSP00000465185
MAPTWGPGMVSVVGPMGLLVVLLVGGCAAEEPPRFIKEPKDQIGVSGGVASFVCQATGDPKPRVTWNKKGKKVNSQRFETIEFDESAGAVLRIQPLRTPRDENVYECVAQNSVGEITVHAKLTVLRGP

SEQ ID NO: 69468 - protein, 1910 aa, Homo sapiens; identical to SEQ ID NO: 69464
  Payload ID: 13776
  Gene Symbol: PTPRS
  Gene Name: protein tyrosine phosphatase, receptor type, S
  Uniprot ID: Q13332
  ENSP ID: ENSP00000465443

SEQ ID NO: 69469 - protein, 1501 aa, Homo sapiens
  Payload ID: 13776
  Gene Symbol: PTPRS
  Gene Name: protein tyrosine phosphatase, receptor type, S
  Uniprot ID: Q13332
  ENSP ID: ENSP00000467398
MAPTWGPGMVSVVGPMGLLVVLLVGGCAAEEPPRFIKEPKDQIGVSGGVASFVCQATGDPKPRVTWNKKGKKVNSQRFETIEFDESAGAVLRIQPLRTPRDENVYECVAQNSVGEITVHAKLTVLREDQLPSGFPNIDMGPQLKVVERTRTATMLCAASGNPDPEITWFKDFLPVDPSASNGRIKQLRSGALQIESSEETDQGKYECVATNSAGVRYSSPANLYVRVRRVAPRFSILPMSHEIMPGGNVNITCVAVGSPMPYVKWMQGAEDLTPEDDMPVGRNVLELTDVKDSANYTCVAMSSLGVIEAVAQITVKSLPKAPGTPMVTENTATSITITWDSGNPDPVSYYVIEYKSKSQDGPYQIKEDITTTRYSIGGLSPNSEYEIWVSAVNSIGQGPPSESVVTRTGEQAPASAPRNVQARMLSATTMIVQWEEPVEPNGLIRGYRVYYTMEPEHPVGNWQKHNVDDSLLTTVGSLLEDETYTVRVLAFTSVGDGPLSDPIQVKTQQGVPGQPMNLRAEARSETSITLSWSPPRQESIIKYELLFREGDHGREVGRTFDPTTSYVVEDLKPNTEYAFRLAARSPQGLGAFTPVVRQRTLQSISPKNFKVKMIMKTSVLLSWEFPDNYNSPTPYKIQYNGLTLDVDGRTTKKLITHLKPHTFYNFVLTNRGSSLGGLQQTVTAWTAFNLLNGKPSVAPKPDADGFIMVYLPDGQSPVPVQSYFIVMVPLRKSRGGQFLTPLGSPEDMDLEELIQDISRLQRRSLRHSRQLEVPRPYIAARFSVLPPTFHPGDQKQYGGFDNRGLEPGHRYVLFVLAVLQKSEPTFAASPFSDPFQLDNPDPQPIVDGEEGLIWVIGPVLAVVFIICIVIAILLYKNKPDSKRKDSEPRTKCLLNNADLAPHHPKDPVEMRRINFQTPGMLSHPPIPIADMAEHTERLKANDSLKLSQEYESIDPGQQFTWEHSNLEVNKPKNRYANVIAYDHSRVILQPIEGIMGSDYINANYVDGYRCQNAYIATQGPLPETFGDFWRMVWEQRSATIVMMTRLEEKSRIKCDQYWPNRGTETYGFIQVTLLDTIELATFCVRTFSLHKNGSSEKREVRQFQFTAWPDHGVPEYPTPFLAFLRRVKTCNPPDAGPIVVHCSAGVGRTGCFIVIDAMLERIKPEKTVDVYGHVTLMRSQRNYMVQTEDQYSFIHEALLEAVGCGNTEVPARSLYAYIQKLAQVEPGEHVTGMELEFKRLANSKAHTSRFISANLPCNKFKNRLVNIMPYESTRVCLQPIRGVEGSDYINASFIDGYRQQKAYIATQGPLAETTEDFWRMLWENNSTIVVMLTKLREMGREKCHQYWPAERSARYQYFVVDPMAEYNMPQYILREFKVTDARDGQSRTVRQFQFTDWPEQGVPKSGEGFIDFIGQVHKTKEQFGQDGPISVHCSAGVGRTGVFITLSIVLERMRYEGVVDIFQTVKMLRTQRPAMVQTEDEYQFCYQAALEYLGSFDHYAT

SEQ ID NO: 69470 - protein, 1948 aa, Homo sapiens; identical to SEQ ID NO: 69466
  Payload ID: 13776
  Gene Symbol: PTPRS
  Gene Name: protein tyrosine phosphatase, receptor type, S
  Uniprot ID: Q13332
  ENSP ID: ENSP00000467537

SEQ ID NO: 69471 - protein, 79 aa, Homo sapiens
  Payload ID: 13776
  Gene Symbol: PTPRS
  Gene Name: protein tyrosine phosphatase, receptor type, S
  ENSP ID: ENSP00000468455
MAPTWGPGMVSVVGPMGLLVVLLVGGCAAEEPPRFIKEPKDQIGVSGGVASFVCQATGDPKPRVTWNKKGKKVNSQRFE

SEQ ID NO: 69472 - protein, 90 aa, Homo sapiens
  Payload ID: 13776
  Gene Symbol: PTPRS
  Gene Name: protein tyrosine phosphatase, receptor type, S
  ENSP ID: ENSP00000468803
MAPTWGPGMVSVVGPMGLLVVLLVGGCAAEEPPRFIKEPKDQIGVSGGVASFVCQATGDPKPRVTWNKKGKKVNSQRFETIEFDESAGAV

SEQ ID NO: 69473 - protein, 1450 aa, Homo sapiens
  Payload ID: 13777
  Gene Symbol: PTPRT
  Gene Name: protein tyrosine phosphatase, receptor type, T
  ENSP ID: ENSP00000348408
MASLAALALSLLLRLQLPPLPGARAQSAAGGCSFDEHYSNCGYSVALGTNGFTWEQINTWEKPMLDQAVPTGSFMMVNSSGRASGQKAHLLLPTLKENDTHCIDFHYYFSSRDRSSPGALNVYVKVNGGPQGNPVWNVSGVVTEGWVKAELAISTFWPHFYQVIFESVSLKGHPGYIAVDEVRVLAHPCRKAPHFLRLQNVEVNVGQNATFQCIAGGKWSQHDKLWLQQWNGRDTALMVTRVVNHRRFSATVSVADTAQRSVSKYRCVIRSDGGSGVSNYAELIVKEPPTPIAPPELLAVGATYLWIKPNANSIIGDGPIILKEVEYRTTTGTWAETHIVDSPNYKLWHLDPDVEYEIRVLLTRPGEGGTGPPGPPLTTRTKCADPVHGPQNVEIVDIRARQLTLQWEPFGYAVTRCHSYNLTVQYQYVFNQQQYEAEEVIQTSSHYTLRGLRPFMTIRLRLLLSNPEGRMESEELVVQTEEDVPGAVPLESIQGGPFEEKIYIQWKPPNETNGVITLYEINYKAVGSLDPSADLSSQRGKVFKLRNETHHLFVGLYPGTTYSFTIKASTAKGFGPPVTTRIATKISAPSMPEYDTDTPLNETDTTITVMLKPAQSRGAPVSVYQLVVKEERLQKSRRAADIIECFSVPVSYRNASSLDSLHYFAAELKPANLPVTQPFTVGDNKTYNGYWNPPLSPLKSYSIYFQALSKANGETKINCVRLATKAPMGSAQVTPGTPLCLLTTGASTQNSNTVEPEKQVDNTVKMAGVIAGLLMFIIILLGVMLTIKRRKLAKKQKETQSGAQREMGPVASADKPTTKLSASRNDEGFSSSSQDVNGFTDGSRGELSQPTLTIQTHPYRTCDPVEMSYPRDQFQPAIRVADLLQHITQMKRGQGYGFKEEYEALPEGQTASWDTAKEDENRNKNRYGNIISYDHSRVRLLVLDGDPHSDYINANYIDGYHRPRHYIATQGPMQETVKDFWRMIWQENSASIVMVTNLVEVGRVKCVRYWPDDTEVYGDIKVTLIETEPLAEYVIRTFTVQKKGYHEIRELRLFHFTSWPDHGVPCYATGLLGFVRQVKFLNPPEAGPIVVHCSAGAGRTGCFIAIDTMLDMAENEGVVDIFNCVRELRAQRVNLVQTEEQYVFVHDAILEACLCGNTAIPVCEFRSLYYNISRLDPQTNSSQIKDEFQTLNIVTPRVRPEDCSIGLLPRNHDKNRSMDVLPLDRCLPFLISVDGESSNYINAALMDSHKQPAAFVVTQHPLPNTVADFWRLVFDYNCSSVVMLNEMDTAQFCMQYWPEKTSGCYGPIQVEFVSADIDEDIIHRIFRICNMARPQDGYRIVQHLQYIGWPAYRDTPPSKRSLLKVVRRLEKWQEQYDGREGRTVVHCLNGGGRSGTFCAICSVCEMIQQQNIIDVFHIVKTLRNNKSNMVETLEQYKFVYEVALEYLSSF

SEQ ID NO: 69474 - protein, 1451 aa, Homo sapiens
  Payload ID: 13777
  Gene Symbol: PTPRT
  Gene Name: protein tyrosine phosphatase, receptor type, T
  ENSP ID: ENSP00000362280
MASLAALALSLLLRLQLPPLPGARAQSAAGGCSFDEHYSNCGYSVALGTNGFTWEQINTWEKPMLDQAVPTGSFMMVNSSGRASGQKAHLLLPTLKENDTHCIDFHYYFSSRDRSSPGALNVYVKVNGGPQGNPVWNVSGVVTEGWVKAELAISTFWPHFYQVIFESVSLKGHPGYIAVDEVRVLAHPCRKAPHFLRLQNVEVNVGQNATFQCIAGGKWSQHDKLWLQQWNGRDTALMVTRVVNHRRFSATVSVADTAQRSVSKYRCVIRSDGGSGVSNYAELIVKEPPTPIAPPELLAVGATYLWIKPNANSIIGDGPIILKEVEYRTTTGTWAETHIVDSPNYKLWHLDPDVEYEIRVLLTRPGEGGTGPPGPPLTTRTKCADPVHGPQNVEIVDIRARQLTLQWEPFGYAVTRCHSYNLTVQYQYVFNQQQYEAEEVIQTSSHYTLRGLRPFMTIRLRLLLSNPEGRMESEELVVQTEEDVPGAVPLESIQGGPFEEKIYIQWKPPNETNGVITLYEINYKAVGSLDPSADLSSQRGKVFKLRNETHHLFVGLYPGTTYSFTIKASTAKGFGPPVTTRIATKISAPSMPEYDTDTPLNETDTTITVMLKPAQSRGAPVSVYQLVVKEERLQKSRRAADIIECFSVPVSYRNASSLDSLHYFAAELKPANLPVTQPFTVGDNKTYNGYWNPPLSPLKSYSIYFQALSKANGETKINCVRLATKGASTQNSNTVEPEKQVDNTVKMAGVIAGLLMFIIILLGVMLTIKRRKLAKKQKETQSGAQREMGPVASADKPTTKLSASRNDEGFSSSSQDVNGFTDGSRGELSQPTLTIQTHPYRTCDPVEMSYPRDQFQPAIRVADLLQHITQMKRGQGYGFKEEYEALPEGQTASWDTAKEDENRNKNRYGNIISYDHSRVRLLVLDGDPHSDYINANYIDGYHRPRHYIATQGPMQETVKDFWRMIWQENSASIVMVTNLVEVGRHPAEHTVGNATLGRAASPGMVKCVRYWPDDTEVYGDIKVTLIETEPLAEYVIRTFTVQKKGYHEIRELRLFHFTSWPDHGVPCYATGLLGFVRQVKFLNPPEAGPIVVHCSAGAGRTGCFIAIDTMLDMAENEGVVDIFNCVRELRAQRVNLVQTEEQYVFVHDAILEACLCGNTAIPVCEFRSLYYNISRLDPQTNSSQIKDEFQTLNIVTPRVRPEDCSIGLLPRNHDKNRSMDVLPLDRCLPFLISVDGESSNYINAALMDSHKQPAAFVVTQHPLPNTVADFWRLVFDYNCSSVVMLNEMDTAQFCMQYWPEKTSGCYGPIQVEFVSADIDEDIIHRIFRICNMARPQDGYRIVQHLQYIGWPAYRDTPPSKRSLLKVVRRLEKWQEQYDGREGRTVVHCLNGGGRSGTFCAICSVCEMIQQQNIIDVFHIVKTLRNNKSNMVETLEQYKFVYEVALEYLSSF

SEQ ID NO: 69475 - protein, 1441 aa, Homo sapiens
  Payload ID: 13777
  Gene Symbol: PTPRT
  Gene Name: protein tyrosine phosphatase, receptor type, T
  Uniprot ID: O14522
  ENSP ID: ENSP00000362283
MASLAALALSLLLRLQLPPLPGARAQSAAGGCSFDEHYSNCGYSVALGTNGFTWEQINTWEKPMLDQAVPTGSFMMVNSSGRASGQKAHLLLPTLKENDTHCIDFHYYFSSRDRSSPGALNVYVKVNGGPQGNPVWNVSGVVTEGWVKAELAISTFWPHFYQVIFESVSLKGHPGYIAVDEVRVLAHPCRKAPHFLRLQNVEVNVGQNATFQCIAGGKWSQHDKLWLQQWNGRDTALMVTRVVNHRRFSATVSVADTAQRSVSKYRCVIRSDGGSGVSNYAELIVKEPPTPIAPPELLAVGATYLWIKPNANSIIGDGPIILKEVEYRTTTGTWAETHIVDSPNYKLWHLDPDVEYEIRVLLTRPGEGGTGPPGPPLTTRTKCADPVHGPQNVEIVDIRARQLTLQWEPFGYAVTRCHSYNLTVQYQYVFNQQQYEAEEVIQTSSHYTLRGLRPFMTIRLRLLLSNPEGRMESEELVVQTEEDVPGAVPLESIQGGPFEEKIYIQWKPPNETNGVITLYEINYKAVGSLDPSADLSSQRGKVFKLRNETHHLFVGLYPGTTYSFTIKASTAKGFGPPVTTRIATKISAPSMPEYDTDTPLNETDTTITVMLKPAQSRGAPVSVYQLVVKEERLQKSRRAADIIECFSVPVSYRNASSLDSLHYFAAELKPANLPVTQPFTVGDNKTYNGYWNPPLSPLKSYSIYFQALSKANGETKINCVRLATKGASTQNSNTVEPEKQVDNTVKMAGVIAGLLMFIIILLGVMLTIKRRRNAYSYSYYLKLAKKQKETQSGAQREMGPVASADKPTTKLSASRNDEGFSSSSQDVNGFTDGSRGELSQPTLTIQTHPYRTCDPVEMSYPRDQFQPAIRVADLLQHITQMKRGQGYGFKEEYEALPEGQTASWDTAKEDENRNKNRYGNIISYDHSRVRLLVLDGDPHSDYINANYIDGYHRPRHYIATQGPMQETVKDFWRMIWQENSASIVMVTNLVEVGRVKCVRYWPDDTEVYGDIKVTLIETEPLAEYVIRTFTVQKKGYHEIRELRLFHFTSWPDHGVPCYATGLLGFVRQVKFLNPPEAGPIVVHCSAGAGRTGCFIAIDTMLDMAENEGVVDIFNCVRELRAQRVNLVQTEEQYVFVHDAILEACLCGNTAIPVCEFRSLYYNISRLDPQTNSSQIKDEFQTLNIVTPRVRPEDCSIGLLPRNHDKNRSMDVLPLDRCLPFLISVDGESSNYINAALMDSHKQPAAFVVTQHPLPNTVADFWRLVFDYNCSSVVMLNEMDTAQFCMQYWPEKTSGCYGPIQVEFVSADIDEDIIHRIFRICNMARPQDGYRIVQHLQYIGWPAYRDTPPSKRSLLKVVRRLEKWQEQYDGREGRTVVHCLNGGGRSGTFCAICSVCEMIQQQNIIDVFHIVKTLRNNKSNMVETLEQYKFVYEVALEYLSSF

SEQ ID NO: 69476 - protein, 1440 aa, Homo sapiens
  Payload ID: 13777
  Gene Symbol: PTPRT
  Gene Name: protein tyrosine phosphatase, receptor type, T
  ENSP ID: ENSP00000362286
MASLAALALSLLLRLQLPPLPGARAQSAAGGCSFDEHYSNCGYSVALGTNGFTWEQINTWEKPMLDQAVPTGSFMMVNSSGRASGQKAHLLLPTLKENDTHCIDFHYYFSSRDRSSPGALNVYVKVNGGPQGNPVWNVSGVVTEGWVKAELAISTFWPHFYQVIFESVSLKGHPGYIAVDEVRVLAHPCRKAPHFLRLQNVEVNVGQNATFQCIAGGKWSQHDKLWLQQWNGRDTALMVTRVVNHRRFSATVSVADTAQRSVSKYRCVIRSDGGSGVSNYAELIVKEPPTPIAPPELLAVGATYLWIKPNANSIIGDGPIILKEVEYRTTTGTWAETHIVDSPNYKLWHLDPDVEYEIRVLLTRPGEGGTGPPGPPLTTRTKCADPVHGPQNVEIVDIRARQLTLQWEPFGYAVTRCHSYNLTVQYQYVFNQQQYEAEEVIQTSSHYTLRGLRPFMTIRLRLLLSNPEGRMESEELVVQTEEDVPGAVPLESIQGGPFEEKIYIQWKPPNETNGVITLYEINYKAVGSLDPSADLSSQRGKVFKLRNETHHLFVGLYPGTTYSFTIKASTAKGFGPPVTTRIATKISAPSMPEYDTDTPLNETDTTITVMLKPAQSRGAPVSVYQLVVKEERLQKSRRAADIIECFSVPVSYRNASSLDSLHYFAAELKPANLPVTQPFTVGDNKTYNGYWNPPLSPLKSYSIYFQALSKANGETKINCVRLATKGASTQNSNTVEPEKQVDNTVKMAGVIAGLLMFIIILLGVMLTIKRRRNAYSYSYYLKLAKKQKETQSGAQREMGPVASADKPTTKLSASRNDEGFSSSSQDVNGFNGSRGELSQPTLTIQTHPYRTCDPVEMSYPRDQFQPAIRVADLLQHITQMKRGQGYGFKEEYEALPEGQTASWDTAKEDENRNKNRYGNIISYDHSRVRLLVLDGDPHSDYINANYIDGYHRPRHYIATQGPMQETVKDFWRMIWQENSASIVMVTNLVEVGRVKCVRYWPDDTEVYGDIKVTLIETEPLAEYVIRTFTVQKKGYHEIRELRLFHFTSWPDHGVPCYATGLLGFVRQVKFLNPPEAGPIVVHCSAGAGRTGCFIAIDTMLDMAENEGVVDIFNCVRELRAQRVNLVQTEEQYVFVHDAILEACLCGNTAIPVCEFRSLYYNISRLDPQTNSSQIKDEFQTLNIVTPRVRPEDCSIGLLPRNHDKNRSMDVLPLDRCLPFLISVDGESSNYINAALMDSHKQPAAFVVTQHPLPNTVADFWRLVFDYNCSSVVMLNEMDTAQFCMQYWPEKTSGCYGPIQVEFVSADIDEDIIHRIFRICNMARPQDGYRIVQHLQYIGWPAYRDTPPSKRSLLKVVRRLEKWQEQYDGREGRTVVHCLNGGGRSGTFCAICSVCEMIQQQNIIDVFHIVKTLRNNKSNMVETLEQYKFVYEVALEYLSSF

SEQ ID NO: 69477 - protein, 1463 aa, Homo sapiens
  Payload ID: 13777
  Gene Symbol: PTPRT
  Gene Name: protein tyrosine phosphatase, receptor type, T
  Uniprot ID: O14522
  ENSP ID: ENSP00000362289
MASLAALALSLLLRLQLPPLPGARAQSAAGGCSFDEHYSNCGYSVALGTNGFTWEQINTWEKPMLDQAVPTGSFMMVNSSGRASGQKAHLLLPTLKENDTHCIDFHYYFSSRDRSSPGALNVYVKVNGGPQGNPVWNVSGVVTEGWVKAELAISTFWPHFYQVIFESVSLKGHPGYIAVDEVRVLAHPCRKAPHFLRLQNVEVNVGQNATFQCIAGGKWSQHDKLWLQQWNGRDTALMVTRVVNHRRFSATVSVADTAQRSVSKYRCVIRSDGGSGVSNYAELIVKEPPTPIAPPELLAVGATYLWIKPNANSIIGDGPIILKEVEYRTTTGTWAETHIVDSPNYKLWHLDPDVEYEIRVLLTRPGEGGTGPPGPPLTTRTKCADPVHGPQNVEIVDIRARQLTLQWEPFGYAVTRCHSYNLTVQYQYVFNQQQYEAEEVIQTSSHYTLRGLRPFMTIRLRLLLSNPEGRMESEELVVQTEEDVPGAVPLESIQGGPFEEKIYIQWKPPNETNGVITLYEINYKAVGSLDPSADLSSQRGKVFKLRNETHHLFVGLYPGTTYSFTIKASTAKGFGPPVTTRIATKISAPSMPEYDTDTPLNETDTTITVMLKPAQSRGAPVSVYQLVVKEERLQKSRRAADIIECFSVPVSYRNASSLDSLHYFAAELKPANLPVTQPFTVGDNKTYNGYWNPPLSPLKSYSIYFQALSKANGETKINCVRLATKAPMGSAQVTPGTPLCLLTTGASTQNSNTVEPEKQVDNTVKMAGVIAGLLMFIIILLGVMLTIKRRRNAYSYSYYLSQRKLAKKQKETQSGAQREMGPVASADKPTTKLSASRNDEGFSSSSQDVNGFTDGSRGELSQPTLTIQTHPYRTCDPVEMSYPRDQFQPAIRVADLLQHITQMKRGQGYGFKEEYEALPEGQTASWDTAKEDENRNKNRYGNIISYDHSRVRLLVLDGDPHSDYINANYIDGYHRPRHYIATQGPMQETVKDFWRMIWQENSASIVMVTNLVEVGRVKCVRYWPDDTEVYGDIKVTLIETEPLAEYVIRTFTVQKKGYHEIRELRLFHFTSWPDHGVPCYATGLLGFVRQVKFLNPPEAGPIVVHCSAGAGRTGCFIAIDTMLDMAENEGVVDIFNCVRELRAQRVNLVQTEEQYVFVHDAILEACLCGNTAIPVCEFRSLYYNISRLDPQTNSSQIKDEFQTLNIVTPRVRPEDCSIGLLPRNHDKNRSMDVLPLDRCLPFLISVDGESSNYINAALMDSHKQPAAFVVTQHPLPNTVADFWRLVFDYNCSSVVMLNEMDTAQFCMQYWPEKTSGCYGPIQVEFVSADIDEDIIHRIFRICNMARPQDGYRIVQHLQYIGWPAYRDTPPSKRSLLKVVRRLEKWQEQYDGREGRTVVHCLNGGGRSGTFCAICSVCEMIQQQNIIDVFHIVKTLRNNKSNMVETLEQYKFVYEVALEYLSSF

SEQ ID NO: 69478 - protein, 1460 aa, Homo sapiens
  Payload ID: 13777
  Gene Symbol: PTPRT
  Gene Name: protein tyrosine phosphatase, receptor type, T
  ENSP ID: ENSP00000362294
MASLAALALSLLLRLQLPPLPGARAQSAAGGCSFDEHYSNCGYSVALGTNGFTWEQINTWEKPMLDQAVPTGSFMMVNSSGRASGQKAHLLLPTLKENDTHCIDFHYYFSSRDRSSPGALNVYVKVNGGPQGNPVWNVSGVVTEGWVKAELAISTFWPHFYQVIFESVSLKGHPGYIAVDEVRVLAHPCRKAPHFLRLQNVEVNVGQNATFQCIAGGKWSQHDKLWLQQWNGRDTALMVTRVVNHRRFSATVSVADTAQRSVSKYRCVIRSDGGSGVSNYAELIVKEPPTPIAPPELLAVGATYLWIKPNANSIIGDGPIILKEVEYRTTTGTWAETHIVDSPNYKLWHLDPDVEYEIRVLLTRPGEGGTGPPGPPLTTRTKCADPVHGPQNVEIVDIRARQLTLQWEPFGYAVTRCHSYNLTVQYQYVFNQQQYEAEEVIQTSSHYTLRGLRPFMTIRLRLLLSNPEGRMESEELVVQTEEDVPGAVPLESIQGGPFEEKIYIQWKPPNETNGVITLYEINYKAVGSLDPSADLSSQRGKVFKLRNETHHLFVGLYPGTTYSFTIKASTAKGFGPPVTTRIATKISAPSMPEYDTDTPLNETDTTITVMLKPAQSRGAPVSVYQLVVKEERLQKSRRAADIIECFSVPVSYRNASSLDSLHYFAAELKPANLPVTQPFTVGDNKTYNGYWNPPLSPLKSYSIYFQALSKANGETKINCVRLATKAPMGSAQVTPGTPLCLLTTGASTQNSNTVEPEKQVDNTVKMAGVIAGLLMFIIILLGVMLTIKRRRNAYSYSYYLKLAKKQKETQSGAQREMGPVASADKPTTKLSASRNDEGFSSSSQDVNGFTDGSRGELSQPTLTIQTHPYRTCDPVEMSYPRDQFQPAIRVADLLQHITQMKRGQGYGFKEEYEALPEGQTASWDTAKEDENRNKNRYGNIISYDHSRVRLLVLDGDPHSDYINANYIDGYHRPRHYIATQGPMQETVKDFWRMIWQENSASIVMVTNLVEVGRVKCVRYWPDDTEVYGDIKVTLIETEPLAEYVIRTFTVQKKGYHEIRELRLFHFTSWPDHGVPCYATGLLGFVRQVKFLNPPEAGPIVVHCSAGAGRTGCFIAIDTMLDMAENEGVVDIFNCVRELRAQRVNLVQTEEQYVFVHDAILEACLCGNTAIPVCEFRSLYYNISRLDPQTNSSQIKDEFQTLNIVTPRVRPEDCSIGLLPRNHDKNRSMDVLPLDRCLPFLISVDGESSNYINAALMDSHKQPAAFVVTQHPLPNTVADFWRLVFDYNCSSVVMLNEMDTAQFCMQYWPEKTSGCYGPIQVEFVSADIDEDIIHRIFRICNMARPQDGYRIVQHLQYIGWPAYRDTPPSKRSLLKVVRRLEKWQEQYDGREGRTVVHCLNGGGRSGTFCAICSVCEMIQQQNIIDVFHIVKTLRNNKSNMVETLEQYKFVYEVALEYLSSF

SEQ ID NO: 69479 - protein, 1431 aa, Homo sapiens
  Payload ID: 13777
  Gene Symbol: PTPRT
  Gene Name: protein tyrosine phosphatase, receptor type, T
  ENSP ID: ENSP00000362297
MASLAALALSLLLRLQLPPLPGARAQSAAGGCSFDEHYSNCGYSVALGTNGFTWEQINTWEKPMLDQAVPTGSFMMVNSSGRASGQKAHLLLPTLKENDTHCIDFHYYFSSRDRSSPGALNVYVKVNGGPQGNPVWNVSGVVTEGWVKAELAISTFWPHFYQVIFESVSLKGHPGYIAVDEVRVLAHPCRKAPHFLRLQNVEVNVGQNATFQCIAGGKWSQHDKLWLQQWNGRDTALMVTRVVNHRRFSATVSVADTAQRSVSKYRCVIRSDGGSGVSNYAELIVKEPPTPIAPPELLAVGATYLWIKPNANSIIGDGPIILKEVEYRTTTGTWAETHIVDSPNYKLWHLDPDVEYEIRVLLTRPGEGGTGPPGPPLTTRTKCADPVHGPQNVEIVDIRARQLTLQWEPFGYAVTRCHSYNLTVQYQYVFNQQQYEAEEVIQTSSHYTLRGLRPFMTIRLRLLLSNPEGRMESEELVVQTEEDVPGAVPLESIQGGPFEEKIYIQWKPPNETNGVITLYEINYKAVGSLDPSADLSSQRGKVFKLRNETHHLFVGLYPGTTYSFTIKASTAKGFGPPVTTRIATKISAPSMPEYDTDTPLNETDTTITVMLKPAQSRGAPVSVYQLVVKEERLQKSRRAADIIECFSVPVSYRNASSLDSLHYFAAELKPANLPVTQPFTVGDNKTYNGYWNPPLSPLKSYSIYFQALSKANGETKINCVRLATKGASTQNSNTVEPEKQVDNTVKMAGVIAGLLMFIIILLGVMLTIKRRKLAKKQKETQSGAQREMGPVASADKPTTKLSASRNDEGFSSSSQDVNGFTDGSRGELSQPTLTIQTHPYRTCDPVEMSYPRDQFQPAIRVADLLQHITQMKRGQGYGFKEEYEALPEGQTASWDTAKEDENRNKNRYGNIISYDHSRVRLLVLDGDPHSDYINANYIDGYHRPRHYIATQGPMQETVKDFWRMIWQENSASIVMVTNLVEVGRVKCVRYWPDDTEVYGDIKVTLIETEPLAEYVIRTFTVQKKGYHEIRELRLFHFTSWPDHGVPCYATGLLGFVRQVKFLNPPEAGPIVVHCSAGAGRTGCFIAIDTMLDMAENEGVVDIFNCVRELRAQRVNLVQTEEQYVFVHDAILEACLCGNTAIPVCEFRSLYYNISRLDPQTNSSQIKDEFQTLNIVTPRVRPEDCSIGLLPRNHDKNRSMDVLPLDRCLPFLISVDGESSNYINAALMDSHKQPAAFVVTQHPLPNTVADFWRLVFDYNCSSVVMLNEMDTAQFCMQYWPEKTSGCYGPIQVEFVSADIDEDIIHRIFRICNMARPQDGYRIVQHLQYIGWPAYRDTPPSKRSLLKVVRRLEKWQEQYDGREGRTVVHCLNGGGRSGTFCAICSVCEMIQQQNIIDVFHIVKTLRNNKSNMVETLEQYKFVYEVALEYLSSF

SEQ ID NO: 69480 - protein, 313 aa, Homo sapiens
  Payload ID: 13777
  Gene Symbol: PTPRT
  Gene Name: protein tyrosine phosphatase, receptor type, T
  ENSP ID: ENSP00000480136
GSFMMVNSSGRASGQKAHLLLPTLKENDTHCIDFHYYFSSRDRSSPGALNVYVKVNGGPQGNPVWNVSGVVTEGWVKAELAISTFWPHFYQVIFESVSLKGHPGYIAVDEVRVLAHPCRKAPHFLRLQNVEVNVGQNATFQCIAGGKWSQHDKLWLQQWNGRDTALMVTRVVNHRRFSATVSVADTAQRSVSKYRCVIRSDGGSGVSNYAELIVKEPPTPIAPPELLAVGATYLWIKPNANSIIGDGPIILKEVEYRTTTGTWAETHIVDSPNYKLWHLDPDVEYEIRVLLTRPGEGGTGPPGPPLTTRTKCA

SEQ ID NO: 69481 - protein, 1059 aa, Homo sapiens [sequence omitted]

SEQ ID NO: 69482 - protein, 47 aa, Homo sapiens
  Payload ID: 13777
  Gene Symbol: PTPRT
  Gene Name: protein tyrosine phosphatase, receptor type, T
  ENSP ID: ENSP00000484248
MASLAALALSLLLRLQLPPLPGARAQSAAGVAVPLMSTTATVVIVWL

SEQ ID NO: 69483 - protein, 1076 aa, Homo sapiens
  Payload ID: 13777
  Gene Symbol: PTPRT
  Gene Name: protein tyrosine phosphatase, receptor type, T
  ENSP ID: ENSP00000484524
  MOD_RES (1)..(1): Any amino acid
XPVHGPQNVEIVDIRARQLTLQWEPFGYAVTRCHSYNLTVQYQYVFNQQQYEAEEVIQTSSHYTLRGLRPFMTIRLRLLLSNPEGRMESEELVVQTEEDVPGAVPLESIQGGPFEEKIYIQWKPPNETNGVITLYEINYKAVGSLDPSADLSSQRGKVFKLRNETHHLFVGLYPGTTYSFTIKASTAKGFGPPVTTRIATKISAPSMPEYDTDTPLNETDTTITVMLKPAQSRGAPVSVYQLVVKEERLQKSRRAADIIECFSVPVSYRNASSLDSLHYFAAELKPANLPVTQPFTVGDNKTYNGYWNPPLSPLKSYSIYFQALSKANGETKINCVRLATKAPMGSAQVTPGTPLCLLTTGASTQNSNTVEPEKQVDNTVKMAGVIAGLLMFIIILLGVMLTIKRRRNAYSYSYYLKLAKKQKETQSGAQREMGPVASADKPTTKLSASRNDEGFSSSSQDVNGFTDGSRGELSQPTLTIQTHPYRTCDPVEMSYPRDQFQPAIRVADLLQHITQMKRGQGYGFKEEYEALPEGQTASWDTAKEDENRNKNRYGNIISYDHSRVRLLVLDGDPHSDYINANYIDGYHRPRHYIATQGPMQETVKDFWRMIWQENSASIVMVTNLVEVGRVKCVRYWPDDTEVYGDIKVTLIETEPLAEYVIRTFTVQKKGYHEIRELRLFHFTSWPDHGVPCYATGLLGFVRQVKFLNPPEAGPIVVHCSAGAGRTGCFIAIDTMLDMAENEGVVDIFNCVRELRAQRVNLVQTEEQYVFVHDAILEACLCGNTAIPVCEFRSLYYNISRLDPQTNSSQIKDEFQTLNIVTPRVRPEDCSIGLLPRNHDKNRSMDVLPLDRCLPFLISVDGESSNYINAALMDSHKQPAAFVVTQHPLPNTVADFWRLVFDYNCSSVVMLNEMDTAQFCMQYWPEKTSGCYGPIQVEFVSADIDEDIIHRIFRICNMARPQDGYRIVQHLQYIGWPAYRDTPPSKRSLLKVVRRLEKWQEQYDGREGRTVVHCLNGGGRSGTFCAICSVCEMIQQQNIIDVFHIVKTLRNNKSNMVETLEQYKFVYEVALEYLSSF

SEQ ID NO: 69484 - protein, 1446 aa, Homo sapiens
  Payload ID: 13778
  Gene Symbol: PTPRU
  Gene Name: protein tyrosine phosphatase, receptor type, U
  Uniprot ID: Q92729
  ENSP ID: ENSP00000334941
MARAQALVLALTFQLCAPETETPAAGCTFEEASDPAVPCEYSQAQYDDFQWEQVRIHPGTRAPADLPHGSYLMVNTSQHAPGQRAHVIFQSLSENDTHCVQFSYFLYSRDGHSPGTLGVYVRVNGGPLGSAVWNMTGSHGRQWHQAELAVSTFWPNEYQVLFEALISPDRRGYMGLDDILLLSYPCAKAPHFSRLGDVEVNAGQNASFQCMAAGRAAEAERFLLQRQSGALVPAAGVRHISHRRFLATFPLAAVSRAEQDLYRCVSQAPRGAGVSNFAELIVKEPPTPIAPPQLLRAGPTYLIIQLNTNSIIGDGPIVRKEIEYRMARGPWAEVHAVSLQTYKLWHLDPDTEYEISVLLTRPGDGGTGRPGPPLISRTKCAEPMRAPKGLAFAEIQARQLTLQWEPLGYNVTRCHTYTVSLCYHYTLGSSHNQTIRECVKTEQGVSRYTIKNLLPYRNVHVRLVLTNPEGRKEGKEVTFQTDEDVPSGIAAESLTFTPLEDMIFLKWEEPQEPNGLITQYEISYQSIESSDPAVNVPGPRRTISKLRNETYHVFSNLHPGTTYLFSVRARTGKGFGQAALTEITTNISAPSFDYADMPSPLGESENTITVLLRPAQGRGAPISVYQVIVEEERARRLRREPGGQDCFPVPLTFEAALARGLVHYFGAELAASSLPEAMPFTVGDNQTYRGFWNPPLEPRKAYLIYFQAASHLKGETRLNCIRIARKAACKESKRPLEVSQRSEEMGLILGICAGGLAVLILLLGAIIVIIRKGRDHYAYSYYPKPVNMTKATVNYRQEKTHMMSAVDRSFTDQSTLQEDERLGLSFMDTHGYSTRGDQRSGGVTEASSLLGGSPRRPCGRKGSPYHTGQLHPAVRVADLLQHINQMKTAEGYGFKQEYESFFEGWDATKKKDKVKGSRQEPMPAYDRHRVKLHPMLGDPNADYINANYIDGYHRSNHFIATQGPKPEMVYDFWRMVWQEHCSSIVMITKLVEVGRVKCSRYWPEDSDTYGDIKIMLVKTETLAEYVVRTFALERRGYSARHEVRQFHFTAWPEHGVPYHATGLLAFIRRVKASTPPDAGPIVIHCSAGTGRTGCYIVLDVMLDMAECEGVVDIYNCVKTLCSRRVNMIQTEEQYIFIHDAILEACLCGETTIPVSEFKATYKEMIRIDPQSNSSQLREEFQTLNSVTPPLDVEECSIALLPRNRDKNRSMDVLPPDRCLPFLISTDGDSNNYINAALTDSYTRSAAFIVTLHPLQSTTPDFWRLVYDYGCTSIVMLNQLNQSNSAWPCLQYWPEPGRQQYGLMEVEFMSGTADEDLVARVFRVQNISRLQEGHLLVRHFQFLRWSAYRDTPDSKKAFLHLLAEVDKWQAESGDGRTIVHCLNGGGRSGTFCACATVLEMIRCHNLVDVFFAAKTLRNYKPNMVETMDQYHFCYDVALEYLEGLESR

SEQ ID NO: 69485 - protein, 1436 aa, Homo sapiens
  Payload ID: 13778
  Gene Symbol: PTPRU
  Gene Name: protein tyrosine phosphatase, receptor type, U
  Uniprot ID: Q92729
  ENSP ID: ENSP00000362884
MARAQALVLALTFQLCAPETETPAAGCTFEEASDPAVPCEYSQAQYDDFQWEQVRIHPGTRAPADLPHGSYLMVNTSQHAPGQRAHVIFQSLSENDTHCVQFSYFLYSRDGHSPGTLGVYVRVNGGPLGSAVWNMTGSHGRQWHQAELAVSTFWPNEYQVLFEALISPDRRGYMGLDDILLLSYPCAKAPHFSRLGDVEVNAGQNASFQCMAAGRAAEAERFLLQRQSGALVPAAGVRHISHRRFLATFPLAAVSRAEQDLYRCVSQAPRGAGVSNFAELIVKEPPTPIAPPQLLRAGPTYLIIQLNTNSIIGDGPIVRKEIEYRMARGPWAEVHAVSLQTYKLWHLDPDTEYEISVLLTRPGDGGTGRPGPPLISRTKCAEPMRAPKGLAFAEIQARQLTLQWEPLGYNVTRCHTYTVSLCYHYTLGSSHNQTIRECVKTEQGVSRYTIKNLLPYRNVHVRLVLTNPEGRKEGKEVTFQTDEDVPSGIAAESLTFTPLEDMIFLKWEEPQEPNGLITQYEISYQSIESSDPAVNVPGPRRTISKLRNETYHVFSNLHPGTTYLFSVRARTGKGFGQAALTEITTNISAPSFDYADMPSPLGESENTITVLLRPAQGRGAPISVYQVIVEEERARRLRREPGGQDCFPVPLTFEAALARGLVHYFGAELAASSLPEAMPFTVGDNQTYRGFWNPPLEPRKAYLIYFQAASHLKGETRLNCIRIARKAACKESKRPLEVSQRSEEMGLILGICAGGLAVLILLLGAIIVIIRKGKPVNMTKATVNYRQEKTHMMSAVDRSFTDQSTLQEDERLGLSFMDTHGYSTRGDQRSGGVTEASSLLGGSPRRPCGRKGSPYHTGQLHPAVRVADLLQHINQMKTAEGYGFKQEYESFFEGWDATKKKDKVKGSRQEPMPAYDRHRVKLHPMLGDPNADYINANYIDGYHRSNHFIATQGPKPEMVYDFWRMVWQEHCSSIVMITKLVEVGRVKCSRYWPEDSDTYGDIKIMLVKTETLAEYVVRTFALERRGYSARHEVRQFHFTAWPEHGVPYHATGLLAFIRRVKASTPPDAGPIVIHCSAGTGRTGCYIVLDVMLDMAECEGVVDIYNCVKTLCSRRVNMIQTEEQYIFIHDAILEACLCGETTIPVSEFKATYKEMIRIDPQSNSSQLREEFQTLNSVTPPLDVEECSIALLPRNRDKNRSMDVLPPDRCLPFLISTDGDSNNYINAALTDSYTRSAAFIVTLHPLQSTTPDFWRLVYDYGCTSIVMLNQLNQSNSAWPCLQYWPEPGRQQYGLMEVEFMSGTADEDLVARVFRVQNISRLQEGHLLVRHFQFLRWSAYRDTPDSKKAFLHLLAEVDKWQAESGDGRTIVHCLNGGGRSGTFCACATVLEMIRCHNLVDVFFAAKTLRNYKPNMVETMDQYHFCYDVALEYLEGLESR

SEQ ID NO: 69486 - protein, 1433 aa, Homo sapiens
  Payload ID: 13778
  Gene Symbol: PTPRU
  Gene Name: protein tyrosine phosphatase, receptor type, U
  Uniprot ID: Q92729
  ENSP ID: ENSP00000392332
MARAQALVLALTFQLCAPETETPAAGCTFEEASDPAVPCEYSQAQYDDFQWEQVRIHPGTRAPADLPHGSYLMVNTSQHAPGQRAHVIFQSLSENDTHCVQFSYFLYSRDGHSPGTLGVYVRVNGGPLGSAVWNMTGSHGRQWHQAELAVSTFWPNEYQVLFEALISPDRRGYMGLDDILLLSYPCAKAPHFSRLGDVEVNAGQNASFQCMAAGRAAEAERFLLQRQSGALVPAAGVRHISHRRFLATFPLAAVSRAEQDLYRCVSQAPRGAGVSNFAELIVKEPPTPIAPPQLLRAGPTYLIIQLNTNSIIGDGPIVRKEIEYRMARGPWAEVHAVSLQTYKLWHLDPDTEYEISVLLTRPGDGGTGRPGPPLISRTKCAEPMRAPKGLAFAEIQARQLTLQWEPLGYNVTRCHTYTVSLCYHYTLGSSHNQTIRECVKTEQGVSRYTIKNLLPYRNVHVRLVLTNPEGRKEGKEVTFQTDEDVPSGIAAESLTFTPLEDMIFLKWEEPQEPNGLITQYEISYQSIESSDPAVNVPGPRRTISKLRNETYHVFSNLHPGTTYLFSVRARTGKGFGQAALTEITTNISAPSFDYADMPSPLGESENTITVLLRPAQGRGAPISVYQVIVEEERARRLRREPGGQDCFPVPLTFEAALARGLVHYFGAELAASSLPEAMPFTVGDNQTYRGFWNPPLEPRKAYLIYFQAASHLKGETRLNCIRIARKAACKESKRPLEVSQRSEEMGLILGICAGGLAVLILLLGAIIVIIRKGKPVNMTKATVNYRQEKTHMMSAVDRSFTDQSTLQEDERLGLSFMDTHGYSTRGDQRSGGVTEASSLLGGSPRRPCGRKGSPYHTGQLHPAVRVADLLQHINQMKTAEGYGFKQEYESFFEGWDATKKKDKVKGSRQEPMPAYDRHRVKLHPMLGDPNADYINANYIDGYHRSNHFIATQGPKPEMVYDFWRMVWQEHCSSIVMITKLVEVKCSRYWPEDSDTYGDIKIMLVKTETLAEYVVRTFALERRGYSARHEVRQFHFTAWPEHGVPYHATGLLAFIRRVKASTPPDAGPIVIHCSAGTGRTGCYIVLDVMLDMAECEGVVDIYNCVKTLCSRRVNMIQTEEQYIFIHDAILEACLCGETTIPVSEFKATYKEMIRIDPQSNSSQLREEFQTLNSVTPPLDVEECSIALLPRNRDKNRSMDVLPPDRCLPFLISTDGDSNNYINAALTDSYTRSAAFIVTLHPLQSTTPDFWRLVYDYGCTSIVMLNQLNQSNSAWPCLQYWPEPGRQQYGLMEVEFMSGTADEDLVARVFRVQNISRLQEGHLLVRHFQFLRWSAYRDTPDSKKAFLHLLAEVDKWQAESGDGRTIVHCLNGGGRSGTFCACATVLEMIRCHNLVDVFFAAKTLRNYKPNMVETMDQYHFCYDVALEYLEGLESR

SEQ ID NO: 69487 - protein, 1440 aa, Homo sapiens
  Payload ID: 13778
  Gene Symbol: PTPRU
  Gene Name: protein tyrosine phosphatase, receptor type, U
  Uniprot ID: Q92729
  ENSP ID: ENSP00000432906
MARAQALVLALTFQLCAPETETPAAGCTFEEASDPAVPCEYSQAQYDDFQWEQVRIHPGTRAPADLPHGSYLMVNTSQHAPGQRAHVIFQSLSENDTHCVQFSYFLYSRDGHSPGTLGVYVRVNGGPLGSAVWNMTGSHGRQWHQAELAVSTFWPNEYQVLFEALISPDRRGYMGLDDILLLSYPCAKAPHFSRLGDVEVNAGQNASFQCMAAGRAAEAERFLLQRQSGALVPAAGVRHISHRRFLATFPLAAVSRAEQDLYRCVSQAPRGAGVSNFAELIVKEPPTPIAPPQLLRAGPTYLIIQLNTNSIIGDGPIVRKEIEYRMARGPWAEVHAVSLQTYKLWHLDPDTEYEISVLLTRPGDGGTGRPGPPLISRTKCAEPMRAPKGLAFAEIQARQLTLQWEPLGYNVTRCHTYTVSLCYHYTLGSSHNQTIRECVKTEQGVSRYTIKNLLPYRNVHVRLVLTNPEGRKEGKEVTFQTDEDVPSGIAAESLTFTPLEDMIFLKWEEPQEPNGLITQYEISYQSIESSDPAVNVPGPRRTISKLRNETYHVFSNLHPGTTYLFSVRARTGKGFGQAALTEITTNISAPSFDYADMPSPLGESENTITVLLRPAQGRGAPISVYQVIVEEERARRLRREPGGQDCFPVPLTFEAALARGLVHYFGAELAASSLPEAMPFTVGDNQTYRGFWNPPLEPRKAYLIYFQAASHLKGETRLNCIRIARKAACKESKRPLEVSQRSEEMGLILGICAGGLAVLILLLGAIIVIIRKGKPVNMTKATVNYRQEKTHMMSAVDRSFTDQSTLQEDERLGLSFMDTHGYSTRGDQRSGGVTEASSLLGGSPRRPCGRKGSPYHTGQLHPAVRVADLLQHINQMKTAEGYGFKQEYESFFEGWDATKKKDKVKGSRQEPMPAYDRHRVKLHPMLGDPNADYINANYIDIRINREGYHRSNHFIATQGPKPEMVYDFWRMVWQEHCSSIVMITKLVEVGRVKCSRYWPEDSDTYGDIKIMLVKTETLAEYVVRTFALERRGYSARHEVRQFHFTAWPEHGVPYHATGLLAFIRRVKASTPPDAGPIVIHCSAGTGRTGCYIVLDVMLDMAECEGVVDIYNCVKTLCSRRVNMIQTEEQYIFIHDAILEACLCGETTIPVSEFKATYKEMIRIDPQSNSSQLREEFQTLNSVTPPLDVEECSIALLPRNRDKNRSMDVLPPDRCLPFLISTDGDSNNYINAALTDSYTRSAAFIVTLHPLQSTTPDFWRLVYDYGCTSIVMLNQLNQSNSAWPCLQYWPEPGRQQYGLMEVEFMSGTADEDLVARVFRVQNISREGHLLVRHFQFLRWSAYRDTPDSKKAFLHLLAEVDKWQAESGDGRTIVHCLNGGGRSGTFCACATVLEMIRCHNLVDVFFAAKTLRNYKPNMVETMDQYHFCYDVALEYLEGLESR

SEQ ID NO: 69488 - protein, 2315 aa, Homo sapiens
  Payload ID: 13779
  Gene Symbol: PTPRZ1
  Gene Name: protein tyrosine phosphatase, receptor-type, Z polypeptide 1
  Uniprot ID: P23471
  ENSP ID: ENSP00000377047
MRILKRFLACIQLLCVCRLDWANGYYRQQRKLVEEIGWSYTGALNQKNWGKKYPTCNSPKQSPINIDEDLTQVNVNLKKLKFQGWDKTSLENTFIHNTGKTVEINLTNDYRVSGGVSEMVFKASKITFHWGKCNMSSDGSEHSLEGQKFPLEMQIYCFDADRFSSFEEAVKGKGKLRALSILFEVGTEENLDFKAIIDGVESVSRFGKQAALDPFILLNLLPNSTDKYYIYNGSLTSPPCTDTVDWIVFKDTVSISESQLAVFCEVLTMQQSGYVMLMDYLQNNFREQQYKFSRQVFSSYTGKEEIHEAVCSSEPENVQADPENYTSLLVTWERPRVVYDTMIEKFAVLYQQLDGEDQTKHEFLTDGYQDLGAILNNLLPNMSYVLQIVAICTNGLYGKYSDQLIVDMPTDNPELDLFPELIGTEEIIKEEEEGKDIEEGAIVNPGRDSATNQIRKKEPQISTTTHYNRIGTKYNEAKTNRSPTRGSEFSGKGDVPNTSLNSTSQPVTKLATEKDISLTSQTVTELPPHTVEGTSASLNDGSKTVLRSPHMNLSGTAESLNTVSITEYEEESLLTSFKLDTGAEDSSGSSPATSAIPFISENISQGYIFSSENPETITYDVLIPESARNASEDSTSSGSEESLKDPSMEGNVWFPSSTDITAQPDVGSGRESFLQTNYTEIRVDESEKTTKSFSAGPVMSQGPSVTDLEMPHYSTFAYFPTEVTPHAFTPSSRQQDLVSTVNVVYSQTTQPVYNGETPLQPSYSSEVFPLVTPLLLDNQILNTTPAASSSDSALHATPVFPSVDVSFESILSSYDGAPLLPFSSASFSSELFRHLHTVSQILPQVTSATESDKVPLHASLPVAGGDLLLEPSLAQYSDVLSTTHAASETLEFGSESGVLYKTLMFSQVEPPSSDAMMHARSSGPEPSYALSDNEGSQHIFTVSYSSAIPVHDSVGVTYQGSLFSGPSHIPIPKSSLITPTASLLQPTHALSGDGEWSGASSDSEFLLPDTDGLTALNISSPVSVAEFTYTTSVFGDDNKALSKSEIIYGNETELQIPSFNEMVYPSESTVMPNMYDNVNKLNASLQETSVSISSTKGMFPGSLAHTTTKVFDHEISQVPENNFSVQPTHTVSQASGDTSLKPVLSANSEPASSDPASSEMLSPSTQLLFYETSASFSTEVLLQPSFQASDVDTLLKTVLPAVPSDPILVETPKVDKISSTMLHLIVSNSASSENMLHSTSVPVFDVSPTSHMHSASLQGLTISYASEKYEPVLLKSESSHQVVPSLYSNDELFQTANLEINQAHPPKGRHVFATPVLSIDEPLNTLINKLIHSDEILTSTKSSVTGKVFAGIPTVASDTFVSTDHSVPIGNGHVAITAVSPHRDGSVTSTKLLFPSKATSELSHSAKSDAGLVGGGEDGDTDDDGDDDDDDRGSDGLSIHKCMSCSSYRESQEKVMNDSDTHENSLMDQNNPISYSLSENSEEDNRVTSVSSDSQTGMDRSPGKSPSANGLSQKHNDGKEENDIQTGSALLPLSPESKAWAVLTSDEESGSGQGTSDSLNENETSTDFSFADTNEKDADGILAAGDSEITPGFPQSPTSSVTSENSEVFHVSEAEASNSSHESRIGLAEGLESEKKAVIPLVIVSALTFICLVVLVGILIYWRKCFQTAHFYLEDSTSPRVISTPPTPIFPISDDVGAIPIKHFPKHVADLHASSGFTEEFETLKEFYQEVQSCTVDLGITADSSNHPDNKHKNRYINIVAYDHSRVKLAQLAEKDGKLTDYINANYVDGYNRPKAYIAAQGPLKSTAEDFWRMIWEHNVEVIVMITNLVEKGRRKCDQYWPADGSEEYGNFLVTQKSVQVLAYYTVRNFTLRNTKIKKGSQKGRPSGRVVTQYHYTQWPDMGVPEYSLPVLTFVRKAAYAKRHAVGPVVVHCSAGVGRTGTYIVLDSMLQQIQHEGTVNIFGFLKHIRSQRNYLVQTEEQYVFIHDTLVEAILSKETEVLDSHIHAYVNALLIPGPAGKTKLEKQFQLLSQSNIQQSDYSAALKQCNREKNRTSSIIPVERSRVGISSLSGEGTDYINASYIMGYYQSNEFIITQHPLLHTIKDFWRMIWDHNAQLVVMIPDGQNMAEDEFVYWPNKDEPINCESFKVTLMAEEHKCLSNEEKLIIQDFILEATQDDYVLEVRHFQCPKWPNPDSPISKTFELISVIKEEAANRDGPMIVHDEHGGVTAGTFCALTTLMHQLEKENSVDVYQVAKMINLMRPGVFADIEQYQFLYKVILSLVSTRQEENPSTSLDSNGAALPDGNIAESLESLV

SEQ ID NO: 69489 - protein, 1448 aa, Homo sapiens
  Payload ID: 13779
  Gene Symbol: PTPRZ1
  Gene Name: protein tyrosine phosphatase, receptor-type, Z polypeptide 1
  Uniprot ID: P23471
  ENSP ID: ENSP00000410000
MRILKRFLACIQLLCVCRLDWANGYYRQQRKLVEEIGWSYTGALNQKNWGKKYPTCNSPKQSPINIDEDLTQVNVNLKKLKFQGWDKTSLENTFIHNTGKTVEINLTNDYRVSGGVSEMVFKASKITFHWGKCNMSSDGSEHSLEGQKFPLEMQIYCFDADRFSSFEEAVKGKGKLRALSILFEVGTEENLDFKAIIDGVESVSRFGKQAALDPFILLNLLPNSTDKYYIYNGSLTSPPCTDTVDWIVFKDTVSISESQLAVFCEVLTMQQSGYVMLMDYLQNNFREQQYKFSRQVFSSYTGKEEIHEAVCSSEPENVQADPENYTSLLVTWERPRVVYDTMIEKFAVLYQQLDGEDQTKHEFLTDGYQDLGAILNNLLPNMSYVLQIVAICTNGLYGKYSDQLIVDMPTDNPELDLFPELIGTEEIIKEEEEGKDIEEGAIVNPGRDSATNQIRKKEPQISTTTHYNRIGTKYNEAKTNRSPTRGSEFSGKGDVPNTSLNSTSQPVTKLATEKDISLTSQTVTELPPHTVEGTSASLNDGSKTVLRSPHMNLSGTAESLNTVSITEYEEESLLTSFKLDTGAEDSSGSSPATSAIPFISENISQGYIFSSENPETITYDVLIPESARNASEDSTSSGSEESLKDPSMEGNVWFPSSTDITAQPDVGSGRESFLQTNYTEIRVDESEKTTKSFSAGPVMSQGPSVTDLEMPHYSTFAYFPTEVTPHAFTPSSRQQDLVSTVNVVYSQTTQPVYNEASNSSHESRIGLAEGLESEKKAVIPLVIVSALTFICLVVLVGILIYWRKCFQTAHFYLEDSTSPRVISTPPTPIFPISDDVGAIPIKHFPKHVADLHASSGFTEEFEEVQSCTVDLGITADSSNHPDNKHKNRYINIVAYDHSRVKLAQLAEKDGKLTDYINANYVDGYNRPKAYIAAQGPLKSTAEDFWRMIWEHNVEVIVMITNLVEKGRRKCDQYWPADGSEEYGNFLVTQKSVQVLAYYTVRNFTLRNTKIKKGSQKGRPSGRVVTQYHYTQWPDMGVPEYSLPVLTFVRKAAYAKRHAVGPVVVHCSAGVGRTGTYIVLDSMLQQIQHEGTVNIFGFLKHIRSQRNYLVQTEEQYVFIHDTLVEAILSKETEVLDSHIHAYVNALLIPGPAGKTKLEKQFQLLSQSNIQQSDYSAALKQCNREKNRTSSIIPVERSRVGISSLSGEGTDYINASYIMGYYQSNEFIITQHPLLHTIKDFWRMIWDHNAQLVVMIPDGQNMAEDEFVYWPNKDEPINCESFKVTLMAEEHKCLSNEEKLIIQDFILEATQDDYVLEVRHFQCPKWPNPDSPISKTFELISVIKEEAANRDGPMIVHDEHGGVTAGTFCALTTLMHQLEKENSVDVYQVAKMINLMRPGVFADIEQYQFLYKVILSLVSTRQEENPSTSLDSNGAALPDGNIAESLESLV

SEQ ID NO: 69490 - protein, 422 aa, Homo sapiens
  Payload ID: 13780
  Gene Symbol: PROZ
  Gene Name: protein Z, vitamin K-dependent plasma glycoprotein
  Uniprot ID: P22891
  ENSP ID: ENSP00000344458
MAGCVPLLQGLVLVLALHRVEPSATSLKERHGLHSDSACTGVQESLFLPASKANDVLVRWKRAGSYLLEELFEGNLEKECYEEICVYEEAREVFENEVVTDEFWRRYKGGSPCISQPCLHNGSCQDSIWGYTCTCSPGYEGSNCELAKNECHPERTDGCQHFCLPGQESYTCSCAQGYRLGEDHKQCVPHDQCACGVLTSEKRAPDLQDLPWQVKLTNSEGKDFCGGVIIRENFVLTTAKCSLLHRNITVKTYFNRTSQDPLMIKITHVHVHMRYDADAGENDLSLLELEWPIQCPGAGLPVCTPEKDFAEHLLIPRTRGLLSGWARNGTDLGNSLTTRPVTLVEGEECGQVLNVTVTTRTYCERSSVAAMHWMDGSVVTREHRGSWFLTGVLGSQPVGGQAHMVLVTKVSRYSLWFKQIMN

SEQ ID NO: 69491 - protein, 400 aa, Homo sapiens
  Payload ID: 13780
  Gene Symbol: PROZ
  Gene Name: protein Z, vitamin K-dependent plasma glycoprotein
  Uniprot ID: P22891
  ENSP ID: ENSP00000364697
MAGCVPLLQGLVLVLALHRVEPSVFLPASKANDVLVRWKRAGSYLLEELFEGNLEKECYEEICVYEEAREVFENEVVTDEFWRRYKGGSPCISQPCLHNGSCQDSIWGYTCTCSPGYEGSNCELAKNECHPERTDGCQHFCLPGQESYTCSCAQGYRLGEDHKQCVPHDQCACGVLTSEKRAPDLQDLPWQVKLTNSEGKDFCGGVIIRENFVLTTAKCSLLHRNITVKTYFNRTSQDPLMIKITHVHVHMRYDADAGENDLSLLELEWPIQCPGAGLPVCTPEKDFAEHLLIPRTRGLLSGWARNGTDLGNSLTTRPVTLVEGEECGQVLNVTVTTRTYCERSSVAAMHWMDGSVVTREHRGSWFLTGVLGSQPVGGQAHMVLVTKVSRYSLWFKQIMN

SEQ ID NO: 69492 - protein, 127 aa, Homo sapiens; identical to SEQ ID NO: 61800
  Payload ID: 13781
  Gene Symbol:
  Gene Name: Protein-arginine deiminase type-4  [Source:UniProtKB/Swiss-Prot
  Acc:Q9UM07]
  ENSP ID: ENSP00000486726

SEQ ID NO: 69493 - protein, 663 aa, Homo sapiens; identical to SEQ ID NO: 61799
  Payload ID: 13781
  Gene Symbol:
  Gene Name: Protein-arginine deiminase type-4  [Source:UniProtKB/Swiss-Prot
  Acc:Q9UM07]
  Uniprot ID: Q9UM07
  ENSP ID: ENSP00000487021

SEQ ID NO: 69494 - protein, 694 aa, Homo sapiens; identical to SEQ ID NO: 61801
  Payload ID: 13782
  Gene Symbol:
  Gene Name: Protein-arginine deiminase type-6  [Source:UniProtKB/Swiss-Prot
  Acc:Q6TGC4]
  Uniprot ID: Q6TGC4
  ENSP ID: ENSP00000485805

SEQ ID NO: 69495 - protein, 256 aa, Homo sapiens
  Payload ID: 13783
  Gene Symbol: PRTN3
  Gene Name: proteinase 3
  Uniprot ID: P24158
  ENSP ID: ENSP00000234347
MAHRPPSPALASVLLALLLSGAARAAEIVGGHEAQPHSRPYMASLQMRGNPGSHFCGGTLIHPSFVLTAAHCLRDIPQRLVNVVLGAHNVRTQEPTQQHFSVAQVFLNNYDAENKLNDVLLIQLSSPANLSASVATVQLPQQDQPVPHGTQCLAMGWGRVGAHDPPAQVLQELNVTVVTFFCRPHNICTFVPRRKAGICFGDSGGPLICDGIIQGIDSFVIWGCATRLFPDFFTRVALYVDWIRSTLRRVEAKGRP

SEQ ID NO: 69496 - protein, 215 aa, Homo sapiens
  Payload ID: 13783
  Gene Symbol: PRTN3
  Gene Name: proteinase 3
  ENSP ID: ENSP00000475174
MASLQMRGNPGSHFCGGTLIHPSFVLTAAHCLRDIPQRLVNVVLGAHNVRTQEPTQQHFSVAQVFLNNYDAENKLNDVLLIQLSSPANLSASVATVQLPQQDQPVPHGTQCLAMGWGRVGAHDPPAQVLQELNVTVVTFFCRPHNICTFVPRRKAGICFGDSGGPLICDGIIQGIDSFVIWGCATRLFPDFFTRVALYVDWIRSTLRRVEAKGRP

SEQ ID NO: 69497 - protein, 215 aa, Homo sapiens; identical to SEQ ID NO: 69496
  Payload ID: 13783
  Gene Symbol: PRTN3
  Gene Name: proteinase 3
  ENSP ID: ENSP00000478164

SEQ ID NO: 69498 - protein, 256 aa, Homo sapiens; identical to SEQ ID NO: 69495
  Payload ID: 13783
  Gene Symbol: PRTN3
  Gene Name: proteinase 3
  Uniprot ID: P24158
  ENSP ID: ENSP00000478977

SEQ ID NO: 69499 - protein, 82 aa, Homo sapiens; identical to SEQ ID NO: 37553
  Payload ID: 13784
  Gene Symbol:
  Gene Name: Protein-cysteine N-palmitoyltransferase HHAT  [Source:UniProtKB/Swiss-Prot
  Acc:Q5VTY9]
  ENSP ID: ENSP00000485903

SEQ ID NO: 69500 - protein, 493 aa, Homo sapiens; identical to SEQ ID NO: 37547
  Payload ID: 13784
  Gene Symbol:
  Gene Name: Protein-cysteine N-palmitoyltransferase HHAT  [Source:UniProtKB/Swiss-Prot
  Acc:Q5VTY9]
  Uniprot ID: Q5VTY9
  ENSP ID: ENSP00000486054

SEQ ID NO: 69501 - protein, 493 aa, Homo sapiens; identical to SEQ ID NO: 37547
  Payload ID: 13784
  Gene Symbol:
  Gene Name: Protein-cysteine N-palmitoyltransferase HHAT  [Source:UniProtKB/Swiss-Prot
  Acc:Q5VTY9]
  Uniprot ID: Q5VTY9
  ENSP ID: ENSP00000486128

SEQ ID NO: 69502 - protein, 183 aa, Homo sapiens; identical to SEQ ID NO: 37548
  Payload ID: 13784
  Gene Symbol:
  Gene Name: Protein-cysteine N-palmitoyltransferase HHAT  [Source:UniProtKB/Swiss-Prot
  Acc:Q5VTY9]
  ENSP ID: ENSP00000486378

SEQ ID NO: 69503 - protein, 494 aa, Homo sapiens; identical to SEQ ID NO: 37552
  Payload ID: 13784
  Gene Symbol:
  Gene Name: Protein-cysteine N-palmitoyltransferase HHAT  [Source:UniProtKB/Swiss-Prot
  Acc:Q5VTY9]
  Uniprot ID: Q5VTY9
  ENSP ID: ENSP00000486611

SEQ ID NO: 69504 - protein, 356 aa, Homo sapiens; identical to SEQ ID NO: 37555
  Payload ID: 13784
  Gene Symbol:
  Gene Name: Protein-cysteine N-palmitoyltransferase HHAT  [Source:UniProtKB/Swiss-Prot
  Acc:Q5VTY9]
  Uniprot ID: Q5VTY9
  ENSP ID: ENSP00000486634

SEQ ID NO: 69505 - protein, 207 aa, Homo sapiens; identical to SEQ ID NO: 37550
  Payload ID: 13784
  Gene Symbol:
  Gene Name: Protein-cysteine N-palmitoyltransferase HHAT  [Source:UniProtKB/Swiss-Prot
  Acc:Q5VTY9]
  ENSP ID: ENSP00000487124

SEQ ID NO: 69506 - protein, 493 aa, Homo sapiens; identical to SEQ ID NO: 37547
  Payload ID: 13784
  Gene Symbol:
  Gene Name: Protein-cysteine N-palmitoyltransferase HHAT  [Source:UniProtKB/Swiss-Prot
  Acc:Q5VTY9]
  Uniprot ID: Q5VTY9
  ENSP ID: ENSP00000487400

SEQ ID NO: 69507 - protein, 428 aa, Homo sapiens; identical to SEQ ID NO: 37554
  Payload ID: 13784
  Gene Symbol:
  Gene Name: Protein-cysteine N-palmitoyltransferase HHAT  [Source:UniProtKB/Swiss-Prot
  Acc:Q5VTY9]
  Uniprot ID: Q5VTY9
  ENSP ID: ENSP00000487414

SEQ ID NO: 69508 - protein, 761 aa, Homo sapiens
  Payload ID: 13785
  Gene Symbol: PRKRIR
  Gene Name: protein-kinase, interferon-inducible double stranded RNA dependent inhibitor, repressor of (P58 repressor)
  Uniprot ID: O43422
  ENSP ID: ENSP00000260045
MPNFCAAPNCTRKSTQSDLAFFRFPRDPARCQKWVENCRRADLEDKTPDQLNKHYRLCAKHFETSMICRTSPYRTVLRDNAIPTIFDLTSHLNNPHSRHRKRIKELSEDEIRTLKQKKIDETSEQEQKHKETNNSNAQNPSEEEGEGQDEDILPLTLEEKENKEYLKSLFEILILMGKQNIPLDGHEADEIPEGLFTPDNFQALLECRINSGEEVLRKRFETTAVNTLFCSKTQQRQMLEICESCIREETLREVRDSHFFSIITDDVVDIAGEEHLPVLVRFVDESHNLREEFIGFLPYEADAEILAVKFHTMITEKWGLNMEYCRGQAYIVSSGFSSKMKVVASRLLEKYPQAIYTLCSSCALNMWLAKSVPVMGVSVALGTIEEVCSFFHRSPQLLLELDNVISVLFQNSKERGKELKEICHSQWTGRHDAFEILVELLQALVLCLDGINSDTNIRWNNYIAGRAFVLCSAVSDFDFIVTIVVLKNVLSFTRAFGKNLQGQTSDVFFAAGSLTAVLHSLNEVMENIEVYHEFWFEEATNLATKLDIQMKLPGKFRRAHQGNLESQLTSESYYKETLSVPTVEHIIQELKDIFSEQHLKALKCLSLVPSVMGQLKFNTSEEHHADMYRSDLPNPDTLSAELHCWRIKWKHRGKDIELPSTIYEALHLPDIKFFPNVYALLKVLCILPVMKVENERYENGRKRLKAYLRNTLTDQRSSNLALLNINFDIKHDLDLMVDTYIKLYTSKSELPTDNSETVENT

SEQ ID NO: 69509 - protein, 79 aa, Homo sapiens
  Payload ID: 13785
  Gene Symbol: PRKRIR
  Gene Name: protein-kinase, interferon-inducible double stranded RNA dependent inhibitor, repressor of (P58 repressor)
  ENSP ID: ENSP00000433966
MPNFCAAPNCTRKSTQSDLAFFRFPRDPARCQKWVENCRRADLEDKTPDQLNKHYRLCAKHFETSMICRTIHFAEASEN

SEQ ID NO: 69510 - protein, 285 aa, Homo sapiens
  Payload ID: 13786
  Gene Symbol: PCMT1
  Gene Name: protein-L-isoaspartate (D-aspartate) O-methyltransferase
  ENSP ID: ENSP00000356348
MPGARSGGSGGDGSNSGSYSGDASGAVTVWEVVSLLGKLLGTVVALKVVLYLLRVCLAMAWKSGGASHSELIHNLRKNGIIKTDKVFEVMLATDRSHYAKCNPYMDSPQSIGFQATISAPHMHAYALELLFDQLHEGAKALDVGSGSGILTACFARMVGCTGKVIGIDHIKELVDDSVNNVRKDDPTLLSSGRVQLVVGDGRMGYAEEAPYDAIHVGAAAPVVPQALIDQLKPGGRLILPVGPAGGNQMLEQYDKLQDGSIKMKPLMGVIYVPLTDKEKQWSRWK

SEQ ID NO: 69511 - protein, 250 aa, Homo sapiens
  Payload ID: 13786
  Gene Symbol: PCMT1
  Gene Name: protein-L-isoaspartate (D-aspartate) O-methyltransferase
  Uniprot ID: P22061
  ENSP ID: ENSP00000356350
MPGARSGGSGGDGSNSGSYSGDASGAVTVWEVVSLLGKLLGTVVALKVVLYLLRVCLAMAWKSGGASHSELIHNLRSFQATISAPHMHAYALELLFDQLHEGAKALDVGSGSGILTACFARMVGCTGKVIGIDHIKELVDDSVNNVRKDDPTLLSSGRVQLVVGDGRMGYAEEAPYDAIHVGAAAPVVPQALIDQLKPGGRLILPVGPAGGNQMLEQYDKLQDGSIKMKPLMGVIYVPLTDKEKQWSRWK

SEQ ID NO: 69512 - protein, 286 aa, Homo sapiens
  Payload ID: 13786
  Gene Symbol: PCMT1
  Gene Name: protein-L-isoaspartate (D-aspartate) O-methyltransferase
  ENSP ID: ENSP00000356354
MPGARSGGSGGDGSNSGSYSGDASGAVTVWEVVSLLGKLLGTVVALKVVLYLLRVCLAMAWKSGGASHSELIHNLRKNGIIKTDKVFEVMLATDRSHYAKCNPYMDSPQSIGFQATISAPHMHAYALELLFDQLHEGAKALDVGSGSGILTACFARMVGCTGKVIGIDHIKELVDDSVNNVRKDDPTLLSSGRVQLVVGDGRMGYAEEAPYDAIHVGAAAPVVPQALIDQLKPGGRLILPVGPAGGNQMLEQYDKLQDGSIKMKPLMGVIYVPLTDKEKQWSRDEL

SEQ ID NO: 69513 - protein, 130 aa, Homo sapiens
  Payload ID: 13786
  Gene Symbol: PCMT1
  Gene Name: protein-L-isoaspartate (D-aspartate) O-methyltransferase
  ENSP ID: ENSP00000417112
MPGARSGGSGGDGSNSGSYSGDASGAVTVWEVVSLLGKLLGTVVALKVVLYLLRVCLAMAWKSGGASHSELIHNLRKNGIIKTDKVFEVMLATDRSHYAKCNPYMDSPQSIADSTGEEIFSCRTLEGLFY

SEQ ID NO: 69514 - protein, 124 aa, Homo sapiens
  Payload ID: 13786
  Gene Symbol: PCMT1
  Gene Name: protein-L-isoaspartate (D-aspartate) O-methyltransferase
  ENSP ID: ENSP00000417448
MPGARSGGSGGDGSNSGSYSGDASGAVTVWEVVSLLGKLLGTVVALKVVLYLLRVCLAMAWKSGGASHSELIHNLRKNGIIKTDKVFEVMLATDRSHYAKCNPYMDSPQSIGFAELLSLGSGRL

SEQ ID NO: 69515 - protein, 67 aa, Homo sapiens
  Payload ID: 13786
  Gene Symbol: PCMT1
  Gene Name: protein-L-isoaspartate (D-aspartate) O-methyltransferase
  ENSP ID: ENSP00000418461
  MOD_RES (1)..(1): Any amino acid
XEVVSLLGKLLGTVVALKVVLYLLRVCLAMAWKSGGASHSELIHNLRSMMAHTCNTSTLGGRGRWIT

SEQ ID NO: 69516 - protein, 96 aa, Homo sapiens
  Payload ID: 13786
  Gene Symbol: PCMT1
  Gene Name: protein-L-isoaspartate (D-aspartate) O-methyltransferase
  ENSP ID: ENSP00000418881
MLATDRSHYAKCNPYMDSPQSIGFQATISAPHMHAYALELLFDQLHEGAKALDVGSGSGILTACFARMVGCTGKVIGIDHIKELVDDSVNNVRKDD

SEQ ID NO: 69517 - protein, 120 aa, Homo sapiens
  Payload ID: 13786
  Gene Symbol: PCMT1
  Gene Name: protein-L-isoaspartate (D-aspartate) O-methyltransferase
  ENSP ID: ENSP00000420804
MPGARSGGSGGDGSNSGSYSGDASGAVTVWEVVSLLGKLLGTVVALKVVLYLLRVCLAMAWKSGGASHSELIHNLRKNGIIKTDKVFEVMLATDRSHYAKCNPYMDSPQSIESPVFNSFS

SEQ ID NO: 69518 - protein, 285 aa, Homo sapiens; identical to SEQ ID NO: 69510
  Payload ID: 13786
  Gene Symbol: PCMT1
  Gene Name: protein-L-isoaspartate (D-aspartate) O-methyltransferase
  ENSP ID: ENSP00000420813

SEQ ID NO: 69519 - protein, 250 aa, Homo sapiens
  Payload ID: 13786
  Gene Symbol: PCMT1
  Gene Name: protein-L-isoaspartate (D-aspartate) O-methyltransferase
  ENSP ID: ENSP00000438247
MPGARSGGSGGDGSNSGSYSGDASGAVTVWEVVSLLGKLLGTVVALKVVLYLLRVCLAMAWKSGGASHSELIHNLRKNGIIKTDKVFEVMLATDRSHYAKCNPYMDSPQSIGFQATISAPHMVGCTGKVIGIDHIKELVDDSVNNVRKDDPTLLSSGRVQLVVGDGRMGYAEEAPYDAIHVGAAAPVVPQALIDQLKPGGRLILPVGPAGGNQMLEQYDKLQDGSIKMKPLMGVIYVPLTDKEKQWSRWK

SEQ ID NO: 69520 - protein, 357 aa, Homo sapiens
  Payload ID: 13787
  Gene Symbol: PCMTD1
  Gene Name: protein-L-isoaspartate (D-aspartate) O-methyltransferase domain containing 1
  Uniprot ID: Q96MG8
  ENSP ID: ENSP00000353739
MGGAVSAGEDNDDLIDNLKEAQYIRTERVEQAFRAIDRGDYYLEGYRDNAYKDLAWKHGNIHLSAPCIYSEVMEALKLQPGLSFLNLGSGTGYLSTMVGLILGPFGINHGIELHSDVVEYAKEKLESFIKNSDSFDKFEFCEPAFVVGNCLQIASDSHQYDRIYCGAGVQKDHENYMKILLKVGGILVMPIEDQLTQIMRTGQNTWESKNILAVSFAPLVQPSKNDNGKPDSVGLPPCAVRNLQDLARIYIRRTLRNFINDEMQAKGIPQRAPPKRKRKRVKQRINTYVFVGNQLIPQPLDSEEDEKMEEDNKEEEEKDHNEAMKPEEPPQNLLREKIMKLPLPESLKAYLTYFRDK

SEQ ID NO: 69521 - protein, 357 aa, Homo sapiens; identical to SEQ ID NO: 69520
  Payload ID: 13787
  Gene Symbol: PCMTD1
  Gene Name: protein-L-isoaspartate (D-aspartate) O-methyltransferase domain containing 1
  Uniprot ID: Q96MG8
  ENSP ID: ENSP00000428099

SEQ ID NO: 69522 - protein, 105 aa, Homo sapiens
  Payload ID: 13787
  Gene Symbol: PCMTD1
  Gene Name: protein-L-isoaspartate (D-aspartate) O-methyltransferase domain containing 1
  ENSP ID: ENSP00000430168
MGGAVSAGEDNDDLIDNLKEAQYIRTERVEQAFRAIDRGDYYLEGYRDNAYKDLAWKHGNIHLSAPCIYSEVMEALKLQPGLSFLNLGSGTGYLSTMYFDLRVLN

SEQ ID NO: 69523 - protein, 130 aa, Homo sapiens
  Payload ID: 13787
  Gene Symbol: PCMTD1
  Gene Name: protein-L-isoaspartate (D-aspartate) O-methyltransferase domain containing 1
  ENSP ID: ENSP00000430340
  MOD_RES (1)..(1): Any amino acid
XGIELHSDVVEYAKEKLESFIKNSDSFDKFEFCEPAFVVGNCLQIASDSHQYDRIYCGAGVQKDHENYMKILLKVGGILVMPIEDQLTQIMRTGQNTWESKNILAVSFAPLVQPSKNDNGKPDSVGLHLG

SEQ ID NO: 69524 - protein, 281 aa, Homo sapiens
  Payload ID: 13787
  Gene Symbol: PCMTD1
  Gene Name: protein-L-isoaspartate (D-aspartate) O-methyltransferase domain containing 1
  ENSP ID: ENSP00000444026
MPGPRRLRSPGGSGCSSRGSGPRLSTRRWRPCCYCGGSGVWLLRTPPSPSAWPARRCPRHRFEFCEPAFVVGNCLQIASDSHQYDRIYCGAGVQKDHENYMKILLKVGGILVMPIEDQLTQIMRTGQNTWESKNILAVSFAPLVQPSKNDNGKPDSVGLPPCAVRNLQDLARIYIRRTLRNFINDEMQAKGIPQRAPPKRKRKRVKQRINTYVFVGNQLIPQPLDSEEDEKMEEDNKEEEEKDHNEAMKPEEPPQNLLREKIMKLPLPESLKAYLTYFRDK

SEQ ID NO: 69525 - protein, 282 aa, Homo sapiens
  Payload ID: 13788
  Gene Symbol: PCMTD2
  Gene Name: protein-L-isoaspartate (D-aspartate) O-methyltransferase domain containing 2
  ENSP ID: ENSP00000299468
MGGAVSAGEDNDELIDNLKEAQYIRTELVEQAFRAIDRADYYLEEFKENAYKDLAWKHGNIHLSAPCIYSEVMEALDLQPGLSFLNLGSGTGYLSSMVGLILGPFGVNHGVELHSDVIEYAKQKLDFFIRTSDSFDKFDFCEPSFVTGNCLEISPDCSQYDRVYCGAGVQKEHEEYMKNLLKVGGILVMPLEEKLTKITRTGPSAWETKKILAVSFAPLIQPCHSESGKSRLVQLRSPSFVQGWSVVVLSQLTAASTFQAEAILPSQSPTWLTLQVLATMPN

SEQ ID NO: 69526 - protein, 361 aa, Homo sapiens
  Payload ID: 13788
  Gene Symbol: PCMTD2
  Gene Name: protein-L-isoaspartate (D-aspartate) O-methyltransferase domain containing 2
  Uniprot ID: Q9NV79
  ENSP ID: ENSP00000307854
MGGAVSAGEDNDELIDNLKEAQYIRTELVEQAFRAIDRADYYLEEFKENAYKDLAWKHGNIHLSAPCIYSEVMEALDLQPGLSFLNLGSGTGYLSSMVGLILGPFGVNHGVELHSDVIEYAKQKLDFFIRTSDSFDKFDFCEPSFVTGNCLEISPDCSQYDRVYCGAGVQKEHEEYMKNLLKVGGILVMPLEEKLTKITRTGPSAWETKKILAVSFAPLIQPCHSESGKSRLVQLPPVAVRSLQDLARIAIRGTIKKIIHQETVSKNGNGLKNTPRFKRRRVRRRRMETIVFLDKEVFASRISNPSDDNSCEDLEEERREEEEKTPPETKPDPPVNFLRQKVLSLPLPDPLKYYLLYYREK

SEQ ID NO: 69527 - protein, 334 aa, Homo sapiens
  Payload ID: 13788
  Gene Symbol: PCMTD2
  Gene Name: protein-L-isoaspartate (D-aspartate) O-methyltransferase domain containing 2
  Uniprot ID: Q9NV79
  ENSP ID: ENSP00000358773
MGGAVSAGEDNDELIDNLKEAQYIRTELVEQAFRAIDRADYYLEEFKENAYKDLAWKHGNIHLSAPCIYSEVMEALDLQPGLSFLNLGSGTGYLSSMVGLILGPFGVNHGVELHSDVIEYAKQKLDFFIRTSDSFDKFDFCEPSFVTGNCLEISPDCSQYDRVYCGAGVQKEHEEYMKNLLKVGGILVMPLEEKPCHSESGKSRLVQLPPVAVRSLQDLARIAIRGTIKKIIHQETVSKNGNGLKNTPRFKRRRVRRRRMETIVFLDKEVFASRISNPSDDNSCEDLEEERREEEEKTPPETKPDPPVNFLRQKVLSLPLPDPLKYYLLYYREK

SEQ ID NO: 69528 - protein, 183 aa, Homo sapiens
  Payload ID: 13788
  Gene Symbol: PCMTD2
  Gene Name: protein-L-isoaspartate (D-aspartate) O-methyltransferase domain containing 2
  ENSP ID: ENSP00000476726
NNFLHFTNEETEAGTGEGDAGSRTCPSWGQKLTQLTKITRTGPSAWETKKILAVSFAPLIQPCHSESGKSRLVQLPPVAVRSLQDLARIAIRGTIKKIIHQETVSKNGNGLKNTPRFKRRRVRRRRMETIVFLDKEVFASRISNPSDDNSCEDLEEERREEEEKTPPETKPDPPVNFLRQKVL

SEQ ID NO: 69529 - protein, 94 aa, Homo sapiens
  Payload ID: 13788
  Gene Symbol: PCMTD2
  Gene Name: protein-L-isoaspartate (D-aspartate) O-methyltransferase domain containing 2
  ENSP ID: ENSP00000476878
MGGAVSAGEDNDELIDNLKEAQYIRTELVEQAFRAIDRADYYLEEFKENAYKDLAWKHGNIHLSAPCIYSEVMEALDLQPGLSFLNLGSGTGYL

SEQ ID NO: 69530 - protein, 135 aa, Homo sapiens
  Payload ID: 13788
  Gene Symbol: PCMTD2
  Gene Name: protein-L-isoaspartate (D-aspartate) O-methyltransferase domain containing 2
  ENSP ID: ENSP00000477110
MGGAVSAGEDNDELIDNLKEAQYIRTELVEQAFRAIDRADYYLEEFKENAYKDLAWKHGNIHLSAPCIYSEVMEALDLQPGLSFLNLGSGTGYLSSMVGLILGPFGVNHGVELHSDVIEYAKQKLDFFIRTSDSF

SEQ ID NO: 69531 - protein, 71 aa, Homo sapiens
  Payload ID: 13788
  Gene Symbol: PCMTD2
  Gene Name: protein-L-isoaspartate (D-aspartate) O-methyltransferase domain containing 2
  ENSP ID: ENSP00000477240
  MOD_RES (1)..(1): Any amino acid
XYYLEEFKENAYKDLAWKHGNIHLSAPCIYSEVMEALDLQPGLSFLNLGSGTGYLSSMVGLILDAAAFIQA

SEQ ID NO: 69532 - protein, 135 aa, Homo sapiens; identical to SEQ ID NO: 69530
  Payload ID: 13788
  Gene Symbol: PCMTD2
  Gene Name: protein-L-isoaspartate (D-aspartate) O-methyltransferase domain containing 2
  ENSP ID: ENSP00000477252

SEQ ID NO: 69533 - protein, 211 aa, Homo sapiens
  Payload ID: 13788
  Gene Symbol: PCMTD2
  Gene Name: protein-L-isoaspartate (D-aspartate) O-methyltransferase domain containing 2
  ENSP ID: ENSP00000477398
MGGAVSAGEDNDELIDNLKEAQYIRTELVEQAFRAIDRADYYLEEFKENAYKDLAWKHGNIHLSAPCIYSEPCHSESGKSRLVQLPPVAVRSLQDLARIAIRGTIKKIIHQETVSKNGNGLKNTPRFKRRRVRRRRMETIVFLDKEVFASRISNPSDDNSCEDLEEERREEEEKTPPETKPDPPVNFLRQKVLSLPLPDPLKYYLLYYREK

SEQ ID NO: 69534 - protein, 262 aa, Homo sapiens
  Payload ID: 13788
  Gene Symbol: PCMTD2
  Gene Name: protein-L-isoaspartate (D-aspartate) O-methyltransferase domain containing 2
  ENSP ID: ENSP00000478638
MEAWKHSPLSPVELHSDVIEYAKQKLDFFIRTSDSFDKFDFCEPSFVTGNCLEISPDCSQYDRVYCGAGVQKEHEEYMKNLLKVGGILVMPLEEKLTKITRTGPSAWETKKILAVSFAPLIQPCHSESGKSRLVQLPPVAVRSLQDLARIAIRGTIKKIIHQETVSKNGNGLKNTPRFKRRRVRRRRMETIVFLDKEVFASRISNPSDDNSCEDLEEERREEEEKTPPETKPDPPVNFLRQKVLSLPLPDPLKYYLLYYREK

SEQ ID NO: 69535 - protein, 135 aa, Homo sapiens; identical to SEQ ID NO: 69530
  Payload ID: 13788
  Gene Symbol: PCMTD2
  Gene Name: protein-L-isoaspartate (D-aspartate) O-methyltransferase domain containing 2
  ENSP ID: ENSP00000485733

SEQ ID NO: 69536 - protein, 334 aa, Homo sapiens; identical to SEQ ID NO: 69527
  Payload ID: 13788
  Gene Symbol: PCMTD2
  Gene Name: protein-L-isoaspartate (D-aspartate) O-methyltransferase domain containing 2
  Uniprot ID: Q9NV79
  ENSP ID: ENSP00000486003

SEQ ID NO: 69537 - protein, 31 aa, Homo sapiens
  Payload ID: 13788
  Gene Symbol: PCMTD2
  Gene Name: protein-L-isoaspartate (D-aspartate) O-methyltransferase domain containing 2
  ENSP ID: ENSP00000486313
MGGAVSAGEDNDELIDNLKEAQYIRTELVEQ

SEQ ID NO: 69538 - protein, 135 aa, Homo sapiens; identical to SEQ ID NO: 69530
  Payload ID: 13788
  Gene Symbol: PCMTD2
  Gene Name: protein-L-isoaspartate (D-aspartate) O-methyltransferase domain containing 2
  ENSP ID: ENSP00000486493

SEQ ID NO: 69539 - protein, 361 aa, Homo sapiens; identical to SEQ ID NO: 69526
  Payload ID: 13788
  Gene Symbol: PCMTD2
  Gene Name: protein-L-isoaspartate (D-aspartate) O-methyltransferase domain containing 2
  Uniprot ID: Q9NV79
  ENSP ID: ENSP00000486510

SEQ ID NO: 69540 - protein, 94 aa, Homo sapiens; identical to SEQ ID NO: 69529
  Payload ID: 13788
  Gene Symbol: PCMTD2
  Gene Name: protein-L-isoaspartate (D-aspartate) O-methyltransferase domain containing 2
  ENSP ID: ENSP00000486648

SEQ ID NO: 69541 - protein, 211 aa, Homo sapiens; identical to SEQ ID NO: 69533
  Payload ID: 13788
  Gene Symbol: PCMTD2
  Gene Name: protein-L-isoaspartate (D-aspartate) O-methyltransferase domain containing 2
  ENSP ID: ENSP00000487463

SEQ ID NO: 69542 - protein, 361 aa, Homo sapiens; identical to SEQ ID NO: 69526
  Payload ID: 13789
  Gene Symbol:
  Gene Name: Protein-L-isoaspartate O-methyltransferase domain-containing protein 2  [Source:UniProtKB/Swiss-Prot
  Acc:Q9NV79]
  Uniprot ID: Q9NV79
  ENSP ID: ENSP00000482166

SEQ ID NO: 69543 - protein, 829 aa, Homo sapiens
  Payload ID: 13789
  Gene Symbol:
  Gene Name: Protein-L-isoaspartate O-methyltransferase domain-containing protein 2  [Source:UniProtKB/Swiss-Prot
  Acc:Q9NV79]
  ENSP ID: ENSP00000487346
EEEEEEEEEEEEEEAAPDVIFQEDTSHTSAQKAPELRGPESPSPKPEYSVIVEVRSDDDKDEDTHSRKSTVTDESEMQDMMTRGNLGLLEQAIALKAEQVRTVCEPGCPPAEQSQLGLGEPGKAAKPLDTVRKSYYSKDPSRAEKREIKCPTPGCDGTGHVTGLYPHHRSLSGCPHKDRIPPEILAMHENVLKCPTPGCTGQGHVNSNRNTHRSLSGCPIAAAEKLAKSHEKQQPQTGDPSKSSSNSDRILRPMCFVKQLEVPPYGSYRPNVAPATPRANLAKELEKFSKVTFDYASFDAQVFGKRMLAPKIQTSETSPKAFQCFDYSQDAEAAHMAATAILNLSTRCWEMPENLSTKPQDLPSKSVDIEVDENGTLDLSMHKHRKRENAFPSSSSCSSSPGVKSPDASQRHSSTSAPSSSMTSPQSSQASRQDEWDRPLDYTKPSRLREEEPEESEPAAHSFASSEADDQEVSEENFEERKYPGEVTLTNFKLKFLSKDIKKELLTCPTPGCDGSGHITGNYASHRSLSGCPLADKSLRNLMAAHSADLKCPTPGCDGSGHITGNYASHRSLSGCPRAKKSGVKVAPTKDDKEDPELMKCPVPGCVGLGHISGKYASHRSASGCPLAARRQKEGSLNGSSFSWKSLKNEGPTCPTPGCDGSGHANGSFLTHRSLSGCPRATFAGKKGKLSGDEVLSPKFKTSDVLENDEEIKQLNQEIRDLNESNSEMEAAMVQLQSQISSMEKNLKNIEEENKLIEEQNEALFLELSGLSQALIQSLANIRLPHMEPICEQNFDAYVSTLTDMYSNQDPENKDLLESIKQAVRGIQV

SEQ ID NO: 69544 - protein, 350 aa, Homo sapiens
  Payload ID: 13790
  Gene Symbol: POMK
  Gene Name: protein-O-mannose kinase
  Uniprot ID: Q9H5K3
  ENSP ID: ENSP00000331258
MEKQPQNSRRGLAPREVPPAVGLLLIMALMNTLLYLCLDHFFIAPRQSTVDPTHCPYGHFRIGQMKNCSPWLSCEELRTEVRQLKRVGEGAVKRVFLSEWKEHKVALSQLTSLEMKDDFLHGLQMLKSLQGTHVVTLLGYCEDDNTMLTEYHPLGSLSNLEETLNLSKYQNVNTWQHRLELAMDYVSIINYLHHSPVGTRVMCDSNDLPKTLSQYLLTSNFSILANDLDALPLVNHSSGMLVKCGHRELHGDFVAPEQLWPYGEDVPFHDDLMPSYDEKIDIWKIPDISSFLLGHIEGSDMVRFHLFDIHKACKSQTPSERPTAQDVLETYQKVLDTLRDAMMSQAREML

SEQ ID NO: 69545 - protein, 134 aa, Homo sapiens
  Payload ID: 13790
  Gene Symbol: POMK
  Gene Name: protein-O-mannose kinase
  ENSP ID: ENSP00000429090
MEKQPQNSRRGLAPREVPPAVGLLLIMALMNTLLYLCLDHFFIAPRQSTVDPTHCPYGHFRIGQMKNCSPWLSCEELRTEVRQLKRVGEGAVKRVFLSEWKEHKVALSQLTSLEMKDDFLHGLQMLKSLQGTHV

SEQ ID NO: 69546 - protein, 350 aa, Homo sapiens; identical to SEQ ID NO: 69544
  Payload ID: 13790
  Gene Symbol: POMK
  Gene Name: protein-O-mannose kinase
  Uniprot ID: Q9H5K3
  ENSP ID: ENSP00000478821

SEQ ID NO: 69547 - protein, 671 aa, Homo sapiens
  Payload ID: 13791
  Gene Symbol: POMT1
  Gene Name: protein-O-mannosyltransferase 1
  Uniprot ID: Q9Y6A1
  ENSP ID: ENSP00000343034
MKQIFFLDDSGPPFGHMVLALGGYLGGFDGNFLWNRIGAEYSSNVPVWSLRLLPALAGALSVPMAYQIVLELHFSHCAAMGAALLMLIENALITQSRLMLLESVLIFFNLLAVLSYLKFFNCQKHSPFSLSWWFWLTLTGVACSCAVGIKYMGVFTYVLVLGVAAVHAWHLLGDQTLSNVCVFCHLLARAVALLVIPVVLYLLFFYVHLILVFRSGPHDQIMSSAFQASLEGGLARITQGQPLEVAFGSQVTLRNVFGKPVPCWLHSHQDTYPMIYENGRGSSHQQQVTCYPFKDVNNWWIVKDPRRHQLVVSSPPRPVRHGDMVQLVHGMTTRSLNTHDVAAPLSPHSQEVSCYIDYNISMPAQNLWRLEIVNRGSDTDVWKTILSEVRFVHVNTSAVLKLSGAHLPDWGYRQLEIVGEKLSRGYHGSTVWNVEEHRYGASQEQRERERELHSPAQVDVSRNLSFMARFSELQWRMLALRSDDSEHKYSSSPLEWVTLDTNIAYWLHPRTSAQIHLLGNIVIWVSGSLALAIYALLSLWYLLRRRRNVHDLPQDAWLRWVLAGALCAGGWAVNYLPFFLMEKTLFLYHYLPALTFQILLLPVVLQHISDHLCRSQLQRSIFSALVVAWYSSACHVSNTLRPLTYGDKSLSPHELKALRWKDSWDILIRKH

SEQ ID NO: 69548 - protein, 346 aa, Homo sapiens
  Payload ID: 13791
  Gene Symbol: POMT1
  Gene Name: protein-O-mannosyltransferase 1
  ENSP ID: ENSP00000361294
WRGGGCTSPATLGAARGAVGIGKEGQYQPLIASLTWGLVPLSQAQEIVNRGSDTDVWKTILSEVRFVHVNTSAVLKLSGAHLPDWGYRQLEIVGEKLSRGYHGSTVWNVEEHRYGASQEQRERERELHSPAQVDVSRNLSFMARFSELQWRMLALRSDDSEHKYSSSPLEWVTLDTNIAYWLHPRTSAQIHLLGNIVIWVSGSLALAIYALLSLWYLLRRRRNVHDLPQDAWLRWVLAGALCAGGWAVNYLPFFLMEKTLFLYHYLPALTFQILLLPVVLQHISDHLCRSQLQRSIFSALVVAWYSSACHVSNTLRPLTYGDKSLSPHELKALRWKDSWDILIRKH

SEQ ID NO: 69549 - protein, 747 aa, Homo sapiens
  Payload ID: 13791
  Gene Symbol: POMT1
  Gene Name: protein-O-mannosyltransferase 1
  Uniprot ID: Q9Y6A1
  ENSP ID: ENSP00000361302
MWGFLKRPVVVTADINLSLVALTGMGLLSRLWRLTYPRAVVFDEVYYGQYISFYMKQIFFLDDSGPPFGHMVLALGGYLGGFDGNFLWNRIGAEYSSNVPVWSLRLLPALAGALSVPMAYQIVLELHFSHCAAMGAALLMLIENALITQSRLMLLESVLIFFNLLAVLSYLKFFNCQKHSPFSLSWWFWLTLTGVACSCAVGIKYMGVFTYVLVLGVAAVHAWHLLGDQTLSNVGADVQCCMRPACMGQMQMSQGVCVFCHLLARAVALLVIPVVLYLLFFYVHLILVFRSGPHDQIMSSAFQASLEGGLARITQGQPLEVAFGSQVTLRNVFGKPVPCWLHSHQDTYPMIYENGRGSSHQQQVTCYPFKDVNNWWIVKDPRRHQLVVSSPPRPVRHGDMVQLVHGMTTRSLNTHDVAAPLSPHSQEVSCYIDYNISMPAQNLWRLEIVNRGSDTDVWKTILSEVRFVHVNTSAVLKLSGAHLPDWGYRQLEIVGEKLSRGYHGSTVWNVEEHRYGASQEQRERERELHSPAQVDVSRNLSFMARFSELQWRMLALRSDDSEHKYSSSPLEWVTLDTNIAYWLHPRTSAQIHLLGNIVIWVSGSLALAIYALLSLWYLLRRRRNVHDLPQDAWLRWVLAGALCAGGWAVNYLPFFLMEKTLFLYHYLPALTFQILLLPVVLQHISDHLCRSQLQRSIFSALVVAWYSSACHVSNTLRPLTYGDKSLSPHELKALRWKDSWDILIRKH

SEQ ID NO: 69550 - protein, 608 aa, Homo sapiens
  Payload ID: 13791
  Gene Symbol: POMT1
  Gene Name: protein-O-mannosyltransferase 1
  Uniprot ID: Q9Y6A1
  ENSP ID: ENSP00000384531
MAYQIVLELHFSHCAAMGAALLMLIENALITQSRLMLLESVLIFFNLLAVLSYLKFFNCQKHSPFSLSWWFWLTLTGVACSCAVGIKYMGVFTYVLVLGVAAVHAWHLLGDQTLSNVCVFCHLLARAVALLVIPVVLYLLFFYVHLILVFRSGPHDQIMSSAFQASLEGGLARITQGQPLEVAFGSQVTLRNVFGKPVPCWLHSHQDTYPMIYENGRGSSHQQQVTCYPFKDVNNWWIVKDPRRHQLVVSSPPRPVRHGDMVQLVHGMTTRSLNTHDVAAPLSPHSQEVSCYIDYNISMPAQNLWRLEIVNRGSDTDVWKTILSEVRFVHVNTSAVLKLSGAHLPDWGYRQLEIVGEKLSRGYHGSTVWNVEEHRYGASQEQRERERELHSPAQVDVSRNLSFMARFSELQWRMLALRSDDSEHKYSSSPLEWVTLDTNIAYWLHPRTSAQIHLLGNIVIWVSGSLALAIYALLSLWYLLRRRRNVHDLPQDAWLRWVLAGALCAGGWAVNYLPFFLMEKTLFLYHYLPALTFQILLLPVVLQHISDHLCRSQLQRSIFSALVVAWYSSACHVSNTLRPLTYGDKSLSPHELKALRWKDSWDILIRKH

SEQ ID NO: 69551 - protein, 725 aa, Homo sapiens
  Payload ID: 13791
  Gene Symbol: POMT1
  Gene Name: protein-O-mannosyltransferase 1
  Uniprot ID: Q9Y6A1
  ENSP ID: ENSP00000385797
MWGFLKRPVVVTADINLSLVALTGMGLLSRLWRLTYPRAVVFDEVYYGQYISFYMKQIFFLDDSGPPFGHMVLALGGYLGGFDGNFLWNRIGAEYSSNVPVWSLRLLPALAGALSVPMAYQIVLELHFSHCAAMGAALLMLIENALITQSRLMLLESVLIFFNLLAVLSYLKFFNCQKHSPFSLSWWFWLTLTGVACSCAVGIKYMGVFTYVLVLGVAAVHAWHLLGDQTLSNVCVFCHLLARAVALLVIPVVLYLLFFYVHLILVFRSGPHDQIMSSAFQASLEGGLARITQGQPLEVAFGSQVTLRNVFGKPVPCWLHSHQDTYPMIYENGRGSSHQQQVTCYPFKDVNNWWIVKDPRRHQLVVSSPPRPVRHGDMVQLVHGMTTRSLNTHDVAAPLSPHSQEVSCYIDYNISMPAQNLWRLEIVNRGSDTDVWKTILSEVRFVHVNTSAVLKLSGAHLPDWGYRQLEIVGEKLSRGYHGSTVWNVEEHRYGASQEQRERERELHSPAQVDVSRNLSFMARFSELQWRMLALRSDDSEHKYSSSPLEWVTLDTNIAYWLHPRTSAQIHLLGNIVIWVSGSLALAIYALLSLWYLLRRRRNVHDLPQDAWLRWVLAGALCAGGWAVNYLPFFLMEKTLFLYHYLPALTFQILLLPVVLQHISDHLCRSQLQRSIFSALVVAWYSSACHVSNTLRPLTYGDKSLSPHELKALRWKDSWDILIRKH

SEQ ID NO: 69552 - protein, 142 aa, Homo sapiens
  Payload ID: 13791
  Gene Symbol: POMT1
  Gene Name: protein-O-mannosyltransferase 1
  ENSP ID: ENSP00000390737
MWGFLKRPVVVTADINLSLVALTGMGLLSRLWRLTYPRAVVFDEVYYGQYISFYMKQIFFLDDSGPPFGHMVLALGGYLGGFDGNFLWNRIGAEYSSNVPVWSLRLLPALAGALSVPMAYQIVLELHFSHCAAMGAALLMLI

SEQ ID NO: 69553 - protein, 296 aa, Homo sapiens
  Payload ID: 13791
  Gene Symbol: POMT1
  Gene Name: protein-O-mannosyltransferase 1
  ENSP ID: ENSP00000395060
MAYQIVLELHFSHCAAMGAALLMLIENALITQSRLMLLESVLIFFNLLAVLSYLKFFNCQKHSPFSLSWWFWLTLTGVACSCAVGIKYMGVFTYVLVLGVAAVHAWHLLGDQTLSNVGADVQCCMRPACMGQMQMSQGVCVFCHLLARAVALLVIPVVLYLLFFYVHLILVFRSGPHDQIMSSAFQASLEGGLARITQGQPLEVAFGSQVTLRNVFGKPVPCWLHSHQDTYPMIYENGRGSSHQQQVTCYPFKDVNNWWIVKDPRRHQLVVSSPPRPVRHGDMVQLVHGMTTRSLN

SEQ ID NO: 69554 - protein, 168 aa, Homo sapiens
  Payload ID: 13791
  Gene Symbol: POMT1
  Gene Name: protein-O-mannosyltransferase 1
  ENSP ID: ENSP00000402083
MAYQIVLELHFSHCAAMGAALLMLIENALITQSRLMLLESVLIFFNLLAVLSYLKFFNCQKHSPFSLSWWFWLTLTGVACSCAVGIKYMGVFTYVLVLGVAAVHAWHLLGDQTLSNVCVFCHLLARAVALLVIPVVLYLLFFYVHLILVFRSGPHDQIMSSAFQASLE

SEQ ID NO: 69555 - protein, 218 aa, Homo sapiens
  Payload ID: 13791
  Gene Symbol: POMT1
  Gene Name: protein-O-mannosyltransferase 1
  ENSP ID: ENSP00000403736
MKQIFFLDDSGPPFGHMVLALGGYLGGFDGNFLWNRIGAEYSSNVPVWSLRLLPALAGALSVPMAYQIVLELHFSHCAAMGAALLMLIENALITQSRLMLLESVLIFFNLLAVLSYLKFFNCQKHSPFSLSWWFWLTLTGVACSCAVGIKYMGVFTYVLVLGVAAVHAWHLLGDQTLSNVGADVQCCMRPACMGQMQMSQGVCVFCHLLARAVALLVI

SEQ ID NO: 69556 - protein, 725 aa, Homo sapiens; identical to SEQ ID NO: 69551
  Payload ID: 13791
  Gene Symbol: POMT1
  Gene Name: protein-O-mannosyltransferase 1
  Uniprot ID: Q9Y6A1
  ENSP ID: ENSP00000404119

SEQ ID NO: 69557 - protein, 156 aa, Homo sapiens
  Payload ID: 13791
  Gene Symbol: POMT1
  Gene Name: protein-O-mannosyltransferase 1
  ENSP ID: ENSP00000405149
MAYQIVLELHFSHCAAMGAALLMLIENALITQSRLMLLESVLIFFNLLAVLSYLKFFNCQKHSLPLWAPRPNHVQCLPGQLRGRTSSDHSGSATGGGLWVPGHSEERLWETCALLASFPPGHLPHDVRYENGRGSSHQQQVTCYPFKDVNNWWIVK

SEQ ID NO: 69558 - protein, 750 aa, Homo sapiens
  Payload ID: 13792
  Gene Symbol: POMT2
  Gene Name: protein-O-mannosyltransferase 2
  Uniprot ID: Q9UKY4
  ENSP ID: ENSP00000261534
MPPATGGGLAESELRPRRGRCGPQAARAAGRDVAAEAVARSPKRPAWGSRRFEAVGWWALLALVTLLSFATRFHRLDEPPHICWDETHFGKMGSYYINRTFFFDVHPPLGKMLIGLAGYLSGYDGTFLFQKPGDKYEHHSYMGMRGFCAFLGSWLVPFAYLTVLDLSKSLSAALLTAALLTFDTGCLTLSQYILLDPILMFFIMAAMLSMVKYNSCADRPFSAPWWFWLSLTGVSLAGALGVKFVGLFIILQVGLNTIADLWYLFGDLSLSLVTVGKHLTARVLCLIVLPLALYTATFAVHFMVLSKSGPGDGFFSSAFQARLSGNNLHNASIPEHLAYGSVITVKNLRMAIGYLHSHRHLYPEGIGARQQQVTTYLHKDYNNLWIIKKHNTNSDPLDPSFPVEFVRHGDIIRLEHKETSRNLHSHYHEAPMTRKHYQVTGYGINGTGDSNDFWRIEVVNRKFGNRIKVLRSRIRFIHLVTGCVLGSSGKVLPKWGWEQLEVTCTPYLKETLNSIWNVEDHINPKLPNISLDVLQPSFPEILLESHMVMIRGNSGLKPKDNEFTSKPWHWPINYQGLRFSGVNDTDFRVYLLGNPVVWWLNLLSIALYLLSGSIIAVAMQRGARLPAEVAGLSQVLLRGGGQVLLGWTLHYFPFFLMGRVLYFHHYFPAMLFSSMLTGILWDTLLRLCAWGLASWPLARGIHVAGILSLLLGTAYSFYLFHPLAYGMVGPLAQDPQSPMAGLRWLDSWDF

SEQ ID NO: 69559 - protein, 82 aa, Homo sapiens
  Payload ID: 13792
  Gene Symbol: POMT2
  Gene Name: protein-O-mannosyltransferase 2
  Uniprot ID: Q9UKY4
  ENSP ID: ENSP00000450630
MPPATGGGLAESELRPRRGRCGPQAARAAGRDVAAEAVARSPKRPAWGSRRFEAVGWWALLALVTLLSFATRFHRLDEPPHI

SEQ ID NO: 69560 - protein, 52 aa, Homo sapiens
  Payload ID: 13792
  Gene Symbol: POMT2
  Gene Name: protein-O-mannosyltransferase 2
  ENSP ID: ENSP00000451115
DLSKSLSAALLTAALLTFGDCGKTPDCSCPVPHSAAPGSLYSHLCCSLHGAE

SEQ ID NO: 69561 - protein, 193 aa, Homo sapiens
  Payload ID: 13792
  Gene Symbol: POMT2
  Gene Name: protein-O-mannosyltransferase 2
  ENSP ID: ENSP00000451651
  MOD_RES (1)..(1): Any amino acid
XLQPSFPEILLESHMVMIRGNSGLKPKDNEFTSKPWHWPINYQGLRFSGVNDTDFRVYLLGNPVVWWLNLLSIALYLLSGSIIAVAMQRGARLPAEVAGQVLWALPPLTWRQQGTCTPGEGRLPADGPSFAFTTPHLPLSFAFERKPRNHEIKKLAPGHTARLSQVLLRGGGQVLLGWTLHYFPFFLMGRVLY

SEQ ID NO: 69562 - protein, 75 aa, Homo sapiens
  Payload ID: 13792
  Gene Symbol: POMT2
  Gene Name: protein-O-mannosyltransferase 2
  ENSP ID: ENSP00000451730
RFSGVNDTDFRVYLLGNPVVWWLNLLSIALYLLSGSIIAVAMQRGARLPAEVAGHTARKGQSWTRAWNLCPLLVF

SEQ ID NO: 69563 - protein, 102 aa, Homo sapiens
  Payload ID: 13792
  Gene Symbol: POMT2
  Gene Name: protein-O-mannosyltransferase 2
  ENSP ID: ENSP00000451967
  MOD_RES (1)..(1): Any amino acid
XLSIALYLLSGSIIAVAMQRGARLPAEVAGILWDTLLRLCAWGLASWPLARGIHVAGILSLLLGTAYSFYLFHPLAYGMVGPLAQDPQSPMAGLRWLDSWDF

SEQ ID NO: 69564 - protein, 137 aa, Homo sapiens
  Payload ID: 13792
  Gene Symbol: POMT2
  Gene Name: protein-O-mannosyltransferase 2
  ENSP ID: ENSP00000452060
MGSYYINRTFFFDVHPPLGKMLIGLAGYLSGYDGTFLFQKPGDKYEHHSYMGMRGFCAFLGSWLVPFAYLTVLDLSKSLSAALLTAALLTFDTGCLTLSQYILLDPILMFFIMAAMLSMVKYNSCADRPFSAPWWFW

SEQ ID NO: 69565 - protein, 219 aa, Homo sapiens
  Payload ID: 13792
  Gene Symbol: POMT2
  Gene Name: protein-O-mannosyltransferase 2
  ENSP ID: ENSP00000487704
VVWWLNLLSIALYLLSGSIIAVAMQRGARLPAEVAGLSQVLLRGGGQVLLGWTLHYFPFFLMGRVLYFHHYFPAMLFSSMLTGILWDTLLRLCAWGLASWPLARGIHVAGILSLLLGTAYRSPKNSAAHQDPALGVQLEWNPALERAGREPQLRPQHHGEDSASWAAPSCTAQGRMGARGWEWVRVCVCEGMLSISLWNTDRVTGQLSVINSKIVQAIV

SEQ ID NO: 69566 - protein, 222 aa, Homo sapiens
  Payload ID: 13793
  Gene Symbol: PRG2
  Gene Name: proteoglycan 2, bone marrow (natural killer cell activator, eosinophil granule major basic protein)
  Uniprot ID: P13727
  ENSP ID: ENSP00000312134
MKLPLLLALLFGAVSALHLRSETSTFETPLGAKTLPEDEETPEQEMEETPCRELEEEEEWGSGSEDASKKDGAVESISVPDMVDKNLTCPEEEDTVKVVGIPGCQTCRYLLVRSLQTFSQAWFTCRRCYRGNLVSIHNFNINYRIQCSVSALNQGQVWIGGRITGSGRCRRFQWVDGSRWNFAYWAAHQPWSRGGHCVALCTRGGHWRRAHCLRRLPFICSY

SEQ ID NO: 69567 - protein, 222 aa, Homo sapiens; identical to SEQ ID NO: 69566
  Payload ID: 13793
  Gene Symbol: PRG2
  Gene Name: proteoglycan 2, bone marrow (natural killer cell activator, eosinophil granule major basic protein)
  Uniprot ID: P13727
  ENSP ID: ENSP00000433016

SEQ ID NO: 69568 - protein, 211 aa, Homo sapiens
  Payload ID: 13793
  Gene Symbol: PRG2
  Gene Name: proteoglycan 2, bone marrow (natural killer cell activator, eosinophil granule major basic protein)
  Uniprot ID: P13727
  ENSP ID: ENSP00000433231
MKLPLLLALLFGAVSALHLRSETSTFETPLGAKTLPEDEETPEQEMEETPCRELEEEEEWGSGSEDASKKDGAVESISVPDMVDKNLTCPEEEDTVKVVGIPGCQTCRYLLFTCRRCYRGNLVSIHNFNINYRIQCSVSALNQGQVWIGGRITGSGRCRRFQWVDGSRWNFAYWAAHQPWSRGGHCVALCTRGGHWRRAHCLRRLPFICSY

SEQ ID NO: 69569 - protein, 225 aa, Homo sapiens
  Payload ID: 13794
  Gene Symbol: PRG3
  Gene Name: proteoglycan 3
  Uniprot ID: Q9Y2Y8
  ENSP ID: ENSP00000287143
MQCLLLLPFLLLGTVSALHLENDAPHLESLETQADLGQDLDSSKEQERDLALTEEVIQAEGEEVKASACQDNFEDEEAMESDPAALDKDFQCPREEDIVEVQGSPRCKICRYLLVRTPKTFAEAQNVCSRCYGGNLVSIHDFNFNYRIQCCTSTVNQAQVWIGGNLRGWFLWKRFCWTDGSHWNFAYWSPGQPGNGQGSCVALCTKGGYWRRAQCDKQLPFVCSF

SEQ ID NO: 69570 - protein, 853 aa, Homo sapiens
  Payload ID: 13795
  Gene Symbol: PRG4
  Gene Name: proteoglycan 4
  ENSP ID: ENSP00000356452
MAWKTLPIYLLLLLSVFVIQQVSSQELSCKGRCFESFERGRECDCDAQCKKYDKCCPDYESFCAEVKDNKKNRTKKKPTPKPPVVDEAGSGLDNGDFKVTTPDTSTTQHNKVSTSPKITTAKPINPRPSLPPNSDTSKETSLTVNKETTVETKETTTTNKQTSTDGKEKTTSAKETQSIEKTSAKDLAPTSKVLAKPTPKAETTTKGPALTTPKEPTPTTPKEPASTTPKEPTPTTIKSAPTTPKEPAPTTTKSAPTTPKEPAPTTTKEPAPTTPKEPAPTTTKEPAPTTTKSAPTTPKEPAPTTPKKPAPTTPKEPAPTTPKEPTPTTPKEPAPTTKEPAPTTPKEPAPTAPKKPAPTTPKEPAPTTPKEPAPTTTKEPSPTTPKEPAPTTTKSAPTTTKEPAPTTTKSAPTTPKEPSPTTTKEPAPTTPKEPAPTTPKKPAPTTPKEPAPTTPKEPAPTTTKKPAPTTPKEPAPTTPKETAPTTPKKLTPTTPEKLAPTTPEKPAPTTPEELAPTTPEEPTPTTPEEPAPTTPKAAAPNTPKEPAPTTPKEPAPTTPKEPAPTTPKETAPTTPKGTAPTTLKEPAPTTPKKPAPKELAPTTTKEPTSTTSDKPAPTTPKGTAPTTPKEPAPTTPKEPAPTTPKGTAPTTLKEPAPTTPKKPAPKELAPTTTKGPTSTTSDKPAPTTPKETAPTTPKEPAPTTPKKPAPTTPETPPPTTSEVSTPTTTKEPTTIHKSPDESTPELSAEPTPKALENSPKEPGVPTTKTPAATKPEMTTTAKDKTTERDLRTTPETTTAAPKMTKETATTTEKTTESKITATTTQVTSTTTQDTTPFKITTLKTTTLAPKVTT

SEQ ID NO: 69571 - protein, 1363 aa, Homo sapiens
  Payload ID: 13795
  Gene Symbol: PRG4
  Gene Name: proteoglycan 4
  Uniprot ID: Q92954
  ENSP ID: ENSP00000356453
MAWKTLPIYLLLLLSVFVIQQVSSQELSCKGRCFESFERGRECDCDAQCKKYDKCCPDYESFCAEVHNPTSPPSSKKAPPPSGASQTIKSTTKRSPKPPNKKKTKKVIESEEITEEHSVSENQESSSSSSSSSSSSTIRKIKSSKNSAANRELQKKLKVKDNKKNRTKKKPTPKPPVVDEAGSGLDNGDFKVTTPDTSTTQHNKVSTSPKITTAKPINPRPSLPPNSDTSKETSLTVNKETTVETKETTTTNKQTSTDGKEKTTSAKETQSIEKTSAKDLAPTSKVLAKPTPKAETTTKGPALTTPKEPTPTTPKEPASTTPKEPTPTTIKSAPTTPKEPAPTTTKSAPTTPKEPAPTTTKEPAPTTPKEPAPTTTKEPAPTTTKSAPTTPKEPAPTTPKKPAPTTPKEPAPTTPKEPTPTTPKEPAPTTKEPAPTTPKEPAPTAPKKPAPTTPKEPAPTTPKEPAPTTTKEPSPTTPKEPAPTTTKSAPTTTKEPAPTTTKSAPTTPKEPSPTTTKEPAPTTPKEPAPTTPKKPAPTTPKEPAPTTPKEPAPTTTKKPAPTTPKEPAPTTPKETAPTTPKKLTPTTPEKLAPTTPEKPAPTTPEELAPTTPEEPTPTTPEEPAPTTPKAAAPNTPKEPAPTTPKEPAPTTPKEPAPTTPKETAPTTPKGTAPTTLKEPAPTTPKKPAPKELAPTTTKEPTSTTSDKPAPTTPKGTAPTTPKEPAPTTPKEPAPTTPKGTAPTTLKEPAPTTPKKPAPKELAPTTTKGPTSTTSDKPAPTTPKETAPTTPKEPAPTTPKKPAPTTPETPPPTTSEVSTPTTTKEPTTIHKSPDESTPELSAEPTPKALENSPKEPGVPTTKTPAATKPEMTTTAKDKTTERDLRTTPETTTAAPKMTKETATTTEKTTESKITATTTQVTSTTTQDTTPFKITTLKTTTLAPKVTTTKKTITTTEIMNKPEETAKPKDRATNSKATTPKPQKPTKAPKKPTSTKKPKTMPRVRKPKTTPTPRKMTSTMPELNPTSRIAEAMLQTTTRPNQTPNSKLVEVNPKSEDAGGAEGETPHMLLRPHVFMPEVTPDMDYLPRVPNQGIIINPMLSDETNICNGKPVDGLTTLRNGTLVAFRGHYFWMLSPFSPPSPARRITEVWGIPSPIDTVFTRCNCEGKTFFFKDSQYWRFTNDIKDAGYPKPIFKGFGGLTGQIVAALSTAKYKNWPESVYFFKRGGSIQQYIYKQEPVQKCPGRRPALNYPVYGETTQVRRRRFERAIGPSQTHTIRIQYSPARLAYQDKGVLHNEVKVSILWRGLPNVVTSAISLPNIRKPDGYDYYAFSKDQYYNIDVPSRTARAITTRSGQTLSKVWYNCP

SEQ ID NO: 69572 - protein, 1311 aa, Homo sapiens
  Payload ID: 13795
  Gene Symbol: PRG4
  Gene Name: proteoglycan 4
  Uniprot ID: Q92954
  ENSP ID: ENSP00000356455
MAWKTLPIYLLLLLSVFVIQQVSSQDLSSCAGRCGEGYSRDATCNCDYNCQHYMECCPDFKRVCTAELSCKGRCFESFERGRECDCDAQCKKYDKCCPDYESFCAEVKDNKKNRTKKKPTPKPPVVDEAGSGLDNGDFKVTTPDTSTTQHNKVSTSPKITTAKPINPRPSLPPNSDTSKETSLTVNKETTVETKETTTTNKQTSTDGKEKTTSAKETQSIEKTSAKDLAPTSKVLAKPTPKAETTTKGPALTTPKEPTPTTPKEPASTTPKEPTPTTIKSAPTTPKEPAPTTTKSAPTTPKEPAPTTTKEPAPTTPKEPAPTTTKEPAPTTTKSAPTTPKEPAPTTPKKPAPTTPKEPAPTTPKEPTPTTPKEPAPTTKEPAPTTPKEPAPTAPKKPAPTTPKEPAPTTPKEPAPTTTKEPSPTTPKEPAPTTTKSAPTTTKEPAPTTTKSAPTTPKEPSPTTTKEPAPTTPKEPAPTTPKKPAPTTPKEPAPTTPKEPAPTTTKKPAPTTPKEPAPTTPKETAPTTPKKLTPTTPEKLAPTTPEKPAPTTPEELAPTTPEEPTPTTPEEPAPTTPKAAAPNTPKEPAPTTPKEPAPTTPKEPAPTTPKETAPTTPKGTAPTTLKEPAPTTPKKPAPKELAPTTTKEPTSTTSDKPAPTTPKGTAPTTPKEPAPTTPKEPAPTTPKGTAPTTLKEPAPTTPKKPAPKELAPTTTKGPTSTTSDKPAPTTPKETAPTTPKEPAPTTPKKPAPTTPETPPPTTSEVSTPTTTKEPTTIHKSPDESTPELSAEPTPKALENSPKEPGVPTTKTPAATKPEMTTTAKDKTTERDLRTTPETTTAAPKMTKETATTTEKTTESKITATTTQVTSTTTQDTTPFKITTLKTTTLAPKVTTTKKTITTTEIMNKPEETAKPKDRATNSKATTPKPQKPTKAPKKPTSTKKPKTMPRVRKPKTTPTPRKMTSTMPELNPTSRIAEAMLQTTTRPNQTPNSKLVEVNPKSEDAGGAEGETPHMLLRPHVFMPEVTPDMDYLPRVPNQGIIINPMLSDETNICNGKPVDGLTTLRNGTLVAFRGHYFWMLSPFSPPSPARRITEVWGIPSPIDTVFTRCNCEGKTFFFKDSQYWRFTNDIKDAGYPKPIFKGFGGLTGQIVAALSTAKYKNWPESVYFFKRGGSIQQYIYKQEPVQKCPGRRPALNYPVYGETTQVRRRRFERAIGPSQTHTIRIQYSPARLAYQDKGVLHNEVKVSILWRGLPNVVTSAISLPNIRKPDGYDYYAFSKDQYYNIDVPSRTARAITTRSGQTLSKVWYNCP

SEQ ID NO: 69573 - protein, 1404 aa, Homo sapiens
  Payload ID: 13795
  Gene Symbol: PRG4
  Gene Name: proteoglycan 4
  Uniprot ID: Q92954
  ENSP ID: ENSP00000399679
MAWKTLPIYLLLLLSVFVIQQVSSQDLSSCAGRCGEGYSRDATCNCDYNCQHYMECCPDFKRVCTAELSCKGRCFESFERGRECDCDAQCKKYDKCCPDYESFCAEVHNPTSPPSSKKAPPPSGASQTIKSTTKRSPKPPNKKKTKKVIESEEITEEHSVSENQESSSSSSSSSSSSTIRKIKSSKNSAANRELQKKLKVKDNKKNRTKKKPTPKPPVVDEAGSGLDNGDFKVTTPDTSTTQHNKVSTSPKITTAKPINPRPSLPPNSDTSKETSLTVNKETTVETKETTTTNKQTSTDGKEKTTSAKETQSIEKTSAKDLAPTSKVLAKPTPKAETTTKGPALTTPKEPTPTTPKEPASTTPKEPTPTTIKSAPTTPKEPAPTTTKSAPTTPKEPAPTTTKEPAPTTPKEPAPTTTKEPAPTTTKSAPTTPKEPAPTTPKKPAPTTPKEPAPTTPKEPTPTTPKEPAPTTKEPAPTTPKEPAPTAPKKPAPTTPKEPAPTTPKEPAPTTTKEPSPTTPKEPAPTTTKSAPTTTKEPAPTTTKSAPTTPKEPSPTTTKEPAPTTPKEPAPTTPKKPAPTTPKEPAPTTPKEPAPTTTKKPAPTTPKEPAPTTPKETAPTTPKKLTPTTPEKLAPTTPEKPAPTTPEELAPTTPEEPTPTTPEEPAPTTPKAAAPNTPKEPAPTTPKEPAPTTPKEPAPTTPKETAPTTPKGTAPTTLKEPAPTTPKKPAPKELAPTTTKEPTSTTSDKPAPTTPKGTAPTTPKEPAPTTPKEPAPTTPKGTAPTTLKEPAPTTPKKPAPKELAPTTTKGPTSTTSDKPAPTTPKETAPTTPKEPAPTTPKKPAPTTPETPPPTTSEVSTPTTTKEPTTIHKSPDESTPELSAEPTPKALENSPKEPGVPTTKTPAATKPEMTTTAKDKTTERDLRTTPETTTAAPKMTKETATTTEKTTESKITATTTQVTSTTTQDTTPFKITTLKTTTLAPKVTTTKKTITTTEIMNKPEETAKPKDRATNSKATTPKPQKPTKAPKKPTSTKKPKTMPRVRKPKTTPTPRKMTSTMPELNPTSRIAEAMLQTTTRPNQTPNSKLVEVNPKSEDAGGAEGETPHMLLRPHVFMPEVTPDMDYLPRVPNQGIIINPMLSDETNICNGKPVDGLTTLRNGTLVAFRGHYFWMLSPFSPPSPARRITEVWGIPSPIDTVFTRCNCEGKTFFFKDSQYWRFTNDIKDAGYPKPIFKGFGGLTGQIVAALSTAKYKNWPESVYFFKRGGSIQQYIYKQEPVQKCPGRRPALNYPVYGETTQVRRRRFERAIGPSQTHTIRIQYSPARLAYQDKGVLHNEVKVSILWRGLPNVVTSAISLPNIRKPDGYDYYAFSKDQYYNIDVPSRTARAITTRSGQTLSKVWYNCP

SEQ ID NO: 69574 - protein, 162 aa, Homo sapiens
  Payload ID: 13795
  Gene Symbol: PRG4
  Gene Name: proteoglycan 4
  ENSP ID: ENSP00000431330
MAWKTLPIYLLLLLSVFVIQQVSSQELSCKGRCFESFERGRECDCDAQCKKYDKCCPDYESFCAEEHSVSENQESSSSSSSSSSSSTIRKIKSSKNSAANRELQKKLKVKDNKKNRTKKKPTPKPPVVDEAGSGLDNGDFKVTTPDTSTTQHNKVSTSPKIT

SEQ ID NO: 69575 - protein, 1361 aa, Homo sapiens
  Payload ID: 13795
  Gene Symbol: PRG4
  Gene Name: proteoglycan 4
  ENSP ID: ENSP00000489292
MAWKTLPIYLLLLLSVFVIQQVSSQDLSSCAGRCGEGYSRDATCNCDYNCQHYMECCPDFKRVCTAELSCKGRCFESFERGRECDCDAQCKKYDKCCPDYESFCAEVHNPTSPPSSKKAPPPSGASQTIKSTTKRSPKPPNKKKTKKVIESEEITEVKDNKKNRTKKKPTPKPPVVDEAGSGLDNGDFKVTTPDTSTTQHNKVSTSPKITTAKPINPRPSLPPNSDTSKETSLTVNKETTVETKETTTTNKQTSTDGKEKTTSAKETQSIEKTSAKDLAPTSKVLAKPTPKAETTTKGPALTTPKEPTPTTPKEPASTTPKEPTPTTIKSAPTTPKEPAPTTTKSAPTTPKEPAPTTTKEPAPTTPKEPAPTTTKEPAPTTTKSAPTTPKEPAPTTPKKPAPTTPKEPAPTTPKEPTPTTPKEPAPTTKEPAPTTPKEPAPTAPKKPAPTTPKEPAPTTPKEPAPTTTKEPSPTTPKEPAPTTTKSAPTTTKEPAPTTTKSAPTTPKEPSPTTTKEPAPTTPKEPAPTTPKKPAPTTPKEPAPTTPKEPAPTTTKKPAPTTPKEPAPTTPKETAPTTPKKLTPTTPEKLAPTTPEKPAPTTPEELAPTTPEEPTPTTPEEPAPTTPKAAAPNTPKEPAPTTPKEPAPTTPKEPAPTTPKETAPTTPKGTAPTTLKEPAPTTPKKPAPKELAPTTTKEPTSTTSDKPAPTTPKGTAPTTPKEPAPTTPKEPAPTTPKGTAPTTLKEPAPTTPKKPAPKELAPTTTKGPTSTTSDKPAPTTPKETAPTTPKEPAPTTPKKPAPTTPETPPPTTSEVSTPTTTKEPTTIHKSPDESTPELSAEPTPKALENSPKEPGVPTTKTPAATKPEMTTTAKDKTTERDLRTTPETTTAAPKMTKETATTTEKTTESKITATTTQVTSTTTQDTTPFKITTLKTTTLAPKVTTTKKTITTTEIMNKPEETAKPKDRATNSKATTPKPQKPTKAPKKPTSTKKPKTMPRVRKPKTTPTPRKMTSTMPELNPTSRIAEAMLQTTTRPNQTPNSKLVEVNPKSEDAGGAEGETPHMLLRPHVFMPEVTPDMDYLPRVPNQGIIINPMLSDETNICNGKPVDGLTTLRNGTLVAFRGHYFWMLSPFSPPSPARRITEVWGIPSPIDTVFTRCNCEGKTFFFKDSQYWRFTNDIKDAGYPKPIFKGFGGLTGQIVAALSTAKYKNWPESVYFFKRGGSIQQYIYKQEPVQKCPGRRPALNYPVYGETTQVRRRRFERAIGPSQTHTIRIQYSPARLAYQDKGVLHNEVKVSILWRGLPNVVTSAISLPNIRKPDGYDYYAFSKDQYYNIDVPSRTARAITTRSGQTLSKVWYNCP

SEQ ID NO: 69576 - protein, 111 aa, Homo sapiens
  Payload ID: 13796
  Gene Symbol: PLP1
  Gene Name: proteolipid protein 1
  ENSP ID: ENSP00000391853
MGLLECCARCLVGAPFASLVATGLCFFGVALFCGCGHEALTGTEKLIETYFSKNYQDYEYLINVIHAFQYVIYGTASFFFLYGALLLAEGFYTTGAVRQIFGDYKTTICGK

SEQ ID NO: 69577 - protein, 100 aa, Homo sapiens
  Payload ID: 13796
  Gene Symbol: PLP1
  Gene Name: proteolipid protein 1
  ENSP ID: ENSP00000393391
MGLLECCARCLVGAPFASLVATGLCFFGVALFCGCGHEALTGTEKLIETYFSKNYQDYEYLINVIHAFQYVIYGTASFFFLYGALLLAEGFYTTGAVRQI

SEQ ID NO: 69578 - protein, 122 aa, Homo sapiens
  Payload ID: 13796
  Gene Symbol: PLP1
  Gene Name: proteolipid protein 1
  ENSP ID: ENSP00000403335
MGLLECCARCLVGAPFASLVATGLCFFGVALFCGCGHEALTGTEKLIETYFSKNYQDYEYLINVIHAFQYVIYGTASFFFLYGALLLAEGFYTTGAVRQIFGDYKTTICGKGLSATVTGGQK

SEQ ID NO: 69579 - protein, 136 aa, Homo sapiens
  Payload ID: 13796
  Gene Symbol: PLP1
  Gene Name: proteolipid protein 1
  ENSP ID: ENSP00000409802
MGLLECCARCLVGAPFASLVATGLCFFGVALFCGCGHEALTGTEKLIETYFSKNYQDYEYLINVIHAFQYVIYGTASFFFLYGALLLAEGFYTTGAVRQIFGDYKTTICGKGLSATVTGGQKGRGSRGQHQAHSLE

SEQ ID NO: 69580 - protein, 127 aa, Homo sapiens
  Payload ID: 13796
  Gene Symbol: PLP1
  Gene Name: proteolipid protein 1
  ENSP ID: ENSP00000413931
MGLLECCARCLVGAPFASLVATGLCFFGVALFCGCGHEALTGTEKLIETYFSKNYQDYEYLINVIHAFQYVIYGTASFFFLYGALLLAEGFYTTGAVRQIFGDYKTTICGKGLSATVTGGQKGRGSR

SEQ ID NO: 69581 - protein, 242 aa, Homo sapiens
  Payload ID: 13796
  Gene Symbol: PLP1
  Gene Name: proteolipid protein 1
  Uniprot ID: P60201
  ENSP ID: ENSP00000477619
MGLLECCARCLVGAPFASLVATGLCFFGVALFCGCGHEALTGTEKLIETYFSKNYQDYEYLINVIHAFQYVIYGTASFFFLYGALLLAEGFYTTGAVRQIFGDYKTTICGKGLSATFVGITYALTVVWLLVFACSAVPVYIYFNTWTTCQSIAFPSKTSASIGSLCADARMYGVLPWNAFPGKVCGSNLLSICKTAEFQMTFHLFIAAFVGAAATLVSLLTFMIAATYNFAVLKLMGRGTKF

SEQ ID NO: 69582 - protein, 136 aa, Homo sapiens; identical to SEQ ID NO: 69579
  Payload ID: 13796
  Gene Symbol: PLP1
  Gene Name: proteolipid protein 1
  ENSP ID: ENSP00000480409

SEQ ID NO: 69583 - protein, 277 aa, Homo sapiens
  Payload ID: 13796
  Gene Symbol: PLP1
  Gene Name: proteolipid protein 1
  Uniprot ID: P60201
  ENSP ID: ENSP00000481006
MGLLECCARCLVGAPFASLVATGLCFFGVALFCGCGHEALTGTEKLIETYFSKNYQDYEYLINVIHAFQYVIYGTASFFFLYGALLLAEGFYTTGAVRQIFGDYKTTICGKGLSATVTGGQKGRGSRGQHQAHSLERVCHCLGKWLGHPDKFVGITYALTVVWLLVFACSAVPVYIYFNTWTTCQSIAFPSKTSASIGSLCADARMYGVLPWNAFPGKVCGSNLLSICKTAEFQMTFHLFIAAFVGAAATLVSLLTFMIAATYNFAVLKLMGRGTKF

SEQ ID NO: 69584 - protein, 277 aa, Homo sapiens; identical to SEQ ID NO: 69583
  Payload ID: 13796
  Gene Symbol: PLP1
  Gene Name: proteolipid protein 1
  Uniprot ID: P60201
  ENSP ID: ENSP00000484450

SEQ ID NO: 69585 - protein, 145 aa, Homo sapiens
  Payload ID: 13797
  Gene Symbol: PLP2
  Gene Name: proteolipid protein 2 (colonic epithelium-enriched)
  Uniprot ID: Q04941
  ENSP ID: ENSP00000365500
MADSERLSAPGCWAACTNFSRTRKGILLFAEIILCLVILICFSASTPGYSSLSVIEMILAAIFFVVYMCDLHTKIPFINWPWSDFFRTLIAAILYLITSIVVLVERGNHSKIVAGVKAMGAALKHRAKGLRSQGPFLPLLLAEIV

SEQ ID NO: 69586 - protein, 152 aa, Homo sapiens
  Payload ID: 13797
  Gene Symbol: PLP2
  Gene Name: proteolipid protein 2 (colonic epithelium-enriched)
  Uniprot ID: Q04941
  ENSP ID: ENSP00000365505
MADSERLSAPGCWAACTNFSRTRKGILLFAEIILCLVILICFSASTPGYSSLSVIEMILAAIFFVVYMCDLHTKIPFINWPWSDFFRTLIAAILYLITSIVVLVERGNHSKIVAGVLGLIATCLFGYDAYVTFPVRQPRHTAAPTDPADGPV

SEQ ID NO: 69587 - protein, 111 aa, Homo sapiens
  Payload ID: 13798
  Gene Symbol: PTMA
  Gene Name: prothymosin, alpha
  Uniprot ID: P06454
  ENSP ID: ENSP00000344547
MSDAAVDTSSEITTKDLKEKKEVVEEAENGRDAPANGNAENEENGEQEADNEVDEEEEEGGEEEEEEEEGDGEEEDGDEDEEAESATGKRAAEDDEDDDVDTKKQKTDEDD

SEQ ID NO: 69588 - protein, 107 aa, Homo sapiens
  Payload ID: 13798
  Gene Symbol: PTMA
  Gene Name: prothymosin, alpha
  ENSP ID: ENSP00000386519
MSDAAVDTSSEITTKDLKEKKEVVEEAENGRDAPANGNANEENGEQEADNEVDEEEEEGGEEEEEEEEGDEDGDEDEEAESATGKRAAEDDEDDDVDTKKQKTDEDD

SEQ ID NO: 69589 - protein, 131 aa, Homo sapiens
  Payload ID: 13798
  Gene Symbol: PTMA
  Gene Name: prothymosin, alpha
  ENSP ID: ENSP00000386645
MNPCVLGTVPACRLTWPTDAGPDDAAVDTSSEITTKDLKEKKEVVEEAENGRDAPANGNANEENGEQEADNEVDEEEEEGGEEEEEEEEGDGEEEDGDEDEEAESATGKRAAEDDEDDDVDTKKQKTDEDD

SEQ ID NO: 69590 - protein, 110 aa, Homo sapiens
  Payload ID: 13798
  Gene Symbol: PTMA
  Gene Name: prothymosin, alpha
  Uniprot ID: P06454
  ENSP ID: ENSP00000386819
MSDAAVDTSSEITTKDLKEKKEVVEEAENGRDAPANGNANEENGEQEADNEVDEEEEEGGEEEEEEEEGDGEEEDGDEDEEAESATGKRAAEDDEDDDVDTKKQKTDEDD

SEQ ID NO: 69591 - protein, 136 aa, Homo sapiens
  Payload ID: 13798
  Gene Symbol: PTMA
  Gene Name: prothymosin, alpha
  ENSP ID: ENSP00000387102
MQTFGPAGVAAVGRRVESPADRRATRARATASSACRPGVSKDLKEKKEVVEEAENGRDAPANGNANEENGEQEADNEVDEEEEEGGEEEEEEEEGDGEEEDGDEDEEAESATGKRAAEDDEDDDVDTKKQKTDEDD

SEQ ID NO: 69592 - protein, 74 aa, Homo sapiens
  Payload ID: 13798
  Gene Symbol: PTMA
  Gene Name: prothymosin, alpha
  ENSP ID: ENSP00000392732
GAGRTERADRWPGAARRTAAEGFPQARTPDLCWYWWPCRVEKVTGRPGPRCLLDPGRSPTPEDLKEKKEVVEEA

SEQ ID NO: 69593 - protein, 43 aa, Homo sapiens
  Payload ID: 13798
  Gene Symbol: PTMA
  Gene Name: prothymosin, alpha
  ENSP ID: ENSP00000400406
MNPCVLGTVPACRLTWPTDAGPDGLKGEEGSCGRGRKWKRRPC

SEQ ID NO: 69594 - protein, 148 aa, Homo sapiens
  Payload ID: 13798
  Gene Symbol: PTMA
  Gene Name: prothymosin, alpha
  ENSP ID: ENSP00000406903
  MOD_RES (1)..(1): Any amino acid
XSPGLRPPGGESGRSRGPRSGAGRAGLRGPTGGPEPLAGQRPRGSRRPGRRTSDLKEKKEVVEEAENGRDAPANGNANEENGEQEADNEVDEEEEEGGEEEEEEEEGDGEEEDGDEDEEAESATGKRAAEDDEDDDVDTKKQKTDEDD

SEQ ID NO: 69595 - protein, 135 aa, Homo sapiens
  Payload ID: 13798
  Gene Symbol: PTMA
  Gene Name: prothymosin, alpha
  ENSP ID: ENSP00000478904
MQTFGPAGVAAVGRRVESPADRRATRARACKLCLPAGSLQGLKGEEGSVEEAENGRDAPANGNANEENGEQEADNEVDEEEEEGGEEEEEEEEGDGEEEDGDEDEEAESATGKRAAEDDEDDDVDTKKQKTDEDD

SEQ ID NO: 69596 - protein, 1237 aa, Homo sapiens
  Payload ID: 13799
  Gene Symbol: PCDH1
  Gene Name: protocadherin 1
  Uniprot ID: Q08174
  ENSP ID: ENSP00000287008
MDSGAGGRRCPEAALLILGPPRMEHLRHSPGPGGQRLLLPSMLLALLLLLAPSPGHATRVVYKVPEEQPPNTLIGSLAADYGFPDVGHLYKLEVGAPYLRVDGKTGDIFTTETSIDREGLRECQNQLPGDPCILEFEVSITDLVQNGSPRLLEGQIEVQDINDNTPNFASPVITLAIPENTNIGSLFPIPLASDRDAGPNGVASYELQAGPEAQELFGLQVAEDQEEKQPQLIVMGNLDRERWDSYDLTIKVQDGGSPPRASSALLRVTVLDTNDNAPKFERPSYEAELSENSPIGHSVIQVKANDSDQGANAEIEYTFHQAPEVVRRLLRLDRNTGLITVQGPVDREDLSTLRFSVLAKDRGTNPKSARAQVVVTVKDMNDNAPTIEIRGIGLVTHQDGMANISEDVAEETAVALVQVSDRDEGENAAVTCVVAGDVPFQLRQASETGSDSKKKYFLQTTTPLDYEKVKDYTIEIVAVDSGNPPLSSTNSLKVQVVDVNDNAPVFTQSVTEVAFPENNKPGEVIAEITASDADSGSNAELVYSLEPEPAAKGLFTISPETGEIQVKTSLDREQRESYELKVVAADRGSPSLQGTATVLVNVLDCNDNDPKFMLSGYNFSVMENMPALSPVGMVTVIDGDKGENAQVQLSVEQDNGDFVIQNGTGTILSSLSFDREQQSTYTFQLKAVDGGVPPRSAYVGVTINVLDENDNAPYITAPSNTSHKLLTPQTRLGETVSQVAAEDFDSGVNAELIYSIAGGNPYGLFQIGSHSGAITLEKEIERRHHGLHRLVVKVSDRGKPPRYGTALVHLYVNETLANRTLLETLLGHSLDTPLDIDIAGDPEYERSKQRGNILFGVVAGVVAVALLIALAVLVRYCRQREAKSGYQAGKKETKDLYAPKPSGKASKGNKSKGKKSKSPKPVKPVEDEDEAGLQKSLKFNLMSDAPGDSPRIHLPLNYPPGSPDLGRHYRSNSPLPSIQLQPQSPSASKKHQVVQDLPPANTFVGTGDTTSTGSEQYSDYSYRTNPPKYPSKQLPHRRVTFSATSQAQELQDPSQHSYYDSGLEESETPSSKSSSGPRLGPLALPEDHYERTTPDGSIGEMEHPENDLRPLPDVAMTGTCTRECSEFGHSDTCWMPGQSSPSRRTKSSALKLSTFVPYQDRGGQEPAGAGSPSPPEDRNTKTAPVRLLPSYSAFSHSSHDSCKDSATLEEIPLTQTSDFPPAATPASAQTAKREIYL

SEQ ID NO: 69597 - protein, 1060 aa, Homo sapiens
  Payload ID: 13799
  Gene Symbol: PCDH1
  Gene Name: protocadherin 1
  Uniprot ID: Q08174
  ENSP ID: ENSP00000378043
MDSGAGGRRCPEAALLILGPPRMEHLRHSPGPGGQRLLLPSMLLALLLLLAPSPGHATRVVYKVPEEQPPNTLIGSLAADYGFPDVGHLYKLEVGAPYLRVDGKTGDIFTTETSIDREGLRECQNQLPGDPCILEFEVSITDLVQNGSPRLLEGQIEVQDINDNTPNFASPVITLAIPENTNIGSLFPIPLASDRDAGPNGVASYELQAGPEAQELFGLQVAEDQEEKQPQLIVMGNLDRERWDSYDLTIKVQDGGSPPRASSALLRVTVLDTNDNAPKFERPSYEAELSENSPIGHSVIQVKANDSDQGANAEIEYTFHQAPEVVRRLLRLDRNTGLITVQGPVDREDLSTLRFSVLAKDRGTNPKSARAQVVVTVKDMNDNAPTIEIRGIGLVTHQDGMANISEDVAEETAVALVQVSDRDEGENAAVTCVVAGDVPFQLRQASETGSDSKKKYFLQTTTPLDYEKVKDYTIEIVAVDSGNPPLSSTNSLKVQVVDVNDNAPVFTQSVTEVAFPENNKPGEVIAEITASDADSGSNAELVYSLEPEPAAKGLFTISPETGEIQVKTSLDREQRESYELKVVAADRGSPSLQGTATVLVNVLDCNDNDPKFMLSGYNFSVMENMPALSPVGMVTVIDGDKGENAQVQLSVEQDNGDFVIQNGTGTILSSLSFDREQQSTYTFQLKAVDGGVPPRSAYVGVTINVLDENDNAPYITAPSNTSHKLLTPQTRLGETVSQVAAEDFDSGVNAELIYSIAGGNPYGLFQIGSHSGAITLEKEIERRHHGLHRLVVKVSDRGKPPRYGTALVHLYVNETLANRTLLETLLGHSLDTPLDIDIAGDPEYERSKQRGNILFGVVAGVVAVALLIALAVLVRYCRQREAKSGYQAGKKETKDLYAPKPSGKASKGNKSKGKKSKSPKPVKPVEDEDEAGLQKSLKFNLMSDAPGDSPRIHLPLNYPPGSPDLGRHYRSNSPLPSIQLQPQSPSASKKHQVVQDLPPANTFVGTGDTTSTGSEQYSDYSYRTNPPKYPSKQVGQPFQLSTPQPLPHPYHGAIWTEVWE

SEQ ID NO: 69598 - protein, 126 aa, Homo sapiens
  Payload ID: 13799
  Gene Symbol: PCDH1
  Gene Name: protocadherin 1
  ENSP ID: ENSP00000424004
  MOD_RES (1)..(1): Any amino acid
XGPNGVASYELQAGPEAQELFGLQVAEDQEEKQPQLIVMGNLDRERWDSYDLTIKVQDGGSPPRASSALLRVTVLDTNDNAPKFERPSYEAELSENSPIGHSVIQSLVDWDLEKRLRKKRETDSRG

SEQ ID NO: 69599 - protein, 150 aa, Homo sapiens
  Payload ID: 13799
  Gene Symbol: PCDH1
  Gene Name: protocadherin 1
  ENSP ID: ENSP00000424163
MEHLRHSPGPGGQRLLLPSMLLALLLLLAPSPGHATRVVYKVPEEQPPNTLIGSLAADYGFPDVGHLYKLEVGAPYLRVDGKTGDIFTTETSIDREGLRECQNQLPGDPCILEFEVSITDLVQNGSPRLLEGQIEVQDINDNTPNFASPV

SEQ ID NO: 69600 - protein, 17 aa, Homo sapiens
  Payload ID: 13799
  Gene Symbol: PCDH1
  Gene Name: protocadherin 1
  ENSP ID: ENSP00000424204
  MOD_RES (1)..(1): Any amino acid
XIQVRGPLRITVRVTHH

SEQ ID NO: 69601 - protein, 382 aa, Homo sapiens
  Payload ID: 13799
  Gene Symbol: PCDH1
  Gene Name: protocadherin 1
  ENSP ID: ENSP00000424667
MDSGAGGRRCPEAALLILGPPRMEHLRHSPGPGGQRLLLPSMLLALLLLLAPSPGHATRVVYKVPEEQPPNTLIGSLAADYGFPDVGHLYKLEVGAPYLRVDGKTGDIFTTETSIDREGLRECQNQLPGDPCILEFEVSITDLVQNGSPRLLEGQIEVQDINDNTPNFASPVITLAIPENTNIGSLFPIPLASDRDAGPNGVASYELQAGPEAQELFGLQVAEDQEEKQPQLIVMGNLDRERWDSYDLTIKVQDGGSPPRASSALLRVTVLDTNDNAPKFERPSYEAELSENSPIGHSVIQLPHRRVTFSATSQAQELQDPSQHSYYDSGLEESETPSSKSSSGPRLGPLALPEDHYERTTPDGSIGEMEHPENEPAGRSRP

SEQ ID NO: 69602 - protein, 1040 aa, Homo sapiens
  Payload ID: 13800
  Gene Symbol: PCDH10
  Gene Name: protocadherin 10
  Uniprot ID: Q9P2E7
  ENSP ID: ENSP00000264360
MIVLLLFALLWMVEGVFSQLHYTVQEEQEHGTFVGNIAEDLGLDITKLSARGFQTVPNSRTPYLDLNLETGVLYVNEKIDREQICKQSPSCVLHLEVFLENPLELFQVEIEVLDINDNPPSFPEPDLTVEISESATPGTRFPLESAFDPDVGTNSLRDYEITPNSYFSLDVQTQGDGNRFAELVLEKPLDREQQAVHRYVLTAVDGGGGGGVGEGGGGGGGAGLPPQQQRTGTALLTIRVLDSNDNVPAFDQPVYTVSLPENSPPGTLVIQLNATDPDEGQNGEVVYSFSSHISPRARELFGLSPRTGRLEVSGELDYEESPVYQVYVQAKDLGPNAVPAHCKVLVRVLDANDNAPEISFSTVKEAVSEGAAPGTVVALFSVTDRDSEENGQVQCELLGDVPFRLKSSFKNYYTIVTEAPLDREAGDSYTLTVVARDRGEPALSTSKSIQVQVSDVNDNAPRFSQPVYDVYVTENNVPGAYIYAVSATDRDEGANAQLAYSILECQIQGMSVFTYVSINSENGYLYALRSFDYEQLKDFSFQVEARDAGSPQALAGNATVNILIVDQNDNAPAIVAPLPGRNGTPAREVLPRSAEPGYLLTRVAAVDADDGENARLTYSIVRGNEMNLFRMDWRTGELRTARRVPAKRDPQRPYELVIEVRDHGQPPLSSTATLVVQLVDGAVEPQGGGGSGGGGSGEHQRPSRSGGGETSLDLTLILIIALGSVSFIFLLAMIVLAVRCQKEKKLNIYTCLASDCCLCCCCCGGGGSTCCGRQARARKKKLSKSDIMLVQSSNVPSNPAQVPIEESGGFGSHHHNQNYCYQVCLTPESAKTDLMFLKPCSPSRSTDTEHNPCGAIVTGYTDQQPDIISNGSILSNETKHQRAELSYLVDRPRRVNSSAFQEADIVSSKDSGHGDSEQGDSDHDATNRAQSAGMDLFSNCTEECKALGHSDRCWMPSFVPSDGRQAADYRSNLHVPGMDSVPDTEVFETPEAQPGAERSFSTFGKEKALHSTLERKELDGLLTNTRAPYKPPYLTRKRIC

SEQ ID NO: 69603 - protein, 896 aa, Homo sapiens
  Payload ID: 13800
  Gene Symbol: PCDH10
  Gene Name: protocadherin 10
  Uniprot ID: Q9P2E7
  ENSP ID: ENSP00000480512
MIVLLLFALLWMVEGVFSQLHYTVQEEQEHGTFVGNIAEDLGLDITKLSARGFQTVPNSRTPYLDLNLETGVLYVNEKIDREQICKQSPSCVLHLEVFLENPLELFQVEIEVLDINDNPPSFPEPDLTVEISESATPGTRFPLESAFDPDVGTNSLRDYEITPNSYFSLDVQTQGDGNRFAELVLEKPLDREQQAVHRYVLTAVDGGGGGGVGEGGGGGGGAGLPPQQQRTGTALLTIRVLDSNDNVPAFDQPVYTVSLPENSPPGTLVIQLNATDPDEGQNGEVVYSFSSHISPRARELFGLSPRTGRLEVSGELDYEESPVYQVYVQAKDLGPNAVPAHCKVLVRVLDANDNAPEISFSTVKEAVSEGAAPGTVVALFSVTDRDSEENGQVQCELLGDVPFRLKSSFKNYYTIVTEAPLDREAGDSYTLTVVARDRGEPALSTSKSIQVQVSDVNDNAPRFSQPVYDVYVTENNVPGAYIYAVSATDRDEGANAQLAYSILECQIQGMSVFTYVSINSENGYLYALRSFDYEQLKDFSFQVEARDAGSPQALAGNATVNILIVDQNDNAPAIVAPLPGRNGTPAREVLPRSAEPGYLLTRVAAVDADDGENARLTYSIVRGNEMNLFRMDWRTGELRTARRVPAKRDPQRPYELVIEVRDHGQPPLSSTATLVVQLVDGAVEPQGGGGSGGGGSGEHQRPSRSGGGETSLDLTLILIIALGSVSFIFLLAMIVLAVRCQKEKKLNIYTCLASDCCLCCCCCGGGGSTCCGRQARARKKKLSKSDIMLVQSSNVPSNPAQVPIEESGGFGSHHHNQNYCYQVCLTPESAKTDLMFLKPCSPSRSTDTEHNPCGAIVTGYTDQQPDIISNGSILSNEVRLKRKDHHLSSPPSESLL

SEQ ID NO: 69604 - protein, 1329 aa, Homo sapiens
  Payload ID: 13801
  Gene Symbol: PCDH11X
  Gene Name: protocadherin 11 X-linked
  Uniprot ID: Q9BZA7
  ENSP ID: ENSP00000355105
MDLLSGTYIFAVLLACVVFHSGAQEKNYTIREEMPENVLIGDLLKDLNLSLIPNKSLTTAMQFKLVYKTGDVPLIRIEEDTGEIFTTGARIDREKLCAGIPRDEHCFYEVEVAILPDEIFRLVKIRFLIEDINDNAPLFPATVINISIPENSAINSKYTLPAAVDPDVGINGVQNYELIKSQNIFGLDVIETPEGDKMPQLIVQKELDREEKDTYVMKVKVEDGGFPQRSSTAILQVSVTDTNDNHPVFKETEIEVSIPENAPVGTSVTQLHATDADIGENAKIHFSFSNLVSNIARRLFHLNATTGLITIKEPLDREETPNHKLLVLASDGGLMPARAMVLVNVTDVNDNVPSIDIRYIVNPVNDTVVLSENIPLNTKIALITVTDKDADHNGRVTCFTDHEIPFRLRPVFSNQFLLETAAYLDYESTKEYAIKLLAADAGKPPLNQSAMLFIKVKDENDNAPVFTQSFVTVSIPENNSPGIQLTKVSAMDADSGPNAKINYLLGPDAPPEFSLDCRTGMLTVVKKLDREKEDKYLFTILAKDNGVPPLTSNVTVFVSIIDQNDNSPVFTHNEYNFYVPENLPRHGTVGLITVTDPDYGDNSAVTLSILDENDDFTIDSQTGVIRPNISFDREKQESYTFYVKAEDGGRVSRSSSAKVTINVVDVNDNKPVFIVPPSNCSYELVLPSTNPGTVVFQVIAVDNDTGMNAEVRYSIVGGNTRDLFAIDQETGNITLMEKCDVTDLGLHRVLVKANDLGQPDSLFSVVIVNLFVNESVTNATLINELVRKSTEAPVTPNTEIADVSSPTSDYVKILVAAVAGTITVVVVIFITAVVRCRQAPHLKAAQKNKQNSEWATPNPENRQMIMMKKKKKKKKHSPKNLLLNFVTIEETKADDVDSDGNRVTLDLPIDLEEQTMGKYNWVTTPTTFKPDSPDLARHYKSASPQPAFQIQPETPLNSKHHIIQELPLDNTFVACDSISKCSSSSSDPYSVSDCGYPVTTFEVPVSVHTRPPMKEVVRSCTPMKESTTMEIWIHPQPQSQRRVTFHLPEGSQESSSDGGLGDHDAGSLTSTSHGLPLGYPQEEYFDRATPSNRTEGDGNSDPESTAEITVQPTVEEASDNCTQECLIYGHSDACWMPASLDHSSSSQAQASALCHSPPLSQASTQHHSPRVTQTIALCHSPPVTQTIALCHSPPPIQVSALHHSPPLVQATALHHSPPSAQASALCYSPPLAQAAAISHSSPLPQVIALHRSQAQSSVSLQQGWVQGADGLCSVDQGVQGSATSQFYTMSERLHPSDDSIKVIPLTTFTPRQQARPSRGDSPIMEEHPL

SEQ ID NO: 69605 - protein, 1310 aa, Homo sapiens
  Payload ID: 13801
  Gene Symbol: PCDH11X
  Gene Name: protocadherin 11 X-linked
  Uniprot ID: Q9BZA7
  ENSP ID: ENSP00000362180
MDLLSGTYIFAVLLACVVFHSGAQEKNYTIREEMPENVLIGDLLKDLNLSLIPNKSLTTAMQFKLVYKTGDVPLIRIEEDTGEIFTTGARIDREKLCAGIPRDEHCFYEVEVAILPDEIFRLVKIRFLIEDINDNAPLFPATVINISIPENSAINSKYTLPAAVDPDVGINGVQNYELIKSQNIFGLDVIETPEGDKMPQLIVQKELDREEKDTYVMKVKVEDGGFPQRSSTAILQVSVTDTNDNHPVFKETEIEVSIPENAPVGTSVTQLHATDADIGENAKIHFSFSNLVSNIARRLFHLNATTGLITIKEPLDREETPNHKLLVLASDGGLMPARAMVLVNVTDVNDNVPSIDIRYIVNPVNDTVVLSENIPLNTKIALITVTDKDADHNGRVTCFTDHEIPFRLRPVFSNQFLLETAAYLDYESTKEYAIKLLAADAGKPPLNQSAMLFIKVKDENDNAPVFTQSFVTVSIPENNSPGIQLTKVSAMDADSGPNAKINYLLGPDAPPEFSLDCRTGMLTVVKKLDREKEDKYLFTILAKDNGVPPLTSNVTVFVSIIDQNDNSPVFTHNEYNFYVPENLPRHGTVGLITVTDPDYGDNSAVTLSILDENDDFTIDSQTGVIRPNISFDREKQESYTFYVKAEDGGRVSRSSSAKVTINVVDVNDNKPVFIVPPSNCSYELVLPSTNPGTVVFQVIAVDNDTGMNAEVRYSIVGGNTRDLFAIDQETGNITLMEKCDVTDLGLHRVLVKANDLGQPDSLFSVVIVNLFVNESVTNATLINELVRKSTEAPVTPNTEIADVSSPTSDYVKILVAAVAGTITVVVVIFITAVVRCRQAPHLKAAQKNKQNSEWATPNPENRQMIMMKKKKKKKKHSPKNLLLNFVTIEETKADDVDSDGNRVTLDLPIDLEEQTMGKYNWVTTPTTFKPDSPDLARHYKSASPQPAFQIQPETPLNSKHHIIQELPLDNTFVACDSISKCSSSSSDPYSVSDCGYPVTTFEVPVSVHTRPSQRRVTFHLPEGSQESSSDGGLGDHDAGSLTSTSHGLPLGYPQEEYFDRATPSNRTEGDGNSDPESTFIPGLKKAAEITVQPTVEEASDNCTQECLIYGHSDACWMPASLDHSSSSQAQASALCHSPPLSQASTQHHSPRVTQTIALCHSPPVTQTIALCHSPPPIQVSALHHSPPLVQATALHHSPPSAQASALCYSPPLAQAAAISHSSPLPQVIALHRSQAQSSVSLQQGWVQGADGLCSVDQGVQGSATSQFYTMSERLHPSDDSIKVIPLTTFTPRQQARPSRGDSPIMEEHPL

SEQ ID NO: 69606 - protein, 1347 aa, Homo sapiens
  Payload ID: 13801
  Gene Symbol: PCDH11X
  Gene Name: protocadherin 11 X-linked
  Uniprot ID: Q9BZA7
  ENSP ID: ENSP00000362186
MDLLSGTYIFAVLLACVVFHSGAQEKNYTIREEMPENVLIGDLLKDLNLSLIPNKSLTTAMQFKLVYKTGDVPLIRIEEDTGEIFTTGARIDREKLCAGIPRDEHCFYEVEVAILPDEIFRLVKIRFLIEDINDNAPLFPATVINISIPENSAINSKYTLPAAVDPDVGINGVQNYELIKSQNIFGLDVIETPEGDKMPQLIVQKELDREEKDTYVMKVKVEDGGFPQRSSTAILQVSVTDTNDNHPVFKETEIEVSIPENAPVGTSVTQLHATDADIGENAKIHFSFSNLVSNIARRLFHLNATTGLITIKEPLDREETPNHKLLVLASDGGLMPARAMVLVNVTDVNDNVPSIDIRYIVNPVNDTVVLSENIPLNTKIALITVTDKDADHNGRVTCFTDHEIPFRLRPVFSNQFLLETAAYLDYESTKEYAIKLLAADAGKPPLNQSAMLFIKVKDENDNAPVFTQSFVTVSIPENNSPGIQLTKVSAMDADSGPNAKINYLLGPDAPPEFSLDCRTGMLTVVKKLDREKEDKYLFTILAKDNGVPPLTSNVTVFVSIIDQNDNSPVFTHNEYNFYVPENLPRHGTVGLITVTDPDYGDNSAVTLSILDENDDFTIDSQTGVIRPNISFDREKQESYTFYVKAEDGGRVSRSSSAKVTINVVDVNDNKPVFIVPPSNCSYELVLPSTNPGTVVFQVIAVDNDTGMNAEVRYSIVGGNTRDLFAIDQETGNITLMEKCDVTDLGLHRVLVKANDLGQPDSLFSVVIVNLFVNESVTNATLINELVRKSTEAPVTPNTEIADVSSPTSDYVKILVAAVAGTITVVVVIFITAVVRCRQAPHLKAAQKNKQNSEWATPNPENRQMIMMKKKKKKKKHSPKNLLLNFVTIEETKADDVDSDGNRVTLDLPIDLEEQTMGKYNWVTTPTTFKPDSPDLARHYKSASPQPAFQIQPETPLNSKHHIIQELPLDNTFVACDSISKCSSSSSDPYSVSDCGYPVTTFEVPVSVHTRPPMKEVVRSCTPMKESTTMEIWIHPQPQRKSEGKVAGKSQRRVTFHLPEGSQESSSDGGLGDHDAGSLTSTSHGLPLGYPQEEYFDRATPSNRTEGDGNSDPESTFIPGLKKAAEITVQPTVEEASDNCTQECLIYGHSDACWMPASLDHSSSSQAQASALCHSPPLSQASTQHHSPRVTQTIALCHSPPVTQTIALCHSPPPIQVSALHHSPPLVQATALHHSPPSAQASALCYSPPLAQAAAISHSSPLPQVIALHRSQAQSSVSLQQGWVQGADGLCSVDQGVQGSATSQFYTMSERLHPSDDSIKVIPLTTFTPRQQARPSRGDSPIMEEHPL

SEQ ID NO: 69607 - protein, 1337 aa, Homo sapiens
  Payload ID: 13801
  Gene Symbol: PCDH11X
  Gene Name: protocadherin 11 X-linked
  Uniprot ID: Q9BZA7
  ENSP ID: ENSP00000362189
MDLLSGTYIFAVLLACVVFHSGAQEKNYTIREEMPENVLIGDLLKDLNLSLIPNKSLTTAMQFKLVYKTGDVPLIRIEEDTGEIFTTGARIDREKLCAGIPRDEHCFYEVEVAILPDEIFRLVKIRFLIEDINDNAPLFPATVINISIPENSAINSKYTLPAAVDPDVGINGVQNYELIKSQNIFGLDVIETPEGDKMPQLIVQKELDREEKDTYVMKVKVEDGGFPQRSSTAILQVSVTDTNDNHPVFKETEIEVSIPENAPVGTSVTQLHATDADIGENAKIHFSFSNLVSNIARRLFHLNATTGLITIKEPLDREETPNHKLLVLASDGGLMPARAMVLVNVTDVNDNVPSIDIRYIVNPVNDTVVLSENIPLNTKIALITVTDKDADHNGRVTCFTDHEIPFRLRPVFSNQFLLETAAYLDYESTKEYAIKLLAADAGKPPLNQSAMLFIKVKDENDNAPVFTQSFVTVSIPENNSPGIQLTKVSAMDADSGPNAKINYLLGPDAPPEFSLDCRTGMLTVVKKLDREKEDKYLFTILAKDNGVPPLTSNVTVFVSIIDQNDNSPVFTHNEYNFYVPENLPRHGTVGLITVTDPDYGDNSAVTLSILDENDDFTIDSQTGVIRPNISFDREKQESYTFYVKAEDGGRVSRSSSAKVTINVVDVNDNKPVFIVPPSNCSYELVLPSTNPGTVVFQVIAVDNDTGMNAEVRYSIVGGNTRDLFAIDQETGNITLMEKCDVTDLGLHRVLVKANDLGQPDSLFSVVIVNLFVNESVTNATLINELVRKSTEAPVTPNTEIADVSSPTSDYVKILVAAVAGTITVVVVIFITAVVRCRQAPHLKAAQKNKQNSEWATPNPENRQMIMMKKKKKKKKHSPKNLLLNFVTIEETKADDVDSDGNRVTLDLPIDLEEQTMGKYNWVTTPTTFKPDSPDLARHYKSASPQPAFQIQPETPLNSKHHIIQELPLDNTFVACDSISKCSSSSSDPYSVSDCGYPVTTFEVPVSVHTRPPMKEVVRSCTPMKESTTMEIWIHPQPQSQRRVTFHLPEGSQESSSDGGLGDHDAGSLTSTSHGLPLGYPQEEYFDRATPSNRTEGDGNSDPESTFIPGLKKAAEITVQPTVEEASDNCTQECLIYGHSDACWMPASLDHSSSSQAQASALCHSPPLSQASTQHHSPRVTQTIALCHSPPVTQTIALCHSPPPIQVSALHHSPPLVQATALHHSPPSAQASALCYSPPLAQAAAISHSSPLPQVIALHRSQAQSSVSLQQGWVQGADGLCSVDQGVQGSATSQFYTMSERLHPSDDSIKVIPLTTFTPRQQARPSRGDSPIMEEHPL

SEQ ID NO: 69608 - protein, 1016 aa, Homo sapiens
  Payload ID: 13801
  Gene Symbol: PCDH11X
  Gene Name: protocadherin 11 X-linked
  ENSP ID: ENSP00000378746
MDLLSGTYIFAVLLACVVFHSGAQEKNYTIREEMPENVLIGDLLKDLNLSLIPNKSLTTAMQFKLVYKTGDVPLIRIEEDTGEIFTTGARIDREKLCAGIPRDEHCFYEVEVAILPDEIFRLVKIRFLIEDINDNAPLFPATVINISIPENSAINSKYTLPAAVDPDVGINGVQNYELIKSQNIFGLDVIETPEGDKMPQLIVQKELDREEKDTYVMKVKVEDGGFPQRSSTAILQVSVTDTNDNHPVFKETEIEVSIPENAPVGTSVTQLHATDADIGENAKIHFSFSNLVSNIARRLFHLNATTGLITIKEPLDREETPNHKLLVLASDGGLMPARAMVLVNVTDVNDNVPSIDIRYIVNPVNDTVVLSENIPLNTKIALITVTDKDADHNGRVTCFTDHEIPFRLRPVFSNQFLLETAAYLDYESTKEYAIKLLAADAGKPPLNQSAMLFIKVKDENDNAPVFTQSFVTVSIPENNSPGIQLTKVSAMDADSGPNAKINYLLGPDAPPEFSLDCRTGMLTVVKKLDREKEDKYLFTILAKDNGVPPLTSNVTVFVSIIDQNDNSPVFTHNEYNFYVPENLPRHGTVGLITVTDPDYGDNSAVTLSILDENDDFTIDSQTGVIRPNISFDREKQESYTFYVKAEDGGRVSRSSSAKVTINVVDVNDNKPVFIVPPSNCSYELVLPSTNPGTVVFQVIAVDNDTGMNAEVRYSIVGGNTRDLFAIDQETGNITLMEKCDVTDLGLHRVLVKANDLGQPDSLFSVVIVNLFVNESVTNATLINELVRKSTEAPVTPNTEIADVSSPTSDYVKILVAAVAGTITVVVVIFITAVVRCRQAPHLKAAQKNKQNSEWATPNPENRQMIMMKKKKKKKKHSPKNLLLNFVTIEETKADDVDSDGNRVTLDLPIDLEEQTMGKYNWVTTPTTFKPDSPDLARHYKSASPQPAFQIQPETPLNSKHHIIQELPLDNTFVACDSISKCSSSSSDPYSVSDCGYPVTTFEVPVSVHTRPAQRKL

SEQ ID NO: 69609 - protein, 1339 aa, Homo sapiens
  Payload ID: 13801
  Gene Symbol: PCDH11X
  Gene Name: protocadherin 11 X-linked
  Uniprot ID: Q9BZA7
  ENSP ID: ENSP00000384758
MDLLSGTYIFAVLLACVVFHSGAQEKNYTIREEMPENVLIGDLLKDLNLSLIPNKSLTTAMQFKLVYKTGDVPLIRIEEDTGEIFTTGARIDREKLCAGIPRDEHCFYEVEVAILPDEIFRLVKIRFLIEDINDNAPLFPATVINISIPENSAINSKYTLPAAVDPDVGINGVQNYELIKSQNIFGLDVIETPEGDKMPQLIVQKELDREEKDTYVMKVKVEDGGFPQRSSTAILQVSVTDTNDNHPVFKETEIEVSIPENAPVGTSVTQLHATDADIGENAKIHFSFSNLVSNIARRLFHLNATTGLITIKEPLDREETPNHKLLVLASDGGLMPARAMVLVNVTDVNDNVPSIDIRYIVNPVNDTVVLSENIPLNTKIALITVTDKDADHNGRVTCFTDHEIPFRLRPVFSNQFLLETAAYLDYESTKEYAIKLLAADAGKPPLNQSAMLFIKVKDENDNAPVFTQSFVTVSIPENNSPGIQLTKVSAMDADSGPNAKINYLLGPDAPPEFSLDCRTGMLTVVKKLDREKEDKYLFTILAKDNGVPPLTSNVTVFVSIIDQNDNSPVFTHNEYNFYVPENLPRHGTVGLITVTDPDYGDNSAVTLSILDENDDFTIDSQTGVIRPNISFDREKQESYTFYVKAEDGGRVSRSSSAKVTINVVDVNDNKPVFIVPPSNCSYELVLPSTNPGTVVFQVIAVDNDTGMNAEVRYSIVGGNTRDLFAIDQETGNITLMEKCDVTDLGLHRVLVKANDLGQPDSLFSVVIVNLFVNESVTNATLINELVRKSTEAPVTPNTEIADVSSPTSDYVKILVAAVAGTITVVVVIFITAVVRCRQAPHLKAAQKNKQNSEWATPNPENRQMIMMKKKKKKKKHSPKNLLLNFVTIEETKADDVDSDGNRVTLDLPIDLEEQTMGKYNWVTTPTTFKPDSPDLARHYKSASPQPAFQIQPETPLNSKHHIIQELPLDNTFVACDSISKCSSSSSDPYSVSDCGYPVTTFEVPVSVHTRPPMKEVVRSCTPMKESTTMEIWIHPQPQRKSEGKVAGKSQRRVTFHLPEGSQESSSDGGLGDHDAGSLTSTSHGLPLGYPQEEYFDRATPSNRTEGDGNSDPESTAEITVQPTVEEASDNCTQECLIYGHSDACWMPASLDHSSSSQAQASALCHSPPLSQASTQHHSPRVTQTIALCHSPPVTQTIALCHSPPPIQVSALHHSPPLVQATALHHSPPSAQASALCYSPPLAQAAAISHSSPLPQVIALHRSQAQSSVSLQQGWVQGADGLCSVDQGVQGSATSQFYTMSERLHPSDDSIKVIPLTTFTPRQQARPSRGDSPIMEEHPL

SEQ ID NO: 69610 - protein, 1065 aa, Homo sapiens
  Payload ID: 13801
  Gene Symbol: PCDH11X
  Gene Name: protocadherin 11 X-linked
  Uniprot ID: Q9BZA7
  ENSP ID: ENSP00000423762
MDLLSGTYIFAVLLACVVFHSGAQEKNYTIREEMPENVLIGDLLKDLNLSLIPNKSLTTAMQFKLVYKTGDVPLIRIEEDTGEIFTTGARIDREKLCAGIPRDEHCFYEVEVAILPDEIFRLVKIRFLIEDINDNAPLFPATVINISIPENSAINSKYTLPAAVDPDVGINGVQNYELIKSQNIFGLDVIETPEGDKMPQLIVQKELDREEKDTYVMKVKVEDGGFPQRSSTAILQVSVTDTNDNHPVFKETEIEVSIPENAPVGTSVTQLHATDADIGENAKIHFSFSNLVSNIARRLFHLNATTGLITIKEPLDREETPNHKLLVLASDGGLMPARAMVLVNVTDVNDNVPSIDIRYIVNPVNDTVVLSENIPLNTKIALITVTDKDADHNGRVTCFTDHEIPFRLRPVFSNQFLLETAAYLDYESTKEYAIKLLAADAGKPPLNQSAMLFIKVKDENDNAPVFTQSFVTVSIPENNSPGIQLTKVSAMDADSGPNAKINYLLGPDAPPEFSLDCRTGMLTVVKKLDREKEDKYLFTILAKDNGVPPLTSNVTVFVSIIDQNDNSPVFTHNEYNFYVPENLPRHGTVGLITVTDPDYGDNSAVTLSILDENDDFTIDSQTGVIRPNISFDREKQESYTFYVKAEDGGRVSRSSSAKVTINVVDVNDNKPVFIVPPSNCSYELVLPSTNPGTVVFQVIAVDNDTGMNAEVRYSIVGGNTRDLFAIDQETGNITLMEKCDVTDLGLHRVLVKANDLGQPDSLFSVVIVNLFVNESVTNATLINELVRKSTEAPVTPNTEIADVSSPTSDYVKILVAAVAGTITVVVVIFITAVVRCRQAPHLKAAQKNKQNSEWATPNPENRQMIMMKKKKKKKKHSPKNLLLNFVTIEETKADDVDSDGNRVTLDLPIDLEEQTMGKYNWVTTPTTFKPDSPDLARHYKSASPQPAFQIQPETPLNSKHHIIQELPLDNTFVACDSISKCSSSSSDPYSVSDCGYPVTTFEVPVSVHTRPPMKEVVRSCTPMKESTTMEIWIHPQPQRKSEGKVAGKTVLTSSSPSAMTLSYLD

SEQ ID NO: 69611 - protein, 1053 aa, Homo sapiens
  Payload ID: 13802
  Gene Symbol: PCDH11Y
  Gene Name: protocadherin 11 Y-linked
  Uniprot ID: Q9BZA8
  ENSP ID: ENSP00000215473
MFRVGFLIISSSSSLSPLLLVSVVRVNTTNCHKCLLSGTYIFAVLLVCVVFHSGAQEKNYTIREEIPENVLIGNLLKDLNLSLIPNKSLTTTMQFKLVYKTGDVPLIRIEEDTGEIFTTGARIDREKLCAGIPRDEHCFYEVEVAILPDEIFRLVKIRFLIEDINDNAPLFPATVINISIPENSAINSKYTLPAAVDPDVGINGVQNYELIKSQNIFGLDVIETPEGDKMPQLIVQKELDREEKDTYVMKVKVEDGGFPQRSSTAILQVSVTDTNDNHPVFKETEIEVSIPENAPVGTSVTQLHATDADIGENAKIHFSFSNLVSNIARRLFHLNATTGLITIKEPLDREETPNHKLLVLASDGGLMPARAMVLVNVTDVNDNVPSIDIRYIVNPVNDTVVLSENIPLNTKIALITVTDKDADHNGRVTCFTDHEIPFRLRPVFSNQFLLENAAYLDYESTKEYAIKLLAADAGKPPLNQSAMLFIKVKDENDNAPVFTQSFVTVSIPENNSPGIQLMKVSATDADSGPNAEINYLLGPDAPPEFSLDRRTGMLTVVKKLDREKEDKYLFTILAKDNGVPPLTSNVTVFVSIIDQNDNSPVFTHNEYKFYVPENLPRHGTVGLITVTDPDYGDNSAVTLSILDENDDFTIDSQTGVIRPNISFDREKQESYTFYVKAEDGGRVSRSSSAKVTINVVDVNDNKPVFIVPPYNYSYELVLPSTNPGTVVFQVIAVDNDTGMNAEVRYSIVGGNTRDLFAIDQETGNITLMEKCDVTDLGLHRVLVKANDLGQPDSLFSVVIVNLFVNESVTNATLINELVRKSIEAPVTPNTEIADVSSPTSDYVKILVAAVAGTITVVVVIFITAVVRCRQAPHLKAAQKNMQNSEWATPNPENRQMIMMKKKKKKKKHSPKNLLLNVVTIEETKADDVDSDGNRVTLDLPIDLEEQTMGKYNWVTTPTTFKPDSPDLARHYKSASPQPAFQIQPETPLNLKHHIIQELPLDNTFVACDSISNCSSSSSDPYSVSDCGYPVTTFEVPVSVHTRPVGIQVSNTTF

SEQ ID NO: 69612 - protein, 1037 aa, Homo sapiens
  Payload ID: 13802
  Gene Symbol: PCDH11Y
  Gene Name: protocadherin 11 Y-linked
  Uniprot ID: Q9BZA8
  ENSP ID: ENSP00000330552
MTVGFNSDISSVVRVNTTNCHKCLLSGTYIFAVLLVCVVFHSGAQEKNYTIREEIPENVLIGNLLKDLNLSLIPNKSLTTTMQFKLVYKTGDVPLIRIEEDTGEIFTTGARIDREKLCAGIPRDEHCFYEVEVAILPDEIFRLVKIRFLIEDINDNAPLFPATVINISIPENSAINSKYTLPAAVDPDVGINGVQNYELIKSQNIFGLDVIETPEGDKMPQLIVQKELDREEKDTYVMKVKVEDGGFPQRSSTAILQVSVTDTNDNHPVFKETEIEVSIPENAPVGTSVTQLHATDADIGENAKIHFSFSNLVSNIARRLFHLNATTGLITIKEPLDREETPNHKLLVLASDGGLMPARAMVLVNVTDVNDNVPSIDIRYIVNPVNDTVVLSENIPLNTKIALITVTDKDADHNGRVTCFTDHEIPFRLRPVFSNQFLLENAAYLDYESTKEYAIKLLAADAGKPPLNQSAMLFIKVKDENDNAPVFTQSFVTVSIPENNSPGIQLMKVSATDADSGPNAEINYLLGPDAPPEFSLDRRTGMLTVVKKLDREKEDKYLFTILAKDNGVPPLTSNVTVFVSIIDQNDNSPVFTHNEYKFYVPENLPRHGTVGLITVTDPDYGDNSAVTLSILDENDDFTIDSQTGVIRPNISFDREKQESYTFYVKAEDGGRVSRSSSAKVTINVVDVNDNKPVFIVPPYNYSYELVLPSTNPGTVVFQVIAVDNDTGMNAEVRYSIVGGNTRDLFAIDQETGNITLMEKCDVTDLGLHRVLVKANDLGQPDSLFSVVIVNLFVNESVTNATLINELVRKSIEAPVTPNTEIADVSSPTSDYVKILVAAVAGTITVVVVIFITAVVRCRQAPHLKAAQKNMQNSEWATPNPENRQMIMMKKKKKKKKHSPKNLLLNVVTIEETKADDVDSDGNRVTLDLPIDLEEQTMGKYNWVTTPTTFKPDSPDLARHYKSASPQPAFQIQPETPLNLKHHIIQELPLDNTFVACDSISNCSSSSSDPYSVSDCGYPVTTFEVPVSVHTRPTDSRT

SEQ ID NO: 69613 - protein, 1048 aa, Homo sapiens
  Payload ID: 13802
  Gene Symbol: PCDH11Y
  Gene Name: protocadherin 11 Y-linked
  Uniprot ID: Q9BZA8
  ENSP ID: ENSP00000355419
MFRVGFLIISSSSSLSPLLLVSVVRVNTTNCHKCLLSGTYIFAVLLVCVVFHSGAQEKNYTIREEIPENVLIGNLLKDLNLSLIPNKSLTTTMQFKLVYKTGDVPLIRIEEDTGEIFTTGARIDREKLCAGIPRDEHCFYEVEVAILPDEIFRLVKIRFLIEDINDNAPLFPATVINISIPENSAINSKYTLPAAVDPDVGINGVQNYELIKSQNIFGLDVIETPEGDKMPQLIVQKELDREEKDTYVMKVKVEDGGFPQRSSTAILQVSVTDTNDNHPVFKETEIEVSIPENAPVGTSVTQLHATDADIGENAKIHFSFSNLVSNIARRLFHLNATTGLITIKEPLDREETPNHKLLVLASDGGLMPARAMVLVNVTDVNDNVPSIDIRYIVNPVNDTVVLSENIPLNTKIALITVTDKDADHNGRVTCFTDHEIPFRLRPVFSNQFLLENAAYLDYESTKEYAIKLLAADAGKPPLNQSAMLFIKVKDENDNAPVFTQSFVTVSIPENNSPGIQLMKVSATDADSGPNAEINYLLGPDAPPEFSLDRRTGMLTVVKKLDREKEDKYLFTILAKDNGVPPLTSNVTVFVSIIDQNDNSPVFTHNEYKFYVPENLPRHGTVGLITVTDPDYGDNSAVTLSILDENDDFTIDSQTGVIRPNISFDREKQESYTFYVKAEDGGRVSRSSSAKVTINVVDVNDNKPVFIVPPYNYSYELVLPSTNPGTVVFQVIAVDNDTGMNAEVRYSIVGGNTRDLFAIDQETGNITLMEKCDVTDLGLHRVLVKANDLGQPDSLFSVVIVNLFVNESVTNATLINELVRKSIEAPVTPNTEIADVSSPTSDYVKILVAAVAGTITVVVVIFITAVVRCRQAPHLKAAQKNMQNSEWATPNPENRQMIMMKKKKKKKKHSPKNLLLNVVTIEETKADDVDSDGNRVTLDLPIDLEEQTMGKYNWVTTPTTFKPDSPDLARHYKSASPQPAFQIQPETPLNLKHHIIQELPLDNTFVACDSISNCSSSSSDPYSVSDCGYPVTTFEVPVSVHTRPTDSRT

SEQ ID NO: 69614 - protein, 1340 aa, Homo sapiens
  Payload ID: 13802
  Gene Symbol: PCDH11Y
  Gene Name: protocadherin 11 Y-linked
  Uniprot ID: Q9BZA8
  ENSP ID: ENSP00000383306
MFRVGFLIISSSSSLSPLLLVSVVRVNTTNCHKCLLSGTYIFAVLLVCVVFHSGAQEKNYTIREEIPENVLIGNLLKDLNLSLIPNKSLTTTMQFKLVYKTGDVPLIRIEEDTGEIFTTGARIDREKLCAGIPRDEHCFYEVEVAILPDEIFRLVKIRFLIEDINDNAPLFPATVINISIPENSAINSKYTLPAAVDPDVGINGVQNYELIKSQNIFGLDVIETPEGDKMPQLIVQKELDREEKDTYVMKVKVEDGGFPQRSSTAILQVSVTDTNDNHPVFKETEIEVSIPENAPVGTSVTQLHATDADIGENAKIHFSFSNLVSNIARRLFHLNATTGLITIKEPLDREETPNHKLLVLASDGGLMPARAMVLVNVTDVNDNVPSIDIRYIVNPVNDTVVLSENIPLNTKIALITVTDKDADHNGRVTCFTDHEIPFRLRPVFSNQFLLENAAYLDYESTKEYAIKLLAADAGKPPLNQSAMLFIKVKDENDNAPVFTQSFVTVSIPENNSPGIQLMKVSATDADSGPNAEINYLLGPDAPPEFSLDRRTGMLTVVKKLDREKEDKYLFTILAKDNGVPPLTSNVTVFVSIIDQNDNSPVFTHNEYKFYVPENLPRHGTVGLITVTDPDYGDNSAVTLSILDENDDFTIDSQTGVIRPNISFDREKQESYTFYVKAEDGGRVSRSSSAKVTINVVDVNDNKPVFIVPPYNYSYELVLPSTNPGTVVFQVIAVDNDTGMNAEVRYSIVGGNTRDLFAIDQETGNITLMEKCDVTDLGLHRVLVKANDLGQPDSLFSVVIVNLFVNESVTNATLINELVRKSIEAPVTPNTEIADVSSPTSDYVKILVAAVAGTITVVVVIFITAVVRCRQAPHLKAAQKNMQNSEWATPNPENRQMIMMKKKKKKKKHSPKNLLLNVVTIEETKADDVDSDGNRVTLDLPIDLEEQTMGKYNWVTTPTTFKPDSPDLARHYKSASPQPAFQIQPETPLNLKHHIIQELPLDNTFVACDSISNCSSSSSDPYSVSDCGYPVTTFEVPVSVHTRPSQRRVTFHLPEGSQESSSDGGLGDHDAGSLTSTSHGLPLGYPQEEYFDRATPSNRTEGDGNSDPESTFIPGLKKEITVQPTVEEASDNCTQECLIYGHSDACWMPASLDHSSSSQAQASALCHSPPLSQASTQHHSPPVTQTIVLCHSPPVTQTIALCHSPPPIQVSALHHSPPLVQGTALHHSPPSAQASALCYSPPLAQAAAISHSSSLPQVIALHRSQAQSSVSLQQGWVQGANGLCSVDQGVQGSATSQFYTMSERLHPSDDSIKVIPLTTFAPRQQARPSRGDSPIMETHPL

SEQ ID NO: 69615 - protein, 77 aa, Homo sapiens
  Payload ID: 13802
  Gene Symbol: PCDH11Y
  Gene Name: protocadherin 11 Y-linked
  ENSP ID: ENSP00000478548
MTVGFNSDISSVVRVNTTNCHKCLLSGTYIFAVLLVCVVFHSGAQEKNYTIREEIPENVLIGNLLKDLNLSLIPNKS

SEQ ID NO: 69616 - protein, 1037 aa, Homo sapiens; identical to SEQ ID NO: 69612
  Payload ID: 13802
  Gene Symbol: PCDH11Y
  Gene Name: protocadherin 11 Y-linked
  Uniprot ID: Q9BZA8
  ENSP ID: ENSP00000482115

SEQ ID NO: 69617 - protein, 1184 aa, Homo sapiens
  Payload ID: 13803
  Gene Symbol: PCDH12
  Gene Name: protocadherin 12
  Uniprot ID: Q9NPG4
  ENSP ID: ENSP00000231484
MMQLLQLLLGLLGPGGYLFLLGDCQEVTTLTVKYQVSEEVPSGTVIGKLSQELGREERRRQAGAAFQVLQLPQALPIQVDSEEGLLSTGRRLDREQLCRQWDPCLVSFDVLATGDLALIHVEIQVLDINDHQPRFPKGEQELEISESASLRTRIPLDRALDPDTGPNTLHTYTLSPSEHFALDVIVGPDETKHAELIVVKELDREIHSFFDLVLTAYDNGNPPKSGTSLVKVNVLDSNDNSPAFAESSLALEIQEDAAPGTLLIKLTATDPDQGPNGEVEFFLSKHMPPEVLDTFSIDAKTGQVILRRPLDYEKNPAYEVDVQARDLGPNPIPAHCKVLIKVLDVNDNIPSIHVTWASQPSLVSEALPKDSFIALVMADDLDSGHNGLVHCWLSQELGHFRLKRTNGNTYMLLTNATLDREQWPKYTLTLLAQDQGLQPLSAKKQLSIQISDINDNAPVFEKSRYEVSTRENNLPSLHLITIKAHDADLGINGKVSYRIQDSPVAHLVAIDSNTGEVTAQRSLNYEEMAGFEFQVIAEDSGQPMLASSVSVWVSLLDANDNAPEVVQPVLSDGKASLSVLVNASTGHLLVPIETPNGLGPAGTDTPPLATHSSRPFLLTTIVARDADSGANGEPLYSIRSGNEAHLFILNPHTGQLFVNVTNASSLIGSEWELEIVVEDQGSPPLQTRALLRVMFVTSVDHLRDSARKPGALSMSMLTVICLAVLLGIFGLILALFMSICRTEKKDNRAYNCREAESTYRQQPKRPQKHIQKADIHLVPVLRGQAGEPCEVGQSHKDVDKEAMMEAGWDPCLQAPFHLTPTLYRTLRNQGNQGAPAESREVLQDTVNLLFNHPRQRNASRENLNLPEPQPATGQPRSRPLKVAGSPTGRLAGDQGSEEAPQRPPASSATLRRQRHLNGKVSPEKESGPRQILRSLVRLSVAAFAERNPVEELTVDSPPVQQISQLLSLLHQGQFQPKPNHRGNKYLAKPGGSRSAIPDTDGPSARAGGQTDPEQEEGPLDPEEDLSVKQLLEEELSSLLDPSTGLALDRLSAPDPAWMARLSLPLTTNYRDNVISPDAAATEEPRTFQTFGKAEAPELSPTGTRLASTFVSEMSSLLEMLLEQRSSMPVEAASEALRRLSVCGRTLSLDLATSAASGMKVQGDPGGKTGTEGKSRGSSSSSRCL

SEQ ID NO: 69618 - protein, 23 aa, Homo sapiens
  Payload ID: 13803
  Gene Symbol: PCDH12
  Gene Name: protocadherin 12
  ENSP ID: ENSP00000429094
MMQLLQLLLGLLGPGGYLFLLGD

SEQ ID NO: 69619 - protein, 1159 aa, Homo sapiens
  Payload ID: 13804
  Gene Symbol: PCDH17
  Gene Name: protocadherin 17
  Uniprot ID: O14917
  ENSP ID: ENSP00000367151
MYLSICCCFLLWAPALTLKNLNYSVPEEQGAGTVIGNIGRDARLQPGLPPAERGGGGRSKSGSYRVLENSAPHLLDVDADSGLLYTKQRIDRESLCRHNAKCQLSLEVFANDKEICMIKVEIQDINDNAPSFSSDQIEMDISENAAPGTRFPLTSAHDPDAGENGLRTYLLTRDDHGLFGLDVKSRGDGTKFPELVIQKALDREQQNHHTLVLTALDGGEPPRSATVQINVKVIDSNDNSPVFEAPSYLVELPENAPLGTVVIDLNATDADEGPNGEVLYSFSSYVPDRVRELFSIDPKTGLIRVKGNLDYEENGMLEIDVQARDLGPNPIPAHCKVTVKLIDRNDNAPSIGFVSVRQGALSEAAPPGTVIALVRVTDRDSGKNGQLQCRVLGGGGTGGGGGLGGPGGSVPFKLEENYDNFYTVVTDRPLDRETQDEYNVTIVARDGGSPPLNSTKSFAIKILDENDNPPRFTKGLYVLQVHENNIPGEYLGSVLAQDPDLGQNGTVSYSILPSHIGDVSIYTYVSVNPTNGAIYALRSFNFEQTKAFEFKVLAKDSGAPAHLESNATVRVTVLDVNDNAPVIVLPTLQNDTAELQVPRNAGLGYLVSTVRALDSDFGESGRLTYEIVDGNDDHLFEIDPSSGEIRTLHPFWEDVTPVVELVVKVTDHGKPTLSAVAKLIIRSVSGSLPEGVPRVNGEQHHWDMSLPLIVTLSTISIILLAAMITIAVKCKRENKEIRTYNCRIAEYSHPQLGGGKGKKKKINKNDIMLVQSEVEERNAMNVMNVVSSPSLATSPMYFDYQTRLPLSSPRSEVMYLKPASNNLTVPQGHAGCHTSFTGQGTNASETPATRMSIIQTDNFPAEPNYMGSRQQFVQSSSTFKDPERASLRDSGHGDSDQADSDQDTNKGSCCDMSVREALKMKTTSTKSQPLEQEPEECVNCTDECRVLGHSDRCWMPQFPAANQAENADYRTNLFVPTVEANVETETYETVNPTGKKTFCTFGKDKREHTILIANVKPYLKAKRALSPLLQEVPSASSSPTKACIEPCTSTKGSLDGCEAKPGALAEASSQYLPTDSQYLSPSKQPRDPPFMASDQMARVFADVHSRASRDSSEMGAVLEQLDHPNRDLGRESVDAEEVVREIDKLLQDCRGNDPVAVRK

SEQ ID NO: 69620 - protein, 889 aa, Homo sapiens
  Payload ID: 13804
  Gene Symbol: PCDH17
  Gene Name: protocadherin 17
  Uniprot ID: O14917
  ENSP ID: ENSP00000432899
MYLSICCCFLLWAPALTLKNLNYSVPEEQGAGTVIGNIGRDARLQPGLPPAERGGGGRSKSGSYRVLENSAPHLLDVDADSGLLYTKQRIDRESLCRHNAKCQLSLEVFANDKEICMIKVEIQDINDNAPSFSSDQIEMDISENAAPGTRFPLTSAHDPDAGENGLRTYLLTRDDHGLFGLDVKSRGDGTKFPELVIQKALDREQQNHHTLVLTALDGGEPPRSATVQINVKVIDSNDNSPVFEAPSYLVELPENAPLGTVVIDLNATDADEGPNGEVLYSFSSYVPDRVRELFSIDPKTGLIRVKGNLDYEENGMLEIDVQARDLGPNPIPAHCKVTVKLIDRNDNAPSIGFVSVRQGALSEAAPPGTVIALVRVTDRDSGKNGQLQCRVLGGGGTGGGGGLGGPGGSVPFKLEENYDNFYTVVTDRPLDRETQDEYNVTIVARDGGSPPLNSTKSFAIKILDENDNPPRFTKGLYVLQVHENNIPGEYLGSVLAQDPDLGQNGTVSYSILPSHIGDVSIYTYVSVNPTNGAIYALRSFNFEQTKAFEFKVLAKDSGAPAHLESNATVRVTVLDVNDNAPVIVLPTLQNDTAELQVPRNAGLGYLVSTVRALDSDFGESGRLTYEIVDGNDDHLFEIDPSSGEIRTLHPFWEDVTPVVELVVKVTDHGKPTLSAVAKLIIRSVSGSLPEGVPRVNGEQHHWDMSLPLIVTLSTISIILLAAMITIAVKCKRENKEIRTYNCRIAEYSHPQLGGGKGKKKKINKNDIMLVQSEVEERNAMNVMNVVSSPSLATSPMYFDYQTRLPLSSPRSEVMYLKPASNNLTVPQGHAGCHTSFTGQGTNASETPATRMSIIQTDNFPAEPNYMGSRQQFVQSISVAPRLRTQKEPA

SEQ ID NO: 69621 - protein, 546 aa, Homo sapiens
  Payload ID: 13804
  Gene Symbol: PCDH17
  Gene Name: protocadherin 17
  ENSP ID: ENSP00000481329
LDSDFGESGRLTYEIVDGNDDHLFEIDPSSGEIRTLHPFWEDVTPVVELVVKVTDHGKPTLSAVAKLIIRSVSGSLPEGVPRVNGEQHHWDMSLPLIVTLSTISIILLAAMITIAVKCKRENKEIRTYNCRIAEYSHPQLGGGKGKKKKINKNDIMLVQSEVEERNAMNVMNVVSSPSLATSPMYFDYQTRLPLSSPRSEVMYLKPASNNLTVPQGHAGCHTSFTGQGTNASETPATRMSIIQTDNFPAEPNYMGSRQQFVQSSTFKDPERASLRDSGHGDSDQADSDQDTNKGSCCDMSVREALKMKTTSTKSQPLEQEPEECVNCTDECRVLGHSDRCWMPQFPAANQAENADYRTNLFVPTVEANVETETYETVNPTGKKTFCTFGKDKREHTILIANVKPYLKAKRALSPLLQEVPSASSSPTKACIEPCTSTKGSLDGCEAKPGALAEASSQYLPTDSQYLSPSKQPRDPPFMASDQMARVFADVHSRASRDSSEMGAVLEQLDHPNRDLGRESVDAEEVVREIDKLLQDCRGNDPVAVRK

SEQ ID NO: 69622 - protein, 184 aa, Homo sapiens
  Payload ID: 13804
  Gene Symbol: PCDH17
  Gene Name: protocadherin 17
  ENSP ID: ENSP00000483215
LTVPQGHAGCHTSFTGQGTNASETPATRMSIIQTDNFPAEPNYMGSRQQFVQSSSTFKDPERASLRDSGHGDSDQADSDQDTNKGSCCDMSVREALKMKTTSTKSQPLEQAFPTLLSFAILTLHTITSRLQSVDLLPPEPEECVNCTDECRVLGHSDRCWMPQFPAANQAENADYRTNLFVPTV

SEQ ID NO: 69623 - protein, 1135 aa, Homo sapiens
  Payload ID: 13805
  Gene Symbol: PCDH18
  Gene Name: protocadherin 18
  Uniprot ID: Q9HCL0
  ENSP ID: ENSP00000355082
MHQMNAKMHFRFVFALLIVSFNHDVLGKNLKYRIYEEQRVGSVIARLSEDVADVLLKLPNPSTVRFRAMQRGNSPLLVVNEDNGEISIGATIDREQLCQKNLNCSIEFDVITLPTEHLQLFHIEVEVLDINDNSPQFSRSLIPIEISESAAVGTRIPLDSAFDPDVGENSLHTYSLSANDFFNIEVRTRTDGAKYAELIVVRELDRELKSSYELQLTASDMGVPQRSGSSILKISISDSNDNSPAFEQQSYIIQLLENSPVGTLLLDLNATDPDEGANGKIVYSFSSHVSPKIMETFKIDSERGHLTLFKQVDYEITKSYEIDVQAQDLGPNSIPAHCKIIIKVVDVNDNKPEININLMSPGKEEISYIFEGDPIDTFVALVRVQDKDSGLNGEIVCKLHGHGHFKLQKTYENNYLILTNATLDREKRSEYSLTVIAEDRGTPSLSTVKHFTVQINDINDNPPHFQRSRYEFVISENNSPGAYITTVTATDPDLGENGQVTYTILESFILGSSITTYVTIDPSNGAIYALRIFDHEEVSQITFVVEARDGGSPKQLVSNTTVVLTIIDENDNVPVVIGPALRNNTAEITIPKGAESGFHVTRIRAIDRDSGVNAELSCAIVAGNEENIFIIDPRSCDIHTNVSMDSVPYTEWELSVIIQDKGNPQLHTKVLLKCMIFEYAESVTSTAMTSVSQASLDVSMIIIISLGAICAVLLVIMVLFATRCNREKKDTRSYNCRVAESTYQHHPKRPSRQIHKGDITLVPTINGTLPIRSHHRSSPSSSPTLERGQMGSRQSHNSHQSLNSLVTISSNHVPENFSLELTHATPAVEQVSQLLSMLHQGQYQPRPSFRGNKYSRSYRYALQDMDKFSLKDSGRGDSEAGDSDYDLGRDSPIDRLLGEGFSDLFLTDGRIPAAMRLCTEECRVLGHSDQCWMPPLPSPSSDYRSNMFIPGEEFPTQPQQQHPHQSLEDDAQPADSGEKKKSFSTFGKDSPNDEDTGDTSTSSLLSEMSSVFQRLLPPSLDTYSECSEVDRSNSLERRKGPLPAKTVGYPQGVAAWAASTHFQNPTTNCGPPLGTHSSVQPSSKWLPAMEEIPENYEEDDFDNVLNHLNDGKHELMDASELVAEINKLLQDVRQS

SEQ ID NO: 69624 - protein, 1134 aa, Homo sapiens
  Payload ID: 13805
  Gene Symbol: PCDH18
  Gene Name: protocadherin 18
  Uniprot ID: Q9HCL0
  ENSP ID: ENSP00000390688
MHQMNAKMHFRFVFALLIVSFNHDVLGKNLKYRIYEEQRVGSVIARLSEDVADVLLKLPNPSTVRFRAMQRGNSPLLVVNEDNGEISIGATIDREQLCQKNLNCSIEFDVITLPTEHLQLFHIEVEVLDINDNSPQFSRSLIPIEISESAAVGTRIPLDSAFDPDVGENSLHTYSLSANDFFNIEVRTRTDGAKYAELIVVRELDRELKSSYELQLTASDMGVPQRSGSSILKISISDSNDNSPAFEQQSYIIQLLENSPVGTLLLDLNATDPDEGANGKIVYSFSSHVSPKIMETFKIDSERGHLTLFKQVDYEITKSYEIDVQAQDLGPNSIPAHCKIIIKVVDVNDNKPEININLMSPGKEEISYIFEGDPIDTFVALVRVQDKDSGLNGEIVCKLHGHGHFKLQKTYENNYLILTNATLDREKRSEYSLTVIAEDRGTPSLSTVKHFTVQINDINDNPPHFQRSRYEFVISENNSPGAYITTVTATDPDLGENGQVTYTILESFILGSSITTYVTIDPSNGAIYALRIFDHEEVSQITFVVEARDGGSPKQLVSNTTVVLTIIDENDNVPVVIGPALRNNTAEITIPKGAESGFHVTRIRAIDRDSGVNAELSCAIVAGNEENIFIIDPRSCDIHTNVSMDSVPYTEWELSVIIQDKGNPQLHTKVLLKCMIFEYAESVTSTAMTSVSQASLDVSMIIIISLGAICAVLLVIMVLFATRCNREKKDTRSYNCRVAESTYQHHPKRPSRQIHKGDITLVPTINGTLPIRSHHRSSPSSSPTLERGQMGSRQSHNSHQSLNSLVTISSNHVPENFSLELTHATPAVEVSQLLSMLHQGQYQPRPSFRGNKYSRSYRYALQDMDKFSLKDSGRGDSEAGDSDYDLGRDSPIDRLLGEGFSDLFLTDGRIPAAMRLCTEECRVLGHSDQCWMPPLPSPSSDYRSNMFIPGEEFPTQPQQQHPHQSLEDDAQPADSGEKKKSFSTFGKDSPNDEDTGDTSTSSLLSEMSSVFQRLLPPSLDTYSECSEVDRSNSLERRKGPLPAKTVGYPQGVAAWAASTHFQNPTTNCGPPLGTHSSVQPSSKWLPAMEEIPENYEEDDFDNVLNHLNDGKHELMDASELVAEINKLLQDVRQS

SEQ ID NO: 69625 - protein, 346 aa, Homo sapiens
  Payload ID: 13805
  Gene Symbol: PCDH18
  Gene Name: protocadherin 18
  ENSP ID: ENSP00000424269
MGSRQSHNSHQSLNSLVTISSNHVPENFSLELTHATPAVEQVSQLLSMLHQGQYQPRPSFRGNKYSRSYRYALQDMDKFSLKDSGRGDSEAGDSDYDLGRDSPIDRLLGEGFSDLFLTDGRIPAAMRLCTEECRVLGHSDQCWMPPLPSPSSDYRSNMFIPGEEFPTQPQQQHPHQSLEDDAQPADSGEKKKSFSTFGKDSPNDEDTGDTSTSSLLSEMSSVFQRLLPPSLDTYSECSEVDRSNSLERRKGPLPAKTVGYPQGVAAWAASTHFQNPTTNCGPPLGTHSSVQPSSKWLPAMEEIPENYEEDDFDNVLNHLNDGKHELMDASELVAEINKLLQDVRQS

SEQ ID NO: 69626 - protein, 315 aa, Homo sapiens
  Payload ID: 13805
  Gene Symbol: PCDH18
  Gene Name: protocadherin 18
  ENSP ID: ENSP00000425647
MPKVSGSRDTVSQLLSMLHQGQYQPRPSFRGNKYSRSYRYALQDMDKFSLKDSGRGDSEAGDSDYDLGRDSPIDRLLGEGFSDLFLTDGRIPAAMRLCTEECRVLGHSDQCWMPPLPSPSSDYRSNMFIPGEEFPTQPQQQHPHQSLEDDAQPADSGEKKKSFSTFGKDSPNDEDTGDTSTSSLLSEMSSVFQRLLPPSLDTYSECSEVDRSNSLERRKGPLPAKTVGYPQGVAAWAASTHFQNPTTNCGPPLGTHSSVQPSSKWLPAMEEIPENYEEDDFDNVLNHLNDGKHELMDASELVAEINKLLQDVRQS

SEQ ID NO: 69627 - protein, 914 aa, Homo sapiens
  Payload ID: 13805
  Gene Symbol: PCDH18
  Gene Name: protocadherin 18
  ENSP ID: ENSP00000425903
MGVPQRSGSSILKISISDSNDNSPAFEQQSYIIQLLENSPVGTLLLDLNATDPDEGANGKIVYSFSSHVSPKIMETFKIDSERGHLTLFKQVDYEITKSYEIDVQAQDLGPNSIPAHCKIIIKVVDVNDNKPEININLMSPGKEEISYIFEGDPIDTFVALVRVQDKDSGLNGEIVCKLHGHGHFKLQKTYENNYLILTNATLDREKRSEYSLTVIAEDRGTPSLSTVKHFTVQINDINDNPPHFQRSRYEFVISENNSPGAYITTVTATDPDLGENGQVTYTILESFILGSSITTYVTIDPSNGAIYALRIFDHEEVSQITFVVEARDGGSPKQLVSNTTVVLTIIDENDNVPVVIGPALRNNTAEITIPKGAESGFHVTRIRAIDRDSGVNAELSCAIVAGNEENIFIIDPRSCDIHTNVSMDSVPYTEWELSVIIQDKGNPQLHTKVLLKCMIFEYAESVTSTAMTSVSQASLDVSMIIIISLGAICAVLLVIMVLFATRCNREKKDTRSYNCRVAESTYQHHPKRPSRQIHKGDITLVPTINGTLPIRSHHRSSPSSSPTLERGQMGSRQSHNSHQSLNSLVTISSNHVPENFSLELTHATPAVEVSQLLSMLHQGQYQPRPSFRGNKYSRSYRYALQDMDKFSLKDSGRGDSEAGDSDYDLGRDSPIDRLLGEGFSDLFLTDGRIPAAMRLCTEECRVLGHSDQCWMPPLPSPSSDYRSNMFIPGEEFPTQPQQQHPHQSLEDDAQPADSGEKKKSFSTFGKDSPNDEDTGDTSTSSLLSEMSSVFQRLLPPSLDTYSECSEVDRSNSLERRKGPLPAKTVGYPQGVAAWAASTHFQNPTTNCGPPLGTHSSVQPSSKWLPAMEEIPENYEEDDFDNVLNHLNDGKHELMDASELVAEINKLLQDVRQS

SEQ ID NO: 69628 - protein, 96 aa, Homo sapiens
  Payload ID: 13805
  Gene Symbol: PCDH18
  Gene Name: protocadherin 18
  ENSP ID: ENSP00000478176
MPKVSGSRDTVSQLLSMLHQGQYQPRPSFRGNKYSRSYRYALQDMDKFSLKDSGRGDSEAGDSDYDLGRDSPIDRLLGEGFSDLFLTDGRIPAVQL

SEQ ID NO: 69629 - protein, 1101 aa, Homo sapiens
  Payload ID: 13806
  Gene Symbol: PCDH19
  Gene Name: protocadherin 19
  Uniprot ID: Q8TAB3
  ENSP ID: ENSP00000255531
MESLLLPVLLLLAILWTQAAALINLKYSVEEEQRAGTVIANVAKDAREAGFALDPRQASAFRVVSNSAPHLVDINPSSGLLVTKQKIDRDLLCRQSPKCIISLEVMSSSMEICVIKVEIKDLNDNAPSFPAAQIELEISEAASPGTRIPLDSAYDPDSGSFGVQTYELTPNELFGLEIKTRGDGSRFAELVVEKSLDRETQSHYSFRITALDGGDPPRLGTVGLSIKVTDSNDNNPVFSESTYAVSVPENSPPNTPVIRLNASDPDEGTNGQVVYSFYGYVNDRTRELFQIDPHSGLVTVTGALDYEEGHVYELDVQAKDLGPNSIPAHCKVTVSVLDTNDNPPVINLLSVNSELVEVSESAPPGYVIALVRVSDRDSGLNGRVQCRLLGNVPFRLQEYESFSTILVDGRLDREQHDQYNLTIQARDGGVPMLQSAKSFTVLITDENDNHPHFSKPYYQVIVQENNTPGAYLLSVSARDPDLGLNGSVSYQIVPSQVRDMPVFTYVSINPNSGDIYALRSFNHEQTKAFEFKVLAKDGGLPSLQSNATVRVIILDVNDNTPVITAPPLINGTAEVYIPRNSGIGYLVTVVKAEDYDEGENGRVTYDMTEGDRGFFEIDQVNGEVRTTRTFGESSKSSYELIVVAHDHGKTSLSASALVLIYLSPALDAQESMGSVNLSLIFIIALGSIAGILFVTMIFVAIKCKRDNKEIRTYNCRIAEYSYGHQKKSSKKKKISKNDIRLVPRDVEETDKMNVVSCSSLTSSLNYFDYHQQTLPLGCRRSESTFLNVENQNTRNTSANHIYHHSFNSQGPQQPDLIINGVPLPETENYSFDSNYVNSRAHLIKSSSTFKDLEGNSLKDSGHEESDQTDSEHDVQRSLYCDTAVNDVLNTSVTSMGSQMPDHDQNEGFHCREECRILGHSDRCWMPRNPMPIRSKSPEHVRNIIALSIEATAADVEAYDDCGPTKRTFATFGKDVSDHPAEERPTLKGKRTVDVTICSPKVNSVIREAGNGCEAISPVTSPLHLKSSLPTKPSVSYTIALAPPARDLEQYVNNVNNGPTRPSEAEPRGADSEKVMHEVSPILKEGRNKESPGVKRLKDIVL

SEQ ID NO: 69630 - protein, 1148 aa, Homo sapiens
  Payload ID: 13806
  Gene Symbol: PCDH19
  Gene Name: protocadherin 19
  Uniprot ID: Q8TAB3
  ENSP ID: ENSP00000362125
MESLLLPVLLLLAILWTQAAALINLKYSVEEEQRAGTVIANVAKDAREAGFALDPRQASAFRVVSNSAPHLVDINPSSGLLVTKQKIDRDLLCRQSPKCIISLEVMSSSMEICVIKVEIKDLNDNAPSFPAAQIELEISEAASPGTRIPLDSAYDPDSGSFGVQTYELTPNELFGLEIKTRGDGSRFAELVVEKSLDRETQSHYSFRITALDGGDPPRLGTVGLSIKVTDSNDNNPVFSESTYAVSVPENSPPNTPVIRLNASDPDEGTNGQVVYSFYGYVNDRTRELFQIDPHSGLVTVTGALDYEEGHVYELDVQAKDLGPNSIPAHCKVTVSVLDTNDNPPVINLLSVNSELVEVSESAPPGYVIALVRVSDRDSGLNGRVQCRLLGNVPFRLQEYESFSTILVDGRLDREQHDQYNLTIQARDGGVPMLQSAKSFTVLITDENDNHPHFSKPYYQVIVQENNTPGAYLLSVSARDPDLGLNGSVSYQIVPSQVRDMPVFTYVSINPNSGDIYALRSFNHEQTKAFEFKVLAKDGGLPSLQSNATVRVIILDVNDNTPVITAPPLINGTAEVYIPRNSGIGYLVTVVKAEDYDEGENGRVTYDMTEGDRGFFEIDQVNGEVRTTRTFGESSKSSYELIVVAHDHGKTSLSASALVLIYLSPALDAQESMGSVNLSLIFIIALGSIAGILFVTMIFVAIKCKRDNKEIRTYNCSNCLTITCLLGCFIKGQNSKCLHCISVSPISEEQDKKTEEKVSLRGKRIAEYSYGHQKKSSKKKKISKNDIRLVPRDVEETDKMNVVSCSSLTSSLNYFDYHQQTLPLGCRRSESTFLNVENQNTRNTSANHIYHHSFNSQGPQQPDLIINGVPLPETENYSFDSNYVNSRAHLIKSSSTFKDLEGNSLKDSGHEESDQTDSEHDVQRSLYCDTAVNDVLNTSVTSMGSQMPDHDQNEGFHCREECRILGHSDRCWMPRNPMPIRSKSPEHVRNIIALSIEATAADVEAYDDCGPTKRTFATFGKDVSDHPAEERPTLKGKRTVDVTICSPKVNSVIREAGNGCEAISPVTSPLHLKSSLPTKPSVSYTIALAPPARDLEQYVNNVNNGPTRPSEAEPRGADSEKVMHEVSPILKEGRNKESPGVKRLKDIVL

SEQ ID NO: 69631 - protein, 1100 aa, Homo sapiens
  Payload ID: 13806
  Gene Symbol: PCDH19
  Gene Name: protocadherin 19
  Uniprot ID: Q8TAB3
  ENSP ID: ENSP00000400327
MESLLLPVLLLLAILWTQAAALINLKYSVEEEQRAGTVIANVAKDAREAGFALDPRQASAFRVVSNSAPHLVDINPSSGLLVTKQKIDRDLLCRQSPKCIISLEVMSSSMEICVIKVEIKDLNDNAPSFPAAQIELEISEAASPGTRIPLDSAYDPDSGSFGVQTYELTPNELFGLEIKTRGDGSRFAELVVEKSLDRETQSHYSFRITALDGGDPPRLGTVGLSIKVTDSNDNNPVFSESTYAVSVPENSPPNTPVIRLNASDPDEGTNGQVVYSFYGYVNDRTRELFQIDPHSGLVTVTGALDYEEGHVYELDVQAKDLGPNSIPAHCKVTVSVLDTNDNPPVINLLSVNSELVEVSESAPPGYVIALVRVSDRDSGLNGRVQCRLLGNVPFRLQEYESFSTILVDGRLDREQHDQYNLTIQARDGGVPMLQSAKSFTVLITDENDNHPHFSKPYYQVIVQENNTPGAYLLSVSARDPDLGLNGSVSYQIVPSQVRDMPVFTYVSINPNSGDIYALRSFNHEQTKAFEFKVLAKDGGLPSLQSNATVRVIILDVNDNTPVITAPPLINGTAEVYIPRNSGIGYLVTVVKAEDYDEGENGRVTYDMTEGDRGFFEIDQVNGEVRTTRTFGESSKSSYELIVVAHDHGKTSLSASALVLIYLSPALDAQESMGSVNLSLIFIIALGSIAGILFVTMIFVAIKCKRDNKEIRTYNCRIAEYSYGHQKKSSKKKKISKNDIRLVPRDVEETDKMNVVSCSSLTSSLNYFDYHQQTLPLGCRRSESTFLNVENQNTRNTSANHIYHHSFNSQGPQQPDLIINGVPLPETENYSFDSNYVNSRAHLIKSSTFKDLEGNSLKDSGHEESDQTDSEHDVQRSLYCDTAVNDVLNTSVTSMGSQMPDHDQNEGFHCREECRILGHSDRCWMPRNPMPIRSKSPEHVRNIIALSIEATAADVEAYDDCGPTKRTFATFGKDVSDHPAEERPTLKGKRTVDVTICSPKVNSVIREAGNGCEAISPVTSPLHLKSSLPTKPSVSYTIALAPPARDLEQYVNNVNNGPTRPSEAEPRGADSEKVMHEVSPILKEGRNKESPGVKRLKDIVL

SEQ ID NO: 69632 - protein, 7 aa, Homo sapiens
  Payload ID: 13806
  Gene Symbol: PCDH19
  Gene Name: protocadherin 19
  ENSP ID: ENSP00000479805
RLKDIVL

SEQ ID NO: 69633 - protein, 951 aa, Homo sapiens
  Payload ID: 13807
  Gene Symbol: PCDH20
  Gene Name: protocadherin 20
  Uniprot ID: Q8N6Y1
  ENSP ID: ENSP00000387250
MRGRGNARSSQALGVSWCPATWHPRLDMGRLHRPRSSTSYRNLPHLFLFFLFVGPFSCLGSYSRATELLYSLNEGLPAGVLIGSLAEDLRLLPRSAGRPDPQSQLPERTGAEWNPPLSFSLASRGLSGQYVTLDNRSGELHTSAQEIDREALCVEGGGGTAWSGSVSISSSPSDSCLLLLDVLVLPQEYFRFVKVKIAIRDINDNAPQFPVSQISVWVPENAPVNTRLAIEHPAVDPDVGINGVQTYRLLDYHGMFTLDVEENENGERTPYLIVMGALDRETQDQYVSIIIAEDGGSPPLLGSATLTIGISDINDNCPLFTDSQINVTVYGNATVGTPIAAVQAVDKDLGTNAQITYSYSQKVPQASKDLFHLDENTGVIKLFSKIGGSVLESHKLTILANGPGCIPAVITALVSIIKVIFRPPEIVPRYIANEIDGVVYLKELEPVNTPIAFFTIRDPEGKYKVNCYLDGEGPFRLSPYKPYNNEYLLETTKPMDYELQQFYEVAVVAWNSEGFHVKRVIKVQLLDDNDNAPIFLQPLIELTIEENNSPNAFLTKLYATDADSEERGQVSYFLGPDAPSYFSLDSVTGILTVSTQLDREEKEKYRYTVRAVDCGKPPRESVATVALTVLDKNDNSPRFINKDFSFFVPENFPGYGEIGVISVTDADAGRNGWVALSVVNQSDIFVIDTGKGMLRAKVSLDREQQSSYTLWVEAVDGGEPALSSTAKITILLLDINDNPPLVLFPQSNMSYLLVLPSTLPGSPVTEVYAVDKDTGMNAVIAYSIIGRRGPRPESFRIDPKTGNITLEEALLQTDYGLHRLLVKVSDHGYPEPLHSTVMVNLFVNDTVSNESYIESLLRKEPEINIEEKEPQISIEPTHRKVESVSCMPTLVALSVISLGSITLVTGMGIYICLRKGEKHPREDENLEVQIPLKGKIDLHMRERKPMDISNI

SEQ ID NO: 69634 - protein, 1069 aa, Homo sapiens
  Payload ID: 13808
  Gene Symbol: PCDH7
  Gene Name: protocadherin 7
  Uniprot ID: O60245
  ENSP ID: ENSP00000355243
MLRMRTAGWARGWCLGCCLLLPLSLSLAAAKQLLRYRLAEEGPADVRIGNVASDLGIVTGSGEVTFSLESGSEYLKIDNLTGELSTSERRIDREKLPQCQMIFDENECFLDFEVSVIGPSQSWVDLFEGQVIVLDINDNTPTFPSPVLTLTVEENRPVGTLYLLPTATDRDFGRNGIERYELLQEPGGGGSGGESRRAGAADSAPYPGGGGNGASGGGSGGSKRRLDASEGGGGTNPGGRSSVFELQVADTPDGEKQPQLIVKGALDREQRDSYELTLRVRDGGDPPRSSQAILRVLITDVNDNSPRFEKSVYEADLAENSAPGTPILQLRAADLDVGVNGQIEYVFGAATESVRRLLRLDETSGWLSVLHRIDREEVNQLRFTVMARDRGQPPKTDKATVVLNIKDENDNVPSIEIRKIGRIPLKDGVANVAEDVLVDTPIALVQVSDRDQGENGVVTCTVVGDVPFQLKPASDTEGDQNKKKYFLHTSTPLDYEATREFNVVIVAVDSGSPSLSSNNSLIVKVGDTNDNPPMFGQSVVEVYFPENNIPGERVATVLATDADSGKNAEIAYSLDSSVMGIFAIDPDSGDILVNTVLDREQTDRYEFKVNAKDKGIPVLQGSTTVIVQVADKNDNDPKFMQDVFTFYVKENLQPNSPVGMVTVMDADKGRNAEMSLYIEENNNIFSIENDTGTIYSTMSFDREHQTTYTFRVKAVDGGDPPRSATATVSLFVMDENDNAPTVTLPKNISYTLLPPSSNVRTVVATVLATDSDDGINADLNYSIVGGNPFKLFEIDPTSGVVSLVGKLTQKHYGLHRLVVQVNDSGQPSQSTTTLVHVFVNESVSNATAIDSQIARSLHIPLTQDIAGDPSYEISKQRLSIVIGVVAGIMTVILIILIVVMARYCRSKNKNGYEAGKKDHEDFFTPQQHDKSKKPKKDKKNKKSKQPLYSSIVTVEASKPNGQRYDSVNEKLSDSPSMGRYRSVNGGPGSPDLARHYKSSSPLPTVQLHPQSPTAGKKHQAVQDLPPANTFVGAGDNISIGSDHCSEYSCQTNNKYSKQMRLHPYITVFG

SEQ ID NO: 69635 - protein, 937 aa, Homo sapiens
  Payload ID: 13808
  Gene Symbol: PCDH7
  Gene Name: protocadherin 7
  ENSP ID: ENSP00000427066
  MOD_RES (1)..(1): Any amino acid
XVYEADLAENSAPGTPILQLRAADLDVGVNGQIEYVFGAATESVRRLLRLDETSGWLSVLHRIDREEVNQLRFTVMARDRGQPPKTDKATVVLNIKDENDNVPSIEIRKIGRIPLKDGVANVAEDVLVDTPIALVQVSDRDQGENGVVTCTVVGDVPFQLKPASDTEGDQNKKKYFLHTSTPLDYEATREFNVVIVAVDSGSPSLSSNNSLIVKVGDTNDNPPMFGQSVVEVYFPENNIPGERVATVLATDADSGKNAEIAYSLDSSVMGIFAIDPDSGDILVNTVLDREQTDRYEFKVNAKDKGIPVLQGSTTVIVQVADKNDNDPKFMQDVFTFYVKENLQPNSPVGMVTVMDADKGRNAEMSLYIEENNNIFSIENDTGTIYSTMSFDREHQTTYTFRVKAVDGGDPPRSATATVSLFVMDENDNAPTVTLPKNISYTLLPPSSNVRTVVATVLATDSDDGINADLNYSIVGGNPFKLFEIDPTSGVVSLVGKLTQKHYGLHRLVVQVNDSGQPSQSTTTLVHVFVNESVSNATAIDSQIARSLHIPLTQDIAGDPSYEISKQRLSIVIGVVAGIMTVILIILIVVMARYCRSKNKNGYEAGKKDHEDFFTPQQHDKSKKPKKDKKNKKSKQPLYSSIVTVEASKPNGQRYDSVNEKLSDSPSMGRYRSVNGGPGSPDLARHYKSSSPLPTVQLHPQSPTAGKKHQAVQDLPPANTFVGAGDNISIGSDHCSEYSCQTNNKYSKQPFRRVTFSVVSQPQDPHQGSLQSCYDSGLEESETPSSKSSSGPRLGALPLPEDNYERTTPDGSVDSRPLPDVALTGKCTRECDEYGHSDSCWMPVRTSPERKKSQPKLSTFMPVDERGSQEKLANGEAAIMGDRNRNLLNKKLTSSYETFSAASFSKNEEANPEDIPLTKTGEYKPSPVNTLTRREVYL

SEQ ID NO: 69636 - protein, 1072 aa, Homo sapiens
  Payload ID: 13808
  Gene Symbol: PCDH7
  Gene Name: protocadherin 7
  Uniprot ID: O60245
  ENSP ID: ENSP00000441802
MLRMRTAGWARGWCLGCCLLLPLSLSLAAAKQLLRYRLAEEGPADVRIGNVASDLGIVTGSGEVTFSLESGSEYLKIDNLTGELSTSERRIDREKLPQCQMIFDENECFLDFEVSVIGPSQSWVDLFEGQVIVLDINDNTPTFPSPVLTLTVEENRPVGTLYLLPTATDRDFGRNGIERYELLQEPGGGGSGGESRRAGAADSAPYPGGGGNGASGGGSGGSKRRLDASEGGGGTNPGGRSSVFELQVADTPDGEKQPQLIVKGALDREQRDSYELTLRVRDGGDPPRSSQAILRVLITDVNDNSPRFEKSVYEADLAENSAPGTPILQLRAADLDVGVNGQIEYVFGAATESVRRLLRLDETSGWLSVLHRIDREEVNQLRFTVMARDRGQPPKTDKATVVLNIKDENDNVPSIEIRKIGRIPLKDGVANVAEDVLVDTPIALVQVSDRDQGENGVVTCTVVGDVPFQLKPASDTEGDQNKKKYFLHTSTPLDYEATREFNVVIVAVDSGSPSLSSNNSLIVKVGDTNDNPPMFGQSVVEVYFPENNIPGERVATVLATDADSGKNAEIAYSLDSSVMGIFAIDPDSGDILVNTVLDREQTDRYEFKVNAKDKGIPVLQGSTTVIVQVADKNDNDPKFMQDVFTFYVKENLQPNSPVGMVTVMDADKGRNAEMSLYIEENNNIFSIENDTGTIYSTMSFDREHQTTYTFRVKAVDGGDPPRSATATVSLFVMDENDNAPTVTLPKNISYTLLPPSSNVRTVVATVLATDSDDGINADLNYSIVGGNPFKLFEIDPTSGVVSLVGKLTQKHYGLHRLVVQVNDSGQPSQSTTTLVHVFVNESVSNATAIDSQIARSLHIPLTQDIAGDPSYEISKQRLSIVIGVVAGIMTVILIILIVVMARYCRSKNKNGYEAGKKDHEDFFTPQQHDKSKKPKKDKKNKKSKQPLYSSIVTVEASKPNGQRYDSVNEKLSDSPSMGRYRSVNGGPGSPDLARHYKSSSPLPTVQLHPQSPTAGKKHQAVQDLPPANTFVGAGDNISIGSDHCSEYSCQTNNKYSKQVRCIPNIFKYPREG

SEQ ID NO: 69637 - protein, 125 aa, Homo sapiens
  Payload ID: 13808
  Gene Symbol: PCDH7
  Gene Name: protocadherin 7
  ENSP ID: ENSP00000483285
  MOD_RES (1)..(1): Any amino acid
XNISIGSDHCSEYSCQTNNKYSKQPFRRVTFSVVSQPQDPHQGSLQSCYDSGLEESETPSSKSSSGPRLGALPLPEDNYERTTPDGSVGEAEHMENGVAAITTFPFLPFPHGKTHGRRVLLRPLH

SEQ ID NO: 69638 - protein, 584 aa, Homo sapiens
  Payload ID: 13808
  Gene Symbol: PCDH7
  Gene Name: protocadherin 7
  ENSP ID: ENSP00000484874
  MOD_RES (1)..(1): Any amino acid
XIENDTGTIYSTMSFDREHQTTYTFRVKAVDGGDPPRSATATVSLFVMDENDNAPTVTLPKNISYTLLPPSSNVRTVVATVLATDSDDGINADLNYSIVGGNPFKLFEIDPTSGVVSLVGKLTQKHYGLHRLVVQVNDSGQPSQSTTTLVHVFVNESVSNATAIDSQIARSLHIPLTQDIAGDPSYEISKQRLSIVIGVVAGIMTVILIILIVVMARYCRSKNKNGYEAGKKDHEDFFTPQQHDKSKKPKKDKKNKKSKQPLYSSIVTVEASKPNGQRYDSVNEKLSDSPSMGRYRSVNGGPGSPDLARHYKSSSPLPTVQLHPQSPTAGKKHQAVQDLPPANTFVGAGDNISIGSDHCSEYSCQTNNKYSKQLVMENNVLILDSFCQIAQKYHKPFRRVTFSVVSQPQDPHQGSLQSCYDSGLEESETPSSKSSSGPRLGALPLPEDNYERTTPDGSVDSRPLPDVALTGKCTRECDEYGHSDSCWMPVRTSPERKKSQPKLSTFMPVDERGSQEKLANGEAAIMGDRNRNLLNKKLTSSYETFSAASFSKNEEANPEDIPLTKTGEYKPSPVNTLTRREVYL

SEQ ID NO: 69639 - protein, 973 aa, Homo sapiens
  Payload ID: 13809
  Gene Symbol: PCDH8
  Gene Name: protocadherin 8
  Uniprot ID: O95206
  ENSP ID: ENSP00000341350
MSPVRRWGSPCLFPLQLFSLCWVLSVAQSKTVRYSTFEEDAPGTVIGTLAEDLHMKVSGDTSFRLMKQFNSSLLRVREGDGQLTVGDAGLDRERLCGQAPQCVLAFDVVSFSQEQFRLVHVEVEVRDVNDHAPRFPRAQIPVEVSEGAAVGTRIPLEVPVDEDVGANGLQTVRLAEPHSPFRVELQTRADGAQCADLVLLQELDRESQAAYSLELVAQDGGRPPRSATAALSVRVLDANDHSPAFPQGAVAEVELAEDAPVGSLLLDLDAADPDEGPNGDVVFAFGARTPPEARRLFRLDPRSGRLTLAGPVDYERQDTYELDVRAQDRGPGPRAATCKVIVRIRDVNDNAPDIAITPLAAPGAPATSPFAAAAAAAALGGADASSPAGAGTPEAGATSLVPEGAARESLVALVSTSDRDSGANGQVRCALYGHEHFRLQPAYAGSYLVVTAASLDRERIAEYNLTLVAEDRGAPPLRTVRPYTVRVGDENDNAPLFTRPVYEVSVRENNPPGAYLATVAARDRDLGRNGQVTYRLLEAEVGRAGGAVSTYVSVDPATGAIYALRSFDYETLRQLDVRIQASDGGSPQLSSSALVQVRVLDQNDHAPVLVHPAPANGSLEVAVPGRTAKDTVVARVQARDADEGANGELAFELQQQEPREAFAIGRRTGEILLTGDLSQEPPGRVFRALLVISDGGRPPLTTTATVSFVVTAGGGRGPAAPASAGSPERSRPPGSRLGVSGSVLQWDTPLIVIIVLAGSCTLLLAAIIAIATTCNRRKKEPYGASPGFGKEPAPPVAVWKGHSFNTISGREAEKFSGKDSGKGDSDFNDSDSDISGDALKKDLINHMQSGLWACTAECKILGHSDRCWSPSCSGPNAHPSPHPPAQMSTFCKSTSLPRDPLRRDNYYQAQLPKTVGLQSVYEKVLHRDYDRTVTLLSPPRPGRLPDLQEIGVPLYQSPPGRYLSPKKGANENV

SEQ ID NO: 69640 - protein, 1070 aa, Homo sapiens
  Payload ID: 13809
  Gene Symbol: PCDH8
  Gene Name: protocadherin 8
  Uniprot ID: O95206
  ENSP ID: ENSP00000367177
MSPVRRWGSPCLFPLQLFSLCWVLSVAQSKTVRYSTFEEDAPGTVIGTLAEDLHMKVSGDTSFRLMKQFNSSLLRVREGDGQLTVGDAGLDRERLCGQAPQCVLAFDVVSFSQEQFRLVHVEVEVRDVNDHAPRFPRAQIPVEVSEGAAVGTRIPLEVPVDEDVGANGLQTVRLAEPHSPFRVELQTRADGAQCADLVLLQELDRESQAAYSLELVAQDGGRPPRSATAALSVRVLDANDHSPAFPQGAVAEVELAEDAPVGSLLLDLDAADPDEGPNGDVVFAFGARTPPEARRLFRLDPRSGRLTLAGPVDYERQDTYELDVRAQDRGPGPRAATCKVIVRIRDVNDNAPDIAITPLAAPGAPATSPFAAAAAAAALGGADASSPAGAGTPEAGATSLVPEGAARESLVALVSTSDRDSGANGQVRCALYGHEHFRLQPAYAGSYLVVTAASLDRERIAEYNLTLVAEDRGAPPLRTVRPYTVRVGDENDNAPLFTRPVYEVSVRENNPPGAYLATVAARDRDLGRNGQVTYRLLEAEVGRAGGAVSTYVSVDPATGAIYALRSFDYETLRQLDVRIQASDGGSPQLSSSALVQVRVLDQNDHAPVLVHPAPANGSLEVAVPGRTAKDTVVARVQARDADEGANGELAFELQQQEPREAFAIGRRTGEILLTGDLSQEPPGRVFRALLVISDGGRPPLTTTATVSFVVTAGGGRGPAAPASAGSPERSRPPGSRLGVSGSVLQWDTPLIVIIVLAGSCTLLLAAIIAIATTCNRRKKEVRKGGALREERPGAAGGGASAPGSPEEAARGAGPRPNMFDVLTFPGTGKAPFGSPAADAPPPAVAAAEVPGSEGGSATGESACHFEGQQRLRGAHAEPYGASPGFGKEPAPPVAVWKGHSFNTISGREAEKFSGKDSGKGDSDFNDSDSDISGDALKKDLINHMQSGLWACTAECKILGHSDRCWSPSCSGPNAHPSPHPPAQMSTFCKSTSLPRDPLRRDNYYQAQLPKTVGLQSVYEKVLHRDYDRTVTLLSPPRPGRLPDLQEIGVPLYQSPPGRYLSPKKGANENV

SEQ ID NO: 69641 - protein, 1032 aa, Homo sapiens
  Payload ID: 13810
  Gene Symbol: PCDH9
  Gene Name: protocadherin 9
  ENSP ID: ENSP00000367092
MDLRDFYLLAALIACLRLDSAIAQELIYTIREELPENVPIGNIPKDLNISHINAATGTSASLVYRLVSKAGDAPLVKVSSSTGEIFTTSNRIDREKLCAGASYAEENECFFELEVVILPNDFFRLIKIKIIVKDTNDNAPMFPSPVINISIPENTLINSRFPIPSATDPDTGFNGVQHYELLNGQSVFGLDIVETPEGEKWPQLIVQQNLDREQKDTYVMKIKVEDGGTPQKSSTAILQVTVSDVNDNRPVFKEGQVEVHIPENAPVGTSVIQLHATDADIGSNAEIRYIFGAQVAPATKRLFALNNTTGLITVQRSLDREETAIHKVTVLASDGSSTPARATVTINVTDVNDNPPNIDLRYIISPINGTVYLSEKDPVNTKIALITVSDKDTDVNGKVICFIEREVPFHLKAVYDNQYLLETSSLLDYEGTKEFSFKIVASDSGKPSLNQTALVRVKLEDENDNPPIFNQPVIELSVSENNRRGLYLTTISATDEDSGKNADIVYQLGPNASFFDLDRKTGVLTASRVFDREEQERFIFTVTARDNGTPPLQSQAAVIVTVLDENDNSPKFTHNHFQFFVSENLPKYSTVGVITVTDADAGENKAVTLSILNDNDNFVLDPYSGVIKSNVSFDREQQSSYTFDVKATDGGQPPRSSTAKVTINVMDVNDNSPVVISPPSNTSFKLVPLSAIPGSVVAEVFAVDVDTGMNAELKYTIVSGNNKGLFRIDPVTGNITLEEKPAPTDVGLHRLVVNISDLGYPKSLHTLVLVFLYVNDTAGNASYIYDLIRRTMETPLDRNIGDSSQPYQNEDYLTIMIAIIAGAMVVIVVIFVTVLVRCRHASRFKAAQRSKQGAEWMSPNQENKQNKKKKRKKRKSPKSSLLNFVTIEESKPDDAVHEPINGTISLPAELEEQSIGRFDWGPAPPTTFKPNSPDLAKHYKSASPQPAFHLKPDTPVSVKKHHVIQELPLDNTFVGGCDTLSKRSSTSSDHFSASECSSQGGFKTKGPLHTRQVNEHFYWSISTAYKCPVNQY

SEQ ID NO: 69642 - protein, 1237 aa, Homo sapiens
  Payload ID: 13810
  Gene Symbol: PCDH9
  Gene Name: protocadherin 9
  Uniprot ID: Q9HC56
  ENSP ID: ENSP00000367096
MDLRDFYLLAALIACLRLDSAIAQELIYTIREELPENVPIGNIPKDLNISHINAATGTSASLVYRLVSKAGDAPLVKVSSSTGEIFTTSNRIDREKLCAGASYAEENECFFELEVVILPNDFFRLIKIKIIVKDTNDNAPMFPSPVINISIPENTLINSRFPIPSATDPDTGFNGVQHYELLNGQSVFGLDIVETPEGEKWPQLIVQQNLDREQKDTYVMKIKVEDGGTPQKSSTAILQVTVSDVNDNRPVFKEGQVEVHIPENAPVGTSVIQLHATDADIGSNAEIRYIFGAQVAPATKRLFALNNTTGLITVQRSLDREETAIHKVTVLASDGSSTPARATVTINVTDVNDNPPNIDLRYIISPINGTVYLSEKDPVNTKIALITVSDKDTDVNGKVICFIEREVPFHLKAVYDNQYLLETSSLLDYEGTKEFSFKIVASDSGKPSLNQTALVRVKLEDENDNPPIFNQPVIELSVSENNRRGLYLTTISATDEDSGKNADIVYQLGPNASFFDLDRKTGVLTASRVFDREEQERFIFTVTARDNGTPPLQSQAAVIVTVLDENDNSPKFTHNHFQFFVSENLPKYSTVGVITVTDADAGENKAVTLSILNDNDNFVLDPYSGVIKSNVSFDREQQSSYTFDVKATDGGQPPRSSTAKVTINVMDVNDNSPVVISPPSNTSFKLVPLSAIPGSVVAEVFAVDVDTGMNAELKYTIVSGNNKGLFRIDPVTGNITLEEKPAPTDVGLHRLVVNISDLGYPKSLHTLVLVFLYVNDTAGNASYIYDLIRRTMETPLDRNIGDSSQPYQNEDYLTIMIAIIAGAMVVIVVIFVTVLVRCRHASRFKAAQRSKQGAEWMSPNQENKQNKKKKRKKRKSPKSSLLNFVTIEESKPDDAVHEPINGTISLPAELEEQSIGRFDWGPAPPTTFKPNSPDLAKHYKSASPQPAFHLKPDTPVSVKKHHVIQELPLDNTFVGGCDTLSKRSSTSSDHFSASECSSQGGFKTKGPLHTRQCNSHSKSDNIPVTPQKCPSSTGFHIQENEESHYESQRRVTFHLPDGSQESCSDSGLGDHEPVGSGTLISHPLPLVQPQDEFYDQASPDKRTEADGNSDPNSDGPLGPRGLAEATEMCTQECLVLGHSDNCWMPPGLGPYQHPKSPLSTFAPQKEWVKKDKLVNGHTLTRAWKEDSNRNQFNDRKQYGSNEGHFNNGSHMTDIPLANLKSYKQAGGATESPKEHQL

SEQ ID NO: 69643 - protein, 1195 aa, Homo sapiens
  Payload ID: 13810
  Gene Symbol: PCDH9
  Gene Name: protocadherin 9
  ENSP ID: ENSP00000401699
MDLRDFYLLAALIACLRLDSAIAQELIYTIREELPENVPIGNIPKDLNISHINAATGTSASLVYRLVSKAGDAPLVKVSSSTGEIFTTSNRIDREKLCAGASYAEENECFFELEVVILPNDFFRLIKIKIIVKDTNDNAPMFPSPVINISIPENTLINSRFPIPSATDPDTGFNGVQHYELLNGQSVFGLDIVETPEGEKWPQLIVQQNLDREQKDTYVMKIKVEDGGTPQKSSTAILQVTVSDVNDNRPVFKEGQVEVHIPENAPVGTSVIQLHATDADIGSNAEIRYIFGAQVAPATKRLFALNNTTGLITVQRSLDREETAIHKVTVLASDGSSTPARATVTINVTDVNDNPPNIDLRYIISPINGTVYLSEKDPVNTKIALITVSDKDTDVNGKVICFIEREVPFHLKAVYDNQYLLETSSLLDYEGTKEFSFKIVASDSGKPSLNQTALVRVKLEDENDNPPIFNQPVIELSVSENNRRGLYLTTISATDEDSGKNADIVYQLGPNASFFDLDRKTGVLTASRVFDREEQERFIFTVTARDNGTPPLQSQAAVIVTVLDENDNSPKFTHNHFQFFVSENLPKYSTVGVITVTDADAGENKAVTLSILNDNDNFVLDPYSGVIKSNVSFDREQQSSYTFDVKATDGGQPPRSSTAKVTINVMDVNDNSPVVISPPSNTSFKLVPLSAIPGSVVAEVFAVDVDTGMNAELKYTIVSGNNKGLFRIDPVTGNITLEEKPAPTDVGLHRLVVNISDLGYPKSLHTLVLVFLYVNDTAGNASYIYDLIRRTMETPLDRNIGDSSQPYQNEDYLTIMIAIIAGAMVVIVVIFVTVLVRCRHASRFKAAQRSKQGAEWMSPNQENKQNKKKKRKKRKSPKSSLLNFVTIEESKPDDAVHEPINGTISLPAELEEQSIGRFDWGPAPPTTFKPNSPDLAKHYKSASPQPAFHLKPDTPVSVKKHHVIQELPLDNTFVGGCDTLSKRSSTSSDHFSASECSSQGGFKTKGPLHTRQCNSHSKSDNIPVTPQKCPSSTGFHIQENEESHYEPQDEFYDQASPDKRTEADGNSDPNSDGPLGPRGLAEATEMCTQECLVLGHSDNCWMPPGLGPYQHPKSPLSTFAPQKEWVKKDKLVNGHTLTRAWKEDSNRNQFNDRKQYGSNEGHFNNGSHMTDIPLANLKSYKQAGGATESPKEHQL

SEQ ID NO: 69644 - protein, 1203 aa, Homo sapiens
  Payload ID: 13810
  Gene Symbol: PCDH9
  Gene Name: protocadherin 9
  Uniprot ID: Q9HC56
  ENSP ID: ENSP00000442186
MDLRDFYLLAALIACLRLDSAIAQELIYTIREELPENVPIGNIPKDLNISHINAATGTSASLVYRLVSKAGDAPLVKVSSSTGEIFTTSNRIDREKLCAGASYAEENECFFELEVVILPNDFFRLIKIKIIVKDTNDNAPMFPSPVINISIPENTLINSRFPIPSATDPDTGFNGVQHYELLNGQSVFGLDIVETPEGEKWPQLIVQQNLDREQKDTYVMKIKVEDGGTPQKSSTAILQVTVSDVNDNRPVFKEGQVEVHIPENAPVGTSVIQLHATDADIGSNAEIRYIFGAQVAPATKRLFALNNTTGLITVQRSLDREETAIHKVTVLASDGSSTPARATVTINVTDVNDNPPNIDLRYIISPINGTVYLSEKDPVNTKIALITVSDKDTDVNGKVICFIEREVPFHLKAVYDNQYLLETSSLLDYEGTKEFSFKIVASDSGKPSLNQTALVRVKLEDENDNPPIFNQPVIELSVSENNRRGLYLTTISATDEDSGKNADIVYQLGPNASFFDLDRKTGVLTASRVFDREEQERFIFTVTARDNGTPPLQSQAAVIVTVLDENDNSPKFTHNHFQFFVSENLPKYSTVGVITVTDADAGENKAVTLSILNDNDNFVLDPYSGVIKSNVSFDREQQSSYTFDVKATDGGQPPRSSTAKVTINVMDVNDNSPVVISPPSNTSFKLVPLSAIPGSVVAEVFAVDVDTGMNAELKYTIVSGNNKGLFRIDPVTGNITLEEKPAPTDVGLHRLVVNISDLGYPKSLHTLVLVFLYVNDTAGNASYIYDLIRRTMETPLDRNIGDSSQPYQNEDYLTIMIAIIAGAMVVIVVIFVTVLVRCRHASRFKAAQRSKQGAEWMSPNQENKQNKKKKRKKRKSPKSSLLNFVTIEESKPDDAVHEPINGTISLPAELEEQSIGRFDWGPAPPTTFKPNSPDLAKHYKSASPQPAFHLKPDTPVSVKKHHVIQELPLDNTFVGGCDTLSKRSSTSSDHFSASECSSQGGFKTKGPLHTRQSQRRVTFHLPDGSQESCSDSGLGDHEPVGSGTLISHPLPLVQPQDEFYDQASPDKRTEADGNSDPNSDGPLGPRGLAEATEMCTQECLVLGHSDNCWMPPGLGPYQHPKSPLSTFAPQKEWVKKDKLVNGHTLTRAWKEDSNRNQFNDRKQYGSNEGHFNNGSHMTDIPLANLKSYKQAGGATESPKEHQL

SEQ ID NO: 69645 - protein, 44 aa, Homo sapiens
  Payload ID: 13810
  Gene Symbol: PCDH9
  Gene Name: protocadherin 9
  ENSP ID: ENSP00000482917
CNSHSKSDNIPVTPQKCPSSTGFHIQENEESHYEGTLPYLRYSL

SEQ ID NO: 69646 - protein, 807 aa, Homo sapiens
  Payload ID: 13811
  Gene Symbol: PCDHA1
  Gene Name: protocadherin alpha 1
  Uniprot ID: Q9Y5I3
  ENSP ID: ENSP00000367373
MVFSRRGGLGARDLLLWLLLLAAWEVGSGQLHYSIPEEAKHGTFVGRVAQDLGLELAELVPRLFRVASKTHRDLLEVNLQNGILFVNSRIDREELCQWSAECSIHLELIADRPLQVFHVEVKVKDINDNPPVFRGREQIIFIPESRLLNSRFPIEGAADADIGANALLTYTLSPSDYFSLDVEASDELSKSLWLELRKYLDREETPELHLLLTATDGGKPELQGTVELLITVLDVNDNAPLFDQAVYRVHLLETTANGTLVTTLNASDADEGVNGEVVFSFDSGISRDIQEKFKVDSSSGEIRLIDKLDYEETKSYEIQVKAVDKGSPPMSNHCKVLVKVLDVNDNAPELAVTSLYLPIREDAPLSTVIALITVSDRDSGANGQVTCSLMPHVPFKLVSTFKNYYSLVLDSALDRESLSVYELVVTARDGGSPSLWATARVSVEVADVNDNAPAFAQPEYTVFVKENNPPGCHIFTVSARDADAQENALVSYSLVERRVGERALSNYVSVHAESGKVYALQPLDHEELELLQFQVSARDAGVPPLGSNVTLQVFVLDENDNAPALLAPRVGGTIGAVSELVPRLVGAGHVVAKVRAVDADSGYNAWLSYELQPAAGGARIPFRVGLYTGEISTTRVLDEADLSRYRLLVLVKDHGEPALTATATVLVSLVESGQAPKASSRASVGVAGPEAALVDVNVYLIIAICAVSSLLVLTLLLYTALRCSVPPTEGAYVPGKPTLVCSSALGSWSNSQQRRQRVCSSEGPPKTDLMAFSPGLSPSLNTSERNEQPEANLDLSGNVSPTFEFWL

SEQ ID NO: 69647 - protein, 686 aa, Homo sapiens
  Payload ID: 13811
  Gene Symbol: PCDHA1
  Gene Name: protocadherin alpha 1
  Uniprot ID: Q9Y5I3
  ENSP ID: ENSP00000378129
MVFSRRGGLGARDLLLWLLLLAAWEVGSGQLHYSIPEEAKHGTFVGRVAQDLGLELAELVPRLFRVASKTHRDLLEVNLQNGILFVNSRIDREELCQWSAECSIHLELIADRPLQVFHVEVKVKDINDNPPVFRGREQIIFIPESRLLNSRFPIEGAADADIGANALLTYTLSPSDYFSLDVEASDELSKSLWLELRKYLDREETPELHLLLTATDGGKPELQGTVELLITVLDVNDNAPLFDQAVYRVHLLETTANGTLVTTLNASDADEGVNGEVVFSFDSGISRDIQEKFKVDSSSGEIRLIDKLDYEETKSYEIQVKAVDKGSPPMSNHCKVLVKVLDVNDNAPELAVTSLYLPIREDAPLSTVIALITVSDRDSGANGQVTCSLMPHVPFKLVSTFKNYYSLVLDSALDRESLSVYELVVTARDGGSPSLWATARVSVEVADVNDNAPAFAQPEYTVFVKENNPPGCHIFTVSARDADAQENALVSYSLVERRVGERALSNYVSVHAESGKVYALQPLDHEELELLQFQPRQPNPDWRYSASLRAGMHSSVHLEEAGILRAGPGGPDQQWPTVSSATPEPEAGEVSPPVGAGVNSNSWTFKYGPGNPKQSGPGELPDKFIIPGSPAIISIRQEPTNSQIDKSDFITFGKKEETKKKKKKKKGNKTQEKKEKGNSTTDNSDQ

SEQ ID NO: 69648 - protein, 950 aa, Homo sapiens
  Payload ID: 13811
  Gene Symbol: PCDHA1
  Gene Name: protocadherin alpha 1
  Uniprot ID: Q9Y5I3
  ENSP ID: ENSP00000420840
MVFSRRGGLGARDLLLWLLLLAAWEVGSGQLHYSIPEEAKHGTFVGRVAQDLGLELAELVPRLFRVASKTHRDLLEVNLQNGILFVNSRIDREELCQWSAECSIHLELIADRPLQVFHVEVKVKDINDNPPVFRGREQIIFIPESRLLNSRFPIEGAADADIGANALLTYTLSPSDYFSLDVEASDELSKSLWLELRKYLDREETPELHLLLTATDGGKPELQGTVELLITVLDVNDNAPLFDQAVYRVHLLETTANGTLVTTLNASDADEGVNGEVVFSFDSGISRDIQEKFKVDSSSGEIRLIDKLDYEETKSYEIQVKAVDKGSPPMSNHCKVLVKVLDVNDNAPELAVTSLYLPIREDAPLSTVIALITVSDRDSGANGQVTCSLMPHVPFKLVSTFKNYYSLVLDSALDRESLSVYELVVTARDGGSPSLWATARVSVEVADVNDNAPAFAQPEYTVFVKENNPPGCHIFTVSARDADAQENALVSYSLVERRVGERALSNYVSVHAESGKVYALQPLDHEELELLQFQVSARDAGVPPLGSNVTLQVFVLDENDNAPALLAPRVGGTIGAVSELVPRLVGAGHVVAKVRAVDADSGYNAWLSYELQPAAGGARIPFRVGLYTGEISTTRVLDEADLSRYRLLVLVKDHGEPALTATATVLVSLVESGQAPKASSRASVGVAGPEAALVDVNVYLIIAICAVSSLLVLTLLLYTALRCSVPPTEGAYVPGKPTLVCSSALGSWSNSQQRRQRVCSSEGPPKTDLMAFSPGLSPSLNTSERNEQPEANLDLSGNPRQPNPDWRYSASLRAGMHSSVHLEEAGILRAGPGGPDQQWPTVSSATPEPEAGEVSPPVGAGVNSNSWTFKYGPGNPKQSGPGELPDKFIIPGSPAIISIRQEPTNSQIDKSDFITFGKKEETKKKKKKKKGNKTQEKKEKGNSTTDNSDQ

SEQ ID NO: 69649 - protein, 948 aa, Homo sapiens
  Payload ID: 13812
  Gene Symbol: PCDHA10
  Gene Name: protocadherin alpha 10
  Uniprot ID: Q9Y5I2
  ENSP ID: ENSP00000304234
MVSRCSCLGVQCLLLSLLLLAAWEVGSGQLHYSVYEEARHGTFVGRIAQDLGLELAELVQRLFRVASKRHGDLLEVNLQNGILFVNSRIDREELCGRSVECSIHLEVIVDRPLQVFHVDVEVKDINDNPPRFSVTEQKLSIPESRLLDSRFPLEGASDADVGENALLTYKLSPNEYFVLDIINKKDKDKFPVLVLRKLLDREENPQLKLLLTATDGGKPEFTGSVSLLILVLDANDNAPIFDRPVYEVKMYENQVNQTLVIRLNASDSDEGINKEMMYSFSSLVPPTIRRKFWINERTGEIKVNDAIDFEDSNTYEIHVDVTDKGNPPMVGHCTVLVELLDENDNSPEVIVTSLSLPVKEDAQVGTVIALISVSDHDSGANGQVTCSLTPHVPFKLVSTYKNYYSLVLDSALDRERVSAYELVVTARDGGSPPLWATASVSVEVADVNDNAPAFAQSEYTVFVKENNPPGCHIFTVSAWDADAQENALVSYSLVERRLGERSLSSYVSVHAESGKVYALQPLDHEELELLQFQVSARDGGVPPLGSNLTLQVFVLDENDNAPALLASPAGSAGGAVSELVLRSVVAGHVVAKVRAVDADSGYNAWLSYELQSAAVGARIPFRVGLYTGEISTTRALDETDSPRQRLLVLVKDHGEPSLTATATVLVSLVEGSQAPKASSRASVGVAPEVALVDVNVYLIIAICAVSSLLVLTLLLYTALRCSAAPTEGACGPVKPTLVCSSAVGSWSYSQQRRQRVCSGEGLPKADLMAFSPSLPPCPMVDVDGEDQSIGGDHSRKPRQPNPDWRYSASLRAGMHSSVHLEEAGILRAGPGGPDQQWPTVSSATPEPEAGEVSPPVGAGVNSNSWTFKYGPGNPKQSGPGELPDKFIIPGSPAIISIRQEPTNSQIDKSDFITFGKKEETKKKKKKKKGNKTQEKKEKGNSTTDNSDQ

SEQ ID NO: 69650 - protein, 685 aa, Homo sapiens
  Payload ID: 13812
  Gene Symbol: PCDHA10
  Gene Name: protocadherin alpha 10
  Uniprot ID: Q9Y5I2
  ENSP ID: ENSP00000421030
MVSRCSCLGVQCLLLSLLLLAAWEVGSGQLHYSVYEEARHGTFVGRIAQDLGLELAELVQRLFRVASKRHGDLLEVNLQNGILFVNSRIDREELCGRSVECSIHLEVIVDRPLQVFHVDVEVKDINDNPPRFSVTEQKLSIPESRLLDSRFPLEGASDADVGENALLTYKLSPNEYFVLDIINKKDKDKFPVLVLRKLLDREENPQLKLLLTATDGGKPEFTGSVSLLILVLDANDNAPIFDRPVYEVKMYENQVNQTLVIRLNASDSDEGINKEMMYSFSSLVPPTIRRKFWINERTGEIKVNDAIDFEDSNTYEIHVDVTDKGNPPMVGHCTVLVELLDENDNSPEVIVTSLSLPVKEDAQVGTVIALISVSDHDSGANGQVTCSLTPHVPFKLVSTYKNYYSLVLDSALDRERVSAYELVVTARDGGSPPLWATASVSVEVADVNDNAPAFAQSEYTVFVKENNPPGCHIFTVSAWDADAQENALVSYSLVERRLGERSLSSYVSVHAESGKVYALQPLDHEELELLQFQPRQPNPDWRYSASLRAGMHSSVHLEEAGILRAGPGGPDQQWPTVSSATPEPEAGEVSPPVGAGVNSNSWTFKYGPGNPKQSGPGELPDKFIIPGSPAIISIRQEPTNSQIDKSDFITFGKKEETKKKKKKKKGNKTQEKKEKGNSTTDNSDQ

SEQ ID NO: 69651 - protein, 844 aa, Homo sapiens
  Payload ID: 13812
  Gene Symbol: PCDHA10
  Gene Name: protocadherin alpha 10
  Uniprot ID: Q9Y5I2
  ENSP ID: ENSP00000478748
MVSRCSCLGVQCLLLSLLLLAAWEVGSGQLHYSVYEEARHGTFVGRIAQDLGLELAELVQRLFRVASKRHGDLLEVNLQNGILFVNSRIDREELCGRSVECSIHLEVIVDRPLQVFHVDVEVKDINDNPPRFSVTEQKLSIPESRLLDSRFPLEGASDADVGENALLTYKLSPNEYFVLDIINKKDKDKFPVLVLRKLLDREENPQLKLLLTATDGGKPEFTGSVSLLILVLDANDNAPIFDRPVYEVKMYENQVNQTLVIRLNASDSDEGINKEMMYSFSSLVPPTIRRKFWINERTGEIKVNDAIDFEDSNTYEIHVDVTDKGNPPMVGHCTVLVELLDENDNSPEVIVTSLSLPVKEDAQVGTVIALISVSDHDSGANGQVTCSLTPHVPFKLVSTYKNYYSLVLDSALDRERVSAYELVVTARDGGSPPLWATASVSVEVADVNDNAPAFAQSEYTVFVKENNPPGCHIFTVSAWDADAQENALVSYSLVERRLGERSLSSYVSVHAESGKVYALQPLDHEELELLQFQVSARDGGVPPLGSNLTLQVFVLDENDNAPALLASPAGSAGGAVSELVLRSVVAGHVVAKVRAVDADSGYNAWLSYELQSAAVGARIPFRVGLYTGEISTTRALDETDSPRQRLLVLVKDHGEPSLTATATVLVSLVEGSQAPKASSRASVGVAPEVALVDVNVYLIIAICAVSSLLVLTLLLYTALRCSAAPTEGACGPVKPTLVCSSAVGSWSYSQQRRQRVCSGEGLPKADLMAFSPSLPPCPMVDVDGEDQSIGGDHSRKVGYYVFIFLLCFMNNIFSYRIFSNMYQNISFLSTFHLCLNISSDTFVI

SEQ ID NO: 69652 - protein, 949 aa, Homo sapiens
  Payload ID: 13813
  Gene Symbol: PCDHA11
  Gene Name: protocadherin alpha 11
  Uniprot ID: Q9Y5I1
  ENSP ID: ENSP00000381636
MFGFQRRGLGTPRLQLWLLLLEFWEVGSGQLHYSVSEEAKHGTFVGRIAQDLGLELAELVQRLFRVASKTHGDLLEVNLQNGILFVNSRIDREELCGQSAECSIHLEVIVDRPLQVFHVNVEVKDINDNPPVFSLREQKLLIAESKQSDSRFPLEGASDADIEENALLTYRLSKNEYFSLDSPTNGKQIKRLSLILKKSLDREKTPELNLLLTATDGGKPELTGTVRLLVQVLDVNDNDPEFDKSEYKVSLMENAAKETLVLKLNATDRDEGVNGEVTYSLMSIKPNGRHLFTLDQNNGEVRVNGTLDYEENKFYKIEVQATDKGTPPMAGHCTVWVEILDTNDNSPEVAVTSLSLPVREDAQPSTVIALISVSDRDSGVNGQVTCSLTPHVPFKLVSTFKNYYSLVLDSALDRENVWAYELVVTARDGGSPSLWATARVSVEVADVNDNAPAFAQPEYTVFVKENNPPGCHIFTVSARDADAQENALVSYSLVERRLGDRALSSYVSVHAESGKVYALQPLDHEELELLQFQVSARDAGVPPLSSNVTLQVFVLDENDNAPALLATQAGSAGGAVNKLVPRSVGAGHVVAKVRAVDADSGYNAWLSYELQPAAGGSRIPFRVGLYTGEISTTRALDEADSPRHRLLVLVKDHGEPALTATATVLVSLVESGQAPKASSRTLAGAASPEAALVDVNVYLIIAICVVSSLLVLTLLLYTALWWSATPTEGACAPGKPTLVCSRAVGSWSYSQQRRQRVCSEEGPPKTDLMAFSPSLPLGLNKEEEGERQEPGSNHPGQPRQPNPDWRYSASLRAGMHSSVHLEEAGILRAGPGGPDQQWPTVSSATPEPEAGEVSPPVGAGVNSNSWTFKYGPGNPKQSGPGELPDKFIIPGSPAIISIRQEPTNSQIDKSDFITFGKKEETKKKKKKKKGNKTQEKKEKGNSTTDNSDQ

SEQ ID NO: 69653 - protein, 199 aa, Homo sapiens
  Payload ID: 13813
  Gene Symbol: PCDHA11
  Gene Name: protocadherin alpha 11
  ENSP ID: ENSP00000482347
  MOD_RES (1)..(1): Any amino acid
XVSSLLVLTLLLYTALWWSATPTEGACAPGKPTLVCSRAVGSWSYSQQRRQRVCSEEGPPKTDLMAFSPSLPLGLNKEEEGERQEPGSNHPGQPRQPNPDWRYSASLRAGMHSSVHLEEAGILRAGPGGPDQQWPTVSSATPEPEAGEVSPPVGAGVNSNSWTFKYGPGNPKQSGPEPKKQTQVSFLLRRKGEASQPRQ

SEQ ID NO: 69654 - protein, 810 aa, Homo sapiens
  Payload ID: 13813
  Gene Symbol: PCDHA11
  Gene Name: protocadherin alpha 11
  Uniprot ID: Q9Y5I1
  ENSP ID: ENSP00000482503
MFGFQRRGLGTPRLQLWLLLLEFWEVGSGQLHYSVSEEAKHGTFVGRIAQDLGLELAELVQRLFRVASKTHGDLLEVNLQNGILFVNSRIDREELCGQSAECSIHLEVIVDRPLQVFHVNVEVKDINDNPPVFSLREQKLLIAESKQSDSRFPLEGASDADIEENALLTYRLSKNEYFSLDSPTNGKQIKRLSLILKKSLDREKTPELNLLLTATDGGKPELTGTVRLLVQVLDVNDNDPEFDKSEYKVSLMENAAKETLVLKLNATDRDEGVNGEVTYSLMSIKPNGRHLFTLDQNNGEVRVNGTLDYEENKFYKIEVQATDKGTPPMAGHCTVWVEILDTNDNSPEVAVTSLSLPVREDAQPSTVIALISVSDRDSGVNGQVTCSLTPHVPFKLVSTFKNYYSLVLDSALDRENVWAYELVVTARDGGSPSLWATARVSVEVADVNDNAPAFAQPEYTVFVKENNPPGCHIFTVSARDADAQENALVSYSLVERRLGDRALSSYVSVHAESGKVYALQPLDHEELELLQFQVSARDAGVPPLSSNVTLQVFVLDENDNAPALLATQAGSAGGAVNKLVPRSVGAGHVVAKVRAVDADSGYNAWLSYELQPAAGGSRIPFRVGLYTGEISTTRALDEADSPRHRLLVLVKDHGEPALTATATVLVSLVESGQAPKASSRTLAGAASPEAALVDVNVYLIIAICVVSSLLVLTLLLYTALWWSATPTEGACAPGKPTLVCSRAVGSWSYSQQRRQRVCSEEGPPKTDLMAFSPSLPLGLNKEEEGERQEPGSNHPGQVSFLQIPPIRKCM

SEQ ID NO: 69655 - protein, 941 aa, Homo sapiens
  Payload ID: 13814
  Gene Symbol: PCDHA12
  Gene Name: protocadherin alpha 12
  Uniprot ID: Q9UN75
  ENSP ID: ENSP00000381628
MVIIGPRGPGSQRLLLSLLLLAAWEVGSGQLHYSVYEEAKHGTFVGRIAQDLGLELAELVPRLFRVASKRHGDLLEVNLQNGILFVNSRIDREKLCGRSAECSIHLEVIVDRPLQVFHVDVEVKDINDNPPVFREREQKVPVSESAPLDSHFPLEGASDADIGVNSLLTYALSLNENFELKIKTKKDKSILPELVLRKLLDREQTPKLNLLLMVIDGGKPELTGSVQIQITVLDVNDNGPAFDKPSYKVVLSENVQNDTRVIQLNASDPDEGLNGEISYGIKMILPVSEKCMFSINPDTGEIRIYGELDFEENNAYEIQVNAIDKGIPSMAGHSMVLVEVLDVNDNVPEVMVTSLSLPVQEDAQVGTVIALISVSDRDSGANGQVICSLTPHVPFKLVSTYKNYYSLVLDSALDRESVSAYELVVTARDGGSPSLWATARVSVEVADVNDNAPAFAQPEYTVFVKENNPPGCHIFTVSAWDADAQKNALVSYSLVERRVGEHALSSYVSVHAESGKVYALQPLDHEELELLQFQVSARDAGVPPLGSNVTLQVFVLDENDNAPALLATPAGSAGGAVSELVPRSVGAGHVVAKVRAVDADSGYNAWLSYELQPAAVGAHIPFHVGLYTGEISTTRILDEADAPRHRLLVLVKDHGEPALTSTATVLVSLVENGQAPKTSSRASVGAVDPEAALVDINVYLIIAICAVSSLLVLTLLLYTALRCSAPPTVSRCAPGKPTLVCSSAVGSWSYSQQRRQRVCSAESPPKTDLMAFSPSLQLSREDCLNPPSEPRQPNPDWRYSASLRAGMHSSVHLEEAGILRAGPGGPDQQWPTVSSATPEPEAGEVSPPVGAGVNSNSWTFKYGPGNPKQSGPGELPDKFIIPGSPAIISIRQEPTNSQIDKSDFITFGKKEETKKKKKKKKGNKTQEKKEKGNSTTDNSDQ

SEQ ID NO: 69656 - protein, 792 aa, Homo sapiens
  Payload ID: 13814
  Gene Symbol: PCDHA12
  Gene Name: protocadherin alpha 12
  Uniprot ID: Q9UN75
  ENSP ID: ENSP00000481404
MVIIGPRGPGSQRLLLSLLLLAAWEVGSGQLHYSVYEEAKHGTFVGRIAQDLGLELAELVPRLFRVASKRHGDLLEVNLQNGILFVNSRIDREKLCGRSAECSIHLEVIVDRPLQVFHVDVEVKDINDNPPVFREREQKVPVSESAPLDSHFPLEGASDADIGVNSLLTYALSLNENFELKIKTKKDKSILPELVLRKLLDREQTPKLNLLLMVIDGGKPELTGSVQIQITVLDVNDNGPAFDKPSYKVVLSENVQNDTRVIQLNASDPDEGLNGEISYGIKMILPVSEKCMFSINPDTGEIRIYGELDFEENNAYEIQVNAIDKGIPSMAGHSMVLVEVLDVNDNVPEVMVTSLSLPVQEDAQVGTVIALISVSDRDSGANGQVICSLTPHVPFKLVSTYKNYYSLVLDSALDRESVSAYELVVTARDGGSPSLWATARVSVEVADVNDNAPAFAQPEYTVFVKENNPPGCHIFTVSAWDADAQKNALVSYSLVERRVGEHALSSYVSVHAESGKVYALQPLDHEELELLQFQVSARDAGVPPLGSNVTLQVFVLDENDNAPALLATPAGSAGGAVSELVPRSVGAGHVVAKVRAVDADSGYNAWLSYELQPAAVGAHIPFHVGLYTGEISTTRILDEADAPRHRLLVLVKDHGEPALTSTATVLVSLVENGQAPKTSSRASVGAVDPEAALVDINVYLIIAICAVSSLLVLTLLLYTALRCSAPPTVSRCAPGKPTLVCSSAVGSWSYSQQRRQRVCSAESPPKTDLMAFSPSLQLSREDCLNPPSEVSY

SEQ ID NO: 69657 - protein, 950 aa, Homo sapiens
  Payload ID: 13815
  Gene Symbol: PCDHA13
  Gene Name: protocadherin alpha 13
  Uniprot ID: Q9Y5I0
  ENSP ID: ENSP00000289272
MLSSWQGGPRPRQLLLWLLILAAWETGSGQLHYSVPEEAKHGTFVGRIAQDLGLELAELVPRLFRVASKRHGDLLEVNLQNGILFVNSRIDREELCGRSAECSIHLEVIVDRPLQVFHVEVKVRDINDNPPIFPESKKRIIIAESRPPETRFPLDGASDADIGVNSALTYRLDPNDYFTLDAQNSLEQMSSLSLVLRKTLDREEIQEHSLLLTASDGGKPELTGTVQLLITILDVNDNAPEFYQSVYKVTVLENAFNGTLVIKLNATDPDDGTNGDIVYSFRRPVWPAVVYAFTINPNNGEIRTKGKLDFEEKKLYEISVEAVDKGNIPMAGHCTLLVEVLDVNDNAPEVTITSLSLPIREDTQPSAIIALISVSDRDSGSNGQVTCTLTPHVPFKLVSTYKNYYSLVLDSALDRESVSAYELVVTARDGGSPSLWATASVSVGVADVNDNAPAFAQPEYTVFVKENNPPGCHIFTVSAQDADAQENALVSYSLVERRVGERALSSYVSVHAESGKVYALQPLDHEELELLQFQVSARDSGVPPLGSNVTLQVFVLDENDNAPALLTPGAGSAGGTVSELMPRSVGAGHVVAKVRAVDADSGYNAWLSYELQLAAVGARIPFRVGLYTGEISTTRPLDEVDAPHHRLLVLVKDHGEPALTATATVLLSLVESGQAPQASSRASAGAVGPEAALVDVNVYLIIAICAVSSLLVLTLLLYTALRCSAPPTEGACAPGKPTLVCSSAAGSWSYSQQRRPRVCSGEGPHKTDLMAFSPSLPPCLGSAEGTGQREEDSECLKEPRQPNPDWRYSASLRAGMHSSVHLEEAGILRAGPGGPDQQWPTVSSATPEPEAGEVSPPVGAGVNSNSWTFKYGPGNPKQSGPGELPDKFIIPGSPAIISIRQEPTNSQIDKSDFITFGKKEETKKKKKKKKGNKTQEKKEKGNSTTDNSDQ

SEQ ID NO: 69658 - protein, 904 aa, Homo sapiens
  Payload ID: 13815
  Gene Symbol: PCDHA13
  Gene Name: protocadherin alpha 13
  ENSP ID: ENSP00000386821
MLSSWQGGPRPRQLLLWLLILAAWETGSGQLHYSVPEEAKHGTFVGRIAQDLGLELAELVPRLFRVASKRHGDLLEVNLQNGILFVNSRIDREELCGRSAECSIHLEVIVDRPLQVFHVEVKVRDINDNPPIFPESKKRIIIAESRPPETRFPLDGASDADIGVNSALTYRLDPNDYFTLDAQNSLEQMSSLSLVLRKTLDREEIQEHSLLLTASDGGKPELTGTVQLLITILDVNDNAPEFYQSVYKVTVLENAFNGTLVIKLNATDPDDGTNGDIVYSFRRPVWPAVVYAFTINPNNGEIRTKGKLDFEEKKLYEISVEAVDKGNIPMAGHCTLLVEVLDVNDNAPEVTITSLSLPIREDTQPSAIIALISVSDRDSGSNGQVTCTLTPHVPFKLVSTYKNYYSLVLDSALDRESVSAYELVVTARDGGSPSLWATASVSVGVADVNDNAPAFAQPEYTVFVKENNPPGCHIFTVSAQDADAQENALVSYSLVERRVGERALSSYVSVHAESGKVYALQPLDHEELELLQFQVSARDSGVPPLGSNVTLQVFVLDENDNAPALLTPGAGSAGGTVSELMPRSVGAGHVVAKVRAVDADSGYNAWLSYELQLAAVGARIPFRVGLYTGEISTTRPLDEVDAPHHRLLVLVKDHGEPALTATATVLLSLVESGQAPQASSRASAGAVGPEAALVDVNVYLIIAICAVSSLLVLTLLLYTALRCSAPPTEGACAPGKPTLVCSSAAGSWSYSQQRRPRVCSGEGPHKTDLMAFSPSLPPCLGSAEGTGQREEDSECLKEPRQPNPDWRYSASLRAGMHSSVHLEEAGILRAGPGGPDQQWPTVSSATPEPEAGEVSPPVGAGVNSNSWTFKYGPGNPKQSGPEPKKQTQVSFLLRRKGEASQPRQ

SEQ ID NO: 69659 - protein, 807 aa, Homo sapiens
  Payload ID: 13815
  Gene Symbol: PCDHA13
  Gene Name: protocadherin alpha 13
  Uniprot ID: Q9Y5I0
  ENSP ID: ENSP00000479167
MLSSWQGGPRPRQLLLWLLILAAWETGSGQLHYSVPEEAKHGTFVGRIAQDLGLELAELVPRLFRVASKRHGDLLEVNLQNGILFVNSRIDREELCGRSAECSIHLEVIVDRPLQVFHVEVKVRDINDNPPIFPESKKRIIIAESRPPETRFPLDGASDADIGVNSALTYRLDPNDYFTLDAQNSLEQMSSLSLVLRKTLDREEIQEHSLLLTASDGGKPELTGTVQLLITILDVNDNAPEFYQSVYKVTVLENAFNGTLVIKLNATDPDDGTNGDIVYSFRRPVWPAVVYAFTINPNNGEIRTKGKLDFEEKKLYEISVEAVDKGNIPMAGHCTLLVEVLDVNDNAPEVTITSLSLPIREDTQPSAIIALISVSDRDSGSNGQVTCTLTPHVPFKLVSTYKNYYSLVLDSALDRESVSAYELVVTARDGGSPSLWATASVSVGVADVNDNAPAFAQPEYTVFVKENNPPGCHIFTVSAQDADAQENALVSYSLVERRVGERALSSYVSVHAESGKVYALQPLDHEELELLQFQVSARDSGVPPLGSNVTLQVFVLDENDNAPALLTPGAGSAGGTVSELMPRSVGAGHVVAKVRAVDADSGYNAWLSYELQLAAVGARIPFRVGLYTGEISTTRPLDEVDAPHHRLLVLVKDHGEPALTATATVLLSLVESGQAPQASSRASAGAVGPEAALVDVNVYLIIAICAVSSLLVLTLLLYTALRCSAPPTEGACAPGKPTLVCSSAAGSWSYSQQRRPRVCSGEGPHKTDLMAFSPSLPPCLGSAEGTGQREEDSECLKEVSLYFKKLS

SEQ ID NO: 69660 - protein, 824 aa, Homo sapiens
  Payload ID: 13816
  Gene Symbol: PCDHA2
  Gene Name: protocadherin alpha 2
  Uniprot ID: Q9Y5H9
  ENSP ID: ENSP00000367372
MASSIRRGRGAWTRLLSLLLLAAWEVGSGQLRYSVPEEAKHGTFVGRIAQDLGLELEELVPRLFRVASKRHGDLLEVNLQNGILFVNSRIDREELCGRSAECSIHVEVIVDRPLQVFHVEVEVKDINDNPPIFPMTVKTIRFPESRLLDSRFPLEGASDADIGVNALLSYKLSSSEFFFLDIQANDELSESLSLVLGKSLDREETAEVNLLLVATDGGKPELTGTVQILIKVLDVNDNEPTFAQSVYKVKLLENTANGTLVVKLNASDADEGPNSEIVYSLGSDVSSTIQTKFTIDPISGEIRTKGKLDYEEAKSYEIQVTATDKGTPSMSGHCKISLKLVDINDNTPEVSITSLSLPISENASLGTVIALITVSDRDSGTNGHVTCSLTPHVPFKLVSTFKNYYSLVLDSALDRESVSAYELVVTARDGGSPSLWATTSVSIEVADVNDNAPAFAQPEYTVFVKENNPPGCHIFTVSAWDADAQENALVSYSLVERRVGERALSSYVSVHAESGKVYALQPLDHEEVELLQFQVSARDAGVPPLGSNVTLQVFVLDENDNAPALLAPRAGTAAGAVSELVPWSVGAGHVVAKVRAVDADSGYNAWLSYELQLGTGSARIPFRVGLYTGEISTTRALDEADSPRHRLLVLVKDHGEPALTATATVLVSLVESGQAPKASSRAWVGAAGSEATLVDVNVYLIIAICAVSSLLVLTVLLYTALRCSVPPTEGARAPGKPTLVCSSAVGSWSYSQQRRQRVCSGEDPPKTDLMAFSPSLSQGPDSAEEKQLSESEYVGKVSLLLFLANSKIVLFKKFYMISTSYLDS

SEQ ID NO: 69661 - protein, 808 aa, Homo sapiens
  Payload ID: 13816
  Gene Symbol: PCDHA2
  Gene Name: protocadherin alpha 2
  Uniprot ID: Q9Y5H9
  ENSP ID: ENSP00000430584
MASSIRRGRGAWTRLLSLLLLAAWEVGSGQLRYSVPEEAKHGTFVGRIAQDLGLELEELVPRLFRVASKRHGDLLEVNLQNGILFVNSRIDREELCGRSAECSIHVEVIVDRPLQVFHVEVEVKDINDNPPIFPMTVKTIRFPESRLLDSRFPLEGASDADIGVNALLSYKLSSSEFFFLDIQANDELSESLSLVLGKSLDREETAEVNLLLVATDGGKPELTGTVQILIKVLDVNDNEPTFAQSVYKVKLLENTANGTLVVKLNASDADEGPNSEIVYSLGSDVSSTIQTKFTIDPISGEIRTKGKLDYEEAKSYEIQVTATDKGTPSMSGHCKISLKLVDINDNTPEVSITSLSLPISENASLGTVIALITVSDRDSGTNGHVTCSLTPHVPFKLVSTFKNYYSLVLDSALDRESVSAYELVVTARDGGSPSLWATTSVSIEVADVNDNAPAFAQPEYTVFVKENNPPGCHIFTVSAWDADAQENALVSYSLVERRVGERALSSYVSVHAESGKVYALQPLDHEEVELLQFQVSARDAGVPPLGSNVTLQVFVLDENDNAPALLAPRAGTAAGAVSELVPWSVGAGHVVAKVRAVDADSGYNAWLSYELQLGTGSARIPFRVGLYTGEISTTRALDEADSPRHRLLVLVKDHGEPALTATATVLVSLVESGQAPKASSRAWVGAAGSEATLVDVNVYLIIAICAVSSLLVLTVLLYTALRCSVPPTEGARAPGKPTLVCSSAVGSWSYSQQRRQRVCSGEDPPKTDLMAFSPSLSQGPDSAEEKQLSESEYVGKIWNFNLQIQLAS

SEQ ID NO: 69662 - protein, 948 aa, Homo sapiens
  Payload ID: 13816
  Gene Symbol: PCDHA2
  Gene Name: protocadherin alpha 2
  Uniprot ID: Q9Y5H9
  ENSP ID: ENSP00000431748
MASSIRRGRGAWTRLLSLLLLAAWEVGSGQLRYSVPEEAKHGTFVGRIAQDLGLELEELVPRLFRVASKRHGDLLEVNLQNGILFVNSRIDREELCGRSAECSIHVEVIVDRPLQVFHVEVEVKDINDNPPIFPMTVKTIRFPESRLLDSRFPLEGASDADIGVNALLSYKLSSSEFFFLDIQANDELSESLSLVLGKSLDREETAEVNLLLVATDGGKPELTGTVQILIKVLDVNDNEPTFAQSVYKVKLLENTANGTLVVKLNASDADEGPNSEIVYSLGSDVSSTIQTKFTIDPISGEIRTKGKLDYEEAKSYEIQVTATDKGTPSMSGHCKISLKLVDINDNTPEVSITSLSLPISENASLGTVIALITVSDRDSGTNGHVTCSLTPHVPFKLVSTFKNYYSLVLDSALDRESVSAYELVVTARDGGSPSLWATTSVSIEVADVNDNAPAFAQPEYTVFVKENNPPGCHIFTVSAWDADAQENALVSYSLVERRVGERALSSYVSVHAESGKVYALQPLDHEEVELLQFQVSARDAGVPPLGSNVTLQVFVLDENDNAPALLAPRAGTAAGAVSELVPWSVGAGHVVAKVRAVDADSGYNAWLSYELQLGTGSARIPFRVGLYTGEISTTRALDEADSPRHRLLVLVKDHGEPALTATATVLVSLVESGQAPKASSRAWVGAAGSEATLVDVNVYLIIAICAVSSLLVLTVLLYTALRCSVPPTEGARAPGKPTLVCSSAVGSWSYSQQRRQRVCSGEDPPKTDLMAFSPSLSQGPDSAEEKQLSESEYVGKPRQPNPDWRYSASLRAGMHSSVHLEEAGILRAGPGGPDQQWPTVSSATPEPEAGEVSPPVGAGVNSNSWTFKYGPGNPKQSGPGELPDKFIIPGSPAIISIRQEPTNSQIDKSDFITFGKKEETKKKKKKKKGNKTQEKKEKGNSTTDNSDQ

SEQ ID NO: 69663 - protein, 950 aa, Homo sapiens
  Payload ID: 13817
  Gene Symbol: PCDHA3
  Gene Name: protocadherin alpha 3
  Uniprot ID: Q9Y5H8
  ENSP ID: ENSP00000429808
MLFSWREDPGAQCLLLSLLLLAASEVGSGQLHYSVSEEAKHGTFVGRIAQDLGLELAELVPRLFRVASKRHGDLLEVNLQNGILFVNSRIDREELCGRSAECSIHLEVIVDRPLQVFHVEVEVKDINDNAPVFPMAVKNLFISESRQPGSRFSLEGASDADIGTNSLLTYSLDSTEYFTLDVKRNDEEIKSLGLVLKKNLNREDTPKHYLLITAIDGGKPELTGTTQLKITVLDVNDNAPAFERTIYKVRLLENAPNGTLVVTVNATDLDEGVNKDIAYSFNTDMSADILSKFHLDPVNGQISVKGNIDFEESKSYEIQVEATDKGNPPMSDHCTVLLEIVDINDNVPELVIQSLSLPVLEDSPLSTVIALISVSDRDSGVNGQVTCSLTPHVPFKLVSTFKNYYSLVLDSPLDRESVSAYELVVTARDGGSPSLWATASVSVEVADVNDNAPAFSQSEYTVFVKENNPPGCHIFTVSARDADAQENALVSYSLVERRVGERALSSYVSVHAESGKVYALQPLDHEELELLQFQVSARDAGVPPLGSNVTLQVFVLDENDNAPALLMPRVGGIGGAVSELVPRSVGAGHVVAKVRAVDADSGYNAWLSYELQPGTGGARIPFRVGLYTGEISTTRALDEVDAPRHRLLVLVKDHGEPSLTATATVLVSLVESGQAPKASSQASAGATGPEAALVDVNVYLIVAICAVSSLLVLTLLLYTALRCSAPPTEGDCGPGKPTLVCSSAVGSWSYSQQRQQRVCSGEGLPKTDLMAFSPSLPPCPISRDREEKQDVDVDLSAKPRQPNPDWRYSASLRAGMHSSVHLEEAGILRAGPGGPDQQWPTVSSATPEPEAGEVSPPVGAGVNSNSWTFKYGPGNPKQSGPGELPDKFIIPGSPAIISIRQEPTNSQIDKSDFITFGKKEETKKKKKKKKGNKTQEKKEKGNSTTDNSDQ

SEQ ID NO: 69664 - protein, 824 aa, Homo sapiens
  Payload ID: 13817
  Gene Symbol: PCDHA3
  Gene Name: protocadherin alpha 3
  Uniprot ID: Q9Y5H8
  ENSP ID: ENSP00000434086
MLFSWREDPGAQCLLLSLLLLAASEVGSGQLHYSVSEEAKHGTFVGRIAQDLGLELAELVPRLFRVASKRHGDLLEVNLQNGILFVNSRIDREELCGRSAECSIHLEVIVDRPLQVFHVEVEVKDINDNAPVFPMAVKNLFISESRQPGSRFSLEGASDADIGTNSLLTYSLDSTEYFTLDVKRNDEEIKSLGLVLKKNLNREDTPKHYLLITAIDGGKPELTGTTQLKITVLDVNDNAPAFERTIYKVRLLENAPNGTLVVTVNATDLDEGVNKDIAYSFNTDMSADILSKFHLDPVNGQISVKGNIDFEESKSYEIQVEATDKGNPPMSDHCTVLLEIVDINDNVPELVIQSLSLPVLEDSPLSTVIALISVSDRDSGVNGQVTCSLTPHVPFKLVSTFKNYYSLVLDSPLDRESVSAYELVVTARDGGSPSLWATASVSVEVADVNDNAPAFSQSEYTVFVKENNPPGCHIFTVSARDADAQENALVSYSLVERRVGERALSSYVSVHAESGKVYALQPLDHEELELLQFQVSARDAGVPPLGSNVTLQVFVLDENDNAPALLMPRVGGIGGAVSELVPRSVGAGHVVAKVRAVDADSGYNAWLSYELQPGTGGARIPFRVGLYTGEISTTRALDEVDAPRHRLLVLVKDHGEPSLTATATVLVSLVESGQAPKASSQASAGATGPEAALVDVNVYLIVAICAVSSLLVLTLLLYTALRCSAPPTEGDCGPGKPTLVCSSAVGSWSYSQQRQQRVCSGEGLPKTDLMAFSPSLPPCPISRDREEKQDVDVDLSAKVSNFYLFFPKCLCFSFLNVSTPLEIH

SEQ ID NO: 69665 - protein, 776 aa, Homo sapiens
  Payload ID: 13818
  Gene Symbol: PCDHA4
  Gene Name: protocadherin alpha 4
  ENSP ID: ENSP00000367365
VVYSRVGQESRRLLLLLLLLAAWEAGNGQLHYSVSEEAKHGTFVGRIAQDLGLELAELVPRLFRVASKGRGGLLEVNLQNGILFVNSRIDREELCRRSAECSIHLEVIVDRPLQVFHVDVEVRDINDNPPVFPATQKNLSIAESRPLDSRFPLEGASDADIGENALLTYRLSPNEYFSLEKPPDDELVKGLGLILRKSLDREEAPEIFLVLTATDGGKPELTGTVQLLITVLDANDNAPAFDRTIYKVRLLENVPNGTLVIKLNASDLDEGLNGDIVYSFSNDISPNVKSKFHIDPITGQIIVKGYIDFEESKSYEIIVEGIDKGQLPLSGHCRVIVEVEDNNDNVPDLEFKSLSLPIREDAPLGTVIALISVSDKDMGVNGLVTCSLTSHVPFKLVSTFKNYYSLVLDSALDRESVSAYELVVTARDGGSPSLWATASVSVEVADVNDNAPAFAQPEYTVFVKENNPPGCHIFTVSAWDADAQENALVSYSLVERRVGERALSSYVSVHAESGKVYALQPLDHEELELLQFQVTARDAGVPPLGSNVTLQVFVLDENDNAPALLAPRAGGTGGAVSELVPWSVGVGHVVAKVRAVDADSGYNAWLSYELQPGTGGARIPFRVGLYTGEISTTRALDETDAPRHRLLVLVKDHGEPALTATATVLVSLVESGQAPKASSRALVGAVGPDAALVDVNVYLIIAICAVSSLLVLTLLLYTALRCSALPTEGACAPGKPTLVCSSAVGSWSYSQQRRPRVCSGEGPPKTDLMAFSPSLP

SEQ ID NO: 69666 - protein, 901 aa, Homo sapiens
  Payload ID: 13818
  Gene Symbol: PCDHA4
  Gene Name: protocadherin alpha 4
  ENSP ID: ENSP00000423470
MEFSWGSGQESRRLLLLLLLLAAWEAGNGQLHYSVSEEAKHGTFVGRIAQDLGLELAELVPRLFRVASKGRGGLLEVNLQNGILFVNSRIDREELCRRSAECSIHLEVIVDRPLQVFHVDVEVRDINDNPPVFPATQKNLSIAESRPLDSRFPLEGASDADIGENALLTYRLSPNEYFSLEKPPDDELVKGLGLILRKSLDREEAPEIFLVLTATDGGKPELTGTVQLLITVLDANDNAPAFDRTIYKVRLLENVPNGTLVIKLNASDLDEGLNGDIVYSFSNDISPNVKSKFHIDPITGQIIVKGYIDFEESKSYEIIVEGIDKGQLPLSGHCRVIVEVEDNNDNVPDLEFKSLSLPIREDAPLGTVIALISVSDKDMGVNGLVTCSLTSHVPFKLVSTFKNYYSLVLDSALDRESVSAYELVVTARDGGSPSLWATASVSVEVADVNDNAPAFAQPEYTVFVKENNPPGCHIFTVSAWDADAQENALVSYSLVERRVGERALSSYVSVHAESGKVYALQPLDHEELELLQFQVTARDAGVPPLGSNVTLQVFVLDENDNAPALLAPRAGGTGGAVSELVPWSVGVGHVVAKVRAVDADSGYNAWLSYELQPGTGGARIPFRVGLYTGEISTTRALDETDAPRHRLLVLVKDHGEPALTATATVLVSLVESGQAPKASSRALVGAVGPDAALVDVNVYLIIAICAVSSLLVLTLLLYTALRCSALPTEGACAPGKPTLVCSSAVGSWSYSQQRRPRVCSGEGPPKTDLMAFSPSLPDSRDREDQLQTTEESFAKPRQPNPDWRYSASLRAGMHSSVHLEEAGILRAGPGGPDQQWPTVSSATPEPEAGEVSPPVGAGVNSNSWTFKYGPGNPKQSGPEPKKQTQVSFLLRRKGEASQPRQ

SEQ ID NO: 69667 - protein, 947 aa, Homo sapiens
  Payload ID: 13818
  Gene Symbol: PCDHA4
  Gene Name: protocadherin alpha 4
  Uniprot ID: Q9UN74
  ENSP ID: ENSP00000435300
MEFSWGSGQESRRLLLLLLLLAAWEAGNGQLHYSVSEEAKHGTFVGRIAQDLGLELAELVPRLFRVASKGRGGLLEVNLQNGILFVNSRIDREELCRRSAECSIHLEVIVDRPLQVFHVDVEVRDINDNPPVFPATQKNLSIAESRPLDSRFPLEGASDADIGENALLTYRLSPNEYFSLEKPPDDELVKGLGLILRKSLDREEAPEIFLVLTATDGGKPELTGTVQLLITVLDANDNAPAFDRTIYKVRLLENVPNGTLVIKLNASDLDEGLNGDIVYSFSNDISPNVKSKFHIDPITGQIIVKGYIDFEESKSYEIIVEGIDKGQLPLSGHCRVIVEVEDNNDNVPDLEFKSLSLPIREDAPLGTVIALISVSDKDMGVNGLVTCSLTSHVPFKLVSTFKNYYSLVLDSALDRESVSAYELVVTARDGGSPSLWATASVSVEVADVNDNAPAFAQPEYTVFVKENNPPGCHIFTVSAWDADAQENALVSYSLVERRVGERALSSYVSVHAESGKVYALQPLDHEELELLQFQVTARDAGVPPLGSNVTLQVFVLDENDNAPALLAPRAGGTGGAVSELVPWSVGVGHVVAKVRAVDADSGYNAWLSYELQPGTGGARIPFRVGLYTGEISTTRALDETDAPRHRLLVLVKDHGEPALTATATVLVSLVESGQAPKASSRALVGAVGPDAALVDVNVYLIIAICAVSSLLVLTLLLYTALRCSALPTEGACAPGKPTLVCSSAVGSWSYSQQRRPRVCSGEGPPKTDLMAFSPSLPDSRDREDQLQTTEESFAKPRQPNPDWRYSASLRAGMHSSVHLEEAGILRAGPGGPDQQWPTVSSATPEPEAGEVSPPVGAGVNSNSWTFKYGPGNPKQSGPGELPDKFIIPGSPAIISIRQEPTNSQIDKSDFITFGKKEETKKKKKKKKGNKTQEKKEKGNSTTDNSDQ

SEQ ID NO: 69668 - protein, 798 aa, Homo sapiens
  Payload ID: 13818
  Gene Symbol: PCDHA4
  Gene Name: protocadherin alpha 4
  Uniprot ID: Q9UN74
  ENSP ID: ENSP00000481220
MEFSWGSGQESRRLLLLLLLLAAWEAGNGQLHYSVSEEAKHGTFVGRIAQDLGLELAELVPRLFRVASKGRGGLLEVNLQNGILFVNSRIDREELCRRSAECSIHLEVIVDRPLQVFHVDVEVRDINDNPPVFPATQKNLSIAESRPLDSRFPLEGASDADIGENALLTYRLSPNEYFSLEKPPDDELVKGLGLILRKSLDREEAPEIFLVLTATDGGKPELTGTVQLLITVLDANDNAPAFDRTIYKVRLLENVPNGTLVIKLNASDLDEGLNGDIVYSFSNDISPNVKSKFHIDPITGQIIVKGYIDFEESKSYEIIVEGIDKGQLPLSGHCRVIVEVEDNNDNVPDLEFKSLSLPIREDAPLGTVIALISVSDKDMGVNGLVTCSLTSHVPFKLVSTFKNYYSLVLDSALDRESVSAYELVVTARDGGSPSLWATASVSVEVADVNDNAPAFAQPEYTVFVKENNPPGCHIFTVSAWDADAQENALVSYSLVERRVGERALSSYVSVHAESGKVYALQPLDHEELELLQFQVTARDAGVPPLGSNVTLQVFVLDENDNAPALLAPRAGGTGGAVSELVPWSVGVGHVVAKVRAVDADSGYNAWLSYELQPGTGGARIPFRVGLYTGEISTTRALDETDAPRHRLLVLVKDHGEPALTATATVLVSLVESGQAPKASSRALVGAVGPDAALVDVNVYLIIAICAVSSLLVLTLLLYTALRCSALPTEGACAPGKPTLVCSSAVGSWSYSQQRRPRVCSGEGPPKTDLMAFSPSLPDSRDREDQLQTTEESFAKVSV

SEQ ID NO: 69669 - protein, 890 aa, Homo sapiens
  Payload ID: 13819
  Gene Symbol: PCDHA5
  Gene Name: protocadherin alpha 5
  Uniprot ID: Q9Y5H7
  ENSP ID: ENSP00000433416
MVYSRRGSLGSRLLLLWLLLAYWKAGSGQLHYSIPEEAKHGTFVGRIAQDLGLELAELVPRLFRVASKGRGDLLEVNLQNGILFVNSRIDREELCRRRAECSIHLEVIVDRPLQVFHVEVAVKDINDNPPRFSRQEQRLFILESRMPDSRFPLEGASDLDIGANAQLRYRLNPNEYFDLDVKTNEEETNFLELVLRKSLDREETQEHRLLVIATDGGKPELTGTVQLLINVLDANDNAPEFDKSIYNVRLLENAPSGTLVIKLNASDADEGINKEIVYFFSNLVLDDVKSKFIINSNTGEIKVNGELDYEDYNSYEINIDAMDKSTFPLSGHCKVVVKLLDVNDNTPEMAITTLFLPVKEDAPLSTVIALISVSDRDSGANGQVTCSLMPHVPFKLVSTFKNYYSLVLDSALDRESVSVYELVVTARDGGSPSLWATASVSVEVADVNDNAPAFAQPQYTVFVKENNPPGCHIFTVSARDADAQENALVSYSLVERRVGERPLSSYVSVHAESGKVYALQPLDHEEVELLQFQVSARDAGVPPLGSNVTLQVFVLDENDNAPALLVPRVGGTGGAVSELVPRSVGAGHVVAKVRAVDPDSGYNAWLSYELQPAPGSARIPFRVGLYTGEISTTRSLDETEAPRHRLLVLVKDHGEPPLTATATVLVSLVESGQAPKASSRASAGAVGPEAALVDVNVYLIIAICAVSSLLVLTLLLYTALRCSAQPTEAVCTRGKPTLLCSSAVGSWSYSQQRRQRVCSGEAPPKTDLMAFSPSLPQGPTSTDNPRQPNPDWRYSASLRAGMHSSVHLEEAGILRAGPGGPDQQWPTVSSATPEPEAGEVSPPVGAGVNSNSWTFKYGPGNPKQSGPEPKKQTQVSFLLRRKGEASQPRQ

SEQ ID NO: 69670 - protein, 936 aa, Homo sapiens
  Payload ID: 13819
  Gene Symbol: PCDHA5
  Gene Name: protocadherin alpha 5
  Uniprot ID: Q9Y5H7
  ENSP ID: ENSP00000436557
MVYSRRGSLGSRLLLLWLLLAYWKAGSGQLHYSIPEEAKHGTFVGRIAQDLGLELAELVPRLFRVASKGRGDLLEVNLQNGILFVNSRIDREELCRRRAECSIHLEVIVDRPLQVFHVEVAVKDINDNPPRFSRQEQRLFILESRMPDSRFPLEGASDLDIGANAQLRYRLNPNEYFDLDVKTNEEETNFLELVLRKSLDREETQEHRLLVIATDGGKPELTGTVQLLINVLDANDNAPEFDKSIYNVRLLENAPSGTLVIKLNASDADEGINKEIVYFFSNLVLDDVKSKFIINSNTGEIKVNGELDYEDYNSYEINIDAMDKSTFPLSGHCKVVVKLLDVNDNTPEMAITTLFLPVKEDAPLSTVIALISVSDRDSGANGQVTCSLMPHVPFKLVSTFKNYYSLVLDSALDRESVSVYELVVTARDGGSPSLWATASVSVEVADVNDNAPAFAQPQYTVFVKENNPPGCHIFTVSARDADAQENALVSYSLVERRVGERPLSSYVSVHAESGKVYALQPLDHEEVELLQFQVSARDAGVPPLGSNVTLQVFVLDENDNAPALLVPRVGGTGGAVSELVPRSVGAGHVVAKVRAVDPDSGYNAWLSYELQPAPGSARIPFRVGLYTGEISTTRSLDETEAPRHRLLVLVKDHGEPPLTATATVLVSLVESGQAPKASSRASAGAVGPEAALVDVNVYLIIAICAVSSLLVLTLLLYTALRCSAQPTEAVCTRGKPTLLCSSAVGSWSYSQQRRQRVCSGEAPPKTDLMAFSPSLPQGPTSTDNPRQPNPDWRYSASLRAGMHSSVHLEEAGILRAGPGGPDQQWPTVSSATPEPEAGEVSPPVGAGVNSNSWTFKYGPGNPKQSGPGELPDKFIIPGSPAIISIRQEPTNSQIDKSDFITFGKKEETKKKKKKKKGNKTQEKKEKGNSTTDNSDQ

SEQ ID NO: 69671 - protein, 816 aa, Homo sapiens
  Payload ID: 13819
  Gene Symbol: PCDHA5
  Gene Name: protocadherin alpha 5
  Uniprot ID: Q9Y5H7
  ENSP ID: ENSP00000484128
MVYSRRGSLGSRLLLLWLLLAYWKAGSGQLHYSIPEEAKHGTFVGRIAQDLGLELAELVPRLFRVASKGRGDLLEVNLQNGILFVNSRIDREELCRRRAECSIHLEVIVDRPLQVFHVEVAVKDINDNPPRFSRQEQRLFILESRMPDSRFPLEGASDLDIGANAQLRYRLNPNEYFDLDVKTNEEETNFLELVLRKSLDREETQEHRLLVIATDGGKPELTGTVQLLINVLDANDNAPEFDKSIYNVRLLENAPSGTLVIKLNASDADEGINKEIVYFFSNLVLDDVKSKFIINSNTGEIKVNGELDYEDYNSYEINIDAMDKSTFPLSGHCKVVVKLLDVNDNTPEMAITTLFLPVKEDAPLSTVIALISVSDRDSGANGQVTCSLMPHVPFKLVSTFKNYYSLVLDSALDRESVSVYELVVTARDGGSPSLWATASVSVEVADVNDNAPAFAQPQYTVFVKENNPPGCHIFTVSARDADAQENALVSYSLVERRVGERPLSSYVSVHAESGKVYALQPLDHEEVELLQFQVSARDAGVPPLGSNVTLQVFVLDENDNAPALLVPRVGGTGGAVSELVPRSVGAGHVVAKVRAVDPDSGYNAWLSYELQPAPGSARIPFRVGLYTGEISTTRSLDETEAPRHRLLVLVKDHGEPPLTATATVLVSLVESGQAPKASSRASAGAVGPEAALVDVNVYLIIAICAVSSLLVLTLLLYTALRCSAQPTEAVCTRGKPTLLCSSAVGSWSYSQQRRQRVCSGEAPPKTDLMAFSPSLPQGPTSTDNVSFLILTSIFPSQFSNIKCHIHPLFLYLKIMS

SEQ ID NO: 69672 - protein, 803 aa, Homo sapiens
  Payload ID: 13820
  Gene Symbol: PCDHA6
  Gene Name: protocadherin alpha 6
  Uniprot ID: Q9UN73
  ENSP ID: ENSP00000367366
MVFTPEDRLGKQCLLLPLLLLAAWKVGSGQLHYSVPEEAKHGTFVGRIAQDLGLELAELVPRLFRMASKDREDLLEVNLQNGILFVNSRIDREELCGRSAECSIHLEVIVDRPLQVFHVDVEVRDINDNPPLFPVEEQRVLIYESRLPDSVFPLEGASDADVGSNSILTYKLSSSEYFGLDVKINSDDNKQIGLLLKKSLDREEAPAHNLFLTATDGGKPELTGTVQLLVTVLDVNDNAPTFEQSEYEVRIFENADNGTTVIRLNASDRDEGANGAISYSFNSLVAAMVIDHFSIDRNTGEIVIRGNLDFEQENLYKILIDATDKGHPPMAGHCTVLVRILDKNDNVPEIALTSLSLPVREDAQFGTVIALISVNDLDSGANGQVNCSLTPHVPFKLVSTFKNYYSLVLDSALDRESVSAYELVVTARDGGSPSLWATASLSVEVADMNDNAPAFAQPEYTVFVKENNPPGCHIFTVSARDADAQENALVSYSLVERRVGERALSSYISVHAESGKVYALQPLDHEELELLQFQVSARDAGVPPLGSNVTLQVFVLDENDNAPALLAPRVGGTGGAVSELVPRSLGAGQVVAKVRAVDADSGYNAWLSYELQPPASSARFPFRVGLYTGEISTTRVLDEADSPRHRLLVLVKDHGEPALTATATVLVSLVESGQAPKASSRASVGAAGPEAALVDVNVYLIIAICAVSSLLVLTLLLYTALRCSAPPTEGACTADKPTLVCSSAVGSWSYSQQRRQRVCSGEGPPKMDLMAFSPSLSPCPIMMGKAENQDLNEDHDAKVSEFS

SEQ ID NO: 69673 - protein, 950 aa, Homo sapiens
  Payload ID: 13820
  Gene Symbol: PCDHA6
  Gene Name: protocadherin alpha 6
  Uniprot ID: Q9UN73
  ENSP ID: ENSP00000433378
MVFTPEDRLGKQCLLLPLLLLAAWKVGSGQLHYSVPEEAKHGTFVGRIAQDLGLELAELVPRLFRMASKDREDLLEVNLQNGILFVNSRIDREELCGRSAECSIHLEVIVDRPLQVFHVDVEVRDINDNPPLFPVEEQRVLIYESRLPDSVFPLEGASDADVGSNSILTYKLSSSEYFGLDVKINSDDNKQIGLLLKKSLDREEAPAHNLFLTATDGGKPELTGTVQLLVTVLDVNDNAPTFEQSEYEVRIFENADNGTTVIRLNASDRDEGANGAISYSFNSLVAAMVIDHFSIDRNTGEIVIRGNLDFEQENLYKILIDATDKGHPPMAGHCTVLVRILDKNDNVPEIALTSLSLPVREDAQFGTVIALISVNDLDSGANGQVNCSLTPHVPFKLVSTFKNYYSLVLDSALDRESVSAYELVVTARDGGSPSLWATASLSVEVADMNDNAPAFAQPEYTVFVKENNPPGCHIFTVSARDADAQENALVSYSLVERRVGERALSSYISVHAESGKVYALQPLDHEELELLQFQVSARDAGVPPLGSNVTLQVFVLDENDNAPALLAPRVGGTGGAVSELVPRSLGAGQVVAKVRAVDADSGYNAWLSYELQPPASSARFPFRVGLYTGEISTTRVLDEADSPRHRLLVLVKDHGEPALTATATVLVSLVESGQAPKASSRASVGAAGPEAALVDVNVYLIIAICAVSSLLVLTLLLYTALRCSAPPTEGACTADKPTLVCSSAVGSWSYSQQRRQRVCSGEGPPKMDLMAFSPSLSPCPIMMGKAENQDLNEDHDAKPRQPNPDWRYSASLRAGMHSSVHLEEAGILRAGPGGPDQQWPTVSSATPEPEAGEVSPPVGAGVNSNSWTFKYGPGNPKQSGPGELPDKFIIPGSPAIISIRQEPTNSQIDKSDFITFGKKEETKKKKKKKKGNKTQEKKEKGNSTTDNSDQ

SEQ ID NO: 69674 - protein, 686 aa, Homo sapiens
  Payload ID: 13820
  Gene Symbol: PCDHA6
  Gene Name: protocadherin alpha 6
  Uniprot ID: Q9UN73
  ENSP ID: ENSP00000434113
MVFTPEDRLGKQCLLLPLLLLAAWKVGSGQLHYSVPEEAKHGTFVGRIAQDLGLELAELVPRLFRMASKDREDLLEVNLQNGILFVNSRIDREELCGRSAECSIHLEVIVDRPLQVFHVDVEVRDINDNPPLFPVEEQRVLIYESRLPDSVFPLEGASDADVGSNSILTYKLSSSEYFGLDVKINSDDNKQIGLLLKKSLDREEAPAHNLFLTATDGGKPELTGTVQLLVTVLDVNDNAPTFEQSEYEVRIFENADNGTTVIRLNASDRDEGANGAISYSFNSLVAAMVIDHFSIDRNTGEIVIRGNLDFEQENLYKILIDATDKGHPPMAGHCTVLVRILDKNDNVPEIALTSLSLPVREDAQFGTVIALISVNDLDSGANGQVNCSLTPHVPFKLVSTFKNYYSLVLDSALDRESVSAYELVVTARDGGSPSLWATASLSVEVADMNDNAPAFAQPEYTVFVKENNPPGCHIFTVSARDADAQENALVSYSLVERRVGERALSSYISVHAESGKVYALQPLDHEELELLQFQPRQPNPDWRYSASLRAGMHSSVHLEEAGILRAGPGGPDQQWPTVSSATPEPEAGEVSPPVGAGVNSNSWTFKYGPGNPKQSGPGELPDKFIIPGSPAIISIRQEPTNSQIDKSDFITFGKKEETKKKKKKKKGNKTQEKKEKGNSTTDNSDQ

SEQ ID NO: 69675 - protein, 789 aa, Homo sapiens
  Payload ID: 13821
  Gene Symbol: PCDHA7
  Gene Name: protocadherin alpha 7
  Uniprot ID: Q9UN72
  ENSP ID: ENSP00000349344
MVCPNGYDPGGRHLLLFIIILAAWEAGRGQLHYSVPEEAKHGNFVGRIAQDLGLELAELVPRLFRAVCKFRGDLLEVNLQNGILFVNSRIDREELCGRSAECSIHLEVIVERPLQVFHVDVEVKDINDNPPVFPATQRNLFIAESRPLDSRFPLEGASDADIGENALLTYRLSPNEYFFLDVPTSNQQVKPLGLVLRKLLDREETPELHLLLTATDGGKPELTGTVQLLITVLDNNDNAPVFDRTLYTVKLPENVSIGTLVIHPNASDLDEGLNGDIIYSFSSDVSPDIKSKFHMDPLSGAITVIGHMDFEESRAHKIPVEAVDKGFPPLAGHCTVLVEVVDVNDNAPQLTLTSLSLPIPEDAQPGTVITLISVFDRDFGVNGQVTCSLTPRVPFKLVSTFKNYYSLVLDSALDRESVSAYELVVTARDGGSPSLWATASVSVEVADVNDNAPAFAQPEYTVFVKENNPPGCHIFTVSAGDADAQKNALVSYSLVELRVGERALSSYVSVHAESGKVYALQPLDHEELELLQFQVSARDAGVPPLGSNVTLQVFVLDENDNAPALLAPRVGGTGGAVRELVPRSVGAGHVVAKVRAVDADSGYNAWLSYELQPVAAGASIPFRVGLYTGEISTTRALDETDAPRHRLLVLVKDHGEPSLTATATVLVSLVESGQAPKASSRASLGIAGPETELVDVNVYLIIAICAVSSLLVLTLLLYTALRCSAPSSEGACSLVKPTLVCSSAVGSWSFSQQRRQRVCSGEGPPKTDLMAFSPSLPQGPSSTDNVSHK

SEQ ID NO: 69676 - protein, 937 aa, Homo sapiens
  Payload ID: 13821
  Gene Symbol: PCDHA7
  Gene Name: protocadherin alpha 7
  Uniprot ID: Q9UN72
  ENSP ID: ENSP00000436426
MVCPNGYDPGGRHLLLFIIILAAWEAGRGQLHYSVPEEAKHGNFVGRIAQDLGLELAELVPRLFRAVCKFRGDLLEVNLQNGILFVNSRIDREELCGRSAECSIHLEVIVERPLQVFHVDVEVKDINDNPPVFPATQRNLFIAESRPLDSRFPLEGASDADIGENALLTYRLSPNEYFFLDVPTSNQQVKPLGLVLRKLLDREETPELHLLLTATDGGKPELTGTVQLLITVLDNNDNAPVFDRTLYTVKLPENVSIGTLVIHPNASDLDEGLNGDIIYSFSSDVSPDIKSKFHMDPLSGAITVIGHMDFEESRAHKIPVEAVDKGFPPLAGHCTVLVEVVDVNDNAPQLTLTSLSLPIPEDAQPGTVITLISVFDRDFGVNGQVTCSLTPRVPFKLVSTFKNYYSLVLDSALDRESVSAYELVVTARDGGSPSLWATASVSVEVADVNDNAPAFAQPEYTVFVKENNPPGCHIFTVSAGDADAQKNALVSYSLVELRVGERALSSYVSVHAESGKVYALQPLDHEELELLQFQVSARDAGVPPLGSNVTLQVFVLDENDNAPALLAPRVGGTGGAVRELVPRSVGAGHVVAKVRAVDADSGYNAWLSYELQPVAAGASIPFRVGLYTGEISTTRALDETDAPRHRLLVLVKDHGEPSLTATATVLVSLVESGQAPKASSRASLGIAGPETELVDVNVYLIIAICAVSSLLVLTLLLYTALRCSAPSSEGACSLVKPTLVCSSAVGSWSFSQQRRQRVCSGEGPPKTDLMAFSPSLPQGPSSTDNPRQPNPDWRYSASLRAGMHSSVHLEEAGILRAGPGGPDQQWPTVSSATPEPEAGEVSPPVGAGVNSNSWTFKYGPGNPKQSGPGELPDKFIIPGSPAIISIRQEPTNSQIDKSDFITFGKKEETKKKKKKKKGNKTQEKKEKGNSTTDNSDQ

SEQ ID NO: 69677 - protein, 814 aa, Homo sapiens
  Payload ID: 13822
  Gene Symbol: PCDHA8
  Gene Name: protocadherin alpha 8
  Uniprot ID: Q9Y5H6
  ENSP ID: ENSP00000367363
MDYHWRGELGSWRLLLLLLLLAAWKVGSGQLHYSVPEEAKHGTFVGRIAQDLGLELAELVPRLFRVASKRHRDLLEVSLQNGILFVNSRIDREELCGRSAECSIHLEVIVDRPLQVFHVDVEVKDVNDNPPVFRVKDQKLFVSESRMPDSRFPLEGASDADVGANSVLTYRLSSHDYFMLDVNSKNDENKLVELVLRKSLDREDAPAHHLFLTATDGGKPELTGTVQLLVTVLDVNDNAPTFEQSEYEVRIFENADNGTTVIKLNASDPDEGANGAISYSFNSLVETMVIDHFSIDRNTGEIVIRGNLDFEQENLYKILIDATDKGHPPMAGHCTVLVRILDKNDNVPEIALTSLSLPVREDAQFGTVIALISVNDLDSGANGQVTCSLMPHVPFKLVSTFKNYYSLVLDSALDRERVSAYELVVTARDGGSPSLWATASLSVEVADVNDNAPAFAQPEYTVFVKENNPPGCHIFTVSARDADAQENALVSYSLVERRVGERSLSSYISVHTESGKVYALQPLDHEELELLQFQVSARDAGVPPLGSNVTLQVFVLDENDNAPALLEPRVGGTGGAASKLVPRSVGAGHVVAKVRAVDADSGYNAWLSYELQPAASSPRIPFRVGLYTGEISTTRVLDEADSPRHRLLVLVKDHGEPALTATATVLVSLVESGQAPKASSRQSAGVLGPEAALVDVNVYLIIAICAVSSLLVLTLLLYTALRCSALPTEGGCRAGKPTLVCSSAVGSWSYSQQQPQRVCSGEGPPKTDLMAFSPCLPPDLGSVDVGEEQDLNVDHGLKVSPFKFRTHKFYLWKL

SEQ ID NO: 69678 - protein, 950 aa, Homo sapiens
  Payload ID: 13822
  Gene Symbol: PCDHA8
  Gene Name: protocadherin alpha 8
  Uniprot ID: Q9Y5H6
  ENSP ID: ENSP00000434655
MDYHWRGELGSWRLLLLLLLLAAWKVGSGQLHYSVPEEAKHGTFVGRIAQDLGLELAELVPRLFRVASKRHRDLLEVSLQNGILFVNSRIDREELCGRSAECSIHLEVIVDRPLQVFHVDVEVKDVNDNPPVFRVKDQKLFVSESRMPDSRFPLEGASDADVGANSVLTYRLSSHDYFMLDVNSKNDENKLVELVLRKSLDREDAPAHHLFLTATDGGKPELTGTVQLLVTVLDVNDNAPTFEQSEYEVRIFENADNGTTVIKLNASDPDEGANGAISYSFNSLVETMVIDHFSIDRNTGEIVIRGNLDFEQENLYKILIDATDKGHPPMAGHCTVLVRILDKNDNVPEIALTSLSLPVREDAQFGTVIALISVNDLDSGANGQVTCSLMPHVPFKLVSTFKNYYSLVLDSALDRERVSAYELVVTARDGGSPSLWATASLSVEVADVNDNAPAFAQPEYTVFVKENNPPGCHIFTVSARDADAQENALVSYSLVERRVGERSLSSYISVHTESGKVYALQPLDHEELELLQFQVSARDAGVPPLGSNVTLQVFVLDENDNAPALLEPRVGGTGGAASKLVPRSVGAGHVVAKVRAVDADSGYNAWLSYELQPAASSPRIPFRVGLYTGEISTTRVLDEADSPRHRLLVLVKDHGEPALTATATVLVSLVESGQAPKASSRQSAGVLGPEAALVDVNVYLIIAICAVSSLLVLTLLLYTALRCSALPTEGGCRAGKPTLVCSSAVGSWSYSQQQPQRVCSGEGPPKTDLMAFSPCLPPDLGSVDVGEEQDLNVDHGLKPRQPNPDWRYSASLRAGMHSSVHLEEAGILRAGPGGPDQQWPTVSSATPEPEAGEVSPPVGAGVNSNSWTFKYGPGNPKQSGPGELPDKFIIPGSPAIISIRQEPTNSQIDKSDFITFGKKEETKKKKKKKKGNKTQEKKEKGNSTTDNSDQ

SEQ ID NO: 69679 - protein, 842 aa, Homo sapiens
  Payload ID: 13823
  Gene Symbol: PCDHA9
  Gene Name: protocadherin alpha 9
  Uniprot ID: Q9Y5H5
  ENSP ID: ENSP00000367362
MLYSSRGDPEGQPLLLSLLILAMWVVGSGQLHYSVPEEAEHGTFVGRIAQDLGLELAELVPRLFQLDSKGRGDLLEVNLQNGILFVNSRIDREELCGRSAECSIHLEVIVDRPLQVFHVDVEVKDINDNPPVFPATQKNLFIAESRPLDSRFPLEGASDADIGENALLTYRLSPNEYFFLDVPTSNQQVKPLGLVLRKLLDREETPELHLLLTATDGGKPELTGTVQLLITVLDNNDNAPVFDRTLYTVKLPENVSIGTLVIHPNASDLDEGLNGDIIYSFSSDVSPDIKSKFHMDPLSGAITVIGHMDFEESRAHKIPVEAVDKGFPPLAGHCTLLVEVVDVNDNAPQLTIKTLSVPVKEDAQLGTVIALISVIDLDADANGQVTCSLTPHVPFKLVSTYKNYYSLVLDRALDRESVSAYELVVTARDGGSPSLWATARVSVEVADVNDNAPAFAQSEYTVFVKENNPPGCHIFTVSARDADAQENALVSYSLVERRLGERSLSSYVSVHAESGKVYALQPLDHEELELLQFQVSARDAGVPPLGSNVTLQVFVLDENDNAPALLTPRMRGTDGAVSEMVLRSVGAGVVVGKVRAVDADSGYNAWLSYELQPETASASIPFRVGLYTGEISTTRALDETDAPRQRLLVLVKDHGEPALTATATVLVSLVESGQAPKSSSRASVGATGPEVTLVDVNVYLIIAICAVSSLLVLTLLLYTVLRCSAMPTEGECAPGKPTLVCSSAVGSWSYSQQRRQRVCSGEGKQKTDLMAFSPGLSPCAGSTERTGEPSASSDSTGKVGFSSILFIYIIFFLERYYRLLPGAVQIVLFIFLEIQQIFFLIK

SEQ ID NO: 69680 - protein, 950 aa, Homo sapiens
  Payload ID: 13823
  Gene Symbol: PCDHA9
  Gene Name: protocadherin alpha 9
  Uniprot ID: Q9Y5H5
  ENSP ID: ENSP00000436042
MLYSSRGDPEGQPLLLSLLILAMWVVGSGQLHYSVPEEAEHGTFVGRIAQDLGLELAELVPRLFQLDSKGRGDLLEVNLQNGILFVNSRIDREELCGRSAECSIHLEVIVDRPLQVFHVDVEVKDINDNPPVFPATQKNLFIAESRPLDSRFPLEGASDADIGENALLTYRLSPNEYFFLDVPTSNQQVKPLGLVLRKLLDREETPELHLLLTATDGGKPELTGTVQLLITVLDNNDNAPVFDRTLYTVKLPENVSIGTLVIHPNASDLDEGLNGDIIYSFSSDVSPDIKSKFHMDPLSGAITVIGHMDFEESRAHKIPVEAVDKGFPPLAGHCTLLVEVVDVNDNAPQLTIKTLSVPVKEDAQLGTVIALISVIDLDADANGQVTCSLTPHVPFKLVSTYKNYYSLVLDRALDRESVSAYELVVTARDGGSPSLWATARVSVEVADVNDNAPAFAQSEYTVFVKENNPPGCHIFTVSARDADAQENALVSYSLVERRLGERSLSSYVSVHAESGKVYALQPLDHEELELLQFQVSARDAGVPPLGSNVTLQVFVLDENDNAPALLTPRMRGTDGAVSEMVLRSVGAGVVVGKVRAVDADSGYNAWLSYELQPETASASIPFRVGLYTGEISTTRALDETDAPRQRLLVLVKDHGEPALTATATVLVSLVESGQAPKSSSRASVGATGPEVTLVDVNVYLIIAICAVSSLLVLTLLLYTVLRCSAMPTEGECAPGKPTLVCSSAVGSWSYSQQRRQRVCSGEGKQKTDLMAFSPGLSPCAGSTERTGEPSASSDSTGKPRQPNPDWRYSASLRAGMHSSVHLEEAGILRAGPGGPDQQWPTVSSATPEPEAGEVSPPVGAGVNSNSWTFKYGPGNPKQSGPGELPDKFIIPGSPAIISIRQEPTNSQIDKSDFITFGKKEETKKKKKKKKGNKTQEKKEKGNSTTDNSDQ

SEQ ID NO: 69681 - protein, 963 aa, Homo sapiens
  Payload ID: 13824
  Gene Symbol: PCDHAC1
  Gene Name: protocadherin alpha subfamily C, 1
  Uniprot ID: Q9H158
  ENSP ID: ENSP00000253807
MVGCGVAVLCLWVSCGAAAGQLEYSVPEETERGVAVGNLSADLRLPAAAMSSRNFRFLSSHRELYFGVDLPSGNLVVREPADREQLCRAKAACVLTYDLVLEDPLELHKIRIHVLDTNDNSPLFPAGDVQLHIPEFLTPGARFTLPNAQDDDEGSNGILSYSLSPSQHFRLDMGSRVDGSEYPELVLEKALDREQRATHLLVLTARDGGLPARSGDAQVTIIVVDTNDNAPVFERSVYRTKVPETAPNGTVLFRVQALDPDEGSNGEVQYSLSNSTQAELRHRFHVHPKSGEVQVAASLGPPETLLEAYIEARDEGVFGLASTAKLLVEVTDVNDHAPELDFLTLSNPVPEDAAPGTVIALFSVKDEDLDSNGRVICGMSSAGPFQLTASFDNYYSLLIDGPLDREQISEYQVLITASDSGSPPLSTRRTITVSVADVNDNTPNFPQPQQELFVAENNGPGASLGRVFAQDPDLGKNGLVSYELLDVISEGPSASSLLAVESSSGAITAKTSFDFEQLRGFHFQVEGRDGGIPPRSATVTINLFVVDRNDNYPVILFPLPRNGSVPVEIVPRSARTGHLVTKVVAEDADSGSNAWLSYHISRASDSSLFRISANIGELRTARLVLPTDAVKQRVVVVVRDHGDPPLSSSVTLGVLLSNSVPQLLPDFEDVWEPGGQLSAQNLYLVIALACISFLFLGCLLFFVCTKLHQSPGCCAQSCCRSTEDLRYGSKMVSNPCMTSATIDVTTVERLSQTYLYRASLGLGSDNNSLLLRGEYNAADLRNLATGVGLNLPISCIQIRNRKGDHANVNAMPRQPNPDWRYSASLRAGMHSSVHLEEAGILRAGPGGPDQQWPTVSSATPEPEAGEVSPPVGAGVNSNSWTFKYGPGNPKQSGPGELPDKFIIPGSPAIISIRQEPTNSQIDKSDFITFGKKEETKKKKKKKKGNKTQEKKEKGNSTTDNSDQ

SEQ ID NO: 69682 - protein, 818 aa, Homo sapiens
  Payload ID: 13824
  Gene Symbol: PCDHAC1
  Gene Name: protocadherin alpha subfamily C, 1
  Uniprot ID: Q9H158
  ENSP ID: ENSP00000386356
MVGCGVAVLCLWVSCGAAAGQLEYSVPEETERGVAVGNLSADLRLPAAAMSSRNFRFLSSHRELYFGVDLPSGNLVVREPADREQLCRAKAACVLTYDLVLEDPLELHKIRIHVLDTNDNSPLFPAGDVQLHIPEFLTPGARFTLPNAQDDDEGSNGILSYSLSPSQHFRLDMGSRVDGSEYPELVLEKALDREQRATHLLVLTARDGGLPARSGDAQVTIIVVDTNDNAPVFERSVYRTKVPETAPNGTVLFRVQALDPDEGSNGEVQYSLSNSTQAELRHRFHVHPKSGEVQVAASLGPPETLLEAYIEARDEGVFGLASTAKLLVEVTDVNDHAPELDFLTLSNPVPEDAAPGTVIALFSVKDEDLDSNGRVICGMSSAGPFQLTASFDNYYSLLIDGPLDREQISEYQVLITASDSGSPPLSTRRTITVSVADVNDNTPNFPQPQQELFVAENNGPGASLGRVFAQDPDLGKNGLVSYELLDVISEGPSASSLLAVESSSGAITAKTSFDFEQLRGFHFQVEGRDGGIPPRSATVTINLFVVDRNDNYPVILFPLPRNGSVPVEIVPRSARTGHLVTKVVAEDADSGSNAWLSYHISRASDSSLFRISANIGELRTARLVLPTDAVKQRVVVVVRDHGDPPLSSSVTLGVLLSNSVPQLLPDFEDVWEPGGQLSAQNLYLVIALACISFLFLGCLLFFVCTKLHQSPGCCAQSCCRSTEDLRYGSKMVSNPCMTSATIDVTTVERLSQTYLYRASLGLGSDNNSLLLRGEYNAADLRNLATGVGLNLPISCIQIRNRKGDHANVNAMVSKFYGI

SEQ ID NO: 69683 - protein, 1007 aa, Homo sapiens
  Payload ID: 13825
  Gene Symbol: PCDHAC2
  Gene Name: protocadherin alpha subfamily C, 2
  Uniprot ID: Q9Y5I4
  ENSP ID: ENSP00000289269
MEQAGTRPAATEHPRLRRPMPWLLLLPLLLLLLLLLPGPAASQLRYSVPEEQAPGALVGNVARALGLELRRLGPGCLRINHLGAPSPRYLELDLTSGALFVNERIDREALCEQRPRCLLSLEVLAHNPVAVSAVEVEILDINDNSPRFPRPNYQLQVSESVAPGARFHIESAQDPDVGANSVQTYELSPSEHFELDLKPLQENSKVLELVLRKGLDREQAALHHLVLTAVDGGIPARSGTAQISVRVLDTNDNSPAFDQSTYRVQLREDSPPGTLVVKLNASDPDEGSNGELRYSLSSYTSDRERQLFSIDASTGEVRVIGGLDYEEASSYQIYVQATDRGPVPMAGHCKVLVDIVDVNDNAPEVVLTDLYSPVPENATPNTIVAVLSVNDQDSGPNRKVSLGLEATLPFRLNGFGNSYTLVVSGPLDRERVAVYNITVTATDGGIPQLTSLRTLKVEISDINDNPPSFLEDSYSIYIQENNLPGVLLCTVQATDPDEKENAEVTYSLLEREIQGLPVTSYVSINSASGSLYAVNSFDYEKFREFFVTVEAQDKGSPPLSSTVTANVYVVDMNDHAPHILYPTSTNSSAAFEMVPRTAPAGYLVTKVIAMDSDSGQNAWLFYHLAQTSDLDLFKVELHTGEIRTTRKMGDESGSTFNLTVVVRDNGEPSLSASVAITVAVVDRVSKILPDTQRHVKSPRTYSEITLYLIIALSTVSFIFLLTIIILSIIKCYRYTAYGTACCGGFCGVRERSPAELYKQANNNIDARIPHGLKVQPHFIEVRGNGSLTKTYCYKACLTAGSGSDTFMFYNTGAQTGPGPSGAQAAVTDSRNLTGQSGQNAGNLIILKNEAVSQNEPRQPNPDWRYSASLRAGMHSSVHLEEAGILRAGPGGPDQQWPTVSSATPEPEAGEVSPPVGAGVNSNSWTFKYGPGNPKQSGPGELPDKFIIPGSPAIISIRQEPTNSQIDKSDFITFGKKEETKKKKKKKKGNKTQEKKEKGNSTTDNSDQ

SEQ ID NO: 69684 - protein, 884 aa, Homo sapiens
  Payload ID: 13825
  Gene Symbol: PCDHAC2
  Gene Name: protocadherin alpha subfamily C, 2
  Uniprot ID: Q9Y5I4
  ENSP ID: ENSP00000478629
MEQAGTRPAATEHPRLRRPMPWLLLLPLLLLLLLLLPGPAASQLRYSVPEEQAPGALVGNVARALGLELRRLGPGCLRINHLGAPSPRYLELDLTSGALFVNERIDREALCEQRPRCLLSLEVLAHNPVAVSAVEVEILDINDNSPRFPRPNYQLQVSESVAPGARFHIESAQDPDVGANSVQTYELSPSEHFELDLKPLQENSKVLELVLRKGLDREQAALHHLVLTAVDGGIPARSGTAQISVRVLDTNDNSPAFDQSTYRVQLREDSPPGTLVVKLNASDPDEGSNGELRYSLSSYTSDRERQLFSIDASTGEVRVIGGLDYEEASSYQIYVQATDRGPVPMAGHCKVLVDIVDVNDNAPEVVLTDLYSPVPENATPNTIVAVLSVNDQDSGPNRKVSLGLEATLPFRLNGFGNSYTLVVSGPLDRERVAVYNITVTATDGGIPQLTSLRTLKVEISDINDNPPSFLEDSYSIYIQENNLPGVLLCTVQATDPDEKENAEVTYSLLEREIQGLPVTSYVSINSASGSLYAVNSFDYEKFREFFVTVEAQDKGSPPLSSTVTANVYVVDMNDHAPHILYPTSTNSSAAFEMVPRTAPAGYLVTKVIAMDSDSGQNAWLFYHLAQTSDLDLFKVELHTGEIRTTRKMGDESGSTFNLTVVVRDNGEPSLSASVAITVAVVDRVSKILPDTQRHVKSPRTYSEITLYLIIALSTVSFIFLLTIIILSIIKCYRYTAYGTACCGGFCGVRERSPAELYKQANNNIDARIPHGLKVQPHFIEVRGNGSLTKTYCYKACLTAGSGSDTFMFYNTGAQTGPGPSGAQAAVTDSRNLTGQSGQNAGNLIILKNEAVSQNEVRQWSGGLLQTHAFVTHPPISCDLALLSH

SEQ ID NO: 69685 - protein, 818 aa, Homo sapiens
  Payload ID: 13826
  Gene Symbol: PCDHB1
  Gene Name: protocadherin beta 1
  Uniprot ID: Q9Y5F3
  ENSP ID: ENSP00000307234
MAGTRRKSLQNRQVGSLLIFLCISVGDATTIRYSVAEEMESGSFVANVAKDLGLEVGKLAARGARLVSEGNKMHFRLHRKTGDLFVKEKLDRESLCGKADPCVLHFEVVLVEPLQSFRAEVRVFDINDNAPVFLNKEPLLKIPESTPLGSRFPLQSAQDLDVGLNGLQNYTLSANGYFHLHTRFCSHGPKYAELVLNKPLDREEQPEVNLTITAVDGGSPPKSGTAHIHVVVLDVNDHVPQFSRLVYRAQVSENSPNGSLVATVTAVDLDEGTNKAITYSLAQNPEAILKTFQIDPQNGEVRLRGPLDFEAIETYDIDIQATDGGGLSAHSKVLVEVVDVNDNPPEVMVSSVSSPLPEDSPPQTVVALFTIRDRDIRVGGKVTCFLREDLPFVIKPTFGNSYSLVTDRSLDREEVSGYNITIVAMDTGPPSLSAETMIEVLISDVNDNPPIFREDSYILTVRENNSPAVFIGKVHAEDLDLGENAQITYSLLPPKNGDLSVFAYISINSGNGKLYALRTMDYEAIQDFQFVVKATDGGFLSLSSQVTVRVVVLDDNDNRPMILYPLQNGTLPCNDLVPRSAEAGYLVTKVVAVDGDSGQNSWLSYHLLKATDLGLFSVQRQNGEIHTLRQISERDPMMQKLIILVQDHGQPALSTTVSLNILLVDGFSEPYLQFQDPTKHSRKVNPSTKYLVISLVILSFLFLLSVIVIFIIHVYQKIKYREKFTIQEHFYDDCNFSNNLVQGQGNGSLSRPCPYEMCSATGTGNSEFRFLKRFMPNFPFPHATGEIKMEAGSSLPPNSDRNKSQRLEGHDQVSDDYM

SEQ ID NO: 69686 - protein, 800 aa, Homo sapiens
  Payload ID: 13827
  Gene Symbol: PCDHB10
  Gene Name: protocadherin beta 10
  Uniprot ID: Q9UN67
  ENSP ID: ENSP00000239446
MAVRELCFPRQRQVLFLFLFWGVSLAGSGFGRYSVTEETEKGSFVVNLAKDLGLAEGELAARGTRVVSDDNKQYLLLDSHTGNLLTNEKLDREKLCGPKEPCMLYFQILMDDPFQIYRAELRVRDINDHAPVFQDKETVLKISENTAEGTAFRLERAQDPDGGLNGIQNYTISPNSFFHINISGGDEGMIYPELVLDKALDREEQGELSLTLTALDGGSPSRSGTSTVRIVVLDVNDNAPQFAQALYETQAPENSPIGFLIVKVWAEDVDSGVNAEVSYSFFDASENIRTTFQINPFSGEIFLRELLDYELVNSYKINIQAMDGGGLSARCRVLVEVLDTNDNPPELIVSSFSNSVAENSPETPLAVFKINDRDSGENGKMVCYIQENLPFLLKPSVENFYILITEGALDREIRAEYNITITVTDLGTPRLKTEHNITVLVSDVNDNAPAFTQTSYTLFVRENNSPALHIGSVSATDRDSGTNAQVTYSLLPPQDPHLPLASLVSINADNGHLFALRSLDYEALQAFEFRVGATDRGSPALSREALVRVLVLDANDNSPFVLYPLQNGSAPCTELVPRAAEPGYLVTKVVAVDGDSGQNAWLSYQLLKATEPGLFGVWAHNGEVRTARLLSERDAAKHRLVVLVKDNGEPPRSATATLHLLLVDGFSQPYLPLPEAAPAQAQAEADLLTVYLVVALASVSSLFLLSVLLFVAVRLCRRSRAASVGRCSVPEGPFPGHLVDVRGAETLSQSYQYEVCLTGGPGTSEFKFLKPVISDIQAQGPGRKGEENSTFRNSFGFNIQ

SEQ ID NO: 69687 - protein, 799 aa, Homo sapiens
  Payload ID: 13827
  Gene Symbol: PCDHB10
  Gene Name: protocadherin beta 10
  ENSP ID: ENSP00000444518
MEIGWMHNRRQRQVLVFFVLLSLSGAGAELGSYSVVEETERGSFVANLGKDLGLGLTEMSTRKARIISQGNKQHLQLKAQTGDLLINEKLDREELCGPTEPCILHFQVLMENPLEIFQAELRVIDINDHSPMFTEKEMILKIPENSPLGSLFLLERAQDPDGGLNGIQNYTISPNSFFHINISGGDEGMIYPELVLDKALDREEQGELSLTLTALDGGSPSRSGTSTVRIVVLDVNDNAPQFAQALYETQAPENSPIGFLIVKVWAEDVDSGVNAEVSYSFFDASENIRTTFQINPFSGEIFLRELLDYELVNSYKINIQAMDGGGLSARCRVLVEVLDTNDNPPELIVSSFSNSVAENSPETPLAVFKINDRDSGENGKMVCYIQENLPFLLKPSVENFYILITEGALDREIRAEYNITITVTDLGTPRLKTEHNITVLVSDVNDNAPAFTQTSYTLFVRENNSPALHIGSVSATDRDSGTNAQVTYSLLPPQDPHLPLASLVSINADNGHLFALRSLDYEALQAFEFRVGATDRGSPALSREALVRVLVLDANDNSPFVLYPLQNGSAPCTELVPRAAEPGYLVTKVVAVDGDSGQNAWLSYQLLKATEPGLFGVWAHNGEVRTARLLSERDAAKHRLVVLVKDNGEPPRSATATLHLLLVDGFSQPYLPLPEAAPAQAQAEADLLTVYLVVALASVSSLFLLSVLLFVAVRLCRRSRAASVGRCSVPEGPFPGHLVDVRGAETLSQSYQYEVCLTGGPGTSEFKFLKPVISDIQAQGPGRKGEENSTFRNSFGFNI

SEQ ID NO: 69688 - protein, 797 aa, Homo sapiens
  Payload ID: 13828
  Gene Symbol: PCDHB11
  Gene Name: protocadherin beta 11
  Uniprot ID: Q9Y5F2
  ENSP ID: ENSP00000346802
MENQGTRTQQIRQVLLLFVLLGMSQAGSETWSFSVAEEMQSGSFVGNLAKDLGLKVRELSSRGARVVSNDKKQRLQLDINTGDLLLSETLDREELCGSIEPCVLHLQVLMQNPTQFLQIELQVRDINDHSPIFSEKQMLLEIPENSPVGAVFLLESAKDLDVGINAVKSYTISPNSHFHIKMRVIPDNRKYPELVLDKALDYEELPELSFILSALDGGSPPRSGTALVRVVVVDINDNSPEFEQAFYEVKIRENSILGSLILIVSAWDLDSGTNGEICYTFSHASEDIRKTFEINQKSGEITLRAPLDFETIESYSIIIQATDGGGLFGKSTVIIHVIDVNDNAPEITVSSITSPIPENTPETVVMVFSIQDIDSGDNGRIVCSIPEDLPFVLKSSVENYYTLETERPLDRESTAEYNITITVTDLGIPRLKTEHNTTVLVSDVNDNAPTFTQTSYTLFVRENNSPALHIGSVSATDRDSGTNAQVNYSLLPPQDLHLPLASLVSINTDNGHLFALRSLDYEALQAFDFRVGATDRGSPALSSEALVRVLVLDANDNSPFVLYPLQNGSAPCTELVPRAAEPGYLVTKVVAVDGDSGQNAWLSYQLLKATEPGLFGVWAHNGEVRTARLLSERDAAKHRLVVLVKDNGEPPRSATATLQVLLVDGFSQPYLPLPEAAPAQAQADSLTVYLVVALASVSSLFLFSVLLFVAVRLCRRSRAASVGSCSVPKGPFPGHLVDVSGTGTLSQSYQYEVCLTGGSETNEFKFLKPVIPNIQAKGLGKNSEENSTFRNSFGFNF

SEQ ID NO: 69689 - protein, 432 aa, Homo sapiens
  Payload ID: 13828
  Gene Symbol: PCDHB11
  Gene Name: protocadherin beta 11
  Uniprot ID: Q9Y5F2
  ENSP ID: ENSP00000485553
MVFSIQDIDSGDNGRIVCSIPEDLPFVLKSSVENYYTLETERPLDRESTAEYNITITVTDLGIPRLKTEHNTTVLVSDVNDNAPTFTQTSYTLFVRENNSPALHIGSVSATDRDSGTNAQVNYSLLPPQDLHLPLASLVSINTDNGHLFALRSLDYEALQAFDFRVGATDRGSPALSSEALVRVLVLDANDNSPFVLYPLQNGSAPCTELVPRAAEPGYLVTKVVAVDGDSGQNAWLSYQLLKATEPGLFGVWAHNGEVRTARLLSERDAAKHRLVVLVKDNGEPPRSATATLQVLLVDGFSQPYLPLPEAAPAQAQADSLTVYLVVALASVSSLFLFSVLLFVAVRLCRRSRAASVGSCSVPKGPFPGHLVDVSGTGTLSQSYQYEVCLTGGSETNEFKFLKPVIPNIQAKGLGKNSEENSTFRNSFGFNF

SEQ ID NO: 69690 - protein, 795 aa, Homo sapiens
  Payload ID: 13829
  Gene Symbol: PCDHB12
  Gene Name: protocadherin beta 12
  Uniprot ID: Q9Y5F1
  ENSP ID: ENSP00000239450
MENGGAGTLQIRQVLLFFVLLGMSQAGSETGNFLVMEELQSGSFVGNLAKTLGLEVSELSSRGARVVSNDNKECLQLDTNTGDLLLREMLDREELCGSNEPCVLYFQVLMKNPTQFLQIELQVRDINDHSPVFLEKEMLLEIPENSPVGAVFLLESAKDLDVGINAVKSYTINPNSHFHVKIRVNPDNRKYPELVLDKALDYEERPELSFILTALDGGSPPRSGTALVRVVVVDINDNSPEFEQAFYEVKILENSILGSLVVTVSAWDLDSGTNSELSYTFSHASEDIRKTFEINQKSGDITLTAPLDFEAIESYSIIIQATDGGGLFGKSTVRIQVMDVNDNAPEITVSSITSPIPENTPETVVMVFRIRDRDSGDNGKMVCSIPEDIPFVLKSSVNNYYTLETERPLDRESRAEYNITITVTDLGTPRLKTEHNITVLVSDVNDNAPAFTQTSYALFVRENNSPALHIGSISATDRDSGTNAQVNYSLLPSQDPHLPLASLVSINADNGHLFALRSLDYEALQGFQFRVGATDHGSPALSSEALVRVLVLDANDNSPFVLYPLQNGSAPCTELVPWAAEPGYLVTKVVAVDGDSGQNAWLSYQLLKATEPGLFGVWAHNGEVRTARLLSERDAAKHRLVVLVKDNGEPPRSATATLHVLLVDGFSQPYLPLPEAAPAQAQADSLTVYLVVALASVSSLFLFSVLLFVAVRLCRRSRAAPVGRCSVPEGPFPGHLVDVSGTGTLSQSYHYEVCVTGGSRSNKFKFLKPIIPNFLPQSTGSEVEENPPFQNNLGF

SEQ ID NO: 69691 - protein, 458 aa, Homo sapiens
  Payload ID: 13829
  Gene Symbol: PCDHB12
  Gene Name: protocadherin beta 12
  Uniprot ID: Q9Y5F1
  ENSP ID: ENSP00000485303
MDVNDNAPEITVSSITSPIPENTPETVVMVFRIRDRDSGDNGKMVCSIPEDIPFVLKSSVNNYYTLETERPLDRESRAEYNITITVTDLGTPRLKTEHNITVLVSDVNDNAPAFTQTSYALFVRENNSPALHIGSISATDRDSGTNAQVNYSLLPSQDPHLPLASLVSINADNGHLFALRSLDYEALQGFQFRVGATDHGSPALSSEALVRVLVLDANDNSPFVLYPLQNGSAPCTELVPWAAEPGYLVTKVVAVDGDSGQNAWLSYQLLKATEPGLFGVWAHNGEVRTARLLSERDAAKHRLVVLVKDNGEPPRSATATLHVLLVDGFSQPYLPLPEAAPAQAQADSLTVYLVVALASVSSLFLFSVLLFVAVRLCRRSRAAPVGRCSVPEGPFPGHLVDVSGTGTLSQSYHYEVCVTGGSRSNKFKFLKPIIPNFLPQSTGSEVEENPPFQNNLGF

SEQ ID NO: 69692 - protein, 67 aa, Homo sapiens
  Payload ID: 13829
  Gene Symbol: PCDHB12
  Gene Name: protocadherin beta 12
  ENSP ID: ENSP00000485352
MENGGAGTLQIRQVLLFFVLLGMSQAGSETGNFLVMEELQSGSFVGNLAKTLGLEHLWILKQLSHTQ

SEQ ID NO: 69693 - protein, 798 aa, Homo sapiens
  Payload ID: 13830
  Gene Symbol: PCDHB13
  Gene Name: protocadherin beta 13
  Uniprot ID: Q9Y5F0
  ENSP ID: ENSP00000345491
MEASGKLICRQRQVLFSFLLLGLSLAGAAEPRSYSVVEETEGSSFVTNLAKDLGLEQREFSRRGVRVVSRGNKLHLQLNQETADLLLNEKLDREDLCGHTEPCVLRFQVLLESPFEFFQAELQVIDINDHSPVFLDKQMLVKVSESSPPGTTFPLKNAEDLDVGQNNIENYIISPNSYFRVLTRKRSDGRKYPELVLDKALDREEEAELRLTLTALDGGSPPRSGTAQVYIEVLDVNDNAPEFEQPFYRVQISEDSPVGFLVVKVSATDVDTGVNGEISYSLFQASEEIGKTFKINPLTGEIELKKQLDFEKLQSYEVNIEARDAGTFSGKCTVLIQVIDVNDHAPEVTMSAFTSPIPENAPETVVALFSVSDLDSGENGKISCSIQEDLPFLLKSAENFYTLLTERPLDRESRAEYNITITVTDLGTPMLITQLNMTVLIADVNDNAPAFTQTSYTLFVRENNSPALHIRSVSATDRDSGTNAQVTYSLLPPQDPHLPLTSLVSINADNGHLFALRSLDYEALQGFQFRVGASDHGSPALSSEALVRVVVLDANDNSPFVLYPLQNGSAPCTELVPRAAEPGYLVTKVVAVDGDSGQNAWLSYQLLKATELGLFGVWAHNGEVRTARLLSERDAAKHRLVVLVKDNGEPPRSATATLHVLLVDGFSQPYLPLPEAAPTQAQADLLTVYLVVALASVSSLFLFSVLLFVAVRLCRRSRAASVGRCLVPEGPLPGHLVDMSGTRTLSQSYQYEVCLAGGSGTNEFKFLKPIIPNFPPQCPGKEIQGNSTFPNNFGFNIQ

SEQ ID NO: 69694 - protein, 798 aa, Homo sapiens
  Payload ID: 13831
  Gene Symbol: PCDHB14
  Gene Name: protocadherin beta 14
  Uniprot ID: Q9Y5E9
  ENSP ID: ENSP00000239449
MEIRGALDLRKRQVLIFLVLLGLSRAGTESAHYSVAEETEIGSFVANLARDLGLGVEELSSREARVVSDDNKKYLHLDLLTGNLLLNEKLDRDELCGSTEPCVLHFQVVLENPLQFFRFELCVKDINDHSPTFLDKEILIKISEGTTVGATFLMESAQDLDVGSNSLQNYTISPNSHFYIKIPDSSDRKIYPELVLDRALDYEQEAELRLTLTAVDGGSPPKSGTTLVLIKVLDINDNAPEFPQSLYEVQVPEDRPLGSWIATISAKDLDAGNYGKISYTFFHASEDIRKTFEINPISGEVNLRSPLDFEVIQSYTINIQATDGGGLSGKCTLLVKVMDINDNPPEVTISSITKRIPENASETLVALFSILDQDSGDNGRMICSIQDNLPFFLKPTFKNFFTLVSEKALDRESQAEYNITITVTDLGTPRLKTEYNITVLLSDVNDNAPTFTQTSYTLFVRENNSPALHIGSVSATDRDSGTNAQVNYSLLPPQDRHLPLASLVSINADNGHLFALRSLDYEALQEFEFRVGATDRGSPALSSEALVRVLVLDANDNSPFVLYPLQNGSAPCTELVPRAAEPGYLVTKVVAVDGDSGQNAWLSYQLLKATEPGLFGVWAHNGEVRTARLLSERDAAKHRLVVLVKDNGEPPRSATATLHVLLVDGFSQPYLPLPEAAPAQAQADSLTVYLVVALASVSSLFLFSVLLFVAVRLCRRSRAASVGRCSVPEGPFPGHLVDVSGTGTLSQSYQYEVCLTGGSGTNEFKFLKPIIPNFQVHDTGRNMGEIENFRNSFGLNIQ

SEQ ID NO: 69695 - protein, 645 aa, Homo sapiens
  Payload ID: 13831
  Gene Symbol: PCDHB14
  Gene Name: protocadherin beta 14
  Uniprot ID: Q9Y5E9
  ENSP ID: ENSP00000485055
MESAQDLDVGSNSLQNYTISPNSHFYIKIPDSSDRKIYPELVLDRALDYEQEAELRLTLTAVDGGSPPKSGTTLVLIKVLDINDNAPEFPQSLYEVQVPEDRPLGSWIATISAKDLDAGNYGKISYTFFHASEDIRKTFEINPISGEVNLRSPLDFEVIQSYTINIQATDGGGLSGKCTLLVKVMDINDNPPEVTISSITKRIPENASETLVALFSILDQDSGDNGRMICSIQDNLPFFLKPTFKNFFTLVSEKALDRESQAEYNITITVTDLGTPRLKTEYNITVLLSDVNDNAPTFTQTSYTLFVRENNSPALHIGSVSATDRDSGTNAQVNYSLLPPQDRHLPLASLVSINADNGHLFALRSLDYEALQEFEFRVGATDRGSPALSSEALVRVLVLDANDNSPFVLYPLQNGSAPCTELVPRAAEPGYLVTKVVAVDGDSGQNAWLSYQLLKATEPGLFGVWAHNGEVRTARLLSERDAAKHRLVVLVKDNGEPPRSATATLHVLLVDGFSQPYLPLPEAAPAQAQADSLTVYLVVALASVSSLFLFSVLLFVAVRLCRRSRAASVGRCSVPEGPFPGHLVDVSGTGTLSQSYQYEVCLTGGSGTNEFKFLKPIIPNFQVHDTGRNMGEIENFRNSFGLNIQ

SEQ ID NO: 69696 - protein, 787 aa, Homo sapiens
  Payload ID: 13832
  Gene Symbol: PCDHB15
  Gene Name: protocadherin beta 15
  Uniprot ID: Q9Y5E8
  ENSP ID: ENSP00000231173
MEPAGERFPEQRQVLILLLLLEVTLAGWEPRRYSVMEETERGSFVANLANDLGLGVGELAERGARVVSEDNEQGLQLDLQTGQLILNEKLDREKLCGPTEPCIMHFQVLLKKPLEVFRAELLVTDINDHSPEFPEREMTLKIPETSSLGTVFPLKKARDLDVGSNNVQNYNISPNSHFHVSTRTRGDGRKYPELVLDTELDREEQAELRLTLTAVDGGSPPRSGTVQILILVLDANDNAPEFVQALYEVQVPENSPVGSLVVKVSARDLDTGTNGEISYSLYYSSQEIDKPFELSSLSGEIRLIKKLDFETMSSYDLDIEASDGGGLSGKCSVSVKVLDVNDNFPELSISSLTSPIPENSPETEVALFRIRDRDSGENGKMICSIQDDVPFKLKPSVENFYRLVTEGALDRETRAEYNITITITDLGTPRLKTEQSITVLVSDVNDNAPAFTQTSYTLFVRENNSPALHIGSVSATDRDSGTNAQVTYSLLPPRDPHLPLTSLVSINTDNGHLFALQSLDYEALQAFEFRVGATDRGFPALSSEALVRVLVLDANDNSPFVLYPLQNGSAPCTELVPRAAEPGYLVTKVVAVDGDSGQNAWLSYQLLKATEPGLFGVWAHNGEVRTARLLSERDVAKHRLVVLVKDNGEPPRSATATLQVLLVDGFSQPYLPLPEAAPAQAQADSLTVYLVVALASVSSLFLFSVFLFVAVRLCRRSRAASVGRCSVPEGPFPGHLVDVSGTGTLSQSYQYEVCLTGGSESNDFKFLKPIFPNIVSQDSRRKSEFLE

SEQ ID NO: 69697 - protein, 129 aa, Homo sapiens
  Payload ID: 13832
  Gene Symbol: PCDHB15
  Gene Name: protocadherin beta 15
  ENSP ID: ENSP00000485504
MEPAGERFPEQRKYPELVLDTELDREEQAELRLTLTAVDGGSPPRSGTVQILILVLDANDNAPEFVQALYEVQVPENSPVGSLVVKVSARDLDTGTNGEISYSLYYSSQEIDKPFELSSLSGEIRLIKK

SEQ ID NO: 69698 - protein, 776 aa, Homo sapiens
  Payload ID: 13833
  Gene Symbol: PCDHB16
  Gene Name: protocadherin beta 16
  Uniprot ID: Q9NRJ7
  ENSP ID: ENSP00000477314
MEIGWMHNRRQRQVLVFFVLLSLSGAGAELGSYSVVEETERGSFVANLGKDLGLGLTEMSTRKARIISQGNKQHLQLKAQTGDLLINEKLDREELCGPTEPCILHFQVLMENPLEIFQAELRVIDINDHSPMFTEKEMILKIPENSPLGTEFPLNHALDLDVGSNNVQNYKISPSSHFRVLIHEFRDGRKYPELVLDKELDREEEPQLRLTLTALDGGSPPRSGTAQVRIEVVDINDNAPEFEQPIYKVQIPENSPLGSLVATVSARDLDGGANGKISYTLFQPSEDISKTLEVNPMTGEVRLRKQVDFEMVTSYEVRIKATDGGGLSGKCTLLLQVVDVNDNPPQVTMSALTSPIPENSPEIVVAVFSVSDPDSGNNGKTISSIQEDLPFLLKPSVKNFYTLVTERALDREARAEYNITLTVTDMGTPRLKTEHNITVQISDVNDNAPTFTQTSYTLFVRENNSPALHIGSVSATDRDSGTNAQVTYSLLPPQDPHLPLASLVSINADNGHLFALRSLDYEALQAFEFRVGATDRGSPALSREALVRVLVLDANDNSPFVLYPLQNGSAPCTELVPRAAEPGYLVTKVVAVDGDSGQNAWLSYQLLKATEPGLFGVWAHNGEVRTARLLSERDAAKQRLVVLVKDNGEPPRSATATLHVLLVDGFSQPFLPLPEAAPGQTQANSLTVYLVVALASVSSLFLFSVLLFVAVRLCRRSRAASVGRCSMPEGPFPGRLVDVSGTGTLSQSYQYEVCLTGGSETSEFKFLKPIIPNFSP

SEQ ID NO: 69699 - protein, 222 aa, Homo sapiens
  Payload ID: 13833
  Gene Symbol: PCDHB16
  Gene Name: protocadherin beta 16
  ENSP ID: ENSP00000485449
MSALTSPIPENSPEIVVAVFSVSDPDSGNNGKTISSIQEDLPFLLKPSVKNFYTLVTERALDREARAEYNITLTVTDMGTPRLKTEHNITVQISDVNDNAPTFTQTSYTLFVRENNSPALHIGSVSATDRDSGTNAQVTYSLLPPQDPHLPLASLVSINADNGHLFALRSLDYEALQAFEFRVGATDRGSPALSREALVRVLVLDANDNSPFVLYPLQNGSA

SEQ ID NO: 69700 - protein, 798 aa, Homo sapiens
  Payload ID: 13834
  Gene Symbol: PCDHB2
  Gene Name: protocadherin beta 2
  Uniprot ID: Q9Y5E7
  ENSP ID: ENSP00000194155
MEAGEGKERVPKQRQVLIFFVLLGIAQASCQPRHYSVAEETESGSFVANLLKDLGLEIGELAVRGARVVSKGKKMHLQFDRQTGDLLLNEKLDREELCGPTEPCVLPFQVLLENPLQFFQAELRIRDVNDHSPVFLDKEILLKIPESITPGTTFLIERAQDLDVGTNSLQNYTISPNFHFHLNLQDSLDGIILPQLVLNRALDREEQPEIRLTLTALDGGSPPRSGTALVRIEVVDINDNVPEFAKLLYEVQIPEDSPVGSQVAIVSARDLDIGTNGEISYAFSQASEDIRKTFRLSAKSGELLLRQKLDFESIQTYTVNIQATDGGGLSGTCVVFVQVMDLNDNPPELTMSTLINQIPENLQDTLIAVFSVSDPDSGDNGRMVCSIQDDLPFFLKPSVENFYTLVISTALDRETRSEYNITITVTDFGTPRLKTEHNITVLVSDVNDNAPAFTQTSYTLFVRENNSPALHIGSVSATDRDSGTNAQVTYSLLPPQDPHLPLASLVSINADNGHLFALQSLDYEALQAFEFRVGAADRGSPALSSEALVRVLVLDANDNSPFVLYPLQNGSAPCTELVPRAAEPGYLVTKVVAVDGDSGQNAWLSYQLLKATEPGLFGVWAHNGEVRTARLLRERDAAKQRLVVLVKDNGEPPRSATATLHVLLVDGFSQPYLLLPEAAPAQAQADLLTVYLVVALASVSSLFLFSVLLFVAVRLCRRSRAASVGRCSVPEGPFPGQMVDVSGTGTLSQSYQYEVCLTGGSGTNEFKFLKPIIPNFVAQGAERVSEANPSFRKSFEFT

SEQ ID NO: 69701 - protein, 39 aa, Homo sapiens
  Payload ID: 13834
  Gene Symbol: PCDHB2
  Gene Name: protocadherin beta 2
  ENSP ID: ENSP00000485040
MEAGEGKERVPKQRTCPGLGCRNQQSPKLHNQSQFPLSS

SEQ ID NO: 69702 - protein, 50 aa, Homo sapiens
  Payload ID: 13834
  Gene Symbol: PCDHB2
  Gene Name: protocadherin beta 2
  ENSP ID: ENSP00000485270
MEAGEGKERVPKQRKYHSWNYFLNRTCPGLGCRNQQSPKLHNQSQFPLSS

SEQ ID NO: 69703 - protein, 36 aa, Homo sapiens
  Payload ID: 13834
  Gene Symbol: PCDHB2
  Gene Name: protocadherin beta 2
  ENSP ID: ENSP00000485376
MEAGEGKERVPKQRQSRWHNITTAGAEQSPGSRGAA

SEQ ID NO: 69704 - protein, 54 aa, Homo sapiens
  Payload ID: 13834
  Gene Symbol: PCDHB2
  Gene Name: protocadherin beta 2
  ENSP ID: ENSP00000485480
QAQADLLTVYLMVDVSGTGTLSQSYQYEVCLTGGSGTNEFKFLKPIIPNFVAQG

SEQ ID NO: 69705 - protein, 796 aa, Homo sapiens
  Payload ID: 13835
  Gene Symbol: PCDHB3
  Gene Name: protocadherin beta 3
  Uniprot ID: Q9Y5E6
  ENSP ID: ENSP00000231130
MEAGGERFLRQRQVLLLFVFLGGSLAGSESRRYSVAEEKEKGFLIANLAKDLGLRVEELAARGAQVVSKGNKQHFQLSHQTGDLLLNEKLDREELCGPTEPCILHFQILLQNPLQFVTNELRIIDVNDHSPVFFENEMHLKILESTLPGTVIPLGNAEDLDVGRNSLQNYTITPNSHFHVLTRSRRDGRKYPELVLDKALDPEEQPELSLTLTALDGGSPPRSGTAQINIQVLDINDNAPEFAQPLYEVAVLENTPVNSVIVTVSASDLDTGSFGTISYAFFHASEEIRKTFQLNPITGDMQLVKYLNFEAINSYEVDIEAKDGGGLSGKSTVIVQVVDVNDNPPELTLSSVNSPIPENSGETVLAVFSVSDLDSGDNGRVMCSIENNLPFFLKPSVENFYTLVSEGALDRETRSEYNITITITDLGTPRLKTKYNITVLVSDVNDNAPAFTQISYTLFVRENNSPALHIGSVSATDRDSGTNAQVTYSLLPPQDPHLPLSSLVSINADNGHLFALRSLDYEALQAFEFRVGATDRGSPALSSEALVRVLVLDANDNSPFVLYPLQNGSAPCTELVPRAAEPGYLVTKVVAVDGDSGQNAWLSYQLLKATEPGLFGVWAHNGEVRTARLLSERDAAKHRLVVLVKDNGEPPRSATATLHVLLVDGFSQPYLPLPEAAPAQAQADLLTVYLVVALASVSSLFLFSVLLFVAVRLCRRSRAASVGRCSVPEGPFPGQMVDVSGTGTLSQSYQYEVCLTGGSGTNEFKFLKPIIPNFVAQGAERVSEANPSFRKSFEFS

SEQ ID NO: 69706 - protein, 54 aa, Homo sapiens; identical to SEQ ID NO: 69704
  Payload ID: 13835
  Gene Symbol: PCDHB3
  Gene Name: protocadherin beta 3
  ENSP ID: ENSP00000485531

SEQ ID NO: 69707 - protein, 795 aa, Homo sapiens
  Payload ID: 13836
  Gene Symbol: PCDHB4
  Gene Name: protocadherin beta 4
  Uniprot ID: Q9Y5E5
  ENSP ID: ENSP00000194152
MKKLGRIHPNRQVLAFILMVFLSQVRLEPIRYSVLEETESGSFVAHLAKDLGLGIGELASRSARVLSDDDKQRLQLDRQTGDLLLREKLDREELCGPIEPCVLHFQVFLEMPVQFFQGELLIQDINDHSPIFPEREVLLKILENSQPGTLFPLLIAEDLDVGSNGLQKYTISPNSHFHILTRNHSEGKKYPDLVQDKPLDREEQPEFSLTLVALDGGSPPRSGTVMVRILIMDINDNAPEFVHTPYGVQVLENSPLDSPIVRVLARDIDAGNFGSVSYGLFQASDEIKQTFSINEVTGEILLKKKLDFEKIKSYHVEIEATDGGGLSGKGTVVIEVVDVNDNPPELIISSLTSSIPENAPETVVSIFRIRDRDSGENGKMICSIPDNLPFILKPTLKNFYTLVTERPLDRETSAEYNITIAVTDLGTPRLKTQQNITVQVSDVNDNAPAFTQTSYTLFVRENNSPALHIGSVSATDRDSGTNAQVTYSLLPPQDPHLPLASLVSINADNGHLFALRSLDYEALQAFEFRVGASDRGSPALSSEALVRVLVLDTNDNSPFVLYPLQNGSAPCTELVPRAAEPGYLVTKVVAVDGDSGQNAWLSYQLLKATEPGLFGVWAHNGEVRTARLLSERDAAKHRLVVLVKDNGEPPRSATATLHVLLVDGFSQPYLPLPEAAPAQAQADSLTVYLVVALASVSSLFLFSVLLFVAVRLCRRSRAASVGRCSVPEGPFPGHLVDVSGTGTLSQSYQYEVCLTGDSGTGEFKFLKPIFPNLLVQDTGREVKENPKFRNSLVFS

SEQ ID NO: 69708 - protein, 795 aa, Homo sapiens
  Payload ID: 13837
  Gene Symbol: PCDHB5
  Gene Name: protocadherin beta 5
  Uniprot ID: Q9Y5E4
  ENSP ID: ENSP00000231134
METALAKTPQKRQVMFLAILLLLWEAGSEAVRYSIPEETESGYSVANLAKDLGLGVGELATRGARMHYKGNKELLQLDIKTGNLLLYEKLDREVMCGATEPCILHFQLLLENPVQFFQTDLQLTDINDHAPEFPEKEMLLKIPESTQPGTVFPLKIAQDFDIGSNTVQNYTISPNSHFHVATHNRGDGRKYPELVLDKALDREERPELSLTLTALDGGAPPRSGTTTIRIVVLDNNDNAPEFLQSFYEVQVPENSPLNSLVVVVSARDLDAGAYGSVAYALFQGDEVTQPFVIDEKTAEIRLKRALDFEATPYYNVEIVATDGGGLSGKCTVAIEVVDVNDNAPELTMSTLSSPTPENAPETVVAVFSVSDPDSGDNGRMICSIQNDLPFLLKPTLKNFYTLVTQRTLDRESQAEYNITITVTDMGTPRLKTEHNITVLVSDVNDNAPAFTQTSYTLFVRENNSPALHIGSVSATDRDSGTNAQVTYSLLPPQNPHLRLASLVSINADNGHLFALRSLDYEALQAFEFRVGATDRGSPALSSEALVRVLVLDANDNSPFVLYPLQNGSAPCTELVPRAAEPGYLVTKVVAVDGDSGQNAWLSYQLLKATEPGLFSMWAHNGEVRTARLLSERDAAKHRLVVLVKDNGEPPRSATATLHVLLVDGFSQPYLPLPEAAPAQAQADSLTVYLVVALASVSSLFLFSVLLFVAVRLCRRSRAAPVGRCSVPEGPFPGHLVDVSGTGTLSQSYHYEVCLTGDSGAGEFKFLKPIIPNLLPQGAGEEIGKTAAFRNSFGLN

SEQ ID NO: 69709 - protein, 247 aa, Homo sapiens
  Payload ID: 13837
  Gene Symbol: PCDHB5
  Gene Name: protocadherin beta 5
  ENSP ID: ENSP00000485464
MGTPRLKTEHNITVLVSDVNDNAPAFTQTSYTLFVRENNSPALHIGSVSATDRDSGTNAQVTYSLLPPQNPHLRLASLVSINADNGHLFALRSLDYEALQAFEFRVGATDRGSPALSSEALVRVLVLDANDNSPFVLYPLQNGSAPCTELVPRAAEPGYLVTKVVAVDGDSGQNAWLSYQLLKATEPGLFSMWAHNGEVRTARLLSERDAAKHRLVVLVKDNGEPPRSATATLHVLLVDGFSQPYLP

SEQ ID NO: 69710 - protein, 794 aa, Homo sapiens
  Payload ID: 13838
  Gene Symbol: PCDHB6
  Gene Name: protocadherin beta 6
  Uniprot ID: Q9Y5E3
  ENSP ID: ENSP00000231136
MMQTKVQNKKRQVAFFILLMLWGEVGSESIQYSVLEETESGTFVANLTKDLGLRVGELASRGARVVFKGNRQHLQFDPQTHDLLLNEKLDREELCGSTEPCVLPFQVLLENPLQFFQASLRVRDINDHAPEFPAREMLLKISEITMPGKIFPLKMAHDLDTGSNGLQRYTISSNPHFHVLTRNRSEGRKFPELVLDKPLDREEQPQLRLTLIALDGGSPPRSGTSEIQIQVLDINDNVPEFAQELYEAQVPENNPLGSLVITVSARDLDAGSFGKVSYALFQVDDVNQPFEINAITGEIRLRKALDFEEIQSYDVDVEATDGGGLSGKCSLVVRVLDVNDNAPELTMSFFISLIPENLPEITVAVFSVSDADSGHNQQVICSIENNLPFLLRPSVENFYTLVTEGALDRESRAEYNITITVTDLGTPRLKTQQSITVQVSDVNDNAPAFTQTSYTLFVRENNSPALHIGSVSATDRDSGINAQVTYSLLPPQDPHLPLSSLVSINADNGHLFALRSLDYEALQSFEFRVGATDRGSPALSSEALVRLLVLDANDNSPFVLYPLQNGSAPCTELVPRAAEPGYLVTKVVAVDGDSGQNAWLSYQLLKATELGLFGVWAHNGEVRTARLLSERDAAKHRLVVLVKDNGEPPRSATATLHVLLVDGFSQPYLPLPEAAPAQAQADSLTVYLVVALASVSSLFLFSVLLFVAVRLCRRSRAASVGRYSVPEGPFPGHLVDVSGTGTLSQSYQYKVCLTGGSETNEFKFLKPIMPNFPPQGTEREMEETPTSRNSFPFS

SEQ ID NO: 69711 - protein, 658 aa, Homo sapiens
  Payload ID: 13838
  Gene Symbol: PCDHB6
  Gene Name: protocadherin beta 6
  ENSP ID: ENSP00000485034
MLLKISEITMPGKIFPLKMAHDLDTGSNGLQRYTISSNPHFHVLTRNRSEGRKFPELVLDKPLDREEQPQLRLTLIALDGGSPPRSGTSEIQIQVLDINDNVPEFAQELYEAQVPENNPLGSLVITVSARDLDAGSFGKVSYALFQVDDVNQPFEINAITGEIRLRKALDFEEIQSYDVDVEATDGGGLSGKCSLVVRVLDVNDNAPELTMSFFISLIPENLPEITVAVFSVSDADSGHNQQVICSIENNLPFLLRPSVENFYTLVTEGALDRESRAEYNITITVTDLGTPRLKTQQSITVQVSDVNDNAPAFTQTSYTLFVRENNSPALHIGSVSATDRDSGINAQVTYSLLPPQDPHLPLSSLVSINADNGHLFALRSLDYEALQSFEFRVGATDRGSPALSSEALVRLLVLDANDNSPFVLYPLQNGSAPCTELVPRAAEPGYLVTKVVAVDGDSGQNAWLSYQLLKATELGLFGVWAHNGEVRTARLLSERDAAKHRLVVLVKDNGEPPRSATATLHVLLVDGFSQPYLPLPEAAPAQAQADSLTVYLVVALASVSSLFLFSVLLFVAVRLCRRSRAASVGRYSVPEGPFPGHLVDVSGTGTLSQSYQYKVCLTGGSETNEFKFLKPIMPNFPPQGTEREMEETPTSRNSFPFS

SEQ ID NO: 69712 - protein, 793 aa, Homo sapiens
  Payload ID: 13839
  Gene Symbol: PCDHB7
  Gene Name: protocadherin beta 7
  Uniprot ID: Q9Y5E2
  ENSP ID: ENSP00000231137
MEARVERAVQKRQVLFLCVFLGMSWAGAEPLRYFVAEETERGTFLTNLAKDLGLGVGELRARGTRIVSDQNMQILLLSSLTGDLLLNEKLDREELCGPREPCVLPFQLLLEKPFQIFRAELWVRDINDHAPVFLDREISLKILESTTPGAAFLLESAQDSDVGTNSLSNYTISPNAYFHINVHDSGEGNIYPELVLNQVLDREEIPEFSLTLTALDGGSPPRSGTALVRILVLDVNDNAPDFVRSLYKVQVPENSPVGSMVVSVSARDLDTGSNGEIAYAFSYATERILKTFQINPTSGSLHLKAQLDYEAIQTYTLTIQAKDGGGLSGKCTVVVDVTDINDNRPELLLSSLTSPIAENSPETVVAVFRIRDRDSGNNGKTVCSIQDDVPFILKPSVENFYTLVTEKPLDRERNTEYNITITVTDLGTPRLKTEHNITVLVSDVNDNAPAFTQTSYTLFVRENNSPALPIGSVSATDRDSGTNAQVIYSLLPSQDPHLPLASLVSINADNGHLFALRSLDYEALQAFEFRVGATDRGSPALSSEALVRVLVLDANDNSPFVLYPLQNSSAPCTEPLPRAAEPGYLVTKVVAVDGDSGQNAWLSYQLLKATEPGLFGVWAHNGEVRTARLLSERDAAKQRLVVLVKDNGEPPRSATATLHVLLVDGFSQPYLRLPEAAPDQANSLTVYLVVALASVSSLFLLSVLLFVAVRLCRRSRAAPVGRCSVPEGPFPRHLVDLSGTGTLSQSYQYEVCLTGGSGTNEFKFLKPIIPNLLPQSTGREVEENRPFQNNLGF

SEQ ID NO: 69713 - protein, 801 aa, Homo sapiens
  Payload ID: 13840
  Gene Symbol: PCDHB8
  Gene Name: protocadherin beta 8
  Uniprot ID: Q9UN66
  ENSP ID: ENSP00000239444
MEASGKLICRQRQVLFSFLLLGLSLAGAAEPRSYSVVEETEGSSFVTNLAKDLGLEQREFSRRGVRVVSRGNKLHLQLNQETADLLLNEKLDREDLCGHTEPCVLRFQVLLESPFEFFQAELQVIDINDHSPVFLDKQMLVKVSESSPPGTAFPLKNAEDLDIGQNNIENYIISPNSYFRVLTRKRSDGRKYPELVLDKALDREEEAELRLTLTALDGGSPPRSGTAQVYIEVVDVNDNAPEFEQPFYRVQISEDSPISFLVVKVSATDVDTGVNGEISYSLFQASDEISKTFKVDFLTGEIRLKKQLDFEKFQSYEVNIEARDAGGFSGKCTVLIQVIDVNDHAPEVTMSAFTSPIPENAPETVVALFSVSDLDSGENGKISCSIQEDLPFLLKSSVGNFYTLLTETPLDRESRAEYNVTITVTDLGTPRLTTHLNMTVLVSDVNDNAPAFTQTSYTLFVRENNSPALHIGSVSATDRDSGTNAQVTYSLLPPQDPHLPLASLVSINTDNGHLFALRSLDYEALQAFEFRVGASDRGSPALSSEALVRVLVLDANDNSPFVLYPLQNGSAPCTELVPRAAEPGYLVTKVVAVDGDSGQNAWLSYQLLKATEPGLFGVWAHNGEVRTARLLSERDAAKQRLVVLVKDNGEPPCSATATLHVLLVDGFSQPYLPLPEAAPAQGQADSLTVYLVVALASVSSLFLFSVLLFVAVLLCRRSRAASVGRCSVPEGPFPGHLVDVRGTGSLSQNYQYEVCLAGGSGTNEFQLLKPVLPNIQGHSFGPEMEQNSNFRNGFGFSLQLK

SEQ ID NO: 69714 - protein, 797 aa, Homo sapiens
  Payload ID: 13841
  Gene Symbol: PCDHB9
  Gene Name: protocadherin beta 9
  Uniprot ID: Q9Y5E1
  ENSP ID: ENSP00000478606
MKTRGFSFPRQRQVLFLFLFWGVSLAGSGFGRYSVTEETEKGSFVVNLAKDLGLAEGELAARGTRVVSDDNKQYLLLDSHTGNLLTNEKLDREKLCGPKEPCMLYFQILMDDPFQIYRAELRVRDINDHSPVFRHKEMVLKISENTAEGTAFRLERAQDPDEGHNSIQNYTISSNSFFHIKISGSDEGMIYPELVLDKALDREEQEELSLTLTALDGGSPSRSGTSTIRIVVLDVNDNVPQFAQALYETQAPENSPVGSLIVKVSAGDADSGVNAEVSYSFFDASEDILTTFQINPFSGEIFLRELLDYELVNSYKINIQAMDGGGLSARCTVLIKVLDSNDNPPELIISSLSNSVAENSPGIVLAVFKIKDRDSGENGKTICYVQDNLPFFLKPSVDNFYILMTEGALDRESKAEYNITITVTDLGTPRLKTEHSITLQVSDVNDNAPAFTQTSYTLFVRENNSPALHIGSVSATDRDSGTNAQVTYSLLPPQDPHLPLASLVSINADNGHLFALRSLDYEALQAFDFRVGASDRGSPALSSEALVRVLVLDANDNSPFVLYPLQNGSAPCTELVPRAAEPGYLVTKVVAVDGDSGQNAWLSYQLLKATEPGLFGVWAHNGEVRTARLLSERDAAKHRLVVLVKDNGEPPRSATATLHVLLVDGFSQPYLPLPEAAPAQAQADLLTVYLVVALASVSSLFLLSVLLFVAVRLCRRSRAASVGRCSVPEGPFPGHLVDVSGTGTLFQSYQYEVCLTGGSETGEFKFLKPITPHLPPHRGGKEIEENSTLPNSFGFNY

SEQ ID NO: 69715 - protein, 73 aa, Homo sapiens
  Payload ID: 13841
  Gene Symbol: PCDHB9
  Gene Name: protocadherin beta 9
  ENSP ID: ENSP00000485394
MTEGALDRESKAEYNITITVTDLGTPRLKTEHSITLQVSDVNDNAPAFTQTSYTLFVRENNSPALHIGSVSAT

SEQ ID NO: 69716 - protein, 823 aa, Homo sapiens
  Payload ID: 13842
  Gene Symbol: PCDHGA1
  Gene Name: protocadherin gamma subfamily A, 1
  Uniprot ID: Q9Y5H4
  ENSP ID: ENSP00000367345
MKIQKKLTGCSRLMLLCLSLELLLEAGAGNIHYSVPEETDKGSFVGNIAKDLGLQPQELADGGVRIVSRGRMPLFALNPRSGSLITARRIDREELCAQSMPCLVSFNILVEDKMKLFPVEVEIIDINDNTPQFQLEELEFKMNEITTPGTRVSLPFGQDLDVGMNSLQSYQLSSNPHFSLDVQQGADGPQHPEMVLQSPLDREEEAVHHLILTASDGGEPVRSGTLRIYIQVVDANDNPPAFTQAQYHINVPENVPLGTQLLMVNATDPDEGANGEVTYSFHNVDHRVAQIFRLDSYTGEISNKEPLDFEEYKMYSMEVQAQDGAGLMAKVKVLIKVLDVNDNAPEVTITSVTTAVPENFPPGTIIALISVHDQDSGDNGYTTCFIPGNLPFKLEKLVDNYYRLVTERTLDRELISGYNITITAIDQGTPALSTETHISLLVTDINDNSPVFHQDSYSAYIPENNPRGASIFSVRAHDLDSNENAQITYSLIEDTIQGAPLSAYLSINSDTGVLYALRSFDYEQFRDMQLKVMARDSGDPPLSSNVSLSLFLLDQNDNAPEILYPALPTDGSTGVELAPLSAEPGYLVTKVVAVDRDSGQNAWLSYRLLKASEPGLFSVGLHTGEVRTARALLDRDALKQSLVVAVQDHGQPPLSATVTLTVAVADRISDILADLGSLEPSAKPNDSDLTLYLVVAAAAVSCVFLAFVIVLLAHRLRRWHKSRLLQASGGGLASMPGSHFVGVDGVRAFLQTYSHEVSLTADSRKSHLIFPQPNYADTLISQESCEKKGFLSAPQSLLEDKKEPFSQVNFCDECISYLEKNNS

SEQ ID NO: 69717 - protein, 931 aa, Homo sapiens
  Payload ID: 13842
  Gene Symbol: PCDHGA1
  Gene Name: protocadherin gamma subfamily A, 1
  Uniprot ID: Q9Y5H4
  ENSP ID: ENSP00000431083
MKIQKKLTGCSRLMLLCLSLELLLEAGAGNIHYSVPEETDKGSFVGNIAKDLGLQPQELADGGVRIVSRGRMPLFALNPRSGSLITARRIDREELCAQSMPCLVSFNILVEDKMKLFPVEVEIIDINDNTPQFQLEELEFKMNEITTPGTRVSLPFGQDLDVGMNSLQSYQLSSNPHFSLDVQQGADGPQHPEMVLQSPLDREEEAVHHLILTASDGGEPVRSGTLRIYIQVVDANDNPPAFTQAQYHINVPENVPLGTQLLMVNATDPDEGANGEVTYSFHNVDHRVAQIFRLDSYTGEISNKEPLDFEEYKMYSMEVQAQDGAGLMAKVKVLIKVLDVNDNAPEVTITSVTTAVPENFPPGTIIALISVHDQDSGDNGYTTCFIPGNLPFKLEKLVDNYYRLVTERTLDRELISGYNITITAIDQGTPALSTETHISLLVTDINDNSPVFHQDSYSAYIPENNPRGASIFSVRAHDLDSNENAQITYSLIEDTIQGAPLSAYLSINSDTGVLYALRSFDYEQFRDMQLKVMARDSGDPPLSSNVSLSLFLLDQNDNAPEILYPALPTDGSTGVELAPLSAEPGYLVTKVVAVDRDSGQNAWLSYRLLKASEPGLFSVGLHTGEVRTARALLDRDALKQSLVVAVQDHGQPPLSATVTLTVAVADRISDILADLGSLEPSAKPNDSDLTLYLVVAAAAVSCVFLAFVIVLLAHRLRRWHKSRLLQASGGGLASMPGSHFVGVDGVRAFLQTYSHEVSLTADSRKSHLIFPQPNYADTLISQESCEKKGFLSAPQSLLEDKKEPFSQQAPPNTDWRFSQAQRPGTSGSQNGDDTGTWPNNQFDTEMLQAMILASASEAADGSSTLGGGAGTMGLSARYGPQFTLQHVPDYRQNVYIPGSNATLTNAAGKRDGKAPAGGNGNKKKSGKKEKK

SEQ ID NO: 69718 - protein, 936 aa, Homo sapiens
  Payload ID: 13843
  Gene Symbol: PCDHGA10
  Gene Name: protocadherin gamma subfamily A, 10
  Uniprot ID: Q9Y5H3
  ENSP ID: ENSP00000381611
MAAQRNRSKESKDCSGLVLLCLFFGIPWEAGARQISYSIPEELEKGSFVGNISKDLGLAPRELAERGVRIVSRGRTQLFSLNPRSGSLITAGRIDREELCAQSARCVVSFNILVEDRVKLFGIEIEVTDINDNAPKFQAENLDVKINENVAAGMRFPLPEAIDPDVGVNSLQSYQLSPNKHFSLRVQSRANGVKYPELVLEHSLDREEEAIHHLVLTASDGGDPLRSGTVLVSVTVFDANDNAPVFTLPEYRVSVPENLPVGTQLLTVTATDRDEGANGEVTYSFRKLPDTQLLKFQLNKYTGEIKISENLDYEETGFYEIEIQAEDGGAYLATAKVLITVEDVNDNSPELTITSLFSPVTEDSPLGTVVALLNVHDLDSEQNGQVTCSILAYLPFKLEKSIDSYYRLVIHRALDREQVSSYNITVTATDGGSPPLSTEAHFMLQVADINDNPPTFSQVSYFTYIPENNARGASIFSVTALDPDSKENAQIIYSLAEDTIQGVPLSSYISINSDTGVLYALRSFDYEQFHELQMQVTASDSGDPPLSSNVSLSLFVLDQNDNAPEILYPALPTDGSTGVELAPRSAEPGYLVTKVVAVDRDSGQNAWLSYRLLKASEPGLFAVGEHTGEVRTARALLDRDALKQSLVVAVQDHGQPPLSATVTLTVAVADSIPQVLADLGSFESPANSETSDLTLYLVVAVAAVSCVFLAFVIVLLAHRLRRWHKSRLLQASGGGLTGVSGSHFVGVDGVRAFLQTYSHEVSLTADSRKSHLIFPQPNYADTLISQESCEKNDPLSLLDDSKFPIEDTPLVPQAPPNTDWRFSQAQRPGTSGSQNGDDTGTWPNNQFDTEMLQAMILASASEAADGSSTLGGGAGTMGLSARYGPQFTLQHVPDYRQNVYIPGSNATLTNAAGKRDGKAPAGGNGNKKKSGKKEKK

SEQ ID NO: 69719 - protein, 850 aa, Homo sapiens
  Payload ID: 13843
  Gene Symbol: PCDHGA10
  Gene Name: protocadherin gamma subfamily A, 10
  Uniprot ID: Q9Y5H3
  ENSP ID: ENSP00000481157
MAAQRNRSKESKDCSGLVLLCLFFGIPWEAGARQISYSIPEELEKGSFVGNISKDLGLAPRELAERGVRIVSRGRTQLFSLNPRSGSLITAGRIDREELCAQSARCVVSFNILVEDRVKLFGIEIEVTDINDNAPKFQAENLDVKINENVAAGMRFPLPEAIDPDVGVNSLQSYQLSPNKHFSLRVQSRANGVKYPELVLEHSLDREEEAIHHLVLTASDGGDPLRSGTVLVSVTVFDANDNAPVFTLPEYRVSVPENLPVGTQLLTVTATDRDEGANGEVTYSFRKLPDTQLLKFQLNKYTGEIKISENLDYEETGFYEIEIQAEDGGAYLATAKVLITVEDVNDNSPELTITSLFSPVTEDSPLGTVVALLNVHDLDSEQNGQVTCSILAYLPFKLEKSIDSYYRLVIHRALDREQVSSYNITVTATDGGSPPLSTEAHFMLQVADINDNPPTFSQVSYFTYIPENNARGASIFSVTALDPDSKENAQIIYSLAEDTIQGVPLSSYISINSDTGVLYALRSFDYEQFHELQMQVTASDSGDPPLSSNVSLSLFVLDQNDNAPEILYPALPTDGSTGVELAPRSAEPGYLVTKVVAVDRDSGQNAWLSYRLLKASEPGLFAVGEHTGEVRTARALLDRDALKQSLVVAVQDHGQPPLSATVTLTVAVADSIPQVLADLGSFESPANSETSDLTLYLVVAVAAVSCVFLAFVIVLLAHRLRRWHKSRLLQASGGGLTGVSGSHFVGVDGVRAFLQTYSHEVSLTADSRKSHLIFPQPNYADTLISQESCEKNDPLSLLDDSKFPIEDTPLVPVSFIFIFTFVKKKKIGFYFEVCGMMVESVNAKTLMSRI

SEQ ID NO: 69720 - protein, 935 aa, Homo sapiens
  Payload ID: 13844
  Gene Symbol: PCDHGA11
  Gene Name: protocadherin gamma subfamily A, 11
  Uniprot ID: Q9Y5H2
  ENSP ID: ENSP00000381589
MANRLQRGDRSRLLLLLCIFLGTLRGFRARQIRYSVPEETEKGSFVGNISKDLGLEPRELAKRGVRIVSRGKTQLFAVNPRSGSLITAGRIDREELCETVSSCFLNMELLVEDTLKIYGVEVEIIDINDNAPSFQEDEVEIKVSEHAIPGARFALPNARDPDVGVNSLQSYQLSPNNYFSLQLRGRTDGAKNPELVLEGSLDREKEAAHLLLLTALDGGDPIRKGAVPIRVVVLDVNDHIPMFTQSVYRVSVPENISSGTRVLMVNATDPDEGINGEVMYSFRNMESKASEIFQLDSQTGEVQVRGSLDFEKYRFYEMEIQGQDGGGLFTTTTMLITVVDVNDNAPEITITSSINSILENSPPGTVIALLNVQDQDSGENGQVSCFIPNHLPFKLEKTYGNYYKLITSRVLDRELVQSYNITLTATDQGSPPLSAETHVWLNVADDNDNPPVFPHSSYSAYIPENNPRGASIFSVTALDPDSKQNALVTYSLTDDTVQGVPLSSYVSINSNTGVLYALQSFDYEQFRDLELRVIARDSGDPPLSSNVSLSLFVLDQNDNAPEILYPALPTDGSTGVELAPRSAEPGYLVTKVVAVDKDSGQNAWLSYRLLKASEPGLFAVGEHTGEVRTARALLDRDALKQSLVVAVQDHGQPPLSATVTLTVAVADSIPEVLADLGSLESLANSETSDLSLYLVVAVAAVSCIFLVFVIVLLALRLWRWHKSRLLQASEGGLAGMPTSHFVGVDGVQAFLQTYSHEVSLIADSQKSHLIFPQPNYGDTLISQESCEKSEPLLIAEDSAIILGKCDPTSNQQAPPNTDWRFSQAQRPGTSGSQNGDDTGTWPNNQFDTEMLQAMILASASEAADGSSTLGGGAGTMGLSARYGPQFTLQHVPDYRQNVYIPGSNATLTNAAGKRDGKAPAGGNGNKKKSGKKEKK

SEQ ID NO: 69721 - protein, 750 aa, Homo sapiens
  Payload ID: 13844
  Gene Symbol: PCDHGA11
  Gene Name: protocadherin gamma subfamily A, 11
  Uniprot ID: Q9Y5H2
  ENSP ID: ENSP00000428333
MANRLQRGDRSRLLLLLCIFLGTLRGFRARQIRYSVPEETEKGSFVGNISKDLGLEPRELAKRGVRIVSRGKTQLFAVNPRSGSLITAGRIDREELCETVSSCFLNMELLVEDTLKIYGVEVEIIDINDNAPSFQEDEVEIKVSEHAIPGARFALPNARDPDVGVNSLQSYQLSPNNYFSLQLRGRTDGAKNPELVLEGSLDREKEAAHLLLLTALDGGDPIRKGAVPIRVVVLDVNDHIPMFTQSVYRVSVPENISSGTRVLMVNATDPDEGINGEVMYSFRNMESKASEIFQLDSQTGEVQVRGSLDFEKYRFYEMEIQGQDGGGLFTTTTMLITVVDVNDNAPEITITSSINSILENSPPGTVIALLNVQDQDSGENGQVSCFIPNHLPFKLEKTYGNYYKLITSRVLDRELVQSYNITLTATDQGSPPLSAETHVWLNVADDNDNPPVFPHSSYSAYIPENNPRGASIFSVTALDPDSKQNALVTYSLTDDTVQGVPLSSYVSINSNTGVLYALQSFDYEQFRDLELRVIARDSGDPPLSSNVSLSLFVLDQNDNAPEILYPALPTDGSTGVELAPRSAEPGYLVTKVVAVDKDSGQNAWLSYRLLKASEPGLFAVGEHTGEQAPPNTDWRFSQAQRPGTSGSQNGDDTGTWPNNQFDTEMLQAMILASASEAADGSSTLGGGAGTMGLSARYGPQFTLQHVPDYRQNVYIPGSNATLTNAAGKRDGKAPAGGNGNKKKSGKKEKK

SEQ ID NO: 69722 - protein, 837 aa, Homo sapiens
  Payload ID: 13844
  Gene Symbol: PCDHGA11
  Gene Name: protocadherin gamma subfamily A, 11
  Uniprot ID: Q9Y5H2
  ENSP ID: ENSP00000480917
MANRLQRGDRSRLLLLLCIFLGTLRGFRARQIRYSVPEETEKGSFVGNISKDLGLEPRELAKRGVRIVSRGKTQLFAVNPRSGSLITAGRIDREELCETVSSCFLNMELLVEDTLKIYGVEVEIIDINDNAPSFQEDEVEIKVSEHAIPGARFALPNARDPDVGVNSLQSYQLSPNNYFSLQLRGRTDGAKNPELVLEGSLDREKEAAHLLLLTALDGGDPIRKGAVPIRVVVLDVNDHIPMFTQSVYRVSVPENISSGTRVLMVNATDPDEGINGEVMYSFRNMESKASEIFQLDSQTGEVQVRGSLDFEKYRFYEMEIQGQDGGGLFTTTTMLITVVDVNDNAPEITITSSINSILENSPPGTVIALLNVQDQDSGENGQVSCFIPNHLPFKLEKTYGNYYKLITSRVLDRELVQSYNITLTATDQGSPPLSAETHVWLNVADDNDNPPVFPHSSYSAYIPENNPRGASIFSVTALDPDSKQNALVTYSLTDDTVQGVPLSSYVSINSNTGVLYALQSFDYEQFRDLELRVIARDSGDPPLSSNVSLSLFVLDQNDNAPEILYPALPTDGSTGVELAPRSAEPGYLVTKVVAVDKDSGQNAWLSYRLLKASEPGLFAVGEHTGEVRTARALLDRDALKQSLVVAVQDHGQPPLSATVTLTVAVADSIPEVLADLGSLESLANSETSDLSLYLVVAVAAVSCIFLVFVIVLLALRLWRWHKSRLLQASEGGLAGMPTSHFVGVDGVQAFLQTYSHEVSLIADSQKSHLIFPQPNYGDTLISQESCEKSEPLLIAEDSAIILGKCDPTSNQVRFISLPPNCWCLGTSLLRRCFLSLL

SEQ ID NO: 69723 - protein, 932 aa, Homo sapiens
  Payload ID: 13845
  Gene Symbol: PCDHGA12
  Gene Name: protocadherin gamma subfamily A, 12
  Uniprot ID: O60330
  ENSP ID: ENSP00000252085
MIPARLHRDYKGLVLLGILLGTLWETGCTQIRYSVPEELEKGSRVGDISRDLGLEPRELAERGVRIIPRGRTQLFALNPRSGSLVTAGRIDREELCMGAIKCQLNLDILMEDKVKIYGVEVEVRDINDNAPYFRESELEIKISENAATEMRFPLPHAWDPDIGKNSLQSYELSPNTHFSLIVQNGADGSKYPELVLKRALDREEKAAHHLVLTASDGGDPVRTGTARIRVMVLDANDNAPAFAQPEYRASVPENLALGTQLLVVNATDPDEGVNAEVRYSFRYVDDKAAQVFKLDCNSGTISTIGELDHEESGFYQMEVQAMDNAGYSARAKVLITVLDVNDNAPEVVLTSLASSVPENSPRGTLIALLNVNDQDSEENGQVICFIQGNLPFKLEKSYGNYYSLVTDIVLDREQVPSYNITVTATDRGTPPLSTETHISLNVADTNDNPPVFPQASYSAYIPENNPRGVSLVSVTAHDPDCEENAQITYSLAENTIQGASLSSYVSINSDTGVLYALSSFDYEQFRDLQVKVMARDNGHPPLSSNVSLSLFVLDQNDNAPEILYPALPTDGSTGVELAPRSAEPGYLVTKVVAVDRDSGQNAWLSYRLLKASEPGLFSVGLHTGEVRTARALLDRDALKQSLVVAVQDHGQPPLSATVTLTVAVADSIPQVLADLGSLESPANSETSDLTLYLVVAVAAVSCVFLAFVILLLALRLRRWHKSRLLQASGGGLTGAPASHFVGVDGVQAFLQTYSHEVSLTTDSRKSHLIFPQPNYADMLVSQESFEKSEPLLLSGDSVFSKDSHGLIEQAPPNTDWRFSQAQRPGTSGSQNGDDTGTWPNNQFDTEMLQAMILASASEAADGSSTLGGGAGTMGLSARYGPQFTLQHVPDYRQNVYIPGSNATLTNAAGKRDGKAPAGGNGNKKKSGKKEKK

SEQ ID NO: 69724 - protein, 820 aa, Homo sapiens
  Payload ID: 13845
  Gene Symbol: PCDHGA12
  Gene Name: protocadherin gamma subfamily A, 12
  Uniprot ID: O60330
  ENSP ID: ENSP00000481438
MIPARLHRDYKGLVLLGILLGTLWETGCTQIRYSVPEELEKGSRVGDISRDLGLEPRELAERGVRIIPRGRTQLFALNPRSGSLVTAGRIDREELCMGAIKCQLNLDILMEDKVKIYGVEVEVRDINDNAPYFRESELEIKISENAATEMRFPLPHAWDPDIGKNSLQSYELSPNTHFSLIVQNGADGSKYPELVLKRALDREEKAAHHLVLTASDGGDPVRTGTARIRVMVLDANDNAPAFAQPEYRASVPENLALGTQLLVVNATDPDEGVNAEVRYSFRYVDDKAAQVFKLDCNSGTISTIGELDHEESGFYQMEVQAMDNAGYSARAKVLITVLDVNDNAPEVVLTSLASSVPENSPRGTLIALLNVNDQDSEENGQVICFIQGNLPFKLEKSYGNYYSLVTDIVLDREQVPSYNITVTATDRGTPPLSTETHISLNVADTNDNPPVFPQASYSAYIPENNPRGVSLVSVTAHDPDCEENAQITYSLAENTIQGASLSSYVSINSDTGVLYALSSFDYEQFRDLQVKVMARDNGHPPLSSNVSLSLFVLDQNDNAPEILYPALPTDGSTGVELAPRSAEPGYLVTKVVAVDRDSGQNAWLSYRLLKASEPGLFSVGLHTGEVRTARALLDRDALKQSLVVAVQDHGQPPLSATVTLTVAVADSIPQVLADLGSLESPANSETSDLTLYLVVAVAAVSCVFLAFVILLLALRLRRWHKSRLLQASGGGLTGAPASHFVGVDGVQAFLQTYSHEVSLTTDSRKSHLIFPQPNYADMLVSQESFEKSEPLLLSGDSVFSKDSHGLIEVSLYQIFFLFFF

SEQ ID NO: 69725 - protein, 932 aa, Homo sapiens
  Payload ID: 13846
  Gene Symbol: PCDHGA2
  Gene Name: protocadherin gamma subfamily A, 2
  Uniprot ID: Q9Y5H1
  ENSP ID: ENSP00000378077
MAALQKLPHCRKLVLLCFLLATLWEARAGQIRYSVREEIDRGSFVGNIAKDLGLEPLALAEQGVRIVSRGRSQLFALNPRSGSLVTANRIDREELCAQSAPCLLNFNILLEDKLTIYSVEVEITDINDNAPRFGVEELELKISETTTPGFRIPLKNAHDADVGENALQKYALNPNDHFSLDVRRGADGNKYPELVLERSLDREEEAVHHLVLVASDGGDPVLSGTSRICVKVLDANDNAPVFTQPEYRISIPENTLVGTRILTVTATDADEGYYAQVVYFLEKSPGETSEVFELKSTSGELTIIKDLDYEDATFHEIDIEAQDGPGLLTRAKVIVTVLDVNDNAPEFYMTSATSSVSEDSLPGTIIGLFNVHDRDSGQNAFTTCSLPEDLPFKLEKSVDNYYRLVTTRALDREQFSFYNITLTAKDGGNPSLSTDAHILLQVADINDNAPAFSRTSYSTYIPENNPRGASVFSVTAHDPDSNDNAHVTYSFAEDTVQGAPLSSYISINSDTGVLYALRSFDYEQLRDLQVWVIARDSGNPPLSSNVSLSLFVLDQNDNAPEILYPAFPTDGSTGVELAPRSAEPGYLVTKVVAVDRDSGQNAWLSYHLLKASEPGLFSVGLHTGEVRTARALLDRDALKQSLVVAIQDHGQPPLSATVTLTVAVADRIPDILADLGSLEPSAIPNDSDLTLYLVVAVAAVSCVFLAFVIVLLAHRLRRWHKSRLLQASGGSLTGMQSSHFVGVDGVRAFLQTYSHEVSLTADSRKSHLIFPQPNYADTLISQESCEKKDFLSAPQSLLEEEREETFSQQAPPNTDWRFSQAQRPGTSGSQNGDDTGTWPNNQFDTEMLQAMILASASEAADGSSTLGGGAGTMGLSARYGPQFTLQHVPDYRQNVYIPGSNATLTNAAGKRDGKAPAGGNGNKKKSGKKEKK

SEQ ID NO: 69726 - protein, 823 aa, Homo sapiens
  Payload ID: 13846
  Gene Symbol: PCDHGA2
  Gene Name: protocadherin gamma subfamily A, 2
  Uniprot ID: Q9Y5H1
  ENSP ID: ENSP00000483020
MAALQKLPHCRKLVLLCFLLATLWEARAGQIRYSVREEIDRGSFVGNIAKDLGLEPLALAEQGVRIVSRGRSQLFALNPRSGSLVTANRIDREELCAQSAPCLLNFNILLEDKLTIYSVEVEITDINDNAPRFGVEELELKISETTTPGFRIPLKNAHDADVGENALQKYALNPNDHFSLDVRRGADGNKYPELVLERSLDREEEAVHHLVLVASDGGDPVLSGTSRICVKVLDANDNAPVFTQPEYRISIPENTLVGTRILTVTATDADEGYYAQVVYFLEKSPGETSEVFELKSTSGELTIIKDLDYEDATFHEIDIEAQDGPGLLTRAKVIVTVLDVNDNAPEFYMTSATSSVSEDSLPGTIIGLFNVHDRDSGQNAFTTCSLPEDLPFKLEKSVDNYYRLVTTRALDREQFSFYNITLTAKDGGNPSLSTDAHILLQVADINDNAPAFSRTSYSTYIPENNPRGASVFSVTAHDPDSNDNAHVTYSFAEDTVQGAPLSSYISINSDTGVLYALRSFDYEQLRDLQVWVIARDSGNPPLSSNVSLSLFVLDQNDNAPEILYPAFPTDGSTGVELAPRSAEPGYLVTKVVAVDRDSGQNAWLSYHLLKASEPGLFSVGLHTGEVRTARALLDRDALKQSLVVAIQDHGQPPLSATVTLTVAVADRIPDILADLGSLEPSAIPNDSDLTLYLVVAVAAVSCVFLAFVIVLLAHRLRRWHKSRLLQASGGSLTGMQSSHFVGVDGVRAFLQTYSHEVSLTADSRKSHLIFPQPNYADTLISQESCEKKDFLSAPQSLLEEEREETFSQVIYLFTTYVLASLLK

SEQ ID NO: 69727 - protein, 932 aa, Homo sapiens
  Payload ID: 13847
  Gene Symbol: PCDHGA3
  Gene Name: protocadherin gamma subfamily A, 3
  Uniprot ID: Q9Y5H0
  ENSP ID: ENSP00000253812
MTNCLSFRNGRGLALLCALLGTLCETGSGQIRYSVSEELDKGSFVGNIANDLGLEPRELAERGVRIVSRGRTQLFSLNPQSGSLVTAERIDREELCAQIPLCLVKINILVEDKLKIFEVEIEIKDINDNAPNFPTEELEIKIGELTVPGTRFPIKTAFDPDVGINSLQNYKLSPNDYFSLAVNSVSEGAKYPELVLERALDREKKEIHQLVLVASDGGDPVHSGNLHIQVIVLDANDNPPMFTQPEYRVSVWENVPVGTRLLTVNATDPDEGFNAQVSYILDKMPGKIAEIFHLNSVSGEVSILKSLDYEDAMFYEIKIEAQDGPGLLSRAKILVTVLDVNDNAPEITITSLTSSVPEEGTVGREIALIDVHDRDSGQNGQVEVFVLGNLPFKLEKSIDQYYRLVTATSLDREQISEYNISLRASDGGSPPLSTETHITLHVIDINDNPPTFPHLSYSAYIPENNPRGASIFSVTAQDPDSNNNARITYALTEDTLQGAPLSSFVSINSNTGVLYALRSFDYEQFRDLKLLVTASDSGNPPLSSNVSLNLFVLDQNDNAPEILYPALPTDGSTGVELAPRSAEPGYLVTKVVAVDRDSGQNAWLSYRLLKASEPGLFSVGLHTGEVRTARALLDRDALKQSLVVAVQDHGQPPLSATVTLTVAVADRIPDILADLGSLEPSAKPNDSDLTLYLVVAVAAVSCVFLAFVIVLLALRLRRWHKSRLLQASGGGLASTPGSHFVGADGVRAFLQTYSHEVSLTADSRKSHLIFPQPNYADTLISQESCEKSEPLLITQDLLEMKGDSNLLQQAPPNTDWRFSQAQRPGTSGSQNGDDTGTWPNNQFDTEMLQAMILASASEAADGSSTLGGGAGTMGLSARYGPQFTLQHVPDYRQNVYIPGSNATLTNAAGKRDGKAPAGGNGNKKKSGKKEKK

SEQ ID NO: 69728 - protein, 829 aa, Homo sapiens
  Payload ID: 13847
  Gene Symbol: PCDHGA3
  Gene Name: protocadherin gamma subfamily A, 3
  Uniprot ID: Q9Y5H0
  ENSP ID: ENSP00000479265
MTNCLSFRNGRGLALLCALLGTLCETGSGQIRYSVSEELDKGSFVGNIANDLGLEPRELAERGVRIVSRGRTQLFSLNPQSGSLVTAERIDREELCAQIPLCLVKINILVEDKLKIFEVEIEIKDINDNAPNFPTEELEIKIGELTVPGTRFPIKTAFDPDVGINSLQNYKLSPNDYFSLAVNSVSEGAKYPELVLERALDREKKEIHQLVLVASDGGDPVHSGNLHIQVIVLDANDNPPMFTQPEYRVSVWENVPVGTRLLTVNATDPDEGFNAQVSYILDKMPGKIAEIFHLNSVSGEVSILKSLDYEDAMFYEIKIEAQDGPGLLSRAKILVTVLDVNDNAPEITITSLTSSVPEEGTVGREIALIDVHDRDSGQNGQVEVFVLGNLPFKLEKSIDQYYRLVTATSLDREQISEYNISLRASDGGSPPLSTETHITLHVIDINDNPPTFPHLSYSAYIPENNPRGASIFSVTAQDPDSNNNARITYALTEDTLQGAPLSSFVSINSNTGVLYALRSFDYEQFRDLKLLVTASDSGNPPLSSNVSLNLFVLDQNDNAPEILYPALPTDGSTGVELAPRSAEPGYLVTKVVAVDRDSGQNAWLSYRLLKASEPGLFSVGLHTGEVRTARALLDRDALKQSLVVAVQDHGQPPLSATVTLTVAVADRIPDILADLGSLEPSAKPNDSDLTLYLVVAVAAVSCVFLAFVIVLLALRLRRWHKSRLLQASGGGLASTPGSHFVGADGVRAFLQTYSHEVSLTADSRKSHLIFPQPNYADTLISQESCEKSEPLLITQDLLEMKGDSNLLQVSLFISLIIKNKYENVVIIKL

SEQ ID NO: 69729 - protein, 107 aa, Homo sapiens
  Payload ID: 13847
  Gene Symbol: PCDHGA3
  Gene Name: protocadherin gamma subfamily A, 3
  ENSP ID: ENSP00000481801
MTNCLSFRNGRGLALLCALLGTLCETGSGQIRYSVSEELDKGSFVGNIANDLGLEPRELAERGVRIVSRGRTQLFSLNPQSGSLVTAERIDREELCAQIPLCLRNWK

SEQ ID NO: 69730 - protein, 962 aa, Homo sapiens
  Payload ID: 13848
  Gene Symbol: PCDHGA4
  Gene Name: protocadherin gamma subfamily A, 4
  ENSP ID: ENSP00000458570
MHFILDPEDPGAPQASTEGKPKHRRLRGGVVMAAPPARPDHTRLLQICLLLGVLVEIRAEQILYSVFEEQEEGSVVGNIAKDLGLAPRELAERGVRIVSRGRTQLFALNPRSGTLVTAGRIDREELCDRSPNCVTNLEILLEDTVKILRVEVEIIDVNDNPPSFGTEQREIKVAENENPGARFPLPEAFDPDVGVNSLQGYQLNSNGYFSLDVQSGADGIKYPELVLERALDREEEAVHHLVLTAFDGGDPVRSGTARILIILVDTNDNAPVFTQPEYHVSVRENVPVGTRLLTVKATDPDEGANGDVTYSFRKVRDKISQLFQLNSLSGDITILGGLDYEDSGFYDIDVEAHDGPGLRARSKVLVTVLDENDNAPEVTVTSLTSSVQESSSPGTVIALFNVHDSDSGGNGLVTCSIPDNLPFTLEKTYGNYYRLLTHRTLDREEVSEYNITVTATDQGTPPLSTETHISLQVMDINDNPPTFPHASYSAYIPENNPRGASILSMTAQDPDSGDNARITYSLAEDTFQGAPLSSYVSINSNTGILYALCSFDYEQFRDLQLLMTASDSGDPPLSSNVSLSLFVLDQNDNVPEILYPTFPTDGSTGVELAPRSADSGYLVTKVVAVDRDSGQNAWLSYSLLKSSEPGLFAVGLHTGEVRTARALLDRDALKQRLVVVVQDHGQPPLSATVTLTVAVADSIPDVLADLGSLKPSADPDDSGLTLYLVVAVAAVSCVFLAFVTVLLALKLRRWHKSRLLHAEGSRLAGVPASHFVGVDGVRAFLQTYSHEVSLTADSRKSHLIFSQPSYADTLISRESCEKSEPLLITQDLLETKGDPNLQQAPPNTDWRFSQAQRPGTSGSQNGDDTGTWPNNQFDTEMLQAMILASASEAADGSSTLGGGAGTMGLSARYGPQFTLQHVPDYRQNVYIPGSNATLTNAAGKRDGKAPAGGNGNKKKSGKKEKK

SEQ ID NO: 69731 - protein, 851 aa, Homo sapiens
  Payload ID: 13848
  Gene Symbol: PCDHGA4
  Gene Name: protocadherin gamma subfamily A, 4
  ENSP ID: ENSP00000477894
MHFILDPEDPGAPQASTEGKPKHRRLRGGVVMAAPPARPDHTRLLQICLLLGVLVEIRAEQILYSVFEEQEEGSVVGNIAKDLGLAPRELAERGVRIVSRGRTQLFALNPRSGTLVTAGRIDREELCDRSPNCVTNLEILLEDTVKILRVEVEIIDVNDNPPSFGTEQREIKVAENENPGARFPLPEAFDPDVGVNSLQGYQLNSNGYFSLDVQSGADGIKYPELVLERALDREEEAVHHLVLTAFDGGDPVRSGTARILIILVDTNDNAPVFTQPEYHVSVRENVPVGTRLLTVKATDPDEGANGDVTYSFRKVRDKISQLFQLNSLSGDITILGGLDYEDSGFYDIDVEAHDGPGLRARSKVLVTVLDENDNAPEVTVTSLTSSVQESSSPGTVIALFNVHDSDSGGNGLVTCSIPDNLPFTLEKTYGNYYRLLTHRTLDREEVSEYNITVTATDQGTPPLSTETHISLQVMDINDNPPTFPHASYSAYIPENNPRGASILSMTAQDPDSGDNARITYSLAEDTFQGAPLSSYVSINSNTGILYALCSFDYEQFRDLQLLMTASDSGDPPLSSNVSLSLFVLDQNDNVPEILYPTFPTDGSTGVELAPRSADSGYLVTKVVAVDRDSGQNAWLSYSLLKSSEPGLFAVGLHTGEVRTARALLDRDALKQRLVVVVQDHGQPPLSATVTLTVAVADSIPDVLADLGSLKPSADPDDSGLTLYLVVAVAAVSCVFLAFVTVLLALKLRRWHKSRLLHAEGSRLAGVPASHFVGVDGVRAFLQTYSHEVSLTADSRKSHLIFSQPSYADTLISRESCEKSEPLLITQDLLETKGDPNLQVSQSYNRSYHTEI

SEQ ID NO: 69732 - protein, 931 aa, Homo sapiens
  Payload ID: 13849
  Gene Symbol: PCDHGA5
  Gene Name: protocadherin gamma subfamily A, 5
  Uniprot ID: Q9Y5G8
  ENSP ID: ENSP00000429834
MASPPRGWGCGELLLPFMLLGTLCEPGSGQIRYSMPEELDKGSFVGNIAKDLGLEPQELAERGVRIVSRGRTQLFALNPRSGSLVTAGRIDREELCAQSPLCVVNFNILVENKMKIYGVEVEIIDINDNFPRFRDEELKVKVNENAAAGTRLVLPFARDADVGVNSLRSYQLSSNLHFSLDVVSGTDGQKYPELVLEQPLDREKETVHDLLLTALDGGDPVLSGTTHIRVTVLDANDNAPLFTPSEYSVSVPENIPVGTRLLMLTATDPDEGINGKLTYSFRNEEEKISETFQLDSNLGEISTLQSLDYEESRFYLMEVVAQDGGALVASAKVVVTVQDVNDNAPEVILTSLTSSISEDCLPGTVIALFSVHDGDSGENGEIACSIPRNLPFKLEKSVDNYYHLLTTRDLDREETSDYNITLTVMDHGTPPLSTESHIPLKVADVNDNPPNFPQASYSTSVTENNPRGVSIFSVTAHDPDSGDNARVTYSLAEDTFQGAPLSSYVSINSDTGVLYALRSFDYEQLRDLQLWVTASDSGNPPLSSNVSLSLFVLDQNDNTPEILYPALPTDGSTGVELAPRSAEPGYLVTKVVAVDKDSGQNAWLSYRLLKASEPGLFAVGLHTGEVRTARALLDRDALKQSLVVAVEDHGQPPLSATFTVTVAVADRIPDILADLGSIKTPIDPEDLDLTLYLVVAVAAVSCVFLAFVIVLLVLRLRRWHKSRLLQAEGSRLAGVPASHFVGVDGVRAFLQTYSHEVSLTADSRKSHLIFPQPNYADTLLSEESCEKSEPLLMSDKVDANKEERRVQQAPPNTDWRFSQAQRPGTSGSQNGDDTGTWPNNQFDTEMLQAMILASASEAADGSSTLGGGAGTMGLSARYGPQFTLQHVPDYRQNVYIPGSNATLTNAAGKRDGKAPAGGNGNKKKSGKKEKK

SEQ ID NO: 69733 - protein, 813 aa, Homo sapiens
  Payload ID: 13849
  Gene Symbol: PCDHGA5
  Gene Name: protocadherin gamma subfamily A, 5
  Uniprot ID: Q9Y5G8
  ENSP ID: ENSP00000480337
MASPPRGWGCGELLLPFMLLGTLCEPGSGQIRYSMPEELDKGSFVGNIAKDLGLEPQELAERGVRIVSRGRTQLFALNPRSGSLVTAGRIDREELCAQSPLCVVNFNILVENKMKIYGVEVEIIDINDNFPRFRDEELKVKVNENAAAGTRLVLPFARDADVGVNSLRSYQLSSNLHFSLDVVSGTDGQKYPELVLEQPLDREKETVHDLLLTALDGGDPVLSGTTHIRVTVLDANDNAPLFTPSEYSVSVPENIPVGTRLLMLTATDPDEGINGKLTYSFRNEEEKISETFQLDSNLGEISTLQSLDYEESRFYLMEVVAQDGGALVASAKVVVTVQDVNDNAPEVILTSLTSSISEDCLPGTVIALFSVHDGDSGENGEIACSIPRNLPFKLEKSVDNYYHLLTTRDLDREETSDYNITLTVMDHGTPPLSTESHIPLKVADVNDNPPNFPQASYSTSVTENNPRGVSIFSVTAHDPDSGDNARVTYSLAEDTFQGAPLSSYVSINSDTGVLYALRSFDYEQLRDLQLWVTASDSGNPPLSSNVSLSLFVLDQNDNTPEILYPALPTDGSTGVELAPRSAEPGYLVTKVVAVDKDSGQNAWLSYRLLKASEPGLFAVGLHTGEVRTARALLDRDALKQSLVVAVEDHGQPPLSATFTVTVAVADRIPDILADLGSIKTPIDPEDLDLTLYLVVAVAAVSCVFLAFVIVLLVLRLRRWHKSRLLQAEGSRLAGVPASHFVGVDGVRAFLQTYSHEVSLTADSRKSHLIFPQPNYADTLLSEESCEKSEPLLMSDKVDANKEERRVQVSFLFR

SEQ ID NO: 69734 - protein, 932 aa, Homo sapiens
  Payload ID: 13850
  Gene Symbol: PCDHGA6
  Gene Name: protocadherin gamma subfamily A, 6
  Uniprot ID: Q9Y5G7
  ENSP ID: ENSP00000429601
MAPPQRHPQRSEQVLLLTLLGTLWGAAAAQIRYSIPEELEKGSFVGNIVKDLGLEPQELAEHGVRIVSRGRMQLFSLNPRNGSLVTAGRIDREELCAQSPRCLVSFNILVEDKLNLYPVEVEIVDINDNTPRFLKEELEVKILENAAPSSRFPLMEVYDPDVGMNSLQGFKLSGNSHFSVDVQSEAHGPKYPELVLEGTLDREGEAVYRLVLTAMDGGDPVRSSVAQILVTVLDVNDNTPMFTQPVYRVSVPENLPVGTPVLAVTATDQDEGVHGEVTYSFVKITEKISQIFCLNVLTGEISTSANLDYEDSSFYELGVEARDGPGLRDRAKVLITILDVNDNVPEVVVTSGSRTIAESAPPGTVIALFQVFDRDSGLNGLVTCSIPRSLPFELEKSVGNYYRLVTNAALDREEVFLYNITVTATDKGTPPLSTETIISLNVADTNDNPPTFPHSSYSVYVLENNPRGASIFSVNALDPDVDQNAQVSYSLAEDTLQGAPLSSYVSINSDTGILYALRSFDYEQLRDLQLWVTASDSGDPPLSSNVSLSLFVLDQNDNAPEILYPALPTDGSTGVELAPRSAEPGYLVTKVVAVDRDSGQNAWLSYRLLKASEPGLFSVGLHTGEVRTARALLDRDALKQSLVVAVQDHGQPPLSATVTLTVAVADRIPDILADLGSLEPSAKPNDSDLTLYLVVAVAAVSCVFLAFVIVLLALRLQRWHKSRLLQASGGGLASMPGSHFVGVEGVRAFLQTYSHEVSLTADSRKSHLIFPQPNYADTLINQESYEKSEPLLITQDLLETKGEPRQLQQAPPNTDWRFSQAQRPGTSGSQNGDDTGTWPNNQFDTEMLQAMILASASEAADGSSTLGGGAGTMGLSARYGPQFTLQHVPDYRQNVYIPGSNATLTNAAGKRDGKAPAGGNGNKKKSGKKEKK

SEQ ID NO: 69735 - protein, 818 aa, Homo sapiens
  Payload ID: 13850
  Gene Symbol: PCDHGA6
  Gene Name: protocadherin gamma subfamily A, 6
  Uniprot ID: Q9Y5G7
  ENSP ID: ENSP00000479478
MAPPQRHPQRSEQVLLLTLLGTLWGAAAAQIRYSIPEELEKGSFVGNIVKDLGLEPQELAEHGVRIVSRGRMQLFSLNPRNGSLVTAGRIDREELCAQSPRCLVSFNILVEDKLNLYPVEVEIVDINDNTPRFLKEELEVKILENAAPSSRFPLMEVYDPDVGMNSLQGFKLSGNSHFSVDVQSEAHGPKYPELVLEGTLDREGEAVYRLVLTAMDGGDPVRSSVAQILVTVLDVNDNTPMFTQPVYRVSVPENLPVGTPVLAVTATDQDEGVHGEVTYSFVKITEKISQIFCLNVLTGEISTSANLDYEDSSFYELGVEARDGPGLRDRAKVLITILDVNDNVPEVVVTSGSRTIAESAPPGTVIALFQVFDRDSGLNGLVTCSIPRSLPFELEKSVGNYYRLVTNAALDREEVFLYNITVTATDKGTPPLSTETIISLNVADTNDNPPTFPHSSYSVYVLENNPRGASIFSVNALDPDVDQNAQVSYSLAEDTLQGAPLSSYVSINSDTGILYALRSFDYEQLRDLQLWVTASDSGDPPLSSNVSLSLFVLDQNDNAPEILYPALPTDGSTGVELAPRSAEPGYLVTKVVAVDRDSGQNAWLSYRLLKASEPGLFSVGLHTGEVRTARALLDRDALKQSLVVAVQDHGQPPLSATVTLTVAVADRIPDILADLGSLEPSAKPNDSDLTLYLVVAVAAVSCVFLAFVIVLLALRLQRWHKSRLLQASGGGLASMPGSHFVGVEGVRAFLQTYSHEVSLTADSRKSHLIFPQPNYADTLINQESYEKSEPLLITQDLLETKGEPRQLQVSFFPPKREE

SEQ ID NO: 69736 - protein, 932 aa, Homo sapiens
  Payload ID: 13851
  Gene Symbol: PCDHGA7
  Gene Name: protocadherin gamma subfamily A, 7
  Uniprot ID: Q9Y5G6
  ENSP ID: ENSP00000430024
MAAQPRGGDYRGFFLLSILLGTPWEAWAGRILYSVSEETDKGSFVGDIAKDLGLEPRELAERGVRIISRGRTQLFALNQRSGSLVTAGRIDREEICAQSARCLVNFNILMEDKMNLYPIDVEIIDINDNVPRFLTEEINVKIMENTAPGVRFPLSEAGDPDVGTNSLQSYQLSPNRHFSLAVQSGDDETKYPELVLERVLDREEERVHHLVLTASDGGDPPRSSTAHIQVTVVDVNDHTPVFSLPQYQVTVPENVPVGTRLLTVHAIDLDEGVNGEVTYSFRKITPKLPKMFHLNSLTGEISTLEGLDYEETAFYEMEVQAQDGPGSLTKAKVLITVLDVNDNAPEVTMTSLSSSIPEDTPLGTVIALFYLQDRDSGKNGEVTCTIPENLPFKLEKSIDNYYRLVTTKNLDRETLSLYNITLKATDGGTPPLSRETHIFMQVADTNDNPPTFPHSSYSVYIAENNPRGASIFLVTAQDHDSEDNAQITYSLAEDTIQGAPVSSYVSINSDTGVLYALQSFDYEQLRELQLRVTAHDSGDPPLSSNMSLSLFVLDQNDNPPEILYPALPTDGSTGMELAPRSAEPGYLVTKVVAVDKDSGQNAWLSYLLLKASEPGLFAVGLYTGEVRTARALLDRDALKQSLVVAVQDHGQPPLSATVTLTVAVADSIPEVLADLGSLEPSDGPYNYDLTLYLVVAVATVSCVFLAFVLVLLALRLRRWHKSRLLQASEGGLANVPTSHFVGMDGVQAFLQTYSHEVSLTADSRKSHLIFPQPNYVDMLISQESCEKNDSLLTSVDFQECKENLPSIQQAPPNTDWRFSQAQRPGTSGSQNGDDTGTWPNNQFDTEMLQAMILASASEAADGSSTLGGGAGTMGLSARYGPQFTLQHVPDYRQNVYIPGSNATLTNAAGKRDGKAPAGGNGNKKKSGKKEKK

SEQ ID NO: 69737 - protein, 817 aa, Homo sapiens
  Payload ID: 13851
  Gene Symbol: PCDHGA7
  Gene Name: protocadherin gamma subfamily A, 7
  Uniprot ID: Q9Y5G6
  ENSP ID: ENSP00000477805
MAAQPRGGDYRGFFLLSILLGTPWEAWAGRILYSVSEETDKGSFVGDIAKDLGLEPRELAERGVRIISRGRTQLFALNQRSGSLVTAGRIDREEICAQSARCLVNFNILMEDKMNLYPIDVEIIDINDNVPRFLTEEINVKIMENTAPGVRFPLSEAGDPDVGTNSLQSYQLSPNRHFSLAVQSGDDETKYPELVLERVLDREEERVHHLVLTASDGGDPPRSSTAHIQVTVVDVNDHTPVFSLPQYQVTVPENVPVGTRLLTVHAIDLDEGVNGEVTYSFRKITPKLPKMFHLNSLTGEISTLEGLDYEETAFYEMEVQAQDGPGSLTKAKVLITVLDVNDNAPEVTMTSLSSSIPEDTPLGTVIALFYLQDRDSGKNGEVTCTIPENLPFKLEKSIDNYYRLVTTKNLDRETLSLYNITLKATDGGTPPLSRETHIFMQVADTNDNPPTFPHSSYSVYIAENNPRGASIFLVTAQDHDSEDNAQITYSLAEDTIQGAPVSSYVSINSDTGVLYALQSFDYEQLRELQLRVTAHDSGDPPLSSNMSLSLFVLDQNDNPPEILYPALPTDGSTGMELAPRSAEPGYLVTKVVAVDKDSGQNAWLSYLLLKASEPGLFAVGLYTGEVRTARALLDRDALKQSLVVAVQDHGQPPLSATVTLTVAVADSIPEVLADLGSLEPSDGPYNYDLTLYLVVAVATVSCVFLAFVLVLLALRLRRWHKSRLLQASEGGLANVPTSHFVGMDGVQAFLQTYSHEVSLTADSRKSHLIFPQPNYVDMLISQESCEKNDSLLTSVDFQECKENLPSIQVSPALPLFP

SEQ ID NO: 69738 - protein, 932 aa, Homo sapiens
  Payload ID: 13852
  Gene Symbol: PCDHGA8
  Gene Name: protocadherin gamma subfamily A, 8
  Uniprot ID: Q9Y5G5
  ENSP ID: ENSP00000381605
MAAPQSRPRRGELILLCALLGTLWEIGRGQIRYSVPEETDKGSFVGNISKDLGLDPRKLAKHGVRIVSRGRTQLFALNPRSGSLITAGRIDREELCAQSPRCLININTLVEDKGKLFGVEIEIIDINDNNPKFQVEDLEVKINEIAVPGARYPLPEAVDPDVGVNSLQSYQLSPNHHFSLDVQTGDNGAINPELVLERALDREEEAAHHLVLTASDGGKPPRSSTVRIHVTVLDTNDNAPVFPHPIYRVKVLENMPPGTRLLTVTASDPDEGINGKVAYKFRKINEKQTPLFQLNENTGEISIAKSLDYEECSFYEMEIQAEDVGALLGRTKLLISVEDVNDNRPEVIITSLFSPVLENSLPGTVIAFLSVHDQDSGKNGQVVCYTRDNLPFKLEKSIGNYYRLVTRKYLDRENVSIYNITVMASDLGTPPLSTETQIALHVADINDNPPTFPHASYSAYILENNLRGASIFSLTAHDPDSQENAQVTYSVTEDTLQGAPLSSYISINSDTGVLYALQSFDYEQIRDLQLLVTASDSGDPPLSSNMSLSLFVLDQNDNAPEILYPALPTDGSTGVELAPRSAERGYLVTKVVAVDRDSGQNAWLSYRLLKASEPGLFSVGLHTGEVRTARALLDRDALKQSLVVAVQDHGQPPLSATVTLTVAVADSIPEVLTELGSLKPSVDPNDSSLTLYLVVAVAAISCVFLAFVAVLLGLRLRRWHKSRLLQDSGGRLVGVPASHFVGVEEVQAFLQTYSQEVSLTADSRKSHLIFPQPNYADMLISQEGCEKNDSLLTSVDFHEYKNEADHGQQAPPNTDWRFSQAQRPGTSGSQNGDDTGTWPNNQFDTEMLQAMILASASEAADGSSTLGGGAGTMGLSARYGPQFTLQHVPDYRQNVYIPGSNATLTNAAGKRDGKAPAGGNGNKKKSGKKEKK

SEQ ID NO: 69739 - protein, 820 aa, Homo sapiens
  Payload ID: 13852
  Gene Symbol: PCDHGA8
  Gene Name: protocadherin gamma subfamily A, 8
  Uniprot ID: Q9Y5G5
  ENSP ID: ENSP00000483161
MAAPQSRPRRGELILLCALLGTLWEIGRGQIRYSVPEETDKGSFVGNISKDLGLDPRKLAKHGVRIVSRGRTQLFALNPRSGSLITAGRIDREELCAQSPRCLININTLVEDKGKLFGVEIEIIDINDNNPKFQVEDLEVKINEIAVPGARYPLPEAVDPDVGVNSLQSYQLSPNHHFSLDVQTGDNGAINPELVLERALDREEEAAHHLVLTASDGGKPPRSSTVRIHVTVLDTNDNAPVFPHPIYRVKVLENMPPGTRLLTVTASDPDEGINGKVAYKFRKINEKQTPLFQLNENTGEISIAKSLDYEECSFYEMEIQAEDVGALLGRTKLLISVEDVNDNRPEVIITSLFSPVLENSLPGTVIAFLSVHDQDSGKNGQVVCYTRDNLPFKLEKSIGNYYRLVTRKYLDRENVSIYNITVMASDLGTPPLSTETQIALHVADINDNPPTFPHASYSAYILENNLRGASIFSLTAHDPDSQENAQVTYSVTEDTLQGAPLSSYISINSDTGVLYALQSFDYEQIRDLQLLVTASDSGDPPLSSNMSLSLFVLDQNDNAPEILYPALPTDGSTGVELAPRSAERGYLVTKVVAVDRDSGQNAWLSYRLLKASEPGLFSVGLHTGEVRTARALLDRDALKQSLVVAVQDHGQPPLSATVTLTVAVADSIPEVLTELGSLKPSVDPNDSSLTLYLVVAVAAISCVFLAFVAVLLGLRLRRWHKSRLLQDSGGRLVGVPASHFVGVEEVQAFLQTYSQEVSLTADSRKSHLIFPQPNYADMLISQEGCEKNDSLLTSVDFHEYKNEADHGQVSLVLCLLLISR

SEQ ID NO: 69740 - protein, 932 aa, Homo sapiens
  Payload ID: 13853
  Gene Symbol: PCDHGA9
  Gene Name: protocadherin gamma subfamily A, 9
  Uniprot ID: Q9Y5G4
  ENSP ID: ENSP00000460274
MAAPTKCQLRGRLVLLCSLLGMLWEARASQIRYSVPEETEKGYIVGNISKDLALEPRELAERRVRIVSRGRTQLFSLNPRSGTLVTAGRIDREELCAQSPRCLVNFKVLVEDRVKLYGIEIEVTDINDSAPKFQAESLEVKINEIAVPGARYPLPEAIDPDVGVNSLQSYQLSPNHHFSLNVQTGDNGAINPELVLERALDREEATAHHLVLTASDGGEPRRSSTVRIHVTVLDTNDNAPVFAQRIYRVKVLENVPPGTWLLTATASDLDEGINGKVAYKFWKINEKQSLLFQLNENTGEISTAKSLDYEECSFYEMEIQAEDGGGLKGWTKVLISVEDVNDNRPEVTITSLFSPVREDAPQGTVILLFNAHDRDSGKNGQVVCSIQENLSFTLENSEEDYYRLLTAQILDREKASEYNITVTATDRGTPPLSTEIHITLQVTDINDNPPAFSQASYSVYLPENNARGTSIFSVIAYDPDSNENSRVIYSLAEDTIQGSPLSTYVSINSDTGVLYALCSFDYEQFRDLQMQVTASDSGSPPLSSNVSLRLFVLDQNDNAPEILYPALPTDGSTGVELAPRSAEPGYLVTKVVAVDRDSGQNAWLSYRLFKASEPGLFSVGLHTGEVRTARALLDRDALKQSLVVAVQDHGQPPLSATVTLTVAIADSIPDILADLGSLQIPADLEASDLTLYLVVAVAVVSCVFLTFVITLLALRLRHWHSSHLLRATSDGLAGVPTSHFVGVDGVRAFLQTYSQEFSLTADSRKSHLIFPQPNYADTLISQQSCEKNEPLCVSVDSKFPIEDTPLVPQAPPNTDWRFSQAQRPGTSGSQNGDDTGTWPNNQFDTEMLQAMILASASEAADGSSTLGGGAGTMGLSARYGPQFTLQHVPDYRQNVYIPGSNATLTNAAGKRDGKAPAGGNGNKKKSGKKEKK

SEQ ID NO: 69741 - protein, 828 aa, Homo sapiens
  Payload ID: 13853
  Gene Symbol: PCDHGA9
  Gene Name: protocadherin gamma subfamily A, 9
  Uniprot ID: Q9Y5G4
  ENSP ID: ENSP00000480862
MAAPTKCQLRGRLVLLCSLLGMLWEARASQIRYSVPEETEKGYIVGNISKDLALEPRELAERRVRIVSRGRTQLFSLNPRSGTLVTAGRIDREELCAQSPRCLVNFKVLVEDRVKLYGIEIEVTDINDSAPKFQAESLEVKINEIAVPGARYPLPEAIDPDVGVNSLQSYQLSPNHHFSLNVQTGDNGAINPELVLERALDREEATAHHLVLTASDGGEPRRSSTVRIHVTVLDTNDNAPVFAQRIYRVKVLENVPPGTWLLTATASDLDEGINGKVAYKFWKINEKQSLLFQLNENTGEISTAKSLDYEECSFYEMEIQAEDGGGLKGWTKVLISVEDVNDNRPEVTITSLFSPVREDAPQGTVILLFNAHDRDSGKNGQVVCSIQENLSFTLENSEEDYYRLLTAQILDREKASEYNITVTATDRGTPPLSTEIHITLQVTDINDNPPAFSQASYSVYLPENNARGTSIFSVIAYDPDSNENSRVIYSLAEDTIQGSPLSTYVSINSDTGVLYALCSFDYEQFRDLQMQVTASDSGSPPLSSNVSLRLFVLDQNDNAPEILYPALPTDGSTGVELAPRSAEPGYLVTKVVAVDRDSGQNAWLSYRLFKASEPGLFSVGLHTGEVRTARALLDRDALKQSLVVAVQDHGQPPLSATVTLTVAIADSIPDILADLGSLQIPADLEASDLTLYLVVAVAVVSCVFLTFVITLLALRLRHWHSSHLLRATSDGLAGVPTSHFVGVDGVRAFLQTYSQEFSLTADSRKSHLIFPQPNYADTLISQQSCEKNEPLCVSVDSKFPIEDTPLVPVSSFFFFLSFLFLFFVLFCF

SEQ ID NO: 69742 - protein, 927 aa, Homo sapiens
  Payload ID: 13854
  Gene Symbol: PCDHGB1
  Gene Name: protocadherin gamma subfamily B, 1
  Uniprot ID: Q9Y5G3
  ENSP ID: ENSP00000429273
MQRAREAEMMKSQVLFPFLLSLFCGAISQQIRYTIPEELANGSRVGKLAKDLGLSVRELPTRKLRVSAEDYFNVSLESGDLLVNGRIDREKICGRKLECALEFETVAENPMNVFHVVVVIQDINDNAPRFVAKGIDLEICESALPGVKFSLDSAQDADVEGNSLKLYTINPNQYFSLSTKESPDGSKYPVLLLEKPLDREHQSSHRLILTAMDGGDPPLSGTTHIWIRVTDANDNAPVFSQEVYRVSLQENVPWGTSVLRVMATDQDEGINAEITYAFLNSPISTSLFNLNPNTGDITTNGTLDFEETSRYVLSVEAKDGGVHTAHCNVQIEIVDENDNAPEVTFMSFSNQIPEDSDLGTVIALIKVRDKDSGQNGMVTCYTQEEVPFKLESTSKNYYKLVIAGALNREQTADYNVTIIATDKGKPALSSRTSITLHISDINDNAPVFHQASYVVHVSENNPPGASIAQVSASDPDLGPNGRVSYSILASDLEPRELLSYVSVSPQSGVVFAQRAFDHEQLRAFELTLQARDQGSPALSANVSLRVLVGDLNDNAPRVLYPALGPDGSALFDMVPRAAEPGYLVTKVVAVDADSGHNAWLSYHVLQASEPGLFSLGLRTGEVRTARALGDRDAARQRLLVAVRDGGQPPLSATATLHLIFADSLQEVLPDLSDRPEPSDPQTELQFYLVVALALISVLFLLAVILAIALRLRRSSSLDTEGCFQTGLCSKSGPGVPPNHSEGTLPYSYNLCIASHSAKTEFNSLNLTPEMAPPQDLLCDDPSMVVCASNEDHKIAYDPSLSSHQAPPNTDWRFSQAQRPGTSGSQNGDDTGTWPNNQFDTEMLQAMILASASEAADGSSTLGGGAGTMGLSARYGPQFTLQHVPDYRQNVYIPGSNATLTNAAGKRDGKAPAGGNGNKKKSGKKEKK

SEQ ID NO: 69743 - protein, 810 aa, Homo sapiens
  Payload ID: 13854
  Gene Symbol: PCDHGB1
  Gene Name: protocadherin gamma subfamily B, 1
  Uniprot ID: Q9Y5G3
  ENSP ID: ENSP00000478900
MQRAREAEMMKSQVLFPFLLSLFCGAISQQIRYTIPEELANGSRVGKLAKDLGLSVRELPTRKLRVSAEDYFNVSLESGDLLVNGRIDREKICGRKLECALEFETVAENPMNVFHVVVVIQDINDNAPRFVAKGIDLEICESALPGVKFSLDSAQDADVEGNSLKLYTINPNQYFSLSTKESPDGSKYPVLLLEKPLDREHQSSHRLILTAMDGGDPPLSGTTHIWIRVTDANDNAPVFSQEVYRVSLQENVPWGTSVLRVMATDQDEGINAEITYAFLNSPISTSLFNLNPNTGDITTNGTLDFEETSRYVLSVEAKDGGVHTAHCNVQIEIVDENDNAPEVTFMSFSNQIPEDSDLGTVIALIKVRDKDSGQNGMVTCYTQEEVPFKLESTSKNYYKLVIAGALNREQTADYNVTIIATDKGKPALSSRTSITLHISDINDNAPVFHQASYVVHVSENNPPGASIAQVSASDPDLGPNGRVSYSILASDLEPRELLSYVSVSPQSGVVFAQRAFDHEQLRAFELTLQARDQGSPALSANVSLRVLVGDLNDNAPRVLYPALGPDGSALFDMVPRAAEPGYLVTKVVAVDADSGHNAWLSYHVLQASEPGLFSLGLRTGEVRTARALGDRDAARQRLLVAVRDGGQPPLSATATLHLIFADSLQEVLPDLSDRPEPSDPQTELQFYLVVALALISVLFLLAVILAIALRLRRSSSLDTEGCFQTGLCSKSGPGVPPNHSEGTLPYSYNLCIASHSAKTEFNSLNLTPEMAPPQDLLCDDPSMVVCASNEDHKIAYDPSLSSHVSFCKSS

SEQ ID NO: 69744 - protein, 931 aa, Homo sapiens
  Payload ID: 13855
  Gene Symbol: PCDHGB2
  Gene Name: protocadherin gamma subfamily B, 2
  Uniprot ID: Q9Y5G2
  ENSP ID: ENSP00000429018
MKASSGRCGLVRWLQVLLPFLLSLFPGALPVQIRYSIPEELAKNSVVGNLAKDLGLSVRDLPARKLRVSAEKEYFTVNPESGDLLVSDRIDREQICGKQPLCVLDFDTVAENPLNIFYIAVIVQDINDNTPLFKQTKINLKIGESTKPGTTFPLDPALDSDVGPNSLQRYHLNDNEYFDLAEKQTPDGRKYPELILKHSLDREEHSLHQLVLTAVDGGDPPQSGTTQIRIKVTDANDNPPVFSQDVYRVTLREDVPPGFFVLQVTATDRDEGINAEITYSFHNVDEQVKHFFNLNEKTGEITTKDDLDFEIASSYTLSIEAKDPGDLAAHCSIQVEILDDNDCAPEVIVTSVSTPLPEDSPPGTVIALIKTRDRDSGENGEVYCQVLGNAKFILKSSSKNYYKLVTDGALDREEIPEYNLTITATDGGKPPLSSSIIVTLHISDVNDNAPVFQQTSYMVHVAENNPPGASIAQISASDPDLGPSGQVSYSIVASDLKPREILSYVSVSAQSGVVFAQRAFDHEQLRAFELTLQARDQGSPALSANVSLRVLVGDLNDNAPRVLYPALGPDGSALFDMVPRAAEPGYLVTKVVAVDADSGHNAWLSYHVLQASEPGLFSLGLRTGEVRTARALGDRDAARQRLLVAVRDGGQPPLSATATLHLIFADSLQEVLPDLSDRREPSDPQAKLQFYLVVALALISVLFFLAVILAISLRLRLSSRSDAWDCFQPGLSSKPGPGVLPNYSEGTLPYSYNLCVASQSAKTEFNFLNITPELVPAQDLVCDNASWEQNTNHGAAGVPFASDTILKQAPPNTDWRFSQAQRPGTSGSQNGDDTGTWPNNQFDTEMLQAMILASASEAADGSSTLGGGAGTMGLSARYGPQFTLQHVPDYRQNVYIPGSNATLTNAAGKRDGKAPAGGNGNKKKSGKKEKK

SEQ ID NO: 69745 - protein, 811 aa, Homo sapiens
  Payload ID: 13855
  Gene Symbol: PCDHGB2
  Gene Name: protocadherin gamma subfamily B, 2
  Uniprot ID: Q9Y5G2
  ENSP ID: ENSP00000481512
MKASSGRCGLVRWLQVLLPFLLSLFPGALPVQIRYSIPEELAKNSVVGNLAKDLGLSVRDLPARKLRVSAEKEYFTVNPESGDLLVSDRIDREQICGKQPLCVLDFDTVAENPLNIFYIAVIVQDINDNTPLFKQTKINLKIGESTKPGTTFPLDPALDSDVGPNSLQRYHLNDNEYFDLAEKQTPDGRKYPELILKHSLDREEHSLHQLVLTAVDGGDPPQSGTTQIRIKVTDANDNPPVFSQDVYRVTLREDVPPGFFVLQVTATDRDEGINAEITYSFHNVDEQVKHFFNLNEKTGEITTKDDLDFEIASSYTLSIEAKDPGDLAAHCSIQVEILDDNDCAPEVIVTSVSTPLPEDSPPGTVIALIKTRDRDSGENGEVYCQVLGNAKFILKSSSKNYYKLVTDGALDREEIPEYNLTITATDGGKPPLSSSIIVTLHISDVNDNAPVFQQTSYMVHVAENNPPGASIAQISASDPDLGPSGQVSYSIVASDLKPREILSYVSVSAQSGVVFAQRAFDHEQLRAFELTLQARDQGSPALSANVSLRVLVGDLNDNAPRVLYPALGPDGSALFDMVPRAAEPGYLVTKVVAVDADSGHNAWLSYHVLQASEPGLFSLGLRTGEVRTARALGDRDAARQRLLVAVRDGGQPPLSATATLHLIFADSLQEVLPDLSDRREPSDPQAKLQFYLVVALALISVLFFLAVILAISLRLRLSSRSDAWDCFQPGLSSKPGPGVLPNYSEGTLPYSYNLCVASQSAKTEFNFLNITPELVPAQDLVCDNASWEQNTNHGAAGVPFASDTILKVSFN

SEQ ID NO: 69746 - protein, 929 aa, Homo sapiens
  Payload ID: 13856
  Gene Symbol: PCDHGB3
  Gene Name: protocadherin gamma subfamily B, 3
  Uniprot ID: Q9Y5G1
  ENSP ID: ENSP00000461862
MGNSSGWRGPAGQRRMLFLFLLSLLDQALSEPIRYAIPEELDRGSLVGNLAKDLGFGVGDLPTRNLRVIAEKKFFTVSPENGNLLVSDRIDREEICGKKSTCVLEFEMVAEKPLNFFHVTVLIQDINDNPPTFSQNITELEISELALTGATFALESAQDPDVGVNSLQQYYLSPDPHFSLIQKENLDGSRYPELVLKAPLDREEQPHHHLVLTAVDGGEPSRSCTTQIRVIVADANDNPPVFTQDMYRVNVAENLPAGSSVLKVMAIDMDEGINAEIIYAFINIGKEVRQLFKLDSKTGELTTIGELDFEERDSYTIGVEAKDGGHHTAYCKVQIDISDENDNAPEITLASESQHIQEDAELGTAVALIKTHDLDSGFNGEILCQLKGNFPFKIVQDTKNTYRLVTDGALDREQIPEYNVTITATDKGNPPLSSSKTITLHILDVNDNVPVFHQASYTVHVAENNPPGASIAHVRASDPDLGPNGLVSYYIVASDLEPRELSSYVSVSARSGVVFAQRAFDHEQLRAFELTLQARDQGSPTLSANVSLRVLVDDRNDNAPLVLYPALGPEGSALFDMVPRSAEPGYLVTKVVAVDADSGYNAWLSYHIVQASEPGLFSLGLRTGEVRTARTLGDREAARQRLLVTVRDGGQQPLSATVMLHLIFADSLQEIQPDLSDRPTPSDPQAELQFHLVVALALISVLFLLAVILAISLRLRCSSRPATEGYFQPGVCFKTVPGVLPTYSERTLPYSYNPCAASHSSNTEFKFLNIKAENAAPQDLLCDEASWFESNDNPEMPSNSGNLQKQAPPNTDWRFSQAQRPGTSGSQNGDDTGTWPNNQFDTEMLQAMILASASEAADGSSTLGGGAGTMGLSARYGPQFTLQHVPDYRQNVYIPGSNATLTNAAGKRDGKAPAGGNGNKKKSGKKEKK

SEQ ID NO: 69747 - protein, 814 aa, Homo sapiens
  Payload ID: 13856
  Gene Symbol: PCDHGB3
  Gene Name: protocadherin gamma subfamily B, 3
  ENSP ID: ENSP00000483339
MGNSSGWRGPAGQRRMLFLFLLSLLDQALSEPIRYAIPEELDRGSLVGNLAKDLGFGVGDLPTRNLRVIAEKKFFTVSPENGNLLVSDRIDREEICGKKSTCVLEFEMVAEKPLNFFHVTVLIQDINDNPPTFSQNITELEISELALTGATFALESAQDPDVGVNSLQQYYLSPDPHFSLIQKENLDGSRYPELVLKAPLDREEQPHHHLVLTAVDGGEPSRSCTTQIRVIVADANDNPPVFTQDMYRVNVAENLPAGSSVLKVMAIDMDEGINAEIIYAFINIGKEVRQLFKLDSKTGELTTIGELDFEERDSYTIGVEAKDGGHHTAYCKVQIDISDENDNAPEITLASESQHIQEDAELGTAVALIKTHDLDSGFNGEILCQLKGNFPFKIVQDTKNTYRLVTDGALDREQIPEYNVTITATDKGNPPLSSSKTITLHILDVNDNVPVFHQASYTVHVAENNPPGASIAHVRASDPDLGPNGLVSYYIVASDLEPRELSSYVSVSARSGVVFAQRAFDHEQLRAFELTLQARDQGSPTLSANVSLRVLVDDRNDNAPLVLYPALGPEGSALFDMVPRSAEPGYLVTKVVAVDADSGYNAWLSYHIVQASEPGLFSLGLRTGEVRTARTLGDREAARQRLLVTVRDGGQQPLSATVMLHLIFADSLQEIQPDLSDRPTPSDPQAELQFHLVVALALISVLFLLAVILAISLRLRCSSRPATEGYFQPGVCFKTVPGVLPTYSERTLPYSYNPCAASHSSNTEFKFLNIKAENAAPQDLLCDEASWFESNDNPEMPSNSGNLQKVSFFKPFLP

SEQ ID NO: 69748 - protein, 923 aa, Homo sapiens
  Payload ID: 13857
  Gene Symbol: PCDHGB4
  Gene Name: protocadherin gamma subfamily B, 4
  Uniprot ID: Q9UN71
  ENSP ID: ENSP00000428288
MGSGAGELGRAERLPVLFLFLLSLFCPALCEQIRYRIPEEMPKGSVVGNLATDLGFSVQELPTRKLRVSSEKPYFTVSAESGELLVSSRLDREEICGKKPACALEFEAVAENPLNFYHVNVEIEDINDHTPKFTQNSFELQISESAQPGTRFILGSAHDADIGSNTLQNYQLSPSDHFSLINKEKSDGSKYPEMVLKTPLDREKQKSYHLTLTALDFGAPPLSSTAQIHVLVTDANDNAPVFSQDVYRVSLSENVYPGTTVLQVTATDQDEGVNAEITFSFSEASQITQFDLNSNTGEITVLNTLDFEEVKEYSIVLEARDGGGMIAQCTVEVEVIDENDNAPEVIFQSLPNLIMEDAELGTHIALLKVRDKDSRHNGEVTCKLEGDVPFKILTSSRNTYKLVTDAVLDREQNPEYNITVTATDRGKPPLSSSSSITLHIGDVNDNAPVFSQSSYIVHVAENNPPGASISQVRASDPDLGPNGQVSYCIMASDLEQRELSSYVSISAESGVVFAQRAFDHEQLRAFELTLQARDQGSPALSANVSLRVLVDDRNDNAPRVLYPALGPDGSALFDMVPHAAEPGYLVTKVVAVDADSGHNAWLSYHVLQASEPGLFSLGLRTGEVRTARALGDRDAVRQRLLVAVRDGGQPPLSATATLHLVFADSLQEVLPDITDRPDPSDLQAELQFYLVVALALISVLFLVAMILAIALRLRRSSSPASWSCFQPGLCVKSESVVPPNYSEGTLPYSYNLCVAHTGKTEFNFLKCSEQLSSGQDILCGDSSGALFPLCNSSELTSHQQAPPNTDWRFSQAQRPGTSGSQNGDDTGTWPNNQFDTEMLQAMILASASEAADGSSTLGGGAGTMGLSARYGPQFTLQHVPDYRQNVYIPGSNATLTNAAGKRDGKAPAGGNGNKKKSGKKEKK

SEQ ID NO: 69749 - protein, 803 aa, Homo sapiens
  Payload ID: 13857
  Gene Symbol: PCDHGB4
  Gene Name: protocadherin gamma subfamily B, 4
  Uniprot ID: Q9UN71
  ENSP ID: ENSP00000484560
MGSGAGELGRAERLPVLFLFLLSLFCPALCEQIRYRIPEEMPKGSVVGNLATDLGFSVQELPTRKLRVSSEKPYFTVSAESGELLVSSRLDREEICGKKPACALEFEAVAENPLNFYHVNVEIEDINDHTPKFTQNSFELQISESAQPGTRFILGSAHDADIGSNTLQNYQLSPSDHFSLINKEKSDGSKYPEMVLKTPLDREKQKSYHLTLTALDFGAPPLSSTAQIHVLVTDANDNAPVFSQDVYRVSLSENVYPGTTVLQVTATDQDEGVNAEITFSFSEASQITQFDLNSNTGEITVLNTLDFEEVKEYSIVLEARDGGGMIAQCTVEVEVIDENDNAPEVIFQSLPNLIMEDAELGTHIALLKVRDKDSRHNGEVTCKLEGDVPFKILTSSRNTYKLVTDAVLDREQNPEYNITVTATDRGKPPLSSSSSITLHIGDVNDNAPVFSQSSYIVHVAENNPPGASISQVRASDPDLGPNGQVSYCIMASDLEQRELSSYVSISAESGVVFAQRAFDHEQLRAFELTLQARDQGSPALSANVSLRVLVDDRNDNAPRVLYPALGPDGSALFDMVPHAAEPGYLVTKVVAVDADSGHNAWLSYHVLQASEPGLFSLGLRTGEVRTARALGDRDAVRQRLLVAVRDGGQPPLSATATLHLVFADSLQEVLPDITDRPDPSDLQAELQFYLVVALALISVLFLVAMILAIALRLRRSSSPASWSCFQPGLCVKSESVVPPNYSEGTLPYSYNLCVAHTGKTEFNFLKCSEQLSSGQDILCGDSSGALFPLCNSSELTSHQVSFL

SEQ ID NO: 69750 - protein, 923 aa, Homo sapiens
  Payload ID: 13858
  Gene Symbol: PCDHGB5
  Gene Name: protocadherin gamma subfamily B, 5
  Uniprot ID: Q9Y5G0
  ENSP ID: ENSP00000478258
MGSGAGELGRAERLPVLFLFLLSLFCPALCEQIRYRIPEEMPKGSVVGNLATDLGFSVQELPTRKLRVSSEKPYFTVSAESGELLVSSRLDREEICGKKPACALEFEAVAENPLNFYHVNVEIEDINDHTPKFTQNSFELQISESAQPGTRFILEVAEDADIGLNSLQKYKLSLNPSFSLIIKEKQDGSKYPELALEKTLDREQQSYHRLVLTALDGGHPPLSGTTELRIQVTDANDNPPVFNRDVYRVSLRENVPPGTTVLQVSATDQDEGINSEITYSFYRTGQIFSLNSKSGEITTQKKLDFEETKEYSMVVEGRDGGGLVAQCTVEINIQDENDNSPEVTFHSLLEMILENAVPGTLIALIKIHDQDSGENGEVNCQLQGEVPFKIISSSKNSYKLVTDGTLDREQTPEYNVTITATDRGKPPLSSSISVILHIRDVNDNAPVFHQASYLVSVPENNPPGASIAQVCASDLDLGLNGQVSYSIMASDLEPLALASYVSMSAQSGVVFAQRAFDYEQLRTFELTLQARDQGSPALSANVSLRVLVGDRNDNAPRVLYPALGPDGSALFDMVPRAAEPGYLVTKVVAVDADSGHNAWLSYHVLQASEPGLFSLGLRTGEVRTARALGDRDAARQRLLVAVRDGGQPPLSATATLHLVFADSLQEVLPDITDRPVPSDPQAELQFYLVVALALISVLFLLAVILAVALRLRRSSSPAAWSCFQPGLCVKSGPVVPPNYSQGTLPYSYNLCVAHTGKTEFNFLKCSEQLSSGQDILCGDSSGALFPLCNSSESTSHPELQAPPNTDWRFSQAQRPGTSGSQNGDDTGTWPNNQFDTEMLQAMILASASEAADGSSTLGGGAGTMGLSARYGPQFTLQHVPDYRQNVYIPGSNATLTNAAGKRDGKAPAGGNGNKKKSGKKEKK

SEQ ID NO: 69751 - protein, 818 aa, Homo sapiens
  Payload ID: 13858
  Gene Symbol: PCDHGB5
  Gene Name: protocadherin gamma subfamily B, 5
  Uniprot ID: Q9Y5G0
  ENSP ID: ENSP00000484888
MGSGAGELGRAERLPVLFLFLLSLFCPALCEQIRYRIPEEMPKGSVVGNLATDLGFSVQELPTRKLRVSSEKPYFTVSAESGELLVSSRLDREEICGKKPACALEFEAVAENPLNFYHVNVEIEDINDHTPKFTQNSFELQISESAQPGTRFILEVAEDADIGLNSLQKYKLSLNPSFSLIIKEKQDGSKYPELALEKTLDREQQSYHRLVLTALDGGHPPLSGTTELRIQVTDANDNPPVFNRDVYRVSLRENVPPGTTVLQVSATDQDEGINSEITYSFYRTGQIFSLNSKSGEITTQKKLDFEETKEYSMVVEGRDGGGLVAQCTVEINIQDENDNSPEVTFHSLLEMILENAVPGTLIALIKIHDQDSGENGEVNCQLQGEVPFKIISSSKNSYKLVTDGTLDREQTPEYNVTITATDRGKPPLSSSISVILHIRDVNDNAPVFHQASYLVSVPENNPPGASIAQVCASDLDLGLNGQVSYSIMASDLEPLALASYVSMSAQSGVVFAQRAFDYEQLRTFELTLQARDQGSPALSANVSLRVLVGDRNDNAPRVLYPALGPDGSALFDMVPRAAEPGYLVTKVVAVDADSGHNAWLSYHVLQASEPGLFSLGLRTGEVRTARALGDRDAARQRLLVAVRDGGQPPLSATATLHLVFADSLQEVLPDITDRPVPSDPQAELQFYLVVALALISVLFLLAVILAVALRLRRSSSPAAWSCFQPGLCVKSGPVVPPNYSQGTLPYSYNLCVAHTGKTEFNFLKCSEQLSSGQDILCGDSSGALFPLCNSSESTSHPELVSFIYVYSFSLPTQFSVFT

SEQ ID NO: 69752 - protein, 930 aa, Homo sapiens
  Payload ID: 13859
  Gene Symbol: PCDHGB6
  Gene Name: protocadherin gamma subfamily B, 6
  Uniprot ID: Q9Y5F9
  ENSP ID: ENSP00000428603
MGGSCAQRRRAGPRQVLFPLLLPLFYPTLSEPIRYSIPEELAKGSVVGNLAKDLGLSVLDVSARKLRVSAEKLHFSVDAESGDLLVKNRIDREQICKERRRCELQLEAVVENPLNIFHVIVVIEDVNDHAPQFDKKEIHLEIFESASAGTRLSLDPATDPDININSIKDYKINSNPYFSLMVRVNSDGGKYPELSLEKLLDREEQRSHSLILTALDGGDPPRSATAHIEISVKDTNDNPPVFSRDEYRISLSENLPPGSPVLQVTATDQDEGVNAEINYYFRSTAQSTKHMFSLDEKTGMIKNNQSFDFEDVERYTMEVEAKDGGGLSTQCKVIIEILDENDNSPEIIITSLSDQILENSPPGMVVALFKTRDLDFGGNGEVRCNIETDIPFKIYSSSNNYYKLVTDGALDREQTPEYNVTIVATDRGKPPLSSSRSITLYVADINDNAPVFDQTSYVVHVAENNPPGASIAQVSASDPDLGLNGHISYSIVASDLEPLAVSSYVSVSAQSGVVFAQRAFDHEQLRAFALTLQARDHGSPTLSANVSLRVLVGDRNDNAPRVLYPALGPDGSAFFDMVPRSAEPGYLVTKVVAVDADSGHNAWLSYHVLQASEPGLFSLGLRTGEVRTARALGDRDAARQRLLVAVRDGGQPPLSATATLHLVFADNLQEILPDLSDRPVLSDPQAELQFYLVVALALISVLFLLAVILAIALRLRRSLSPATWDCFHPGLCVKSGPVVPPNYSEGTLPYSYNLCIAHTGTKEFNFLKCSVPLHSNEDMVCSVSPGALIPPHGGEDLTSHPETLTSQAPPNTDWRFSQAQRPGTSGSQNGDDTGTWPNNQFDTEMLQAMILASASEAADGSSTLGGGAGTMGLSARYGPQFTLQHVPDYRQNVYIPGSNATLTNAAGKRDGKAPAGGNGNKKKSGKKEKK

SEQ ID NO: 69753 - protein, 820 aa, Homo sapiens
  Payload ID: 13859
  Gene Symbol: PCDHGB6
  Gene Name: protocadherin gamma subfamily B, 6
  Uniprot ID: Q9Y5F9
  ENSP ID: ENSP00000479143
MGGSCAQRRRAGPRQVLFPLLLPLFYPTLSEPIRYSIPEELAKGSVVGNLAKDLGLSVLDVSARKLRVSAEKLHFSVDAESGDLLVKNRIDREQICKERRRCELQLEAVVENPLNIFHVIVVIEDVNDHAPQFDKKEIHLEIFESASAGTRLSLDPATDPDININSIKDYKINSNPYFSLMVRVNSDGGKYPELSLEKLLDREEQRSHSLILTALDGGDPPRSATAHIEISVKDTNDNPPVFSRDEYRISLSENLPPGSPVLQVTATDQDEGVNAEINYYFRSTAQSTKHMFSLDEKTGMIKNNQSFDFEDVERYTMEVEAKDGGGLSTQCKVIIEILDENDNSPEIIITSLSDQILENSPPGMVVALFKTRDLDFGGNGEVRCNIETDIPFKIYSSSNNYYKLVTDGALDREQTPEYNVTIVATDRGKPPLSSSRSITLYVADINDNAPVFDQTSYVVHVAENNPPGASIAQVSASDPDLGLNGHISYSIVASDLEPLAVSSYVSVSAQSGVVFAQRAFDHEQLRAFALTLQARDHGSPTLSANVSLRVLVGDRNDNAPRVLYPALGPDGSAFFDMVPRSAEPGYLVTKVVAVDADSGHNAWLSYHVLQASEPGLFSLGLRTGEVRTARALGDRDAARQRLLVAVRDGGQPPLSATATLHLVFADNLQEILPDLSDRPVLSDPQAELQFYLVVALALISVLFLLAVILAIALRLRRSLSPATWDCFHPGLCVKSGPVVPPNYSEGTLPYSYNLCIAHTGTKEFNFLKCSVPLHSNEDMVCSVSPGALIPPHGGEDLTSHPETLTSVSFSFLCVIYLIVY

SEQ ID NO: 69754 - protein, 929 aa, Homo sapiens
  Payload ID: 13860
  Gene Symbol: PCDHGB7
  Gene Name: protocadherin gamma subfamily B, 7
  Uniprot ID: Q9Y5F8
  ENSP ID: ENSP00000381594
MGGSCAQRRRAGPRQVLFPLLLPLFYPTLCEPIRYSIPEELAKGSVVGNLAKDLGLSVLDVSARELRVSAEKLHFSVDAQSGDLLVKDRIDREQICKERRRCELQLEAVVENPLNIFHVIVVIEDVNDHAPQFRKDEINLEISESVSLGMGTILESAEDPDISMNSLSKYQLSPNEYFSLVEKDNPDGGKYPELVLQKTLDRETQSAHHLVLTALDGGDPPRSGTAQIRILVIDANDNPPVFSQDVYRVSLREDVPPGTSILRVKATDQDEGINSEITYSFFGVADKAQHVFSLDYTTGNILTQQPLDFEEVERYTINIEAKDRGSLSTRCKVIVEVVDENDNSPEIIITSLSDQIMEDSPPGVVVALFKTRDQDSGENGEVRCSLSRGVPFKIHSSSNNYYKLVTDEALDREQTPEYNVTIAATDRGKPPLSSSKTITLHITDVNDNAPVFGQSAYLVHVPENNQPGASIAQVSASDPDFGLNGRVSYSLIASDLESRTLSSYVSVSAQSGVVFAQRAFDHEQLRTFELTLQARDQGSPALSANVSLRVLVGDRNDNAPRVLYPALGPDGSALFDTVPRAAQPGYLVTKVVAVDADSGHNAWLSYHVVQASEPGLFSLGLRTGEVRMVRALGDKDSVRQRLLVAVRDGGQPPLSATATLHLVFADSLQEVLPDFSDHPTPSDSQAEMQFYLVVALALISVLFLLAVILAIALRLRQSFSPTAGDCFESVLCSKSGPVGPPNYSEGTLPYAYNFCVPGDQMNPEFNFFTSVDHCPATQDNLNKDSMLLASILTPSVEADKKILKQQAPPNTDWRFSQAQRPGTSGSQNGDDTGTWPNNQFDTEMLQAMILASASEAADGSSTLGGGAGTMGLSARYGPQFTLQHVPDYRQNVYIPGSNATLTNAAGKRDGKAPAGGNGNKKKSGKKEKK

SEQ ID NO: 69755 - protein, 808 aa, Homo sapiens
  Payload ID: 13860
  Gene Symbol: PCDHGB7
  Gene Name: protocadherin gamma subfamily B, 7
  Uniprot ID: Q9Y5F8
  ENSP ID: ENSP00000479132
MGGSCAQRRRAGPRQVLFPLLLPLFYPTLCEPIRYSIPEELAKGSVVGNLAKDLGLSVLDVSARELRVSAEKLHFSVDAQSGDLLVKDRIDREQICKERRRCELQLEAVVENPLNIFHVIVVIEDVNDHAPQFRKDEINLEISESVSLGMGTILESAEDPDISMNSLSKYQLSPNEYFSLVEKDNPDGGKYPELVLQKTLDRETQSAHHLVLTALDGGDPPRSGTAQIRILVIDANDNPPVFSQDVYRVSLREDVPPGTSILRVKATDQDEGINSEITYSFFGVADKAQHVFSLDYTTGNILTQQPLDFEEVERYTINIEAKDRGSLSTRCKVIVEVVDENDNSPEIIITSLSDQIMEDSPPGVVVALFKTRDQDSGENGEVRCSLSRGVPFKIHSSSNNYYKLVTDEALDREQTPEYNVTIAATDRGKPPLSSSKTITLHITDVNDNAPVFGQSAYLVHVPENNQPGASIAQVSASDPDFGLNGRVSYSLIASDLESRTLSSYVSVSAQSGVVFAQRAFDHEQLRTFELTLQARDQGSPALSANVSLRVLVGDRNDNAPRVLYPALGPDGSALFDTVPRAAQPGYLVTKVVAVDADSGHNAWLSYHVVQASEPGLFSLGLRTGEVRMVRALGDKDSVRQRLLVAVRDGGQPPLSATATLHLVFADSLQEVLPDFSDHPTPSDSQAEMQFYLVVALALISVLFLLAVILAIALRLRQSFSPTAGDCFESVLCSKSGPVGPPNYSEGTLPYAYNFCVPGDQMNPEFNFFTSVDHCPATQDNLNKDSMLLASILTPSVEADKKILKQVSI

SEQ ID NO: 69756 - protein, 934 aa, Homo sapiens
  Payload ID: 13861
  Gene Symbol: PCDHGC3
  Gene Name: protocadherin gamma subfamily C, 3
  Uniprot ID: Q9UN70
  ENSP ID: ENSP00000312070
MVPEAWRSGLVSTGRVVGVLLLLGALNKASTVIHYEIPEEREKGFAVGNVVANLGLDLGSLSARRFRVVSGASRRFFEVNRETGEMFVNDRLDREELCGTLPSCTVTLELVVENPLELFSVEVVIQDINDNNPAFPTQEMKLEISEAVAPGTRFPLESAHDPDVGSNSLQTYELSRNEYFALRVQTREDSTKYAELVLERALDREREPSLQLVLTALDGGTPALSASLPIHIKVLDANDNAPVFNQSLYRARVLEDAPSGTRVVQVLATDLDEGPNGEIIYSFGSHNRAGVRQLFALDLVTGMLTIKGRLDFEDTKLHEIYIQAKDKGANPEGAHCKVLVEVVDVNDNAPEITVTSVYSPVPEDAPLGTVIALLSVTDLDAGENGLVTCEVPPGLPFSLTSSLKNYFTLKTSADLDRETVPEYNLSITARDAGTPSLSALTIVRVQVSDINDNPPQSSQSSYDVYIEENNLPGAPILNLSVWDPDAPQNARLSFFLLEQGAETGLVGRYFTINRDNGIVSSLVPLDYEDRREFELTAHISDGGTPVLATNISVNIFVTDRNDNAPQVLYPRPGGSSVEMLPRGTSAGHLVSRVVGWDADAGHNAWLSYSLLGSPNQSLFAIGLHTGQISTARPVQDTDSPRQTLTVLIKDNGEPSLSTTATLTVSVTEDSPEARAEFPSGSAPREQKKNLTFYLLLSLILVSVGFVVTVFGVIIFKVYKWKQSRDLYRAPVSSLYRTPGPSLHADAVRGGLMSPHLYHQVYLTTDSRRSDPLLKKPGAASPLASRQNTLRSCDPVFYRQVLGAESAPPGQQAPPNTDWRFSQAQRPGTSGSQNGDDTGTWPNNQFDTEMLQAMILASASEAADGSSTLGGGAGTMGLSARYGPQFTLQHVPDYRQNVYIPGSNATLTNAAGKRDGKAPAGGNGNKKKSGKKEKK

SEQ ID NO: 69757 - protein, 863 aa, Homo sapiens
  Payload ID: 13861
  Gene Symbol: PCDHGC3
  Gene Name: protocadherin gamma subfamily C, 3
  Uniprot ID: Q9UN70
  ENSP ID: ENSP00000481219
MVPEAWRSGLVSTGRVVGVLLLLGALNKASTVIHYEIPEEREKGFAVGNVVANLGLDLGSLSARRFRVVSGASRRFFEVNRETGEMFVNDRLDREELCGTLPSCTVTLELVVENPLELFSVEVVIQDINDNNPAFPTQEMKLEISEAVAPGTRFPLESAHDPDVGSNSLQTYELSRNEYFALRVQTREDSTKYAELVLERALDREREPSLQLVLTALDGGTPALSASLPIHIKVLDANDNAPVFNQSLYRARVLEDAPSGTRVVQVLATDLDEGPNGEIIYSFGSHNRAGVRQLFALDLVTGMLTIKGRLDFEDTKLHEIYIQAKDKGANPEGAHCKVLVEVVDVNDNAPEITVTSVYSPVPEDAPLGTVIALLSVTDLDAGENGLVTCEVPPGLPFSLTSSLKNYFTLKTSADLDRETVPEYNLSITARDAGTPSLSALTIVRVQVSDINDNPPQSSQSSYDVYIEENNLPGAPILNLSVWDPDAPQNARLSFFLLEQGAETGLVGRYFTINRDNGIVSSLVPLDYEDRREFELTAHISDGGTPVLATNISVNIFVTDRNDNAPQVLYPRPGGSSVEMLPRGTSAGHLVSRVVGWDADAGHNAWLSYSLLGSPNQSLFAIGLHTGQISTARPVQDTDSPRQTLTVLIKDNGEPSLSTTATLTVSVTEDSPEARAEFPSGSAPREQKKNLTFYLLLSLILVSVGFVVTVFGVIIFKVYKWKQSRDLYRAPVSSLYRTPGPSLHADAVRGGLMSPHLYHQVYLTTDSRRSDPLLKKPGAASPLASRQNTLRSCDPVFYRQVLGAESAPPGQVRFSKSCLTLLVLFYSYIILRKEWSCFFSDEDVFLVMHSHFQLALPRSKLVPL

SEQ ID NO: 69758 - protein, 185 aa, Homo sapiens
  Payload ID: 13861
  Gene Symbol: PCDHGC3
  Gene Name: protocadherin gamma subfamily C, 3
  ENSP ID: ENSP00000481673
MVPEAWRSGLVYLTTDSRRSDPLLKKPGAASPLASRQNTLRSCDPVFYRQVLGAESAPPGQQAPPNTDWRFSQAQRPGTSGSQNGDDTGTWPNNQFDTEMLQAMILASASEAADGSSTLGGGAGTMGLSARYGPQFTLQHVPDYRQNVYIPGSNATLTNAAGKRDGKAPAGGNGNKKKSGKKEKK

SEQ ID NO: 69759 - protein, 134 aa, Homo sapiens
  Payload ID: 13861
  Gene Symbol: PCDHGC3
  Gene Name: protocadherin gamma subfamily C, 3
  ENSP ID: ENSP00000483383
MVPEAWRSGLQAPPNTDWRFSQAQRPGTSGSQNGDDTGTWPNNQFDTEMLQAMILASASEAADGSSTLGGGAGTMGLSARYGPQFTLQHVPDYRQNVYIPGSNATLTNAAGKRDGKAPAGGNGNKKKSGKKEKK

SEQ ID NO: 69760 - protein, 242 aa, Homo sapiens
  Payload ID: 13861
  Gene Symbol: PCDHGC3
  Gene Name: protocadherin gamma subfamily C, 3
  ENSP ID: ENSP00000484352
MVPEAWRSGLEMKLEISEAVAPGTRFPLESAHDPDVGSNSLQTYELSRNEYFALRVQTREDSTKYAELVLERALDREREPSLQLVLTALDGGTPALSASLPIHIKVLDANDNAPVFNQSLYRARVLEDAPSGTRVVQVLATDLDEGPNGEIIYSFGSHNRAGVRQLFALDLVTGMLTIKGRLDFEDTKLHEIYIQAKDKGANPEGAHCKVLVEVVDVNDNAPEITVTSVYSPVPEDAPLGTV

SEQ ID NO: 69761 - protein, 938 aa, Homo sapiens
  Payload ID: 13862
  Gene Symbol: PCDHGC4
  Gene Name: protocadherin gamma subfamily C, 4
  Uniprot ID: Q9Y5F7
  ENSP ID: ENSP00000306918
MLRKVRSWTEIWRWATLLFLFYHLGYVCGQIRYPVPEESQEGTFVGNVAQDFLLDTDSLSARRLQVAGEVNQRHFRVDLDSGALLIKNPIDREALCGLSASCIVPLEFVTEGPLEMYRAEVEIVDVNDHAPRFPRQQLDLEIGEAAPPGQRFPLEKAQDADVGSNSISSYRLSSNEHFALDVKKRSDGSLVPELLLEKPLDREKQSDYRLVLTAVDGGNPPRSGTAELRVSVLDVNDNAPAFQQSSYRISVLESAPAGMVLIQLNASDPDLGPSGNVTFYFSGHTPDRVRNLFSLHPTTGKLTLLGPLDFESENYYEFDVRARDGGSPAMEQHCSLRVDLLDVNDNAPYITVTSELGTLPESAEPGTVVALISVQDPDSGSNGDVSLRIPDHLPFALKSAFRNQFSLVTAGPLDREAKSSYDIMVTASDAGNPPLSTHRTIFLNISDVNDNPPSFFQRSHEVFVPENNRPGDLLCSLAASDPDSGLNALISYSLLEPRNRDVSASSFISLNPQTGAVHATRSFDYEQTQTLQFEVQARDRGNPPLSSTVTVRLFVLDLNDNAPAVLRPRARPGSLCPQALPPSVGAGHLITKVTAVDLDSGYNAWVSYQLLEAPDPSLFAVSRYAGEVRTAVPIPADLPPQKLVIVVKDSGSPPLSTSVTLLVSLEEDTHPVVPDLRESSAPREGESRLTLYLAVSLVAICFVSFGSFVALLSKCLRGAACGVTCFPAGTCACLTRSRRREGLPPSNGILRIQLGSDDPIKFVDVGGHSHGCTPLASAPTRSDSFMMVKSPSAPMAGEPVRPSCPPSDLLYGLEQAPPNTDWRFSQAQRPGTSGSQNGDDTGTWPNNQFDTEMLQAMILASASEAADGSSTLGGGAGTMGLSARYGPQFTLQHVPDYRQNVYIPGSNATLTNAAGKRDGKAPAGGNGNKKKSGKKEKK

SEQ ID NO: 69762 - protein, 83 aa, Homo sapiens
  Payload ID: 13862
  Gene Symbol: PCDHGC4
  Gene Name: protocadherin gamma subfamily C, 4
  ENSP ID: ENSP00000478393
MYRAEVEIVDVNDHAPRFPRQQLDLEIGEAAPPGQRFPLEKAQDADVGSNSISSYRLSSNEHFALDVKKRSDGSLVPELLLEK

SEQ ID NO: 69763 - protein, 128 aa, Homo sapiens
  Payload ID: 13862
  Gene Symbol: PCDHGC4
  Gene Name: protocadherin gamma subfamily C, 4
  ENSP ID: ENSP00000478541
MLRKQAPPNTDWRFSQAQRPGTSGSQNGDDTGTWPNNQFDTEMLQAMILASASEAADGSSTLGGGAGTMGLSARYGPQFTLQHVPDYRQNVYIPGSNATLTNAAGKRDGKAPAGGNGNKKKSGKKEKK

SEQ ID NO: 69764 - protein, 871 aa, Homo sapiens
  Payload ID: 13862
  Gene Symbol: PCDHGC4
  Gene Name: protocadherin gamma subfamily C, 4
  Uniprot ID: Q9Y5F7
  ENSP ID: ENSP00000483845
MLRKVRSWTEIWRWATLLFLFYHLGYVCGQIRYPVPEESQEGTFVGNVAQDFLLDTDSLSARRLQVAGEVNQRHFRVDLDSGALLIKNPIDREALCGLSASCIVPLEFVTEGPLEMYRAEVEIVDVNDHAPRFPRQQLDLEIGEAAPPGQRFPLEKAQDADVGSNSISSYRLSSNEHFALDVKKRSDGSLVPELLLEKPLDREKQSDYRLVLTAVDGGNPPRSGTAELRVSVLDVNDNAPAFQQSSYRISVLESAPAGMVLIQLNASDPDLGPSGNVTFYFSGHTPDRVRNLFSLHPTTGKLTLLGPLDFESENYYEFDVRARDGGSPAMEQHCSLRVDLLDVNDNAPYITVTSELGTLPESAEPGTVVALISVQDPDSGSNGDVSLRIPDHLPFALKSAFRNQFSLVTAGPLDREAKSSYDIMVTASDAGNPPLSTHRTIFLNISDVNDNPPSFFQRSHEVFVPENNRPGDLLCSLAASDPDSGLNALISYSLLEPRNRDVSASSFISLNPQTGAVHATRSFDYEQTQTLQFEVQARDRGNPPLSSTVTVRLFVLDLNDNAPAVLRPRARPGSLCPQALPPSVGAGHLITKVTAVDLDSGYNAWVSYQLLEAPDPSLFAVSRYAGEVRTAVPIPADLPPQKLVIVVKDSGSPPLSTSVTLLVSLEEDTHPVVPDLRESSAPREGESRLTLYLAVSLVAICFVSFGSFVALLSKCLRGAACGVTCFPAGTCACLTRSRRREGLPPSNGILRIQLGSDDPIKFVDVGGHSHGCTPLASAPTRSDSFMMVKSPSAPMAGEPVRPSCPPSDLLYGLEVRPLQAQQMLEGYSDPGIWLGHVLESTGLSVSAHSDVTIFVRGNYVVDAVLCNCFVN

SEQ ID NO: 69765 - protein, 944 aa, Homo sapiens
  Payload ID: 13863
  Gene Symbol: PCDHGC5
  Gene Name: protocadherin gamma subfamily C, 5
  Uniprot ID: Q9Y5F6
  ENSP ID: ENSP00000252087
MGPKTLPQLAGKWQVLCMLSLCCWGWVSGQLRYSVVEESEPGTLVGNVAQDLGLKMTDLLSRRLQLGSEENGRYFSLSLMSGALAVNQKIDRESLCGASTSCLLPVQVVTEHPLELIRVEVEILDLNDNSPSFATPEREMRISESAASGARFPLDSAQDPDVGTNTVSFYTLSPNSHFSLNVKTLKDGKPFPELVLEQQLDREAQARHQLVLTAVDGGTPARSGTTLISVIVLDINDNAPTFQSSVLRVGIPENAPIGTLLLRLNATDPDEGTNGQLDYSFGDHTSEAVRNLFGLDPSSGAIHVLGPIDFEESRFYEIHARARDQGQPAMEGHCVIQVDVGDVNDNAPEVLLASLANPVLESTPVGTVVGLFNVRDRDSGRNGEVSLDISPDLPFQIKPSENHYSLLTSQPLDREATSHYIIELLASDAGSPSLHKHLTIRLNISDVNDNAPRFNQQLYTAYILENRPPGSLLCTVAASDPDTGDNARLTYSIVGNQVQGAPASSFVYVNPEDGRIFAQRTFDYELLQMLQIVVGVRDSGSPPLHANTSLHVFVLDENDNAPAVLHPRPDWEHSAPQRLPRSAPPGSLVTKVTAVDADAGHNAWLSYSLLPQSTAPGLFLVSTHTGEVRTARALLEDDSDTQQVVVLVRDNGDPSLSSTATVLLVLEDEDPEEMPKSSDFLIHPPERSDLTLYLIVALATVSLLSLVTFTFLSAKCLQGNADGDGGGGQCCRRQDSPSPDFYKQSSPNLQVSSDGTLKYMEVTLRPTDSQSHCYRTCFSPASDGSDFTFLRPLSVQQPTALALEPDAIRSRSNTLRERSQQAPPNTDWRFSQAQRPGTSGSQNGDDTGTWPNNQFDTEMLQAMILASASEAADGSSTLGGGAGTMGLSARYGPQFTLQHVPDYRQNVYIPGSNATLTNAAGKRDGKAPAGGNGNKKKSGKKEKK

SEQ ID NO: 69766 - protein, 878 aa, Homo sapiens
  Payload ID: 13863
  Gene Symbol: PCDHGC5
  Gene Name: protocadherin gamma subfamily C, 5
  Uniprot ID: Q9Y5F6
  ENSP ID: ENSP00000482569
MGPKTLPQLAGKWQVLCMLSLCCWGWVSGQLRYSVVEESEPGTLVGNVAQDLGLKMTDLLSRRLQLGSEENGRYFSLSLMSGALAVNQKIDRESLCGASTSCLLPVQVVTEHPLELIRVEVEILDLNDNSPSFATPEREMRISESAASGARFPLDSAQDPDVGTNTVSFYTLSPNSHFSLNVKTLKDGKPFPELVLEQQLDREAQARHQLVLTAVDGGTPARSGTTLISVIVLDINDNAPTFQSSVLRVGIPENAPIGTLLLRLNATDPDEGTNGQLDYSFGDHTSEAVRNLFGLDPSSGAIHVLGPIDFEESRFYEIHARARDQGQPAMEGHCVIQVDVGDVNDNAPEVLLASLANPVLESTPVGTVVGLFNVRDRDSGRNGEVSLDISPDLPFQIKPSENHYSLLTSQPLDREATSHYIIELLASDAGSPSLHKHLTIRLNISDVNDNAPRFNQQLYTAYILENRPPGSLLCTVAASDPDTGDNARLTYSIVGNQVQGAPASSFVYVNPEDGRIFAQRTFDYELLQMLQIVVGVRDSGSPPLHANTSLHVFVLDENDNAPAVLHPRPDWEHSAPQRLPRSAPPGSLVTKVTAVDADAGHNAWLSYSLLPQSTAPGLFLVSTHTGEVRTARALLEDDSDTQQVVVLVRDNGDPSLSSTATVLLVLEDEDPEEMPKSSDFLIHPPERSDLTLYLIVALATVSLLSLVTFTFLSAKCLQGNADGDGGGGQCCRRQDSPSPDFYKQSSPNLQVSSDGTLKYMEVTLRPTDSQSHCYRTCFSPASDGSDFTFLRPLSVQQPTALALEPDAIRSRSNTLRERSQVRGSAPPRATPGGGTGEAARPHKGLNLHPLLSGRLGRWLRSTRFSGSLDRLRETRVAD

SEQ ID NO: 69767 - protein, 951 aa, Homo sapiens; identical to SEQ ID NO: 69633
  Payload ID: 13864
  Gene Symbol:
  Gene Name: Protocadherin-20  [Source:UniProtKB/Swiss-Prot
  Acc:Q8N6Y1]
  Uniprot ID: Q8N6Y1
  ENSP ID: ENSP00000386653

SEQ ID NO: 69768 - protein, 1955 aa, Homo sapiens
  Payload ID: 13865
  Gene Symbol: PCDH15
  Gene Name: protocadherin-related 15
  Uniprot ID: Q96QU1
  ENSP ID: ENSP00000322604
MFRQFYLWTCLASGIILGSLFEICLGQYDDDCKLARGGPPATIVAIDEESRNGTILVDNMLIKGTAGGPDPTIELSLKDNVDYWVLMDPVKQMLFLNSTGRVLDRDPPMNIHSIVVQVQCINKKVGTIIYHEVRIVVRDRNDNSPTFKHESYYATVNELTPVGTTIFTGFSGDNGATDIDDGPNGQIEYVIQYNPDDPTSNDTFEIPLMLTGNIVLRKRLNYEDKTRYFVIIQANDRAQNLNERRTTTTTLTVDVLDGDDLGPMFLPCVLVPNTRDCRPLTYQAAIPELRTPEELNPIIVTPPIQAIDQDRNIQPPSDRPGILYSILVGTPEDYPRFFHMHPRTAELSLLEPVNRDFHQKFDLVIKAEQDNGHPLPAFAGLHIEILDENNQSPYFTMPSYQGYILESAPVGATISDSLNLTSPLRIVALDKDIEDTKDPELHLFLNDYTSVFTVTQTGITRYLTLLQPVDREEQQTYTFSITAFDGVQESEPVIVNIQVMDANDNTPTFPEISYDVYVYTDMRPGDSVIQLTAVDADEGSNGEITYEILVGAQGDFIINKTTGLITIAPGVEMIVGRTYALTVQAADNAPPAERRNSICTVYIEVLPPNNQSPPRFPQLMYSLEISEAMRVGAVLLNLQATDREGDSITYAIENGDPQRVFNLSETTGILTLGKALDRESTDRYILIITASDGRPDGTSTATVNIVVTDVNDNAPVFDPYLPRNLSVVEEEANAFVGQVKATDPDAGINGQVHYSLGNFNNLFRITSNGSIYTAVKLNREVRDYYELVVVATDGAVHPRHSTLTLAIKVLDIDDNSPVFTNSTYTVLVEENLPAGTTILQIEAKDVDLGANVSYRIRSPEVKHFFALHPFTGELSLLRSLDYEAFPDQEASITFLVEAFDIYGTMPPGIATVTVIVKDMNDYPPVFSKRIYKGMVAPDAVKGTPITTVYAEDADPPGLPASRVRYRVDDVQFPYPASIFEVEEDSGRVITRVNLNEEPTTIFKLVVVAFDDGEPVMSSSATVKILVLHPGEIPRFTQEEYRPPPVSELATKGTMVGVISAAAINQSIVYSIVSGNEEDTFGINNITGVIYVNGPLDYETRTSYVLRVQADSLEVVLANLRVPSKSNTAKVYIEIQDENNHPPVFQKKFYIGGVSEDARMFTSVLRVKATDKDTGNYSVMAYRLIIPPIKEGKEGFVVETYTGLIKTAMLFHNMRRSYFKFQVIATDDYGKGLSGKADVLVSVVNQLDMQVIVSNVPPTLVEKKIEDLTEILDRYVQEQIPGAKVVVESIGARRHGDAFSLEDYTKCDLTVYAIDPQTNRAIDRNELFKFLDGKLLDINKDFQPYYGEGGRILEIRTPEAVTSIKKRGESLGYTEGALLALAFIIILCCIPAILVVLVSYRQFKVRQAECTKTARIQAALPAAKPAVPAPAPVAAPPPPPPPPPGAHLYEELGDSSILFLLYHFQQSRGNNSVSEDRKHQQVVMPFSSNTIEAHKSAHVDGSLKSNKLKSARKFTFLSDEDDLSAHNPLYKENISQVSTNSDISQRTDFVDPFSPKIQAKSKSLRGPREKIQRLWSQSVSLPRRLMRKVPNRPEIIDLQQWQGTRQKAENENTGICTNKRGSSNPLLTTEEANLTEKEEIRQGETLMIEGTEQLKSLSSDSSFCFPRPHFSFSTLPTVSRTVELKSEPNVISSPAECSLELSPSRPCVLHSSLSRRETPICMLPIETERNIFENFAHPPNISPSACPLPPPPPISPPSPPPAPAPLAPPPDISPFSLFCPPPSPPSIPLPLPPPTFFPLSVSTSGPPTPPLLPPFPTPLPPPPPSIPCPPPPSASFLSTECVCITGVKCTTNLMPAEKIKSSMTQLSTTTVCKTDPQREPKGILRHVKNLAELEKSVANMYSQIEKNYLRTNVSELQTMCPSEVTNMEITSEQNKGSLNNIVEGTEKQSHSQSTSL

SEQ ID NO: 69769 - protein, 1957 aa, Homo sapiens
  Payload ID: 13865
  Gene Symbol: PCDH15
  Gene Name: protocadherin-related 15
  ENSP ID: ENSP00000354950
MFRQFYLWTCLASGIILGSLFEICLGQYDDDCKLARGGPPATIVAIDEESRNGTILVDNMLIKGTAGGPDPTIELSLKDNVDYWVLMDPVKQMLFLNSTGRVLDRDPPMNIHSIVVQVQCINKKVGTIIYHEVRIVVRDRNDNSPTFKHESYYATVNELTPVGTTIFTGFSGDNGATDIDDGPNGQIEYVIQYNPDDPTSNDTFEIPLMLTGNIVLRKRLNYEDKTRYFVIIQANDRAQNLNERRTTTTTLTVDVLDGDDLGPMFLPCVLVPNTRDCRPLTYQAAIPELRTPEELNPIIVTPPIQAIDQDRNIQPPSDRPGILYSILVGTPEDYPRFFHMHPRTAELSLLEPVNRDFHQKFDLVIKAEQDNGHPLPAFAGLHIEILDENNQSPYFTMPSYQGYILESAPVGATISDSLNLTSPLRIVALDKDIEDTKDPELHLFLNDYTSVFTVTQTGITRYLTLLQPVDREEQQTYTFSITAFDGVQESEPVIVNIQVMDANDNTPTFPEISYDVYVYTDMRPGDSVIQLTAVDADEGSNGEITYEILVGAQGDFIINKTTGLITIAPGVEMIVGRTYALTVQAADNAPPAERRNSICTVYIEVLPPNNQSPPRFPQLMYSLEISEAMRVGAVLLNLQATDREGDSITYAIENGDPQRVFNLSETTGILTLGKALDRESTDRYILIITASDGRPDGTSTATVNIVVTDVNDNAPVFDPYLPRNLSVVEEEANAFVGQVKATDPDAGINGQVHYSLGNFNNLFRITSNGSIYTAVKLNREVRDYYELVVVATDGAVHPRHSTLTLAIKVLDIDDNSPVFTNSTYTVLVEENLPAGTTILQIEAKDVDLGANVSYRIRSPEVKHFFALHPFTGELSLLRSLDYEAFPDQEASITFLVEAFDIYGTMPPGIATVTVIVKDMNDYPPVFSKRIYKGMVAPDAVKGTPITTVYAEDADPPGLPASRVRYRVDDVQFPYPASIFEVEEDSGRVITRVNLNEEPTTIFKLVVVAFDDGEPVMSSSATVKILVLHPGEIPRFTQEEYRPPPVSELATKGTMVGVISAAAINQSIVYSIVSGNEEDTFGINNITGVIYVNGPLDYETRTSYVLRVQADSLEVVLANLRVPSKSNTAKVYIEIQDENNHPPVFQKKFYIGGVSEDARMFTSVLRVKATDKDTGNYSVMAYRLIIPPIKEGKEGFVVETYTGLIKTAMLFHNMRRSYFKFQVIATDDYGKGLSGKADVLVSVVNQLDMQVIVSNVPPTLVEKKIEDLTEILDRYVQEQIPGAKVVVESIGARRHGDAFSLEDYTKCDLTVYAIDPQTNRAIDRNELFKFLDGKLLDINKDFQPYYGEGGRILEIRTPEAVTSIKKRGESLGYTEGALLALAFIIILCCIPAILVVLVSYRQFKVRQAECTKTARIQAALPAAKPAVPAPAPVAAPPPPPPPPPGAHLYEELGDSSMHNLFLLYHFQQSRGNNSVSEDRKHQQVVMPFSSNTIEAHKSAHVDGSLKSNKLKSARKFTFLSDEDDLSAHNPLYKENISQVSTNSDISQRTDFVDPFSPKIQAKSKSLRGPREKIQRLWSQSVSLPRRLMRKVPNRPEIIDLQQWQGTRQKAENENTGICTNKRGSSNPLLTTEEANLTEKEEIRQGETLMIEGTEQLKSLSSDSSFCFPRPHFSFSTLPTVSRTVELKSEPNVISSPAECSLELSPSRPCVLHSSLSRRETPICMLPIETERNIFENFAHPPNISPSACPLPPPPPISPPSPPPAPAPLAPPPDISPFSLFCPPPSPPSIPLPLPPPTFFPLSVSTSGPPTPPLLPPFPTPLPPPPPSIPCPPPPSASFLSTECVCITGVKCTTNLMPAEKIKSSMTQLSTTTVCKTDPQREPKGILRHVKNLAELEKSVANMYSQIEKNYLRTNVSELQTMCPSEVTNMEITSEQNKGSLNNIVEGTEKQSHSQSTSL

SEQ ID NO: 69770 - protein, 961 aa, Homo sapiens
  Payload ID: 13865
  Gene Symbol: PCDH15
  Gene Name: protocadherin-related 15
  Uniprot ID: Q96QU1
  ENSP ID: ENSP00000363066
MFRQFYLWTCLASGIILGSLFEICLGQYDDDCKLARGGPPATIVAIDEESRNGTILVDNMLIKGTAGGPDPTIELSLKDNVDYWVLMDPVKQMLFLNSTGRVLDRDPPMNIHSIVVQVQCINKKVGTIIYHEVRIVVRDRNDNSPTFKHESYYATVNELTPVGTTIFTGFSGDNGATDIDDGPNGQIEYVIQYNPDDPTSNDTFEIPLMLTGNIVLRKRLNYEDKTRYFVIIQANDRAQNLNERRTTTTTLTVDVLDGDDLGPMFLPCVLVPNTRDCRPLTYQAAIPELRTPEELNPIIVTPPIQAIDQDRNIQPPSDRPGILYSILVGTPEDYPRFFHMHPRTAELSLLEPVNRDFHQKFDLVIKAEQDNGHPLPAFAGLHIEILDENNQSPYFTMPSYQGYILESAPVGATISDSLNLTSPLRIVALDKDIEDTKDPELHLFLNDYTSVFTVTQTGITRYLTLLQPVDREEQQTYTFSITAFDGVQESEPVIVNIQVMDANDNTPTFPEISYDVYVYTDMRPGDSVIQLTAVDADEGSNGEITYEILVGAQGDFIINKTTGLITIAPGVEMIVGRTYALTVQAADNAPPAERRNSICTVYIEVLPPNNQSPPRFPQLMYSLEISEAMRVGAVLLNLQATDREGDSITYAIENGDPQRVFNLSETTGILTLGKALDRESTDRYILIITASDGRPDGTSTATVNIVVTDVNDNAPVFDPYLPRNLSVVEEEANAFVGQVKATDPDAGINGQVHYSLGNFNNLFRITSNGSIYTAVKLNREVRDYYELVVVATDGAVHPRHSTLTLAIKVLDIDDNSPVFTNSTYTVLVEENLPAGTTILQIEAKDVDLGANVSYRIRSPEVKHFFALHPFTGELSLLRSLDYEAFPDQEASITFLVEAFDIYGTMPPGIATVTVIVKDMNDYPPVFSKRIYKGMVAPDAVKGTPITTVYAEDADPPVSRRH

SEQ ID NO: 69771 - protein, 654 aa, Homo sapiens
  Payload ID: 13865
  Gene Symbol: PCDH15
  Gene Name: protocadherin-related 15
  ENSP ID: ENSP00000363067
MFRQFYLWTCLASGIILGSLFEICLGQYDDDCKLARGGPPATIVAIDEESRNGTILVDNMLIKGTAGGPDPTIELSLKDNVDYWVLMDPVKQMLFLNSTGRVLDRDPPMNIHSIVVQVQCINKKVGTIIYHEVRIVVRDRNDNSPTFKHESYYATVNELTPVGTTIFTGFSGDNGATDIDDGPNGQIEYVIQYNPDDPTSNDTFEIPLMLTGNIVLRKRLNYEDKTRYFVIIQANDRAQNLNERRTTTTTLTVDVLDGDDLGPMFLPCVLVPNTRDCRPLTYQAAIPELRTPEELNPIIVTPPIQAIDQDRNIQPPSDRPGILYSILVGTPEDYPRFFHMHPRTAELSLLEPVNRDFHQKFDLVIKAEQDNGHPLPAFAGLHIEILDENNQSPYFTMPSYQGYILESAPVGATISDSLNLTSPLRIVALDKDIEDTKDPELHLFLNDYTSVFTVTQTGITRYLTLLQPVDREEQQTYTFSITAFDGVQESEPVIVNIQVMDANDNTPTFPEISYDVYVYTDMRPGDSVIQLTAVDADEGSNGEITYEILVGAQGDFIINKTTGLITIAPGVEMIVGRTYALTVQAADNAPPAERRNSICTVYIEVLPPNNQSPPRFPQLMYSLEISEAMRVGAVLLNLQHGDSNLRESTGQGKH

SEQ ID NO: 69772 - protein, 1962 aa, Homo sapiens
  Payload ID: 13865
  Gene Symbol: PCDH15
  Gene Name: protocadherin-related 15
  ENSP ID: ENSP00000363068
MFRQFYLWTCLASGIILGSLFEICLGQYDDDWQYEDCKLARGGPPATIVAIDEESRNGTILVDNMLIKGTAGGPDPTIELSLKDNVDYWVLMDPVKQMLFLNSTGRVLDRDPPMNIHSIVVQVQCINKKVGTIIYHEVRIVVRDRNDNSPTFKHESYYATVNELTPVGTTIFTGFSGDNGATDIDDGPNGQIEYVIQYNPDDPTSNDTFEIPLMLTGNIVLRKRLNYEDKTRYFVIIQANDRAQNLNERRTTTTTLTVDVLDGDDLGPMFLPCVLVPNTRDCRPLTYQAAIPELRTPEELNPIIVTPPIQAIDQDRNIQPPSDRPGILYSILVGTPEDYPRFFHMHPRTAELSLLEPVNRDFHQKFDLVIKAEQDNGHPLPAFAGLHIEILDENNQSPYFTMPSYQGYILESAPVGATISDSLNLTSPLRIVALDKDIEDTKDPELHLFLNDYTSVFTVTQTGITRYLTLLQPVDREEQQTYTFSITAFDGVQESEPVIVNIQVMDANDNTPTFPEISYDVYVYTDMRPGDSVIQLTAVDADEGSNGEITYEILVGAQGDFIINKTTGLITIAPGVEMIVGRTYALTVQAADNAPPAERRNSICTVYIEVLPPNNQSPPRFPQLMYSLEISEAMRVGAVLLNLQATDREGDSITYAIENGDPQRVFNLSETTGILTLGKALDRESTDRYILIITASDGRPDGTSTATVNIVVTDVNDNAPVFDPYLPRNLSVVEEEANAFVGQVKATDPDAGINGQVHYSLGNFNNLFRITSNGSIYTAVKLNREVRDYYELVVVATDGAVHPRHSTLTLAIKVLDIDDNSPVFTNSTYTVLVEENLPAGTTILQIEAKDVDLGANVSYRIRSPEVKHFFALHPFTGELSLLRSLDYEAFPDQEASITFLVEAFDIYGTMPPGIATVTVIVKDMNDYPPVFSKRIYKGMVAPDAVKGTPITTVYAEDADPPGLPASRVRYRVDDVQFPYPASIFEVEEDSGRVITRVNLNEEPTTIFKLVVVAFDDGEPVMSSSATVKILVLHPGEIPRFTQEEYRPPPVSELATKGTMVGVISAAAINQSIVYSIVSGNEEDTFGINNITGVIYVNGPLDYETRTSYVLRVQADSLEVVLANLRVPSKSNTAKVYIEIQDENNHPPVFQKKFYIGGVSEDARMFTSVLRVKATDKDTGNYSVMAYRLIIPPIKEGKEGFVVETYTGLIKTAMLFHNMRRSYFKFQVIATDDYGKGLSGKADVLVSVVNQLDMQVIVSNVPPTLVEKKIEDLTEILDRYVQEQIPGAKVVVESIGARRHGDAFSLEDYTKCDLTVYAIDPQTNRAIDRNELFKFLDGKLLDINKDFQPYYGEGGRILEIRTPEAVTSIKKRGESLGYTEGALLALAFIIILCCIPAILVVLVSYRQFKVRQAECTKTARIQAALPAAKPAVPAPAPVAAPPPPPPPPPGAHLYEELGDSSMHNLFLLYHFQQSRGNNSVSEDRKHQQVVMPFSSNTIEAHKSAHVDGSLKSNKLKSARKFTFLSDEDDLSAHNPLYKENISQVSTNSDISQRTDFVDPFSPKIQAKSKSLRGPREKIQRLWSQSVSLPRRLMRKVPNRPEIIDLQQWQGTRQKAENENTGICTNKRGSSNPLLTTEEANLTEKEEIRQGETLMIEGTEQLKSLSSDSSFCFPRPHFSFSTLPTVSRTVELKSEPNVISSPAECSLELSPSRPCVLHSSLSRRETPICMLPIETERNIFENFAHPPNISPSACPLPPPPPISPPSPPPAPAPLAPPPDISPFSLFCPPPSPPSIPLPLPPPTFFPLSVSTSGPPTPPLLPPFPTPLPPPPPSIPCPPPPSASFLSTECVCITGVKCTTNLMPAEKIKSSMTQLSTTTVCKTDPQREPKGILRHVKNLAELEKSVANMYSQIEKNYLRTNVSELQTMCPSEVTNMEITSEQNKGSLNNIVEGTEKQSHSQSTSL

SEQ ID NO: 69773 - protein, 1677 aa, Homo sapiens
  Payload ID: 13865
  Gene Symbol: PCDH15
  Gene Name: protocadherin-related 15
  ENSP ID: ENSP00000363076
MFRQFYLWTCLASGIILGSLFEICLGQYDDDCKLARGGPPATIVAIDEESRNGTILVDNMLIKGTAGGPDPTIELSLKDNVDYWVLMDPVKQMLFLNSTGRVLDRDPPMNIHSIVVQVQCINKKVGTIIYHEVRIVVRDRNDNSPTFKHESYYATVNELTPVGTTIFTGFSGDNGATDIDDGPNGQIEYVIQYNPDDPTSNDTFEIPLMLTGNIVLRKRLNYEDKTRYFVIIQANDRAQNLNERRTTTTTLTVDVLDGDDLGPMFLPCVLVPNTRDCRPLTYQAAIPELRTPEELNPIIVTPPIQAIDQDRNIQPPSDRPGILYSILVGTPEDYPRFFHMHPRTAELSLLEPVNRDFHQKFDLVIKAEQDNGHPLPAFAGLHIEILDENNQSPYFTMPSYQGYILESAPVGATISDSLNLTSPLRIVALDKDIEDTKDPELHLFLNDYTSVFTVTQTGITRYLTLLQPVDREEQQTYTFSITAFDGVQESEPVIVNIQVMDANDNTPTFPEISYDVYVYTDMRPGDSVIQLTAVDADEGSNGEITYEILVGAQGDFIINKTTGLITIAPGVEMIVGRTYALTVQAADNAPPAERRNSICTVYIEVLPPNNQSPPRFPQLMYSLEISEAMRVGAVLLNLQATDREGDSITYAIENGDPQRVFNLSETTGILTLGKALDRESTDRYILIITASDGRPDGTSTATVNIVVTDVNDNAPVFDPYLPRNLSVVEEEANAFVGQVKATDPDAGINGQVHYSLGNFNNLFRITSNGSIYTAVKLNREVRDYYELVVVATDGAVHPRHSTLTLAIKVLDIDDNSPVFTNSTYTVLVEENLPAGTTILQIEAKDVDLGANVSYRIRSPEVKHFFALHPFTGELSLLRSLDYEAFPDQEASITFLVEAFDIYGTMPPGIATVTVIVKDMNDYPPVFSKRIYKGMVAPDAVKGTPITTVYAEDADPPGLPASRVRYRVDDVQFPYPASIFEVEEDSGRVITRVNLNEEPTTIFKLVVVAFDDGEPVMSSSATVKILVLHPGEIPRFTQEEYRPPPVSELATKGTMVGVISAAAINQSIVYSIVSGNEEDTFGINNITGVIYVNGPLDYETRTSYVLRVQADSLEVVLANLRVPSKSNTAKVYIEIQDENNHPPVFQKKFYIGGVSEDARMFTSVLRVKATDKDTGNYSVMAYRLIIPPIKEGKEGFVVETYTGLIKTAMLFHNMRRSYFKFQVIATDDYGKGLSGKADVLVSVVNQLDMQVIVSNVPPTLVEKKIEDLTEILDRYVQEQIPGAKVVVESIGARRHGDAFSLEDYTKCDLTVYAIDPQTNRAIDRNELFKFLDGKLLDINKDFQPYYGEGGRILEIRTPEAVTSIKKRGESLGYTEGALLALAFIIILCCIPAILVVLVSYRQFKVRQAECTKTARIQAALPAAKPAVPAPAPVAAPPPPPPPPPGAHLYEELGDSSMHKYEMPQYGSRRRLLPPAGQEEYGEVVGEAEEEYEEEEWARKRMIKLVVDREYETSSTGEDSAPECQRNRLHHPSIHSNINGNIYIAQNGSVVRTRRACLTDNLKVASPVRLGGPFKKLDKLAVTHEENVPLNTLSKGPFSTEKMNARPTLVTFAPCPVGTDNTAVKPLRNRLKSTVEQESMIDSKNIKEALEFHSDHTQSDDEELWMGPWNNLHIPMTKL

SEQ ID NO: 69774 - protein, 1952 aa, Homo sapiens
  Payload ID: 13865
  Gene Symbol: PCDH15
  Gene Name: protocadherin-related 15
  ENSP ID: ENSP00000378818
MFRQFYLWTCLASGIILGSLFEICLGQYDDDCKLARGGPPATIVAIDEESRNGTILVDNMLIKGTAGGPDPTIELSLKDNVDYWVLMDPVKQMLFLNSTGRVLDRDPPMNIHSIVVQVQCINKKVGTIIYHEVRIVVRDRNDNSPTFKHESYYATVNELTPVGTTIFTGFSGDNGATDIDDGPNGQIEYVIQYNPDDPTSNDTFEIPLMLTGNIVLRKRLNYEDKTRYFVIIQANDRAQNLNERRTTTTTLTVDVLDGDDLGPMFLPCVLVPNTRDCRPLTYQAAIPELRTPEELNPIIVTPPIQAIDQDRNIQPPSDRPGILYSILVGTPEDYPRFFHMHPRTAELSLLEPVNRDFHQKFDLVIKAEQDNGHPLPAFAGLHIEILDENNQSPYFTMPSYQGYILESAPVGATISDSLNLTSPLRIVALDKDIEDTKDPELHLFLNDYTSVFTVTQTGITRYLTLLQPVDREEQQTYTFSITAFDGVQESEPVIVNIQVMDANDNTPTFPEISYDVYVYTDMRPGDSVIQLTAVDADEGSNGEITYEILVGAQGDFIINKTTGLITIAPGVEMIVGRTYALTVQAADNAPPAERRNSICTVYIEVLPPNNQSPPRFPQLMYSLEISEAMRVGAVLLNLQATDREGDSITYAIENGDPQRVFNLSETTGILTLGKALDRESTDRYILIITASDGRPDGTSTATVNIVVTDVNDNAPVFDPYLPRNLSVVEEEANAFVGQVKATDPDAGINGQVHYSLGNFNNLFRITSNGSIYTAVKLNREVRDYYELVVVATDGAVHPRHSTLTLAIKVLDIDDNSPVFTNSTYTVLVEENLPAGTTILQIEAKDVDLGANVSYRIRSPEVKHFFALHPFTGELSLLRSLDYEAFPDQEASITFLVEAFDIYGTMPPGIATVTVIVKDMNDYPPVFSKRIYKGMVAPDAVKGTPITTVYAEDADPPGLPASRVRYRVDDVQFPYPASIFEVEEDSGRVITRVNLNEEPTTIFKLVVVAFDDGEPVMSSSATVKILVLHPGEIPRFTQEEYRPPPVSELATKGTMVGVISAAAINQSIVYSIVSGNEEDTFGINNITGVIYVNGPLDYETRTSYVLRVQADSLEVVLANLRVPSKSNTAKVYIEIQDENNHPPVFQKKFYIGGVSEDARMFTSVLRVKATDKDTGNYSVMAYRLIIPPIKEGKEGFVVETYTGLIKTAMLFHNMRRSYFKFQVIATDDYGKGLSGKADVLVSVVNQLDMQVIVSNVPPTLVEKKIEDLTEILDRYVQEQIPGAKVVVESIGARRHGDAFSLEDYTKCDLTVYAIDPQTNRAIDRNELFKFLDGKLLDINKDFQPYYGEGGRILEIRTPEAVTSIKKRGESLGYTEGALLALAFIIILCCIPAILVVLVSYRQRQAECTKTARIQAALPAAKPAVPAPAPVAAPPPPPPPPPGAHLYEELGDSSILFLLYHFQQSRGNNSVSEDRKHQQVVMPFSSNTIEAHKSAHVDGSLKSNKLKSARKFTFLSDEDDLSAHNPLYKENISQVSTNSDISQRTDFVDPFSPKIQAKSKSLRGPREKIQRLWSQSVSLPRRLMRKVPNRPEIIDLQQWQGTRQKAENENTGICTNKRGSSNPLLTTEEANLTEKEEIRQGETLMIEGTEQLKSLSSDSSFCFPRPHFSFSTLPTVSRTVELKSEPNVISSPAECSLELSPSRPCVLHSSLSRRETPICMLPIETERNIFENFAHPPNISPSACPLPPPPPISPPSPPPAPAPLAPPPDISPFSLFCPPPSPPSIPLPLPPPTFFPLSVSTSGPPTPPLLPPFPTPLPPPPPSIPCPPPPSASFLSTECVCITGVKCTTNLMPAEKIKSSMTQLSTTTVCKTDPQREPKGILRHVKNLAELEKSVANMYSQIEKNYLRTNVSELQTMCPSEVTNMEITSEQNKGSLNNIVEGTEKQSHSQSTSL

SEQ ID NO: 69775 - protein, 1915 aa, Homo sapiens
  Payload ID: 13865
  Gene Symbol: PCDH15
  Gene Name: protocadherin-related 15
  ENSP ID: ENSP00000378820
MFRQFYLWTCLASGIILGSLFEICLGQYDDDCKLARGGPPATIVAIDEESRNGTILVDNMLIKGTAGGPDPTIELSLKDNVDYWVLMDPVKQMLFLNSTGRVLDRDPPMNIHSIVVQVQCINKKVGTIIYHEVRIVVRDRNDNSPTFKHESYYATVNELTPVGTTIFTGFSGDNGATDIDDGPNGQIEYVIQYNPDDPDRAQNLNERRTTTTTLTVDVLDGDDLGPMFLPCVLVPNTRDCRPLTYQAAIPELRTPEELNPIIVTPPIQAIDQDRNIQPPSDRPGILYSILVGTPEDYPRFFHMHPRTAELSLLEPVNRDFHQKFDLVIKAEQDNGHPLPAFAGLHIEILDENNQSPYFTMPSYQGYILESAPVGATISDSLNLTSPLRIVALDKDIEDTKDPELHLFLNDYTSVFTVTQTGITRYLTLLQPVDREEQQTYTFSITAFDGVQESEPVIVNIQVMDANDNTPTFPEISYDVYVYTDMRPGDSVIQLTAVDADEGSNGEITYEILVGAQGDFIINKTTGLITIAPGVEMIVGRTYALTVQAADNAPPAERRNSICTVYIEVLPPNNQSPPRFPQLMYSLEISEAMRVGAVLLNLQATDREGDSITYAIENGDPQRVFNLSETTGILTLGKALDRESTDRYILIITASDGRPDGTSTATVNIVVTDVNDNAPVFDPYLPRNLSVVEEEANAFVGQVKATDPDAGINGQVHYSLGNFNNLFRITSNGSIYTAVKLNREVRDYYELVVVATDGAVHPRHSTLTLAIKVLDIDDNSPVFTNSTYTVLVEENLPAGTTILQIEAKDVDLGANVSYRIRSPEVKHFFALHPFTGELSLLRSLDYEAFPDQEASITFLVEAFDIYGTMPPGIATVTVIVKDMNDYPPVFSKRIYKGMVAPDAVKGTPITTVYAEDADPPGLPASRVRYRVDDVQFPYPASIFEVEEDSGRVITRVNLNEEPTTIFKLVVVAFDDGEPVMSSSATVKILVLHPGEIPRFTQEEYRPPPVSELATKGTMVGVISAAAINQSIVYSIVSGNEEDTFGINNITGVIYVNGPLDYETRTSYVLRVQADSLEVVLANLRVPSKSNTAKVYIEIQDENNHPPVFQKKFYIGGVSEDARMFTSVLRVKATDKDTGNYSVMAYRLIIPPIKEGKEGFVVETYTGLIKTAMLFHNMRRSYFKFQVIATDDYGKGLSGKADVLVSVVNQLDMQVIVSNVPPTLVEKKIEDLTEILDRYVQEQIPGAKVVVESIGARRHGDAFSLEDYTKCDLTVYAIDPQTNRAIDRNELFKFLDGKLLDINKDFQPYYGEGGRILEIRTPEAVTSIKKRGESLGYTEGALLALAFIIILCCIPAILVVLVSYRQRQAECTKTARIQAALPAAKPAVPAPAPVAAPPPPPPPPPGAHLYEELGDSSILFLLYHFQQSRGNNSVSEDRKHQQVVMPFSSNTIEAHKSAHVDGSLKSNKLKSARKFTFLSDEDDLSAHNPLYKENISQVSTNSDISQRTDFVDPFSPKIQAKSKSLRGPREKIQRLWSQSVSLPRRLMRKVPNRPEIIDLQQWQGTRQKAENENTGICTNKRGSSNPLLTTEEANLTEKEEIRQGETLMIEGTEQLKSLSSDSSFCFPRPHFSFSTLPTVSRTVELKSEPNVISSPAECSLELSPSRPCVLHSSLSRRETPICMLPIETERNIFENFAHPPNISPSACPLPPPPPISPPSPPPAPAPLAPPPDISPFSLFCPPPSPPSIPLPLPPPTFFPLSVSTSGPPTPPLLPPFPTPLPPPPPSIPCPPPPSASFLSTECVCITGVKCTTNLMPAEKIKSSMTQLSTTTVCKTDPQREPKGILRHVKNLAELEKSVANMYSQIEKNYLRTNVSELQTMCPSEVTNMEITSEQNKGSLNNIVEGTEKQSHSQSTSL

SEQ ID NO: 69776 - protein, 1932 aa, Homo sapiens
  Payload ID: 13865
  Gene Symbol: PCDH15
  Gene Name: protocadherin-related 15
  ENSP ID: ENSP00000378821
MFRQFYLWTCLASGIILGSLFEICLGQYDDGTILVDNMLIKGTAGGPDPTIELSLKDNVDYWVLMDPVKQMLFLNSTGRVLDRDPPMNIHSIVVQVQCINKKVGTIIYHEVRIVVRDRNDNSPTFKHESYYATVNELTPVGTTIFTGFSGDNGATDIDDGPNGQIEYVIQYNPDDPTSNDTFEIPLMLTGNIVLRKRLNYEDKTRYFVIIQANDRAQNLNERRTTTTTLTVDVLDGDDLGPMFLPCVLVPNTRDCRPLTYQAAIPELRTPEELNPIIVTPPIQAIDQDRNIQPPSDRPGILYSILVGTPEDYPRFFHMHPRTAELSLLEPVNRDFHQKFDLVIKAEQDNGHPLPAFAGLHIEILDENNQSPYFTMPSYQGYILESAPVGATISDSLNLTSPLRIVALDKDIEDTKDPELHLFLNDYTSVFTVTQTGITRYLTLLQPVDREEQQTYTFSITAFDGVQESEPVIVNIQVMDANDNTPTFPEISYDVYVYTDMRPGDSVIQLTAVDADEGSNGEITYEILVGAQGDFIINKTTGLITIAPGVEMIVGRTYALTVQAADNAPPAERRNSICTVYIEVLPPNNQSPPRFPQLMYSLEISEAMRVGAVLLNLQATDREGDSITYAIENGDPQRVFNLSETTGILTLGKALDRESTDRYILIITASDGRPDGTSTATVNIVVTDVNDNAPVFDPYLPRNLSVVEEEANAFVGQVKATDPDAGINGQVHYSLGNFNNLFRITSNGSIYTAVKLNREVRDYYELVVVATDGAVHPRHSTLTLAIKVLDIDDNSPVFTNSTYTVLVEENLPAGTTILQIEAKDVDLGANVSYRIRSPEVKHFFALHPFTGELSLLRSLDYEAFPDQEASITFLVEAFDIYGTMPPGIATVTVIVKDMNDYPPVFSKRIYKGMVAPDAVKGTPITTVYAEDADPPGLPASRVRYRVDDVQFPYPASIFEVEEDSGRVITRVNLNEEPTTIFKLVVVAFDDGEPVMSSSATVKILVLHPGEIPRFTQEEYRPPPVSELATKGTMVGVISAAAINQSIVYSIVSGNEEDTFGINNITGVIYVNGPLDYETRTSYVLRVQADSLEVVLANLRVPSKSNTAKVYIEIQDENNHPPVFQKKFYIGGVSEDARMFTSVLRVKATDKDTGNYSVMAYRLIIPPIKEGKEGFVVETYTGLIKTAMLFHNMRRSYFKFQVIATDDYGKGLSGKADVLVSVVNQLDMQVIVSNVPPTLVEKKIEDLTEILDRYVQEQIPGAKVVVESIGARRHGDAFSLEDYTKCDLTVYAIDPQTNRAIDRNELFKFLDGKLLDINKDFQPYYGEGGRILEIRTPEAVTSIKKRGESLGYTEGALLALAFIIILCCIPAILVVLVSYRQRQAECTKTARIQAALPAAKPAVPAPAPVAAPPPPPPPPPGAHLYEELGDSSMHNLFLLYHFQQSRGNNSVSEDRKHQQVVMPFSSNTIEAHKSAHVDGSLKSNKLKSARKFTFLSDEDDLSAHNPLYKENISQVSTNSDISQRTDFVDPFSPKIQAKSKSLRGPREKIQRLWSQSVSLPRRLMRKVPNRPEIIDLQQWQGTRQKAENENTGICTNKRGSSNPLLTTEEANLTEKEEIRQGETLMIEGTEQLKSLSSDSSFCFPRPHFSFSTLPTVSRTVELKSEPNVISSPAECSLELSPSRPCVLHSSLSRRETPICMLPIETERNIFENFAHPPNISPSACPLPPPPPISPPSPPPAPAPLAPPPDISPFSLFCPPPSPPSIPLPLPPPTFFPLSVSTSGPPTPPLLPPFPTPLPPPPPSIPCPPPPSASFLSTECVCITGVKCTTNLMPAEKIKSSMTQLSTTTVCKTDPQREPKGILRHVKNLAELEKSVANMYSQIEKNYLRTNVSELQTMCPSEVTNMEITSEQNKGSLNNIVEGTEKQSHSQSTSL

SEQ ID NO: 69777 - protein, 1540 aa, Homo sapiens
  Payload ID: 13865
  Gene Symbol: PCDH15
  Gene Name: protocadherin-related 15
  ENSP ID: ENSP00000378826
MFRQFYLWTCLASGIILGSLFEICLGQYDDDCKLARGGPPATIVAIDEESRNGTILVDNMLIKGTAGGPDPTIELSLKDNVDYWVLMDPVKQMLFLNSTGRVLDRDPPMNIHSIVVQVQCINKKVGTIIYHEVRIVVRDRNDNSPTFKHESYYATVNELTPVGTTIFTGFSGDNGATDIDDGPNGQIEYVIQYNPDDPTSNDTFEIPLMLTGNIVLRKRLNYEDKTRYFVIIQANDRAQNLNERRTTTTTLTVDVLDGDDLGPMFLPCVLVPNTRDCRPLTYQAAIPELRTPEELNPIIVTPPIQAIDQDRNIQPPSDRPGILYSILVGTPEDYPRFFHMHPRTAELSLLEPVNRDFHQKFDLVIKAEQDNGHPLPAFAGLHIEILDENNQSPYFTMPSYQGYILESAPVGATISDSLNLTSPLRIVALDKDIEDTKDPELHLFLNDYTSVFTVTQTGITRYLTLLQPVDREEQQTYTFSITAFDGVQESEPVIVNIQVMDANDNTPTFPEISYDVYVYTDMRPGDSVIQLTAVDADEGSNGEITYEILVGAQGDFIINKTTGLITIAPGVEMIVGRTYALTVQAADNAPPAERRNSICTVYIEVLPPNNQSPPRFPQLMYSLEISEAMRVGAVLLNLQATDREGDSITYAIENGDPQRVFNLSETTGILTLGKALDRESTDRYILIITASDGRPDGTSTATVNIVVTDVNDNAPVFDPYLPRNLSVVEEEANAFVGQVKATDPDAGINGQVHYSLGNFNNLFRITSNGSIYTAVKLNREVRDYYELVVVATDGAVHPRHSTLTLAIKVLDIDDNSPVFTNSTYTVLVEENLPAGTTILQIEAKDVDLGANVSYRIRSPEVKHFFALHPFTGELSLLRSLDYEAFPDQEASITFLVEAFDIYGTMPPGIATVTVIVKDMNDYPPVFSKRIYKGMVAPDAVKGTPITTVYAEDADPPGLPASRVRYRVDDVQFPYPASIFEVEEDSGRVITRVNLNEEPTTIFKLVVVAFDDGEPVMSSSATVKILVLHPGEIPRFTQEEYRPPPVSELATKGTMVGVISAAAINQSIVYSIVSGNEEDTFGINNITGVIYVNGPLDYETRTSYVLRVQADSLEVVLANLRVPSKSNTAKVYIEIQDENNHPPVFQKKFYIGGVSEDARMFTSVLRVKATDKDTGNYSVMAYRLIIPPIKEGKEGFVVETYTGLIKTAMLFHNMRRSYFKFQVIATDDYGKGLSGKADVLVSVVNQLDMQVIVSNVPPTLVEKKIEDLTEILDRYVQEQIPGAKVVVESIGARRHGDAFSLEDYTKCDLTVYAIDPQTNRAIDRNELFKFLDGKLLDINKDFQPYYGEGGRILEIRTPEAVTSIKKRGESLGYTEGALLALAFIIILCCIPAILVVLVSYRQVFKGRQAECTKTARIQAALPAAKPAVPAPAPVAAPPPPPPPPPGAHLYEELGDSSMNRNYPWSLELILARNMDKIITVMSMGMKCLNMGVAVDCYHQLDRRNMVRWLVKLRKNMRRKRKSQRKLKNQRLKLESLVRRKK

SEQ ID NO: 69778 - protein, 719 aa, Homo sapiens
  Payload ID: 13865
  Gene Symbol: PCDH15
  Gene Name: protocadherin-related 15
  ENSP ID: ENSP00000378827
MFRQFYLWTCLASGIILGSLFEICLGQYDDDCKLARGGPPATIVAIDEESRNGTILVDNMLIKGTAGGPDPTIELSLKDNVDYWVLMDPVKQMLFLNSTGRVLDRDPPMNIHSIVVQVQCINKKVGTIIYHEVRIVVRDRNDNSPTFKHESYYATVNELTPVGTTIFTGFSGDNGATDIDDGPNGQIEYVIQYNPDDPTSNDTFEIPLMLTGNIVLRKRLNYEDKTRYFVIIQANDRAQNLNERRTTTTTLTVDVLDGDDLGPMFLPCVLVPNTRDCRPLTYQAAIPELRTPEELNPIIVTPPIQAIDQDRNIQPPSDRPGILYSILVGTPEDYPRFFHMHPRTAELSLLEPVNRDFHQKFDLVIKAEQDNGHPLPAFAGLHIEILDENNQSPYFTMPSYQGYILESAPVGATISDSLNLTSPLRIVALDKDIEDEEPKKIKKPKVEIREPSEEEEVVVTIEKPPAAEPTYTTWKRARIFPMIFKKVRGLADKRGIVDLEGEEWQRRLEEEDKDYLKLTLDQEEATESTVESEEESSSDYTEYSEEESEFSESETTEEESESETPSEEEESSTPESEESESTESEGEKARKNIVLARRRPMVEEVKEVKGRKEEPQEEQKEPKMEEEEHSEEEESGPAPVEESTDPEAQDIPEEGSAESASVEGGVESEEESESGSSSSSSESQSGGPWGYQVPAYDRSKNANQKKSPGANSEGYNTAL

SEQ ID NO: 69779 - protein, 650 aa, Homo sapiens
  Payload ID: 13865
  Gene Symbol: PCDH15
  Gene Name: protocadherin-related 15
  ENSP ID: ENSP00000378829
MFRQFYLWTCLASGIILGSLFEICLGQYDDDCKLARGGPPATIVAIDEESRNGTILVDNMLIKGTAGGPDPTIELSLKDNVDYWVLMDPVKQMLFLNSTGRVLDRDPPMNIHSIVVQVQCINKKVGTIIYHEVRIVVRDRNDNSPTFKHESYYATVNELTPVGTTIFTGFSGDNGATDIDDGPNGQIEYVIQYNPDDPTSNDTFEIPLMLTGNIVLRKRLNYEDKTRYFVIIQANDRAQNLNERRTTTTTLTVDVLDGDDLGPMFLPCVLVPNTRDCRPLTYQAAIPELRTPEELNPIIVTPPIQAIDQDRNIQPPSDRPGILYSILVGTPEDYPRFFHMHPRTAELSLLEPVNRDFHQKFDLVIKEEPKKIKKPKVEIREPSEEEEVVVTIEKPPAAEPTYTTWKRARIFPMIFKKVRGLADKRGIVDLEGEEWQRRLEEEDKDYLKLTLDQEEATESTVESEEESSSDYTEYSEEESEFSESETTEEESESETPSEEEESSTPESEESESTESEGEKARKNIVLARRRPMVEEVKEVKGRKEEPQEEQKEPKMEEEEHSEEEESGPAPVEESTDPEAQDIPEEGSAESASVEGGVESEEESESGSSSSSSESQSGGPWGYQVPAYDRSKNANQKKSPGANSEGYNTAL

SEQ ID NO: 69780 - protein, 1783 aa, Homo sapiens
  Payload ID: 13865
  Gene Symbol: PCDH15
  Gene Name: protocadherin-related 15
  Uniprot ID: Q96QU1
  ENSP ID: ENSP00000378832
MFRQFYLWTCLASGIILGSLFEICLGQYDDDCKLARGGPPATIVAIDEESRNGTILVDNMLIKGTAGGPDPTIELSLKDNVDYWVLMDPVKQMLFLNSTGRVLDRDPPMNIHSIVVQVQCINKKVGTIIYHEVRIVVRDRNDNSPTFKHESYYATVNELTPVGTTIFTGFSGDNGATDIDDGPNGQIEYVIQYNPDDPTSNDTFEIPLMLTGNIVLRKRLNYEDKTRYFVIIQANDRAQNLNERRTTTTTLTVDVLDGDDLGPMFLPCVLVPNTRDCRPLTYQAAIPELRTPEELNPIIVTPPIQAIDQDRNIQPPSDRPGILYSILVGTPEDYPRFFHMHPRTAELSLLEPVNRDFHQKFDLVIKAEQDNGHPLPAFAGLHIEILDENNQSPYFTMPSYQGYILESAPVGATISDSLNLTSPLRIVALDKDIEDVPPSGVPTKDPELHLFLNDYTSVFTVTQTGITRYLTLLQPVDREEQQTYTFSITAFDGVQESEPVIVNIQVMDANDNTPTFPEISYDVYVYTDMRPGDSVIQLTAVDADEGSNGEITYEILVGAQGDFIINKTTGLITIAPGVEMIVGRTYALTVQAADNAPPAERRNSICTVYIEVLPPNNQSPPRFPQLMYSLEISEAMRVGAVLLNLQATDREGDSITYAIENGDPQRVFNLSETTGILTLGKALDRESTDRYILIITASDGRPDGTSTATVNIVVTDVNDNAPVFDPYLPRNLSVVEEEANAFVGQVKATDPDAGINGQVHYSLGNFNNLFRITSNGSIYTAVKLNREVRDYYELVVVATDGAVHPRHSTLTLAIKVLDIDDNSPVFTNSTYTVLVEENLPAGTTILQIEAKDVDLGANVSYRIRSPEVKHFFALHPFTGELSLLRSLDYEAFPDQEASITFLVEAFDIYGTMPPGIATVTVIVKDMNDYPPVFSKRIYKGMVAPDAVKGTPITTVYAEDADPPGLPASRVRYRVDDVQFPYPASIFEVEEDSGRVITRVNLNEEPTTIFKLVVVAFDDGEPVMSSSATVKILVLHPGEIPRFTQEEYRPPPVSELATKGTMVGVISAAAINQSIVYSIVSGNEEDTFGINNITGVIYVNGPLDYETRTSYVLRVQADSLEVVLANLRVPSKSNTAKVYIEIQDENNHPPVFQKKFYIGGVSEDARMFTSVLRVKATDKDTGNYSVMAYRLIIPPIKEGKEGFVVETYTGLIKTAMLFHNMRRSYFKFQVIATDDYGKGLSGKADVLVSVVNQLDMQVIVSNVPPTLVEKKIEDLTEILDRYVQEQIPGAKVVVESIGARRHGDAFSLEDYTKCDLTVYAIDPQTNRAIDRNELFKFLDGKLLDINKDFQPYYGEGGRILEIRTPEAVTSIKKRGESLGYTEGALLALAFIIILCCIPAILVVLVSYRQFKVRQAECTKTARIQAALPAAKPAVPAPAPVAAPPPPPPPPPGAHLYEELGDSSMYEMPQYGSRRRLLPPAGQEEYGEVVGEAEEEYEEEEEEPKKIKKPKVEIREPSEEEEVVVTIEKPPAAEPTYTTWKRARIFPMIFKKVRGLADKRGIVDLEGEEWQRRLEEEDKDYLKLTLDQEEATESTVESEEESSSDYTEYSEEESEFSESETTEEESESETPSEEEESSTPESEESESTESEGEKARKNIVLARRRPMVEEVKEVKGRKEEPQEEQKEPKMEEEEHSEEEESGPAPVEESTDPEAQDIPEEGSAESASVEGGVESEEESESGSSSSSSESQSGGPWGYQVPAYDRSKNANQKKSPGANSEGYNTAL

SEQ ID NO: 69781 - protein, 981 aa, Homo sapiens
  Payload ID: 13865
  Gene Symbol: PCDH15
  Gene Name: protocadherin-related 15
  ENSP ID: ENSP00000378833
MFRQFYLWTCLASGIILGSLFEICLGQYDDDCKLARGGPPATIVAIDEESRNGTILVDNMLIKGTAGGPDPTIELSLKDNVDYWVLMDPVKQMLFLNSTGRVLDRDPPMNIHSIVVQVQCINKKVGTIIYHEVRIVVRDRNDNSPTFKHESYYATVNELTPVGTTIFTGFSGDNGATDIDDGPNGQIEYVIQYNPDDPTSNDTFEIPLMLTGNIVLRKRLNYEDKTRYFVIIQANDRAQNLNERRTTTTTLTVDVLDGDDLGPMFLPCVLVPNTRDCRPLTYQAAIPELRTPEELNPIIVTPPIQAIDQDRNIQPPSDRPGILYSILVGTPEDYPRFFHMHPRTAELSLLEPVNRDFHQKFDLVIKAEQDNGHPLPAFAGLHIEILDENNQSPYFTMPSYQGYILESAPVGATISDSLNLTSPLRIVALDKDIEDTKDPELHLFLNDYTSVFTVTQTGITRYLTLLQPVDREEQQTYTFSITAFDGVQESEPVIVNIQVMDANDNTPTFPEISYDVYVYTDMRPGDSVIQLTAVDADEGSNGEITYEILVGAQGDFIINKTTGLITIAPGVEMIVGRTYALTVQAADNAPPAERRNSICTVYIEVLPPNNQSPPRFPQLMYSLEISEAMRVGAVLLNLQATDREGDSITYAIENGDPQRVFNLSETTGILTLGKALDRESTDRYILIITASDGRPDGEEPKKIKKPKVEIREPSEEEEVVVTIEKPPAAEPTYTTWKRARIFPMIFKKVRGLADKRGIVDLEGEEWQRRLEEEDKDYLKLTLDQEEATESTVESEEESSSDYTEYSEEESEFSESETTEEESESETPSEEEESSTPESEESESTESEGEKARKNIVLARRRPMVEEVKEVKGRKEEPQEEQKEPKMEEEEHSEEEESGPAPVEESTDPEAQDIPEEGSAESASVEGGVESEEESESGSSSSSSESQSGGPWGYQVPAYDRSKNANQKKSPGANSEGYNTAL

SEQ ID NO: 69782 - protein, 1150 aa, Homo sapiens
  Payload ID: 13865
  Gene Symbol: PCDH15
  Gene Name: protocadherin-related 15
  ENSP ID: ENSP00000386693
MPSYQGYILESAPVGATISDSLNLTSPLRIVALDKDIEDVPPSGVPTKDPELHLFLNDYTSVFTVTQTGITRYLTLLQPVDREEQQTYTFSITAFDGVQESEPVIVNIQVMDANDNTPTFPEISYDVYVYTDMRPGDSVIQLTAVDADEGSNGEITYEILVGAQGDFIINKTTGLITIAPGVEMIVGRTYALTVQAADNAPPAERRNSICTVYIEVLPPNNQSPPRFPQLMYSLEISEAMRVGAVLLNLQATDREGDSITYAIENGDPQRVFNLSETTGILTLGKALDRESTDRYILIITASDGRPDGTSTATVNIVVTDVNDNAPVFDPYLPRNLSVVEEEANAFVGQVKATDPDAGINGQVHYSLGNFNNLFRITSNGSIYTAVKLNREVRDYYELVVVATDGAVHPRHSTLTLAIKVLDIDDNSPVFTNSTYTVLVEENLPAGTTILQIEAKDVDLGANVSYRIRSPEVKHFFALHPFTGELSLLRSLDYEAFPDQEASITFLVEAFDIYGTMPPGIATVTVIVKDMNDYPPVFSKRIYKGMVAPDAVKGTPITTVYAEDADPPGLPASRVRYRVDDVQFPYPASIFEVEEDSGRVITRVNLNEEPTTIFKLVVVAFDDGEPVMSSSATVKILVLHPGEIPRFTQEEYRPPPVSELATKGTMVGVISAAAINQSIVYSIVSGNEEDTFGINNITGVIYVNGPLDYETRTSYVLRVQADSLEVVLANLRVPSKSNTAKVYIEIQDENNHPPVFQKKFYIGGVSEDARMFTSVLRVKATDKDTGNYSVMAYRLIIPPIKEGKEGFVVETYTGLIKTAMLFHNMRRSYFKFQVIATDDYGKGLSGKADVLVSVVNQLDMQVIVSNVPPTLVEKKIEDLTEILDRYVQEQIPGAKVVVESIGARRHGDAFSLEDYTKCDLTVYAIDPQTNRAIDRNELFKFLDGKLLDINKDFQPYYGEGGRILEIRTPEAVTSIKKRGESLGYTEGALLALAFIIILCCIPAILVVLVSYRQFKVRQAECTKTARIQAALPAAKPAVPAPAPVAAPPPPPPPPPGAHLYEELGDSSMHKNYPWSLELILARNMDKIITVMSMGMKCLNMGVAVDCYHQLDRRNMVRWLVKLRKNMRRKRKSQRKLKNQRLKLESLVRRKK

SEQ ID NO: 69783 - protein, 92 aa, Homo sapiens
  Payload ID: 13865
  Gene Symbol: PCDH15
  Gene Name: protocadherin-related 15
  ENSP ID: ENSP00000394465
MFRQFYLWTCLASGIILGSLFEICLGQYDDDCKLARGGPPATIVAIDEESRNGTILVDNMLIKGTAGGPDPTIELSLKDNVDYWVLMDPVKQ

SEQ ID NO: 69784 - protein, 1676 aa, Homo sapiens
  Payload ID: 13865
  Gene Symbol: PCDH15
  Gene Name: protocadherin-related 15
  ENSP ID: ENSP00000410304
MFRQFYLWTCLASGIILGSLFEICLGQYDDDCKLARGGPPATIVAIDEESRNGTILVDNMLIKGTAGGPDPTIELSLKDNVDYWVLMDPVKQMLFLNSTGRVLDRDPPMNIHSIVVQVQCINKKVGTIIYHEVRIVVRDRNDNSPTFKHESYYATVNELTPVGTTIFTGFSGDNGATDIDDGPNGQIEYVIQYNPDDPTSNDTFEIPLMLTGNIVLRKRLNYEDKTRYFVIIQANDRAQNLNERRTTTTTLTVDVLDGDDLGPMFLPCVLVPNTRDCRPLTYQAAIPELRTPEELNPIIVTPPIQAIDQDRNIQPPSDRPGILYSILVGTPEDYPRFFHMHPRTAELSLLEPVNRDFHQKFDLVIKAEQDNGHPLPAFAGLHIEILDENNQSPYFTMPSYQGYILESAPVGATISDSLNLTSPLRIVALDKDIEDTKDPELHLFLNDYTSVFTVTQTGITRYLTLLQPVDREEQQTYTFSITAFDGVQESEPVIVNIQVMDANDNTPTFPEISYDVYVYTDMRPGDSVIQLTAVDADEGSNGEITYEILVGAQGDFIINKTTGLITIAPGVEMIVGRTYALTVQAADNAPPAERRNSICTVYIEVLPPNNQSPPRFPQLMYSLEISEAMRVGAVLLNLQATDREGDSITYAIENGDPQRVFNLSETTGILTLGKALDRESTDRYILIITASDGRPDGTSTATVNIVVTDVNDNAPVFDPYLPRNLSVVEEEANAFVGQVKATDPDAGINGQVHYSLGNFNNLFRITSNGSIYTAVKLNREVRDYYELVVVATDGAVHPRHSTLTLAIKVLDIDDNSPVFTNSTYTVLVEENLPAGTTILQIEAKDVDLGANVSYRIRSPEVKHFFALHPFTGELSLLRSLDYEAFPDQEASITFLVEAFDIYGTMPPGIATVTVIVKDMNDYPPVFSKRIYKGMVAPDAVKGTPITTVYAEDADPPGLPASRVRYRVDDVQFPYPASIFEVEEDSGRVITRVNLNEEPTTIFKLVVVAFDDGEPVMSSSATVKILVLHPGEIPRFTQEEYRPPPVSELATKGTMVGVISAAAINQSIVYSIVSGNEEDTFGINNITGVIYVNGPLDYETRTSYVLRVQADSLEVVLANLRVPSKSNTAKVYIEIQDENNHPPVFQKKFYIGGVSEDARMFTSVLRVKATDKDTGNYSVMAYRLIIPPIKEGKEGFVVETYTGLIKTAMLFHNMRRSYFKFQVIATDDYGKGLSGKADVLVSVVNQLDMQVIVSNVPPTLVEKKIEDLTEILDRYVQEQIPGAKVVVESIGARRHGDAFSLEDYTKCDLTVYAIDPQTNRAIDRNELFKFLDGKLLDINKDFQPYYGEGGRILEIRTPEAVTSIKKRGESLGYTEGALLALAFIIILCCIPAILVVLVSYRQVFKGRQAECTKTARIQAALPAAKPAVPAPAPVAAPPPPPPPPPGAHLYEELGDSSMYEMPQYGSRRRLLPPAGQEEYGEVVGEAEEEYEEEEWARKRMIKLVVDREYETSSTGEDSAPECQRNRLHHPSIHSNINGNIYIAQNGSVVRTRRACLTDNLKVASPVRLGGPFKKLDKLAVTHEENVPLNTLSKGPFSTEKMNARPTLVTFAPCPVGTDNTAVKPLRNRLKSTVEQESMIDSKNIKEALEFHSDHTQSDDEELWMGPWNNLHIPMTKL

SEQ ID NO: 69785 - protein, 654 aa, Homo sapiens; identical to SEQ ID NO: 69771
  Payload ID: 13865
  Gene Symbol: PCDH15
  Gene Name: protocadherin-related 15
  ENSP ID: ENSP00000412320

SEQ ID NO: 69786 - protein, 329 aa, Homo sapiens
  Payload ID: 13865
  Gene Symbol: PCDH15
  Gene Name: protocadherin-related 15
  ENSP ID: ENSP00000412531
MFRQFYLWTCLASGIILGSLFEICLGQYDDDCKLARGGPPATIVAIDEESRNGTILVDNMLIKGTAGGPDPTIELSLKDNVDYWVLMDPVKQMLFLNSTGRVLDRDPPMNIHSIVVQVQCINKKVGTIIYHEVRIVVRDRNDNSPTFKHESYYATVNELTPVGTTIFTGFSGDNGATDIDDGPNGQIEYVIQYNPDDPTSNDTFEIPLMLTGNIVLRKRLNYEDKTRYFVIIQANDRAQNLNERRTTTTTLTVDVLDGDDLGPMFLPCVLVPNTRDCRPLTYQAAIPELRTPDLGSLCSGTNSWCQGRSGVHWSSPAWRCLFPRRLHQM

SEQ ID NO: 69787 - protein, 1886 aa, Homo sapiens
  Payload ID: 13865
  Gene Symbol: PCDH15
  Gene Name: protocadherin-related 15
  ENSP ID: ENSP00000412628
MFRQFYLWTCLASGIILGSLFEICLGQYDDDCKLARGGPPATIVAIDEESRNGTILVDNMLIKGTAGGPDPTIELSLKDNVDYWVLMDPVKQMLFLNSTGRVLDRDPPMNIHSIVVQVQCINKKVGTIIYHEVRIVVRDRNDNSPTFKHESYYATVNELTPVGTTIFTGFSGDNGATDIDDGPNGQIEYVIQYNPDDPTSNDTFEIPLMLTGNIVLRKRLNYEDKTRYFVIIQANDRAQNLNERRTTTTTLTVDVLDGDDLGPMFLPCVLVPNTRDCRPLTYQAAIPELRTPEELNPIIVTPPIQAIDQDRNIQPPSDRPGILYSILVGTPEDYPRFFHMHPRTAELSLLEPVNRDFHQKFDLVIKAEQDNGHPLPAFAGLHIEILDENNQSPYFTMPSYQGYILESAPVGATISDSLNLTSPLRIVALDKDIEDTKDPELHLFLNDYTSVFTVTQTGITRYLTLLQPVDREEQQTYTFSITAFDGVQESEPVIVNIQVMDANDNTPTFPEISYDVYVYTDMRPGDSVIQLTAVDADEGSNGEITYEILVGAQGDFIINKTTGLITIAPGVEMIVGRTYALTVQAADNAPPAERSTGILTLGKALDRESTDRYILIITASDGRPDGTSTATVNIVVTDVNDNAPVFDPYLPRNLSVVEEEANAFVGQVKATDPDAGINGQVHYSLGNFNNLFRITSNGSIYTAVKLNREVRDYYELVVVATDGAVHPRHSTLTLAIKVLDIDDNSPVFTNSTYTVLVEENLPAGTTILQIEAKDVDLGANVSYRIRSPEVKHFFALHPFTGELSLLRSLDYEAFPDQEASITFLVEAFDIYGTMPPGIATVTVIVKDMNDYPPVFSKRIYKGMVAPDAVKGTPITTVYAEDADPPGLPASRVRYRVDDVQFPYPASIFEVEEDSGRVITRVNLNEEPTTIFKLVVVAFDDGEPVMSSSATVKILVLHPGEIPRFTQEEYRPPPVSELATKGTMVGVISAAAINQSIVYSIVSGNEEDTFGINNITGVIYVNGPLDYETRTSYVLRVQADSLEVVLANLRVPSKSNTAKVYIEIQDENNHPPVFQKKFYIGGVSEDARMFTSVLRVKATDKDTGNYSVMAYRLIIPPIKEGKEGFVVETYTGLIKTAMLFHNMRRSYFKFQVIATDDYGKGLSGKADVLVSVVNQLDMQVIVSNVPPTLVEKKIEDLTEILDRYVQEQIPGAKVVVESIGARRHGDAFSLEDYTKCDLTVYAIDPQTNRAIDRNELFKFLDGKLLDINKDFQPYYGEGGRILEIRTPEAVTSIKKRGESLGYTEGALLALAFIIILCCIPAILVVLVSYRQFKVRQAECTKTARIQAALPAAKPAVPAPAPVAAPPPPPPPPPGAHLYEELGDSSMHNLFLLYHFQQSRGNNSVSEDRKHQQVVMPFSSNTIEAHKSAHVDGSLKSNKLKSARKFTFLSDEDDLSAHNPLYKENISQVSTNSDISQRTDFVDPFSPKIQAKSKSLRGPREKIQRLWSQSVSLPRRLMRKVPNRPEIIDLQQWQGTRQKAENENTGICTNKRGSSNPLLTTEEANLTEKEEIRQGETLMIEGTEQLKSLSSDSSFCFPRPHFSFSTLPTVSRTVELKSEPNVISSPAECSLELSPSRPCVLHSSLSRRETPICMLPIETERNIFENFAHPPNISPSACPLPPPPPISPPSPPPAPAPLAPPPDISPFSLFCPPPSPPSIPLPLPPPTFFPLSVSTSGPPTPPLLPPFPTPLPPPPPSIPCPPPPSASFLSTECVCITGVKCTTNLMPAEKIKSSMTQLSTTTVCKTDPQREPKGILRHVKNLAELEKSVANMYSQIEKNYLRTNVSELQTMCPSEVTNMEITSEQNKGSLNNIVEGTEKQSHSQSTSL

SEQ ID NO: 69788 - protein, 1539 aa, Homo sapiens
  Payload ID: 13865
  Gene Symbol: PCDH15
  Gene Name: protocadherin-related 15
  ENSP ID: ENSP00000478076
MFRQFYLWTCLASGIILGSLFEICLGQYDDDCKLARGGPPATIVAIDEESRNGTILVDNMLIKGTAGGPDPTIELSLKDNVDYWVLMDPVKQMLFLNSTGRVLDRDPPMNIHSIVVQVQCINKKVGTIIYHEVRIVVRDRNDNSPTFKHESYYATVNELTPVGTTIFTGFSGDNGATDIDDGPNGQIEYVIQYNPDDPTSNDTFEIPLMLTGNIVLRKRLNYEDKTRYFVIIQANDRAQNLNERRTTTTTLTVDVLDGDDLGPMFLPCVLVPNTRDCRPLTYQAAIPELRTPEELNPIIVTPPIQAIDQDRNIQPPSDRPGILYSILVGTPEDYPRFFHMHPRTAELSLLEPVNRDFHQKFDLVIKAEQDNGHPLPAFAGLHIEILDENNQSPYFTMPSYQGYILESAPVGATISDSLNLTSPLRIVALDKDIEDTKDPELHLFLNDYTSVFTVTQTGITRYLTLLQPVDREEQQTYTFSITAFDGVQESEPVIVNIQVMDANDNTPTFPEISYDVYVYTDMRPGDSVIQLTAVDADEGSNGEITYEILVGAQGDFIINKTTGLITIAPGVEMIVGRTYALTVQAADNAPPAERRNSICTVYIEVLPPNNQSPPRFPQLMYSLEISEAMRVGAVLLNLQATDREGDSITYAIENGDPQRVFNLSETTGILTLGKALDRESTDRYILIITASDGRPDGTSTATVNIVVTDVNDNAPVFDPYLPRNLSVVEEEANAFVGQVKATDPDAGINGQVHYSLGNFNNLFRITSNGSIYTAVKLNREVRDYYELVVVATDGAVHPRHSTLTLAIKVLDIDDNSPVFTNSTYTVLVEENLPAGTTILQIEAKDVDLGANVSYRIRSPEVKHFFALHPFTGELSLLRSLDYEAFPDQEASITFLVEAFDIYGTMPPGIATVTVIVKDMNDYPPVFSKRIYKGMVAPDAVKGTPITTVYAEDADPPGLPASRVRYRVDDVQFPYPASIFEVEEDSGRVITRVNLNEEPTTIFKLVVVAFDDGEPVMSSSATVKILVLHPGEIPRFTQEEYRPPPVSELATKGTMVGVISAAAINQSIVYSIVSGNEEDTFGINNITGVIYVNGPLDYETRTSYVLRVQADSLEVVLANLRVPSKSNTAKVYIEIQDENNHPPVFQKKFYIGGVSEDARMFTSVLRVKATDKDTGNYSVMAYRLIIPPIKEGKEGFVVETYTGLIKTAMLFHNMRRSYFKFQVIATDDYGKGLSGKADVLVSVVNQLDMQVIVSNVPPTLVEKKIEDLTEILDRYVQEQIPGAKVVVESIGARRHGDAFSLEDYTKCDLTVYAIDPQTNRAIDRNELFKFLDGKLLDINKDFQPYYGEGGRILEIRTPEAVTSIKKRGESLGYTEGALLALAFIIILCCIPAILVVLVSYRQFKVRQAECTKTARIQAALPAAKPAVPAPAPVAAPPPPPPPPPGAHLYEELGDSSMHKNYPWSLELILARNMDKIITVMSMGMKCLNMGVAVDCYHQLDRRNMVRWLVKLRKNMRRKRKSQRKLKNQRLKLESLVRRKK

SEQ ID NO: 69789 - protein, 1681 aa, Homo sapiens
  Payload ID: 13865
  Gene Symbol: PCDH15
  Gene Name: protocadherin-related 15
  ENSP ID: ENSP00000478512
MFRQFYLWTCLASGIILGSLFEICLGQYDDDWQYEDCKLARGGPPATIVAIDEESRNGTILVDNMLIKGTAGGPDPTIELSLKDNVDYWVLMDPVKQMLFLNSTGRVLDRDPPMNIHSIVVQVQCINKKVGTIIYHEVRIVVRDRNDNSPTFKHESYYATVNELTPVGTTIFTGFSGDNGATDIDDGPNGQIEYVIQYNPDDPTSNDTFEIPLMLTGNIVLRKRLNYEDKTRYFVIIQANDRAQNLNERRTTTTTLTVDVLDGDDLGPMFLPCVLVPNTRDCRPLTYQAAIPELRTPEELNPIIVTPPIQAIDQDRNIQPPSDRPGILYSILVGTPEDYPRFFHMHPRTAELSLLEPVNRDFHQKFDLVIKAEQDNGHPLPAFAGLHIEILDENNQSPYFTMPSYQGYILESAPVGATISDSLNLTSPLRIVALDKDIEDTKDPELHLFLNDYTSVFTVTQTGITRYLTLLQPVDREEQQTYTFSITAFDGVQESEPVIVNIQVMDANDNTPTFPEISYDVYVYTDMRPGDSVIQLTAVDADEGSNGEITYEILVGAQGDFIINKTTGLITIAPGVEMIVGRTYALTVQAADNAPPAERRNSICTVYIEVLPPNNQSPPRFPQLMYSLEISEAMRVGAVLLNLQATDREGDSITYAIENGDPQRVFNLSETTGILTLGKALDRESTDRYILIITASDGRPDGTSTATVNIVVTDVNDNAPVFDPYLPRNLSVVEEEANAFVGQVKATDPDAGINGQVHYSLGNFNNLFRITSNGSIYTAVKLNREVRDYYELVVVATDGAVHPRHSTLTLAIKVLDIDDNSPVFTNSTYTVLVEENLPAGTTILQIEAKDVDLGANVSYRIRSPEVKHFFALHPFTGELSLLRSLDYEAFPDQEASITFLVEAFDIYGTMPPGIATVTVIVKDMNDYPPVFSKRIYKGMVAPDAVKGTPITTVYAEDADPPGLPASRVRYRVDDVQFPYPASIFEVEEDSGRVITRVNLNEEPTTIFKLVVVAFDDGEPVMSSSATVKILVLHPGEIPRFTQEEYRPPPVSELATKGTMVGVISAAAINQSIVYSIVSGNEEDTFGINNITGVIYVNGPLDYETRTSYVLRVQADSLEVVLANLRVPSKSNTAKVYIEIQDENNHPPVFQKKFYIGGVSEDARMFTSVLRVKATDKDTGNYSVMAYRLIIPPIKEGKEGFVVETYTGLIKTAMLFHNMRRSYFKFQVIATDDYGKGLSGKADVLVSVVNQLDMQVIVSNVPPTLVEKKIEDLTEILDRYVQEQIPGAKVVVESIGARRHGDAFSLEDYTKCDLTVYAIDPQTNRAIDRNELFKFLDGKLLDINKDFQPYYGEGGRILEIRTPEAVTSIKKRGESLGYTEGALLALAFIIILCCIPAILVVLVSYRQVFKGRQAECTKTARIQAALPAAKPAVPAPAPVAAPPPPPPPPPGAHLYEELGDSSMYEMPQYGSRRRLLPPAGQEEYGEVVGEAEEEYEEEEWARKRMIKLVVDREYETSSTGEDSAPECQRNRLHHPSIHSNINGNIYIAQNGSVVRTRRACLTDNLKVASPVRLGGPFKKLDKLAVTHEENVPLNTLSKGPFSTEKMNARPTLVTFAPCPVGTDNTAVKPLRNRLKSTVEQESMIDSKNIKEALEFHSDHTQSDDEELWMGPWNNLHIPMTKL

SEQ ID NO: 69790 - protein, 37 aa, Homo sapiens
  Payload ID: 13865
  Gene Symbol: PCDH15
  Gene Name: protocadherin-related 15
  ENSP ID: ENSP00000478551
  MOD_RES (1)..(1): Any amino acid
XMKCLNMGVAVDCYHQLDRRNMVRWLVKLRKNMRRKR

SEQ ID NO: 69791 - protein, 416 aa, Homo sapiens
  Payload ID: 13865
  Gene Symbol: PCDH15
  Gene Name: protocadherin-related 15
  ENSP ID: ENSP00000480780
MQVIVSNVPPTLVEKKIEDLTEILDRYVQEQIPGAKVVVESIGARRHGDAFSLEDYTKCDLTVYAIDPQTNRAIDRNELFKFLDGKLLDINKDFQPYYGEGGRILEIRTPEAVTSIKKRGESLGYTEGALLALAFIIILCCIPAILVVLVSYRQRGYGSEQQQLLRPSLLKPEELSMESGIDPGQEYGQDYYSYEHGYEMPQYGSRRRLLPPAGQEEYGEVVGEAEEEYEEEEWARKRMIKLVVDREYETSSTGEDSAPECQRNRLHHPSIHSNINGNIYIAQNGSVVRTRRACLTDNLKVASPVRLGGPFKKLDKLAVTHEENVPLNTLSKGPFSTEKMNARPTLVTFAPCPVGTDNTAVKPLRNRLKSTVEQESMIDSKNIKEALEFHSDHTQSDDEELWMGPWNNLHIPMTKL

SEQ ID NO: 69792 - protein, 72 aa, Homo sapiens
  Payload ID: 13865
  Gene Symbol: PCDH15
  Gene Name: protocadherin-related 15
  ENSP ID: ENSP00000481211
MFRQFYLWTCLASGIILGSLFEICLGQYDDGTILVDNMLIKGTAGGPDPTIELSLKDNVDYWVLMDPVKQML

SEQ ID NO: 69793 - protein, 1888 aa, Homo sapiens
  Payload ID: 13865
  Gene Symbol: PCDH15
  Gene Name: protocadherin-related 15
  ENSP ID: ENSP00000482329
MFRQFYLWTCLASGIILGSLFEICLGQYDDDCKLARGGPPATIVAIDEESRNGTILVDNMLIKGTAGGPDPTIELSLKDNVDYWVLMDPVKQMLFLNSTGRVLDRDPPMNIHSIVVQVQCINKKVGTIIYHEVRIVVRDRNDNSPTFKHESYYATVNELTPVGTTIFTGFSGDNGATDIDDGPNGQIEYVIQYNPDDPTSNDTFEIPLMLTGNIVLRKRLNYEDKTRYFVIIQANDRAQNLNERRTTTTTLTVDVLDGDDLGPMFLPCVLVPNTRDCRPLTYQAAIPELRTPEELNPIIVTPPIQAIDQDRNIQPPSDRPGILYSILVGTPEDYPRFFHMHPRTAELSLLEPVNRDFHQKFDLVIKAEQDNGHPLPAFAGLHIEILDENNQSPYFTMPSYQGYILESAPVGATISDSLNLTSPLRIVALDKDIEDTKDPELHLFLNDYTSVFTVTQTGITRYLTLLQPVDREEQQTYTFSITAFDGVQESEPVIVNIQVMDANDNTPTFPEISYDVYVYTDMRPGDSVIQLTAVDADEGSNGEITYEILVGAQGDFIINKTTGLITIAPGVEMIVGRTYALTVQAADNAPPAERSTGILTLGKALDRESTDRYILIITASDGRPDGTSTATVNIVVTDVNDNAPVFDPYLPRNLSVVEEEANAFVGQVKATDPDAGINGQVHYSLGNFNNLFRITSNGSIYTAVKLNREVRDYYELVVVATDGAVHPRHSTLTLAIKVLDIDDNSPVFTNSTYTVLVEENLPAGTTILQIEAKDVDLGANVSYRIRSPEVKHFFALHPFTGELSLLRSLDYEAFPDQEASITFLVEAFDIYGTMPPGIATVTVIVKDMNDYPPVFSKRIYKGMVAPDAVKGTPITTVYAEDADPPGLPASRVRYRVDDVQFPYPASIFEVEEDSGRVITRVNLNEEPTTIFKLVVVAFDDGEPVMSSSATVKILVLHPGEIPRFTQEEYRPPPVSELATKGTMVGVISAAAINQSIVYSIVSGNEEDTFGINNITGVIYVNGPLDYETRTSYVLRVQADSLEVVLANLRVPSKSNTAKVYIEIQDENNHPPVFQKKFYIGGVSEDARMFTSVLRVKATDKDTGNYSVMAYRLIIPPIKEGKEGFVVETYTGLIKTAMLFHNMRRSYFKFQVIATDDYGKGLSGKADVLVSVVNQLDMQVIVSNVPPTLVEKKIEDLTEILDRYVQEQIPGAKVVVESIGARRHGDAFSLEDYTKCDLTVYAIDPQTNRAIDRNELFKFLDGKLLDINKDFQPYYGEGGRILEIRTPEAVTSIKKRGESLGYTEGALLALAFIIILCCIPAILVVLVSYRQVFKGRQAECTKTARIQAALPAAKPAVPAPAPVAAPPPPPPPPPGAHLYEELGDSSILSSLFLLYHFQQSRGNNSVSEDRKHQQVVMPFSSNTIEAHKSAHVDGSLKSNKLKSARKFTFLSDEDDLSAHNPLYKENISQVSTNSDISQRTDFVDPFSPKIQAKSKSLRGPREKIQRLWSQSVSLPRRLMRKVPNRPEIIDLQQWQGTRQKAENENTGICTNKRGSSNPLLTTEEANLTEKEEIRQGETLMIEGTEQLKSLSSDSSFCFPRPHFSFSTLPTVSRTVELKSEPNVISSPAECSLELSPSRPCVLHSSLSRRETPICMLPIETERNIFENFAHPPNISPSACPLPPPPPISPPSPPPAPAPLAPPPDISPFSLFCPPPSPPSIPLPLPPPTFFPLSVSTSGPPTPPLLPPFPTPLPPPPPSIPCPPPPSASFLSTECVCITGVKCTTNLMPAEKIKSSMTQLSTTTVCKTDPQREPKGILRHVKNLAELEKSVANMYSQIEKNYLRTNVSELQTMCPSEVTNMEITSEQNKGSLNNIVEGTEKQSHSQSTSL

SEQ ID NO: 69794 - protein, 460 aa, Homo sapiens
  Payload ID: 13865
  Gene Symbol: PCDH15
  Gene Name: protocadherin-related 15
  ENSP ID: ENSP00000482780
LVEKKIEDLTEILDRYVQEQIPGAKVVVESIGARRHGDAFSLEDYTKCDLTVYAIDPQTNRAIDRNELFKFLDGKLLDINKDFQPYYGEGGRILEIRTPEAVTSIKKRGESLGYTEGALLALAFIIILCCIPAILVVLVSYRQFKVRQAECTKTARIQAALPAAKPAVPAPAPVAAPPPPPPPPPGAHLYEELGDSSMRGYGSEQQQLLRPSLLKPEELSMESGIDPGQEYGQDYYSYEHGYEMPQYGSRRRLLPPAGQEEYGEVVGEAEEEYEEEEWARKRMIKLVVDREYETSSTGEDSAPECQRNRLHHPSIHSNINGNIYIAQNGSVVRTRRACLTDNLKVASPVRLGGPFKKLDKLAVTHEENVPLNTLSKGPFSTEKMNARPTLVTFAPCPVGTDNTAVKPLRNRLKSTVEQESMIDSKNIKEALEFHSDHTQSDDEELWMGPWNNLHIPMTKL

SEQ ID NO: 69795 - protein, 1790 aa, Homo sapiens
  Payload ID: 13865
  Gene Symbol: PCDH15
  Gene Name: protocadherin-related 15
  ENSP ID: ENSP00000482794
MFRQFYLWTCLASGIILGSLFEICLGQYDDDWQYEDCKLARGGPPATIVAIDEESRNGTILVDNMLIKGTAGGPDPTIELSLKDNVDYWVLMDPVKQMLFLNSTGRVLDRDPPMNIHSIVVQVQCINKKVGTIIYHEVRIVVRDRNDNSPTFKHESYYATVNELTPVGTTIFTGFSGDNGATDIDDGPNGQIEYVIQYNPDDPTSNDTFEIPLMLTGNIVLRKRLNYEDKTRYFVIIQANDRAQNLNERRTTTTTLTVDVLDGDDLGPMFLPCVLVPNTRDCRPLTYQAAIPELRTPEELNPIIVTPPIQAIDQDRNIQPPSDRPGILYSILVGTPEDYPRFFHMHPRTAELSLLEPVNRDFHQKFDLVIKAEQDNGHPLPAFAGLHIEILDENNQSPYFTMPSYQGYILESAPVGATISDSLNLTSPLRIVALDKDIEDVPPSGVPTKDPELHLFLNDYTSVFTVTQTGITRYLTLLQPVDREEQQTYTFSITAFDGVQESEPVIVNIQVMDANDNTPTFPEISYDVYVYTDMRPGDSVIQLTAVDADEGSNGEITYEILVGAQGDFIINKTTGLITIAPGVEMIVGRTYALTVQAADNAPPAERRNSICTVYIEVLPPNNQSPPRFPQLMYSLEISEAMRVGAVLLNLQATDREGDSITYAIENGDPQRVFNLSETTGILTLGKALDRESTDRYILIITASDGRPDGTSTATVNIVVTDVNDNAPVFDPYLPRNLSVVEEEANAFVGQVKATDPDAGINGQVHYSLGNFNNLFRITSNGSIYTAVKLNREVRDYYELVVVATDGAVHPRHSTLTLAIKVLDIDDNSPVFTNSTYTVLVEENLPAGTTILQIEAKDVDLGANVSYRIRSPEVKHFFALHPFTGELSLLRSLDYEAFPDQEASITFLVEAFDIYGTMPPGIATVTVIVKDMNDYPPVFSKRIYKGMVAPDAVKGTPITTVYAEDADPPGLPASRVRYRVDDVQFPYPASIFEVEEDSGRVITRVNLNEEPTTIFKLVVVAFDDGEPVMSSSATVKILVLHPGEIPRFTQEEYRPPPVSELATKGTMVGVISAAAINQSIVYSIVSGNEEDTFGINNITGVIYVNGPLDYETRTSYVLRVQADSLEVVLANLRVPSKSNTAKVYIEIQDENNHPPVFQKKFYIGGVSEDARMFTSVLRVKATDKDTGNYSVMAYRLIIPPIKEGKEGFVVETYTGLIKTAMLFHNMRRSYFKFQVIATDDYGKGLSGKADVLVSVVNQLDMQVIVSNVPPTLVEKKIEDLTEILDRYVQEQIPGAKVVVESIGARRHGDAFSLEDYTKCDLTVYAIDPQTNRAIDRNELFKFLDGKLLDINKDFQPYYGEGGRILEIRTPEAVTSIKKRGESLGYTEGALLALAFIIILCCIPAILVVLVSYRQFKVRQAECTKTARIQAALPAAKPAVPAPAPVAAPPPPPPPPPGAHLYEELGDSSMHKYEMPQYGSRRRLLPPAGQEEYGEVVGEAEEEYEEEEEEPKKIKKPKVEIREPSEEEEVVVTIEKPPAAEPTYTTWKRARIFPMIFKKVRGLADKRGIVDLEGEEWQRRLEEEDKDYLKLTLDQEEATESTVESEEESSSDYTEYSEEESEFSESETTEEESESETPSEEEESSTPESEESESTESEGEKARKNIVLARRRPMVEEVKEVKGRKEEPQEEQKEPKMEEEEHSEEEESGPAPVEESTDPEAQDIPEEGSAESASVEGGVESEEESESGSSSSSSESQSGGPWGYQVPAYDRSKNANQKKSPGANSEGYNTAL

SEQ ID NO: 69796 - protein, 1789 aa, Homo sapiens
  Payload ID: 13865
  Gene Symbol: PCDH15
  Gene Name: protocadherin-related 15
  ENSP ID: ENSP00000482921
MFRQFYLWTCLASGIILGSLFEICLGQYDDDWQYEDCKLARGGPPATIVAIDEESRNGTILVDNMLIKGTAGGPDPTIELSLKDNVDYWVLMDPVKQMLFLNSTGRVLDRDPPMNIHSIVVQVQCINKKVGTIIYHEVRIVVRDRNDNSPTFKHESYYATVNELTPVGTTIFTGFSGDNGATDIDDGPNGQIEYVIQYNPDDPTSNDTFEIPLMLTGNIVLRKRLNYEDKTRYFVIIQANDRAQNLNERRTTTTTLTVDVLDGDDLGPMFLPCVLVPNTRDCRPLTYQAAIPELRTPEELNPIIVTPPIQAIDQDRNIQPPSDRPGILYSILVGTPEDYPRFFHMHPRTAELSLLEPVNRDFHQKFDLVIKAEQDNGHPLPAFAGLHIEILDENNQSPYFTMPSYQGYILESAPVGATISDSLNLTSPLRIVALDKDIEDVPPSGVPTKDPELHLFLNDYTSVFTVTQTGITRYLTLLQPVDREEQQTYTFSITAFDGVQESEPVIVNIQVMDANDNTPTFPEISYDVYVYTDMRPGDSVIQLTAVDADEGSNGEITYEILVGAQGDFIINKTTGLITIAPGVEMIVGRTYALTVQAADNAPPAERRNSICTVYIEVLPPNNQSPPRFPQLMYSLEISEAMRVGAVLLNLQATDREGDSITYAIENGDPQRVFNLSETTGILTLGKALDRESTDRYILIITASDGRPDGTSTATVNIVVTDVNDNAPVFDPYLPRNLSVVEEEANAFVGQVKATDPDAGINGQVHYSLGNFNNLFRITSNGSIYTAVKLNREVRDYYELVVVATDGAVHPRHSTLTLAIKVLDIDDNSPVFTNSTYTVLVEENLPAGTTILQIEAKDVDLGANVSYRIRSPEVKHFFALHPFTGELSLLRSLDYEAFPDQEASITFLVEAFDIYGTMPPGIATVTVIVKDMNDYPPVFSKRIYKGMVAPDAVKGTPITTVYAEDADPPGLPASRVRYRVDDVQFPYPASIFEVEEDSGRVITRVNLNEEPTTIFKLVVVAFDDGEPVMSSSATVKILVLHPGEIPRFTQEEYRPPPVSELATKGTMVGVISAAAINQSIVYSIVSGNEEDTFGINNITGVIYVNGPLDYETRTSYVLRVQADSLEVVLANLRVPSKSNTAKVYIEIQDENNHPPVFQKKFYIGGVSEDARMFTSVLRVKATDKDTGNYSVMAYRLIIPPIKEGKEGFVVETYTGLIKTAMLFHNMRRSYFKFQVIATDDYGKGLSGKADVLVSVVNQLDMQVIVSNVPPTLVEKKIEDLTEILDRYVQEQIPGAKVVVESIGARRHGDAFSLEDYTKCDLTVYAIDPQTNRAIDRNELFKFLDGKLLDINKDFQPYYGEGGRILEIRTPEAVTSIKKRGESLGYTEGALLALAFIIILCCIPAILVVLVSYRQVFKGRQAECTKTARIQAALPAAKPAVPAPAPVAAPPPPPPPPPGAHLYEELGDSSMYEMPQYGSRRRLLPPAGQEEYGEVVGEAEEEYEEEEEEPKKIKKPKVEIREPSEEEEVVVTIEKPPAAEPTYTTWKRARIFPMIFKKVRGLADKRGIVDLEGEEWQRRLEEEDKDYLKLTLDQEEATESTVESEEESSSDYTEYSEEESEFSESETTEEESESETPSEEEESSTPESEESESTESEGEKARKNIVLARRRPMVEEVKEVKGRKEEPQEEQKEPKMEEEEHSEEEESGPAPVEESTDPEAQDIPEEGSAESASVEGGVESEEESESGSSSSSSESQSGGPWGYQVPAYDRSKNANQKKSPGANSEGYNTAL

SEQ ID NO: 69797 - protein, 1675 aa, Homo sapiens
  Payload ID: 13865
  Gene Symbol: PCDH15
  Gene Name: protocadherin-related 15
  Uniprot ID: Q96QU1
  ENSP ID: ENSP00000483745
MFRQFYLWTCLASGIILGSLFEICLGQYDDDCKLARGGPPATIVAIDEESRNGTILVDNMLIKGTAGGPDPTIELSLKDNVDYWVLMDPVKQMLFLNSTGRVLDRDPPMNIHSIVVQVQCINKKVGTIIYHEVRIVVRDRNDNSPTFKHESYYATVNELTPVGTTIFTGFSGDNGATDIDDGPNGQIEYVIQYNPDDPTSNDTFEIPLMLTGNIVLRKRLNYEDKTRYFVIIQANDRAQNLNERRTTTTTLTVDVLDGDDLGPMFLPCVLVPNTRDCRPLTYQAAIPELRTPEELNPIIVTPPIQAIDQDRNIQPPSDRPGILYSILVGTPEDYPRFFHMHPRTAELSLLEPVNRDFHQKFDLVIKAEQDNGHPLPAFAGLHIEILDENNQSPYFTMPSYQGYILESAPVGATISDSLNLTSPLRIVALDKDIEDTKDPELHLFLNDYTSVFTVTQTGITRYLTLLQPVDREEQQTYTFSITAFDGVQESEPVIVNIQVMDANDNTPTFPEISYDVYVYTDMRPGDSVIQLTAVDADEGSNGEITYEILVGAQGDFIINKTTGLITIAPGVEMIVGRTYALTVQAADNAPPAERRNSICTVYIEVLPPNNQSPPRFPQLMYSLEISEAMRVGAVLLNLQATDREGDSITYAIENGDPQRVFNLSETTGILTLGKALDRESTDRYILIITASDGRPDGTSTATVNIVVTDVNDNAPVFDPYLPRNLSVVEEEANAFVGQVKATDPDAGINGQVHYSLGNFNNLFRITSNGSIYTAVKLNREVRDYYELVVVATDGAVHPRHSTLTLAIKVLDIDDNSPVFTNSTYTVLVEENLPAGTTILQIEAKDVDLGANVSYRIRSPEVKHFFALHPFTGELSLLRSLDYEAFPDQEASITFLVEAFDIYGTMPPGIATVTVIVKDMNDYPPVFSKRIYKGMVAPDAVKGTPITTVYAEDADPPGLPASRVRYRVDDVQFPYPASIFEVEEDSGRVITRVNLNEEPTTIFKLVVVAFDDGEPVMSSSATVKILVLHPGEIPRFTQEEYRPPPVSELATKGTMVGVISAAAINQSIVYSIVSGNEEDTFGINNITGVIYVNGPLDYETRTSYVLRVQADSLEVVLANLRVPSKSNTAKVYIEIQDENNHPPVFQKKFYIGGVSEDARMFTSVLRVKATDKDTGNYSVMAYRLIIPPIKEGKEGFVVETYTGLIKTAMLFHNMRRSYFKFQVIATDDYGKGLSGKADVLVSVVNQLDMQVIVSNVPPTLVEKKIEDLTEILDRYVQEQIPGAKVVVESIGARRHGDAFSLEDYTKCDLTVYAIDPQTNRAIDRNELFKFLDGKLLDINKDFQPYYGEGGRILEIRTPEAVTSIKKRGESLGYTEGALLALAFIIILCCIPAILVVLVSYRQFKVRQAECTKTARIQAALPAAKPAVPAPAPVAAPPPPPPPPPGAHLYEELGDSSMYEMPQYGSRRRLLPPAGQEEYGEVVGEAEEEYEEEEWARKRMIKLVVDREYETSSTGEDSAPECQRNRLHHPSIHSNINGNIYIAQNGSVVRTRRACLTDNLKVASPVRLGGPFKKLDKLAVTHEENVPLNTLSKGPFSTEKMNARPTLVTFAPCPVGTDNTAVKPLRNRLKSTVEQESMIDSKNIKEALEFHSDHTQSDDEELWMGPWNNLHIPMTKL

SEQ ID NO: 69798 - protein, 1682 aa, Homo sapiens
  Payload ID: 13865
  Gene Symbol: PCDH15
  Gene Name: protocadherin-related 15
  ENSP ID: ENSP00000484454
MFRQFYLWTCLASGIILGSLFEICLGQYDDDWQYEDCKLARGGPPATIVAIDEESRNGTILVDNMLIKGTAGGPDPTIELSLKDNVDYWVLMDPVKQMLFLNSTGRVLDRDPPMNIHSIVVQVQCINKKVGTIIYHEVRIVVRDRNDNSPTFKHESYYATVNELTPVGTTIFTGFSGDNGATDIDDGPNGQIEYVIQYNPDDPTSNDTFEIPLMLTGNIVLRKRLNYEDKTRYFVIIQANDRAQNLNERRTTTTTLTVDVLDGDDLGPMFLPCVLVPNTRDCRPLTYQAAIPELRTPEELNPIIVTPPIQAIDQDRNIQPPSDRPGILYSILVGTPEDYPRFFHMHPRTAELSLLEPVNRDFHQKFDLVIKAEQDNGHPLPAFAGLHIEILDENNQSPYFTMPSYQGYILESAPVGATISDSLNLTSPLRIVALDKDIEDTKDPELHLFLNDYTSVFTVTQTGITRYLTLLQPVDREEQQTYTFSITAFDGVQESEPVIVNIQVMDANDNTPTFPEISYDVYVYTDMRPGDSVIQLTAVDADEGSNGEITYEILVGAQGDFIINKTTGLITIAPGVEMIVGRTYALTVQAADNAPPAERRNSICTVYIEVLPPNNQSPPRFPQLMYSLEISEAMRVGAVLLNLQATDREGDSITYAIENGDPQRVFNLSETTGILTLGKALDRESTDRYILIITASDGRPDGTSTATVNIVVTDVNDNAPVFDPYLPRNLSVVEEEANAFVGQVKATDPDAGINGQVHYSLGNFNNLFRITSNGSIYTAVKLNREVRDYYELVVVATDGAVHPRHSTLTLAIKVLDIDDNSPVFTNSTYTVLVEENLPAGTTILQIEAKDVDLGANVSYRIRSPEVKHFFALHPFTGELSLLRSLDYEAFPDQEASITFLVEAFDIYGTMPPGIATVTVIVKDMNDYPPVFSKRIYKGMVAPDAVKGTPITTVYAEDADPPGLPASRVRYRVDDVQFPYPASIFEVEEDSGRVITRVNLNEEPTTIFKLVVVAFDDGEPVMSSSATVKILVLHPGEIPRFTQEEYRPPPVSELATKGTMVGVISAAAINQSIVYSIVSGNEEDTFGINNITGVIYVNGPLDYETRTSYVLRVQADSLEVVLANLRVPSKSNTAKVYIEIQDENNHPPVFQKKFYIGGVSEDARMFTSVLRVKATDKDTGNYSVMAYRLIIPPIKEGKEGFVVETYTGLIKTAMLFHNMRRSYFKFQVIATDDYGKGLSGKADVLVSVVNQLDMQVIVSNVPPTLVEKKIEDLTEILDRYVQEQIPGAKVVVESIGARRHGDAFSLEDYTKCDLTVYAIDPQTNRAIDRNELFKFLDGKLLDINKDFQPYYGEGGRILEIRTPEAVTSIKKRGESLGYTEGALLALAFIIILCCIPAILVVLVSYRQFKVRQAECTKTARIQAALPAAKPAVPAPAPVAAPPPPPPPPPGAHLYEELGDSSMHKYEMPQYGSRRRLLPPAGQEEYGEVVGEAEEEYEEEEWARKRMIKLVVDREYETSSTGEDSAPECQRNRLHHPSIHSNINGNIYIAQNGSVVRTRRACLTDNLKVASPVRLGGPFKKLDKLAVTHEENVPLNTLSKGPFSTEKMNARPTLVTFAPCPVGTDNTAVKPLRNRLKSTVEQESMIDSKNIKEALEFHSDHTQSDDEELWMGPWNNLHIPMTKL

SEQ ID NO: 69799 - protein, 1964 aa, Homo sapiens
  Payload ID: 13865
  Gene Symbol: PCDH15
  Gene Name: protocadherin-related 15
  ENSP ID: ENSP00000484703
MFRQFYLWTCLASGIILGSLFEICLGQYDDDWQYEDCKLARGGPPATIVAIDEESRNGTILVDNMLIKGTAGGPDPTIELSLKDNVDYWVLMDPVKQMLFLNSTGRVLDRDPPMNIHSIVVQVQCINKKVGTIIYHEVRIVVRDRNDNSPTFKHESYYATVNELTPVGTTIFTGFSGDNGATDIDDGPNGQIEYVIQYNPDDPTSNDTFEIPLMLTGNIVLRKRLNYEDKTRYFVIIQANDRAQNLNERRTTTTTLTVDVLDGDDLGPMFLPCVLVPNTRDCRPLTYQAAIPELRTPEELNPIIVTPPIQAIDQDRNIQPPSDRPGILYSILVGTPEDYPRFFHMHPRTAELSLLEPVNRDFHQKFDLVIKAEQDNGHPLPAFAGLHIEILDENNQSPYFTMPSYQGYILESAPVGATISDSLNLTSPLRIVALDKDIEDTKDPELHLFLNDYTSVFTVTQTGITRYLTLLQPVDREEQQTYTFSITAFDGVQESEPVIVNIQVMDANDNTPTFPEISYDVYVYTDMRPGDSVIQLTAVDADEGSNGEITYEILVGAQGDFIINKTTGLITIAPGVEMIVGRTYALTVQAADNAPPAERRNSICTVYIEVLPPNNQSPPRFPQLMYSLEISEAMRVGAVLLNLQATDREGDSITYAIENGDPQRVFNLSETTGILTLGKALDRESTDRYILIITASDGRPDGTSTATVNIVVTDVNDNAPVFDPYLPRNLSVVEEEANAFVGQVKATDPDAGINGQVHYSLGNFNNLFRITSNGSIYTAVKLNREVRDYYELVVVATDGAVHPRHSTLTLAIKVLDIDDNSPVFTNSTYTVLVEENLPAGTTILQIEAKDVDLGANVSYRIRSPEVKHFFALHPFTGELSLLRSLDYEAFPDQEASITFLVEAFDIYGTMPPGIATVTVIVKDMNDYPPVFSKRIYKGMVAPDAVKGTPITTVYAEDADPPGLPASRVRYRVDDVQFPYPASIFEVEEDSGRVITRVNLNEEPTTIFKLVVVAFDDGEPVMSSSATVKILVLHPGEIPRFTQEEYRPPPVSELATKGTMVGVISAAAINQSIVYSIVSGNEEDTFGINNITGVIYVNGPLDYETRTSYVLRVQADSLEVVLANLRVPSKSNTAKVYIEIQDENNHPPVFQKKFYIGGVSEDARMFTSVLRVKATDKDTGNYSVMAYRLIIPPIKEGKEGFVVETYTGLIKTAMLFHNMRRSYFKFQVIATDDYGKGLSGKADVLVSVVNQLDMQVIVSNVPPTLVEKKIEDLTEILDRYVQEQIPGAKVVVESIGARRHGDAFSLEDYTKCDLTVYAIDPQTNRAIDRNELFKFLDGKLLDINKDFQPYYGEGGRILEIRTPEAVTSIKKRGESLGYTEGALLALAFIIILCCIPAILVVLVSYRQVFKGRQAECTKTARIQAALPAAKPAVPAPAPVAAPPPPPPPPPGAHLYEELGDSSILSSLFLLYHFQQSRGNNSVSEDRKHQQVVMPFSSNTIEAHKSAHVDGSLKSNKLKSARKFTFLSDEDDLSAHNPLYKENISQVSTNSDISQRTDFVDPFSPKIQAKSKSLRGPREKIQRLWSQSVSLPRRLMRKVPNRPEIIDLQQWQGTRQKAENENTGICTNKRGSSNPLLTTEEANLTEKEEIRQGETLMIEGTEQLKSLSSDSSFCFPRPHFSFSTLPTVSRTVELKSEPNVISSPAECSLELSPSRPCVLHSSLSRRETPICMLPIETERNIFENFAHPPNISPSACPLPPPPPISPPSPPPAPAPLAPPPDISPFSLFCPPPSPPSIPLPLPPPTFFPLSVSTSGPPTPPLLPPFPTPLPPPPPSIPCPPPPSASFLSTECVCITGVKCTTNLMPAEKIKSSMTQLSTTTVCKTDPQREPKGILRHVKNLAELEKSVANMYSQIEKNYLRTNVSELQTMCPSEVTNMEITSEQNKGSLNNIVEGTEKQSHSQSTSL

SEQ ID NO: 69800 - protein, 1150 aa, Homo sapiens
  Payload ID: 13866
  Gene Symbol: PRTG
  Gene Name: protogenin
  Uniprot ID: Q2VWP7
  ENSP ID: ENSP00000373937
MAPPLRPLARLRPPGMLLRALLLLLLLSPLPGVWCFSELSFVKEPQDVTVTRKDPVVLDCQAHGEVPIKVTWLKNGAKMSENKRIEVLSNGSLYISEVEGRRGEQSDEGFYQCLAMNKYGAILSQKAHLALSTISAFEVQPISTEVHEGGVARFACKISSHPPAVITWEFNRTTLPMTMDRITALPTGVLQIYDVSQRDSGNYRCIAATVAHRRKSMEASLTVIPAKESKSFHTPTIIAGPQNITTSLHQTVVLECMATGNPKPIISWSRLDHKSIDVFNTRVLGNGNLMISDVRLQHAGVYVCRATTPGTRNFTVAMATLTVLAPPSFVEWPESLTRPRAGTARFVCQAEGIPSPKMSWLKNGRKIHSNGRIKMYNSKLVINQIIPEDDAIYQCMAENSQGSILSRARLTVVMSEDRPSAPYNVHAETMSSSAILLAWERPLYNSDKVIAYSVHYMKAEGLNNEEYQVVIGNDTTHYIIDDLEPASNYTFYIVAYMPMGASQMSDHVTQNTLEDVPLRPPEISLTSRSPTDILISWLPIPAKYRRGQVVLYRLSFRLSTENSIQVLELPGTTHEYLLEGLKPDSVYLVRITAATRVGLGESSVWTSHRTPKATSVKAPKSPELHLEPLNCTTISVRWQQDVEDTAAIQGYKLYYKEEGQQENGPIFLDTKDLLYTLSGLDPRRKYHVRLLAYNNIDDGYQADQTVSTPGCVSVRDRMVPPPPPPHHLYAKANTSSSIFLHWRRPAFTAAQIINYTIRCNPVGLQNASLVLYLQTSETHMLVQGLEPNTKYEFAVRLHVDQLSSPWSPVVYHSTLPEAPAGPPVGVKVTLIEDDTALVSWKPPDGPETVVTRYTILYASRKAWIAGEWQVLHREGAITMALLENLVAGNVYIVKISASNEVGEGPFSNSVELAVLPKETSESNQRPKRLDSADAKVYSGYYHLDQKSMTGIAVGVGIALTCILICVLILIYRSKARKSSASKTAQNGTQQLPRTSASLASGNEVGKNLEGAVGNEESLMPMIMPNSFIDAKGGTDLIINSYGPIIKNNSKKKWFFFQDSKKIQVEQPQRRFTPAVCFYQPGTTVLISDEDSPSSPGQTTSFSRPFGVAADTEHSANSEGSHETGDSGRFSHESNDEIHLSSVISTTPPNL

SEQ ID NO: 69801 - protein, 22 aa, Homo sapiens
  Payload ID: 13866
  Gene Symbol: PRTG
  Gene Name: protogenin
  ENSP ID: ENSP00000452760
MSENKRIEVLSNGSLYISEVEG

SEQ ID NO: 69802 - protein, 218 aa, Homo sapiens
  Payload ID: 13866
  Gene Symbol: PRTG
  Gene Name: protogenin
  ENSP ID: ENSP00000453160
EYQVVIGNDTTHYIIDDLEPASNYTFYIVAYMPMGASQMSDHVTQNTLEDVPLRPPEISLTSRSPTDILISWLPIPAKYRRGQVVLYRLSFRLSTENSIQVLELPGTTHEYLLEGLKPDSVYLVRITAATRVGLGESSVWTSHRTPKATSVKAPKSPELHLEPLNCTTISVRWQQDVEDTAAIQGYKLYYKEEGQQENGPIFLDTKDLLYTLSGLARI

SEQ ID NO: 69803 - protein, 137 aa, Homo sapiens
  Payload ID: 13866
  Gene Symbol: PRTG
  Gene Name: protogenin
  ENSP ID: ENSP00000453335
MAPPLRPLARLRPPGMLLRALLLLLLLSPLPGVWCFSELSFVKEPQDVTVTRKDPVVLDCQAHGEVPIKVTWLKNGAKMSENKRIEVLSNGSLYISEVEGRRGEQSDEGFYQCLAMNKYGAILSQKAHLALSRIGST

SEQ ID NO: 69804 - protein, 477 aa, Homo sapiens
  Payload ID: 13867
  Gene Symbol: PPOX
  Gene Name: protoporphyrinogen oxidase
  Uniprot ID: P50336
  ENSP ID: ENSP00000343943
MGRTVVVLGGGISGLAASYHLSRAPCPPKVVLVESSERLGGWIRSVRGPNGAIFELGPRGIRPAGALGARTLLLVSELGLDSEVLPVRGDHPAAQNRFLYVGGALHALPTGLRGLLRPSPPFSKPLFWAGLRELTKPRGKEPDETVHSFAQRRLGPEVASLAMDSLCRGVFAGNSRELSIRSCFPSLFQAEQTHRSILLGLLLGAGRTPQPDSALIRQALAERWSQWSLRGGLEMLPQALETHLTSRGVSVLRGQPVCGLSLQAEGRWKVSLRDSSLEADHVISAIPASVLSELLPAEAAPLARALSAITAVSVAVVNLQYQGAHLPVQGFGHLVPSSEDPGVLGIVYDSVAFPEQDGSPPGLRVTVMLGGSWLQTLEASGCVLSQELFQQRAQEAAATQLGLKEMPSHCLVHLHKNCIPQYTLGHWQKLESARQFLTAHRLPLTLAGASYEGVAVNDCIESGRQAAVSVLGTEPNS

SEQ ID NO: 69805 - protein, 477 aa, Homo sapiens; identical to SEQ ID NO: 69804
  Payload ID: 13867
  Gene Symbol: PPOX
  Gene Name: protoporphyrinogen oxidase
  Uniprot ID: P50336
  ENSP ID: ENSP00000356978

SEQ ID NO: 69806 - protein, 161 aa, Homo sapiens
  Payload ID: 13867
  Gene Symbol: PPOX
  Gene Name: protoporphyrinogen oxidase
  ENSP ID: ENSP00000438136
  MOD_RES (1)..(1): Any amino acid
XADHVISAIPASVLSELLPAEAAPLARALSAITAVSVAVVNLQYQGAHLPVQGFGHLVPSSEDPGVLGIVYDSVAFPEQDGSPPGLRVTVMLGGSWLQTLEASGCVLSQELFQQRAQEAAATQLGLKEMPSHCLVHLHKNCIPQYTLGHWQKLGKLGKQLG

SEQ ID NO: 69807 - protein, 230 aa, Homo sapiens
  Payload ID: 13867
  Gene Symbol: PPOX
  Gene Name: protoporphyrinogen oxidase
  ENSP ID: ENSP00000439544
  MOD_RES (1)..(1): Any amino acid
XQAEQTHRSILLGLLLGAGRTPQPDSALIRQALAERWSQWSLRGGLEMLPQALETHLTSRGVSVLRGQPVCGLSLQAEGRWKGFGHLVPSSEDPGVLGIVYDSVAFPEQDGSPPGLRVTVMLGGSWLQTLEASGCVLSQELFQQRAQEAAATQLGLKEMPSHCLVHLHKNCIPQYTLGHWQKLESARQFLTAHRLPLTLAGASYEGVAVNDCIESGRQAAVSVLGTEPNS

SEQ ID NO: 69808 - protein, 113 aa, Homo sapiens
  Payload ID: 13867
  Gene Symbol: PPOX
  Gene Name: protoporphyrinogen oxidase
  ENSP ID: ENSP00000439613
MGRTVVVLGGGISGLAASYHLSRAPCPPKVVLVESSERLGGWIRSVRGPNGAIFELGPRGIRPAGALGARTLLLVSLRDSSLEADHVISAIPASGIWTFGAIFRRSRSPGNRV

SEQ ID NO: 69809 - protein, 156 aa, Homo sapiens
  Payload ID: 13867
  Gene Symbol: PPOX
  Gene Name: protoporphyrinogen oxidase
  ENSP ID: ENSP00000443769
MGRTVVVLGGGISGLAASYHLSRAPCPPKVMLGGSWLQTLEASGCVLSQELFQQRAQEAAATQLGLKEMPSHCLVHLHKTKNQLKWRQSHDRTVEWPKEYPGRSRKQAPSILHVPGCQLLRCRDRDHLGAVSEQPRSSAESRVGVASSTFSTFPLF

SEQ ID NO: 69810 - protein, 185 aa, Homo sapiens
  Payload ID: 13867
  Gene Symbol: PPOX
  Gene Name: protoporphyrinogen oxidase
  ENSP ID: ENSP00000444216
MGRTVVVLGGGISGLAASYHLSRAPCPPKVVLVESSERLGGWIRSVRGPNGAIFELGPRGIRPAGALGARTLLLVMLGGSWLQTLEASGCVLSQELFQQRAQEAAATQLGLKEMPSHCLVHLHKNCIPQYTLGHWQKLESARQFLTAHRLPLTLAGASYEGVAVNDCIESGRQAAVSVLGTEPNS

SEQ ID NO: 69811 - protein, 858 aa, Homo sapiens
  Payload ID: 13868
  Gene Symbol: PRPF40B
  Gene Name: PRP40 homolog, pre-mRNA processing factor B
  Uniprot ID: Q6NWY9
  ENSP ID: ENSP00000261897
MPPPGIPPPFPPMGLPPMSQRPPAIPPMPPGILPPMLPPMGAPPPLTQIPGMVPPMMPGMLMPAVPVTAATAPGADTASSAVAGTGPPRALWSEHVAPDGRIYYYNADDKQSVWEKPSVLKSKAELLLSQCPWKEYKSDTGKPYYYNNQSKESRWTRPKDLDDLEVLVKQEAAGKQQQQLPQTLQPQPPQPQPDPPPVPPGPTPVPTGLLEPEPGGSEDCDVLEATQPLEQGFLQQLEEGPSSSGQHQPQQEEEESKPEPERSGLSWSNREKAKQAFKELLRDKAVPSNASWEQAMKMVVTDPRYSALPKLSEKKQAFNAYKAQREKEEKEEARLRAKEAKQTLQHFLEQHERMTSTTRYRRAEQTFGELEVWAVVPERDRKEVYDDVLFFLAKKEKEQAKQLRRRNIQALKSILDGMSSVNFQTTWSQAQQYLMDNPSFAQDHQLQNMDKEDALICFEEHIRALEREEEEERERARLRERRQQRKNREAFQTFLDELHETGQLHSMSTWMELYPAVSTDVRFANMLGQPGSTPLDLFKFYVEELKARFHDEKKIIKDILKVNTAFEDFAHVISFDKRAAALDAGNIKLTFNSLLEKAEAREREREKEEARRMRRREAAFRSMLRQAVPALELGTAWEEVRERFVCDSAFEQITLESERIRLFREFLQVLEQTECQHLHTKGRKHGRKGKKHHHKRSHSPSGSESEEEELPPPSLRPPKRRRRNPSESGSEPSSSLDSVESGGAALGGRGSPSSHLLGADHGLRKAKKPKKKTKKRRHKSNSPESETDPEEKAGKESDEKEQEQDKDRELQQAELPNRSPGFGIKKEKTGWDTSESELSEGELERRRRTLLQQLDDHQ

SEQ ID NO: 69812 - protein, 871 aa, Homo sapiens
  Payload ID: 13868
  Gene Symbol: PRPF40B
  Gene Name: PRP40 homolog, pre-mRNA processing factor B
  Uniprot ID: Q6NWY9
  ENSP ID: ENSP00000369634
MMPPPFMPPPGIPPPFPPMGLPPMSQRPPAIPPMPPGILPPMLPPMGAPPPLTQIPGMVPPMMPGMLMPAVPVTAATAPGADTASSAVAGTGPPRALWSEHVAPDGRIYYYNADDKQSVWEKPSVLKSKAELLLSQCPWKEYKSDTGKPYYYNNQSKESRWTRPKDLDDLEVLVKQEAAGKQQQQLPQTLQPQPPQPQPDPPPVPPGPTPVPTGLLEPEPGGSEDCDVLEATQPLEQGFLQQLEEGPSSSGQHQPQQEEEESKPEPERSGLSWSNREKAKQAFKELLRDKAVPSNASWEQAMKMVVTDPRYSALPKLSEKKQAFNAYKAQREKEEKEEARLRAKEAKQTLQHFLEQHERMTSTTRYRRAEQTFGELEVWAVVPERDRKEVYDDVLFFLAKKEKEQAKQLRRRNIQALKSILDGMSSVNFQTTWSQAQQYLMDNPSFAQDHQLQNMDKEDALICFEEHIRALEREEEEERERARLRERRQQRKNREAFQTFLDELHETGQLHSMSTWMELYPAVSTDVRFANMLGQPGSTPLDLFKFYVEELKARFHDEKKIIKDILKDRGFCVEVNTAFEDFAHVISFDKRAAALDAGNIKLTFNSLLEKAEAREREREKEEARRMRRREAAFRSMLRQAVPALELGTAWEEVRERFVCDSAFEQITLESERIRLFREFLQVLEQTECQHLHTKGRKHGRKGKKHHHKRSHSPSGSESEEEELPPPSLRPPKRRRRNPSESGSEPSSSLDSVESGGAALGGRGSPSSHLLGADHGLRKAKKPKKKTKKRRHKSNSPESETDPEEKAGKESDEKEQEQDKDRELQQAELPNRSPGFGIKKEKTGWDTSESELSEGELERRRRTLLQQLDDHQ

SEQ ID NO: 69813 - protein, 892 aa, Homo sapiens
  Payload ID: 13868
  Gene Symbol: PRPF40B
  Gene Name: PRP40 homolog, pre-mRNA processing factor B
  ENSP ID: ENSP00000448073
MSVPDSGPRPPAAPAPFPPGPPMMPPPFMPPPGIPPPFPPMGLPPMSQRPPAIPPMPPGILPPMLPPMGAPPPLTQIPGMVPPMMPGMLMPAVPVTAATAPGADTASSAVAGTGPPRALWSEHVAPDGRIYYYNADDKQSVWEKPSVLKSKAELLLSQCPWKEYKSDTGKPYYYNNQSKESRWTRPKDLDDLEVLVKQEAAGKQQQQLPQTLQPQPPQPQPDPPPVPPGPTPVPTGLLEPEPGGSEDCDVLEATQPLEQGFLQQLEEGPSSSGQHQPQQEEEESKPEPERSGLSWSNREKAKQAFKELLRDKAVPSNASWEQAMKMVVTDPRYSALPKLSEKKQAFNAYKAQREKEEKEEARLRAKEAKQTLQHFLEQHERMTSTTRYRRAEQTFGELEVWAVVPERDRKEVYDDVLFFLAKKEKEQAKQLRRRNIQALKSILDGMSSVNFQTTWSQAQQYLMDNPSFAQDHQLQNMDKEDALICFEEHIRALEREEEEERERARLRERRQQRKNREAFQTFLDELHETGQLHSMSTWMELYPAVSTDVRFANMLGQPGSTPLDLFKFYVEELKARFHDEKKIIKDILKDRGFCVEVNTAFEDFAHVISFDKRAAALDAGNIKLTFNSLLEKAEAREREREKEEARRMRRREAAFRSMLRQAVPALELGTAWEEVRERFVCDSAFEQITLESERIRLFREFLQVLETECQHLHTKGRKHGRKGKKHHHKRSHSPSGSESEEEELPPPSLRPPKRRRRNPSESGSEPSSSLDSVESGGAALGGRGSPSSHLLGADHGLRKAKKPKKKTKKRRHKSNSPESETDPEEKAGKESDEKEQEQDKDRELQQAELPNRSPGFGIKKEKTGWDTSESELSEGELERRRRTLLQQLDDHQ

SEQ ID NO: 69814 - protein, 137 aa, Homo sapiens
  Payload ID: 13868
  Gene Symbol: PRPF40B
  Gene Name: PRP40 homolog, pre-mRNA processing factor B
  ENSP ID: ENSP00000449485
LKDRGFCVEVNTAFEDFAHVISFDKRAAALDAGNIKLTFNSLLEKAEAREREREKEEARRMRRREAAFRSMLRQAVPALELGTAWEEVRERFVCDSAFEQITLESERIRLFREFLQVLETECQHLHTKGRKHGRKGL

SEQ ID NO: 69815 - protein, 6 aa, Homo sapiens
  Payload ID: 13868
  Gene Symbol: PRPF40B
  Gene Name: PRP40 homolog, pre-mRNA processing factor B
  ENSP ID: ENSP00000449569
MMPPPF

SEQ ID NO: 69816 - protein, 109 aa, Homo sapiens
  Payload ID: 13869
  Gene Symbol: PRPF40A
  Gene Name: PRP40 pre-mRNA processing factor 40 homolog A
  ENSP ID: ENSP00000346332
  MOD_RES (1)..(1): Any amino acid
XLRSLLVGMCSGSGRRRSSLSPTMRPGTGAERGGLMMGHPGMHYAPMGMHPMGQRANMPPVPHGMMPQMMPPMGGPPMGQMPGMMSSVMPGMMMSHMSQASMQPALPLN

SEQ ID NO: 69817 - protein, 930 aa, Homo sapiens
  Payload ID: 13869
  Gene Symbol: PRPF40A
  Gene Name: PRP40 pre-mRNA processing factor 40 homolog A
  Uniprot ID: O75400
  ENSP ID: ENSP00000386458
MCSGSGRRRSSLSPTMRPGTGAERGGLMMGHPGMHYAPMGMHPMGQRANMPPVPHGMMPQMMPPMGGPPMGQMPGMMSSVMPGMMMSHMSQASMQPALPPGVNSMDVAAGTASGAKSMWTEHKSPDGRTYYYNTETKQSTWEKPDDLKTPAEQLLSKCPWKEYKSDSGKPYYYNSQTKESRWAKPKELEDLEGYQNTIVAGSLITKSNLHAMIKAEESSKQEECTTTSTAPVPTTEIPTTMSTMAAAEAAAAVVAAAAAAAAAAAAANANASTSASNTVSGTVPVVPEPEVTSIVATVVDNENTVTISTEEQAQLTSTPAIQDQSVEVSSNTGEETSKQETVADFTPKKEEEESQPAKKTYTWNTKEEAKQAFKELLKEKRVPSNASWEQAMKMIINDPRYSALAKLSEKKQAFNAYKVQTEKEEKEEARSKYKEAKESFQRFLENHEKMTSTTRYKKAEQMFGEMEVWNAISERDRLEIYEDVLFFLSKKEKEQAKQLRKRNWEALKNILDNMANVTYSTTWSEAQQYLMDNPTFAEDEELQNMDKEDALICFEEHIRALEKEEEEEKQKSLLRERRRQRKNRESFQIFLDELHEHGQLHSMSSWMELYPTISSDIRFTNMLGQPGSTALDLFKFYVEDLKARYHDEKKIIKDILKDKGFVVEVNTTFEDFVAIISSTKRSTTLDAGNIKLAFNSLLEKAEAREREREKEEARKMKRKESAFKSMLKQAAPPIELDAVWEDIRERFVKEPAFEDITLESERKRIFKDFMHVLEHECQHHHSKNKKHSKKSKKHHRKRSRSRSGSDSDDDDSHSKKKRQRSESRSASEHSSSAESERSYKKSKKHKKKSKKRRHKSDSPESDAEREKDKKEKDRESEKDRTRQRSESKHKSPKKKTGKDSGNWDTSGSELSEGELEKRRRTLLEQLDDDQ

SEQ ID NO: 69818 - protein, 163 aa, Homo sapiens
  Payload ID: 13869
  Gene Symbol: PRPF40A
  Gene Name: PRP40 pre-mRNA processing factor 40 homolog A
  ENSP ID: ENSP00000406924
RSLLVGMCSGSGRRRSSLSPTMRPGTGAERGGLMMGHPGMHYAPMGMHPMGQRANMPPVPHGMMPQMMPPMGGPPMGQMPGMMSSVMPGMMMSHMSQASMQPALPQLLSKCPWKEYKSDSGKPYYYNSQTKESRWAKPKELEDLEGYQNTIVAGSLITKSNLH

SEQ ID NO: 69819 - protein, 346 aa, Homo sapiens
  Payload ID: 13869
  Gene Symbol: PRPF40A
  Gene Name: PRP40 pre-mRNA processing factor 40 homolog A
  ENSP ID: ENSP00000441656
ERGGLMVSEMESHPPSQGPGDGERRLSGSSLCSGSWVSADGFLRRRPSMGHPGMHYAPMGMHPMGQRANMPPVPHGMMPQMMPPMGGPPMGQMPGMMSSVMPGMMMSHMSQASMQPALPPGVNSMDVAAGTASGAKSMWTEHKSPDGRTYYYNTETKQSTWEKPDDLKTPAEQLLSKCPWKEYKSDSGKPYYYNSQTKESRWAKPKELEDLEAMIKAEESSKQEECTTTSTAPVPTTEIPTTMSTMAAAEAAAAVVAAAAAAAAAAAAANANASTSASNTVSGTVPVVPEPEVTSIVATVVDNENTVTISTEEQAQLTSTPAIQDQSVEVSSNTGEETSKQETVAE

SEQ ID NO: 69820 - protein, 448 aa, Homo sapiens
  Payload ID: 13869
  Gene Symbol: PRPF40A
  Gene Name: PRP40 pre-mRNA processing factor 40 homolog A
  ENSP ID: ENSP00000444656
MRPGTGAERGGLMVSEMESHPPSQGPGDGERRLSGSSLCSGSWVSADGFLRRRPSMGHPGMHYAPMGMHPMGQRANMPPVPHGMMPQMMPPMGGPPMGQMPGMMSSVMPGMMMSHMSQASMQPALPPGVNSMDVAAGTASGAKSMWTEHKSPDGRTYYYNTETKQSTWEKPDDLKTPAEQLLSKCPWKEYKSDSGKPYYYNSQTKESRWAKPKELEDLEGYQNTIVAGSLITKSNLHAMIKAEESSKQEECTTTSTAPVPTTEIPTTMSTMAAAEAAAAVVAAAAAAAAAAAAANANASTSASNTVSGTVPVVPEPEVTSIVATVVDNENTVTISTEEQAQLTSTPAIQDQSVEVSSNTGEETSKQETVADFTPKKEEEESQPAKKTYTWNTKEEAKQAFKELLKEKRVPSNASWEQAMKMIINDPRYSALAKLSEKKQAFNAYKVQT

SEQ ID NO: 69821 - protein, 643 aa, Homo sapiens
  Payload ID: 13870
  Gene Symbol: PRR5-ARHGAP8
  Gene Name: PRR5-ARHGAP8 readthrough
  ENSP ID: ENSP00000262731
MRTLRRLKFMSSPSLSDLGKREPAAAADERGTQQRRACANATWNSIHNGVIAVFQRKGLPDQELFSLNEGVRQLLKTELGSFFTEYLQNQLLTKGMVILRDKIRFYEGQKLLDSLAETWDFFFSDVLPMLQAIFYPVQGKEPSVRQLALLHFRNAITLSVKLEDALARAHARVPPAIVQMLLVLQGVHESRGVTEDYLRLETLVQKVVSPYLGTYGLHSSEGPFTHSCILELQRDKAAAAAVLGAVRKRPSVVPMAGQDPALSTSHPFYDVARHGILQVAGDDRFGRRVVTFSCCRMPPSHELDHQRLLEYKKNLKALYVVHPTSFIKVLWNILKPLISHKFGKKVIYFNYLSELHEHLKYDQLVIPPEVLRYDEKLQSLHEGRTPPPTKTPPPRPPLPTQQFGVSLQYLKDKNQGELIPPVLRFTVTYLREKGLRTEGLFRRSASVQTVREIQRLYNQGKPVNFDDYGDIHIPAVILKTFLRELPQPLLTFQAYEQILGITCVESSLRVTGCRQILRSLPEHNYVVLRYLMGFLHAVSRESIFNKMNSSNLACVFGLNLIWPSQGVSSLSALVPLNMFTELLIEYYEKIFSTPEAPGEHGLAPWEQGSRAAPLQEAVPRTQATGLTKPTLPPSPLMAARRRL

SEQ ID NO: 69822 - protein, 564 aa, Homo sapiens
  Payload ID: 13870
  Gene Symbol: PRR5-ARHGAP8
  Gene Name: PRR5-ARHGAP8 readthrough
  ENSP ID: ENSP00000354732
MRTLRRLKFMSSPSLSDLGKREPAAAADERGTQQRRACANATWNSIHNGVIAVFQRKGLPDQELFSLNEGVRQLLKTELGSFFTEYLQNQLLTKGMVILRDKIRFYEELQRDKAAAAAVLGAVRKRPSVVPMAGQDPALSTSHPFYDVARHGILQVAGDDRFGRRVVTFSCCRMPPSHELDHQRLLEYLKYTLDQYVENDYTIVYFHYGLNSRNKPSLGWLQSAYKEFDRKYKKNLKALYVVHPTSFIKVLWNILKPLISHKFGKKVIYFNYLSELHEHLKYDQLVIPPEVLRYDEKLQSLHEGRTPPPTKTPPPRPPLPTQQFGVSLQYLKDKNQGELIPPVLRFTVTYLREKGLRTEGLFRRSASVQTVREIQRLYNQGKPVNFDDYGDIHIPAVILKTFLRELPQPLLTFQAYEQILGITCVESSLRVTGCRQILRSLPEHNYVVLRYLMGFLHAVSRESIFNKMNSSNLACVFGLNLIWPSQGVSSLSALVPLNMFTELLIEYYEKIFSTPEAPGEHGLAPWEQGSRAAPLQEAVPRTQATGLTKPTLPPSPLMAARRRL

SEQ ID NO: 69823 - protein, 504 aa, Homo sapiens
  Payload ID: 13870
  Gene Symbol: PRR5-ARHGAP8
  Gene Name: PRR5-ARHGAP8 readthrough
  ENSP ID: ENSP00000425026
  MOD_RES (1)..(1): Any amino acid
XLGSFFTEYLQNQLLTKGMVILRDKIRFYEELQRDKAAAAAVLGAVRKRPSVVPMAGQDPALSTSHPFYDVARHGILQVAGDDRFGRRVVTFSCCRMPPSHELDHQRLLEYLKYTLDQYVENDYTIVYFHYGLNSRNKPSLGWLQSAYKEFDRKYKKNLKALYVVHPTSFIKVLWNILKPLISHKFGKKVIYFNYLSELHEHLKYDQLVIPPEVLRYDEKLQSLHEGRTPPPTKTPPPRPPLPTQQFGVSLQYLKDKNQGELIPPVLRFTVTYLREKGLRTEGLFRRSASVQTVREIQRLYNQGKPVNFDDYGDIHIPAVILKTFLRELPQPLLTFQAYEQILGITSLPLAPLELSREPHALPGVESSLRVTGCRQILRSLPEHNYVVLRYLMGFLHAVSRESIFNKMNSSNLACVFGLNLIWPSQGVSSLSALVPLNMFTELLIEYYEKIFSTPEAPGEHGLAPWEQGSRAAPLQEAVPRTQATGLTKPTLPPSPLMAARRRL

SEQ ID NO: 69824 - protein, 453 aa, Homo sapiens
  Payload ID: 13871
  Gene Symbol: PRUNE
  Gene Name: prune exopolyphosphatase
  Uniprot ID: Q86TP1
  ENSP ID: ENSP00000271620
MEDYLQGCRAALQESRPLHVVLGNEACDLDSTVSALALAFYLAKTTEAEEVFVPVLNIKRSELPLRGDIVFFLQKVHIPESILIFRDEIDLHALYQAGQLTLILVDHHILSKSDTALEEAVAEVLDHRPIEPKHCPPCHVSVELVGSCATLVTERILQGAPEILDRQTAALLHGTIILDCVNMDLKIGKATPKDSKYVEKLEALFPDLPKRNDIFDSLQKAKFDVSGLTTEQMLRKDQKTIYRQGVKVAISAIYMDLEAFLQRSNLLADLHAFCQAHSYDVLVAMTIFFNTHNEPVRQLAIFCPHVALQTTICEVLERSHSPPLKLTPASSTHPNLHAYLQGNTQVSRKKLLPLLQEALSAYFDSMKIPSGQPETADVSREQVDKELDRASNSLISGLSQDEEDPPLPPTPMNSLVDECPLDQGLPKLSAEAVFEKCSQISLSQSTTASLSKK

SEQ ID NO: 69825 - protein, 218 aa, Homo sapiens
  Payload ID: 13871
  Gene Symbol: PRUNE
  Gene Name: prune exopolyphosphatase
  Uniprot ID: Q86TP1
  ENSP ID: ENSP00000357930
MDLKIGKATPKDSKYVEKLEALFPDLPKRNDIFDSLQKAKFDVSGLTTEQMLRKDQKTIYRQGVKVAISAIYMDLEICEVLERSHSPPLKLTPASSTHPNLHAYLQGNTQVSRKKLLPLLQEALSAYFDSMKIPSGQPETADVSREQVDKELDRASNSLISGLSQDEEDPPLPPTPMNSLVDECPLDQGLPKLSAEAVFEKCSQISLSQSTTASLSKK

SEQ ID NO: 69826 - protein, 168 aa, Homo sapiens
  Payload ID: 13871
  Gene Symbol: PRUNE
  Gene Name: prune exopolyphosphatase
  Uniprot ID: Q86TP1
  ENSP ID: ENSP00000357931
MLRKDQKTIYRQGVKVAISAIYMDLEICEVLERSHSPPLKLTPASSTHPNLHAYLQGNTQVSRKKLLPLLQEALSAYFDSMKIPSGQPETADVSREQVDKELDRASNSLISGLSQDEEDPPLPPTPMNSLVDECPLDQGLPKLSAEAVFEKCSQISLSQSTTASLSKK

SEQ ID NO: 69827 - protein, 271 aa, Homo sapiens
  Payload ID: 13871
  Gene Symbol: PRUNE
  Gene Name: prune exopolyphosphatase
  Uniprot ID: Q86TP1
  ENSP ID: ENSP00000357932
MDLKIGKATPKDSKYVEKLEALFPDLPKRNDIFDSLQKAKFDVSGLTTEQMLRKDQKTIYRQGVKVAISAIYMDLEAFLQRSNLLADLHAFCQAHSYDVLVAMTIFFNTHNEPVRQLAIFCPHVALQTTICEVLERSHSPPLKLTPASSTHPNLHAYLQGNTQVSRKKLLPLLQEALSAYFDSMKIPSGQPETADVSREQVDKELDRASNSLISGLSQDEEDPPLPPTPMNSLVDECPLDQGLPKLSAEAVFEKCSQISLSQSTTASLSKK

SEQ ID NO: 69828 - protein, 218 aa, Homo sapiens; identical to SEQ ID NO: 69825
  Payload ID: 13871
  Gene Symbol: PRUNE
  Gene Name: prune exopolyphosphatase
  Uniprot ID: Q86TP1
  ENSP ID: ENSP00000357933

SEQ ID NO: 69829 - protein, 139 aa, Homo sapiens
  Payload ID: 13871
  Gene Symbol: PRUNE
  Gene Name: prune exopolyphosphatase
  ENSP ID: ENSP00000387696
MDLKIGKATPKDSKYVEKLEALFPDLPKRNDIFDSLQKAKFDVSGLTTEQMLRKDQKTIYRQGVKVAISAIYMDLEAFLQRSNLLADLHAFCQAHSYDVLVAMTIFFNTHNEPVRQLAIFCPHVALQTTICEVLERSHS

SEQ ID NO: 69830 - protein, 178 aa, Homo sapiens
  Payload ID: 13871
  Gene Symbol: PRUNE
  Gene Name: prune exopolyphosphatase
  ENSP ID: ENSP00000392632
MDLKIGKATPKDSKYVEKLEALFPDLPKRNDIFDSLQKAKFDVSGLTTEQMLRKDQKTIYRQGVKVAISAIYMDLEICEVLERSHSPPLKLTPASSTHPNLHAYLQGNTQVSRKKLLPLLQEALSAYFDSMKIPSGQPETADVSREQVDKELDRASNSLISGLSQDEEDPPLPPTPMN

SEQ ID NO: 69831 - protein, 191 aa, Homo sapiens [sequence omitted]

SEQ ID NO: 69832 - protein, 298 aa, Homo sapiens
  Payload ID: 13872
  Gene Symbol: PRUNE2
  Gene Name: prune homolog 2 (Drosophila)
  ENSP ID: ENSP00000365903
MEEFLQRAKSKLNRSKRLEKVHVVIGPKSCDLDSLISTFTYAYFLDKVSPPGVLCLPVLNIPRTEFNYFTETRFILEELNISESFHIFRDEINLHQLNDEGKLSITLVGSSVLASEDKTLESAVVKVINPVEQSDANVEFRESSSSLVLKEILQEAPELITEQLAHRLRGSILFKWMTMESEKISEKQEEILSILEEKFPNLPPREDIINVLQETQFSAQGLSIEQTMLKDLKELSDGEIKVAISTVSMNLEMSRIELFPKGTWLVNRDAFQSRNSGSKCMPGTTVLQCTLRSLQRGK

SEQ ID NO: 69833 - protein, 353 aa, Homo sapiens
  Payload ID: 13872
  Gene Symbol: PRUNE2
  Gene Name: prune homolog 2 (Drosophila)
  ENSP ID: ENSP00000365907
MLKSCSRASFSPSVRKPPLILRRLLSEDVGMDIPFEEGVLSPSAADMRPEPPNSLDLNDTHPRRIKLTAPNINLSLDQSEGSILSDDNLDSPDEIDINVDELDTPDEADSFEYTGHEDPTANKDSGQESESIPEYTAEEEREDNRLWRTVVIGEQEQRIDMKVIEPYRRVISHGGYYGDGLNAIIVFAACFLPDSSRADYHYVMENLFLYVISTLELMVAEDYMIVYLNGATPRRRMPGLGWMKKCYQMIDRRLRKNLKSFIIVHPSWFIRTILAVTRPFISSKFSSKIKYVNSLSELSGLIPMDCIHIPESIIKLDEELREASEAAKTSCLYNDPEMSSMEKDIDLKLKEKP

SEQ ID NO: 69834 - protein, 3088 aa, Homo sapiens
  Payload ID: 13872
  Gene Symbol: PRUNE2
  Gene Name: prune homolog 2 (Drosophila)
  Uniprot ID: Q8WUY3
  ENSP ID: ENSP00000365908
MEEFLQRAKSKLNRSKRLEKVHVVIGPKSCDLDSLISTFTYAYFLDKVSPPGVLCLPVLNIPRTEFNYFTETRFILEELNISESFHIFRDEINLHQLNDEGKLSITLVGSSVLASEDKTLESAVVKVINPVEQSDANVEFRESSSSLVLKEILQEAPELITEQLAHRLRGSILFKWMTMESEKISEKQEEILSILEEKFPNLPPREDIINVLQETQFSAQGLSIEQTMLKDLKELSDGEIKVAISTVSMNLENCLFHSNITSDLKAFTDKFGFDVLILFSSYLSEEQQPRRQIAVYSENMELCSQICCELEECQNPCLELEPFDCGCDEILVYQQEDPSVTCDQVVLVVKEVINRRCPEMVSNSRTSSTEAVAGSAPLSQGSSGIMELYGSDIEPQPSSVNFIENPPDLNDSNQAQVDANVDLVSPDSGLATIRSSRSSKESSVFLSDDSPVGEGAGPHHTLLPGLDSYSPIPEGAVAEEHAWSGEHGEHFDLFNFDPAPMASGQSQQSSHSADYSPADDFFPNSDLSEGQLPAGPEGLDGMGTNMSNYSSSSLLSGAGKDSLVEHDEEFVQRQDSPRDNSERNLSLTDFVGDESPSPERLKNTGKRIPPTPMNSLVESSPSTEEPASLYTEDMTQKATDTGHMGPPQTHARCSSWWGGLEIDSKNIADAWSSSEQESVFQSPESWKEHKPSSIDRRASDSVFQPKSLEFTKSGPWESEFGQPELGSNDIQDKNEESLPFQNLPMEKSPLPNTSPQGTNHLIEDFASLWHSGRSPTAMPEPWGNPTDDGEPAAVAPFPAWSAFGKEDHDEALKNTWNLHPTSSKTPSVRDPNEWAMAKSGFAFSSSELLDNSPSEINNEAAPEIWGKKNNDSRDHIFAPGNPSSDLDHTWTNSKPPKEDQNGLVDPKTRGKVYEKVDSWNLFEENMKKGGSDVLVPWEDSFLSYKCSDYSASNLGEDSVPSPLDTNYSTSDSYTSPTFAGDEKETEHKPFAKEEGFESKDGNSTAEETDIPPQSLQQSSRNRISSGPGNLDMWASPHTDNSSEINTTHNLDENELKTEHTDGKNISMEDDVGESSQSSYDDPSMMQLYNETNRQLTLLHSSTNSRQTAPDSLDLWNRVILEDTQSTATISDMDNDLDWDDCSGGAAIPSDGQTEGYMAEGSEPETRFTVRQLEPWGLEYQEANQVDWELPASDEHTKDSAPSEHHTLNEKSGQLIANSIWDSVMRDKDMSSFMLPGSSHITDSEQRELPPEIPSHSANVKDTHSPDAPAASGTSESEALISHLDKQDTERETLQSDAASLATRLENPGYFPHPDPWKGHGDGQSESEKEAQGATDRGHLDEEEVIASGVENASGISEKGQSDQELSSLVASEHQEICIKSGKISSLAVTFSPQTEEPEEVLEYEEGSYNLDSRDVQTGMSADNLQPKDTHEKHLMSQRNSGETTETSDGMNFTKYVSVPEKDLEKTEECNFLEPENVGGGPPHRVPRSLDFGDVPIDSDVHVSSTCSEITKNLDVKGSENSLPGAGSSGNFDRDTISSEYTHSSASSPELNDSSVALSSWGQQPSSGYQEENQGNWSEQNHQESELITTDGQVEIVTKVKDLEKNRINEFEKSFDRKTPTFLEIWNDSVDGDSFSSLSSPETGKYSEHSGTHQESNLIASYQEKNEHDISATVQPEDARVISTSSGSDDDSVGGEESIEEEIQVANCHVAEDESRAWDSLNESNKFLVTADPKSENIYDYLDSSEPAENENKSNPFCDNQQSSPDPWTFSPLTETEMQITAVEKEKRSSPETGTTGDVAWQISPKASFPKNEDNSQLEMLGFSADSTEWWKASPQEGRLIESPFERELSDSSGVLEINSSVHQNASPWGVPVQGDIEPVETHYTNPFSDNHQSPFLEGNGKNSHEQLWNIQPRQPDPDADKFSQLVKLDQIKEKDSREQTFVSAAGDELTPETPTQEQCQDTMLPVCDHPDTAFTHAEENSCVTSNVSTNEGQETNQWEQEKSYLGEMTNSSIATENFPAVSSPTQLIMKPGSEWDGSTPSEDSRGTFVPDILHGNFQEGGQLASAAPDLWIDAKKPFSLKADGENPDILTHCEHDSNSQASDSPDICHDSEAKQETEKHLSACMGPEVESSELCLTEPEIDEEPIYEPGREFVPSNAELDSENATVLPPIGYQADIKGSSQPASHKGSPEPSEINGDNSTGLQVSEKGASPDMAPILEPVDRRIPRIENVATSIFVTHQEPTPEGDGSWISDSFSPESQPGARALFDGDPHLSTENPALVPDALLASDTCLDISEAAFDHSFSDASGLNTSTGTIDDMSKLTLSEGHPETPVDGDLGKQDICSSEASWGDFEYDVMGQNIDEDLLREPEHFLYGGDPPLEEDSLKQSLAPYTPPFDLSYLTEPAQSAETIEEAGSPEDESLGCRAAEIVLSALPDRRSEGNQAETKNRLPGSQLAVLHIREDPESVYLPVGAGSNILSPSNVDWEVETDNSDLPAGGDIGPPNGASKEISELEEEKTIPTKEPEQIKSEYKEERCTEKNEDRHALHMDYILVNREENSHSKPETCEERESIAELELYVGSKETGLQGTQLASFPDTCQPASLNERKGLSAEKMSSKSDTRSSFESPAQDQSWMFLGHSEVGDPSLDARDSGPGWSGKTVEPFSELGLGEGPQLQILEEMKPLESLALEEASGPVSQSQKSKSRGRAGPDAVTLQAVTHDNEWEMLSPQPVQKNMIPDTEMEEETEFLELGTRISRPNGLLSEDVGMDIPFEEGVLSPSAADMRPEPPNSLDLNDTHPRRIKLTAPNINLSLDQSEGSILSDDNLDSPDEIDINVDELDTPDEADSFEYTGHDPTANKDSGQESESIPEYTAEEEREDNRLWRTVVIGEQEQRIDMKVIEPYRRVISHGGYYGDGLNAIIVFAACFLPDSSRADYHYVMENLFLYVISTLELMVAEDYMIVYLNGATPRRRMPGLGWMKKCYQMIDRRLRKNLKSFIIVHPSWFIRTILAVTRPFISSKFSSKIKYVNSLSELSGLIPMDCIHIPESIIKLDEELREASEAAKTSCLYNDPEMSSMEKDIDLKLKEKP

SEQ ID NO: 69835 - protein, 2384 aa, Homo sapiens
  Payload ID: 13872
  Gene Symbol: PRUNE2
  Gene Name: prune homolog 2 (Drosophila)
  ENSP ID: ENSP00000389706
  MOD_RES (1)..(1): Any amino acid
XFQSPESWKEHKPSSIDRRASDSVFQPKSLEFTKSGPWESEFGQPELGSNDIQDKNEESLPFQNLPMEKSPLPNTSPQGTNHLIEDFASLWHSGRSPTAMPEPWGNPTDDGEPAAVAPFPAWSAFGKEDHDEALKNTWNLHPTSSKTPSVRDPNEWAMAKSGFAFSSSELLDNSPSEINNEAAPEIWGKKNNDSRDHIFAPGNPSSDLDHTWTNSKPPKEDQNGLVDPKTRGKVYEKVDSWNLFEENMKKGGSDVLVPWEDSFLSYKCSDYSASNLGEDSVPSPLDTNYSTSDSYTSPTFAGDEKETEHKPFAKEEGFESKDGNSTAEETDIPPQSLQQSSRNRISSGPGNLDMWASPHTDNSSEINTTHNLDENELKTEHTDGKNISMEDDVGESSQSSYDDPSMMQLYNETNRQLTLLHSSTNSRQTAPDSLDLWNRVILEDTQSTATISDMDNDLDWDDCSGGAAIPSDGQTEGYMAEGSEPETRFTVRQLEPWGLEYQEANQVDWELPASDEHTKDSAPSEHHTLNEKSGQLIANSIWDSVMRDKDMSSFMLPGSSHITDSEQRELPPEIPSHSANVKDTHSPDAPAASGTSESEALISHLDKQDTERETLQSDAASLATRLENPGYFPHPDPWKGHGDGQSESEKEAQGATDRGHLDEEEVIASGVENASGISEKGQSDQELSSLVASEHQEICIKSGKISSLAVTFSPQTEEPEEVLEYEEGSYNLDSRDVQTGMSADNLQPKDTHEKHLMSQRNSGETTETSDGMNFTKYVSVPEKDLEKTEECNFLEPENVGGGPPHRVPRSLDFGDVPIDSDVHVSSTCSEITKNLDVKGSENSLPGAGSSGNFDRDTISSEYTHSSASSPELNDSSVALSSWGQQPSSGYQEENQGNWSEQNHQESELITTDGQVEIVTKVKDLEKNRINEFEKSFDRKTPTFLEIWNDSVDGDSFSSLSSPETGKYSEHSGTHQESNLIASYQEKNEHDISATVQPEDARVISTSSGSDDDSVGGEESIEEEIQVANCHVAEDESRAWDSLNESNKFLVTADPKSENIYDYLDSSEPAENENKSNPFCDNQQSSPDPWTFSPLTETEMQITAVEKEKRSSPETGTTGDVAWQISPKASFPKNEDNSQLEMLGFSADSTEWWKASPQEGRLIESPFERELSDSSGVLEINSSVHQNASPWGVPVQGDIEPVETHYTNPFSDNHQSPFLEGNGKNSHEQLWNIQPRQPDPDADKFSQLVKLDQIKEKDSREQTFVSAAGDELTPETPTQEQCQDTMLPVCDHPDTAFTHAEENSCVTSNVSTNEGQETNQWEQEKSYLGEMTNSSIATENFPAVSSPTQLIMKPGSEWDGSTPSEDSRGTFVPDILHGNFQEGGQLASAAPDLWIDAKKPFSLKADGENPDILTHCEHDSNSQASDSPDICHDSEAKQETEKHLSACMGPEVESSELCLTEPEIDEEPIYEPGREFVPSNAELDSENATVLPPIGYQADIKGSSQPASHKGSPEPSEINGDNSTGLQVSEKGASPDMAPILEPVDRRIPRIENVATSIFVTHQEPTPEGDGSWISDSFSPESQPGARALFDGDPHLSTENPALVPDALLASDTCLDISEAAFDHSFSDASGLNTSTGTIDDMSKLTLSEGHPETPVDGDLGKQDICSSEASWGDFEYDVMGQNIDEDLLREPEHFLYGGDPPLEEDSLKQSLAPYTPPFDLSYLTEPAQSAETIEEAGSPEDESLGCRAAEIVLSALPDRRSEGNQAETKNRLPGSQLAVLHIREDPESVYLPVGAGSNILSPSNVDWEVETDNSDLPAGGDIGPPNGASKEISELEEEKTIPTKEPEQIKSEYKEERCTEKNEDRHALHMDYILVNREENSHSKPETCEERESIAELELYVGSKETGLQGTQLASFPDTCQPASLNERKGLSAEKMSSKSDTRSSFESPAQDQSWMFLGHSEVGDPSLDARDSGPGWSGKTVEPFSELGLGEGPQLQILEEMKPLESLALEEASGPVSQSQKSKSRGRAGPDAVTLQAVTHDNEWEMLSPQPVQKNMIPDTEMEEETEFLELGTRISRPNGLLSEDVGMDIPFEEGVLSPSAADMRPEPPNSLDLNDTHPRRIKLTAPNINLSLDQSEGSILSDDNLDSPDEIDINVDELDTPDEADSFEYTGHDPTANKDSGQESESIPEYTAEEEREDNRLWRTVVIGEQEQRIDMKVIEPYRRVISHGGDSGYYGDGLNAIIVFAACFLPDSSRADYHYVMENLFLYVISTLELMVAEDYMIVYLNGATPRRRMPGLGWMKKCYQMIDRRLRKNLKSFIIVHPSWFIRTILAVTRPFISSKFSSKIKYVNSLSELSGLIPMDCIHIPESIINIDLKLKEKP

SEQ ID NO: 69836 - protein, 260 aa, Homo sapiens
  Payload ID: 13872
  Gene Symbol: PRUNE2
  Gene Name: prune homolog 2 (Drosophila)
  ENSP ID: ENSP00000393657
IDINVDELDTPDEADSFEYTGHDPTANKDSGQESESIPEYTAEEEREDNRLWRTVVIGEQEQRIDMKVIEPYRRVISHGGDSGYYGDGLNAIIVFAACFLPDSSRADYHYVMENLFLYVISTLELMVAEDYMIVYLNGATPRRRMPGLGWMKKCYQMIDRRLRKNLKSFIIVHPSWFIRTILAVTRPFISSKFSSKIKYVNSLSELSGLIPMDCIHIPESIIKYDEERSYKRSVRTSCLYNDPEMSSMEKDIDLKLKEKP

SEQ ID NO: 69837 - protein, 3062 aa, Homo sapiens
  Payload ID: 13872
  Gene Symbol: PRUNE2
  Gene Name: prune homolog 2 (Drosophila)
  ENSP ID: ENSP00000393843
MEEFLQRAKSKLNRSKRLEKVHVVIGPKSCDLDSLISTFTYAYFLDKVSPPGVLCLPVLNIPRTEFNYFTETRFILEELNISESFHIFRDEINLHQLNDEGKLSITLVGSSVLASEDKTLESAVVKVINPVEQSDANVEFRESSSSLVLKEILQEAPELITEQLAHRLRGSILFKWMTMESEKISEKQEEILSILEEKFPNLPPREDIINVLQETQFSAQGLSIEQTMLKDLKELSDGEIKVAISTVSMNLENCLFHSNITSDLKAFTDKFGFDVLILFSSYLSEEQQPRRQIAVYSENMELCSQICCELEECQNPCLELEPFDCGCDEILVYQQEDPSVTCDQVVLVVKEVINRRCPEMVSNSRTSSTEAVAGSAPLSQGSSGIMELYGSDIEPQPSSVNFIENPPDLNDSNQAQVDANVDLVSPDSGLATIRSSRSSKESSVFLSDDSPVGEGAGPHHTLLPGLDSYSPIPEGAVAEEHAWSGEHGEHFDLFNFDPAPMASGQSQQSSHSADYSPADDFFPNSDLSEGQLPAGPEGLDGMGTNMSNYSSSSLLSGAGKDSLVEHDEEFVQRQDSPRDNSERNLSLTDFVGDESPSPERLKNTGKRIPPTPMNSLVESSPSTEEPASLYTEDMTQKATDTGHMGPPQTHARCSSWWGGLEIDSKNIADAWSSSEQESVFQSPESWKEHKPSSIDRRASDSVFQPKSLEFTKSGPWESEFGQPELGSNDIQDKNEESLPFQNLPMEKSPLPNTSPQGTNHLIEDFASLWHSGRSPTAMPEPWGNPTDDGEPAAVAPFPAWSAFGKEDHDEALKNTWNLHPTSSKTPSVRDPNEWAMAKSGFAFSSSELLDNSPSEINNEAAPEIWGKKNNDSRDHIFAPGNPSSDLDHTWTNSKPPKEDQNGLVDPKTRGKVYEKVDSWNLFEENMKKGGSDVLVPWEDSFLSYKCSDYSASNLGEDSVPSPLDTNYSTSDSYTSPTFAGDEKETEHKPFAKEEGFESKDGNSTAEETDIPPQSLQQSSRNRISSGPGNLDMWASPHTDNSSEINTTHNLDENELKTEHTDGKNISMEDDVGESSQSSYDDPSMMQLYNETNRQLTLLHSSTNSRQTAPDSLDLWNRVILEDTQSTATISDMDNDLDWDDCSGGAAIPSDGQTEGYMAEGSEPETRFTVRQLEPWGLEYQEANQVDWELPASDEHTKDSAPSEHHTLNEKSGQLIANSIWDSVMRDKDMSSFMLPGSSHITDSEQRELPPEIPSHSANVKDTHSPDAPAASGTSESEALISHLDKQDTERETLQSDAASLATRLENPGYFPHPDPWKGHGDGQSESEKEAQGATDRGHLDEEEVIASGVENASGISEKGQSDQELSSLVASEHQEICIKSGKISSLAVTFSPQTEEPEEVLEYEEGSYNLDSRDVQTGMSADNLQPKDTHEKHLMSQRNSGETTETSDGMNFTKYVSVPEKDLEKTEECNFLEPENVGGGPPHRVPRSLDFGDVPIDSDVHVSSTCSEITKNLDVKGSENSLPGAGSSGNFDRDTISSEYTHSSASSPELNDSSVALSSWGQQPSSGYQEENQGNWSEQNHQESELITTDGQVEIVTKVKDLEKNRINEFEKSFDRKTPTFLEIWNDSVDGDSFSSLSSPETGKYSEHSGTHQESNLIASYQEKNEHDISATVQPEDARVISTSSGSDDDSVGGEESIEEEIQVANCHVAEDESRAWDSLNESNKFLVTADPKSENIYDYLDSSEPAENENKSNPFCDNQQSSPDPWTFSPLTETEMQITAVEKEKRSSPETGTTGDVAWQISPKASFPKNEDNSQLEMLGFSADSTEWWKASPQEGRLIESPFERELSDSSGVLEINSSVHQNASPWGVPVQGDIEPVETHYTNPFSDNHQSPFLEGNGKNSHEQLWNIQPRQPDPDADKFSQLVKLDQIKEKDSREQTFVSAAGDELTPETPTQEQCQDTMLPVCDHPDTAFTHAEENSCVTSNVSTNEGQETNQWEQEKSYLGEMTNSSIATENFPAVSSPTQLIMKPGSEWDGSTPSEDSRGTFVPDILHGNFQEGGQLASAAPDLWIDAKKPFSLKADGENPDILTHCEHDSNSQASDSPDICHDSEAKQETEKHLSACMGPEVESSELCLTEPEIDEEPIYEPGREFVPSNAELDSENATVLPPIGYQADIKGSSQPASHKGSPEPSEINGDNSTGLQVSEKGASPDMAPILEPVDRRIPRIENVATSIFVTHQEPTPEGDGSWISDSFSPESQPGARALFDGDPHLSTENPALVPDALLASDTCLDISEAAFDHSFSDASGLNTSTGTIDDMSKLTLSEGHPETPVDGDLGKQDICSSEASWGDFEYDVMGQNIDEDLLREPEHFLYGGDPPLEEDSLKQSLAPYTPPFDLSYLTEPAQSAETIEEAGSPEDESLGCRAAEIVLSALPDRRSEGNQAETKNRLPGSQLAVLHIREDPESVYLPVGAGSNILSPSNVDWEVETDNSDLPAGGDIGPPNGASKEISELEEEKTIPTKEPEQIKSEYKEERCTEKNEDRHALHMDYILVNREENSHSKPETCEERESIAELELYVGSKETGLQGTQLASFPDTCQPASLNERKGLSAEKMSSKSDTRSSFESPAQDQSWMFLGHSEVGDPSLDARDSGPGWSGKTVEPFSELGLGEGPQLQILEEMKPLESLALEEASGPVSQSQKSKSRGRAGPDAVTLQAVTHDNEWEMLSPQPVQKNMIPDTEMEEETEFLELGTRISRPNGLLSEDVGMDIPFEEGVLSPSAADMRPEPPNSLDLNDTHPRRIKLTAPNINLSLDQSEGSILSDDNLDSPDEIDINVDELDTPDEADSFEYTGHDPTANKDSGQESESIPEYTAEEEREDNRLWRTVVIGEQEQRIDMKVIEPYRRVISHGGDSGYYGDGLNAIIVFAACFLPDSSRADYHYVMENLFLYVISTLELMVAEDYMIVYLNGATPRRRMPGLGWMKKCYQMIDRRLRKNLKSFIIVHPSWFIRTILAVTRPFISSKFSSKIKYVNSLSELSGLIPMDCIHIPESIINIDLKLKEKP

SEQ ID NO: 69838 - protein, 2730 aa, Homo sapiens
  Payload ID: 13872
  Gene Symbol: PRUNE2
  Gene Name: prune homolog 2 (Drosophila)
  ENSP ID: ENSP00000397425
MVSNSRTSSTEAVAGSAPLSQGSSGIMELYGSDIEPQPSSVNFIENPPDLNDSNQAQVDANVDLVSPDSGLATIRSSRSSKESSVFLSDDSPVGEGAGPHHTLLPGLDSYSPIPEGAVAEEHAWSGEHGEHFDLFNFDPAPMASGQSQQSSHSADYSPADDFFPNSDLSEGQLPAGPEGLDGMGTNMSNYSSSSLLSGAGKDSLVEHDEEFVQRQDSPRDNSERNLSLTDFVGDESPSPERLKNTGKRIPPTPMNSLVESSPSTEEPASLYTEDMTQKATDTGHMGPPQTHARCSSWWGGLEIDSKNIADAWSSSEQESVFQSPESWKEHKPSSIDRRASDSVFQPKSLEFTKSGPWESEFGQPELGSNDIQDKNEESLPFQNLPMEKSPLPNTSPQGTNHLIEDFASLWHSGRSPTAMPEPWGNPTDDGEPAAVAPFPAWSAFGKEDHDEALKNTWNLHPTSSKTPSVRDPNEWAMAKSGFAFSSSELLDNSPSEINNEAAPEIWGKKNNDSRDHIFAPGNPSSDLDHTWTNSKPPKEDQNGLVDPKTRGKVYEKVDSWNLFEENMKKGGSDVLVPWEDSFLSYKCSDYSASNLGEDSVPSPLDTNYSTSDSYTSPTFAGDEKETEHKPFAKEEGFESKDGNSTAEETDIPPQSLQQSSRNRISSGPGNLDMWASPHTDNSSEINTTHNLDENELKTEHTDGKNISMEDDVGESSQSSYDDPSMMQLYNETNRQLTLLHSSTNSRQTAPDSLDLWNRVILEDTQSTATISDMDNDLDWDDCSGGAAIPSDGQTEGYMAEGSEPETRFTVRQLEPWGLEYQEANQVDWELPASDEHTKDSAPSEHHTLNEKSGQLIANSIWDSVMRDKDMSSFMLPGSSHITDSEQRELPPEIPSHSANVKDTHSPDAPAASGTSESEALISHLDKQDTERETLQSDAASLATRLENPGYFPHPDPWKGHGDGQSESEKEAQGATDRGHLDEEEVIASGVENASGISEKGQSDQELSSLVASEHQEICIKSGKISSLAVTFSPQTEEPEEVLEYEEGSYNLDSRDVQTGMSADNLQPKDTHEKHLMSQRNSGETTETSDGMNFTKYVSVPEKDLEKTEECNFLEPENVGGGPPHRVPRSLDFGDVPIDSDVHVSSTCSEITKNLDVKGSENSLPGAGSSGNFDRDTISSEYTHSSASSPELNDSSVALSSWGQQPSSGYQEENQGNWSEQNHQESELITTDGQVEIVTKVKDLEKNRINEFEKSFDRKTPTFLEIWNDSVDGDSFSSLSSPETGKYSEHSGTHQESNLIASYQEKNEHDISATVQPEDARVISTSSGSDDDSVGGEESIEEEIQVANCHVAEDESRAWDSLNESNKFLVTADPKSENIYDYLDSSEPAENENKSNPFCDNQQSSPDPWTFSPLTETEMQITAVEKEKRSSPETGTTGDVAWQISPKASFPKNEDNSQLEMLGFSADSTEWWKASPQEGRLIESPFERELSDSSGVLEINSSVHQNASPWGVPVQGDIEPVETHYTNPFSDNHQSPFLEGNGKNSHEQLWNIQPRQPDPDADKFSQLVKLDQIKEKDSREQTFVSAAGDELTPETPTQEQCQDTMLPVCDHPDTAFTHAEENSCVTSNVSTNEGQETNQWEQEKSYLGEMTNSSIATENFPAVSSPTQLIMKPGSEWDGSTPSEDSRGTFVPDILHGNFQEGGQLASAAPDLWIDAKKPFSLKADGENPDILTHCEHDSNSQASDSPDICHDSEAKQETEKHLSACMGPEVESSELCLTEPEIDEEPIYEPGREFVPSNAELDSENATVLPPIGYQADIKGSSQPASHKGSPEPSEINGDNSTGLQVSEKGASPDMAPILEPVDRRIPRIENVATSIFVTHQEPTPEGDGSWISDSFSPESQPGARALFDGDPHLSTENPALVPDALLASDTCLDISEAAFDHSFSDASGLNTSTGTIDDMSKLTLSEGHPETPVDGDLGKQDICSSEASWGDFEYDVMGQNIDEDLLREPEHFLYGGDPPLEEDSLKQSLAPYTPPFDLSYLTEPAQSAETIEEAGSPEDESLGCRAAEIVLSALPDRRSEGNQAETKNRLPGSQLAVLHIREDPESVYLPVGAGSNILSPSNVDWEVETDNSDLPAGGDIGPPNGASKEISELEEEKTIPTKEPEQIKSEYKEERCTEKNEDRHALHMDYILVNREENSHSKPETCEERESIAELELYVGSKETGLQGTQLASFPDTCQPASLNERKGLSAEKMSSKSDTRSSFESPAQDQSWMFLGHSEVGDPSLDARDSGPGWSGKTVEPFSELGLGEGPQLQILEEMKPLESLALEEASGPVSQSQKSKSRGRAGPDAVTLQAVTHDNEWEMLSPQPVQKNMIPDTEMEEETEFLELGTRISRPNGLLSEDVGMDIPFEEGVLSPSAADMRPEPPNSLDLNDTHPRRIKLTAPNINLSLDQSEGSILSDDNLDSPDEIDINVDELDTPDEADSFEYTGHEDPTANKDSGQESESIPEYTAEEEREDNRLWRTVVIGEQEQRIDMKVIEPYRRVISHGGYYGDGLNAIIVFAACFLPDSSRADYHYVMENLFLYVISTLELMVAEDYMIVYLNGATPRRRMPGLGWMKKCYQMIDRRLRKNLKSFIIVHPSWFIRTILAVTRPFISSKFSSKIKYVNSLSELSGLIPMDCIHIPESIIKLDEELREASEAAKTSCLYNDPEMSSMEKDIDLKLKEKP

SEQ ID NO: 69839 - protein, 1746 aa, Homo sapiens
  Payload ID: 13873
  Gene Symbol: PEAK1
  Gene Name: pseudopodium-enriched atypical kinase 1
  Uniprot ID: Q9H792
  ENSP ID: ENSP00000309230
MSACNTFTEHVWKPGECKNCFKPKSLHQLPPDPEKAPITHGNVKTNANHSNNHRIRNTGNFRPPVAKKPTIAVKPTMIVADGQSICGELSIQEHCENKPVIIGWNRNRAALSQKPLNNNNEDDEGISHVPKPYGNNDSAKKMSDNNNGLTEVLKEIAGLDTAPQIRGNETNSRETFLGRINDCYKRSLERKLPPSCMIGGIKETQGKHVILSGSTEVISNEGGRFCYPEFSSGEESEEDVLFSNMEEEHESWDESDEELLAMEIRMRGQPRFANFRANTLSPVRFFVDKKWNTIPLRNKSLQRICAVDYDDSYDEILNGYEENSVVSYGQGSIQSMVSSDSTSPDSSLTEESRSETASSLSQKICNGGLSPGNPGDSKDMKEIEPNYESPSSNNQDKDSSQASKSSIKVPETHKAVLALRLEEKDGKIAVQTEKEESKASTDVAGQAVTINLVPTEEQAKPYRVVNLEQPLCKPYTVVDVSAAMASEHLEGPVNSPKTKSSSSTPNSPVTSSSLTPGQISAHFQKSSAIRYQEVWTSSTSPRQKIPKVELITSGTGPNVPPRKNCHKSAPTSPTATNISSKTIPVKSPNLSEIKFNSYNNAGMPPFPIIIHDEPTYARSSKNAIKVPIVINPNAYDNLAIYKSFLGTSGELSVKEKTTSVISHTYEEIETESKVPDNTTSKTTDCLQTKGFSNSTEHKRGSVAQKVQEFNNCLNRGQSSPQRSYSSSHSSPAKIQRATQEPVAKIEGTQESQMVGSSSTREKASTVLSQIVASIQPPQSPPETPQSGPKACSVEELYAIPPDADVAKSTPKSTPVRPKSLFTSQPSGEAEAPQTTDSPTTKVQKDPSIKPVTPSPSKLVTSPQSEPPAPFPPPRSTSSPYHAGNLLQRHFTNWTKPTSPTRSTEAESVLHSEGSRRAADAKPKRWISFKSFFRRRKTDEEDDKEKEREKGKLVGLDGTVIHMLPPPPVQRHHWFTEAKGESSEKPAIVFMYRCDPAQGQLSVDQSKARTDQAAVMEKGRAENALLQDSEKKRSHSSPSQIPKKILSHMTHEVTEDFSPRDPRTVVGKQDGRGCTSVTTALSLPELEREDGKEDISDPMDPNPCSATYSNLGQSRAAMIPPKQPRQPKGAVDDAIAFGGKTDQEAPNASQPTPPPLPKKMIIRANTEPISKDLQKSMESSLCVMANPTYDIDPNWDASSAGSSISYELKGLDIESYDSLERPLRKERPVPSAANSISSLTTLSIKDRFSNSMESLSSRRGPSCRQGRGIQKPQRQALYRGLENREEVVGKIRSLHTDALKKLAVKCEDLFMAGQKDQLRFGVDSWSDFRLTSDKPCCEAGDAVYYTASYAKDPLNNYAVKICKSKAKESQQYYHSLAVRQSLAVHFNIQQDCGHFLAEVPNRLLPWEDPDDPEKDEDDMEETEEDAKGETDGKNPKPCSEAASSQKENQGVMSKKQRSHVVVITREVPCLTVADFVRDSLAQHGKSPDLYERQVCLLLLQLCSGLEHLKPYHVTHCDLRLENLLLVHYQPGGTAQGFGPAEPSPTSSYPTRLIVSNFSQAKQKSHLVDPEILRDQSRLAPEIITATQYKKCDEFQTGILIYEMLHLPNPFDENPELKEREYTRADLPRIPFRSPYSRGLQQLASCLLNPNPSERILISDAKGILQCLLWGPREDLFQTFTACPSLVQRNTLLQNWLDIKRTLLMIKFAEKSLDREGGISLEDWLCAQYLAFATTDSLSCIVKILQHR

SEQ ID NO: 69840 - protein, 1746 aa, Homo sapiens; identical to SEQ ID NO: 69839
  Payload ID: 13873
  Gene Symbol: PEAK1
  Gene Name: pseudopodium-enriched atypical kinase 1
  Uniprot ID: Q9H792
  ENSP ID: ENSP00000452796

SEQ ID NO: 69841 - protein, 1049 aa, Homo sapiens
  Payload ID: 13873
  Gene Symbol: PEAK1
  Gene Name: pseudopodium-enriched atypical kinase 1
  ENSP ID: ENSP00000453924
MSACNTFTEHVWKPGECKNCFKPKSLHQLPPDPEKAPITHGNVKTNANHSNNHRIRNTGNFRPPVAKKPTIAVKPTMIVADGQSICGELSIQEHCENKPVIIGWNRNRAALSQKPLNNNNEDDEGISHVPKPYGNNDSAKKMSDNNNGLTEVLKEIAGLDTAPQIRGNETNSRETFLGRINDCYKRSLERKLPPSCMIGGIKETQGKHVILSGSTEVISNEGGRFCYPEFSSGEESEEDVLFSNMEEEHESWDESDEELLAMEIRMRGQPRFANFRANTLSPVRFFVDKKWNTIPLRNKSLQRICAVDYDDSYDEILNGYEENSVVSYGQGSIQSMVSSDSTSPDSSLTEESRSETASSLSQKICNGGLSPGNPGDSKDMKEIEPNYESPSSNNQDKDSSQASKSSIKVPETHKAVLALRLEEKDGKIAVQTEKEESKASTDVAGQAVTINLVPTEEQAKPYRVVNLEQPLCKPYTVVDVSAAMASEHLEGPVNSPKTKSSSSTPNSPVTSSSLTPGQISAHFQKSSAIRYQEVWTSSTSPRQKIPKVELITSGTGPNVPPRKNCHKSAPTSPTATNISSKTIPVKSPNLSEIKFNSYNNAGMPPFPIIIHDEPTYARSSKNAIKVPIVINPNAYDNLAIYKSFLGTSGELSVKEKTTSVISHTYEEIETESKVPDNTTSKTTDCLQTKGFSNSTEHKRGSVAQKVQEFNNCLNRGQSSPQRSYSSSHSSPAKIQRATQEPVAKIEGTQESQMVGSSSTREKASTVLSQIVASIQPPQSPPETPQSGPKACSVEELYAIPPDADVAKSTPKSTPVRPKSLFTSQPSGEAEAPQTTDSPTTKVQKDPSIKPVTPSPSKLVTSPQSEPPAPFPPPRSTSSPYHAGNLLQRHFTNWTKPTSPTRSTEAESVLHSEGSRRAADAKPKRWISFKSFFRRRKTDEEDDKEKEREKGKLVGLDGTVIHMLPPPPVQRHHWFTEAKGESSEKPAIVFMYRCDPAQGQLSVDQSKARTDQAAVMEKGRAENALLQDSEKKRSHSSPSQIPKKILRYVK

SEQ ID NO: 69842 - protein, 60 aa, Homo sapiens
  Payload ID: 13873
  Gene Symbol: PEAK1
  Gene Name: pseudopodium-enriched atypical kinase 1
  ENSP ID: ENSP00000457602
MSACNTFTEHVWKPGECKNCFKPKSLHQLPPDPEKAPITHGNVKTNANHSNNHRIRNTGN

SEQ ID NO: 69843 - protein, 656 aa, Homo sapiens
  Payload ID: 13873
  Gene Symbol: PEAK1
  Gene Name: pseudopodium-enriched atypical kinase 1
  ENSP ID: ENSP00000457880
MSACNTFTEHVWKPGECKNCFKPKSLHQLPPDPEKAPITHGNVKTNANHSNNHRIRNTGNFRPPVAKKPTIAVKPTMIVADGQSICGELSIQEHCENKPVIIGWNRNRAALSQKPLNNNNEDDEGISHVPKPYGNNDSAKKMSDNNNGLTEVLKEIAGLDTAPQIRGNETNSRETFLGRINDCYKRSLERKLPPSCMIGGIKETQGKHVILSGSTEVISNEGGRFCYPEFSSGEESEEDVLFSNMEEEHESWDESDEELLAMEIRMRGQPRFANFRANTLSPVRFFVDKKWNTIPLRNKSLQRICAVDYDDSYDEILNGYEENSVVSYGQGSIQSMVSSDSTSPDSSLTEESRSETASSLSQKICNGGLSPGNPGDSKDMKEIEPNYESPSSNNQDKDSSQASKSSIKVPETHKAVLALRLEEKDGKIAVQTEKEESKASTDVAGQAVTINLVPTEEQAKPYRVVNLEQPLCKPYTVVDVSAAMASEHLEGPVNSPKTKSSSSTPNSPVTSSSLTPGQISAHFQKSSAIRYQEVWTSSTSPRQKIPKVELITSGTGPNVPPRKNCHKSAPTSPTATNISSKTIPVKSPNLSEIKFNSYNNAGMPPFPIIIHDEPTYARSSKNAIKVPIVINPNAYDNLAIYKSFLGTSGELSVKEK

SEQ ID NO: 69844 - protein, 228 aa, Homo sapiens
  Payload ID: 13874
  Gene Symbol: PUDP
  Gene Name: pseudouridine 5'-phosphatase
  Uniprot ID: Q08623
  ENSP ID: ENSP00000370467
MAAPPQPVTHLIFDMDGLLLDTERLYSVVFQEICNRYDKKYSWDVKSLVMGKKALEAAQIIIDVLQLPMSKEELVEESQTKLKEVFPTAALMPGAEKLIIHLRKHGIPFALATSSGSASFDMKTSRHKEFFSLFSHIVLGDDPEVQHGKPDPDIFLACAKRFSPPPAMEKCLVFEDAPNGVEAALAAGMQVVMVPDGNLSRDLTTKATLVLNSLQDFQPELFGLPSYE

SEQ ID NO: 69845 - protein, 251 aa, Homo sapiens
  Payload ID: 13874
  Gene Symbol: PUDP
  Gene Name: pseudouridine 5'-phosphatase
  Uniprot ID: Q08623
  ENSP ID: ENSP00000396452
MAAPPQPVTHLIFDMDGLLLGYTGSIVAAASGESSRGLQSRWTDTERLYSVVFQEICNRYDKKYSWDVKSLVMGKKALEAAQIIIDVLQLPMSKEELVEESQTKLKEVFPTAALMPGAEKLIIHLRKHGIPFALATSSGSASFDMKTSRHKEFFSLFSHIVLGDDPEVQHGKPDPDIFLACAKRFSPPPAMEKCLVFEDAPNGVEAALAAGMQVVMVPDGNLSRDLTTKATLVLNSLQDFQPELFGLPSYE

SEQ ID NO: 69846 - protein, 185 aa, Homo sapiens
  Payload ID: 13874
  Gene Symbol: PUDP
  Gene Name: pseudouridine 5'-phosphatase
  Uniprot ID: Q08623
  ENSP ID: ENSP00000406260
MAAPPQPVTHLIFDMDGLLLDTERLYSVVFQEICNRYDKKYSWDVKSLVMGAEKLIIHLRKHGIPFALATSSGSASFDMKTSRHKEFFSLFSHIVLGDDPEVQHGKPDPDIFLACAKRFSPPPAMEKCLVFEDAPNGVEAALAAGMQVVMVPDGNLSRDLTTKATLVLNSLQDFQPELFGLPSYE

SEQ ID NO: 69847 - protein, 191 aa, Homo sapiens
  Payload ID: 13874
  Gene Symbol: PUDP
  Gene Name: pseudouridine 5'-phosphatase
  ENSP ID: ENSP00000430995
MAAPPQPVTHLIFDMDGLLLDTERLYSVVFQEICNRYDKKYSWDVKSLVMGKKALEAAQIIIDVLQLPMSKEELVEESQTKLKEVFPTAALMPGAEKLIIHLRKHGIPFALATSSGSASFDMKTSRHKEFFSLFSHIVLGDDPEVQHGKPDPDIFLACAKRFSPPPAMEKSSIHRPRLLTAQKCQGCRDPF

SEQ ID NO: 69848 - protein, 208 aa, Homo sapiens
  Payload ID: 13874
  Gene Symbol: PUDP
  Gene Name: pseudouridine 5'-phosphatase
  Uniprot ID: Q08623
  ENSP ID: ENSP00000441208
MAAPPQPVTHLIFDMDGLLLDTERLYSVVFQEICNRYDKKYSWDVKSLVMGKKALEAAQIIIDVLQLPMSKEELVEESQTKLKEVFPTAALMPGAEKLIIHLRKHGIPFALATSSGSASFDMKTSRHKEFFSLFSHIVLGDDPEVQHGKPDPDIFLACAKRFSPPPAMEKSSIHRPRLLTAQKCQGCRDPFSALLLLCNQLLLCSDDT

SEQ ID NO: 69849 - protein, 384 aa, Homo sapiens
  Payload ID: 13875
  Gene Symbol: PUS1
  Gene Name: pseudouridylate synthase 1
  ENSP ID: ENSP00000324726
MAGNAEPPPAGAACPQDRRSCSGRAGGDRVWEDGEHPAKKLKSGGDEERREKPPKRKIVLLMAYSGKGYHGMQRNVGSSQFKTIEDDLVSALVRSGCIPENHGEDMRKMSFQRCARTDKGVSAAGQVVSLKVWLIDDILEKINSHLPSHIRILGLKRVTGGFNSKNRCDARTYCYLLPTFAFAHKDRDVQDETYRLSAETLQQVNRLLACYKGTHNFHNFTSQKGPQDPSACRYILEMYCEEPFVREGLEFAVIRVKGQSFMMHQIRKMVGLVVAIVKGYAPESVLERSWGTEKVDVPKAPGLGLVLERVHFEKYNQRFGNDGLHEPLDWAQEEGKVAAFKEEHIYPTIIGTERDERSMAQWLSTLPIHNFSATALTAGGTGAK

SEQ ID NO: 69850 - protein, 427 aa, Homo sapiens
  Payload ID: 13875
  Gene Symbol: PUS1
  Gene Name: pseudouridylate synthase 1
  Uniprot ID: Q9Y606
  ENSP ID: ENSP00000365837
MGLQLRALLGAFGRWTLRLGPRPSCSPRMAGNAEPPPAGAACPQDRRSCSGRAGGDRVWEDGEHPAKKLKSGGDEERREKPPKRKIVLLMAYSGKGYHGMQRNVGSSQFKTIEDDLVSALVRSGCIPENHGEDMRKMSFQRCARTDKGVSAAGQVVSLKVWLIDDILEKINSHLPSHIRILGLKRVTGGFNSKNRCDARTYCYLLPTFAFAHKDRDVQDETYRLSAETLQQVNRLLACYKGTHNFHNFTSQKGPQDPSACRYILEMYCEEPFVREGLEFAVIRVKGQSFMMHQIRKMVGLVVAIVKGYAPESVLERSWGTEKVDVPKAPGLGLVLERVHFEKYNQRFGNDGLHEPLDWAQEEGKVAAFKEEHIYPTIIGTERDERSMAQWLSTLPIHNFSATALTAGGTGAKVPSPLEGSEGDGDTD

SEQ ID NO: 69851 - protein, 399 aa, Homo sapiens
  Payload ID: 13875
  Gene Symbol: PUS1
  Gene Name: pseudouridylate synthase 1
  Uniprot ID: Q9Y606
  ENSP ID: ENSP00000392451
MAGNAEPPPAGAACPQDRRSCSGRAGGDRVWEDGEHPAKKLKSGGDEERREKPPKRKIVLLMAYSGKGYHGMQRNVGSSQFKTIEDDLVSALVRSGCIPENHGEDMRKMSFQRCARTDKGVSAAGQVVSLKVWLIDDILEKINSHLPSHIRILGLKRVTGGFNSKNRCDARTYCYLLPTFAFAHKDRDVQDETYRLSAETLQQVNRLLACYKGTHNFHNFTSQKGPQDPSACRYILEMYCEEPFVREGLEFAVIRVKGQSFMMHQIRKMVGLVVAIVKGYAPESVLERSWGTEKVDVPKAPGLGLVLERVHFEKYNQRFGNDGLHEPLDWAQEEGKVAAFKEEHIYPTIIGTERDERSMAQWLSTLPIHNFSATALTAGGTGAKVPSPLEGSEGDGDTD

SEQ ID NO: 69852 - protein, 156 aa, Homo sapiens
  Payload ID: 13875
  Gene Symbol: PUS1
  Gene Name: pseudouridylate synthase 1
  ENSP ID: ENSP00000409705
MAGNAEPPPAGAACPQDRRSCSGRAGGDRVWEDGEHPAKKLKSGGDEERREKPPKRKIVLLMAYSGKGYHGMQRNVGSSQFKTIEDDLVSALVRSGCIPENHGEDMRKMSFQRCARTDKSQDLILLPRLECSGMIMAHCSLKLLGSSNPPASASRV

SEQ ID NO: 69853 - protein, 374 aa, Homo sapiens
  Payload ID: 13875
  Gene Symbol: PUS1
  Gene Name: pseudouridylate synthase 1
  ENSP ID: ENSP00000438948
MSVAAHTCNLSTSGGQRSKRPGVRDQPGQHHGDLCLQNIKSVFVSFFQRNVGSSQFKTIEDDLVSALVRSGCIPENHGEDMRKMSFQRCARTDKGVSAAGQVVSLKVWLIDDILEKINSHLPSHIRILGLKRVTGGFNSKNRCDARTYCYLLPTFAFAHKDRDVQDETYRLSAETLQQVNRLLACYKGTHNFHNFTSQKGPQDPSACRYILEMYCEEPFVREGLEFAVIRVKGQSFMMHQIRKMVGLVVAIVKGYAPESVLERSWGTEKVDVPKAPGLGLVLERVHFEKYNQRFGNDGLHEPLDWAQEEGKVAAFKEEHIYPTIIGTERDERSMAQWLSTLPIHNFSATALTAGGTGAKVPSPLEGSEGDGDTD

SEQ ID NO: 69854 - protein, 200 aa, Homo sapiens
  Payload ID: 13875
  Gene Symbol: PUS1
  Gene Name: pseudouridylate synthase 1
  ENSP ID: ENSP00000440179
MAGNAEPPPAGAACPQDRRSCSGRAGGDRVWEDGEHPAKKLKSGGDEERREKPPKRKIVLLMAYSGKGYHGMQRNVGSSQFKTIEDDLVSALVRSGCIPENHGEDMRKMSFQRCARTDKSQDLILLPRLECSGMIMAHCSLKLLGSSNPPASASRVGLKRVTGGFNSKNRCDARTYCYLLPTFAFAHKDRDVQDETYRLS

SEQ ID NO: 69855 - protein, 153 aa, Homo sapiens
  Payload ID: 13875
  Gene Symbol: PUS1
  Gene Name: pseudouridylate synthase 1
  ENSP ID: ENSP00000440326
MAGNAEPPPAGAACPQDRRSCSGRAGGDRVWEDGEHPAKKLKSGGDEERREKPPKRKIVLLMAYSGKGYHGMQRNVGSSQFKTIEDDLVSALVRSGCIPENHGEDMRKMSFQRCARTDKGVSAAGQVVSLKVWLIDDILEKINSHLPSHIRIL

SEQ ID NO: 69856 - protein, 134 aa, Homo sapiens
  Payload ID: 13875
  Gene Symbol: PUS1
  Gene Name: pseudouridylate synthase 1
  ENSP ID: ENSP00000443969
MAGNAEPPPAGAACPQDRRSCSGRAGGDRVWEDGEHPAKKLKSGGDEERREKPPKRKIVLLMAYSGKGYHGMQRNVGSSQFKTIEDDLVSALVRSGCIPENHGEDMRKMSFQRCARTDKVPSPLEGSEGDGDTD

SEQ ID NO: 69857 - protein, 184 aa, Homo sapiens
  Payload ID: 13875
  Gene Symbol: PUS1
  Gene Name: pseudouridylate synthase 1
  ENSP ID: ENSP00000445819
MGLQLRALLGAFGRWTLRLGPRPSCSPRMAGNAEPPPAGAACPQDRRSCSGRAGGDRVWEDGEHPAKKLKSGGDEERREKPPKRKIVLLMAYSGKGYHGMQRNVGSSQFKTIEDDLVSALVRSGCIPENHGEDMRKMSFQRCARTDKSQDLILLPRLECSGMIMAHCSLKLLGSSNPPASASRV

SEQ ID NO: 69858 - protein, 529 aa, Homo sapiens
  Payload ID: 13876
  Gene Symbol: PUS10
  Gene Name: pseudouridylate synthase 10
  Uniprot ID: Q3MIT2
  ENSP ID: ENSP00000326003
MFPLTEENKHVAQLLLNTGTCPRCIFRFCGVDFHAPYKLPYKELLNELQKFLETEKDELILEVMNPPPKKIRLQELEDSIDNLSQNGEGRISVSHVGSTASKNSNLNVCNVCLGILQEFCEKDFIKKVCQKVEASGFEFTSLVFSVSFPPQLSVREHAAWLLVKQEMGKQSLSLGRDDIVQLKEAYKWITHPLFSEELGVPIDGKSLFEVSVVFAHPETVEDCHFLAAICPDCFKPAKNKQSVFTRMAVMKALNKIKEEDFLKQFPCPPNSPKAVCAVLEIECAHGAVFVAGRYNKYSRNLPQTPWIIDGERKLESSVEELISDHLLAVFKAESFNFSSSGREDVDVRTLGNGRPFAIELVNPHRVHFTSQEIKELQQKINNSSNKIQVRDLQLVTREAIGHMKEGEEEKTKTYSALIWTNKAIQKKDIEFLNDIKDLKIDQKTPLRVLHRRPLAVRARVIHFMETQYVDEHHFRLHLKTQAGTYIKEFVHGDFGRTKPNIGSLMNVTADILELDVESVDVDWPPALDD

SEQ ID NO: 69859 - protein, 62 aa, Homo sapiens
  Payload ID: 13876
  Gene Symbol: PUS10
  Gene Name: pseudouridylate synthase 10
  ENSP ID: ENSP00000381651
MFPLTEENKHVAQLLLNTGTCPRCIFRFCGVDFHAPYKLPYKMKKLRYREVKQPAQSYTAIK

SEQ ID NO: 69860 - protein, 529 aa, Homo sapiens; identical to SEQ ID NO: 69858
  Payload ID: 13876
  Gene Symbol: PUS10
  Gene Name: pseudouridylate synthase 10
  Uniprot ID: Q3MIT2
  ENSP ID: ENSP00000386074

SEQ ID NO: 69861 - protein, 120 aa, Homo sapiens
  Payload ID: 13876
  Gene Symbol: PUS10
  Gene Name: pseudouridylate synthase 10
  ENSP ID: ENSP00000402185
MFPLTEENKHVAQLLLNTGTCPRCIFRFCGVDFHAPYKLPYKELLNELQKFLETEKDELILEVMNPPPKKIRLQELEDSIDNLSQNGEGRISVSHVGSTASKNSNLNVCNVCLGILQEFC

SEQ ID NO: 69862 - protein, 62 aa, Homo sapiens; identical to SEQ ID NO: 69859
  Payload ID: 13876
  Gene Symbol: PUS10
  Gene Name: pseudouridylate synthase 10
  ENSP ID: ENSP00000403880

SEQ ID NO: 69863 - protein, 481 aa, Homo sapiens
  Payload ID: 13877
  Gene Symbol: PUS3
  Gene Name: pseudouridylate synthase 3
  Uniprot ID: Q9BZE2
  ENSP ID: ENSP00000227474
MAYNDTDRNQTEKLLKRVRELEQEVQRLKKEQAKNKEDSNIRENSAGAGKTKRAFDFSAHGRRHVALRIAYMGWGYQGFASQENTNNTIEEKLFEALTKTRLVESRQTSNYHRCGRTDKGVSAFGQVISLDLRSQFPRGRDSEDFNVKEEANAAAEEIRYTHILNRVLPPDIRILAWAPVEPSFSARFSCLERTYRYFFPRADLDIVTMDYAAQKYVGTHDFRNLCKMDVANGVINFQRTILSAQVQLVGQSPGEGRWQEPFQLCQFEVTGQAFLYHQVRCMMAILFLIGQGMEKPEIIDELLNIEKNPQKPQYSMAVEFPLVLYDCKFENVKWIYDQEAQEFNITHLQQLWANHAVKTHMLYSMLQGLDTVPVPCGIGPKMDGMTEWGNVKPSVIKQTSAFVEGVKMRTYKPLMDRPKCQGLESRIQHFVRRGRIEHPHLFHEEETKAKRDCNDTLEEENTNLETPTKRVCVDTEIKSII

SEQ ID NO: 69864 - protein, 169 aa, Homo sapiens
  Payload ID: 13877
  Gene Symbol: PUS3
  Gene Name: pseudouridylate synthase 3
  ENSP ID: ENSP00000432272
MAYNDTDRNQTEKLLKRVRELEQEVQRLKKEQAKNKEDSNIRENSAGAGKTKRAFDFSAHGRRHVALRIAYMGWGYQGFASQENTNNTIEEKLFEALTKTRLVESRQTSNYHRCGRTDKGVSAFGQVISLDLRSQFPRGRDSEDFNVKEEANAAAEEIRYTHILNRVLP

SEQ ID NO: 69865 - protein, 481 aa, Homo sapiens; identical to SEQ ID NO: 69863
  Payload ID: 13877
  Gene Symbol: PUS3
  Gene Name: pseudouridylate synthase 3
  Uniprot ID: Q9BZE2
  ENSP ID: ENSP00000432386

SEQ ID NO: 69866 - protein, 105 aa, Homo sapiens
  Payload ID: 13877
  Gene Symbol: PUS3
  Gene Name: pseudouridylate synthase 3
  ENSP ID: ENSP00000437077
MAYNDTDRNQTEKLLKRVRELEQEVQRLKKEQAKNKEDSNIRENSAGAGKTKRAFDFSAHGRRHVALRIAYMGWGYQGFASQENTNNTIEEKLFEALTKTRLVES

SEQ ID NO: 69867 - protein, 273 aa, Homo sapiens
  Payload ID: 13877
  Gene Symbol: PUS3
  Gene Name: pseudouridylate synthase 3
  ENSP ID: ENSP00000481536
MDYAAQKYVGTHDFRNLCKMDVANGVINFQRTILSAQVQLVGQSPGEGRWQEPFQLCQFEVTGQAFLYHQVRCMMAILFLIGQGMEKPEIIDELLNIEKNPQKPQYSMAVEFPLVLYDCKFENVKWIYDQEAQEFNITHLQQLWANHAVKTHMLYSMLQGLDTVPVPCGIGPKMDGMTEWGNVKPSVIKQTSAFVEGVKMRTYKPLMDRPKCQGLESRIQHFVRRGRIEHPHLFHEEETKAKRDCNDTLEEENTNLETPTKRVCVDTEIKSII

SEQ ID NO: 69868 - protein, 661 aa, Homo sapiens
  Payload ID: 13878
  Gene Symbol: PUS7
  Gene Name: pseudouridylate synthase 7 (putative)
  Uniprot ID: Q96PZ0
  ENSP ID: ENSP00000348722
MEMTEMTGVSLKRGALVVEDNDSGVPVEETKKQKLSECSLTKGQDGLQNDFLSISEDVPRPPDTVSTGKGGKNSEAQLEDEEEEEEDGLSEECEEEESESFADMMKHGLTEADVGITKFVSSHQGFSGILKERYSDFVVHEIGKDGRISHLNDLSIPVDEEDPSEDIFTVLTAEEKQRLEELQLFKNKETSVAIEVIEDTKEKRTIIHQAIKSLFPGLETKTEDREGKKYIVAYHAAGKKALANPRKHSWPKSRGSYCHFVLYKENKDTMDAINVLSKYLRVKPNIFSYMGTKDKRAITVQEIAVLKITAQRLAHLNKCLMNFKLGNFSYQKNPLKLGELQGNHFTVVLRNITGTDDQVQQAMNSLKEIGFINYYGMQRFGTTAVPTYQVGRAILQNSWTEVMDLILKPRSGAEKGYLVKCREEWAKTKDPTAALRKLPVKRCVEGQLLRGLSKYGMKNIVSAFGIIPRNNRLMYIHSYQSYVWNNMVSKRIEDYGLKPVPGDLVLKGATATYIEEDDVNNYSIHDVVMPLPGFDVIYPKHKIQEAYREMLTADNLDIDNMRHKIRDYSLSGAYRKIIIRPQNVSWEVVAYDDPKIPLFNTDVDNLEGKTPPVFASEGKYRALKMDFSLPPSTYATMAIREVLKMDTSIKNQTQLNTTWLR

SEQ ID NO: 69869 - protein, 661 aa, Homo sapiens; identical to SEQ ID NO: 69868
  Payload ID: 13878
  Gene Symbol: PUS7
  Gene Name: pseudouridylate synthase 7 (putative)
  Uniprot ID: Q96PZ0
  ENSP ID: ENSP00000417402

SEQ ID NO: 69870 - protein, 132 aa, Homo sapiens
  Payload ID: 13878
  Gene Symbol: PUS7
  Gene Name: pseudouridylate synthase 7 (putative)
  ENSP ID: ENSP00000417718
  MOD_RES (1)..(1): Any amino acid
XSGILKERYSDFVVHEIGKDGRISHLNDLSIPVDEEVIEDTKEKRTIIHQAIKSLFPGLETKTEDREGKKYIVAYHAAGKKALANPRKHSWPKSRGSYCHFVLYKENKDTMDAINVLSKYLRVKPNIFSYMG

SEQ ID NO: 69871 - protein, 448 aa, Homo sapiens
  Payload ID: 13878
  Gene Symbol: PUS7
  Gene Name: pseudouridylate synthase 7 (putative)
  ENSP ID: ENSP00000418794
MEMTEMTGVSLKRGALVVEDNDSGVPVEETKKQKLSECSLTKGQDGLQNDFLSISEDVPRPPDTVSTGKGGKNSEAQLEDEEEEEEDGLSEECEEEESESFADMMKHGLTEADVGITKFVSSHQGFSGILKERYSDFVVHEIGKDGRISHLNDLSIPVDEEDPSEDIFTVLTAEEKQRLEELQLFKNKETSVAIEVIEDTKEKRTIIHQAIKSLFPGLETKTEDREGKKYIVAYHAAGKKALANPRKHSWPKSRGSYCHFVLYKENKDTMDAINVLSKYLRVKPNIFSYMGTKDKRAITVQEIAVLKITAQRLAHLNKCLMNFKLGNFSYQKNPLKLGELQGNHFTVVLRNITGTDDQVQQAMNSLKEIGFINYYGMQRFGTTAVPTYQVGRAILQNSWTEVMDLILKPRSGAEKGYLVKCREEWAKTKDPTAALRKLPVKRYPEIIA

SEQ ID NO: 69872 - protein, 701 aa, Homo sapiens
  Payload ID: 13879
  Gene Symbol: PUS7L
  Gene Name: pseudouridylate synthase 7-like
  Uniprot ID: Q9H0K6
  ENSP ID: ENSP00000343081
MEEDTDYRIRFSSLCFFNDHVGFHGTIKSSPSDFIVIEIDEQGQLVNKTIDEPIFKISEIQLEPNNFPKKPKLDLQNLSLEDGRNQEVHTLIKYTDGDQNHQSGSEKEDTIVDGTSKCEEKADVLSSFLDEKTHELLNNFACDVREKWLSKTELIGLPPEFSIGRILDKNQRASLHSAIRQKFPFLVTVGKNSEIVVKPNLEYKELCHLVSEEEAFDFFKYLDAKKENSKFTFKPDTNKDHRKAVHHFVNKKFGNLVETKSFSKMNCSAGNPNVVVTVRFREKAHKRGKRPLSECQEGKVIYTAFTLRKENLEMFEAIGFLAIKLGVIPSDFSYAGLKDKKAITYQAMVVRKVTPERLKNIEKEIEKKRMNVFNIRSVDDSLRLGQLKGNHFDIVIRNLKKQINDSANLRERIMEAIENVKKKGFVNYYGPQRFGKGRKVHTDQIGLALLKNEMMKAIKLFLTPEDLDDPVNRAKKYFLQTEDAKGTLSLMPEFKVRERALLEALHRFGMTEEGCIQAWFSLPHSMRIFYVHAYTSKIWNEAVSYRLETYGARVVQGDLVCLDEDIDDENFPNSKIHLVTEEEGSANMYAIHQVVLPVLGYNIQYPKNKVGQWYHDILSRDGLQTCRFKVPTLKLNIPGCYRQILKHPCNLSYQLMEDHDIDVKTKGSHIDETALSLLISFDLDASCYATVCLKEIMKHDV

SEQ ID NO: 69873 - protein, 388 aa, Homo sapiens
  Payload ID: 13879
  Gene Symbol: PUS7L
  Gene Name: pseudouridylate synthase 7-like
  Uniprot ID: Q9H0K6
  ENSP ID: ENSP00000398497
MFEAIGFLAIKLGVIPSDFSYAGLKDKKAITYQAMVVRKVTPERLKNIEKEIEKKRMNVFNIRSVDDSLRLGQLKGNHFDIVIRNLKKQINDSANLRERIMEAIENVKKKGFVNYYGPQRFGKGRKVHTDQIGLALLKNEMMKAIKLFLTPEDLDDPVNRAKKYFLQTEDAKGTLSLMPEFKVRERALLEALHRFGMTEEGCIQAWFSLPHSMRIFYVHAYTSKIWNEAVSYRLETYGARVVQGDLVCLDEDIDDENFPNSKIHLVTEEEGSANMYAIHQVVLPVLGYNIQYPKNKVGQWYHDILSRDGLQTCRFKVPTLKLNIPGCYRQILKHPCNLSYQLMEDHDIDVKTKGSHIDETALSLLISFDLDASCYATVCLKEIMKHDV

SEQ ID NO: 69874 - protein, 701 aa, Homo sapiens; identical to SEQ ID NO: 69872
  Payload ID: 13879
  Gene Symbol: PUS7L
  Gene Name: pseudouridylate synthase 7-like
  Uniprot ID: Q9H0K6
  ENSP ID: ENSP00000415899

SEQ ID NO: 69875 - protein, 365 aa, Homo sapiens
  Payload ID: 13879
  Gene Symbol: PUS7L
  Gene Name: pseudouridylate synthase 7-like
  ENSP ID: ENSP00000446865
MEEDTDYRIRFSSLCFFNDHVGFHGTIKSSPSDFIVIEIDEQGQLVNKTIDEPIFKISEIQLEPNNFPKKPKLDLQNLSLEDGRNQEVHTLIKYTDGDQNHQSGSEKEDTIVDGTSKCEEKADVLSSFLDEKTHELLNNFACDVREKWLSKTELIGLPPEFSIGRILDKNQRASLHSAIRQKFPFLVTVGKNSEIVVKPNLEYKELCHLVSEEEAFDFFKYLDAKKENSKFTFKPDTNKDHRKAVHHFVNKKFGNLVETKSFSKMNCSAGNPNVVVTVRFREKAHKRGKRPLSECQEGKVIYTAFTLRKENLEMFEAIGFLAIKLGVIPSDFSYAGLKDKKAITYQAMVVRKVTPERLKNIEKEI

SEQ ID NO: 69876 - protein, 701 aa, Homo sapiens; identical to SEQ ID NO: 69872
  Payload ID: 13879
  Gene Symbol: PUS7L
  Gene Name: pseudouridylate synthase 7-like
  Uniprot ID: Q9H0K6
  ENSP ID: ENSP00000447706

SEQ ID NO: 69877 - protein, 160 aa, Homo sapiens
  Payload ID: 13879
  Gene Symbol: PUS7L
  Gene Name: pseudouridylate synthase 7-like
  ENSP ID: ENSP00000449222
MFEAIGFLAIKLGVIPSDFSYAGLKDKKAITYQAMVVRKVTPERLKNIEKEIEKKRMNVFNIRSVDDSLRLGQLKGNHFDIVIRNLKKQINDSANLRERIMEAIENVKKKGFVNYYGPQRFGKGRKVHTDQIGLALLKNEMMKAIKLFLTPEDLDDPVNR

SEQ ID NO: 69878 - protein, 126 aa, Homo sapiens
  Payload ID: 13879
  Gene Symbol: PUS7L
  Gene Name: pseudouridylate synthase 7-like
  ENSP ID: ENSP00000449502
MEEDTDYRIRFSSLCFFNDHVGFHGTIKSSPSDFIVIEIDEQGQLVNKTIDEPIFKISEIQLEPNNFPKKPKLDLQNLSLEDGRNQEVHTLIKYTDGDQNHQSGSEKEDTIVDGTSKCEEKADVLS

SEQ ID NO: 69879 - protein, 154 aa, Homo sapiens
  Payload ID: 13879
  Gene Symbol: PUS7L
  Gene Name: pseudouridylate synthase 7-like
  ENSP ID: ENSP00000450341
MFEAIGFLAIKLGVIPSDFSYAGLKDKKAITYQAMVVRKVTPERLKNIEKEIEKKRMNVFNIRSVDDSLRLGQLKGNHFDIVIRNLKKQINDSANLRERIMEAIENVKKKGFVNYYGPQRFGKGRKVHTDQIGLALLKNEMMKAIKLFLTPEDL

SEQ ID NO: 69880 - protein, 303 aa, Homo sapiens
  Payload ID: 13880
  Gene Symbol: PUSL1
  Gene Name: pseudouridylate synthase-like 1
  Uniprot ID: Q8N0Z8
  ENSP ID: ENSP00000368318
MSSAPASGSVRARYLVYFQYVGTDFNGVAAVRGTQRAVGVQNYLEEAAERLNSVEPVRFTISSRTDAGVHALSNAAHLDVQRRSGRPPFPPEVLAEALNTHLRHPAIRVLRAFRVPSDFHARHAATSRTYLYRLATGCHRRDELPVFERNLCWTLPADCLDMVAMQEAAQHLLGTHDFSAFQSAGSPVPSPVRTLRRVSVSPGQASPLVTPEESRKLRFWNLEFESQSFLYRQVRRMTAVLVAVGLGALAPAQVKTILESQDPLGKHQTRVAPAHGLFLKSVLYGNLGAASCTLQGPQFGSHG

SEQ ID NO: 69881 - protein, 125 aa, Homo sapiens
  Payload ID: 13880
  Gene Symbol: PUSL1
  Gene Name: pseudouridylate synthase-like 1
  ENSP ID: ENSP00000462968
MVAMQEAAQHLLGTHDFSAFQSAGSPVPSPVRTLRRVSVSPGQASPLVTPEESRKLRFWNLEFESQSFLYRQVRRMTAVLVAVGLGALAPAQVKTILESQDPLGKHQTRVAPAHGLFLKSVLYGN

SEQ ID NO: 69882 - protein, 205 aa, Homo sapiens
  Payload ID: 13881
  Gene Symbol: PSMC3IP
  Gene Name: PSMC3 interacting protein
  Uniprot ID: Q9P2W1
  ENSP ID: ENSP00000253789
MSKGRAEAAAGAAGILLRYLQEQNRPYSSQDVFGNLQREHGLGKAVVVKTLEQLAQQGKIKEKMYGKQKIYFADQDQFDMVSDADLQVLDGKIVALTAKVQSLQQSCRYMEAEMQKEIQELKKECAGYRERLKNIKAATNHVTPEEKEQVYRERQKYCKEWRKRKRMATELSDAILEGYPKSKKQFFEEVGIETDEDYNVTLPDP

SEQ ID NO: 69883 - protein, 217 aa, Homo sapiens
  Payload ID: 13881
  Gene Symbol: PSMC3IP
  Gene Name: PSMC3 interacting protein
  Uniprot ID: Q9P2W1
  ENSP ID: ENSP00000377384
MSKGRAEAAAGAAGILLRYLQEQNRPYSSQDVFGNLQREHGLGKAVVVKTLEQLAQQGKIKEKMYGKQKIYFADQDQFDMVSDADLQVLDGKIVALTAKVQSLQQSCRYMEAELKELSSALTTPEMQKEIQELKKECAGYRERLKNIKAATNHVTPEEKEQVYRERQKYCKEWRKRKRMATELSDAILEGYPKSKKQFFEEVGIETDEDYNVTLPDP

SEQ ID NO: 69884 - protein, 85 aa, Homo sapiens
  Payload ID: 13881
  Gene Symbol: PSMC3IP
  Gene Name: PSMC3 interacting protein
  ENSP ID: ENSP00000465409
MSKGRAEAAAGAAGILLRYLQEQNRPYSSQDVFGNLQREHGLGKAVVVKTLEQLAQQGKIKEKMYGKQKIYFADQVRRTCADCHP

SEQ ID NO: 69885 - protein, 84 aa, Homo sapiens
  Payload ID: 13881
  Gene Symbol: PSMC3IP
  Gene Name: PSMC3 interacting protein
  ENSP ID: ENSP00000466031
MSKGRAEAAAGAAGILLRYLQEQNRPYSSQDVFGNLQREHGLGKAVVVKTLEQLAQQGKIKEKMYGKQKIYFADQTLWRLWGPV

SEQ ID NO: 69886 - protein, 92 aa, Homo sapiens
  Payload ID: 13881
  Gene Symbol: PSMC3IP
  Gene Name: PSMC3 interacting protein
  Uniprot ID: Q9P2W1
  ENSP ID: ENSP00000466381
MQKEIQELKKECAGYRERLKNIKAATNHVTPEEKEQVYRERQKYCKEWRKRKRMATELSDAILEGYPKSKKQFFEEVGIETDEDYNVTLPDP

SEQ ID NO: 69887 - protein, 116 aa, Homo sapiens
  Payload ID: 13881
  Gene Symbol: PSMC3IP
  Gene Name: PSMC3 interacting protein
  ENSP ID: ENSP00000467952
MSKGRAEAAAGAAGILLRYLQEQNRPYSSQDVFGNLQREHGLGKAVVVKTLEQLAQQGKIKEKMYGKQKIYFADQDQFDMVSDADLQVLDGKIVALTAKVQSLQQSCRYMEAGRTG

SEQ ID NO: 69888 - protein, 154 aa, Homo sapiens
  Payload ID: 13881
  Gene Symbol: PSMC3IP
  Gene Name: PSMC3 interacting protein
  ENSP ID: ENSP00000468188
MYGKQKIYFADQDQFDMVSDADLQVLDGKIVALTAKVQSLQQSCRYMEAELKELSSALTTPEMQKEIQELKKECAGYRERLKNIKAATNHVTPEEKEQVYRERQKYCKEWRKRKRMATELSDAILEGYPKSKKQFFEEVGIETDEDYNVTLPDP

SEQ ID NO: 69889 - protein, 152 aa, Homo sapiens
  Payload ID: 13882
  Gene Symbol: PSORS1C1
  Gene Name: psoriasis susceptibility 1 candidate 1
  Uniprot ID: Q9UIG5
  ENSP ID: ENSP00000259881
MTCTDQKSHSQRALGTQTPALQGPQLLNTDPSSEETRPPHVNPDRLCHMEPANHFWHAGDLQAMISKEFHLAATQDDCRKGRTQEDILVPSSHPELFASVLPMAPEEAARLQQPQPLPPPSGIHLSASRTLAPTLLYSSPPSHSPFGLSSLI

SEQ ID NO: 69890 - protein, 63 aa, Homo sapiens
  Payload ID: 13882
  Gene Symbol: PSORS1C1
  Gene Name: psoriasis susceptibility 1 candidate 1
  ENSP ID: ENSP00000365466
MTCTDQKSHSQRALGTQTPALQGPQLLNTDPSSEETHPPTLILTDFATWSQQTISGMQGTSKQ

SEQ ID NO: 69891 - protein, 152 aa, Homo sapiens; identical to SEQ ID NO: 69889
  Payload ID: 13882
  Gene Symbol: PSORS1C1
  Gene Name: psoriasis susceptibility 1 candidate 1
  Uniprot ID: Q9UIG5
  ENSP ID: ENSP00000389875

SEQ ID NO: 69892 - protein, 152 aa, Homo sapiens
  Payload ID: 13882
  Gene Symbol: PSORS1C1
  Gene Name: psoriasis susceptibility 1 candidate 1
  Uniprot ID: Q9UIG5
  ENSP ID: ENSP00000391443
MTCTDQKSHSQRALGTQTPALQGPQLLNTDPSSKETRPPHVNPDRLCHMEPANHFWHAGDLQAMISKEFHLAATQDDCRKGRTQEDILVPSSHPELFASVLPMAPEEAARLQQPQPLPPPSGIHLSASRTLAPTLLYSSPPSHSPFGLSSLI

SEQ ID NO: 69893 - protein, 152 aa, Homo sapiens; identical to SEQ ID NO: 69889
  Payload ID: 13882
  Gene Symbol: PSORS1C1
  Gene Name: psoriasis susceptibility 1 candidate 1
  Uniprot ID: Q9UIG5
  ENSP ID: ENSP00000396568

SEQ ID NO: 69894 - protein, 152 aa, Homo sapiens; identical to SEQ ID NO: 69889
  Payload ID: 13882
  Gene Symbol: PSORS1C1
  Gene Name: psoriasis susceptibility 1 candidate 1
  Uniprot ID: Q9UIG5
  ENSP ID: ENSP00000398278

SEQ ID NO: 69895 - protein, 89 aa, Homo sapiens
  Payload ID: 13882
  Gene Symbol: PSORS1C1
  Gene Name: psoriasis susceptibility 1 candidate 1
  ENSP ID: ENSP00000447158
MISKEFHLAATQDDCRKGRTQEDILVPSSHPELFASVLPMAPEEAARLQQPQPLPPPSGIHLSASRTLAPTLLYSSPPSHSPFGLSSLI

SEQ ID NO: 69896 - protein, 104 aa, Homo sapiens
  Payload ID: 13882
  Gene Symbol: PSORS1C1
  Gene Name: psoriasis susceptibility 1 candidate 1
  ENSP ID: ENSP00000449471
MEPANHFWHAGDLQAMISKEFHLAATQDDCRKGRTQEDILVPSSHPELFASVLPMAPEEAARLQQPQPLPPPSGIHLSASRTLAPTLLYSSPPSHSPFGLSSLI

SEQ ID NO: 69897 - protein, 136 aa, Homo sapiens
  Payload ID: 13883
  Gene Symbol: PSORS1C2
  Gene Name: psoriasis susceptibility 1 candidate 2
  Uniprot ID: Q9UIG4
  ENSP ID: ENSP00000259845
MILNWKLLGILVLCLHTRGISGSEGHPSHPPAEDREEAGSPTLPQGPPVPGDPWPGAPPLFEDPPPTRPSRPWRDLPETGVWLPEPPRTDPPQPPRPDDPWPAGPQPPENPWPPAPEVDNRPQEEPDLDPPREEYR

SEQ ID NO: 69898 - protein, 136 aa, Homo sapiens
  Payload ID: 13883
  Gene Symbol: PSORS1C2
  Gene Name: psoriasis susceptibility 1 candidate 2
  Uniprot ID: Q9UIG4
  ENSP ID: ENSP00000373022
MILNWKLLGILVLCLHTRGISGSEGHPSHPPAEDREEAGSPTLPQGPPVPGDPWPGAPPLFEDPPPTRPSRPWRDLPETGVWPPEPPRTDPPQPPRPDDPWPAGPQPPENPWPPAPEVDNRPQEEPDLDPPREEYR

SEQ ID NO: 69899 - protein, 136 aa, Homo sapiens; identical to SEQ ID NO: 69898
  Payload ID: 13883
  Gene Symbol: PSORS1C2
  Gene Name: psoriasis susceptibility 1 candidate 2
  Uniprot ID: Q9UIG4
  ENSP ID: ENSP00000390931

SEQ ID NO: 69900 - protein, 136 aa, Homo sapiens; identical to SEQ ID NO: 69898
  Payload ID: 13883
  Gene Symbol: PSORS1C2
  Gene Name: psoriasis susceptibility 1 candidate 2
  Uniprot ID: Q9UIG4
  ENSP ID: ENSP00000398734

SEQ ID NO: 69901 - protein, 136 aa, Homo sapiens; identical to SEQ ID NO: 69898
  Payload ID: 13883
  Gene Symbol: PSORS1C2
  Gene Name: psoriasis susceptibility 1 candidate 2
  Uniprot ID: Q9UIG4
  ENSP ID: ENSP00000403456

SEQ ID NO: 69902 - protein, 136 aa, Homo sapiens; identical to SEQ ID NO: 69898
  Payload ID: 13883
  Gene Symbol: PSORS1C2
  Gene Name: psoriasis susceptibility 1 candidate 2
  Uniprot ID: Q9UIG4
  ENSP ID: ENSP00000414952

SEQ ID NO: 69903 - protein, 304 aa, Homo sapiens
  Payload ID: 13884
  Gene Symbol: PPTC7
  Gene Name: PTC7 protein phosphatase homolog
  Uniprot ID: Q8NI37
  ENSP ID: ENSP00000346255
MFSVLSYGRLVARAVLGGLSQTDPRAGGGGGGDYGLVTAGCGFGKDFRKGLLKKGACYGDDACFVARHRSADVLGVADGVGGWRDYGVDPSQFSGTLMRTCERLVKEGRFVPSNPIGILTTSYCELLQNKVPLLGSSTACIVVLDRTSHRLHTANLGDSGFLVVRGGEVVHRSDEQQHYFNTPFQLSIAPPEAEGVVLSDSPDAADSTSFDVQLGDIILTATDGLFDNMPDYMILQELKKLKNSNYESIQQTARSIAEQAHELAYDPNYMSPFAQFACDNGLNVRGGKPDDITVLLSIVAEYTD

SEQ ID NO: 69904 - protein, 581 aa, Homo sapiens
  Payload ID: 13885
  Gene Symbol: PINK1
  Gene Name: PTEN induced putative kinase 1
  Uniprot ID: Q9BXM7
  ENSP ID: ENSP00000364204
MAVRQALGRGLQLGRALLLRFTGKPGRAYGLGRPGPAAGCVRGERPGWAAGPGAEPRRVGLGLPNRLRFFRQSVAGLAARLQRQFVVRAWGCAGPCGRAVFLAFGLGLGLIEEKQAESRRAVSACQEIQAIFTQKSKPGPDPLDTRRLQGFRLEEYLIGQSIGKGCSAAVYEATMPTLPQNLEVTKSTGLLPGRGPGTSAPGEGQERAPGAPAFPLAIKMMWNISAGSSSEAILNTMSQELVPASRVALAGEYGAVTYRKSKRGPKQLAPHPNIIRVLRAFTSSVPLLPGALVDYPDVLPSRLHPEGLGHGRTLFLVMKNYPCTLRQYLCVNTPSPRLAAMMLLQLLEGVDHLVQQGIAHRDLKSDNILVELDPDGCPWLVIADFGCCLADESIGLQLPFSSWYVDRGGNGCLMAPEVSTARPGPRAVIDYSKADAWAVGAIAYEIFGLVNPFYGQGKAHLESRSYQEAQLPALPESVPPDVRQLVRALLQREASKRPSARVAANVLHLSLWGEHILALKNLKLDKMVGWLLQQSAATLLANRLTEKCCVETKMKMLFLANLECETLCQAALLLCSWRAAL

SEQ ID NO: 69905 - protein, 104 aa, Homo sapiens
  Payload ID: 13886
  Gene Symbol: PCBD1
  Gene Name: pterin-4 alpha-carbinolamine dehydratase/dimerization cofactor of hepatocyte nuclear factor 1 alpha
  Uniprot ID: P61457
  ENSP ID: ENSP00000299299
MAGKAHRLSAEERDQLLPNLRAVGWNELEGRDAIFKQFHFKDFNRAFGFMTRVALQAEKLDHHPEWFNVYNKVHITLSTHECAGLSERDINLASFIEQVAVSMT

SEQ ID NO: 69906 - protein, 130 aa, Homo sapiens
  Payload ID: 13887
  Gene Symbol: PCBD2
  Gene Name: pterin-4 alpha-carbinolamine dehydratase/dimerization cofactor of hepatocyte nuclear factor 1 alpha (TCF1) 2
  Uniprot ID: Q9H0N5
  ENSP ID: ENSP00000254908
MAAVLGALGATRRLLAALRGQSLGLAAMSSGTHRLTAEERNQAILDLKAAGWSELSERDAIYKEFSFHNFNQAFGFMSRVALQAEKMNHHPEWFNVYNKVQITLTSHDCGELTKKDVKLAKFIEKAAASV

SEQ ID NO: 69907 - protein, 130 aa, Homo sapiens; identical to SEQ ID NO: 69906
  Payload ID: 13887
  Gene Symbol: PCBD2
  Gene Name: pterin-4 alpha-carbinolamine dehydratase/dimerization cofactor of hepatocyte nuclear factor 1 alpha (TCF1) 2
  Uniprot ID: Q9H0N5
  ENSP ID: ENSP00000421544

SEQ ID NO: 69908 - protein, 119 aa, Homo sapiens
  Payload ID: 13887
  Gene Symbol: PCBD2
  Gene Name: pterin-4 alpha-carbinolamine dehydratase/dimerization cofactor of hepatocyte nuclear factor 1 alpha (TCF1) 2
  ENSP ID: ENSP00000426161
RRLLAALRGQSLGLAAMSSGTHRLTAEERNQAILDLKAAGWSELSERDAIYKEFSFHNFNQAFGFMSRVALQAEKMNHHPEWFNVYNKVQITLTSHDCGELTKKDVKLAKFIEKAAASV

SEQ ID NO: 69909 - protein, 525 aa, Homo sapiens
  Payload ID: 13888
  Gene Symbol: PTGES3L-AARSD1
  Gene Name: PTGES3L-AARSD1 readthrough
  Uniprot ID: Q9BTE6
  ENSP ID: ENSP00000353355
MEFCVEDSTDVHVLIEDHRIVFSCKNADGVELYNEIEFYAKVNSKDSQDKRSSRSITCFVRKWKEKVAWPRLTKEDIKPVWLSVDFDNWRDWEGDEEMELAHVEHYAELLKKVSTKRPPPAMDDLDFTTTVVSCCPAELQTEGSNGKKEVLSGFQVVLEDTVLFPEGGGQPDDRGTINDISVLRVTRRGEQADHFTQTPLDPGSQVLVRVDWERRFDHMQQHSGQHLITAVADHLFKLKTTSWELGRFRSAIELDTPSMTAEQVAAIEQSVNEKIRDRLPVNVRELSLDDPEVEQVSGRGLPDDHAGPIRVVNIEGVDSNMCCGTHVSNLSDLQVIKILGTEKGKKNRTNLIFLSGNRVLKWMERSHGTEKALTALLKCGAEDHVEAVKKLQNSTKILQKNNLNLLRDLAVHIAHSLRNSPDWGGVVILHRKEGDSEFMNIIANEIGSEETLLFLTVGDEKGGGLFLLAGPPASVETLGPRVAEVLEGKGAGKKGRFQGKATKMSRRMEAQALLQDYISTQSAKE

SEQ ID NO: 69910 - protein, 495 aa, Homo sapiens
  Payload ID: 13888
  Gene Symbol: PTGES3L-AARSD1
  Gene Name: PTGES3L-AARSD1 readthrough
  ENSP ID: ENSP00000386254
MEFCVEDSTDVHVLIEDHRIVFSCKNADGVELYNEIEFYAKVNSKDSQDKRSSRSITCFVRKWKEKVAWPRLTKEDIKLLKKVSTKRPPPAMDDLDFTTTVVSCCPAELQTEGSNGKKEVLSGFQVVLEDTVLFPEGGGQPDDRGTINDISVLRVTRRGEQADHFTQTPLDPGSQVLVRVDWERRFDHMQQHSGQHLITAVADHLFKLKTTSWELGRFRSAIELDTPSMTAEQVAAIEQSVNEKIRDRLPVNVRELSLDDPEVEQVSGRGLPDDHAGPIRVVNIEGVDSNMCCGTHVSNLSDLQVIKILGTEKGKKNRTNLIFLSGNRVLKWMERSHGTEKALTALLKCGAEDHVEAVKKLQNSTKILQKNNLNLLRDLAVHIAHSLRNSPDWGGVVILHRKEGDSEFMNIIANEIGSEETLLFLTVGDEKGGGLFLLAGPPASVETLGPRVAEVLEGKGAGKKGRFQGKATKMSRRMEAQALLQDYISTQSAKE

SEQ ID NO: 69911 - protein, 586 aa, Homo sapiens
  Payload ID: 13888
  Gene Symbol: PTGES3L-AARSD1
  Gene Name: PTGES3L-AARSD1 readthrough
  Uniprot ID: Q9BTE6
  ENSP ID: ENSP00000386621
MFSLPLNCSPDHIRRGSCWGRPQDLKIAAPAWNSKCHPGAGAAMARQHARTLWYDRPRYVFMEFCVEDSTDVHVLIEDHRIVFSCKNADGVELYNEIEFYAKVNSKDSQDKRSSRSITCFVRKWKEKVAWPRLTKEDIKPVWLSVDFDNWRDWEGDEEMELAHVEHYAELLKKVSTKRPPPAMDDLDFTTTVVSCCPAELQTEGSNGKKEVLSGFQVVLEDTVLFPEGGGQPDDRGTINDISVLRVTRRGEQADHFTQTPLDPGSQVLVRVDWERRFDHMQQHSGQHLITAVADHLFKLKTTSWELGRFRSAIELDTPSMTAEQVAAIEQSVNEKIRDRLPVNVRELSLDDPEVEQVSGRGLPDDHAGPIRVVNIEGVDSNMCCGTHVSNLSDLQVIKILGTEKGKKNRTNLIFLSGNRVLKWMERSHGTEKALTALLKCGAEDHVEAVKKLQNSTKILQKNNLNLLRDLAVHIAHSLRNSPDWGGVVILHRKEGDSEFMNIIANEIGSEETLLFLTVGDEKGGGLFLLAGPPASVETLGPRVAEVLEGKGAGKKGRFQGKATKMSRRMEAQALLQDYISTQSAKE

SEQ ID NO: 69912 - protein, 189 aa, Homo sapiens
  Payload ID: 13888
  Gene Symbol: PTGES3L-AARSD1
  Gene Name: PTGES3L-AARSD1 readthrough
  ENSP ID: ENSP00000393019
  MOD_RES (1)..(1): Any amino acid
XQHARTLWYDRPSCKNADGVELYNEIEFYAKVNSKDSQDKRSSRSITCFVRKWKEKVAWPRLTKEDIKPVWLSVDFDNWRDWEGDEEMELAHVEHYAELLKKVSTKRPPPAMDDLDFTTTVVSCCPAELQTEGSNGKKEVLSGFQVVLEDTVLFPEGGGQPDDRGTINDISVLRVTRRGEQADHFTQTP

SEQ ID NO: 69913 - protein, 53 aa, Homo sapiens
  Payload ID: 13888
  Gene Symbol: PTGES3L-AARSD1
  Gene Name: PTGES3L-AARSD1 readthrough
  ENSP ID: ENSP00000393780
  MOD_RES (1)..(1): Any amino acid
XGSCWGRPQDLKIAAPAWNSKCHPGAGAAMARHTSTSLQAARPDLVVRQAQSK

SEQ ID NO: 69914 - protein, 132 aa, Homo sapiens
  Payload ID: 13888
  Gene Symbol: PTGES3L-AARSD1
  Gene Name: PTGES3L-AARSD1 readthrough
  ENSP ID: ENSP00000407951
MEFCVEDSTDVHVLIEDHRIVFSCKNADGVELYNEIEFYAKVNSKDSQDKRSSRSITCFVRKWKEKVAWPRLTKEDIKPVWLSVDFDNWRDWEGDEEMELAHVEHYAELLKKVSTKRPPPAMDDLDFTTTVV

SEQ ID NO: 69915 - protein, 586 aa, Homo sapiens; identical to SEQ ID NO: 69911
  Payload ID: 13888
  Gene Symbol: PTGES3L-AARSD1
  Gene Name: PTGES3L-AARSD1 readthrough
  Uniprot ID: Q9BTE6
  ENSP ID: ENSP00000409924

SEQ ID NO: 69916 - protein, 147 aa, Homo sapiens
  Payload ID: 13889
  Gene Symbol: PRY
  Gene Name: PTPN13-like, Y-linked
  Uniprot ID: O14603
  ENSP ID: ENSP00000302319
MGATGLGFLLSWRQDNLNGTDCQGCNILYFSETTGSMCSELSLNRGLEARRKKDLKDSFLWRYGKVGCISLPLREMTAWINPPQISEIFQGYHQRVHGADALSLQTNSLRSRLSSQCLGQSFLLRTLERGRGFRALGDICGHVHEED

SEQ ID NO: 69917 - protein, 71 aa, Homo sapiens
  Payload ID: 13889
  Gene Symbol: PRY
  Gene Name: PTPN13-like, Y-linked
  Uniprot ID: O14603
  ENSP ID: ENSP00000474674
MGATGLGFLLSWRQDNLNGTDCQGCNILYFSETTGSMCSELSLNRGLEARRKKDLKDSFLWRDGVSPCLPC

SEQ ID NO: 69918 - protein, 147 aa, Homo sapiens; identical to SEQ ID NO: 69916
  Payload ID: 13890
  Gene Symbol: PRY2
  Gene Name: PTPN13-like, Y-linked 2
  Uniprot ID: O14603
  ENSP ID: ENSP00000303300

SEQ ID NO: 69919 - protein, 71 aa, Homo sapiens; identical to SEQ ID NO: 69917
  Payload ID: 13890
  Gene Symbol: PRY2
  Gene Name: PTPN13-like, Y-linked 2
  Uniprot ID: O14603
  ENSP ID: ENSP00000474545

SEQ ID NO: 69920 - protein, 1505 aa, Homo sapiens; identical to SEQ ID NO: 69309
  Payload ID: 13891
  Gene Symbol:
  Gene Name: PTPRD
  ENSP ID: ENSP00000488982

SEQ ID NO: 69921 - protein, 1506 aa, Homo sapiens; identical to SEQ ID NO: 69306
  Payload ID: 13891
  Gene Symbol:
  Gene Name: PTPRD
  ENSP ID: ENSP00000489038

SEQ ID NO: 69922 - protein, 93 aa, Homo sapiens; identical to SEQ ID NO: 69314
  Payload ID: 13891
  Gene Symbol:
  Gene Name: PTPRD
  ENSP ID: ENSP00000489062

SEQ ID NO: 69923 - protein, 1912 aa, Homo sapiens; identical to SEQ ID NO: 69307
  Payload ID: 13891
  Gene Symbol:
  Gene Name: PTPRD
  ENSP ID: ENSP00000489063

SEQ ID NO: 69924 - protein, 1502 aa, Homo sapiens; identical to SEQ ID NO: 69310
  Payload ID: 13891
  Gene Symbol:
  Gene Name: PTPRD
  ENSP ID: ENSP00000489155

SEQ ID NO: 69925 - protein, 1505 aa, Homo sapiens [sequence omitted]

SEQ ID NO: 69926 - protein, 1912 aa, Homo sapiens; identical to SEQ ID NO: 69307
  Payload ID: 13891
  Gene Symbol:
  Gene Name: PTPRD
  ENSP ID: ENSP00000489257

SEQ ID NO: 69927 - protein, 1496 aa, Homo sapiens; identical to SEQ ID NO: 69316
  Payload ID: 13891
  Gene Symbol:
  Gene Name: PTPRD
  ENSP ID: ENSP00000489264

SEQ ID NO: 69928 - protein, 1912 aa, Homo sapiens; identical to SEQ ID NO: 69307
  Payload ID: 13891
  Gene Symbol:
  Gene Name: PTPRD
  ENSP ID: ENSP00000489439

SEQ ID NO: 69929 - protein, 1505 aa, Homo sapiens; identical to SEQ ID NO: 69312
  Payload ID: 13891
  Gene Symbol:
  Gene Name: PTPRD
  ENSP ID: ENSP00000489509

SEQ ID NO: 69930 - protein, 202 aa, Homo sapiens; identical to SEQ ID NO: 69313
  Payload ID: 13891
  Gene Symbol:
  Gene Name: PTPRD
  ENSP ID: ENSP00000489546

SEQ ID NO: 69931 - protein, 1005 aa, Homo sapiens
  Payload ID: 13892
  Gene Symbol: PPFIBP1
  Gene Name: PTPRF interacting protein, binding protein 1 (liprin beta 1)
  Uniprot ID: Q86W92
  ENSP ID: ENSP00000228425
MMSDASDMLAAALEQMDGIIAGSKALEYSNGIFDCQSPTSPFMGSLRALHLVEDLRGLLEMMETDEKEGLRCQIPDSTAETLVEWLQSQMTNGHLPGNGDVYQERLARLENDKESLVLQVSVLTDQVEAQGEKIRDLEFCLEEHREKVNATEEMLQQELLSRTSLETQKLDLMAEISNLKLKLTAVEKDRLDYEDKFRDTEGLIQEINDLRLKVSEMDSERLQYEKKLKSTKDELASLKEQLEEKESEVKRLQEKLVCKMKGEGVEIVDRDENFKKKLKEKNIEVQKMKKAVESLMAANEEKDRKIEDLRQCLNRYKKMQDTVVLAQGKKGKDGEYEELLNSSSISSLLDAQGFSDLEKSPSPTPVMGSPSCDPFNTSVPEEFHTTILQVSIPSLLPATVSMETSEKSKLTPKPETSFEENDGNIILGATVDTQLCDKLLTSSLQKSSSLGNLKKETSDGEKETIQKTSEDRAPAESRPFGTLPPRPPGQDTSMDDNPFGTRKVRSSFGRGFFKIKSNKRTASAPNLDRKRSASAPTLAETEKETAEHLDLAGASSRPKDSQRNSPFQIPPPSPDSKKKSRGIMKLFGKLRRSQSTTFNPDDMSEPEFKRGGTRATAGPRLGWSRDLGQSNSDLDMPFAKWTKEQVCNWLMEQGLGSYLNSGKHWIASGQTLLQASQQDLEKELGIKHSLHRKKLQLALQALGSEEETNHGKLDFNWVTRWLDDIGLPQYKTQFDEGRVDGRMLHYMTVDDLLSLKVVSVLHHLSIKRAIQVLRINNFEPNCLRRRPSDENTIAPSEVQKWTNHRVMEWLRSVDLAEYAPNLRGSGVHGGLMVLEPRFNVETMAQLLNIPPNKTLLRRHLATHFNLLIGAEAQHQKRDAMELPDYVLLTATAKVKPKKLAFSNFGNLRKKKQEDGEEYVCPMELGQASGSASKKGFKPGLDMRLYEEDDLDRLEQMEDSEGTVRQIGAFSEGINNLTHMLKEDDMFKDFAARSPSASITDEDSNV

SEQ ID NO: 69932 - protein, 1011 aa, Homo sapiens
  Payload ID: 13892
  Gene Symbol: PPFIBP1
  Gene Name: PTPRF interacting protein, binding protein 1 (liprin beta 1)
  Uniprot ID: Q86W92
  ENSP ID: ENSP00000314724
MMSDASDMLAAALEQMDGIIAGSKALEYSNGIFDCQSPTSPFMGSLRALHLVEDLRGLLEMMETDEKEGLRCQIPDSTAETLVEWLQSQMTNGHLPGNGDVYQERLARLENDKESLVLQVSVLTDQVEAQGEKIRDLEFCLEEHREKVNATEEMLQQELLSRTSLETQKLDLMAEISNLKLKLTAVEKDRLDYEDKFRDTEGLIQEINDLRLKVSEMDSERLQYEKKLKSTKSLMAKLSSMKIKVGQMQYEKQRMEQKWESLKDELASLKEQLEEKESEVKRLQEKLVCKMKGEGVEIVDRDIEVQKMKKAVESLMAANEEKDRKIEDLRQCLNRYKKMQDTVVLAQGKDGEYEELLNSSSISSLLDAQGFSDLEKSPSPTPVMGSPSCDPFNTSVPEEFHTTILQVSIPSLLPATVSMETSEKSKLTPKPETSFEENDGNIILGATVDTQLCDKLLTSSLQKSSSLGNLKKETSDGEKETIQKTSEDRAPAESRPFGTLPPRPPGQDTSMDDNPFGTRKVRSSFGRGFFKIKSNKRTASAPNLAETEKETAEHLDLAGASSRPKDSQRNSPFQIPPPSPDSKKKSRGIMKLFGKLRRSQSTTFNPDDMSEPEFKRGGTRATAGPRLGWSRDLGQSNSDLDMPFAKWTKEQVCNWLMEQGLGSYLNSGKHWIASGQTLLQASQQDLEKELGIKHSLHRKKLQLALQALGSEEETNHGKLDFNWVTRWLDDIGLPQYKTQFDEGRVDGRMLHYMTVDDLLSLKVVSVLHHLSIKRAIQVLRINNFEPNCLRRRPSDENTIAPSEVQKWTNHRVMEWLRSVDLAEYAPNLRGSGVHGGLMVLEPRFNVETMAQLLNIPPNKTLLRRHLATHFNLLIGAEAQHQKRDAMELPDYVLLTATAKVKPKKLAFSNFGNLRKKKQEDGEEYVCPMELGQASGSASKKGFKPGLDMRLYEEDDLDRLEQMEDSEGTVRQIGAFSEGINNLTHMLKEDDMFKDFAARSPSASITDEDSNV

SEQ ID NO: 69933 - protein, 86 aa, Homo sapiens
  Payload ID: 13892
  Gene Symbol: PPFIBP1
  Gene Name: PTPRF interacting protein, binding protein 1 (liprin beta 1)
  ENSP ID: ENSP00000437438
MMSDASDMLAAALEQMDGIIAGSKALEYSNGIFDCQSPTSPFMGSLRALHLVEDLRGLLEMMETDEKEGLRCQIPDSTAETLVEWL

SEQ ID NO: 69934 - protein, 109 aa, Homo sapiens
  Payload ID: 13892
  Gene Symbol: PPFIBP1
  Gene Name: PTPRF interacting protein, binding protein 1 (liprin beta 1)
  ENSP ID: ENSP00000438036
MMSDASDMLAAALEQMDGIIAGSKALEYSNGIFDCQSPTSPFMGSLRALHLVEDLRGLLEMMETDEKEGLRCQIPDSTAETLVEWLQSQMVGSACSKFCYKSFVAYSKI

SEQ ID NO: 69935 - protein, 242 aa, Homo sapiens
  Payload ID: 13892
  Gene Symbol: PPFIBP1
  Gene Name: PTPRF interacting protein, binding protein 1 (liprin beta 1)
  ENSP ID: ENSP00000438174
  MOD_RES (1)..(1): Any amino acid
XDIGLPQYKTQFDEGRVDGRMLHYMTVNTIAPSEVQKWTNHRVMEWLRSVDLAEYAPNLRGSGVHGGLMVLEPRFNVETMAQLLNIPPNKTLLRRHLATHFNLLIGAEAQHQKRDAMELPDYVLLTATAKVKPKKLAFSNFGNLRKKKQEDGEEYVCPMELGQASGSASKKGFKPGLDMRLYEEDDLDRLEQMEDSEGTVRQIGAFSEGINNLTHMLKEDDMFKDFAARSPSASITDEDSNV

SEQ ID NO: 69936 - protein, 18 aa, Homo sapiens
  Payload ID: 13892
  Gene Symbol: PPFIBP1
  Gene Name: PTPRF interacting protein, binding protein 1 (liprin beta 1)
  ENSP ID: ENSP00000442462
MLQQELLSRTSLETQKLD

SEQ ID NO: 69937 - protein, 205 aa, Homo sapiens
  Payload ID: 13892
  Gene Symbol: PPFIBP1
  Gene Name: PTPRF interacting protein, binding protein 1 (liprin beta 1)
  ENSP ID: ENSP00000443324
NEEKDRKIEDLRQCLNRYKKMQDTVVLAQGKKGKDGEYEELLNSSSISSLLDAQGFSDLEKSPSPTPVMGSPSCDPFNTSVPEEFHTTILQVSIPSLLPATVSMETSEKSKLTPKPETSFEENDGNIILGATVDTQLCDKLLTSSLQKSSSLGNLKKETSDGDRAPAESRPFGTLPPRPPGQDTSMDDNPFGTRKVRSSFGRGFF

SEQ ID NO: 69938 - protein, 980 aa, Homo sapiens
  Payload ID: 13892
  Gene Symbol: PPFIBP1
  Gene Name: PTPRF interacting protein, binding protein 1 (liprin beta 1)
  Uniprot ID: Q86W92
  ENSP ID: ENSP00000443442
MMSDASDMLAAALEQMDGIIAGSKALEYSNGIFDCQSPTSPFMGSLRALHLVEDLRGLLEMMETDEKEGLRCQIPDSTAETLVEWLQSQMTNGHLPGNGDVYQERLARLENDKESLVLQVSVLTDQVEAQGEKIRDLEFCLEEHREKVNATEEMLQQELLSRTSLETQKLDLMAEISNLKLKLTAVEKDRLDYEDKFRDTEGLIQEINDLRLKVSEMDSERLQYEKKLKSTKDELASLKEQLEEKESEVKRLQEKLVCKMKGEGVEIVDRDIEVQKMKKAVESLMAANEEKDRKIEDLRQCLNRYKKMQDTVVLAQGKDGEYEELLNSSSISSLLDAQGFSDLEKSPSPTPVMGSPSCDPFNTSVPEEFHTTILQVSIPSLLPATVSMETSEKSKLTPKPETSFEENDGNIILGATVDTQLCDKLLTSSLQKSSSLGNLKKETSDGEKETIQKTSEDRAPAESRPFGTLPPRPPGQDTSMDDNPFGTRKVRSSFGRGFFKIKSNKRTASAPNLAETEKETAEHLDLAGASSRPKDSQRNSPFQIPPPSPDSKKKSRGIMKLFGKLRRSQSTTFNPDDMSEPEFKRGGTRATAGPRLGWSRDLGQSNSDLDMPFAKWTKEQVCNWLMEQGLGSYLNSGKHWIASGQTLLQASQQDLEKELGIKHSLHRKKLQLALQALGSEEETNHGKLDFNWVTRWLDDIGLPQYKTQFDEGRVDGRMLHYMTVDDLLSLKVVSVLHHLSIKRAIQVLRINNFEPNCLRRRPSDENTIAPSEVQKWTNHRVMEWLRSVDLAEYAPNLRGSGVHGGLMVLEPRFNVETMAQLLNIPPNKTLLRRHLATHFNLLIGAEAQHQKRDAMELPDYVLLTATAKVKPKKLAFSNFGNLRKKKQEDGEEYVCPMELGQASGSASKKGFKPGLDMRLYEEDDLDRLEQMEDSEGTVRQIGAFSEGINNLTHMLKEDDMFKDFAARSPSASITDEDSNV

SEQ ID NO: 69939 - protein, 170 aa, Homo sapiens
  Payload ID: 13892
  Gene Symbol: PPFIBP1
  Gene Name: PTPRF interacting protein, binding protein 1 (liprin beta 1)
  Uniprot ID: Q86W92
  ENSP ID: ENSP00000444046
MMSDASDMLAAALEQMDGIIAGSKALEYSNGIFDCQSPTSPFMGSLRALHLVEDLRGLLEMMETDEKEGLRCQIPDSTAETLVEWLQSQMTNGHLPGNGDVYQERLARLENDKESLVLQVSVLTDQVEAQGEKIRDLEFCLEEHREKVNATEEMLQQVCAEARTKMGFPC

SEQ ID NO: 69940 - protein, 744 aa, Homo sapiens
  Payload ID: 13892
  Gene Symbol: PPFIBP1
  Gene Name: PTPRF interacting protein, binding protein 1 (liprin beta 1)
  ENSP ID: ENSP00000444304
MAEISNLKLKLTAVEKDRLDYEDKFRDTEGLIQEINDLRLKVSEMDSERLQYEKKLKSTKSLMAKLSSMKIKVGQMQYEKQRMEQKWESLKDELASLKEQLEEKESEVKRLQEKLVCKMKGEGVEIVDRDIEVQKMKKAVESLMAANEEKDRKIEDLRQCLNRYKKMQDTVVLAQGKKGKDGEYEELLNSSSISSLLDAQGFSDLEKSPSPTPVMGSPSCDPFNTSVPEEFHTTILQVSIPSLLPATVSMETSEKSKLTPKPETSFEENDGNIILGATVDTQLCDKLLTSSLQKSSSLGNLKKETSDGEKETIQKTSEDRAPAESRPFGTLPPRPPGQDTSMDDNPFGTRKVRSSFGRGFFKIKSNKRTASAPNLAETEKETAEHLDLAGASSRPKDSQRNSPFQIPPPSPDSKKKSRGIMKLFGKLRRSQSTTFNPDDMSEPEFKRGGTRATAGPRLGWSRDLGQSNSDLDMPFAKWTKEQVCNWLMEQGLGSYLNSGKHWIASGQTLLQASQQDLEKELGIKHSLHRKKLQLALQALGSEEETNHGKLDFNWVTRWLDDIGLPQYKTQFDEGRVDGRMLHYMTVDDLLSLKVVSVLHHLSIKRAIQVLRINNFEPNCLRRRPSDENTIAPSEVQKWTNHRVMEWLRSVDLAEYAPNLRGSGVHGGLMVLEPRFNVETMAQLLNIPPNKTLLRRHLATHFNLLIGAEAQHQKRDAMELPDYVLLTATAKVKPKKLAFSNFGNL

SEQ ID NO: 69941 - protein, 152 aa, Homo sapiens
  Payload ID: 13892
  Gene Symbol: PPFIBP1
  Gene Name: PTPRF interacting protein, binding protein 1 (liprin beta 1)
  ENSP ID: ENSP00000445132
MHLGWNLPLTNNKMMSDASDMLAAALEQMDGIIAGSKALEYSNGIFDCQSPTSPFMGSLRALHLVEDLRGLLEMMETDEKEGLRCQIPDSTAETLVEWLQSQMTNGHLPGNGDVYQERLARLENDKESLVLQVSVLTDQVEAQGEKIRDLEF

SEQ ID NO: 69942 - protein, 858 aa, Homo sapiens
  Payload ID: 13892
  Gene Symbol: PPFIBP1
  Gene Name: PTPRF interacting protein, binding protein 1 (liprin beta 1)
  Uniprot ID: Q86W92
  ENSP ID: ENSP00000445425
MLQQELLSRTSLETQKLDLMAEISNLKLKLTAVEKDRLDYEDKFRDTEGLIQEINDLRLKVSEMDSERLQYEKKLKSTKSLMAKLSSMKIKVGQMQYEKQRMEQKWESLKDELASLKEQLEEKESEVKRLQEKLVCKMKGEGVEIVDRDIEVQKMKKAVESLMAANEEKDRKIEDLRQCLNRYKKMQDTVVLAQGKDGEYEELLNSSSISSLLDAQGFSDLEKSPSPTPVMGSPSCDPFNTSVPEEFHTTILQVSIPSLLPATVSMETSEKSKLTPKPETSFEENDGNIILGATVDTQLCDKLLTSSLQKSSSLGNLKKETSDGEKETIQKTSEDRAPAESRPFGTLPPRPPGQDTSMDDNPFGTRKVRSSFGRGFFKIKSNKRTASAPNLAETEKETAEHLDLAGASSRPKDSQRNSPFQIPPPSPDSKKKSRGIMKLFGKLRRSQSTTFNPDDMSEPEFKRGGTRATAGPRLGWSRDLGQSNSDLDMPFAKWTKEQVCNWLMEQGLGSYLNSGKHWIASGQTLLQASQQDLEKELGIKHSLHRKKLQLALQALGSEEETNHGKLDFNWVTRWLDDIGLPQYKTQFDEGRVDGRMLHYMTVDDLLSLKVVSVLHHLSIKRAIQVLRINNFEPNCLRRRPSDENTIAPSEVQKWTNHRVMEWLRSVDLAEYAPNLRGSGVHGGLMVLEPRFNVETMAQLLNIPPNKTLLRRHLATHFNLLIGAEAQHQKRDAMELPDYVLLTATAKVKPKKLAFSNFGNLRKKKQEDGEEYVCPMELGQASGSASKKGFKPGLDMRLYEEDDLDRLEQMEDSEGTVRQIGAFSEGINNLTHMLKEDDMFKDFAARSPSASITDEDSNV

SEQ ID NO: 69943 - protein, 281 aa, Homo sapiens
  Payload ID: 13892
  Gene Symbol: PPFIBP1
  Gene Name: PTPRF interacting protein, binding protein 1 (liprin beta 1)
  ENSP ID: ENSP00000445822
MMSDASDMLAAALEQMDGIIAGSKALEYSNGIFDCQSPTSPFMGSLRALHLVEDLRGLLEMMETDEKEGLRCQIPDSTAETLVEWLQSQMTNGHLPGNGDVYQERLARLENDKESLVLQVSVLTDQVEAQGEKIRDLEFCLEEHREKVNATEEMLQQELLSRTSLETQKLDLMAEISNLKLKLTAVEKDRLDYEDKFRDTEGLIQEINDLRLKVSEMDSERLQYEKKLKSTKDELASLKEQLEEKESEVKRLQEKLVCKMKGEGVEIVDRDENFKKKLKEK

SEQ ID NO: 69944 - protein, 86 aa, Homo sapiens
  Payload ID: 13892
  Gene Symbol: PPFIBP1
  Gene Name: PTPRF interacting protein, binding protein 1 (liprin beta 1)
  ENSP ID: ENSP00000479763
DRAPAESRPFGTLPPRPPGQDTSMDDNPFGTRKVRSSFGRGFFKIKSNKRTASAPNLGTYDQNAFALILPQGGKEQCLPFPYSFIH

SEQ ID NO: 69945 - protein, 876 aa, Homo sapiens
  Payload ID: 13893
  Gene Symbol: PPFIBP2
  Gene Name: PTPRF interacting protein, binding protein 2 (liprin beta 2)
  Uniprot ID: Q8ND30
  ENSP ID: ENSP00000299492
MASDASHALEAALEQMDGIIAGTKTGADLSDGTCEPGLASPASYMNPFPVLHLIEDLRLALEMLELPQERAALLSQIPGPTAAYIKEWFEESLSQVNHHSAASNETYQERLARLEGDKESLILQVSVLTDQVEAQGEKIRDLEVCLEGHQVKLNAAEEMLQQELLSRTSLETQKLDLMTEVSELKLKLVGMEKEQREQEEKQRKAEELLQELRHLKIKVEELENERNQYEWKLKATKAEVAQLQEQVALKDAEIERLHSQLSRTAALHSESHTERDQEIQRLKMGMETLLLANEDKDRRIEELTGLLNQYRKVKEIVMVTQGPSERTLSINEEEPEGGFSKWNATNKDPEELFKQEMPPRCSSPTVGPPPLPQKSLETRAQKKLSCSLEDLRSESVDKCMDGNQPFPVLEPKDSPFLAEHKYPTLPGKLSGATPNGEAAKSPPTICQPDATGSSLLRLRDTESGWDDTAVVNDLSSTSSGTESGPQSPLTPDGKRNPKGIKKFWGKIRRTQSGNFYTDTLGMAEFRRGGLRATAGPRLSRTRDSKGQKSDANAPFAQWSTERVCAWLEDFGLAQYVIFARQWVSSGHTLLTATPQDMEKELGIKHPLHRKKLVLAVKAINTKQEEKSALLDHIWVTRWLDDIGLPQYKDQFHESRVDRRMLQYLTVNDLLFLKVTSQLHHLSIKCAIHVLHVNKFNPHCLHRRPADESNLSPSEVVQWSNHRVMEWLRSVDLAEYAPNLRGSGVHGGLIILEPRFTGDTLAMLLNIPPQKTLLRRHLTTKFNALIGPEAEQEKREKMASPAYTPLTTTAKVRPRKLGFSHFGNIRKKKFDESTDYICPMEPSDGVSDSHRVYSGYRGLSPLDAPELDGLDQVGQIS

SEQ ID NO: 69946 - protein, 89 aa, Homo sapiens
  Payload ID: 13893
  Gene Symbol: PPFIBP2
  Gene Name: PTPRF interacting protein, binding protein 2 (liprin beta 2)
  ENSP ID: ENSP00000431724
MASDASHALEAALEQMDGIIAGTKTGADLSDGTCEPGLASPASYMNPFPVLHLIEDLRLALEMLELPQERAALLSQIPGPTAAYIKEWF

SEQ ID NO: 69947 - protein, 70 aa, Homo sapiens
  Payload ID: 13893
  Gene Symbol: PPFIBP2
  Gene Name: PTPRF interacting protein, binding protein 2 (liprin beta 2)
  ENSP ID: ENSP00000433026
MASDASHALEAALEQMDGIIAGTKTGADLSDGTCEPGLASPASYMNPFPVLHLIEDLRLALEMLELPQER

SEQ ID NO: 69948 - protein, 225 aa, Homo sapiens
  Payload ID: 13893
  Gene Symbol: PPFIBP2
  Gene Name: PTPRF interacting protein, binding protein 2 (liprin beta 2)
  ENSP ID: ENSP00000433713
  MOD_RES (1)..(1): Any amino acid
XGPSERTLSINEEEPEGGFSKWNATNKDPEELFKQEMPPRCSSPTVGPPPLPQKSLETRAQKKLSCSLEDLRSESVDKCMDGNQPFPVLEPKDSPFLAEHKYPTLPGKLSGATPNGEAAKSPPTICQPDATGSSLLRLNRGRSVSAPVLGDTESGWDDTAVVNDLSSTSSGTESGPQSPLTPDGKRNPKGIKKFWGKIRRTQSGNFYTDTLGMAEFRRGGLRATA

SEQ ID NO: 69949 - protein, 86 aa, Homo sapiens
  Payload ID: 13893
  Gene Symbol: PPFIBP2
  Gene Name: PTPRF interacting protein, binding protein 2 (liprin beta 2)
  ENSP ID: ENSP00000433839
MLQQELLSRTSLETQKLDLMTEVSELKLKLVGMEKEQREQEEKQRKAEELLQELRHLKIKVEELENERNQYEWKLKATKAEVAQLQ

SEQ ID NO: 69950 - protein, 136 aa, Homo sapiens
  Payload ID: 13893
  Gene Symbol: PPFIBP2
  Gene Name: PTPRF interacting protein, binding protein 2 (liprin beta 2)
  ENSP ID: ENSP00000433917
  MOD_RES (1)..(1): Any amino acid
XPFPVLHLIEDLRLALEMLELPQERAALLSQIPGPTAAYIKEWFEESLSQVNHHSAASNETYQERLARLEGDKESLILQVSVLTDQVEAQGEKIRDLEVCLEGHQVKLNAAEEMLQQICNLVLRFCMLNIIFFPFK

SEQ ID NO: 69951 - protein, 89 aa, Homo sapiens; identical to SEQ ID NO: 69946
  Payload ID: 13893
  Gene Symbol: PPFIBP2
  Gene Name: PTPRF interacting protein, binding protein 2 (liprin beta 2)
  ENSP ID: ENSP00000434641

SEQ ID NO: 69952 - protein, 170 aa, Homo sapiens
  Payload ID: 13893
  Gene Symbol: PPFIBP2
  Gene Name: PTPRF interacting protein, binding protein 2 (liprin beta 2)
  ENSP ID: ENSP00000434981
MASDASHALEAALEQMDGIIAGTKTGADLSDGTCEPGLASPASYMNPFPVLHLIEDLRLALEMLELPQERAALLSQIPGPTAAYIKEWFEESLSQVNHHSAASNETYQERLARLEGDKESLILQVSVLTDQVEAQGEKIRDLEVCLEGHQVKLNAAEEMLQQELLSRTSL

SEQ ID NO: 69953 - protein, 764 aa, Homo sapiens
  Payload ID: 13893
  Gene Symbol: PPFIBP2
  Gene Name: PTPRF interacting protein, binding protein 2 (liprin beta 2)
  Uniprot ID: Q8ND30
  ENSP ID: ENSP00000435469
MSSEQWPRLPGKVSVLTDQVEAQGEKIRDLEVCLEGHQVKLNAAEEMLQQELLSRTSLETQKLDLMTEVSELKLKLVGMEKEQREQEEKQRKAEELLQELRHLKIKVEELENERNQYEWKLKATKAEVAQLQEQVALKDAEIERLHSQLSRTAALHSESHTERDQEIQRLKMGMETLLLANEDKDRRIEELTGLLNQYRKVKEIVMVTQGPSERTLSINEEEPEGGFSKWNATNKDPEELFKQEMPPRCSSPTVGPPPLPQKSLETRAQKKLSCSLEDLRSESVDKCMDGNQPFPVLEPKDSPFLAEHKYPTLPGKLSGATPNGEAAKSPPTICQPDATGSSLLRLRDTESGWDDTAVVNDLSSTSSGTESGPQSPLTPDGKRNPKGIKKFWGKIRRTQSGNFYTDTLGMAEFRRGGLRATAGPRLSRTRDSKGQKSDANAPFAQWSTERVCAWLEDFGLAQYVIFARQWVSSGHTLLTATPQDMEKELGIKHPLHRKKLVLAVKAINTKQEEKSALLDHIWVTRWLDDIGLPQYKDQFHESRVDRRMLQYLTVNDLLFLKVTSQLHHLSIKCAIHVLHVNKFNPHCLHRRPADESNLSPSEVVQWSNHRVMEWLRSVDLAEYAPNLRGSGVHGGLIILEPRFTGDTLAMLLNIPPQKTLLRRHLTTKFNALIGPEAEQEKREKMASPAYTPLTTTAKVRPRKLGFSHFGNIRKKKFDESTDYICPMEPSDGVSDSHRVYSGYRGLSPLDAPELDGLDQVGQIS

SEQ ID NO: 69954 - protein, 155 aa, Homo sapiens
  Payload ID: 13893
  Gene Symbol: PPFIBP2
  Gene Name: PTPRF interacting protein, binding protein 2 (liprin beta 2)
  ENSP ID: ENSP00000435794
MLQQELLSRTSLETQKLDLMTEVSELKLKLVGMEKEQREQEEKQRKAEELLQELRHLKIKVEELENERNQYEWKLKATKAEVAQLQEQVALKDAEIERLHSQLSRTAALHSESHTERDQEIQRLKMGMETLLLANEDKDRRIEELTGLLNQYRKV

SEQ ID NO: 69955 - protein, 149 aa, Homo sapiens
  Payload ID: 13893
  Gene Symbol: PPFIBP2
  Gene Name: PTPRF interacting protein, binding protein 2 (liprin beta 2)
  ENSP ID: ENSP00000436489
  MOD_RES (1)..(1): Any amino acid
XKTLLRRHLTTKFNALIGPEAEQEKREKMASPAYTPLTTTAKVRPRKLGFSHFGNIRKKKFDESTDYICPMEPSDGVSDSHRVYSGYRGLSPLDAPELDGLDQHQWKHMNFDAGPETMDTPTRLSSQAPPTLQLREKLKCLRPVDHSLG

SEQ ID NO: 69956 - protein, 718 aa, Homo sapiens
  Payload ID: 13893
  Gene Symbol: PPFIBP2
  Gene Name: PTPRF interacting protein, binding protein 2 (liprin beta 2)
  ENSP ID: ENSP00000436498
MLQQELLSRTSLETQKLDLMTEVSELKLKLVGMEKEQREQEEKQRKAEELLQELRHLKIKVEELENERNQYEWKLKATKAEVAQLQEQVALKDAEIERLHSQLSRTAALHSESHTERDQEIQRLKMGMETLLLANEDKDRRIEELTGLLNQYRKVKEIVMVTQGPSERTLSINEEEPEGGFSKWNATNKDPEELFKQEMPPRCSSPTVGPPPLPQKSLETRAQKKLSCSLEDLRSESVDKCMDGNQPFPVLEPKDSPFLAEHKYPTLPGKLSGATPNGEAAKSPPTICQPDATGSSLLRLRDTESGWDDTAVVNDLSSTSSGTESGPQSPLTPDGKRNPKGIKKFWGKIRRTQSGNFYTDTLGMAEFRRGGLRATAGPRLSRTRDSKGQKSDANAPFAQWSTERVCAWLEDFGLAQYVIFARQWVSSGHTLLTATPQDMEKELGIKHPLHRKKLVLAVKAINTKQEEKSALLDHIWVTRWLDDIGLPQYKDQFHESRVDRRMLQYLTVNDLLFLKVTSQLHHLSIKCAIHVLHVNKFNPHCLHRRPADESNLSPSEVVQWSNHRVMEWLRSVDLAEYAPNLRGSGVHGGLIILEPRFTGDTLAMLLNIPPQKTLLRRHLTTKFNALIGPEAEQEKREKMASPAYTPLTTTAKVRPRKLGFSHFGNIRKKKFDESTDYICPMEPSDGVSDSHRVYSGYRGLSPLDAPELDGLDQVGQIS

SEQ ID NO: 69957 - protein, 181 aa, Homo sapiens
  Payload ID: 13893
  Gene Symbol: PPFIBP2
  Gene Name: PTPRF interacting protein, binding protein 2 (liprin beta 2)
  ENSP ID: ENSP00000436739
MPPRCSSPTVGPPPLPQKSLETRAQKKLSCSLEDLRSESVDKCMDGNQPFPVLEPKDSPFLAEHKYPTLPGKLSGATPNGEAAKSPPTICQPDATGSSLLRLNRGRSVSAPVLGTVPIPGDTESGWDDTAVVNDLSSTSSGTESGPQSPLTPDGKRNPKGIKKFWGKIRRTQSGNFYTDTL

SEQ ID NO: 69958 - protein, 733 aa, Homo sapiens
  Payload ID: 13893
  Gene Symbol: PPFIBP2
  Gene Name: PTPRF interacting protein, binding protein 2 (liprin beta 2)
  Uniprot ID: Q8ND30
  ENSP ID: ENSP00000437321
MGKLITRMWKLLRRRSAPKELLSRTSLETQKLDLMTEVSELKLKLVGMEKEQREQEEKQRKAEELLQELRHLKIKVEELENERNQYEWKLKATKAEVAQLQEQVALKDAEIERLHSQLSRTAALHSESHTERDQEIQRLKMGMETLLLANEDKDRRIEELTGLLNQYRKVKEIVMVTQGPSERTLSINEEEPEGGFSKWNATNKDPEELFKQEMPPRCSSPTVGPPPLPQKSLETRAQKKLSCSLEDLRSESVDKCMDGNQPFPVLEPKDSPFLAEHKYPTLPGKLSGATPNGEAAKSPPTICQPDATGSSLLRLRDTESGWDDTAVVNDLSSTSSGTESGPQSPLTPDGKRNPKGIKKFWGKIRRTQSGNFYTDTLGMAEFRRGGLRATAGPRLSRTRDSKGQKSDANAPFAQWSTERVCAWLEDFGLAQYVIFARQWVSSGHTLLTATPQDMEKELGIKHPLHRKKLVLAVKAINTKQEEKSALLDHIWVTRWLDDIGLPQYKDQFHESRVDRRMLQYLTVNDLLFLKVTSQLHHLSIKCAIHVLHVNKFNPHCLHRRPADESNLSPSEVVQWSNHRVMEWLRSVDLAEYAPNLRGSGVHGGLIILEPRFTGDTLAMLLNIPPQKTLLRRHLTTKFNALIGPEAEQEKREKMASPAYTPLTTTAKVRPRKLGFSHFGNIRKKKFDESTDYICPMEPSDGVSDSHRVYSGYRGLSPLDAPELDGLDQVGQIS

SEQ ID NO: 69959 - protein, 1186 aa, Homo sapiens
  Payload ID: 13894
  Gene Symbol: PUM1
  Gene Name: pumilio RNA-binding family member 1
  Uniprot ID: Q14671
  ENSP ID: ENSP00000257075
MSVACVLKRKAVLWQDSFSPHLKHHPQEPANPNMPVVLTSGTGSQAQPQPAANQALAAGTHSSPVPGSIGVAGRSQDDAMVDYFFQRQHGEQLGGGGSGGGGYNNSKHRWPTGDNIHAEHQVRSMDELNHDFQALALEGRAMGEQLLPGKKFWETDESSKDGPKGIFLGDQWRDSAWGTSDHSVSQPIMVQRRPGQSFHVNSEVNSVLSPRSESGGLGVSMVEYVLSSSPGDSCLRKGGFGPRDADSDENDKGEKKNKGTFDGDKLGDLKEEGDVMDKTNGLPVQNGIDADVKDFSRTPGNCQNSANEVDLLGPNQNGSEGLAQLTSTNGAKPVEDFSNMESQSVPLDPMEHVGMEPLQFDYSGTQVPVDSAAATVGLFDYNSQQQLFQRPNALAVQQLTAAQQQQYALAAAHQPHIGLAPAAFVPNPYIISAAPPGTDPYTAGLAAAATLGPAVVPHQYYGVTPWGVYPASLFQQQAAAAAAATNSANQQTTPQAQQGQQQVLRGGASQRPLTPNQNQQGQQTDPLVAAAAVNSALAFGQGLAAGMPGYPVLAPAAYYDQTGALVVNAGARNGLGAPVRLVAPAPVIISSSAAQAAVAAAAASANGAAGGLAGTTNGPFRPLGTQQPQPQPQQQPNNNLASSSFYGNNSLNSNSQSSSLFSQGSAQPANTSLGFGSSSSLGATLGSALGGFGTAVANSNTGSGSRRDSLTGSSDLYKRTSSSLTPIGHSFYNGLSFSSSPGPVGMPLPSQGPGHSQTPPPSLSSHGSSSSLNLGGLTNGSGRYISAAPGAEAKYRSASSASSLFSPSSTLFSSSRLRYGMSDVMPSGRSRLLEDFRNNRYPNLQLREIAGHIMEFSQDQHGSRFIQLKLERATPAERQLVFNEILQAAYQLMVDVFGNYVIQKFFEFGSLEQKLALAERIRGHVLSLALQMYGCRVIQKALEFIPSDQQNEMVRELDGHVLKCVKDQNGNHVVQKCIECVQPQSLQFIIDAFKGQVFALSTHPYGCRVIQRILEHCLPDQTLPILEELHQHTEQLVQDQYGNYVIQHVLEHGRPEDKSKIVAEIRGNVLVLSQHKFASNVVEKCVTHASRTERAVLIDEVCTMNDGPHSALYTMMKDQYANYVVQKMIDVAEPGQRKIVMHKIRPHIATLRKYTYGKHILAKLEKYYMKNGVDLGPICGPPNGII

SEQ ID NO: 69960 - protein, 1224 aa, Homo sapiens
  Payload ID: 13894
  Gene Symbol: PUM1
  Gene Name: pumilio RNA-binding family member 1
  ENSP ID: ENSP00000362846
MPLPPPGPGPEPIPGCTAPTQSPVGRHVVGVKGVGGMSVACVLKRKAVLWQDSFSPHLKHHPQEPANPNMPVVLTSGTGSQAQPQPAANQALAAGTHSSPVPGSIGVAGRSQDDAMVDYFFQRQHGEQLGGGGSGGGGYNNSKHRWPTGDNIHAEHQVRSMDELNHDFQALALEGRAMGEQLLPGKKFWETDESSKDGPKGIFLGDQWRDSAWGTSDHSVSQPIMVQRRPGQSFHVNSEVNSVLSPRSESGGLGVSMVEYVLSSSPGDSCLRKGGFGPRDADSDENDKGEKKNKGTFDGDKLGDLKEEGDVMDKTNGLPVQNGIDADVKDFSRTPGNCQNSANEVDLLGPNQNGSEGLAQLTSTNGAKPVEDFSNMESQSVPLDPMEHVGMEPLQFDYSGTQVPVDSAAATVGLFDYNSQQQLFQRPNALAVQQLTAAQQQQYALAAAHQPHIGLAPAAFVPNPYIISAAPPGTDPYTAGLAAAATLGPAVVPHQYYGVTPWGVYPASLFQQQAAAAAAATNSANQQTTPQAQQGQQQVLRGGASQRPLTPNQNQQGQQTDPLVAAAAVNSALAFGQGLAAGMPGYPVLAPAAYYDQTGALVVNAGARNGLGAPVRLVAPAPVIISSSAAQAAVAAAAASANGAAGGLAGTTNGPFRPLGTQQPQPQPQQQPNNNLASSSFYGNNSLNSNSQSSSLFSQGSAQPANTSLGFGSSSSLGATLGSALGGFGTAVANSNTGSGSRRDSLTGSSDLYKRTSSSLTPIGHSFYNGLSFSSSPGPVGMPLPSQGPGHSQTPPPSLSSHGSSSSLNLGGLTNGSGRYISAAPGAEAKYRSASSASSLFSPSSTLFSSSRLRYGMSDVMPSGRSRLLEDFRNNRYPNLQLREIAGHIMEFSQDQHGSRFIQLKLERATPAERQLVFNEILQAAYQLMVDVFGNYVIQKFFEFGSLEQKLALAERIRGHVLSLALQMYGCRVIQKALEFIPSDQQVINEMVRELDGHVLKCVKDQNGNHVVQKCIECVQPQSLQFIIDAFKGQVFALSTHPYGCRVIQRILEHCLPDQTLPILEELHQHTEQLVQDQYGNYVIQHVLEHGRPEDKSKIVAEIRGNVLVLSQHKFASNVVEKCVTHASRTERAVLIDEVCTMNDGPHSALYTMMKDQYANYVVQKMIDVAEPGQRKIVMHKIRPHIATLRKYTYGKHILAKLEKYYMKNGVDLGPICGPPNGII

SEQ ID NO: 69961 - protein, 1127 aa, Homo sapiens
  Payload ID: 13894
  Gene Symbol: PUM1
  Gene Name: pumilio RNA-binding family member 1
  Uniprot ID: Q14671
  ENSP ID: ENSP00000362847
MPLPPPGPGPEPIPGCTAPTQSPVGRHVVGVKGVGGMSVACVLKRKAVLWQDSFSPHLKHHPQEPANPNMPVVLTSGTGSQAQPQPAANQALAAGTHSSPVPGSIGVAGRSQDDAMVDYFFQRQHGEQLGGGGSGGGGYNNSKHRWPTGDNIHAEHQVRSMDELNHDFQALALEGRAMGEGPRDADSDENDKGEKKNKGTFDGDKLGDLKEEGDVMDKTNGLPVQNGIDADVKDFSRTPGNCQNSANEVDLLGPNQNGSEGLAQLTSTNGAKPVEDFSNMESQSVPLDPMEHVGMEPLQFDYSGTQVPVDSAAATVGLFDYNSQQQLFQRPNALAVQQLTAAQQQQYALAAAHQPHIAGLAPAAFVPNPYIISAAPPGTDPYTAGLAAAATLGPAVVPHQYYGVTPWGVYPASLFQQQAAAAAAATNSANQQTTPQAQQGQQQVLRGGASQRPLTPNQNQQGQQTDPLVAAAAVNSALAFGQGLAAGMPGYPVLAPAAYYDQTGALVVNAGARNGLGAPVRLVAPAPVIISSSAAQAAVAAAAASANGAAGGLAGTTNGPFRPLGTQQPQPQPQQQPNNNLASSSFYGNNSLNSNSQSSSLFSQGSAQPANTSLGFGSSSSLGATLGSALGGFGTAVANSNTGSGSRRDSLTGSSDLYKRTSSSLTPIGHSFYNGLSFSSSPGPVGMPLPSQGPGHSQTPPPSLSSHGSSSSLNLGGLTNGSGRYISAAPGAEAKYRSASSASSLFSPSSTLFSSSRLRYGMSDVMPSGRSRLLEDFRNNRYPNLQLREIAGHIMEFSQDQHGSRFIQLKLERATPAERQLVFNEILQAAYQLMVDVFGNYVIQKFFEFGSLEQKLALAERIRGHVLSLALQMYGCRVIQKALEFIPSDQQNEMVRELDGHVLKCVKDQNGNHVVQKCIECVQPQSLQFIIDAFKGQVFALSTHPYGCRVIQRILEHCLPDQTLPILEELHQHTEQLVQDQYGNYVIQHVLEHGRPEDKSKIVAEIRGNVLVLSQHKFASNVVEKCVTHASRTERAVLIDEVCTMNDGPHSALYTMMKDQYANYVVQKMIDVAEPGQRKIVMHKIRPHIATLRKYTYGKHILAKLEKYYMKNGVDLGPICGPPNGII

SEQ ID NO: 69962 - protein, 1189 aa, Homo sapiens
  Payload ID: 13894
  Gene Symbol: PUM1
  Gene Name: pumilio RNA-binding family member 1
  ENSP ID: ENSP00000362852
MSVACVLKRKAVLWQDSFSPHLKHHPQEPANPNMPVVLTSGTGSQAQPQPAANQALAAGTHSSPVPGSIGVAGRSQDDAMVDYFFQRQHGEQLGGGGSGGGGYNNSKHRWPTGDNIHAEHQVRSMDELNHDFQALALEGRAMGEQLLPGKKFWETDESSKDGPKGIFLGDQWRDSAWGTSDHSVSQPIMVQRRPGQSFHVNSEVNSVLSPRSESGGLGVSMVEYVLSSSPGDSCLRKGGFGPRDADSDENDKGEKKNKGTFDGDKLGDLKEEGDVMDKTNGLPVQNGIDADVKDFSRTPGNCQNSANEVDLLGPNQNGSEGLAQLTSTNGAKPVEDFSNMESQSVPLDPMEHVGMEPLQFDYSGTQVPVDSAAATVGLFDYNSQQQLFQRPNALAVQQLTAAQQQQYALAAAHQPHIAGLAPAAFVPNPYIISAAPPGTDPYTAGLAAAATLGPAVVPHQYYGVTPWGVYPASLFQQQAAAAAAATNSANQQTTPQAQQGQQQVLRGGASQRPLTPNQNQQGQQTDPLVAAAAVNSALAFGQGLAAGMPGYPVLAPAAYYDQTGALVVNAGARNGLGAPVRLVAPAPVIISSSAAQAAVAAAAASANGAAGGLAGTTNGPFRPLGTQQPQPQPQQQPNNNLASSSFYGNNSLNSNSQSSSLFSQGSAQPANTSLGFGSSSSLGATLGSALGGFGTAVANSNTGSGSRRDSLTGSSDLYKRTSSSLTPIGHSFYNGLSFSSSPGPVGMPLPSQGPGHSQTPPPSLSSHGSSSSLNLGGLTNGSGRYISAAPGAEAKYRSASSASSLFSPSSTLFSSSRLRYGMSDVMPSGRSRLLEDFRNNRYPNLQLREIAGHIMEFSQDQHGSRFIQLKLERATPAERQLVFNEILQAAYQLMVDVFGNYVIQKFFEFGSLEQKLALAERIRGHVLSLALQMYGCRVIQKALEFIPSDQQVINEMVRELDGHVLKCVKDQNGNHVVQKCIECVQPQSLQFIIDAFKGQVFALSTHPYGCRVIQRILEHCLPDQTLPILEELHQHTEQLVQDQYGNYVIQHVLEHGRPEDKSKIVAEIRGNVLVLSQHKFASNVVEKCVTHASRTERAVLIDEVCTMNDGPHSALYTMMKDQYANYVVQKMIDVAEPGQRKIVMHKIRPHIATLRKYTYGKHILAKLEKYYMKNGVDLGPICGPPNGII

SEQ ID NO: 69963 - protein, 1188 aa, Homo sapiens
  Payload ID: 13894
  Gene Symbol: PUM1
  Gene Name: pumilio RNA-binding family member 1
  Uniprot ID: Q14671
  ENSP ID: ENSP00000391723
MSVACVLKRKAVLWQDSFSPHLKHHPQEPANPNMPVVLTSGTGSQAQPQPAANQALAAGTHSSPVPGSIGVAGRSQDDAMVDYFFQRQHGEQLGGGGSGGGGYNNSKHRWPTGDNIHAEHQVRSMDELNHDFQALALEGRAMGEQLLPGKKFWETDESSKDGPKGIFLGDQWRDSAWGTSDHSVSQPIMVQRRPGQSFHVNSEVNSVLSPRSESGGLGVSMVEYVLSSSPGDSCLRKGGFGPRDADSDENDKGEKKNKGTFDGDKLGDLKEEGDVMDKTNGLPVQNGIDADVKDFSRTPGNCQNSANEVDLLGPNQNGSEGLAQLTSTNGAKPVEDFSNMESQSVPLDPMEHVGMEPLQFDYSGTQVPVDSAAATVGLFDYNSQQQLFQRPNALAVQQLTAAQQQQYALAAAHQPHIGLAPAAFVPNPYIISAAPPGTDPYTAGLAAAATLGPAVVPHQYYGVTPWGVYPASLFQQQAAAAAAATNSANQQTTPQAQQGQQQVLRGGASQRPLTPNQNQQGQQTDPLVAAAAVNSALAFGQGLAAGMPGYPVLAPAAYYDQTGALVVNAGARNGLGAPVRLVAPAPVIISSSAAQAAVAAAAASANGAAGGLAGTTNGPFRPLGTQQPQPQPQQQPNNNLASSSFYGNNSLNSNSQSSSLFSQGSAQPANTSLGFGSSSSLGATLGSALGGFGTAVANSNTGSGSRRDSLTGSSDLYKRTSSSLTPIGHSFYNGLSFSSSPGPVGMPLPSQGPGHSQTPPPSLSSHGSSSSLNLGGLTNGSGRYISAAPGAEAKYRSASSASSLFSPSSTLFSSSRLRYGMSDVMPSGRSRLLEDFRNNRYPNLQLREIAGHIMEFSQDQHGSRFIQLKLERATPAERQLVFNEILQAAYQLMVDVFGNYVIQKFFEFGSLEQKLALAERIRGHVLSLALQMYGCRVIQKALEFIPSDQQVINEMVRELDGHVLKCVKDQNGNHVVQKCIECVQPQSLQFIIDAFKGQVFALSTHPYGCRVIQRILEHCLPDQTLPILEELHQHTEQLVQDQYGNYVIQHVLEHGRPEDKSKIVAEIRGNVLVLSQHKFASNVVEKCVTHASRTERAVLIDEVCTMNDGPHSALYTMMKDQYANYVVQKMIDVAEPGQRKIVMHKIRPHIATLRKYTYGKHILAKLEKYYMKNGVDLGPICGPPNGII

SEQ ID NO: 69964 - protein, 944 aa, Homo sapiens
  Payload ID: 13894
  Gene Symbol: PUM1
  Gene Name: pumilio RNA-binding family member 1
  ENSP ID: ENSP00000400141
MSVACVLKRKAVLWQDSFSPHLKHHPQEPANPNMPVVLTSGTGSQAQPQPAANQALAAGTHSSPVPGSIGVAGRSQDDAMVDYFFQRQHGEQLGGGGSGGGGYNNSKHRWPTGDNIHAEHQVRSMDELNHDFQALALEGRAMGELFQRPNALAVQQLTAAQQQQYALAAAHQPHIGLAPAAFVPNPYIISAAPPGTDPYTAGLAAAATLGPAVVPHQYYGVTPWGVYPASLFQQQAAAAAAATNSANQQTTPQAQQGQQQVLRGGASQRPLTPNQNQQGQQTDPLVAAAAVNSALAFGQGLAAGMPGYPVLAPAAYYDQTGALVVNAGARNGLGAPVRLVAPAPVIISSSAAQAAVAAAAASANGAAGGLAGTTNGPFRPLGTQQPQPQPQQQPNNNLASSSFYGNNSLNSNSQSSSLFSQGSAQPANTSLGFGSSSSLGATLGSALGGFGTAVANSNTGSGSRRDSLTGSSDLYKRTSSSLTPIGHSFYNGLSFSSSPGPVGMPLPSQGPGHSQTPPPSLSSHGSSSSLNLGGLTNGSGRYISAAPGAEAKYRSASSASSLFSPSSTLFSSSRLRYGMSDVMPSGRSRLLEDFRNNRYPNLQLREIAGHIMEFSQDQHGSRFIQLKLERATPAERQLVFNEILQAAYQLMVDVFGNYVIQKFFEFGSLEQKLALAERIRGHVLSLALQMYGCRVIQKALEFIPSDQQNEMVRELDGHVLKCVKDQNGNHVVQKCIECVQPQSLQFIIDAFKGQVFALSTHPYGCRVIQRILEHCLPDQTLPILEELHQHTEQLVQDQYGNYVIQHVLEHGRPEDKSKIVAEIRGNVLVLSQHKFASNVVEKCVTHASRTERAVLIDEVCTMNDGPHSALYTMMKDQYANYVVQKMIDVAEPGQRKIVMHKIRPHIATLRKYTYGKHILAKLEKYYMKNGVDLGPICGPPNGII

SEQ ID NO: 69965 - protein, 1162 aa, Homo sapiens
  Payload ID: 13894
  Gene Symbol: PUM1
  Gene Name: pumilio RNA-binding family member 1
  Uniprot ID: Q14671
  ENSP ID: ENSP00000401777
MSVACVLKRKAVLWQDSFSPHLKHHPQEPANPNMPVVLTSGTGSQAQPQPAANQALAAGTHSSPVPGSIGVAGRSQDDAMVDYFFQRQHGEQLGGGGSGGGGYNNSKHRWPTGDNIHAEHQVRSMDELNHDFQALALEGRAMGEQLLPGKKFWETDESSKDGPKGIFLGDQWRDSAWGTSDHSVSQPIMVQRRPGQSFHVNSEVNSVLSPRSESGGLGVSMVEYVLSSSPGDSCLRKGGFGPRDADSDENDKGEKKNKGTFDGDKLGDLKEEGDVMDKTNGLPVQNGIDADVKDFSRTPGNCQNSANEVDLLGPNQNGSEGLAQLTSTNGAKPVEDFSNMESQSVPLDPMEHVGMEPLQFDYSGTQVPVDSAAATVGLFDYNSQQQLFQRPNALAVQQLTAAQQQQYALAAAHQPHIAGLAPAAFVPNPYIISAAPPGTDPYTAGLAAAATLGPAVVPHQYYGVTPWGVYPASLFQQQAAAAAAATNSANQQTTPQAQQGQQQVLRGGASQRPLTPNQNQQGQQTDPLVAAAAVNSALAFGQGLAAGMPGYPVLAPAAYYDQTGALVVNAGARNGLGAPVRLVAPAPVIISSSAAQAGTQQPQPQPQQQPNNNLASSSFYGNNSLNSNSQSSSLFSQGSAQPANTSLGFGSSSSLGATLGSALGGFGTAVANSNTGSGSRRDSLTGSSDLYKRTSSSLTPIGHSFYNGLSFSSSPGPVGMPLPSQGPGHSQTPPPSLSSHGSSSSLNLGGLTNGSGRYISAAPGAEAKYRSASSASSLFSPSSTLFSSSRLRYGMSDVMPSGRSRLLEDFRNNRYPNLQLREIAGHIMEFSQDQHGSRFIQLKLERATPAERQLVFNEILQAAYQLMVDVFGNYVIQKFFEFGSLEQKLALAERIRGHVLSLALQMYGCRVIQKALEFIPSDQQVINEMVRELDGHVLKCVKDQNGNHVVQKCIECVQPQSLQFIIDAFKGQVFALSTHPYGCRVIQRILEHCLPDQTLPILEELHQHTEQLVQDQYGNYVIQHVLEHGRPEDKSKIVAEIRGNVLVLSQHKFASNVVEKCVTHASRTERAVLIDEVCTMNDGPHSALYTMMKDQYANYVVQKMIDVAEPGQRKIVMHKIRPHIATLRKYTYGKHILAKLEKYYMKNGVDLGPICGPPNGII

SEQ ID NO: 69966 - protein, 227 aa, Homo sapiens
  Payload ID: 13894
  Gene Symbol: PUM1
  Gene Name: pumilio RNA-binding family member 1
  ENSP ID: ENSP00000431213
AGHIMEFSQDQHGSRFIQLKLERATPAERQLVFNEILQAAYQLMVDVFGNYVIQKFFEFGSLEQKLALAERIRGHVLSLALQMYGCRVIQKALEFIPSDQQVINEMVRELDGHVLKCVKDQNGNHVVQKCIECVQPQSLQFIIDAFKGQDQYGNYVIQHVLEHGRPEDKSKIVAEIRGNVLVLSQHKFASNVVEKCVTHASRTERAVLIDEVCTMNDGPHSALYTMM

SEQ ID NO: 69967 - protein, 96 aa, Homo sapiens
  Payload ID: 13894
  Gene Symbol: PUM1
  Gene Name: pumilio RNA-binding family member 1
  ENSP ID: ENSP00000431470
MSVACVLKRKAVLWQDSFSPHLKHHPQEPANPNMPVVLTSGTGSQAQPQPAANQALAAGTHSSPVPGSIGVAGRSQDDAMVDYFFQRQHGEQLGGG

SEQ ID NO: 69968 - protein, 90 aa, Homo sapiens
  Payload ID: 13894
  Gene Symbol: PUM1
  Gene Name: pumilio RNA-binding family member 1
  ENSP ID: ENSP00000431779
SLTGSSDLYKRTSSSLTPIGHSFYNGLSFSSSPGPVGMPLPSQGPGHSQTPPPSLSSHGSSSSLNLGAGFWKIFETTGTPIYNCGRLLDI

SEQ ID NO: 69969 - protein, 94 aa, Homo sapiens
  Payload ID: 13894
  Gene Symbol: PUM1
  Gene Name: pumilio RNA-binding family member 1
  ENSP ID: ENSP00000433099
MSVACVLKRKAVLWQDSFSPHLKHHPQEPANPNMPVVLTSGTGSQAQPQPAANQALAAGTHSSPVPGSIGVAGRSQDDAMVDYFFQRQHGAFHG

SEQ ID NO: 69970 - protein, 217 aa, Homo sapiens
  Payload ID: 13894
  Gene Symbol: PUM1
  Gene Name: pumilio RNA-binding family member 1
  ENSP ID: ENSP00000433373
  MOD_RES (1)..(1): Any amino acid
XEFSQDQHGSRFIQLKLERATPAERQLVFNEILQAAYQLMVDVFGNYVIQKFFEFGSLEQKLALAERIRGHVLSLALQMYGCRVIQKALEFIPSDQQVFALSTHPYGCRVIQRILEHCLPDQTLPILEELHQHTEQLVQDQYGNYVIQHVLEHGRPEDKSKIVAEIRGNVLVLSQHKFASNVVEKCVTHASRTERAVLIDEVCTMNDGPHSALYTMM

SEQ ID NO: 69971 - protein, 900 aa, Homo sapiens
  Payload ID: 13894
  Gene Symbol: PUM1
  Gene Name: pumilio RNA-binding family member 1
  ENSP ID: ENSP00000433850
  MOD_RES (1)..(1): Any amino acid
XFSRTPGNCQNSANEVDLLGPNQNGSEGLAQLTSTNGAKPVEDFSNMESQSVPLDPMEHVGMEPLQFDYSGTQVPVDSAAATVGLFDYNSQQQLFQRPNALAVQQLTAAQQQQYALAAAHQPHIGMFSAGLAPAAFVPNPYIISAAPPGTDPYTAGLAAAATLGPAVVPHQYYGVTPWGVYPASLFQQQAAAAAAATNSANQQTTPQAQQGQQQVLRGGASQRPLTPNQNQQGQQTDPLVAAAAVNSALAFGQGLAAGMPGYPVLAPAAYYDQTGALVVNAGARNGLGAPVRLVAPAPVIISSSAAQAAVAAAAASANGAAGGLAGTTNGPFRPLGTQQPQPQPQQQPNNNLASSSFYGNNSLNSNSQSSSLFSQGSAQPANTSLGFGSSSSLGATLGSALGGFGTAVANSNTGSGSRRDSLTGSSDLYKRTSSSLTPIGHSFYNGLSFSSSPGPVGMPLPSQGPGHSQTPPPSLSSHGSSSSLNLGGLTNGSGRYISAAPGAEAKYRSASSASSLFSPSSTLFSSSRLRYGMSDVMPSGRSRLLEDFRNNRYPNLQLREIAGHIMEFSQDQHGSRFIQLKLERATPAERQLVFNEILQAAYQLMVDVFGNYVIQKFFEFGSLEQKLALAERIRGHVLSLALQMYGCRVIQKALEFIPSDQQVINEMVRELDGHVLKCVKDQNGNHVVQKCIECVQPQSLQFIIDAFKGQVFALSTHPYGCRVIQRILEHCLPDQTLPILEELHQHTEQLVQDQYGNYVIQHVLEHGRPEDKSKIVAEIRGNVLVLSQHKFASNVVEKCVTHASRTERAVLIDEVCTMNDGPHSALYTMMKDQYANYVVQKMIDVAEPGQRKIVMHKIRPHIATLRKYTYGKHILAKLEKYYMKNGVDLGPICGPPNGII

SEQ ID NO: 69972 - protein, 76 aa, Homo sapiens
  Payload ID: 13894
  Gene Symbol: PUM1
  Gene Name: pumilio RNA-binding family member 1
  ENSP ID: ENSP00000434096
FIIDAFKGQVFALSTHPYGCRVIQRILEHCLPDQTLPILEELHQHTEQLVQVVELPVEELRTPVGLCRARVCVFCQ

SEQ ID NO: 69973 - protein, 265 aa, Homo sapiens
  Payload ID: 13894
  Gene Symbol: PUM1
  Gene Name: pumilio RNA-binding family member 1
  ENSP ID: ENSP00000435589
  MOD_RES (1)..(1): Any amino acid
XNGLPVQNGIDADVKDFSRTPGNCQNSANEVDLLGPNQNGSEGLAQLTSTNGAKPVEDFSNMESQSVPLDPMEHVGMEPLQFDYSGTQVPVDSAAATVGLFDYNSQQQLFQRPNALAVQQLTAAQQQQYALAAAHQPHIGPAVVPHQYYGVTPWGVYPASLFQQQAAAAAAATNSANQQTTPQAQQGQQQVLRGGASQRPLTPNQNQQGQQTDPLVAAAAVNSALAFGQGLAAGMPGYPVLAPAAYYDQTGALVVNAGARNGLGA

SEQ ID NO: 69974 - protein, 1125 aa, Homo sapiens
  Payload ID: 13894
  Gene Symbol: PUM1
  Gene Name: pumilio RNA-binding family member 1
  ENSP ID: ENSP00000435825
  MOD_RES (1)..(1): Any amino acid
XQSPVGRHVVGVKGVGGMSVACVLKRKAVLWQDSFSPHLKHHPQEPANPNMPVVLTSGTGSQAQPQPAANQALAAGTHSSPVPGSIGVAGRSQDDAMVDYFFQRQHGEQLGGGGSGGGGYNNSKHRWPTGDNIHAEHQVRSMDELNHDFQALALEGRAMGEQLLPGKKFWETDESSKDGPKGIFLGDQWRDSAWGTSDHSVSQPIMVQRRPGQSFHVNSEVNSVLSPRSESGGLGVSMVEYVLSSSPGDSCLRKGGFGPRDADSDENDKGEKKNKGTFDGDKLGDLKEEGDVMDKTNGLPVQNGIDADVKDFSRTPGNCQNSANEVDLLGPNQNGSEGLAQLTSTNGAKPVEDFSNMESQSVPLDPMEHVGMEPLQFDYSGTQVPVDSAAATVGLFDYNSQQQLFQRPNALAVQQLTAAQQQQYALAAAHQPHIAGLAPAAFVPNPYIISAAPPGTDPYTAGLAAAATLGPAVVPHQYYGVTPWGVYPASLFQQQAAAAAAATNSANQQTTPQAQQGQQQVLRGGASQRPLTPNQNQQGQQTDPLVAAAAVNSALAFGQGLAAGMPGYPVLAPAAYYDQTGALVVNAGARNGLGAPVRLVAPAPVIISSSAAQAAVAAAAASANGAAGGLAGTTNGPFRPLGTQQPQPQPQQQPNNNLASSSFYGNNSLNSNSQSSSLFSQGSAQPANTSLGFGSSSSLGATLGSALGGFGTAGGLTNGSGRYISAAPGAEAKYRSASSASSLFSPSSTLFSSSRLRYGMSDVMPSGRSRLLEDFRNNRYPNLQLREIAGHIMEFSQDQHGSRFIQLKLERATPAERQLVFNEILQAAYQLMVDVFGNYVIQKFFEFGSLEQKLALAERIRGHVLSLALQMYGCRVIQKALEFIPSDQQNEMVRELDGHVLKCVKDQNGNHVVQKCIECVQPQSLQFIIDAFKGQVFALSTHPYGCRVIQRILEHCLPDQTLPILEELHQHTEQLVQDQYGNYVIQHVLEHGRPEDKSKIVAEIRGNVLVLSQHKFASNVVEKCVTHASRTERAVLIDEVCTMNDGPHSALYTMMKDQYANYVVQKMIDVAEPGQRKIVMHKIRPHIATLRKYTYGKHILAKLEKYYMKNGVDLGPICGPPNGII

SEQ ID NO: 69975 - protein, 94 aa, Homo sapiens; identical to SEQ ID NO: 69969
  Payload ID: 13894
  Gene Symbol: PUM1
  Gene Name: pumilio RNA-binding family member 1
  ENSP ID: ENSP00000436921

SEQ ID NO: 69976 - protein, 124 aa, Homo sapiens
  Payload ID: 13894
  Gene Symbol: PUM1
  Gene Name: pumilio RNA-binding family member 1
  ENSP ID: ENSP00000437269
MSVACVLKRKAVLWQDSFSPHLKHHPQEPANPNMPVVLTSGTGSQAQPQPAANQALAAGTHSSPVPGSIGVAGRSQDDAMVDYFFQRQHGEQLGGGGSGGGGYNNSKHRWPTGDNIHAEHQEVL

SEQ ID NO: 69977 - protein, 929 aa, Homo sapiens
  Payload ID: 13895
  Gene Symbol: PUM2
  Gene Name: pumilio RNA-binding family member 2
  ENSP ID: ENSP00000326746
MSQPIMVQRRSGQGFHGNSEVNAILSPRSESGGLGVSMVEYVLSSSPADKLDSRFRKGNFGTRDAETDGPEKGDQKGKASPFEEDQNRDLKQGDDDDSKINGRGLPNGMDADCKDFNRTPGSRQASPTEVVERLGPNTNPSEGLGPLPNPTANKPLVEEFSNPETQNLDAMEQVGLESLQFDYPGNQVPMDSSGATVGLFDYNSQQQLFQRTNALTVQQLTAAQQQQYALAAAQQPHIAGVFSAGLAPAAFVPNPYIISAAPPGTDPYTAAGLAAAATLAGPAVVPPQYYGVPWGVYPANLFQQQAAAAANNTASQQAASQAQPGQQQVLRAGAGQRPLTPNQGQQGQQAESLAAAAAANPTLAFGQGLATGMPGYQVLAPTAYYDQTGALVVGPGARTGLGAPVRLMAPTPVLISSAAAQAAAAAAAGGTASSLTGSTNGLFRPIGTQPPQQQQQQPSTNLQSNSFYGSSSLTNSSQSSSLFSHGPGQPGSTSLGFGSGNSLGAAIGSALSGFGSSGGLTNGSGRYISAAPGAEAKYRSASSTSSLFSSSSQLFPPSRLRYNRSDIMPSGRSRLLEDFRNNRFPNLQLRDLIGHIVEFSQDQHGSRFIQQKLERATPAERQMVFNEILQAAYQLMTDVFGNYVIQKFFEFGSLDQKLALATRIRGHVLPLALQMYGCRVIQKALESISSDQQSEMVKELDGHVLKCVKDQNGNHVVQKCIECVQPQSLQFIIDAFKGQVFVLSTHPYGCRVIQRILEHCTAEQTLPILEELHQHTEQLVQDQYGNYVIQHVLEHGRPEDKSKIVSEIRGKVLALSQHKFASNVVEKCVTHASRAERALLIDEVCCQNDGPHSALYTMMKDQYANYVVQKMIDMAEPAQRKIIMHKIRPHITTLRKYTYGKHILAKLEKYYLKNSPDLGPIGGPPNGML

SEQ ID NO: 69978 - protein, 1064 aa, Homo sapiens
  Payload ID: 13895
  Gene Symbol: PUM2
  Gene Name: pumilio RNA-binding family member 2
  Uniprot ID: Q8TB72
  ENSP ID: ENSP00000338173
MNHDFQALALESRGMGELLPTKKFWEPDDSTKDGQKGIFLGDDEWRETAWGASHHSMSQPIMVQRRSGQGFHGNSEVNAILSPRSESGGLGVSMVEYVLSSSPADKLDSRFRKGNFGTRDAETDGPEKGDQKGKASPFEEDQNRDLKQGDDDDSKINGRGLPNGMDADCKDFNRTPGSRQASPTEVVERLGPNTNPSEGLGPLPNPTANKPLVEEFSNPETQNLDAMEQVGLESLQFDYPGNQVPMDSSGATVGLFDYNSQQQLFQRTNALTVQQLTAAQQQQYALAAAQQPHIAGVFSAGLAPAAFVPNPYIISAAPPGTDPYTAAGLAAAATLAGPAVVPPQYYGVPWGVYPANLFQQQAAAAANNTASQQAASQAQPGQQQVLRAGAGQRPLTPNQGQQGQQAESLAAAAAANPTLAFGQGLATGMPGYQVLAPTAYYDQTGALVVGPGARTGLGAPVRLMAPTPVLISSAAAQAAAAAAAGGTASSLTGSTNGLFRPIGTQPPQQQQQQPSTNLQSNSFYGSSSLTNSSQSSSLFSHGPGQPGSTSLGFGSGNSLGAAIGSALSGFGSSVGSSASSSATRRESLSTSSDLYKRSSSSLAPIGQPFYNSLGFSSSPSPIGMPLPSQTPGHSLTPPPSLSSHGSSSSLHLGGLTNGSGRYISAAPGAEAKYRSASSTSSLFSSSSQLFPPSRLRYNRSDIMPSGRSRLLEDFRNNRFPNLQLRDLIGHIVEFSQDQHGSRFIQQKLERATPAERQMVFNEILQAAYQLMTDVFGNYVIQKFFEFGSLDQKLALATRIRGHVLPLALQMYGCRVIQKALESISSDQQSEMVKELDGHVLKCVKDQNGNHVVQKCIECVQPQSLQFIIDAFKGQVFVLSTHPYGCRVIQRILEHCTAEQTLPILEELHQHTEQLVQDQYGNYVIQHVLEHGRPEDKSKIVSEIRGKVLALSQHKFASNVVEKCVTHASRAERALLIDEVCCQNDGPHSALYTMMKDQYANYVVQKMIDMAEPAQRKIIMHKIRPHITTLRKYTYGKHILAKLEKYYLKNSPDLGPIGGPPNGML

SEQ ID NO: 69979 - protein, 1008 aa, Homo sapiens
  Payload ID: 13895
  Gene Symbol: PUM2
  Gene Name: pumilio RNA-binding family member 2
  Uniprot ID: Q8TB72
  ENSP ID: ENSP00000354370
MSQPIMVQRRSGQGFHGNSEVNAILSPRSESGGLGVSMVEYVLSSSPADKLDSRFRKGNFGTRDAETDGPEKGDQKGKASPFEEDQNRDLKQGDDDDSKINGRGLPNGMDADCKDFNRTPGSRQASPTEVVERLGPNTNPSEGLGPLPNPTANKPLVEEFSNPETQNLDAMEQVGLESLQFDYPGNQVPMDSSGATVGLFDYNSQQQLFQRTNALTVQQLTAAQQQQYALAAAQQPHIAGVFSAGLAPAAFVPNPYIISAAPPGTDPYTAAGLAAAATLAGPAVVPPQYYGVPWGVYPANLFQQQAAAAANNTASQQAASQAQPGQQQVLRAGAGQRPLTPNQGQQGQQAESLAAAAAANPTLAFGQGLATGMPGYQVLAPTAYYDQTGALVVGPGARTGLGAPVRLMAPTPVLISSAAAQAAAAAAAGGTASSLTGSTNGLFRPIGTQPPQQQQQQPSTNLQSNSFYGSSSLTNSSQSSSLFSHGPGQPGSTSLGFGSGNSLGAAIGSALSGFGSSVGSSASSSATRRESLSTSSDLYKRSSSSLAPIGQPFYNSLGFSSSPSPIGMPLPSQTPGHSLTPPPSLSSHGSSSSLHLGGLTNGSGRYISAAPGAEAKYRSASSTSSLFSSSSQLFPPSRLRYNRSDIMPSGRSRLLEDFRNNRFPNLQLRDLIGHIVEFSQDQHGSRFIQQKLERATPAERQMVFNEILQAAYQLMTDVFGNYVIQKFFEFGSLDQKLALATRIRGHVLPLALQMYGCRVIQKALESISSDQQSEMVKELDGHVLKCVKDQNGNHVVQKCIECVQPQSLQFIIDAFKGQVFVLSTHPYGCRVIQRILEHCTAEQTLPILEELHQHTEQLVQDQYGNYVIQHVLEHGRPEDKSKIVSEIRGKVLALSQHKFASNVVEKCVTHASRAERALLIDEVCCQNDGPHSALYTMMKDQYANYVVQKMIDMAEPAQRKIIMHKIRPHITTLRKYTYGKHILAKLEKYYLKNSPDLGPIGGPPNGML

SEQ ID NO: 69980 - protein, 1064 aa, Homo sapiens; identical to SEQ ID NO: 69978
  Payload ID: 13895
  Gene Symbol: PUM2
  Gene Name: pumilio RNA-binding family member 2
  Uniprot ID: Q8TB72
  ENSP ID: ENSP00000385992

SEQ ID NO: 69981 - protein, 293 aa, Homo sapiens
  Payload ID: 13895
  Gene Symbol: PUM2
  Gene Name: pumilio RNA-binding family member 2
  ENSP ID: ENSP00000387399
MNHDFQALALESRGMGELLPTKKFWEPDDSTKDGQKGIFLGDDEWRETAWGASHHSMSQPIMVQRRSGQGFHGNSEVNAILSPRSESGGLGVSMVEYVLSSSPADKLDSRFRKGNFGTRDAETDGPEKGDQKGKASPFEEDQNRDLKQGDDDDSKINGRGLPNGMDADCKDFNRTPGSRQASPTEVVERLGPNTNPSEGLGPLPNPTANKPLVEEFSNPETQNLDAMEQVGLESLQFDYPGNQVPMDSSGATVGLFDYNSQQQLFQRTNALTVQQLTAAQQQQYALAAAQQPH

SEQ ID NO: 69982 - protein, 34 aa, Homo sapiens
  Payload ID: 13895
  Gene Symbol: PUM2
  Gene Name: pumilio RNA-binding family member 2
  ENSP ID: ENSP00000395098
MNHDFQALALESRGMGELLPTKKFWEPDDSTKDG

SEQ ID NO: 69983 - protein, 40 aa, Homo sapiens
  Payload ID: 13895
  Gene Symbol: PUM2
  Gene Name: pumilio RNA-binding family member 2
  ENSP ID: ENSP00000396727
MNHDFQALALESRGMGETIQCPSLLWYREDLDRVFMETVK

SEQ ID NO: 69984 - protein, 35 aa, Homo sapiens
  Payload ID: 13895
  Gene Symbol: PUM2
  Gene Name: pumilio RNA-binding family member 2
  ENSP ID: ENSP00000408384
MNHDFQALALESRGMGEMQKRVQVSPLGHKRAPCS

SEQ ID NO: 69985 - protein, 876 aa, Homo sapiens
  Payload ID: 13895
  Gene Symbol: PUM2
  Gene Name: pumilio RNA-binding family member 2
  ENSP ID: ENSP00000409905
RFRKGNFGTRDAETDGPEKGDQKGKASPFEEDQNRDLKQGDDDDSKINGRGLPNGMDADCKDFNRTPGSRQASPTEVVERLGPNTNPSEGLGPLPNPTANKPLVEEFSNPETQNLDAMEQVGLESLQFDYPGNQVPMDSSGATVGLFDYNSQQQLFQRTNALTVQQLTAAQQQQYALAAAQQPHIAGVFSAGLAPAAFVPNPYIISAAPPGTDPYTAAGLAAAATLAGPAVVPPQYYGVPWGVYPANLFQQQAAAAANNTASQQAASQAQPGQQQVLRAGAGQRPLTPNQGQQGQQAESLAAAAAANPTLAFGQGLATGMPGYQVLAPTAYYDQTGALVVGPGARTGLGAPVRLMAPTPVLISSAAAQAAAAAAAGGTASSLTGSTNGLFRPIGTQPPQQQQQQPSTNLQSNSFYGSSSLTNSSQSSSLFSHGPGQPGSTSLGFGSGNSLGAAIGSALSGFGSSGGLTNGSGRYISAAPGAEAKYRSASSTSSLFSSSSQLFPPSRLRYNRSDIMPSGRSRLLEDFRNNRFPNLQLRDLIGHIVEFSQDQHGSRFIQQKLERATPAERQMVFNEILQAAYQLMTDVFGNYVIQKFFEFGSLDQKLALATRIRGHVLPLALQMYGCRVIQKALESISSDQQSEMVKELDGHVLKCVKDQNGNHVVQKCIECVQPQSLQFIIDAFKGQVFVLSTHPYGCRVIQRILEHCTAEQTLPILEELHQHTEQLVQDQYGNYVIQHVLEHGRPEDKSKIVSEIRGKVLALSQHKFASNVVEKCVTHASRAERALLIDEVCCQNDGPHSALYTMMKDQYANYVVQKMIDMAEPAQRKIIMHKIRPHITTLRKYTYGKHILAKLEKYYLKNSPDLGPIGGPPNGML

SEQ ID NO: 69986 - protein, 35 aa, Homo sapiens; identical to SEQ ID NO: 69984
  Payload ID: 13895
  Gene Symbol: PUM2
  Gene Name: pumilio RNA-binding family member 2
  ENSP ID: ENSP00000413515

SEQ ID NO: 69987 - protein, 648 aa, Homo sapiens
  Payload ID: 13896
  Gene Symbol: PUM3
  Gene Name: pumilio RNA-binding family member 3
  Uniprot ID: Q15397
  ENSP ID: ENSP00000380982
MEVKGKKQFTGKSTKTAQEKNRFHKNSDSGSSKTFPTRKVAKEGGPKVTSRNFEKSITKLGKKGVKQFKNKQQGDKSPKNKFQPANKFNKKRKFQPDGRSDESAAKKPKWDDFKKKKKELKQSRQLSDKTNYDIVVRAKQMWEILRRKDCDKEKRVKLMSDLQKLIQGKIKTIAFAHDSTRVIQCYIQYGNEEQRKQAFEELRDDLVELSKAKYSRNIVKKFLMYGSKPQIAEIIRSFKGHVRKMLRHAEASAIVEYAYNDKAILEQRNMLTEELYGNTFQLYKSADHRTLDKVLEVQPEKLELIMDEMKQILTPMAQKEAVIKHSLVHKVFLDFFTYAPPKLRSEMIEAIREAVVYLAHTHDGARVAMHCLWHGTPKDRKVIVKTMKTYVEKVANGQYSHLVLLAAFDCIDDTKLVKQIIISEIISSLPSIVNDKYGRKVLLYLLSPRDPAHTVREIIEVLQKGDGNAHSKKDTEVRRRELLESISPALLSYLQEHAQEVVLDKSACVLVSDILGSATGDVQPTMNAIASLAATGLHPGGKDGELHIAEHPAGHLVLKWLIEQDKKMKENGREGCFAKTLVEHVGMKNLKSWASVNRGAIILSSLLQSCDLEVANKVKAALKSLIPTLEKTKSTSKGIEILLEKLST

SEQ ID NO: 69988 - protein, 49 aa, Homo sapiens
  Payload ID: 13896
  Gene Symbol: PUM3
  Gene Name: pumilio RNA-binding family member 3
  ENSP ID: ENSP00000474467
AIILSSLLQSCDLEVANKVKAALKSLIPTLEKTKSTSKGIEILLEKLST

SEQ ID NO: 69989 - protein, 289 aa, Homo sapiens
  Payload ID: 13897
  Gene Symbol: PNP
  Gene Name: purine nucleoside phosphorylase
  Uniprot ID: P00491
  ENSP ID: ENSP00000354532
MENGYTYEDYKNTAEWLLSHTKHRPQVAIICGSGLGGLTDKLTQAQIFDYGEIPNFPRSTVPGHAGRLVFGFLNGRACVMMQGRFHMYEGYPLWKVTFPVRVFHLLGVDTLVVTNAAGGLNPKFEVGDIMLIRDHINLPGFSGQNPLRGPNDERFGDRFPAMSDAYDRTMRQRALSTWKQMGEQRELQEGTYVMVAGPSFETVAECRVLQKLGADAVGMSTVPEVIVARHCGLRVFGFSLITNKVIMDYESLEKANHEEVLAAGKQAAQKLEQFVSILMASIPLPDKAS

SEQ ID NO: 69990 - protein, 93 aa, Homo sapiens
  Payload ID: 13897
  Gene Symbol: PNP
  Gene Name: purine nucleoside phosphorylase
  ENSP ID: ENSP00000450663
MENGYTYEDYKNTAEWLLSHTKHRPQVAIICGSGLGGLTDKLTQAQIFDYGEIPNFPRSTVPGHAGRLVFGFLNGRACVMMQGRFHMYEGYPL

SEQ ID NO: 69991 - protein, 61 aa, Homo sapiens
  Payload ID: 13897
  Gene Symbol: PNP
  Gene Name: purine nucleoside phosphorylase
  ENSP ID: ENSP00000451108
MMQGRFHMYEGYPLWKVTFPVRVFHLLGVDTLVVTNAAGGLNPKFEVGDIMLIRDHINLPG

SEQ ID NO: 69992 - protein, 221 aa, Homo sapiens
  Payload ID: 13897
  Gene Symbol: PNP
  Gene Name: purine nucleoside phosphorylase
  ENSP ID: ENSP00000452421
MQRGLALSLVSGARRQSHAAASAGRDARGNRAGVAPPEQEGDRYTYEDYKNTAEWLLSHTKHRPQVAIICGSGLGGLTDKLTQAQIFDYGEIPNFPRSTVPGHAGRLVFGFLNGRACVMMQGRFHMYEGYPLWKVTFPVRVFHLLGVDTLVVTNAAGGLNPKFEVGDIMLIRDHINLPGFSGQNPLRGPNDERFGDRFPAMSDAYDRTMRQRALSTWKQMG

SEQ ID NO: 69993 - protein, 399 aa, Homo sapiens
  Payload ID: 13898
  Gene Symbol: P2RX1
  Gene Name: purinergic receptor P2X, ligand gated ion channel, 1
  Uniprot ID: P51575
  ENSP ID: ENSP00000225538
MARRFQEELAAFLFEYDTPRMVLVRNKKVGVIFRLIQLVVLVYVIGWVFLYEKGYQTSSGLISSVSVKLKGLAVTQLPGLGPQVWDVADYVFPAQGDNSFVVMTNFIVTPKQTQGYCAEHPEGGICKEDSGCTPGKAKRKAQGIRTGKCVAFNDTVKTCEIFGWCPVEVDDDIPRPALLREAENFTLFIKNSISFPRFKVNRRNLVEEVNAAHMKTCLFHKTLHPLCPVFQLGYVVQESGQNFSTLAEKGGVVGITIDWHCDLDWHVRHCRPIYEFHGLYEEKNLSPGFNFRFARHFVENGTNYRHLFKVFGIRFDILVDGKAGKFDIIPTMTTIGSGIGIFGVATVLCDLLLLHILPKRHYYKQKKFKYAEDMGPGAAERDLAATSSTLGLQENMRTS

SEQ ID NO: 69994 - protein, 57 aa, Homo sapiens
  Payload ID: 13898
  Gene Symbol: P2RX1
  Gene Name: purinergic receptor P2X, ligand gated ion channel, 1
  ENSP ID: ENSP00000460449
MARRFQEELAAFLFEYDTPRMVLVRNKKVGVIFRLIQLVVLVYVIGGRPSWQATVRE

SEQ ID NO: 69995 - protein, 399 aa, Homo sapiens
  Payload ID: 13899
  Gene Symbol: P2RX2
  Gene Name: purinergic receptor P2X, ligand gated ion channel, 2
  Uniprot ID: Q9UBL9
  ENSP ID: ENSP00000341419
MAAAQPKYPAGATARRLARGCWSALWDYETPKVIVVRIHRAEKLPGERDGPRELHHHQGQGDHHVRAQSVGRGGVREAPRGLRTGRCVPYYQGPSKTCEVFGWCPVEDGASVSQFLGTMAPNFTILIKNSIHYPKFHFSKGNIADRTDGYLKRCTFHEASDLYCPIFKLGFIVEKAGESFTELAHKGGVIGVIINWDCDLDLPASECNPKYSFRRLDPKHVPASSGYNFRFAKYYKINGTTTRTLIKAYGIRIDVIVHGQAGKFSLIPTIINLATALTSVGVGSFLCDWILLTFMNKNKVYSHKKFDKVCTPSHPSGSWPVTLARVLGQAPPEPGHRSEDQHPSPPSGQEGQQGAECGPAFPPLRPCPISAPSEQMVDTPASEPAQASTPTDPKGLAQL

SEQ ID NO: 69996 - protein, 497 aa, Homo sapiens
  Payload ID: 13899
  Gene Symbol: P2RX2
  Gene Name: purinergic receptor P2X, ligand gated ion channel, 2
  Uniprot ID: Q9UBL9
  ENSP ID: ENSP00000343339
MAAAQPKYPAGATARRLARGCWSALWDYETPKVIVVRNRRLGVLYRAVQLLILLYFVWYVFIVQKSYQESETGPESSIITKVKGITTSEHKVWDVEEYVKPPEGGSVFSIITRVEATHSQTQGTCPESIRVHNATCLSDADCVAGELDMLGNGLRTGRCVPYYQGPSKTCEVFGWCPVEDGASVSQFLGTMAPNFTILIKNSIHYPKFHFSKGNIADRTDGYLKRCTFHEASDLYCPIFKLGFIVEKAGESFTELAHKGGVIGVIINWDCDLDLPASECNPKYSFRRLDPKHVPASSGYNFRFAKYYKINGTTTRTLIKAYGIRIDVIVHGQAGKFSLIPTIINLATALTSVGVVRNPLWGPSGCGGSTRPLHTGLCWPQGSFLCDWILLTFMNKNKVYSHKKFDKVCTPSHPSGSWPVTLARVLGQAPPEPGHRSEDQHPSPPSGQEGQQGAECGPAFPPLRPCPISAPSEQMVDTPASEPAQASTPTDPKGLAQL

SEQ ID NO: 69997 - protein, 447 aa, Homo sapiens
  Payload ID: 13899
  Gene Symbol: P2RX2
  Gene Name: purinergic receptor P2X, ligand gated ion channel, 2
  Uniprot ID: Q9UBL9
  ENSP ID: ENSP00000343904
MAAAQPKYPAGATARRLARGCWSALWDYETPKVIVVRNRRLGVLYRAVQLLILLYFVWYVFIVQKSYQESETGPESSIITKVKGITTSEHKVWDVEEYVKPPESIRVHNATCLSDADCVAGELDMLGNGLRTGRCVPYYQGPSKTCEVFGWCPVEDGASVSQFLGTMAPNFTILIKNSIHYPKFHFSKGNIADRTDGYLKRCTFHEASDLYCPIFKLGFIVEKAGESFTELAHKGGVIGVIINWDCDLDLPASECNPKYSFRRLDPKHVPASSGYNFRFAKYYKINGTTTRTLIKAYGIRIDVIVHGQAGKFSLIPTIINLATALTSVGVGSFLCDWILLTFMNKNKVYSHKKFDKVCTPSHPSGSWPVTLARVLGQAPPEPGHRSEDQHPSPPSGQEGQQGAECGPAFPPLRPCPISAPSEQMVDTPASEPAQASTPTDPKGLAQL

SEQ ID NO: 69998 - protein, 379 aa, Homo sapiens
  Payload ID: 13899
  Gene Symbol: P2RX2
  Gene Name: purinergic receptor P2X, ligand gated ion channel, 2
  Uniprot ID: Q9UBL9
  ENSP ID: ENSP00000344502
MAAAQPKYPAGATARRLARGCWSALWDYETPKVIVSIRVHNATCLSDADCVAGELDMLGNGLRTGRCVPYYQGPSKTCEVFGWCPVEDGASVSQFLGTMAPNFTILIKNSIHYPKFHFSKGNIADRTDGYLKRCTFHEASDLYCPIFKLGFIVEKAGESFTELAHKGGVIGVIINWDCDLDLPASECNPKYSFRRLDPKHVPASSGYNFRFAKYYKINGTTTRTLIKAYGIRIDVIVHGQAGKFSLIPTIINLATALTSVGVGSFLCDWILLTFMNKNKVYSHKKFDKVCTPSHPSGSWPVTLARVLGQAPPEPGHRSEDQHPSPPSGQEGQQGAECGPAFPPLRPCPISAPSEQMVDTPASEPAQASTPTDPKGLAQL

SEQ ID NO: 69999 - protein, 404 aa, Homo sapiens
  Payload ID: 13899
  Gene Symbol: P2RX2
  Gene Name: purinergic receptor P2X, ligand gated ion channel, 2
  Uniprot ID: Q9UBL9
  ENSP ID: ENSP00000345095
MAAAQPKYPAGATARRLARGCWSALWDYETPKVIVVRNRRLGVLYRAVQLLILLYFVWYVFIVQKSYQESETGPESSIITKVKGITTSEHKVWDVEEYVKPPEGGSVFSIITRVEATHSQTQGTCPESIRVHNATCLSDADCVAGELDMLGNGLRTGRCVPYYQGPSKTCEVFGWCPVEDGASVSQFLGTMAPNFTILIKNSIHYPKFHFSKGNIADRTDGYLKRCTFHEASDLYCPIFKLGFIVEKAGESFTELAHKGGVIGVIINWDCDLDLPASECNPKYSFRRLDPKHVPASSGYNFRFAKYYKINGTTTRTLIKAYGIRIDVIVHGQAGKFSLIPTIINLATALTSVGVGSFLCDWILLTFMNKNKVYSHKKFDKMVDTPASEPAQASTPTDPKGLAQL

SEQ ID NO: 70000 - protein, 471 aa, Homo sapiens
  Payload ID: 13899
  Gene Symbol: P2RX2
  Gene Name: purinergic receptor P2X, ligand gated ion channel, 2
  Uniprot ID: Q9UBL9
  ENSP ID: ENSP00000373762
MAAAQPKYPAGATARRLARGCWSALWDYETPKVIVVRNRRLGVLYRAVQLLILLYFVWYVFIVQKSYQESETGPESSIITKVKGITTSEHKVWDVEEYVKPPEGGSVFSIITRVEATHSQTQGTCPESIRVHNATCLSDADCVAGELDMLGNGLRTGRCVPYYQGPSKTCEVFGWCPVEDGASVSQFLGTMAPNFTILIKNSIHYPKFHFSKGNIADRTDGYLKRCTFHEASDLYCPIFKLGFIVEKAGESFTELAHKGGVIGVIINWDCDLDLPASECNPKYSFRRLDPKHVPASSGYNFRFAKYYKINGTTTRTLIKAYGIRIDVIVHGQAGKFSLIPTIINLATALTSVGVGSFLCDWILLTFMNKNKVYSHKKFDKVCTPSHPSGSWPVTLARVLGQAPPEPGHRSEDQHPSPPSGQEGQQGAECGPAFPPLRPCPISAPSEQMVDTPASEPAQASTPTDPKGLAQL

SEQ ID NO: 70001 - protein, 370 aa, Homo sapiens
  Payload ID: 13899
  Gene Symbol: P2RX2
  Gene Name: purinergic receptor P2X, ligand gated ion channel, 2
  Uniprot ID: Q9UBL9
  ENSP ID: ENSP00000405531
MAAAQPKYPAGATARRLARGCWSALWDYETPKVIVVRNRRLGVLYRAVQLLILLYFVWYVFIVQKSYQESETGPESSIITKVKGITTSEHKVWDVEEYVKPPESIRVHNATCLSDADCVAGELDMLGNGALQDLRGVRLVPGGRWGLCQPISGYDGPKFHHPHQEQHPLPQIPLLQGQHRRPHRRVPEALHVPRGLRPLLPHLQAGLYRGEGWGELHRARTQGRGGVIGVIINWDCDLDLPASECNPKYSFRRLDPKHVPASSGYNFRFAKYYKINGTTTRTLIKAYGIRIDVIVHGQAGKFSLIPTIINLATALTSVGVGSFLCDWILLTFMNKNKVYSHKKFDKMVDTPASEPAQASTPTDPKGLAQL

SEQ ID NO: 70002 - protein, 349 aa, Homo sapiens
  Payload ID: 13899
  Gene Symbol: P2RX2
  Gene Name: purinergic receptor P2X, ligand gated ion channel, 2
  ENSP ID: ENSP00000444477
MAAAQPKYPAGATARRLARGCWSALWDYETPKVIVVRNRRLGVLYRAVQLLILLYFVWYVFIVQKSYQESETGPESSIITKVKGITTSEHKVWDVEEYVKPPEGGSVFSIITRVEATHSQTQGTCPESIRVHNATCLSDADCVAGELDMLGNGLRTGRCVPYYQGPSKTCEVFGWCPVEDGASVSQFLGTMAPNFTILIKNSIHYPKFHFSKGNIADRTDGYLKRCTFHEASDLYCPIFKLGFIVEKAGESFTELAHKGGVIGVIINWDCDLDLPASECNPKYSFRRLDPKHVPASSGYNFRFAKYYKINGTTTRTLIKAYGIRIDVIVHGQVPAPAGGREVQPDSHHY

SEQ ID NO: 70003 - protein, 397 aa, Homo sapiens
  Payload ID: 13900
  Gene Symbol: P2RX3
  Gene Name: purinergic receptor P2X, ligand gated ion channel, 3
  Uniprot ID: P56373
  ENSP ID: ENSP00000263314
MNCISDFFTYETTKSVVVKSWTIGIINRVVQLLIISYFVGWVFLHEKAYQVRDTAIESSVVTKVKGSGLYANRVMDVSDYVTPPQGTSVFVIITKMIVTENQMQGFCPESEEKYRCVSDSQCGPERLPGGGILTGRCVNYSSVLRTCEIQGWCPTEVDTVETPIMMEAENFTIFIKNSIRFPLFNFEKGNLLPNLTARDMKTCRFHPDKDPFCPILRVGDVVKFAGQDFAKLARTGGVLGIKIGWVCDLDKAWDQCIPKYSFTRLDSVSEKSSVSPGYNFRFAKYYKMENGSEYRTLLKAFGIRFDVLVYGNAGKFNIIPTIISSVAAFTSVGVGTVLCDIILLNFLKGADQYKAKKFEEVNETTLKIAALTNPVYPSDQTTAEKQSTDSGAFSIGH

SEQ ID NO: 70004 - protein, 50 aa, Homo sapiens
  Payload ID: 13900
  Gene Symbol: P2RX3
  Gene Name: purinergic receptor P2X, ligand gated ion channel, 3
  ENSP ID: ENSP00000434166
KYRCVSDSQCGPERLPGGGILTGRCVNYSSVLRTCEIQGWCPTEVDTVET

SEQ ID NO: 70005 - protein, 396 aa, Homo sapiens [sequence omitted]

SEQ ID NO: 70006 - protein, 388 aa, Homo sapiens
  Payload ID: 13901
  Gene Symbol: P2RX4
  Gene Name: purinergic receptor P2X, ligand gated ion channel, 4
  Uniprot ID: Q99571
  ENSP ID: ENSP00000336607
MAGCCAALAAFLFEYDTPRIVLIRSRKVGLMNRAVQLLILAYVIGWVFVWEKGYQETDSVVSSVTTKVKGVAVTNTSKLGFRIWDVADYVIPAQEENSLFVMTNVILTMNQTQGLCPEIPDATTVCKSDASCTAGSAGTHSNGVSTGRCVAFNGSVKTCEVAAWCPVEDDTHVPQPAFLKAAENFTLLVKNNIWYPKFNFSKRNILPNITTTYLKSCIYDAKTDPFCPIFRLGKIVENAGHSFQDMAVEGGIMGIQVNWDCNLDRAASLCLPRYSFRRLDTRDVEHNVSPGYNFRFAKYYRDLAGNEQRTLIKAYGIRFDIIVFGKAGKFDIIPTMINIGSGLALLGMATVLCDIIVLYCMKKRLYYREKKYKYVEDYEQGLASELDQ

SEQ ID NO: 70007 - protein, 404 aa, Homo sapiens
  Payload ID: 13901
  Gene Symbol: P2RX4
  Gene Name: purinergic receptor P2X, ligand gated ion channel, 4
  Uniprot ID: Q99571
  ENSP ID: ENSP00000353032
MAGCCAALAAFLFEYDTPRIVLIRSRKVGLMNRAVQLLILAYVIGCYHPHLAEVEMESPRRWVFVWEKGYQETDSVVSSVTTKVKGVAVTNTSKLGFRIWDVADYVIPAQEENSLFVMTNVILTMNQTQGLCPEIPDATTVCKSDASCTAGSAGTHSNGVSTGRCVAFNGSVKTCEVAAWCPVEDDTHVPQPAFLKAAENFTLLVKNNIWYPKFNFSKRNILPNITTTYLKSCIYDAKTDPFCPIFRLGKIVENAGHSFQDMAVEGGIMGIQVNWDCNLDRAASLCLPRYSFRRLDTRDVEHNVSPGYNFRFAKYYRDLAGNEQRTLIKAYGIRFDIIVFGKAGKFDIIPTMINIGSGLALLGMATVLCDIIVLYCMKKRLYYREKKYKYVEDYEQGLASELDQ

SEQ ID NO: 70008 - protein, 123 aa, Homo sapiens
  Payload ID: 13901
  Gene Symbol: P2RX4
  Gene Name: purinergic receptor P2X, ligand gated ion channel, 4
  ENSP ID: ENSP00000437396
  MOD_RES (1)..(1): Any amino acid
XSRKVGLMNRAVQLLILAYVIGWVFVWEKGYQETDSVVSSVTTKVKGVAVTNTSKLGFRIWDVADYVIPAQEENSLFVMTNVILTMNQTQGLCPEIPDATTVCKSDASCTAGSAGTHSNDLLF

SEQ ID NO: 70009 - protein, 341 aa, Homo sapiens
  Payload ID: 13901
  Gene Symbol: P2RX4
  Gene Name: purinergic receptor P2X, ligand gated ion channel, 4
  ENSP ID: ENSP00000438131
MAGCCAALAAFLFEYDTPRIVLIRSRKVGLMNRAVQLLILAYVIGWVFVWEKGYQETDSVVSSVTTKVKGVAVTNTSKLGFRIWDVADYVIPAQEENSLFVMTNVILTMNQTQGLCPEIPDATTVCKSDASCTAGSAGTHSNGVSTGRCVAFNGSVKTCEVAAWCPVEDDTHVPQPAFLKAAENFTLLVKNNIWYPKFNFSKRNILPNITTTYLKSCIYDAKTDPFCPIFRLGKIVENAGHSFQDMAVEGGIMGIQVNWDCNLDRAASLCLPRYSFRRLDTRDVEHNVSPGYNFRFAKYYRDLAGNEQRTLIKAYGIRFDIIVFGKAGKFDIIPKKFLESD

SEQ ID NO: 70010 - protein, 361 aa, Homo sapiens
  Payload ID: 13901
  Gene Symbol: P2RX4
  Gene Name: purinergic receptor P2X, ligand gated ion channel, 4
  Uniprot ID: Q99571
  ENSP ID: ENSP00000438329
MAGCCAALAAFLFEYDTPRIVLIRSRKVGLMNRAVQLLILAYVIGWVFVWEKGYQETDSVVSSVTTKVKGVAVTNTSKLGFRIWDVADYVIPAQEENSLFVMTNVILTMNQTQGLCPEIPDATTVCKSDASCTAGSAGTHSNGVSTGRPAFLKAAENFTLLVKNNIWYPKFNFSKRNILPNITTTYLKSCIYDAKTDPFCPIFRLGKIVENAGHSFQDMAVEGGIMGIQVNWDCNLDRAASLCLPRYSFRRLDTRDVEHNVSPGYNFRFAKYYRDLAGNEQRTLIKAYGIRFDIIVFGKAGKFDIIPTMINIGSGLALLGMATVLCDIIVLYCMKKRLYYREKKYKYVEDYEQGLASELDQ

SEQ ID NO: 70011 - protein, 52 aa, Homo sapiens
  Payload ID: 13901
  Gene Symbol: P2RX4
  Gene Name: purinergic receptor P2X, ligand gated ion channel, 4
  ENSP ID: ENSP00000439386
MAGCCAALAAFLFEYDTPRIVLIRSRKVGLMNRAVQLLILAYVIGRKTPSSS

SEQ ID NO: 70012 - protein, 145 aa, Homo sapiens
  Payload ID: 13901
  Gene Symbol: P2RX4
  Gene Name: purinergic receptor P2X, ligand gated ion channel, 4
  ENSP ID: ENSP00000444033
MAGCCAALAAFLFEYDTPRIVLIRSRKVGLMNRAVQLLILAYVIGPAFLKAAENFTLLVKNNIWYPKFNFSKRNILPNITTTYLKSCIYDAKTDPFCPIFRLGKIVENAGHSFQDMAVEGGIMGIQVNWDCNLDRAASLCLPRYS

SEQ ID NO: 70013 - protein, 148 aa, Homo sapiens
  Payload ID: 13901
  Gene Symbol: P2RX4
  Gene Name: purinergic receptor P2X, ligand gated ion channel, 4
  ENSP ID: ENSP00000444274
MAGCCAALAAFLFEYDTPRIVLIRSRKVGLMNRAVQLLILAYVIGWVFVWEKGYQETDSVVSSVTTKVKGVAVTNTSKLGFRIWDVADYVIPAQEENSLFVMTNVILTMNQTQGLCPEIPDATTVCKSDASCTAGSAGTHSNAWHHPG

SEQ ID NO: 70014 - protein, 422 aa, Homo sapiens
  Payload ID: 13902
  Gene Symbol: P2RX5
  Gene Name: purinergic receptor P2X, ligand gated ion channel, 5
  Uniprot ID: Q93086
  ENSP ID: ENSP00000225328
MGQAGCKGLCLSLFDYKTEKYVIAKNKKVGLLYRLLQASILAYLVVWVFLIKKGYQDVDTSLQSAVITKVKGVAFTNTSDLGQRIWDVADYVIPAQGENVFFVVTNLIVTPNQRQNVCAENEGIPDGACSKDSDCHAGEAVTAGNGVKTGRCLRRENLARGTCEIFAWCPLETSSRPEEPFLKEAEDFTIFIKNHIRFPKFNFSKSNVMDVKDRSFLKSCHFGPKNHYCPIFRLGSVIRWAGSDFQDIALEGGVIGINIEWNCDLDKAASECHPHYSFSRLDNKLSKSVSSGYNFRFARYYRDAAGVEFRTLMKAYGIRFDVMVNGKGAFFCDLVLIYLIKKREFYRDKKYEEVRGLEDSSQEAEDEASGLGLSEQLTSGPGLLGMPEQQELQEPPEAKRGSSSQKGNGSVCPQLLEPHRST

SEQ ID NO: 70015 - protein, 398 aa, Homo sapiens
  Payload ID: 13902
  Gene Symbol: P2RX5
  Gene Name: purinergic receptor P2X, ligand gated ion channel, 5
  Uniprot ID: Q93086
  ENSP ID: ENSP00000342161
MGQAGCKGLCLSLFDYKTEKYVIAKNKKVGLLYRLLQASILAYLVVWVFLIKKGYQDVDTSLQSAVITKVKGVAFTNTSDLGQRIWDVADYVIPAQNEGIPDGACSKDSDCHAGEAVTAGNGVKTGRCLRRENLARGTCEIFAWCPLETSSRPEEPFLKEAEDFTIFIKNHIRFPKFNFSKSNVMDVKDRSFLKSCHFGPKNHYCPIFRLGSVIRWAGSDFQDIALEGGVIGINIEWNCDLDKAASECHPHYSFSRLDNKLSKSVSSGYNFRFARYYRDAAGVEFRTLMKAYGIRFDVMVNGKGAFFCDLVLIYLIKKREFYRDKKYEEVRGLEDSSQEAEDEASGLGLSEQLTSGPGLLGMPEQQELQEPPEAKRGSSSQKGNGSVCPQLLEPHRST

SEQ ID NO: 70016 - protein, 397 aa, Homo sapiens
  Payload ID: 13902
  Gene Symbol: P2RX5
  Gene Name: purinergic receptor P2X, ligand gated ion channel, 5
  Uniprot ID: Q93086
  ENSP ID: ENSP00000447545
MGQAGCKGLCLSLFDYKTEKYVIAKNKKVGLLYRLLQASILAYLVVWVFLIKKGYQDVDTSLQSAVITKVKGVAFTNTSDLGQRIWDVADYVIPAQNEGIPDGACSKDSDCHAGEAVTAGNGVKTGRCLRRENLARGTCEIFAWCPLETSSRPEEPFLKEAEDFTIFIKNHIRFPKFNFSNNVMDVKDRSFLKSCHFGPKNHYCPIFRLGSVIRWAGSDFQDIALEGGVIGINIEWNCDLDKAASECHPHYSFSRLDNKLSKSVSSGYNFRFARYYRDAAGVEFRTLMKAYGIRFDVMVNGKGAFFCDLVLIYLIKKREFYRDKKYEEVRGLEDSSQEAEDEASGLGLSEQLTSGPGLLGMPEQQELQEPPEAKRGSSSQKGNGSVCPQLLEPHRST

SEQ ID NO: 70017 - protein, 29 aa, Homo sapiens
  Payload ID: 13902
  Gene Symbol: P2RX5
  Gene Name: purinergic receptor P2X, ligand gated ion channel, 5
  ENSP ID: ENSP00000447815
  MOD_RES (1)..(1): Any amino acid
XRFDVMVNGKGPRRQFPGGRGRGIGAGAI

SEQ ID NO: 70018 - protein, 421 aa, Homo sapiens
  Payload ID: 13902
  Gene Symbol: P2RX5
  Gene Name: purinergic receptor P2X, ligand gated ion channel, 5
  Uniprot ID: Q93086
  ENSP ID: ENSP00000448355
MGQAGCKGLCLSLFDYKTEKYVIAKNKKVGLLYRLLQASILAYLVVWVFLIKKGYQDVDTSLQSAVITKVKGVAFTNTSDLGQRIWDVADYVIPAQGENVFFVVTNLIVTPNQRQNVCAENEGIPDGACSKDSDCHAGEAVTAGNGVKTGRCLRRENLARGTCEIFAWCPLETSSRPEEPFLKEAEDFTIFIKNHIRFPKFNFSNNVMDVKDRSFLKSCHFGPKNHYCPIFRLGSVIRWAGSDFQDIALEGGVIGINIEWNCDLDKAASECHPHYSFSRLDNKLSKSVSSGYNFRFARYYRDAAGVEFRTLMKAYGIRFDVMVNGKGAFFCDLVLIYLIKKREFYRDKKYEEVRGLEDSSQEAEDEASGLGLSEQLTSGPGLLGMPEQQELQEPPEAKRGSSSQKGNGSVCPQLLEPHRST

SEQ ID NO: 70019 - protein, 286 aa, Homo sapiens
  Payload ID: 13902
  Gene Symbol: P2RX5
  Gene Name: purinergic receptor P2X, ligand gated ion channel, 5
  ENSP ID: ENSP00000449495
  MOD_RES (1)..(1): Any amino acid
XGYQDVDTSLQSAVITKVKGVAFTNTSDLGQRIWDVADYVIPAQGENVFFVVTNLIVTPNQRQNVCAENEGIPDGACSKDSDCHAGEAVTAGNGVKTGRCLRRENLARGTCEIFAWCPLETSSRPEEPFLKEAEDFTIFIKNHIRFPKFNFSNRLDNKLSKSVSSGYNFRFARYYRDAAGVEFRTLMKAYGIRFDVMVNGKGAFFCDLVLIYLIKKREFYRDKKYEEVRGLEDSSQEAEDEASGLGLSEQLTSGPGLLGMPEQQELQEPPEAKRGSSSQKGNGSVC

SEQ ID NO: 70020 - protein, 362 aa, Homo sapiens
  Payload ID: 13902
  Gene Symbol: P2RX5
  Gene Name: purinergic receptor P2X, ligand gated ion channel, 5
  ENSP ID: ENSP00000450006
MPTYRPPSHRWVFLIKKGYQDVDTSLQSAVITKVKGVAFTNTSDLGQRIWDVADYVIPAQNEGIPDGACSKDSDCHAGEAVTAGNGVKTGRCLRRENLARGTCEIFAWCPLETSSRPEEPFLKEAEDFTIFIKNHIRFPKFNFSKSNVMDVKDRSFLKSCHFGPKNHYCPIFRLGSVIRWAGSDFQDIALEGGVIGINIEWNCDLDKAASECHPHYSFSRLDNKLSKSVSSGYNFRFARYYRDAAGVEFRTLMKAYGIRFDVMVNGKGAFFCDLVLIYLIKKREFYRDKKYEEVRGLEDSSQEAEDEASGLGLSEQLTSGPGLLGMPEQQELQEPPEAKRGSSSQKGNGSVCPQLLEPHRST

SEQ ID NO: 70021 - protein, 431 aa, Homo sapiens
  Payload ID: 13902
  Gene Symbol: P2RX5
  Gene Name: purinergic receptor P2X, ligand gated ion channel, 5
  ENSP ID: ENSP00000467707
MGQAGCKGLCLSLFDYKTEKYVIAKNKKVGLLYRLLQASILAYLVVWVFLIKKGYQDVDTSLQSAVITKVKGVAFTNTSDLGQRIWDVADYVIPAQGENVFFVVTNLIVTPNQRQNVCAENEGIPDGACSKDSDCHAGEAVTAGNGVKTGRCLRRENLARGTCEIFAWCPLETSSRPEEPFLKEAEDFTIFIKNHIRFPKFNFSNNVMDVKDRSFLKSCHFGPKNHYCPIFRLGSVIRWAGSDFQDIALEGGVIGINIEWNCDLDKAASECHPHYSFSRLDNKLSKSVSSGYNFRFARYYRDAAGVEFRTLMKAYGIRFDVMVNGKGAFFCDLVLIYLIKKREFYRDKKYEEVRGLEDSSQEAEDEASGLGLSEQLTSGPGLLGMPEQQELQEPPEAKRGSSSQKGNGSVCPQLLEPHRLRTPSASPLHQE

SEQ ID NO: 70022 - protein, 415 aa, Homo sapiens
  Payload ID: 13903
  Gene Symbol: P2RX6
  Gene Name: purinergic receptor P2X, ligand gated ion channel, 6
  Uniprot ID: O15547
  ENSP ID: ENSP00000385309
MCPQLAGAGSMGSPGATTGWGLLDYKTEKWALLAKKGYQERDLEPQFSIITKLKGVSVTQIKELGNRLWDVADFVKPPQGENVFFLVTNFLVTPAQVQGRCPEHPSVPLANCWVDEDCPEGEGGTHSHGVKTGQCVVFNGTHRTCEIWSWCPVESGVVPSRPLLAQAQNFTLFIKNTVTFSKFNFSKSNALETWDPTYFKHCRYEPQFSPYCPVFRIGDLVAKAGGTFEDLALLGGSVGIRVHWDCDLDTGDSGCWPHYSFQLQEKSYNFRTATHWWEQPGVEARTLLKLYGIRFDILVTGQAGKFGLIPTAVTLGTGAAWLGVVTFFCDLLLLYVDREAHFYWRTKYEEAKAPKATANSVWRELALASQARLAECLRRSSAPAPTATAAGSQTQTPGWPCPSSDTHLPTHSGSL

SEQ ID NO: 70023 - protein, 120 aa, Homo sapiens
  Payload ID: 13903
  Gene Symbol: P2RX6
  Gene Name: purinergic receptor P2X, ligand gated ion channel, 6
  ENSP ID: ENSP00000398347
  MOD_RES (1)..(1): Any amino acid
XQLAGAGSMGSPGATTGWGLLDYKTEKYVMTRNWRVGALQRLLQFGIVVYVVGWALLAKKGYQERDLEPQFSIITKLKGVSVTQIKELGNRLWDVADFVKPPQAAGFRPFQSTRAQPGQP

SEQ ID NO: 70024 - protein, 80 aa, Homo sapiens
  Payload ID: 13903
  Gene Symbol: P2RX6
  Gene Name: purinergic receptor P2X, ligand gated ion channel, 6
  ENSP ID: ENSP00000401192
MCPQLAGAGSMGSPGATTGWGLLDYKTEKWALLAKKGYQERDLEPQFSIITKLKGVSVTQIKELGNRLWDVADFVKPPQV

SEQ ID NO: 70025 - protein, 130 aa, Homo sapiens
  Payload ID: 13903
  Gene Symbol: P2RX6
  Gene Name: purinergic receptor P2X, ligand gated ion channel, 6
  ENSP ID: ENSP00000404223
LAGAGSMGSPGATTGWGLLDYKTEKYVMTRNWRVGALQRLLQFGIVVYVVGSPRQKRLPGAGPGTPVFHHHQTQRGFRHSDQGAWKPAVGCGRLREATSGRERVLLGDQLPCDASPSSGQMPRAPVRPTG

SEQ ID NO: 70026 - protein, 101 aa, Homo sapiens
  Payload ID: 13903
  Gene Symbol: P2RX6
  Gene Name: purinergic receptor P2X, ligand gated ion channel, 6
  ENSP ID: ENSP00000407920
AGAGSMGSPGATTGWGLLDYKTEKYVMTRNWRVGALQRLLQFGIVVYVVGWALLAKKGYQERDLEPQFSIITKLKGVSVTQIKELGNRLWDVADFVKPPQV

SEQ ID NO: 70027 - protein, 441 aa, Homo sapiens
  Payload ID: 13903
  Gene Symbol: P2RX6
  Gene Name: purinergic receptor P2X, ligand gated ion channel, 6
  Uniprot ID: O15547
  ENSP ID: ENSP00000416193
MCPQLAGAGSMGSPGATTGWGLLDYKTEKYVMTRNWRVGALQRLLQFGIVVYVVGWALLAKKGYQERDLEPQFSIITKLKGVSVTQIKELGNRLWDVADFVKPPQGENVFFLVTNFLVTPAQVQGRCPEHPSVPLANCWVDEDCPEGEGGTHSHGVKTGQCVVFNGTHRTCEIWSWCPVESGVVPSRPLLAQAQNFTLFIKNTVTFSKFNFSKSNALETWDPTYFKHCRYEPQFSPYCPVFRIGDLVAKAGGTFEDLALLGGSVGIRVHWDCDLDTGDSGCWPHYSFQLQEKSYNFRTATHWWEQPGVEARTLLKLYGIRFDILVTGQAGKFGLIPTAVTLGTGAAWLGVVTFFCDLLLLYVDREAHFYWRTKYEEAKAPKATANSVWRELALASQARLAECLRRSSAPAPTATAAGSQTQTPGWPCPSSDTHLPTHSGSL

SEQ ID NO: 70028 - protein, 149 aa, Homo sapiens
  Payload ID: 13904
  Gene Symbol: P2RX7
  Gene Name: purinergic receptor P2X, ligand gated ion channel, 7
  ENSP ID: ENSP00000261826
MPACCSCSDVFQYETNKVTRIQSMNYGTIKWFFHVIIFSYVCFALVSDKLYQRKEPVISSVHTKVKGIAEVKEEIVENGVKKLVHSVFDTADYTFPLQGNSFFVMTNFLKTEGQEQRLCPEYPTRRTLCSSDRGCKKGWMDPQSKGLLS

SEQ ID NO: 70029 - protein, 595 aa, Homo sapiens
  Payload ID: 13904
  Gene Symbol: P2RX7
  Gene Name: purinergic receptor P2X, ligand gated ion channel, 7
  Uniprot ID: Q99572
  ENSP ID: ENSP00000330696
MPACCSCSDVFQYETNKVTRIQSMNYGTIKWFFHVIIFSYVCFALVSDKLYQRKEPVISSVHTKVKGIAEVKEEIVENGVKKLVHSVFDTADYTFPLQGNSFFVMTNFLKTEGQEQRLCPEYPTRRTLCSSDRGCKKGWMDPQSKGIQTGRCVVYEGNQKTCEVSAWCPIEAVEEAPRPALLNSAENFTVLIKNNIDFPGHNYTTRNILPGLNITCTFHKTQNPQCPIFRLGDIFRETGDNFSDVAIQGGIMGIEIYWDCNLDRWFHHCRPKYSFRRLDDKTTNVSLYPGYNFRYAKYYKENNVEKRTLIKVFGIRFDILVFGTGGKFDIIQLVVYIGSTLSYFGLAAVFIDFLIDTYSSNCCRSHIYPWCKCCQPCVVNEYYYRKKCESIVEPKPTLKYVSFVDESHIRMVNQQLLGRSLQDVKGQEVPRPAMDFTDLSRLPLALHDTPPIPGQPEEIQLLRKEATPRSRDSPVWCQCGSCLPSQLPESHRCLEELCCRKKPGACITTSELFRKLVLSRHVLQFLLLYQEPLLALDVDSTNSRLRHCAYRCYATWRFGSQDMADFAILPSCCRWRIRKEFPKSEGQYSGFKSPY

SEQ ID NO: 70030 - protein, 128 aa, Homo sapiens
  Payload ID: 13904
  Gene Symbol: P2RX7
  Gene Name: purinergic receptor P2X, ligand gated ion channel, 7
  Uniprot ID: Q99572
  ENSP ID: ENSP00000437729
MPACCSCSDVFQYETNKVTRIQSMNYGTIKWFFHVIIFSYVCFALVSDKLYQRKEPVISSVHTKVKGIAEVKEEIVENGVKKLVHSVFDTADYTFPLQGNSFFVMTNFLKTEGQEQRLCPEEFRPEGV

SEQ ID NO: 70031 - protein, 47 aa, Homo sapiens
  Payload ID: 13904
  Gene Symbol: P2RX7
  Gene Name: purinergic receptor P2X, ligand gated ion channel, 7
  ENSP ID: ENSP00000438586
MPACCSCSDVFQYETNKVTRIQSMNYGTIKWFFHVIIFSYVWGTLSS

SEQ ID NO: 70032 - protein, 127 aa, Homo sapiens
  Payload ID: 13904
  Gene Symbol: P2RX7
  Gene Name: purinergic receptor P2X, ligand gated ion channel, 7
  ENSP ID: ENSP00000439247
MPACCSCSDVFQYETNKVTRIQSMNYGTIKWFFHVIIFSYVCFALVSDKLYQRKEPVISSVHTKVKGIAEVKEEIVENGVKKLVHSVFDTADYTFPLQLFRRTATKPARSAEIQKDRELSTKEHQPF

SEQ ID NO: 70033 - protein, 47 aa, Homo sapiens; identical to SEQ ID NO: 70031
  Payload ID: 13904
  Gene Symbol: P2RX7
  Gene Name: purinergic receptor P2X, ligand gated ion channel, 7
  ENSP ID: ENSP00000439961

SEQ ID NO: 70034 - protein, 128 aa, Homo sapiens; identical to SEQ ID NO: 70030
  Payload ID: 13904
  Gene Symbol: P2RX7
  Gene Name: purinergic receptor P2X, ligand gated ion channel, 7
  Uniprot ID: Q99572
  ENSP ID: ENSP00000441230

SEQ ID NO: 70035 - protein, 275 aa, Homo sapiens
  Payload ID: 13904
  Gene Symbol: P2RX7
  Gene Name: purinergic receptor P2X, ligand gated ion channel, 7
  Uniprot ID: Q99572
  ENSP ID: ENSP00000442470
MPACCSCSDVFQYETNKVTRIQSMNYGTIKWFFHVIIFSYVCFALVSDKLYQRKEPVISSVHTKVKGIAEVKEEIVENGVKKLVHSVFDTADYTFPLQGNSFFVMTNFLKTEGQEQRLCPEYPTRRTLCSSDRGCKKGWMDPQSKGIQTGRCVVYEGNQKTCEVSAWCPIEAVEEAPRPALLNSAENFTVLIKNNIDFPGHNYTTYAKYYKENNVEKRTLIKVFGIRFDILVFGTGGKFDIIQLVVYIGSTLSYFGLVRDSLFHALGKWFGEGSD

SEQ ID NO: 70036 - protein, 364 aa, Homo sapiens
  Payload ID: 13904
  Gene Symbol: P2RX7
  Gene Name: purinergic receptor P2X, ligand gated ion channel, 7
  Uniprot ID: Q99572
  ENSP ID: ENSP00000442572
MPACCSCSDVFQYETNKVTRIQSMNYGTIKWFFHVIIFSYVCFALVSDKLYQRKEPVISSVHTKVKGIAEVKEEIVENGVKKLVHSVFDTADYTFPLQGNSFFVMTNFLKTEGQEQRLCPEYPTRRTLCSSDRGCKKGWMDPQSKGIQTGRCVVYEGNQKTCEVSAWCPIEAVEEAPRPALLNSAENFTVLIKNNIDFPGHNYTTRNILPGLNITCTFHKTQNPQCPIFRLGDIFRETGDNFSDVAIQGGIMGIEIYWDCNLDRWFHHCRPKYSFRRLDDKTTNVSLYPGYNFRYAKYYKENNVEKRTLIKVFGIRFDILVFGTGGKFDIIQLVVYIGSTLSYFGLVRDSLFHALGKWFGEGSD

SEQ ID NO: 70037 - protein, 258 aa, Homo sapiens
  Payload ID: 13904
  Gene Symbol: P2RX7
  Gene Name: purinergic receptor P2X, ligand gated ion channel, 7
  ENSP ID: ENSP00000443640
MPACCSCSDVFQYETNKVTRIQSMNYGTIKWFFHVIIFSYVCFALVSDKLYQRKEPVISSVHTKVKGIAEVKEEIVENGVKKLVHSVFDTADYTFPLQGNSFFVMTNFLKTEGQEQRLCPEYPTRRTLCSSDRGCKKGWMDPQSKGIQTGRCVVYEGNQKTCEVSAWCPIEAVEEAPRPALLNSAENFTVLIKNNIDFPGHNYTTRNILPGLNITCTFHKTQNPQCPIFRLGDIFRETGDNFSDVAIQIRQVLQGKQC

SEQ ID NO: 70038 - protein, 127 aa, Homo sapiens; identical to SEQ ID NO: 70032
  Payload ID: 13904
  Gene Symbol: P2RX7
  Gene Name: purinergic receptor P2X, ligand gated ion channel, 7
  ENSP ID: ENSP00000445325

SEQ ID NO: 70039 - protein, 47 aa, Homo sapiens; identical to SEQ ID NO: 70031
  Payload ID: 13904
  Gene Symbol: P2RX7
  Gene Name: purinergic receptor P2X, ligand gated ion channel, 7
  ENSP ID: ENSP00000445564

SEQ ID NO: 70040 - protein, 373 aa, Homo sapiens
  Payload ID: 13905
  Gene Symbol: P2RY1
  Gene Name: purinergic receptor P2Y, G-protein coupled, 1
  Uniprot ID: P47900
  ENSP ID: ENSP00000304767
MTEVLWPAVPNGTDAAFLAGPGSSWGNSTVASTAAVSSSFKCALTKTGFQFYYLPAVYILVFIIGFLGNSVAIWMFVFHMKPWSGISVYMFNLALADFLYVLTLPALIFYYFNKTDWIFGDAMCKLQRFIFHVNLYGSILFLTCISAHRYSGVVYPLKSLGRLKKKNAICISVLVWLIVVVAISPILFYSGTGVRKNKTITCYDTTSDEYLRSYFIYSMCTTVAMFCVPLVLILGCYGLIVRALIYKDLDNSPLRRKSIYLVIIVLTVFAVSYIPFHVMKTMNLRARLDFQTPAMCAFNDRVYATYQVTRGLASLNSCVDPILYFLAGDTFRRRLSRATRKASRRSEANLQSKSEDMTLNILPEFKQNGDTSL

SEQ ID NO: 70041 - protein, 339 aa, Homo sapiens
  Payload ID: 13906
  Gene Symbol: P2RY10
  Gene Name: purinergic receptor P2Y, G-protein coupled, 10
  Uniprot ID: O00398
  ENSP ID: ENSP00000171757
MANLDKYTETFKMGSNSTSTAEIYCNVTNVKFQYSLYATTYILIFIPGLLANSAALWVLCRFISKKNKAIIFMINLSVADLAHVLSLPLRIYYYISHHWPFQRALCLLCFYLKYLNMYASICFLTCISLQRCFFLLKPFRARDWKRRYDVGISAAIWIVVGTACLPFPILRSTDLNNNKSCFADLGYKQMNAVALVGMITVAELAGFVIPVIIIAWCTWKTTISLRQPPMAFQGISERQKALRMVFMCAAVFFICFTPYHINFIFYTMVKETIISSCPVVRIALYFHPFCLCLASLCCLLDPILYYFMASEFRDQLSRHGSSVTRSRLMSKESGSSMIG

SEQ ID NO: 70042 - protein, 339 aa, Homo sapiens; identical to SEQ ID NO: 70041
  Payload ID: 13906
  Gene Symbol: P2RY10
  Gene Name: purinergic receptor P2Y, G-protein coupled, 10
  Uniprot ID: O00398
  ENSP ID: ENSP00000443138

SEQ ID NO: 70043 - protein, 374 aa, Homo sapiens
  Payload ID: 13907
  Gene Symbol: P2RY11
  Gene Name: purinergic receptor P2Y, G-protein coupled, 11
  Uniprot ID: Q96G91
  ENSP ID: ENSP00000323872
MAANVSGAKSCPANFLAAADDKLSGFQGDFLWPILVVEFLVAVASNGLALYRFSIRKQRPWHPAVVFSVQLAVSDLLCALTLPPLAAYLYPPKHWRYGEAACRLERFLFTCNLLGSVIFITCISLNRYLGIVHPFFARSHLRPKHAWAVSAAGWVLAALLAMPTLSFSHLKRPQQGAGNCSVARPEACIKCLGTADHGLAAYRAYSLVLAGLGCGLPLLLTLAAYGALGRAVLRSPGMTVAEKLRVAALVASGVALYASSYVPYHIMRVLNVDARRRWSTRCPSFADIAQATAALELGPYVGYQVMRGLMPLAFCVHPLLYMAAVPSLGCCCRHCPGYRDSWNPEDAKSTGQALPLNATAAPKPSEPQSRELSQ

SEQ ID NO: 70044 - protein, 342 aa, Homo sapiens
  Payload ID: 13908
  Gene Symbol: P2RY12
  Gene Name: purinergic receptor P2Y, G-protein coupled, 12
  Uniprot ID: Q9H244
  ENSP ID: ENSP00000307259
MQAVDNLTSAPGNTSLCTRDYKITQVLFPLLYTVLFFVGLITNGLAMRIFFQIRSKSNFIIFLKNTVISDLLMILTFPFKILSDAKLGTGPLRTFVCQVTSVIFYFTMYISISFLGLITIDRYQKTTRPFKTSNPKNLLGAKILSVVIWAFMFLLSLPNMILTNRQPRDKNVKKCSFLKSEFGLVWHEIVNYICQVIFWINFLIVIVCYTLITKELYRSYVRTRGVGKVPRKKVNVKVFIIIAVFFICFVPFHFARIPYTLSQTRDVFDCTAENTLFYVKESTLWLTSLNACLDPFIYFFLCKSFRNSLISMLKCPNSATSLSQDNRKKEQDGGDPNEETPM

SEQ ID NO: 70045 - protein, 354 aa, Homo sapiens
  Payload ID: 13909
  Gene Symbol: P2RY13
  Gene Name: purinergic receptor P2Y, G-protein coupled, 13
  Uniprot ID: Q9BPV8
  ENSP ID: ENSP00000320376
MTAAIRRQRELSILPKVTLEAMNTTVMQGFNRSERCPRDTRIVQLVFPALYTVVFLTGILLNTLALWVFVHIPSSSTFIIYLKNTLVADLIMTLMLPFKILSDSHLAPWQLRAFVCRFSSVIFYETMYVGIVLLGLIAFDRFLKIIRPLRNIFLKKPVFAKTVSIFIWFFLFFISLPNTILSNKEATPSSVKKCASLKGPLGLKWHQMVNNICQFIFWTVFILMLVFYVVIAKKVYDSYRKSKSKDRKNNKKLEGKVFVVVAVFFVCFAPFHFARVPYTHSQTNNKTDCRLQNQLFIAKETTLFLAATNICMDPLIYIFLCKKFTEKLPCMQGRKTTASSQENHSSQTDNITLG

SEQ ID NO: 70046 - protein, 338 aa, Homo sapiens
  Payload ID: 13910
  Gene Symbol: P2RY14
  Gene Name: purinergic receptor P2Y, G-protein coupled, 14
  Uniprot ID: Q15391
  ENSP ID: ENSP00000308361
MINSTSTQPPDESCSQNLLITQQIIPVLYCMVFIAGILLNGVSGWIFFYVPSSKSFIIYLKNIVIADFVMSLTFPFKILGDSGLGPWQLNVFVCRVSAVLFYVNMYVSIVFFGLISFDRYYKIVKPLWTSFIQSVSYSKLLSVIVWMLMLLLAVPNIILTNQSVREVTQIKCIELKSELGRKWHKASNYIFVAIFWIVFLLLIVFYTAITKKIFKSHLKSSRNSTSVKKKSSRNIFSIVFVFFVCFVPYHIARIPYTKSQTEAHYSCQSKEILRYMKEFTLLLSAANVCLDPIIYFFLCQPFREILCKKLHIPLKAQNDLDISRIKRGNTTLESTDTL

SEQ ID NO: 70047 - protein, 338 aa, Homo sapiens; identical to SEQ ID NO: 70046
  Payload ID: 13910
  Gene Symbol: P2RY14
  Gene Name: purinergic receptor P2Y, G-protein coupled, 14
  Uniprot ID: Q15391
  ENSP ID: ENSP00000408733

SEQ ID NO: 70048 - protein, 95 aa, Homo sapiens
  Payload ID: 13910
  Gene Symbol: P2RY14
  Gene Name: purinergic receptor P2Y, G-protein coupled, 14
  ENSP ID: ENSP00000418065
MINSTSTQPPDESCSQNLLITQQIIPVLYCMVFIAGILLNGVSGWIFFYVPSSKSFIIYLKNIVIADFVMSLTFPFKILGDSGLGPWQLNVFVCR

SEQ ID NO: 70049 - protein, 377 aa, Homo sapiens
  Payload ID: 13911
  Gene Symbol: P2RY2
  Gene Name: purinergic receptor P2Y, G-protein coupled, 2
  Uniprot ID: P41231
  ENSP ID: ENSP00000310305
MAADLGPWNDTINGTWDGDELGYRCRFNEDFKYVLLPVSYGVVCVPGLCLNAVALYIFLCRLKTWNASTTYMFHLAVSDALYAASLPLLVYYYARGDHWPFSTVLCKLVRFLFYTNLYCSILFLTCISVHRCLGVLRPLRSLRWGRARYARRVAGAVWVLVLACQAPVLYFVTTSARGGRVTCHDTSAPELFSRFVAYSSVMLGLLFAVPFAVILVCYVLMARRLLKPAYGTSGGLPRAKRKSVRTIAVVLAVFALCFLPFHVTRTLYYSFRSLDLSCHTLNAINMAYKVTRPLASANSCLDPVLYFLAGQRLVRFARDAKPPTGPSPATPARRRLGLRRSDRTDMQRIEDVLGSSEDSRRTESTPAGSENTKDIRL

SEQ ID NO: 70050 - protein, 377 aa, Homo sapiens; identical to SEQ ID NO: 70049
  Payload ID: 13911
  Gene Symbol: P2RY2
  Gene Name: purinergic receptor P2Y, G-protein coupled, 2
  Uniprot ID: P41231
  ENSP ID: ENSP00000377221

SEQ ID NO: 70051 - protein, 377 aa, Homo sapiens; identical to SEQ ID NO: 70049
  Payload ID: 13911
  Gene Symbol: P2RY2
  Gene Name: purinergic receptor P2Y, G-protein coupled, 2
  Uniprot ID: P41231
  ENSP ID: ENSP00000377222

SEQ ID NO: 70052 - protein, 359 aa, Homo sapiens
  Payload ID: 13912
  Gene Symbol: P2RY8
  Gene Name: purinergic receptor P2Y, G-protein coupled, 8
  Uniprot ID: Q86VZ1
  ENSP ID: ENSP00000370697
MQVPNSTGPDNATLQMLRNPAIAVALPVVYSLVAAVSIPGNLFSLWVLCRRMGPRSPSVIFMINLSVTDLMLASVLPFQIYYHCNRHHWVFGVLLCNVVTVAFYANMYSSILTMTCISVERFLGVLYPLSSKRWRRRRYAVAACAGTWLLLLTALSPLARTDLTYPVHALGIITCFDVLKWTMLPSVAMWAVFLFTIFILLFLIPFVITVACYTATILKLLRTEEAHGREQRRRAVGLAAVVLLAFVTCFAPNNFVLLAHIVSRLFYGKSYYHVYKLTLCLSCLNNCLDPFVYYFASREFQLRLREYLGCRRVPRDTLDTRRESLFSARTTSVRSEAGAHPEGMEGATRPGLQRQESVF

SEQ ID NO: 70053 - protein, 322 aa, Homo sapiens
  Payload ID: 13913
  Gene Symbol: PURA
  Gene Name: purine-rich element binding protein A
  Uniprot ID: Q00577
  ENSP ID: ENSP00000332706
MADRDSGSEQGGAALGSGGSLGHPGSGSGSGGGGGGGGGGGGSGGGGGGAPGGLQHETQELASKRVDIQNKRFYLDVKQNAKGRFLKIAEVGAGGNKSRLTLSMSVAVEFRDYLGDFIEHYAQLGPSQPPDLAQAQDEPRRALKSEFLVRENRKYYMDLKENQRGRFLRIRQTVNRGPGLGSTQGQTIALPAQGLIEFRDALAKLIDDYGVEEEPAELPEGTSLTVDNKRFFFDVGSNKYGVFMRVSEVKPTYRNSITVPYKVWAKFGHTFCKYSEEMKKIQEKQREKRAACEQLHQQQQQQQEETAAATLLLQGEEEGEED

SEQ ID NO: 70054 - protein, 312 aa, Homo sapiens
  Payload ID: 13914
  Gene Symbol: PURB
  Gene Name: purine-rich element binding protein B
  Uniprot ID: Q96QR8
  ENSP ID: ENSP00000379051
MADGDSGSERGGGGGPCGFQPASRGGGEQETQELASKRLDIQNKRFYLDVKQNAKGRFLKIAEVGAGGSKSRLTLSMAVAAEFRDSLGDFIEHYAQLGPSSPEQLAAGAEEGGGPRRALKSEFLVRENRKYYLDLKENQRGRFLRIRQTVNRGGGGFGAGPGPGGLQSGQTIALPAQGLIEFRDALAKLIDDYGGEDDELAGGPGGGAGGPGGGLYGELPEGTSITVDSKRFFFDVGCNKYGVFLRVSEVKPSYRNAITVPFKAWGKFGGAFCRYADEMKEIQERQRDKLYERRGGGSGGGEESEGEEVDED

SEQ ID NO: 70055 - protein, 322 aa, Homo sapiens
  Payload ID: 13915
  Gene Symbol: PURG
  Gene Name: purine-rich element binding protein G
  Uniprot ID: Q9UJV8
  ENSP ID: ENSP00000345168
MERARRRGGGGGRGRGGKNVGGSGLSKSRLYPQAQHSHYPHYAASATPNQAGGAAEIQELASKRVDIQKKRFYLDVKQSSRGRFLKIAEVWIGRGRQDNIRKSKLTLSLSVAAELKDCLGDFIEHYAHLGLKGHRQEHGHSKEQGSRRRQKHSAPSPPVSVGSEEHPHSVLKTDYIERDNRKYYLDLKENQRGRFLRIRQTMMRGTGMIGYFGHSLGQEQTIVLPAQGMIEFRDALVQLIEDYGEGDIEERRGGDDDPLELPEGTSFRVDNKRFYFDVGSNKYGIFLKLTNYPKSRENINLFHCCQIKHKEQPHDTTKTVEE

SEQ ID NO: 70056 - protein, 347 aa, Homo sapiens
  Payload ID: 13915
  Gene Symbol: PURG
  Gene Name: purine-rich element binding protein G
  Uniprot ID: Q9UJV8
  ENSP ID: ENSP00000418721
MERARRRGGGGGRGRGGKNVGGSGLSKSRLYPQAQHSHYPHYAASATPNQAGGAAEIQELASKRVDIQKKRFYLDVKQSSRGRFLKIAEVWIGRGRQDNIRKSKLTLSLSVAAELKDCLGDFIEHYAHLGLKGHRQEHGHSKEQGSRRRQKHSAPSPPVSVGSEEHPHSVLKTDYIERDNRKYYLDLKENQRGRFLRIRQTMMRGTGMIGYFGHSLGQEQTIVLPAQGMIEFRDALVQLIEDYGEGDIEERRGGDDDPLELPEGTSFRVDNKRFYFDVGSNKYGIFLKVSEVRPPYRNTITVPFKAWTRFGENFIKYEEEMRKICNSHKEKRMDGRKASGEEQECLD

SEQ ID NO: 70057 - protein, 163 aa, Homo sapiens
  Payload ID: 13915
  Gene Symbol: PURG
  Gene Name: purine-rich element binding protein G
  ENSP ID: ENSP00000466881
MERARRRGGGGGRGRGGKNVGGSGLSKSRLYPQAQHSHYPHYAASATPNQAGGAAEIQELASKRVDIQKKRFYLDVKQSSRGRFLKIAEVWIGRGRQDNIRKSKLTLSLSVAAELKDCLGDFIEHYAHLGLKGHRQEHGHSKEQGSRRRQKHSAPSPPVSVGS

SEQ ID NO: 70058 - protein, 136 aa, Homo sapiens
  Payload ID: 13916
  Gene Symbol: PCP2
  Gene Name: Purkinje cell protein 2
  Uniprot ID: Q8IVA1
  ENSP ID: ENSP00000310585
MMDQEEKTEEGSGPCAEAGSPDQEGFFNLLSHVQGDRMEGQRCSLQAGPGQTTKSQSDPTPEMDSLMDMLASTQGRRMDDQRVTVSSLPGFQPVGSKDGAQKRAGTLSPQPLLTPQDPTALGFRRNSSPQPPTQAP

SEQ ID NO: 70059 - protein, 120 aa, Homo sapiens
  Payload ID: 13916
  Gene Symbol: PCP2
  Gene Name: Purkinje cell protein 2
  Uniprot ID: Q8IVA1
  ENSP ID: ENSP00000472761
MAGSPDQEGFFNLLSHVQGDRMEGQRCSLQAGPGQTTKSQSDPTPEMDSLMDMLASTQGRRMDDQRVTVSSLPGFQPVGSKDGAQKRAGTLSPQPLLTPQDPTALGFRRNSSPQPPTQAP

SEQ ID NO: 70060 - protein, 62 aa, Homo sapiens
  Payload ID: 13917
  Gene Symbol: PCP4
  Gene Name: Purkinje cell protein 4
  Uniprot ID: P48539
  ENSP ID: ENSP00000329403
MSERQGAGATNGKDKTSGENDGQKKVQEEFDIDMDAPETERAAVAIQSQFRKFQKKKAGSQS

SEQ ID NO: 70061 - protein, 31 aa, Homo sapiens
  Payload ID: 13917
  Gene Symbol: PCP4
  Gene Name: Purkinje cell protein 4
  ENSP ID: ENSP00000433172
MSERQGAGATNGKDKTSGENVGCPILFLTHS

SEQ ID NO: 70062 - protein, 68 aa, Homo sapiens
  Payload ID: 13918
  Gene Symbol: PCP4L1
  Gene Name: Purkinje cell protein 4 like 1
  Uniprot ID: A6NKN8
  ENSP ID: ENSP00000426296
MSELNTKTSPATNQAAGQEEKGKAGNVKKAEEEEEIDIDLTAPETEKAALAIQGKFRRFQKRKKDPSS

SEQ ID NO: 70063 - protein, 466 aa, Homo sapiens
  Payload ID: 13919
  Gene Symbol:
  Gene Name: Putative eukaryotic translation initiation factor 2 subunit 3-like protein  [Source:UniProtKB/Swiss-Prot
  Acc:Q2VIR3]
  ENSP ID: ENSP00000323063
MAGGEAGVTLGQPHLSRQDLTTLDVTKLTPLSHEVISRQATINIGTIGHVAHGKSTVVKAISGVHTVRFKNELERNITIKLGYANAKIYQLDDPSCPRPECYRSCGSSMPDEFPTDIPGTKGNFRLVRHVSFVDCPGHDILMATMLNGAAVMDAALLLIAGNESCPQPQTSEHLAAIEIMKLKHILILQNKIDLVKERQAKEQYEQILAFVQGTVAEGAPIIPISAQLKYNIEVVCEYIVKKIPVPPRDFTSEPRLIVIRSFDVNKPGCEVDDLKGGVAGGSILKGVLKVGQETEVRPGIVSKDSEGKLMCKSIFSKIVSLFAEHNDLQYAAPGGLIGVGTKIDPTLCRADRMVGQILGAVGALPEIFTELEISYFLLRRLLGVRTEGDKKAAKVQKLSKNEVLMVNIGSLSTGGRVSAVKADLGKIVLTNPVCTEIHLIHLDLIKELEWGPVLTNETQRKSAANF

SEQ ID NO: 70064 - protein, 472 aa, Homo sapiens
  Payload ID: 13919
  Gene Symbol:
  Gene Name: Putative eukaryotic translation initiation factor 2 subunit 3-like protein  [Source:UniProtKB/Swiss-Prot
  Acc:Q2VIR3]
  Uniprot ID: Q2VIR3
  ENSP ID: ENSP00000445077
MAGGEAGVTLGQPHLSRQDLTTLDVTKLTPLSHEVISRQATINIGTIGHVAHGKSTVVKAISGVHTVRFKNELERNITIKLGYANAKIYQLDDPSCPRPECYRSCGSSMPDEFPTDIPGTKGNFRLVRHVSFVDCPGHDILMATMLNGAAVMDAALLLIAGNESCPQPQTSEHLAAIEIMKLKHILILQNKIDLVKERQAKEQYEQILAFVQGTVAEGAPIIPISAQLKYNIEVVCEYIVKKIPVPPRDFTSEPRLIVIRSFDVNKPGCEVDDLKGGVAGGSILKGVLKVGQETEVRPGIVSKDSEGKLMCKSIFSKIVSLFAEHNDLQYAAPGGLIGVGTKIDPTLCRADRMVGQILGAVGALPEIFTELEISYFLLRRLLGVRTEGDKKAAKVQKLSKNEVLMVNIGSLSTGGRVSAVKADLGKIVLTNPVCTEVGEKIALSRRVEKHWRLIGWGQIRRGVTIKPTVDDD

SEQ ID NO: 70065 - protein, 637 aa, Homo sapiens
  Payload ID: 13920
  Gene Symbol: PHTF1
  Gene Name: putative homeodomain transcription factor 1
  Uniprot ID: Q9UMS5
  ENSP ID: ENSP00000350428
MASNERDAISWYQKKIGAYDQQIWEKSIEQTQIKGLKNKPKKMGHIKPDLIDVDLIRGSTFAKAKPEIPWTSLTRKGLVRVVFFPLFSNWWIQVTSLRIFVWLLLLYFMQVIAIVLYLMMPIVNISEVLGPLCLMLLMGTVHCQIVSTQITRPSGNNGNRRRRKLRKTVNGDGSRENGNNSSDKVRGIETLESVPIIGGFWETIFGNRIKRVKLISNKGTETDNDPSCVHPIIKRRQCRPEIRMWQTREKAKFSDGEKCRREAFRRLGNGVSDDLSSEEDGEARTQMILLRRSVEGASSDNGCEVKNRKSILSRHLNSQVKKTTTRWCHIVRDSDSLAESEFESAAFSQGSRSGVSGGSRSLNMSRRDSESTRHDSETEDMLWDDLLHGPECRSSVTSDSEGAHVNTLHSGTKRDPKEDVFQQNHLFWLQNSSPSSDRVSAIIWEGNECKKMDMSVLEISGIIMSRVNAYQQGVGYQMLGNVVTIGLAFFPFLHRLFREKSLDQLKSISAEEILTLFCGAPPVTPIIVLSIINFFERLCLTWMFFFMMCVAERTYKQRFLFAKLFSHITSARKARKYEIPHFRLKKVENIKIWLSLRSYLKRRGPQRSVDVVVSSVFLLTLSIAFICCAQVKVSHLL

SEQ ID NO: 70066 - protein, 717 aa, Homo sapiens
  Payload ID: 13920
  Gene Symbol: PHTF1
  Gene Name: putative homeodomain transcription factor 1
  ENSP ID: ENSP00000358611
MASNERDAISWYQKKIGAYDQQIWEKSIEQTQIKGLKNKPKKMGHIKPDLIDVDLIRGSTFAKAKPEIPWTSLTRKGLVRVVFFPLFSNWWIQVTSLRIFVWLLLLYFMQVIAIVLYLMMPIVNISEVLGPLCLMLLMGTVHCQIVSTQITRPSGNNGNRRRRIKRVKLISNKGTETDNDPSCVHPIIKRRQCRPEIRMWQTREKAKFSDGEKCRREAFRRLGNGVSDDLSSEEDGEARTQMILLRRSVEGASSDNGCEVKNRKSILSRHLNSQVKKTTTRWCHIVRDSDSLAESEFESAAFSQGSRSGVSGGSRSLNMSRRDSESTRHDSETEDMLWDDLLHGPECRSSVTSDSEGAHVNTLHSGTKRDPKEDVFQQNHLFWLQNSSPSSDRVSAIIWEGNECKKMDMSVLEISGIIMSRVNAYQQGVGYQMLGNVVTIGLAFFPFLHRLFREKSLDQLKSISAEEILTLFCGAPPVTPIIVLSIINFFERLCLTWMFFFMMCVAERTYKQRFLFAKLFSHITSARKARKYEIPHFRLKKVENIKIWLSLRSYLKRRGPQRSVDVVVSSVFLLTLSIAFICCAQVLQGHKTFLNDAYNWEFLIWETALLLFLLRLASLGSETNKKYSNVSILLTEQINLYLKMEKKPNKKEQLTLVNNVLKLSTKLLKELDTPFRLYGLTMNPLIYNITRVVILSAVSGVISDLLGFNIRLWKIKS

SEQ ID NO: 70067 - protein, 709 aa, Homo sapiens
  Payload ID: 13920
  Gene Symbol: PHTF1
  Gene Name: putative homeodomain transcription factor 1
  ENSP ID: ENSP00000358613
MASNERDAISWYQKKIGAYDQQIWEKSIEQTQIKGLKNKPKKMGHIKPDLIDVDLIRVIAIVLYLMMPIVNISEVLGPLCLMLLMGTVHCQIVSTQITRPSGNNGNRRRRKLRKTVNGDGSRENGNNSSDKVRGIETLESVPIIGGFWETIFGNRIKRVKLISNKGTETDNDPSCVHPIIKRRQCRPEIRMWQTREKAKFSDGEKCRREAFRRLGNGVSDDLSSEEDGEARTQMILLRRSVEGASSDNGCEVKNRKSILSRHLNSQVKKTTTRWCHIVRDSDSLAESEFESAAFSQGSRSGVSGGSRSLNMSRRDSESTRHDSETEDMLWDDLLHGPECRSSVTSDSEGAHVNTLHSGTKRDPKEDVFQQNHLFWLQNSSPSSDRVSAIIWEGNECKKMDMSVLEISGIIMSRVNAYQQGVGYQMLGNVVTIGLAFFPFLHRLFREKSLDQLKSISAEEILTLFCGAPPVTPIIVLSIINFFERLCLTWMFFFMMCVAERTYKQRFLFAKLFSHITSARKARKYEIPHFRLKKVENIKIWLSLRSYLKRRGPQRSVDVVVSSVFLLTLSIAFICCAQVLQGHKTFLNDAYNWEFLIWETALLLFLLRLASLGSETNKKYSNVSILLTEQINLYLKMEKKPNKKEQLTLVNNVLKLSTKLLKELDTPFRLYGLTMNPLIYNITRVVILSAVSGVISDLLGFNIRLWKIKS

SEQ ID NO: 70068 - protein, 762 aa, Homo sapiens
  Payload ID: 13920
  Gene Symbol: PHTF1
  Gene Name: putative homeodomain transcription factor 1
  Uniprot ID: Q9UMS5
  ENSP ID: ENSP00000358617
MASNERDAISWYQKKIGAYDQQIWEKSIEQTQIKGLKNKPKKMGHIKPDLIDVDLIRGSTFAKAKPEIPWTSLTRKGLVRVVFFPLFSNWWIQVTSLRIFVWLLLLYFMQVIAIVLYLMMPIVNISEVLGPLCLMLLMGTVHCQIVSTQITRPSGNNGNRRRRKLRKTVNGDGSRENGNNSSDKVRGIETLESVPIIGGFWETIFGNRIKRVKLISNKGTETDNDPSCVHPIIKRRQCRPEIRMWQTREKAKFSDGEKCRREAFRRLGNGVSDDLSSEEDGEARTQMILLRRSVEGASSDNGCEVKNRKSILSRHLNSQVKKTTTRWCHIVRDSDSLAESEFESAAFSQGSRSGVSGGSRSLNMSRRDSESTRHDSETEDMLWDDLLHGPECRSSVTSDSEGAHVNTLHSGTKRDPKEDVFQQNHLFWLQNSSPSSDRVSAIIWEGNECKKMDMSVLEISGIIMSRVNAYQQGVGYQMLGNVVTIGLAFFPFLHRLFREKSLDQLKSISAEEILTLFCGAPPVTPIIVLSIINFFERLCLTWMFFFMMCVAERTYKQRFLFAKLFSHITSARKARKYEIPHFRLKKVENIKIWLSLRSYLKRRGPQRSVDVVVSSVFLLTLSIAFICCAQVLQGHKTFLNDAYNWEFLIWETALLLFLLRLASLGSETNKKYSNVSILLTEQINLYLKMEKKPNKKEQLTLVNNVLKLSTKLLKELDTPFRLYGLTMNPLIYNITRVVILSAVSGVISDLLGFNIRLWKIKS

SEQ ID NO: 70069 - protein, 762 aa, Homo sapiens; identical to SEQ ID NO: 70068
  Payload ID: 13920
  Gene Symbol: PHTF1
  Gene Name: putative homeodomain transcription factor 1
  Uniprot ID: Q9UMS5
  ENSP ID: ENSP00000377025

SEQ ID NO: 70070 - protein, 105 aa, Homo sapiens
  Payload ID: 13920
  Gene Symbol: PHTF1
  Gene Name: putative homeodomain transcription factor 1
  ENSP ID: ENSP00000404690
MASNERDAISWYQKKIGAYDQQIWEKSIEQTQIKGLKNKPKKMGHIKPDLIDVDLIRGSTFAKAKPEIPWTSLTRKGLVRVVFFPLFSNWWIQVTSLRIFVWLLL

SEQ ID NO: 70071 - protein, 331 aa, Homo sapiens
  Payload ID: 13920
  Gene Symbol: PHTF1
  Gene Name: putative homeodomain transcription factor 1
  ENSP ID: ENSP00000416810
  MOD_RES (1)..(1): Any amino acid
XQTREKAKFSDGEKCRREAFRRLGNGVSDDLSSEEDGEARTQMILLRRSVEGASSDNGCEVKNRKSILSRHLNSQVKKTTTRWCHIVRDSDSLAESEFESAAFSQGSRSGVSGGSRSLNMSRRDSESTRHDSETEDMLWDDLLHGPECRSSVTSDSEGAHVNTLHSGTKRDPKEDVFQQNHLFWLQNSSPSSDRVSAIIWEGNECKKMDMSVLEISGIIMSRVNAYQQGVGYQMLGNVVTIGLAFFPFLHRLFREKSLDQLKSISAEEILTLFCGAPPVTPIIVLSIINFFERLCLTWMFFFMMCVAERTYKQVSGEIRKIFYLFLYMIFH

SEQ ID NO: 70072 - protein, 785 aa, Homo sapiens
  Payload ID: 13921
  Gene Symbol: PHTF2
  Gene Name: putative homeodomain transcription factor 2
  Uniprot ID: Q8N3S3
  ENSP ID: ENSP00000248550
MASKVTDAIVWYQKKEFLSVATTAPGPQQVLPGYCQCSLKDQGLFIQCLIGAYDQQIWEKSVEQREIKFIKLGLRNKPKKTAHVKPDLIDVDLVRGSAFAKAKPESPWTSLTRKGIVRVVFFPFFFRWWLQVTSKVIFFWLLVLYLLQVAAIVLFCSTSSPHSIPLTEVIGPIWLMLLLGTVHCQIVSTRTPKPPLSTGGKRRRKLRKAAHLEVHREGDGSSTTDNTQEGAVQNHGTSTSHSVGTVFRDLWHAAFFLSGSKKAKNSIDKSTETDNGYVSLDGKKTVKSGEDGIQNHEPQCETIRPEETAWNTGTLRNGPSKDTQRTITNVSDEVSSEEGPETGYSLRRHVDRTSEGVLRNRKSHHYKKHYPNEDAPKSGTSCSSRCSSSRQDSESARPESETEDVLWEDLLHCAECHSSCTSETDVENHQINPCVKKEYRDDPFHQSHLPWLHSSHPGLEKISAIVWEGNDCKKADMSVLEISGMIMNRVNSHIPGIGYQIFGNAVSLILGLTPFVFRLSQATDLEQLTAHSASELYVIAFGSNEDVIVLSMVIISFVVRVSLVWIFFFLLCVAERTYKQRLLFAKLFGHLTSARRARKSEVPHFRLKKVQNIKMWLSLRSYLKRRGPQRSVDVIVSSAFLLTISVVFICCAQLLHVHEIFLDCHYNWELVIWCISLTLFLLRFVTLGSETSKKYSNTSILLTEQINLYLKMEKKPNKKEELTLVNNVLKLATKLLKELDSPFRLYGLTMNPLLYNITQVVILSAVSGVISDLLGFNLKLWKIKS

SEQ ID NO: 70073 - protein, 695 aa, Homo sapiens
  Payload ID: 13921
  Gene Symbol: PHTF2
  Gene Name: putative homeodomain transcription factor 2
  Uniprot ID: Q8N3S3
  ENSP ID: ENSP00000275575
MASKVTDAIVWYQKKIGAYDQQIWEKSVEQREIKGLRNKPKKTAHVKPDLIDVDLVRGSAFAKAKPESPWTSLTRKGIVRVVFFPFFFRWWLQVTSKVIFFWLLVLYLLQVAAIVLFCSTSSPHSIPLTEVIGPIWLMLLLGTVHCQIVSTRTPKPPLSTGGKRRRKLRKAAHLEVHREGDGSSTTDNTQEGAVQNHGTSTSHSVGTVFRDLWHAAFFLSGSKKAKNSIDKSTETDNGYVSLDGKKTVKSGEDGIQNHEPQCETIRPEETAWNTGTLRNGPSKDTQRTITNVSDEVSSEEGPETGYSLRRHVDRTSEGVLRNRKSHHYKKHYPNEDAPKSGTSCSSRCSSSRQDSESARPESETEDVLWEDLLHCAECHSSCTSETDVENHQINPCVKKEYRDDPFHQSHLPWLHSSHPGLEKISAIVWEGNDCKKADMSVLEISGMIMNRVNSHIPGIGYQIFGNAVSLILGLTPFVFRLSQATDLEQLTAHSASELYVIAFGSNEDVIVLSMVIISFVVRVSLVWIFFFLLCVAERTYKQRLLFAKLFGHLTSARRARKSEVPHFRLKKVQNIKMWLSLRSYLKRRGPQRSVDVIVSSAFLLTISVVFICCAQINLYLKMEKKPNKKEELTLVNNVLKLATKLLKELDSPFRLYGLTMNPLLYNITQVVILSAVSGVISDLLGFNLKLWKIKS

SEQ ID NO: 70074 - protein, 747 aa, Homo sapiens
  Payload ID: 13921
  Gene Symbol: PHTF2
  Gene Name: putative homeodomain transcription factor 2
  Uniprot ID: Q8N3S3
  ENSP ID: ENSP00000307699
MASKVTDAIVWYQKKIGAYDQQIWEKSVEQREIKGLRNKPKKTAHVKPDLIDVDLVRGSAFAKAKPESPWTSLTRKGIVRVVFFPFFFRWWLQVTSKVIFFWLLVLYLLQVAAIVLFCSTSSPHSIPLTEVIGPIWLMLLLGTVHCQIVSTRTPKPPLSTGGKRRRKLRKAAHLEVHREGDGSSTTDNTQEGAVQNHGTSTSHSVGTVFRDLWHAAFFLSGSKKAKNSIDKSTETDNGYVSLDGKKTVKSGEDGIQNHEPQCETIRPEETAWNTGTLRNGPSKDTQRTITNVSDEVSSEEGPETGYSLRRHVDRTSEGVLRNRKSHHYKKHYPNEDAPKSGTSCSSRCSSSRQDSESARPESETEDVLWEDLLHCAECHSSCTSETDVENHQINPCVKKEYRDDPFHQSHLPWLHSSHPGLEKISAIVWEGNDCKKADMSVLEISGMIMNRVNSHIPGIGYQIFGNAVSLILGLTPFVFRLSQATDLEQLTAHSASELYVIAFGSNEDVIVLSMVIISFVVRVSLVWIFFFLLCVAERTYKQRLLFAKLFGHLTSARRARKSEVPHFRLKKVQNIKMWLSLRSYLKRRGPQRSVDVIVSSAFLLTISVVFICCAQLLHVHEIFLDCHYNWELVIWCISLTLFLLRFVTLGSETSKKYSNTSILLTEQINLYLKMEKKPNKKEELTLVNNVLKLATKLLKELDSPFRLYGLTMNPLLYNITQVVILSAVSGVISDLLGFNLKLWKIKS

SEQ ID NO: 70075 - protein, 356 aa, Homo sapiens
  Payload ID: 13921
  Gene Symbol: PHTF2
  Gene Name: putative homeodomain transcription factor 2
  Uniprot ID: Q8N3S3
  ENSP ID: ENSP00000387355
MASKVTDAIVWYQKKIGAYDQQIWEKSVEQREIKFIKLGLRNKPKKTAHVKPDLIDVDLVRGSAFAKAKPESPWTSLTRKGIVRVVFFPFFFRWWLQVTSKVIFFWLLVLYLLQVAAIVLFCSTSSPHSIPLTEVIGPIWLMLLLGTVHCQIVSTRTPKPPLSTGGKRRRKLRKAAHLEVHREGDGSSTTDNTQEGAVQNHGTSTSHSVGTVFRDLWHAAFFLSGSKKAKNSIDKSTETDNGYVSLDGKKTVKSGEDGIQNHEPQCETIRPEETAWNTGTLRNGPSKDTQRTITNVSDEVSSEEGPETGYSLRRHVDRTSEGVLRNRKSHHYKKHYPNEVYTLSLSVYIRIYFICY

SEQ ID NO: 70076 - protein, 785 aa, Homo sapiens; identical to SEQ ID NO: 70072
  Payload ID: 13921
  Gene Symbol: PHTF2
  Gene Name: putative homeodomain transcription factor 2
  Uniprot ID: Q8N3S3
  ENSP ID: ENSP00000400958

SEQ ID NO: 70077 - protein, 751 aa, Homo sapiens
  Payload ID: 13921
  Gene Symbol: PHTF2
  Gene Name: putative homeodomain transcription factor 2
  Uniprot ID: Q8N3S3
  ENSP ID: ENSP00000403042
MASKVTDAIVWYQKKIGAYDQQIWEKSVEQREIKFIKLGLRNKPKKTAHVKPDLIDVDLVRGSAFAKAKPESPWTSLTRKGIVRVVFFPFFFRWWLQVTSKVIFFWLLVLYLLQVAAIVLFCSTSSPHSIPLTEVIGPIWLMLLLGTVHCQIVSTRTPKPPLSTGGKRRRKLRKAAHLEVHREGDGSSTTDNTQEGAVQNHGTSTSHSVGTVFRDLWHAAFFLSGSKKAKNSIDKSTETDNGYVSLDGKKTVKSGEDGIQNHEPQCETIRPEETAWNTGTLRNGPSKDTQRTITNVSDEVSSEEGPETGYSLRRHVDRTSEGVLRNRKSHHYKKHYPNEDAPKSGTSCSSRCSSSRQDSESARPESETEDVLWEDLLHCAECHSSCTSETDVENHQINPCVKKEYRDDPFHQSHLPWLHSSHPGLEKISAIVWEGNDCKKADMSVLEISGMIMNRVNSHIPGIGYQIFGNAVSLILGLTPFVFRLSQATDLEQLTAHSASELYVIAFGSNEDVIVLSMVIISFVVRVSLVWIFFFLLCVAERTYKQRLLFAKLFGHLTSARRARKSEVPHFRLKKVQNIKMWLSLRSYLKRRGPQRSVDVIVSSAFLLTISVVFICCAQLLHVHEIFLDCHYNWELVIWCISLTLFLLRFVTLGSETSKKYSNTSILLTEQINLYLKMEKKPNKKEELTLVNNVLKLATKLLKELDSPFRLYGLTMNPLLYNITQVVILSAVSGVISDLLGFNLKLWKIKS

SEQ ID NO: 70078 - protein, 546 aa, Homo sapiens
  Payload ID: 13921
  Gene Symbol: PHTF2
  Gene Name: putative homeodomain transcription factor 2
  Uniprot ID: Q8N3S3
  ENSP ID: ENSP00000403620
MASKVTDAIVWYQKKIGAYDQQIWEKSVEQREIKGLRNKPKKTAHVKPDLIDVDLVRGSAFAKAKPESPWTSLTRKGIVRVVFFPFFFRWWLQVTSKVIFFWLLVLYLLQVAAIVLFCSTSSPHSIPLTEVIGPIWLMLLLGTVHCQIVSTRTPKPPLSTGGKRRRKLRKAAHLEVHREGDGSSTTDNTQEGAVQNHGTSTSHSVGTVFRDLWHAAFFLSGSKKAKNSIDKSTETDNGYVSLDGKKTVKSGEDGIQNHEPQCETIRPEETAWNTGTLRNGPSKDTQRTITNVSDEVSSEEGPETGYSLRRHVDRTSEGVLRNRKSHHYKKHYPNEDAPKSGTSCSSRCSSSRQDSESARPESETEDVLWEDLLHCAECHSSCTSETDVENHQINPCVKKEYRDDPFHQSHLPWLHSSHPGLEKISAIVWEGNDCKKADMSVLEISGMIMNRVNSHIPGIGYQIFGNAVSLILGLTPFVFRLSQATDLEQLTAHSASELYVIAFGSNEDVIVLSMVIISFVVRVSLVWIFFFLLCVAERTYKQVGIM

SEQ ID NO: 70079 - protein, 352 aa, Homo sapiens
  Payload ID: 13921
  Gene Symbol: PHTF2
  Gene Name: putative homeodomain transcription factor 2
  Uniprot ID: Q8N3S3
  ENSP ID: ENSP00000408035
MASKVTDAIVWYQKKIGAYDQQIWEKSVEQREIKGLRNKPKKTAHVKPDLIDVDLVRGSAFAKAKPESPWTSLTRKGIVRVVFFPFFFRWWLQVTSKVIFFWLLVLYLLQVAAIVLFCSTSSPHSIPLTEVIGPIWLMLLLGTVHCQIVSTRTPKPPLSTGGKRRRKLRKAAHLEVHREGDGSSTTDNTQEGAVQNHGTSTSHSVGTVFRDLWHAAFFLSGSKKAKNSIDKSTETDNGYVSLDGKKTVKSGEDGIQNHEPQCETIRPEETAWNTGTLRNGPSKDTQRTITNVSDEVSSEEGPETGYSLRRHVDRTSEGVLRNRKSHHYKKHYPNEVYTLSLSVYIRIYFICY

SEQ ID NO: 70080 - protein, 1138 aa, Homo sapiens
  Payload ID: 13922
  Gene Symbol:
  Gene Name: Putative NPIP-like protein LOC613037  [Source:UniProtKB/Swiss-Prot
  Acc:A6NJU9]
  Uniprot ID: A6NJU9
  ENSP ID: ENSP00000429734
MVKLSIVLTPQFLSHDQGQLTKELQQHVKSVTCPCEYLRKVINTLADHHHRGTDFGGSPWLHVIIAFPTSYKVVITLWIVYLWVSLLKTIFWSRNGHDGSTDVQQRAWRSNRRRQEGLRSICMHTKKRVSSFRGNKIGLKDVITLRRHVETKVRAKIRKRKVTTKINHHDKINGKRKTARKQKMFQRAQELRRRAEDYHKCKIPPSARKALCNWVRMAAAEHRHSSGLPYWPYLTAETLKNRMGHQPPPPTQQHSITDNSLSLKTPPECVLTPLPPSADDNLKTPPECVLTPLPPSADDNLKTPPECLLTPLPPSADDNLKTPPECLLTPLPPSADDNLKTPPECLLTPLPPSAPPSAPPSADDNLKTRAECLLHPLPPSADDNLKTPSERQLTPLPPSAPPSADDNIKTPAERLRGPLPPSADDNLKTPSERQLTPLPPSAPPSADDNIKTPAERLRGPLPPSADDNLKTPSERQLTPLPPSAPPSADDNIKTPAERLRGPLPPSADDNLKTPSERQLTPLPPSAPPSADDNIKTPAERLRGPLPPSADDNLKTPSERQLTPLPPSAPPSADDNIKTPAFHPQRMIISRHLPSVSSLPFHPQLHSQQMIISRYLLSVCGFRFHHQPMIISRHLPSVSSLPFHPQLHPQQMIISRHLPSVCGGRFHPQRMIISRHLPSVSSLPFHPQLHPQQMIISRHLPSVCGGRFHPQRMIISRHLPSVSSLPFHPQLHPQQMIISRHLPSVCGERLRGPLPPSADDNLKTPSERQLTPLPPSAPPSADDNIKTPAERLRRPLPPSADDNLKTPSERQLTPLPPSAPPSADDNIKTPAERLRGPLPPSADDNLKTPSERQLTPLPPSAPPSADDNIKTPAERLRGPLPPSADDNLKTPSERQLTPLPPSAPPSADDNIKTPAERLRGPLPPSADDNLKTPSERQLTPLPPSAPPSADDNIKTPAERLRGPLPPSADDNLKTPSERQLTPLPPSAPPSADDNIKTPAERLRGPLPPSADDNLKTPPLATQEAEAEKPRKPKRQRAAEMEPPPEPKRRRVGDVEPSRKPKRRRAADVEPSSPKPKRRRVGDVEPSRKPKRRRAADVEPSSPEPKRRRVGDVEPSRKPKRRRAADVEPSSPEPKRRRLS

SEQ ID NO: 70081 - protein, 420 aa, Homo sapiens
  Payload ID: 13922
  Gene Symbol:
  Gene Name: Putative NPIP-like protein LOC613037  [Source:UniProtKB/Swiss-Prot
  Acc:A6NJU9]
  ENSP ID: ENSP00000444728
MAAAEHRHSSGLPYWPYLTAETLKNRMGHQPPPPTQQHSITDNSLSLKTPPECVLTPLPPSADDNLKTPPECVLTPLPPSADDNLKTPPECLLTPLPPSADDNLKTPPECLLTPLPPSADDNLKTPPECLLTPLPPSAPPSAPPSADDNLKTRAECLLHPLPPSADDNLKTPSERQLTPLPPSAPPSADDNIKTPAERLRGPLPPSADDNLKTPSERQLTPLPPSAPPSADDNIKTPAERLRGPLPPSADDNLKTPSERQLTPLPPSAPPSADDNIKTPAERLRGPLPPSADDNLKTPPLATQEAEAEKPRKPKRQRAAEMEPPPEPKRRRVGDVEPSRKPKRRRAADVEPSSPKPKRRRVGDVEPSRKPKRRRAADVEPSSPEPKRRRVGDVEPSRKPKRRRAADVEPSSPEPKRRRLS

SEQ ID NO: 70082 - protein, 68 aa, Homo sapiens; identical to SEQ ID NO: 58228
  Payload ID: 13922
  Gene Symbol:
  Gene Name: Putative NPIP-like protein LOC613037  [Source:UniProtKB/Swiss-Prot
  Acc:A6NJU9]
  ENSP ID: ENSP00000455364

SEQ ID NO: 70083 - protein, 84 aa, Homo sapiens
  Payload ID: 13922
  Gene Symbol:
  Gene Name: Putative NPIP-like protein LOC613037  [Source:UniProtKB/Swiss-Prot
  Acc:A6NJU9]
  ENSP ID: ENSP00000455945
MVKLSIVLTPQFLSHDQGQLTKELQQHVKSVTCPCEYLRKVINTLADHHHRGTDFGGSPWLHVIIAFPTSYKVVITLWIVYLWV

SEQ ID NO: 70084 - protein, 49 aa, Homo sapiens; identical to SEQ ID NO: 58201
  Payload ID: 13922
  Gene Symbol:
  Gene Name: Putative NPIP-like protein LOC613037  [Source:UniProtKB/Swiss-Prot
  Acc:A6NJU9]
  ENSP ID: ENSP00000456511

SEQ ID NO: 70085 - protein, 40 aa, Homo sapiens; identical to SEQ ID NO: 58208
  Payload ID: 13922
  Gene Symbol:
  Gene Name: Putative NPIP-like protein LOC613037  [Source:UniProtKB/Swiss-Prot
  Acc:A6NJU9]
  ENSP ID: ENSP00000457242

SEQ ID NO: 70086 - protein, 250 aa, Homo sapiens [sequence omitted]

SEQ ID NO: 70087 - protein, 397 aa, Homo sapiens
  Payload ID: 13923
  Gene Symbol:
  Gene Name: Putative NPIP-like protein LOC729978  [Source:UniProtKB/Swiss-Prot
  Acc:A6NJ64]
  Uniprot ID: A6NJ64
  ENSP ID: ENSP00000382101
MFCCLGYEWLSGGCKTWHSAWVINTLADHHHRGTDFGGSPWLRIIIAFPRSYKVVLTLWTVYLWLSFLKTIFQSENGHDVSTDVQQRARRSNRRRQEGLRSICMHTKKRVSSFPGNKIGLKDVITLRRHVETKGRAKIRKMKVTTKINHHDKINGKRKTAKKQKLSVKECEHAEKERQVSEAEENGKLDMKEIHTYMKMFQRAQELRRRAEDYHKCKIPPSARKALCNWVRMAAAEHRHSSGLPYWPYLTAETLKNRMGHQPPPPTQQHSITDNSLSLKTPPECLLTPLPPSADDNLKTPPECLLTPLPPSAPPSADDNLKTPPLATQEAEAEKPPKPKRWRAAEMESPPEPKRRRAAEVESPPEPKRRRAAEVEPSSPEPKRRRLSKLRTGHCTQA

SEQ ID NO: 70088 - protein, 35 aa, Homo sapiens
  Payload ID: 13923
  Gene Symbol:
  Gene Name: Putative NPIP-like protein LOC729978  [Source:UniProtKB/Swiss-Prot
  Acc:A6NJ64]
  ENSP ID: ENSP00000442069
MKVTTKINHHDKINGKRKTAKKQKLSVKECEHAEK

SEQ ID NO: 70089 - protein, 307 aa, Homo sapiens
  Payload ID: 13923
  Gene Symbol:
  Gene Name: Putative NPIP-like protein LOC729978  [Source:UniProtKB/Swiss-Prot
  Acc:A6NJ64]
  ENSP ID: ENSP00000448752
MFCCLGYEWLSGGCKTWHSAWVINTLADHHHRGTDFGGSPWLRIIIAFPRSYKVVLTLWTVYLWLSFLKTIFQSENGHDVSTDVQQRARRSNRRRQEGNKIGLKDVITLRRHVETKGRAKIRKMKVTTKINHHDKINGKRKTAKKQKLSVKECEHAEKERQVSEAEENGKLDMKEIHTYMKMFQRAQELRRRAEDYHKCKIPPSARKALCNWVRMAAAEHRHSSGLPYWPYLTAETLKNRMGHQPPPPTQQHSITDNSLSLKTPPECLLTPLPPSADDNLKTPPECLLTPLPPSAPPSADDNLKTPP

SEQ ID NO: 70090 - protein, 250 aa, Homo sapiens
  Payload ID: 13923
  Gene Symbol:
  Gene Name: Putative NPIP-like protein LOC729978  [Source:UniProtKB/Swiss-Prot
  Acc:A6NJ64]
  ENSP ID: ENSP00000478897
MRVLWMLFWLLFWLLLEFISHQSTCVINTLADHHHRGTDFGGSPWLRIIIAFPRSYKVVLTLWTVYLWLSFLKTIFQSENGHDVSTDVQQRARRSNRRRQEGNKIGLKDVITLRRHVETKGRAKIRKMKVTTKINHHDKINGKRKTAKKQKMFQRAQELRRRAEDYHKCKIPPSARKALCNWVSLLVFLAFGHSLPGQDMDTFFSLQLCAQALQREMAERKAAYKHHSPIPVGNRVAQKHLHPHPVGPLI

SEQ ID NO: 70091 - protein, 774 aa, Homo sapiens
  Payload ID: 13924
  Gene Symbol:
  Gene Name: Putative RNA exonuclease NEF-sp  [Source:UniProtKB/Swiss-Prot
  Acc:Q96IC2]
  Uniprot ID: Q96IC2
  ENSP ID: ENSP00000261377
MEPEREGTERHPRKVRESRQAPNKLVGAAEAMKAGWDLEESQPEAKKARLSTILFTDNCEVTHDQLCELLKYAVLGKSNVPKPSWCQLFHQNHLNNVVVFVLQGMSQLHFYRFYLEFGCLRKAFRHKFRLPPPSSDFLADVVGLQTEQRAGDLPKTMEGPLPSNAKAAINLQDDPIIQKYGSKKVGLTRCLLTKEEMRTFHFPLQGFPDCENFLLTKCNGSIADNSPLFGLDCEMCLTSKGRELTRISLVAEGGCCVMDELVKPENKILDYLTSFSGITKKILNPVTTKLKDVQRQLKALLPPDAVLVGHSLDLDLRALKMIHPYVIDTSLLYVREQGRRFKLKFLAKVILGKDIQCPDRLGHDATEDARTILELARYFLKHGPKKIAELNLEALANHQEIQAAGQEPKNTAEVLQHPNTSVLECLDSVGQKLLFLTRETDAGELPSSRNCQTIKCLSNKEVLEQARVEIPLFPFSIVQFSFKAFSPVLTEEMNKRMRIKWTEISTVYAGPFSKNCNLRALKRLFKSFGPVQSMTFVLETRQPHLCIQYEVLEAAQLAIESLDGILVDGICIKVQRPVTELTLDCDTLVNELEGDSENQGSIYLSGVSETFKEQLLQEPRLFLGLEAVILPKDLKSGKQKKYCFLKFKSFGSAQQALNILTGKDWKLKGRHALTPRHLHAWLRGLPPESTRLPGLRVVPPPFEQEALQTLKLDHPKIAAWRWSRKIGKLYNSLCPGTLCLILLPGTKSTHGSLSGLGLMGIKEEEESAGPGLCS

SEQ ID NO: 70092 - protein, 743 aa, Homo sapiens
  Payload ID: 13924
  Gene Symbol:
  Gene Name: Putative RNA exonuclease NEF-sp  [Source:UniProtKB/Swiss-Prot
  Acc:Q96IC2]
  ENSP ID: ENSP00000261378
MEPEREGTERHPRKVRESRQAPNKLVGAAEAMKAGWDLEESQPEAKKARLSTILFTDNCEVTHDQLCELLKYAVLGKSNVPKPSWCQLFHQNHLNNVVVFVLQGMSQLHFYRFYLEFGCLRKAFRHKFRLPPPSSDFLADVVGLQTEQRAGDLPKTMEGPLPSNAKAAINLQDDPIIQKYGSKKVGLTRCLLTKEEMRTFHFPLQGFPDCENFLLTKCNGSIADNSPLFGLDCEMCLTSKGRELTRISLVAEGGCCVMDELVKPENKILDYLTSFSGITKKILNPVTTKLKDVQRQLKALLPPDAVLVGHSLDLDLRALKMIHPYVIDTSLLYVREQGRRFKLKFLAKVILGKDIQCPDRLGHDATEDARTILELARYFLKHGPKKIAELNLEALANHQEIQAAGQEPKNTAEVLQHPNTSVLECLDSVGQKLLFLTRETDAGELPSSRNCQTIKCLSNKEVLEQARVEIPLFPFSIVQFSFKAFSPVLTEEMNKRMRIKWTEISTVYAGPFSKNCNLRALKRLFKSFGPVQSMTFVLETRQVQRPVTELTLDCDTLVNELEGDSENQGSIYLSGVSETFKEQLLQEPRLFLGLEAVILPKDLKSGKQKKYCFLKFKSFGSAQQALNILTGKDWKLKGRHALTPRHLHAWLRGLPPESTRLPGLRVVPPPFEQEALQTLKLDHPKIAAWRWSRKIGKLYNSLCPGTLCLILLPGTKSTHGSLSGLGLMGIKEEEESAGPGLCS

SEQ ID NO: 70093 - protein, 212 aa, Homo sapiens
  Payload ID: 13924
  Gene Symbol:
  Gene Name: Putative RNA exonuclease NEF-sp  [Source:UniProtKB/Swiss-Prot
  Acc:Q96IC2]
  ENSP ID: ENSP00000454262
MSQLHFYRFYLEFGCLRKAFRHKFRLPPPSSDFLADVVGLQTEQRAGDLPKTMEGPLPSNAKAAINLQDDPIIQKYGSKKVGLTRCLLTKEEMRTFHFPLQGFPDCENFLLTKCNGSIADNSPLFGLDCEMCLTSKGRELTRISLVAEGGCCVMDELVKPENKILDYLTSFSGITKKILNPVTTKLKDVQRQLKALLPPDAVLVGHSLDLDL

SEQ ID NO: 70094 - protein, 102 aa, Homo sapiens
  Payload ID: 13924
  Gene Symbol:
  Gene Name: Putative RNA exonuclease NEF-sp  [Source:UniProtKB/Swiss-Prot
  Acc:Q96IC2]
  ENSP ID: ENSP00000455233
MEPEREGTERHPRKVRESRQAPNKLVGAAEAMKAGWDLEESQPEAKKARLSTILFTDNCEVTHDQLCELLKYAVLGKSNVPKPSWCQLFHQNHLNNVVVFVL

SEQ ID NO: 70095 - protein, 143 aa, Homo sapiens
  Payload ID: 13924
  Gene Symbol:
  Gene Name: Putative RNA exonuclease NEF-sp  [Source:UniProtKB/Swiss-Prot
  Acc:Q96IC2]
  ENSP ID: ENSP00000455677
MDELVKPENKILDYLTSFSGITKKILNPVTTKLKDVQRQLKALLPPDAVLVGHSLDLDLRALKMIHPYVIDTSLLYVREQGRRFKLKFLAKVILGKDIQCPDRLGHDATEDARTILELARYFLKHGPKKIAELNLEALANHQE

SEQ ID NO: 70096 - protein, 206 aa, Homo sapiens
  Payload ID: 13924
  Gene Symbol:
  Gene Name: Putative RNA exonuclease NEF-sp  [Source:UniProtKB/Swiss-Prot
  Acc:Q96IC2]
  ENSP ID: ENSP00000455867
  MOD_RES (1)..(1): Any amino acid
XGPKKIAELNLEALANHQEIQAAGQEPKNTAEVLQHPNTSVLECLDSVGQKLLFLTRETDAGELPSSRNCQTIKCLSNKEMRIKWTEISTVYAGPFSKNCNLRALKRLFKSFGPVQSMTFVLETRQVQRPVTELTLDCDTLVNELEGDSENQGSIYLSGVSETFKEQLLQEPRLFLGLEAVILPKDLKSGKQKKYCFLKFKSFGSA

SEQ ID NO: 70097 - protein, 161 aa, Homo sapiens
  Payload ID: 13924
  Gene Symbol:
  Gene Name: Putative RNA exonuclease NEF-sp  [Source:UniProtKB/Swiss-Prot
  Acc:Q96IC2]
  ENSP ID: ENSP00000456030
MEPEREGTERHPRKVRESRQAPNKLVGAAEAMKAGWDLEESQPEAKKARLSTILFTDNCEVTHDQLCELLKYAVLGKSNVPKPSWCQLFHQNHLNNVVVFVLQGMSQLHFYRFYLEFGCLRKAFRHKFRLPPPSSDFLADVVGLQTEQRAGDLPKTMEGPL

SEQ ID NO: 70098 - protein, 88 aa, Homo sapiens
  Payload ID: 13924
  Gene Symbol:
  Gene Name: Putative RNA exonuclease NEF-sp  [Source:UniProtKB/Swiss-Prot
  Acc:Q96IC2]
  ENSP ID: ENSP00000456182
MEPEREGTERHPRKVRESRQAPNKLVGAAEAMKAGWDLEESQPEAKKARLSTILFTDNCEVTHDQLCELLKYAVLGKSNVPKPRAFTF

SEQ ID NO: 70099 - protein, 85 aa, Homo sapiens
  Payload ID: 13924
  Gene Symbol:
  Gene Name: Putative RNA exonuclease NEF-sp  [Source:UniProtKB/Swiss-Prot
  Acc:Q96IC2]
  ENSP ID: ENSP00000456227
MEPEREGTERHPRKVRESRQAPNKLVGAAEAMKAGWDLEESQPEAKKARLSTILFTDNCEVTHDQLCELLKYAVLGKSNVPKPRE

SEQ ID NO: 70100 - protein, 78 aa, Homo sapiens
  Payload ID: 13924
  Gene Symbol:
  Gene Name: Putative RNA exonuclease NEF-sp  [Source:UniProtKB/Swiss-Prot
  Acc:Q96IC2]
  ENSP ID: ENSP00000456643
MSQLHFYRFYLEFGCLRKAFRHKFRLPPPSSDFLADVVGLQTEQRAGDLPKTMEGPLPSNAKAAINLQDDPIIQKYGS

SEQ ID NO: 70101 - protein, 105 aa, Homo sapiens
  Payload ID: 13924
  Gene Symbol:
  Gene Name: Putative RNA exonuclease NEF-sp  [Source:UniProtKB/Swiss-Prot
  Acc:Q96IC2]
  ENSP ID: ENSP00000456666
MEPEREGTERHPRKVRESRQAPNKLVGAAEAMKAGWDLEESQPEAKKARLSTILFTDNCEVTHDQLCELLKYAVLGKSNVPKPSWCQLFHQNHLNNVVVFVLQGM

SEQ ID NO: 70102 - protein, 774 aa, Homo sapiens; identical to SEQ ID NO: 70091
  Payload ID: 13924
  Gene Symbol:
  Gene Name: Putative RNA exonuclease NEF-sp  [Source:UniProtKB/Swiss-Prot
  Acc:Q96IC2]
  Uniprot ID: Q96IC2
  ENSP ID: ENSP00000457616

SEQ ID NO: 70103 - protein, 172 aa, Homo sapiens
  Payload ID: 13924
  Gene Symbol:
  Gene Name: Putative RNA exonuclease NEF-sp  [Source:UniProtKB/Swiss-Prot
  Acc:Q96IC2]
  ENSP ID: ENSP00000457789
MEPEREGTERHPRKVRESRQAPNKLVGAAEAMKAGWDLEESQPEAKKARLSTILFTDNCEVTHDQLCELLKYAVLGKSNVPKPSWCQLFHQNHLNNVVVFVLQGMSQLHFYRFYLEFGCLRKAFRHKFRLPPPSSDFLADVVGLQTEQRAGDLPKTMEGPLPSNAKAAINLQ

SEQ ID NO: 70104 - protein, 144 aa, Homo sapiens
  Payload ID: 13924
  Gene Symbol:
  Gene Name: Putative RNA exonuclease NEF-sp  [Source:UniProtKB/Swiss-Prot
  Acc:Q96IC2]
  ENSP ID: ENSP00000458004
MSQLHFYRFYLEFGCLRKAFRHKFRLPPPSSDFLADVVGLQTEQRAGDLPKTMEGPLPSNAKAAINLQDDPIIQKYGSKKVGLTRCLLTKEEMRTFHFPLQGFPDCENFLLTKCNGSIADNSPLFGLDCEMCLTSKGRELTRIS

SEQ ID NO: 70105 - protein, 142 aa, Homo sapiens
  Payload ID: 13925
  Gene Symbol:
  Gene Name: Putative short transient receptor potential channel 2-like protein  [Source:UniProtKB/Swiss-Prot
  Acc:Q6ZNB5]
  Uniprot ID: Q6ZNB5
  ENSP ID: ENSP00000433080
MAPVKISHVVSFSSQDPKYPVENLLNPDSPRRPWLGCPQDKSGQLKVELQLERAVPTGYIDVGNCGCAFLQIDVGHSSWPLDRPFITLLPATTLMSLTDSKQGKNRSGVRMFKDGKEGKSRKDGGGLYEKQRCSTKEDCECY

SEQ ID NO: 70106 - protein, 207 aa, Homo sapiens
  Payload ID: 13925
  Gene Symbol:
  Gene Name: Putative short transient receptor potential channel 2-like protein  [Source:UniProtKB/Swiss-Prot
  Acc:Q6ZNB5]
  ENSP ID: ENSP00000434508
MYFPGCSTCHLASVGLIFKNSSFLKPQNAFLCYGRRKSSSRGQKAKDPKYPVENLLNPDSPRRPWLGCPQDKSGQLKVELQLERAVPTGYIDVGNCGCAFLQIDVGHSSWPLDRPFITLLPATTLMSLTDSKQGKNRSGVRMFKDVDFLAPASGELWDRLRLTCSRPFTRHQSFGLAFLRVCSSLDSLDDSVVGPSALLSSVLNKIR

SEQ ID NO: 70107 - protein, 134 aa, Homo sapiens
  Payload ID: 13925
  Gene Symbol:
  Gene Name: Putative short transient receptor potential channel 2-like protein  [Source:UniProtKB/Swiss-Prot
  Acc:Q6ZNB5]
  ENSP ID: ENSP00000435060
MAPVKISHVVSFSSQDPKYPVENLLNPDSPRRPWLGCPQDKSGQLKVELQLERAVPTGYIDVGNCGCAFLQIDVGHSSWPLDRPFITLLPATTLMSLTDSKQGKNRSGVRMFKDGVVAHACNPSTLGDWDKWII

SEQ ID NO: 70108 - protein, 88 aa, Homo sapiens
  Payload ID: 13925
  Gene Symbol:
  Gene Name: Putative short transient receptor potential channel 2-like protein  [Source:UniProtKB/Swiss-Prot
  Acc:Q6ZNB5]
  ENSP ID: ENSP00000435620
MAPVKISHVVSFSSQDPKYPVENLLNPDSPRRPWLGCPQDKSGQLKVELQLERAVPTGYIDVGNCGCAFLQIDVGHSSWPLDRPFITL

SEQ ID NO: 70109 - protein, 49 aa, Homo sapiens
  Payload ID: 13925
  Gene Symbol:
  Gene Name: Putative short transient receptor potential channel 2-like protein  [Source:UniProtKB/Swiss-Prot
  Acc:Q6ZNB5]
  ENSP ID: ENSP00000435720
MAPVKISHVVSFSSQDPKYPVENLLNPDSPRRPWLGCPQDKSGQLKVEL

SEQ ID NO: 70110 - protein, 82 aa, Homo sapiens
  Payload ID: 13925
  Gene Symbol:
  Gene Name: Putative short transient receptor potential channel 2-like protein  [Source:UniProtKB/Swiss-Prot
  Acc:Q6ZNB5]
  ENSP ID: ENSP00000436412
MAPVKISHVVSFSSQDPKYPVENLLNPDSPRRPWLGCPQDKSGQLKVELQLERAVPTGYIDVGNCGCAFLQIDVGHSSWPLD

SEQ ID NO: 70111 - protein, 141 aa, Homo sapiens
  Payload ID: 13925
  Gene Symbol:
  Gene Name: Putative short transient receptor potential channel 2-like protein  [Source:UniProtKB/Swiss-Prot
  Acc:Q6ZNB5]
  ENSP ID: ENSP00000436725
QDKSGQLKVELQLERAVPTGYIDVGNCGCAFLQIDVGHSSWPLDRPFITLLPATTLMSLTDSKQGKNRSGVRMFKDVDFLAPASGELWDRLRLTCSRPFTRHQSFGLAFLRVCSSLDSLDDSVVGPSALLSSVLNKVGEMF

SEQ ID NO: 70112 - protein, 341 aa, Homo sapiens
  Payload ID: 13926
  Gene Symbol:
  Gene Name: Putative UPF0607 protein ENSP00000381418  [Source:UniProtKB/Swiss-Prot
  Acc:A8MU76]
  Uniprot ID: A8MU76
  ENSP ID: ENSP00000482925
MRLCLSPQNTGTPQRVLPPVVWSPPSRKKPALSARNSTMFGHLRPLRIPRLRGKFNLQLPSFDEQVIPARLPKTEMRAEEPKEATEVKDQVETQGQEDNKRGPCSNGEAASTSRPLETQGNLTSSWYNPRTLEGNVHLKSLTENNQTDKAQVHAVSFYSKGHGVASSHSPAGGILPFGKPDPLPTVLPAPVPGCSLWPEKGALKVLGKDHLPSSPGLLMVGEDMQPKDPAALGSSRSSPPRAAGHSSRKRKLSGPLLQLQLTPPLQLRWDRDEGPPPAKLPCLSPEALLVGQASQREGRLQQGNMHKNMRVLSRTSKFRRLRELLRRRKERRQGRRGGPRL

SEQ ID NO: 70113 - protein, 501 aa, Homo sapiens
  Payload ID: 13927
  Gene Symbol: PWP1
  Gene Name: PWP1 homolog, endonuclein
  Uniprot ID: Q13610
  ENSP ID: ENSP00000387365
MNRSRQVTCVAWVRCGVAKETPDKVELSKEEVKRLIAEAKEKLQEEGGGSDEEETGSPSEDGMQSARTQARPREPLEDGDPEDDRTLDDDELAEYDLDKYDEEGDPDAETLGESLLGLTVYGSNDQDPYVTLKDTEQYEREDFLIKPSDNLIVCGRAEQDQCNLEVHVYNQEEDSFYVHHDILLSAYPLSVEWLNFDPSPDDSTGNYIAVGNMTPVIEVWDLDIVDSLEPVFTLGSKLSKKKKKKGKKSSSAEGHTDAVLDLSWNKLIRNVLASASADNTVILWDMSLGKPAASLAVHTDKVQTLQFHPFEAQTLISGSYDKSVALYDCRSPDESHRMWRFSGQIERVTWNHFSPCHFLASTDDGFVYNLDARSDKPIFTLNAHNDEISGLDLSSQIKGCLVTASADKYVKIWDILGDRPSLVHSRDMKMGVLFCSSCCPDLPFIYAFGGQKEGLRVWDISTVSSVNEAFGRRERLVLGSARNSSISGPFGSRSSDTPMES

SEQ ID NO: 70114 - protein, 439 aa, Homo sapiens
  Payload ID: 13927
  Gene Symbol: PWP1
  Gene Name: PWP1 homolog, endonuclein
  ENSP ID: ENSP00000445249
MQSARTQARPREPLEDGDPEDDRTLDDDELAEYDLDKYDEEGDPDAETLGESLLGLTVYGSNDQDPYVTLKDTEQYEREDFLIKPSDNLIVCGRAEQDQCNLEVHVYNQEEDSFYVHHDILLSAYPLSVEWLNFDPSPDDSTGNYIAVGNMTPVIEVWDLDIVDSLEPVFTLGSKLSKKKKKKGKKSSSAEGHTDAVLDLSWNKLIRNVLASASADNTVILWDMSLGKPAASLAVHTDKVQTLQFHPFEAQTLISGSYDKSVALYDCRSPDESHRMWRFSGQIERVTWNHFSPCHFLASTDDGFVYNLDARSDKPIFTLNAHNDEISGLDLSSQIKGCLVTASADKYVKIWDILGDRPSLVHSRDMKMGVLFCSSCCPDLPFIYAFGGQKEGLRVWDISTVSSVNEAFGRRERLVLGSARNSSISGPFGSRSSDTPMES

SEQ ID NO: 70115 - protein, 98 aa, Homo sapiens
  Payload ID: 13927
  Gene Symbol: PWP1
  Gene Name: PWP1 homolog, endonuclein
  ENSP ID: ENSP00000447770
MQSARTQARPREPLEDGDPEDDRTLDDDELAEYDLDKYDEEGDPDAETLGESLLGLTVYGSNDQDPYVTLKDTEQYEREDFLIKPSDNLIVCGRAEQD

SEQ ID NO: 70116 - protein, 147 aa, Homo sapiens
  Payload ID: 13927
  Gene Symbol: PWP1
  Gene Name: PWP1 homolog, endonuclein
  Uniprot ID: Q13610
  ENSP ID: ENSP00000448227
MNRSRQVTCVAWVRCGVAKETPDKVELSKEEVKRLIAEAKEKLQEEGGGSDEEETGSPSEDGMQSARTQARPREPLEDGDPEDDRTLDDDELAEYDLDKYDEEGDPDAETLGESLLGLTVYGSNDQDPYVTLKDTSMTFFSSHLGTI

SEQ ID NO: 70117 - protein, 919 aa, Homo sapiens [sequence omitted]

SEQ ID NO: 70118 - protein, 186 aa, Homo sapiens
  Payload ID: 13928
  Gene Symbol: PWP2
  Gene Name: PWP2 periodic tryptophan protein homolog (yeast)
  ENSP ID: ENSP00000411749
MKFAYRFSNLLGTVYRRGNLNFTCDGNSVISPVGNRVTVFDLKNNKSDTLPLATRYNVKCVGLSPDGRLAIIVDEGSLLSQRVTLPRCIMPLGRSGSSTPSFWTRPILGPTMRPPASTGRMTPGALWLGAKTCPPGCSEPSAGTTSSTMHWGDIRMPSWPASLNPTAWTCTHSARTECCACGSVTR

SEQ ID NO: 70119 - protein, 755 aa, Homo sapiens
  Payload ID: 13929
  Gene Symbol: PWWP2A
  Gene Name: PWWP domain containing 2A
  Uniprot ID: Q96N64
  ENSP ID: ENSP00000305151
MAAVAAEAAATAASPGEGGAGEAEPEMEPIPGSEAGTDPLPVTATEASVPDGETDGQQSAPQADEPPLPPPPPPPGELARSPEAVGPELEAEEKLSVRVAESAAAAPQGGPELPPSPASPPEQPPAPEEREEPPLPQPVAPALVPPAGGDSTVSQLIPGSEVRVTLDHIIEDALVVSFRFGEKLFSGVLMDLSKRFGPHGIPVTVFPKREYKDKPEAMPLQSNTFQEGTEVKCEANGAVPDDPSPVPHPELSLAESLWTSKPPPLFHEGAPYPPPLFIRDTYNQSIPQPPPRKIKRPKRKMYREEPTSIMNAIKLRPRQVLCDKCKNSVVAEKKEIRKGSSATDSSKYEDKKRRNESVTTVNKKLKTDHKVDGKNQNESQKRNAVVKVSNIAHSRGRVVKVSAQANTSKAQLSTKKVLQSKNMDHAKAREVLKIAKEKAQKKQNETSTSKNAHSKVHFTRRYQNPSSGSLPPRVRLKPQRYRNEENDSSLKTGLEKMRSGKMAPKPQSRCTSTRSAGEAPSENQSPSKGPEEASSEVQDTNEVHVPGDQDEPQTLGKKGSKNNISVYMTLNQKKSDSSSASVCSIDSTDDLKSSNSECSSSESFDFPPGSMHAPSTSSTSSSSKEEKKLSNSLKMKVFSKNVSKCVTPDGRTICVGDIVWAKIYGFPWWPARILTITVSRKDNGLLVRQEARISWFGSPTTSFLALSQLSPFLENFQSRFNKKRKGLYRKAITEAAKAAKQLTPEVRALLTQFET

SEQ ID NO: 70120 - protein, 560 aa, Homo sapiens
  Payload ID: 13929
  Gene Symbol: PWWP2A
  Gene Name: PWWP domain containing 2A
  Uniprot ID: Q96N64
  ENSP ID: ENSP00000390462
MAAVAAEAAATAASPGEGGAGEAEPEMEPIPGSEAGTDPLPVTATEASVPDGETDGQQSAPQADEPPLPPPPPPPGELARSPEAVGPELEAEEKLSVRVAESAAAAPQGGPELPPSPASPPEQPPAPEEREEPPLPQPVAPALVPPAGGDSTVSQLIPGSEVRVTLDHIIEDALVVSFRFGEKLFSGVLMDLSKRFGPHGIPVTVFPKREYKDKPEAMPLQSNTFQEGTEVKCEANGAVPDDPSPVPHPELSLAESLWTSKPPPLFHEGAPYPPPLFIRDTYNQSIPQPPPRKIKRPKRKMYREEPTSIMNAIKLRPRQVLCDKCKNSVVAEKKEIRKGSSATDSSKYEDKKRRNESVTTVNKKLKTDHKVDGKNQNESQKRNAVVKVSNIAHSRGRVVKVSAQANTSKAQLSTKKVLQSKNMDHAKAREVLKIAKEKAQKKQNETSTSKNAHSKVHFTRRYQNPSSGSLPPRVRLKPQRYRNEENDSSLKTGLEKMRSGKMAPKPQSRCTSTRSAGLNKWQLLHQTVTSPAAPLQCLTDHCGFRLGALKLTVKRAAQRH

SEQ ID NO: 70121 - protein, 520 aa, Homo sapiens
  Payload ID: 13929
  Gene Symbol: PWWP2A
  Gene Name: PWWP domain containing 2A
  Uniprot ID: Q96N64
  ENSP ID: ENSP00000428143
MAAVAAEAAATAASPGEGGAGEAEPEMEPIPGSEAGTDPLPVTATEASVPDGETDGQQSAPQADEPPLPPPPPPPGELARSPEAVGPELEAEEKLSVRVAESAAAAPQGGPELPPSPASPPEQPPAPEEREEPPLPQPVAPALVPPAGGDSTVSQLIPGSEVRVTLDHIIEDALVVSFRFGEKLFSGVLMDLSKRFGPHGIPVTVFPKREYKDKPEAMPLQSNTFQEGTEVKCEANGAVPDDPSPVPHPELSLAESLWTSKPPPLFHEGAPYPPPLFIRDTYNQSIPQPPPRKIKRPKRKMYREEPTSIMNAIKLRPRQVLCDKCKNSVVAEKKEIRKGSSATDSSKYEDKKRRNESVTTVNKKLKTDHKVDGKNQNESQKRNAVVKVSNIAHSRGRVVKVSAQANTSKAQLSTKKVLQSKNMDHAKAREVLKIAKEKAQKKQNETSTSKNAHSKVHFTRRYQNPSSGSLPPRVRLKPQRYRNEENDSSLKTGLEKMRSGKMAPKPQSRCTSTRSAAQRH

SEQ ID NO: 70122 - protein, 35 aa, Homo sapiens
  Payload ID: 13929
  Gene Symbol: PWWP2A
  Gene Name: PWWP domain containing 2A
  ENSP ID: ENSP00000428636
  MOD_RES (1)..(1): Any amino acid
XKTGLEKMRSGKMAPKPQSRCTSTRSAEFIDQEAD

SEQ ID NO: 70123 - protein, 69 aa, Homo sapiens
  Payload ID: 13929
  Gene Symbol: PWWP2A
  Gene Name: PWWP domain containing 2A
  ENSP ID: ENSP00000430696
VHFTRRYQNPSSGSLPPRVRLKPQRYRNEENDSSLKTGLEKMRSGKMAPKPQSRCTSTRSAEFIDQEAD

SEQ ID NO: 70124 - protein, 49 aa, Homo sapiens
  Payload ID: 13929
  Gene Symbol: PWWP2A
  Gene Name: PWWP domain containing 2A
  ENSP ID: ENSP00000430703
SGVLMDLSKRDHETYGAIALLLVGKIYSHSGEAVWAPWYPCDSISQKGI

SEQ ID NO: 70125 - protein, 590 aa, Homo sapiens
  Payload ID: 13930
  Gene Symbol: PWWP2B
  Gene Name: PWWP domain containing 2B
  Uniprot ID: Q6NUJ5
  ENSP ID: ENSP00000306324
MEPRAGCRLPVRVEQVVNGALVVTVSCGERSFAGILLDCTKKSGLFGLPPLAPLPQVDESPVNDSHGRAPEEGDAEVMQLGSSSPPPARGVQPPETTRPEPPPPLVPPLPAGSLPPYPPYFEGAPFPHPLWLRDTYKLWVPQPPPRTIKRTRRRLSRNRDPGRLILSTIRLRPRQVLCEKCKSTLSPPEASPGPPAAPRARRRLGSGPDRELRKPEEPENGEPTAAATARRSKRERREEDRAPAEQVPRSPVIKISYSTPQGKGEVVKIPSRVHGSLEPFRPQQAPQDDGSQDPEVLDRESRDRPSCAPSASIPKLKLTRPVPAGADLPPPKIRLKPHRLGDSEHEPVYRAELVGELNGYLRDSSPAPCADGPAGGLADLSSGSSGEDDDFKSCPQGPQGREGLAFLVSCPEGRADCASESACSSDSLDEARSSGSEGTPADTGDLSPGHGASAPSVSREARQTVPPLTVRLHTQSVSECITEDGRTVAVGDIVWGKIHGFPWWPARVLDISLGQKEDGEPSWREAKVSWFGSPTTSFLSISKLSPFSEFFKLRFNRKKKGMYRKAITEAANAARHVAPEIRELLTQFET

SEQ ID NO: 70126 - protein, 499 aa, Homo sapiens
  Payload ID: 13930
  Gene Symbol: PWWP2B
  Gene Name: PWWP domain containing 2B
  Uniprot ID: Q6NUJ5
  ENSP ID: ENSP00000486501
MEPRAGCRLPVRVEQVVNGALVVTVSCGERSFAGILLDCTKKSGLFGLPPLAPLPQVDESPVNDSHGRAPEEGDAEVMQLGSSSPPPARGVQPPETTRPEPPPPLVPPLPAGSLPPYPPYFEGAPFPHPLWLRDTYKLWVPQPPPRTIKRTRRRLSRNRDPGRLILSTIRLRPRQVLCEKCKSTLSPPEASPGPPAAPRARRRLGSGPDRELRKPEEPENGEPTAAATARRSKRERREEDRAPAEQVPRSPVIKISYSTPQGKGEVVKIPSRVHGSLEPFRPQQAPQDDGSQDPEVLDRESRDRPSCAPSASIPKLKLTRPVPAGADLPPPKIRLKPHRLGDSEHEPVYRAELVGELNGYLRDSSPAPCADGPAGGLADLSSGSSGEDDDFKSCPQGPQGREGLAFLVSCPEGRADCASESACSSDSLDEARSSGSEGTPADTGDLSPGHGASAPSVSREARQTVPPLTVRLHTQSVSECITEDGRTVAVGDIVWGHRR

SEQ ID NO: 70127 - protein, 179 aa, Homo sapiens
  Payload ID: 13931
  Gene Symbol: PXDC1
  Gene Name: PX domain containing 1
  ENSP ID: ENSP00000369630
  MOD_RES (1)..(1): Any amino acid
XQSRRIEPVMGRLLLCASHGEIEKHPSLHASSYGLVAIKEAHDIETRLNEVEKLLKTIISMPCKYSRSEVVLTFFERSPLDQVLKNDNVHKIQPSFQSPVKISEIMRSNGFCLANTETIVIDHSIPNGRDQQLGVDPTEHLFENGSEFPSELEDGDDPAAYVTNLSYYHLVPFETDIWD

SEQ ID NO: 70128 - protein, 231 aa, Homo sapiens
  Payload ID: 13931
  Gene Symbol: PXDC1
  Gene Name: PX domain containing 1
  Uniprot ID: Q5TGL8
  ENSP ID: ENSP00000369636
MASAVFEGTSLVNMFVRGCWVNGIRRLIVSRRGDEEEFFEIRTEWSDRSVLYLHRSLADLGRLWQRLRDAFPEDRSELAQGPLRQGLVAIKEAHDIETRLNEVEKLLKTIISMPCKYSRSEVVLTFFERSPLDQVLKNDNVHKIQPSFQSPVKISEIMRSNGFCLANTETIVIDHSIPNGRDQQLGVDPTEHLFENGSEFPSELEDGDDPAAYVTNLSYYHLVPFETDIWD

SEQ ID NO: 70129 - protein, 557 aa, Homo sapiens
  Payload ID: 13932
  Gene Symbol: PXK
  Gene Name: PX domain containing serine/threonine kinase
  ENSP ID: ENSP00000305045
MAFMEKPPAGKVLLDDTVPLTAAIEASQSLQSHTEYIIRVQRGISVENSWQIVRRYSDFDLLNNSLQIAGLSLPLPPKKLIGNMDREFIAERQKGLQNYLNVITTNHILSNCELVKKFLDPNNYSANYTEIALQQVSMFFRSEPKWEVVEPLKDIGWRIRKKYFLMKIKNQPKERLVLSWADLGPDKYLSDKDFQCLIKLLPSCLHPYIYRVTFATANESSALLIRMFNEKGTLKDLIYKAKPKDPFLKKYCNPKKIQGLELQQIKTYGRQILEVLKFLHDKGFPYGHLHASNVMLDGDTCRLLDLENSLLGLPSFYRSYFSQFRKINTLESVDVHCFGHLLYEMTYGRPPDSVPVDSFPPAPSMAVVAVLESTLSCEACKNGMPTISRLLQMPLFSDVLLTTSEKPQFKIPTKLKEALRIAKECIEKRLIEEQKQIHQHRRLTRAQSHHGSEEERKKRKILARKKSKRSALENSEEHSAKYSNSNNSGISALPPPPPPPPPPAAPLPPASTEAPAQLSSQAVNGMSRGALLSSIQNFQKGTLRKAKTCDHSAPKIG

SEQ ID NO: 70130 - protein, 578 aa, Homo sapiens
  Payload ID: 13932
  Gene Symbol: PXK
  Gene Name: PX domain containing serine/threonine kinase
  Uniprot ID: Q7Z7A4
  ENSP ID: ENSP00000348472
MAFMEKPPAGKVLLDDTVPLTAAIEASQSLQSHTEYIIRVQRGISVENSWQIVRRYSDFDLLNNSLQIAGLSLPLPPKKLIGNMDREFIAERQKGLQNYLNVITTNHILSNCELVKKFLDPNNYSANYTEIALQQVSMFFRSEPKWEVVEPLKDIGWRIRKKYFLMKIKNQPKERLVLSWADLGPDKYLSDKDFQCLIKLLPSCLHPYIYRVTFATANESSALLIRMFNEKGTLKDLIYKAKPKDPFLKKYCNPKKIQGLELQQIKTYGRQILEVLKFLHDKGFPYGHLHASNVMLDGDTCRLLDLENSLLGLPSFYRSYFSQFRKINTLESVDVHCFGHLLYEMTYGRPPDSVPVDSFPPAPSMAVVAVLESTLSCEACKNGMPTISRLLQMPLFSDVLLTTSEKPQFKIPTKLKEALRIAKECIEKRLIEEQKQIHQHRRLTRAQSHHGSEEERKKRKILARKKSKRSALENSEEHSAKYSNSNNSAGSGASSPLTSPSSPTPPSTSGISALPPPPPPPPPPAAPLPPASTEAPAQLSSQAVNGMSRGALLSSIQNFQKGTLRKAKTCDHSAPKIG

SEQ ID NO: 70131 - protein, 498 aa, Homo sapiens
  Payload ID: 13932
  Gene Symbol: PXK
  Gene Name: PX domain containing serine/threonine kinase
  ENSP ID: ENSP00000373221
MAFMEKPPAGKVLLDDTVPLTAAIEASQSLQSHTIVRRYSDFDLLNNSLQIAGLSLPLPPKKLIGNMDREFIAERQKGLQNYLNVITTNHILSNCELVKKFLDPNNYSANYTEIALQQVSMFFRSEPKWEVVEPLKDIGWRIRKKYFLMKIKNQPKERLVLSWADLGPDKYLSDKDFQCLIKLLPSCLHPYIYRVTFATANESSALLIRMFNEKGTLKDLIYKAKPKDPFLKKYCNPKKIQGLELQQIKTYGRQILEVLKFLHDKGFPYGHLHASNVMLDGDTCRLLDLENSLLGLPSFYRSYFSQFRKINTLESVDVHCFGHLLYEMTYGRPPDSVPVDSFPPAPSMAVVAVLESTLSCEACKNGMPTISRLLQMPLFSDVLLTTSEKPQFKIPTKLKEALRIAKECIEKRLIEEQKQIHQHRRLTRAQSHHGSEEERKKRKILARKKSKRSALENSEEHSAKYSNSNNSAGSGASSPLTSPSSPTPPSTSVEHAPF

SEQ ID NO: 70132 - protein, 515 aa, Homo sapiens
  Payload ID: 13932
  Gene Symbol: PXK
  Gene Name: PX domain containing serine/threonine kinase
  Uniprot ID: Q7Z7A4
  ENSP ID: ENSP00000373222
MAFMEKPPAGKVLLDDTVPLTAAIEASQSLQSHTEYIIRVQRGISVENSWQIVRRYSDFDLLNNSLQIAGLSLPLPPKKLIGNMDREFIAERQKGLQNYLNVITTNHILSNCELVKKFLDPNNYSANYTEIALQQVSMFFRSEPKWEVVEPLKDIGWRIRKKYFLMKIKNQPKERLVLSWADLGPDKYLSDKDFQCLIKLLPSCLHPYIYRVTFATANESSALLIRMFNEKGTLKDLIYKAKPKDPFLKKYCNPKKIQGLELQQIKTYGRQILEVLKFLHDKGFPYGHLHASNVMLDGDTCRLLDLENSLLGLPSFYRSYFSQFRKINTLESVDVHCFGHLLYEMTYGRPPDSVPVDSFPPAPSMAVVAVLESTLSCEACKNGMPTISRLLQMPLFSDVLLTTSEKPQFKIPTKLKEALRIAKECIEKRLIEEQKQIHQHRRLTRAQSHHGSEEERKKRKILARKKSKRSALENSEEHSAKYSNSNNSAGSGASSPLTSPSSPTPPSTSVEHAPF

SEQ ID NO: 70133 - protein, 56 aa, Homo sapiens
  Payload ID: 13932
  Gene Symbol: PXK
  Gene Name: PX domain containing serine/threonine kinase
  ENSP ID: ENSP00000417167
MAFMEKPPAGKVLLDDTVPLTAAIEASQSLQSHTRLPCNRFPCSSDQNQSGRWWNL

SEQ ID NO: 70134 - protein, 482 aa, Homo sapiens
  Payload ID: 13932
  Gene Symbol: PXK
  Gene Name: PX domain containing serine/threonine kinase
  ENSP ID: ENSP00000417903
MAFMEKPPAGKVLLDDTVPLTAAIEASQSLQSHTIAGLSLPLPPKKLIGNMDREFIAERQKGLQNYLNVITTNHILSNCELVKKFLDPNNYSANYTEIALQQVSMFFRSEPKWEVVEPLKDIGWRIRKKYFLMKIKNQPKERLVLSWADLGPDKYLSDKDFQCLIKLLPSCLHPYIYRVTFATANESSALLIRMFNEKGTLKDLIYKAKPKDPFLKKYCNPKKIQGLELQQIKTYGRQILEVLKFLHDKGFPYGHLHASNVMLDGDTCRLLDLENSLLGLPSFYRSYFSQFRKINTLESVDVHCFGHLLYEMTYGRPPDSVPVDSFPPAPSMAVVAVLESTLSCEACKNGMPTISRLLQMPLFSDVLLTTSEKPQFKIPTKLKEALRIAKECIEKRLIEEQKQIHQHRRLTRAQSHHGSEEERKKRKILARKKSKRSALENSEEHSAKYSNSNNSAGSGASSPLTSPSSPTPPSTSVEHAPF

SEQ ID NO: 70135 - protein, 515 aa, Homo sapiens; identical to SEQ ID NO: 70132
  Payload ID: 13932
  Gene Symbol: PXK
  Gene Name: PX domain containing serine/threonine kinase
  Uniprot ID: Q7Z7A4
  ENSP ID: ENSP00000417915

SEQ ID NO: 70136 - protein, 312 aa, Homo sapiens
  Payload ID: 13932
  Gene Symbol: PXK
  Gene Name: PX domain containing serine/threonine kinase
  ENSP ID: ENSP00000418202
  MOD_RES (1)..(1): Any amino acid
XFLKKYCNPKKIQGLELQQIKTYGRQILEVLKFLHDKGFPYGHLHASNVMLDGDTCRLLDLENSLLGLPSFYRSYFSQFRKINTLESVDVHCFGHLLYEMTYGRPPDSVPVDSFPPAPSMAVVAVLESTLSCEACKNGMPTISRLLQMPLFSDVLLTTSEKPQFKIPTKLKEALRIAKECIEKRLIEEQKQIHQHRRLTRAQSHHGSEEERKKRKILARKKSKRSALENSEEHSAKYSNSNNSGISALPPPPPPPPPPAAPLPPASTEAPAQLSSQAVNGMSRGALLSSIQNFQKGTLRKAKTCDHSAPKIG

SEQ ID NO: 70137 - protein, 85 aa, Homo sapiens
  Payload ID: 13932
  Gene Symbol: PXK
  Gene Name: PX domain containing serine/threonine kinase
  ENSP ID: ENSP00000418376
  MOD_RES (1)..(1): Any amino acid
XLIEEQKQIHQHRRLTRAQSHHGSEEERKKRKILARKKSKRSALENSEEHSAKYSNSNNSGSGASSPLTSPSSPTPPSTSEHAPF

SEQ ID NO: 70138 - protein, 113 aa, Homo sapiens
  Payload ID: 13932
  Gene Symbol: PXK
  Gene Name: PX domain containing serine/threonine kinase
  ENSP ID: ENSP00000418831
MKCDSRAYLLGQQSVSGWGLQPRFQEYIIRVQRGISVENSWQIVRRYSDFDLLNNSLQIAGLSLPLPPKKLIGNMDREFIAERQKGLQNYLNVITTNHILSNCELVKKFLDPN

SEQ ID NO: 70139 - protein, 50 aa, Homo sapiens
  Payload ID: 13932
  Gene Symbol: PXK
  Gene Name: PX domain containing serine/threonine kinase
  ENSP ID: ENSP00000418836
KKSKRSALENSEEHSAKYSNSNNSGSGASSPLTSPSSPTPPSTSVEHAPF

SEQ ID NO: 70140 - protein, 563 aa, Homo sapiens
  Payload ID: 13932
  Gene Symbol: PXK
  Gene Name: PX domain containing serine/threonine kinase
  ENSP ID: ENSP00000419049
MAFMEKPPAGKVLLDDTVPLTAAIEASQSLQSHTIVRRYSDFDLLNNSLQIAGLSLPLPPKKLIGNMDREFIAERQKGLQNYLNVITTNHILSNCELVKKFLDPNNYSANYTEIALQQVSMFFRSEPKWEVVEPLKDIGWRIRKKYFLMKIKNQPKERLVLSWADLGPDKYLSDKDFQCLIKLLPSCLHPYIYRVTFATANESSALLIRMFNEKGTLKDLIYKAKPKDPFLKKYCNPKKIQGLELQQIKTYGRQILEVLKFLHDKGFPYGHLHASNVMLDGDTCRLLDLENSLLGLPSFYRSYFSQFRKINTLESVDVHCFGHLLYEMTYGRPPDSVPVDSFPPAPSMAVVAVLESTLSCEACKNGMPTISRLLQMPLFSDVLLTTSEKPQFKIPTKLKEALRIAKECIEKRLIEEQKQIHQHRRLTRAQSHHGSEEERKKRKILARKKSKRSALENSEEHSAKYSNSNNSGSGASSPLTSPSSPTPPSTSAALGLSKRCKERDICITSTSSTSTTTSSSLASCEHRGTCPALVSGCEWHEPRGLAQLHPEFPKRNFEESQNL

SEQ ID NO: 70141 - protein, 141 aa, Homo sapiens
  Payload ID: 13932
  Gene Symbol: PXK
  Gene Name: PX domain containing serine/threonine kinase
  ENSP ID: ENSP00000420403
MAFMEKPPAGKVLLDDTVPLTAAIEASQSLQSHTEYIIRVQRGISVENSWQIVRRYSDFDLLNNSLQIAGLSLPLPPKKLIGNMDREFIAERQKGLQNYLNVITTNHILSNCELVKKFLDPNNYSANYTAPLHLSGYLCHS

SEQ ID NO: 70142 - protein, 203 aa, Homo sapiens
  Payload ID: 13932
  Gene Symbol: PXK
  Gene Name: PX domain containing serine/threonine kinase
  ENSP ID: ENSP00000476179
NSLLGLPSFYRSYFSQFRKINTLESVDVHCFGHLLYEMTYGRPPDSVPVDSFPPAPSMAVVAVLESTLSCEACKNGMPTISRLLQMPLFSDVLLTTSEKPQFKIPTKLKEALRIAKECIEKRLIEEQKQIHQHRRLTRAQSHHGSEEERKKRKILARKKSKRSALENSEEHSAKYSNSNNSAGSGASSPLTSPSSPTPPSTSG

SEQ ID NO: 70143 - protein, 89 aa, Homo sapiens
  Payload ID: 13933
  Gene Symbol: PYDC1
  Gene Name: PYD (pyrin domain) containing 1
  Uniprot ID: Q8WXC3
  ENSP ID: ENSP00000304336
MGTKREAILKVLENLTPEELKKFKMKLGTVPLREGFERIPRGALGQLDIVDLTDKLVASYYEDYAAELVVAVLRDMRMLEEAARLQRAA

SEQ ID NO: 70144 - protein, 195 aa, Homo sapiens
  Payload ID: 13934
  Gene Symbol: PYCARD
  Gene Name: PYD and CARD domain containing
  Uniprot ID: Q9ULZ3
  ENSP ID: ENSP00000247470
MGRARDAILDALENLTAEELKKFKLKLLSVPLREGYGRIPRGALLSMDALDLTDKLVSFYLETYGAELTANVLRDMGLQEMAGQLQAATHQGSGAAPAGIQAPPQSAAKPGLHFIDQHRAALIARVTNVEWLLDALYGKVLTDEQYQAVRAEPTNPSKMRKLFSFTPAWNWTCKDLLLQALRESQSYLVEDLERS

SEQ ID NO: 70145 - protein, 176 aa, Homo sapiens
  Payload ID: 13934
  Gene Symbol: PYCARD
  Gene Name: PYD and CARD domain containing
  Uniprot ID: Q9ULZ3
  ENSP ID: ENSP00000340441
MGRARDAILDALENLTAEELKKFKLKLLSVPLREGYGRIPRGALLSMDALDLTDKLVSFYLETYGAELTANVLRDMGLQEMAGQLQAATHQGLHFIDQHRAALIARVTNVEWLLDALYGKVLTDEQYQAVRAEPTNPSKMRKLFSFTPAWNWTCKDLLLQALRESQSYLVEDLERS

SEQ ID NO: 70146 - protein, 125 aa, Homo sapiens
  Payload ID: 13934
  Gene Symbol: PYCARD
  Gene Name: PYD and CARD domain containing
  ENSP ID: ENSP00000455141
MGRARDAILDALENLTAEELKKFKLKLLSVPLREGYGRIPRGALLSMDALDLTDKLVSFYLETYGAELTANVLRDMGLQEMAGQLQAATHQGGSPRLAYRPTGPRPHGGKGREGDHLAHILPGSG

SEQ ID NO: 70147 - protein, 419 aa, Homo sapiens
  Payload ID: 13935
  Gene Symbol: PYGO1
  Gene Name: pygopus family PHD finger 1
  Uniprot ID: Q9Y3Y4
  ENSP ID: ENSP00000302327
MPAENSPAPAYKVSSHGGDSGLDGLGGPGVQLGSPDKKKRKANTQGPSFPPLSEYAPPPNPNSDHLVAANPFDDNYNTISYKPLPSSNPYLGPGYPGFGGYSTFRMPPHVPPRMSSPYCGPYSLRNQPHPFPQNPLGMGFNRPHAFNFGPHDNSSFGNPSYNNALSQNVNMPNQHFRQNPAENFSQIPPQNASQVSNPDLASNFVPGNNSNFTSPLESNHSFIPPPNTFGQAKAPPPKQDFTQGATKNTNQNSSAHPPHLNMDDTVNQSNIELKNVNRNNAVNQENSRSSSTEATNNNPANGTQNKPRQPRGAADACTTEKSNKSSLHPNRHGHSSSDPVYPCGICTNEVNDDQDAILCEASCQKWFHRICTGMTETAYGLLTAEASAVWGCDTCMADKDVQLMRTRETFGPSAVGSDA

SEQ ID NO: 70148 - protein, 419 aa, Homo sapiens
  Payload ID: 13935
  Gene Symbol: PYGO1
  Gene Name: pygopus family PHD finger 1
  Uniprot ID: Q9Y3Y4
  ENSP ID: ENSP00000457777
MSAEQEKDPISLKRVRGGDSGLDGLGGPGVQLGSPDKKKRKANTQGPSFPPLSEYAPPPNPNSDHLVAANPFDDNYNTISYKPLPSSNPYLGPGYPGFGGYSTFRMPPHVPPRMSSPYCGPYSLRNQPHPFPQNPLGMGFNRPHAFNFGPHDNSSFGNPSYNNALSQNVNMPNQHFRQNPAENFSQIPPQNASQVSNPDLASNFVPGNNSNFTSPLESNHSFIPPPNTFGQAKAPPPKQDFTQGATKNTNQNSSAHPPHLNMDDTVNQSNIELKNVNRNNAVNQENSRSSSTEATNNNPANGTQNKPRQPRGAADACTTEKSNKSSLHPNRHGHSSSDPVYPCGICTNEVNDDQDAILCEASCQKWFHRICTGMTETAYGLLTAEASAVWGCDTCMADKDVQLMRTRETFGPSAVGSDA

SEQ ID NO: 70149 - protein, 369 aa, Homo sapiens
  Payload ID: 13936
  Gene Symbol: PYGO2
  Gene Name: pygopus family PHD finger 2
  ENSP ID: ENSP00000357441
MKSPEKKRRKSNTQGPAYSHLTEFAPPPTPMVDHLVASNPFEDDFGAPKVGVAAPPFLGSPVPFGGFRVQGGMAGQVPPGYSTGGGGGPQPLRRQPPPFPPNPMGPAFNMPPQGPGYPPPGNMNFPSQPFNQPLGQNFSPPSGQMMPGPVGGFGPMISPTMGQPPRAELGPPSLSQRFAQPGAPFGPSPLQRPGQGLPSLPPNTSPFPGPDPGFPGPGGEDGGKPLNPPASTAFPQEPHSGSPAAAVNGNQPSFPPNSSGRGGGTPDANSLAPPGKAGGGSGPQPPPGLVYPCGACRSEVNDDQDAILCEASCQKWFHRECTGMTESAYGLLTTEASAVWACDLCLKTKEIQSVYIREGMGQLVAANDG

SEQ ID NO: 70150 - protein, 406 aa, Homo sapiens
  Payload ID: 13936
  Gene Symbol: PYGO2
  Gene Name: pygopus family PHD finger 2
  Uniprot ID: Q9BRQ0
  ENSP ID: ENSP00000357442
MAASAPPPPDKLEGGGGPAPPPAPPSTGRKQGKAGLQMKSPEKKRRKSNTQGPAYSHLTEFAPPPTPMVDHLVASNPFEDDFGAPKVGVAAPPFLGSPVPFGGFRVQGGMAGQVPPGYSTGGGGGPQPLRRQPPPFPPNPMGPAFNMPPQGPGYPPPGNMNFPSQPFNQPLGQNFSPPSGQMMPGPVGGFGPMISPTMGQPPRAELGPPSLSQRFAQPGAPFGPSPLQRPGQGLPSLPPNTSPFPGPDPGFPGPGGEDGGKPLNPPASTAFPQEPHSGSPAAAVNGNQPSFPPNSSGRGGGTPDANSLAPPGKAGGGSGPQPPPGLVYPCGACRSEVNDDQDAILCEASCQKWFHRECTGMTESAYGLLTTEASAVWACDLCLKTKEIQSVYIREGMGQLVAANDG

SEQ ID NO: 70151 - protein, 203 aa, Homo sapiens
  Payload ID: 13937
  Gene Symbol: PYM1
  Gene Name: PYM homolog 1, exon junction complex associated factor
  Uniprot ID: Q9BRP8
  ENSP ID: ENSP00000381271
MATPYVTDETGGKYIASTQRPDGTWRKQRRVKEGYVPQEEVPVYENKYVKFFKSKPELPPGLSPEATAPVTPSRPEGGEPGLSKTAKRNLKRKEKRRQQQEKGEAEALSRTLDKVSLEETAQLPSAPQGSRAAPTAASDQPDSAATTEKAKKIKNLKKKLRQVEELQQRIQAGEVSQPSKEQLEKLARRRALEEELEDLELGL

SEQ ID NO: 70152 - protein, 204 aa, Homo sapiens
  Payload ID: 13937
  Gene Symbol: PYM1
  Gene Name: PYM homolog 1, exon junction complex associated factor
  Uniprot ID: Q9BRP8
  ENSP ID: ENSP00000386156
MEAAGSPAATETGKYIASTQRPDGTWRKQRRVKEGYVPQEEVPVYENKYVKFFKSKPELPPGLSPEATAPVTPSRPEGGEPGLSKTAKRNLKRKEKRRQQQEKGEAEALSRTLDKVSLEETAQLPSAPQGSRAAPTAASDQPDSAATTEKAKKIKNLKKKLRQVEELQQRIQAGEVSQPSKEQLEKLARRRALEEELEDLELGL

SEQ ID NO: 70153 - protein, 77 aa, Homo sapiens
  Payload ID: 13937
  Gene Symbol: PYM1
  Gene Name: PYM homolog 1, exon junction complex associated factor
  ENSP ID: ENSP00000402829
MVHSPFKTKMVACYDRDSTSGGEGGGTPARSRRKWFAFSRWRLPMLLTRPAGWEPPNLSLLFDFTLGYHQGQRMEPR

SEQ ID NO: 70154 - protein, 45 aa, Homo sapiens
  Payload ID: 13937
  Gene Symbol: PYM1
  Gene Name: PYM homolog 1, exon junction complex associated factor
  ENSP ID: ENSP00000448858
MPSNICHSSSGRLISPIKVKSEIQTQASISRQHSDLTGPGASSGG

SEQ ID NO: 70155 - protein, 37 aa, Homo sapiens
  Payload ID: 13937
  Gene Symbol: PYM1
  Gene Name: PYM homolog 1, exon junction complex associated factor
  ENSP ID: ENSP00000452291
  MOD_RES (1)..(1): Any amino acid
XLPAALRLRRQGWEPPNLSLLFDFTLGYHQGQRMEPR

SEQ ID NO: 70156 - protein, 44 aa, Homo sapiens
  Payload ID: 13937
  Gene Symbol: PYM1
  Gene Name: PYM homolog 1, exon junction complex associated factor
  ENSP ID: ENSP00000452447
MRGTVPRNFSWLPEDCFTGSKRSVMASISRQHSDLTGPGASSGG

SEQ ID NO: 70157 - protein, 500 aa, Homo sapiens
  Payload ID: 13938
  Gene Symbol: PYROXD1
  Gene Name: pyridine nucleotide-disulphide oxidoreductase domain 1
  Uniprot ID: Q8WU10
  ENSP ID: ENSP00000240651
MEAARPPPTAGKFVVVGGGIAGVTCAEQLATHFPSEDILLVTASPVIKAVTNFKQISKILEEFDVEEQSSTMLGKRFPNIKVIESGVKQLKSEEHCIVTEDGNQHVYKKLCLCAGAKPKLICEGNPYVLGIRDTDSAQEFQKQLTKAKRIMIIGNGGIALELVYEIEGCEVIWAIKDKAIGNTFFDAGAAEFLTSKLIAEKSEAKIAHKRTRYTTEGRKKEARSKSKADNVGSALGPDWHEGLNLKGTKEFSHKIHLETMCEVKKIYLQDEFRILKKKSFTFPRDHKSVTADTEMWPVYVELTNEKIYGCDFIVSATGVTPNVEPFLHGNSFDLGEDGGLKVDDHMHTSLPDIYAAGDICTTSWQLSPVWQQMRLWTQARQMGWYAAKCMAAASSGDSIDMDFSFELFAHVTKFFNYKVVLLGKYNAQGLGSDHELMLRCTKGREYIKVVMQNGRMMGAVLIGETDLEETFENLILNQMNLSSYGEDLLDPNIDIEDYFD

SEQ ID NO: 70158 - protein, 55 aa, Homo sapiens
  Payload ID: 13938
  Gene Symbol: PYROXD1
  Gene Name: pyridine nucleotide-disulphide oxidoreductase domain 1
  ENSP ID: ENSP00000364415
MEAARPPPTAGKFVVVGGGIAGVTCAEQLATHFPSEDILLVTASPVIKAVTNFKQ

SEQ ID NO: 70159 - protein, 429 aa, Homo sapiens
  Payload ID: 13938
  Gene Symbol: PYROXD1
  Gene Name: pyridine nucleotide-disulphide oxidoreductase domain 1
  Uniprot ID: Q8WU10
  ENSP ID: ENSP00000438505
MLGKRFPNIKVIESGVKQLKSEEHCIVTEDGNQHVYKKLCLCAGAKPKLICEGNPYVLGIRDTDSAQEFQKQLTKAKRIMIIGNGGIALELVYEIEGCEVIWAIKDKAIGNTFFDAGAAEFLTSKLIAEKSEAKIAHKRTRYTTEGRKKEARSKSKADNVGSALGPDWHEGLNLKGTKEFSHKIHLETMCEVKKIYLQDEFRILKKKSFTFPRDHKSVTADTEMWPVYVELTNEKIYGCDFIVSATGVTPNVEPFLHGNSFDLGEDGGLKVDDHMHTSLPDIYAAGDICTTSWQLSPVWQQMRLWTQARQMGWYAAKCMAAASSGDSIDMDFSFELFAHVTKFFNYKVVLLGKYNAQGLGSDHELMLRCTKGREYIKVVMQNGRMMGAVLIGETDLEETFENLILNQMNLSSYGEDLLDPNIDIEDYFD

SEQ ID NO: 70160 - protein, 139 aa, Homo sapiens
  Payload ID: 13938
  Gene Symbol: PYROXD1
  Gene Name: pyridine nucleotide-disulphide oxidoreductase domain 1
  ENSP ID: ENSP00000439106
MEAARPPPTAGKFVVVGGGIAGVTCAEQLATHFPSEDILLVTASPVIKAVTNFKQISKILEEFDVEEQSSTMLGKRFPNIKVIESGVKQLKSEEHCIVTEDGNQHVYKKLCLCAGAKPKLICEGNPYVLGIRDTDSAQV

SEQ ID NO: 70161 - protein, 139 aa, Homo sapiens; identical to SEQ ID NO: 70160
  Payload ID: 13938
  Gene Symbol: PYROXD1
  Gene Name: pyridine nucleotide-disulphide oxidoreductase domain 1
  ENSP ID: ENSP00000440192

SEQ ID NO: 70162 - protein, 60 aa, Homo sapiens
  Payload ID: 13938
  Gene Symbol: PYROXD1
  Gene Name: pyridine nucleotide-disulphide oxidoreductase domain 1
  ENSP ID: ENSP00000444800
  MOD_RES (1)..(1): Any amino acid
XKSEAKIAHKRTRYTTEGRKKEARSKSKADNVGSALGPDWHEGLNLKGTKEQYSQHPHQK

SEQ ID NO: 70163 - protein, 581 aa, Homo sapiens
  Payload ID: 13939
  Gene Symbol: PYROXD2
  Gene Name: pyridine nucleotide-disulphide oxidoreductase domain 2
  Uniprot ID: Q8N2H3
  ENSP ID: ENSP00000359607
MAASGRGLCKAVAASPFPAWRRDNTEARGGLKPEYDAVVIGAGHNGLVAAAYLQRLGVNTAVFERRHVIGGAAVTEEIIPGFKFSRASYLLSLLRPQIYTDLELKKHGLRLHLRNPYSFTPMLEEGAGSKVPRCLLLGTDMAENQKQIAQFSQKDAQVFPKYEEFMHRLALAIDPLLDAAPVDMAAFQHGSLLQRMRSLSTLKPLLKAGRILGAQLPRYYEVLTAPITKVLDQWFESEPLKATLATDAVIGAMTSPHTPGSGYVLLHHVMGGLEGMQGAWGYVQGGMGALSDAIASSATTHGASIFTEKTVAKVQVNSEGCVQGVVLEDGTEVRSKMVLSNTSPQITFLKLTPQEWLPEEFLERISQLDTRSPVTKINVAVDRLPSFLAAPNAPRGQPLPHHQCSIHLNCEDTLLLHQAFEDAMDGLPSHRPVIELCIPSSLDPTLAPPGCHVVSLFTQYMPYTLAGGKAWDEQERDAYADRVFDCIEVYAPGFKDSVVGRDILTPPDLERIFGLPGGNIFHCAMSLDQLYFARPVPLHSGYRCPLQGLYLCGSGAHPGGGVMGAAGRNAAHVAFRDLKSM

SEQ ID NO: 70164 - protein, 312 aa, Homo sapiens
  Payload ID: 13940
  Gene Symbol: PDXK
  Gene Name: pyridoxal (pyridoxine, vitamin B6) kinase
  Uniprot ID: O00764
  ENSP ID: ENSP00000291565
MEEECRVLSIQSHVIRGYVGNRAATFPLQVLGFEIDAVNSVQFSNHTGYAHWKGQVLNSDELQELYEGLRLNNMNKYDYVLTGYTRDKSFLAMVVDIVQELKQQNPRLVYVCDPVLGDKWDGEGSMYVPEDLLPVYKEKVVPLADIITPNQFEAELLSGRKIHSQEEALRVMDMLHSMGPDTVVITSSDLPSPQGSNYLIVLGSQRRRNPAGSVVMERIRMDIRKVDAVFVGTGDLFAAMLLAWTHKHPNNLKVACEKTVSTLHHVLQRTIQCAKAQAGEGVRPSPMQLELRMVQSKRDIEDPEIVVQATVL

SEQ ID NO: 70165 - protein, 148 aa, Homo sapiens
  Payload ID: 13940
  Gene Symbol: PDXK
  Gene Name: pyridoxal (pyridoxine, vitamin B6) kinase
  ENSP ID: ENSP00000333624
MGRLWKRPDQLAMLMNKLILMGCVKRRCQPRGSACSCSHLKAENSDFILGYVCQPQRINYLHTQKQWSRIFWQDFQDLCHRCLISVSSQSVLGFEIDAVNSVQFSNHTETRSVSVAQAGVKWRNQLTAALTSWAEAIFLPPPPEWLGL

SEQ ID NO: 70166 - protein, 87 aa, Homo sapiens
  Payload ID: 13940
  Gene Symbol: PDXK
  Gene Name: pyridoxal (pyridoxine, vitamin B6) kinase
  ENSP ID: ENSP00000381155
MEEECRVLSIQSHVIRGYVGNRAATFPLQVLGFEIDAVNSVQFSNHTETRSVSVAQAGVKWRNQLTAALTSWAEAIFLPPPPEWLGL

SEQ ID NO: 70167 - protein, 284 aa, Homo sapiens
  Payload ID: 13940
  Gene Symbol: PDXK
  Gene Name: pyridoxal (pyridoxine, vitamin B6) kinase
  Uniprot ID: O00764
  ENSP ID: ENSP00000418359
MEEECRVLSIQSHVIRGYVGNRAATFPLQVLGFEIDAVNSVQFSNHTGYAHWKGQVLNSDELQELYEGLRLNNMNKYDYVLTVCDPVLGDKWDGEGSMYVPEDLLPVYKEKVVPLADIITPNQFEAELLSGRKIHSQEEALRVMDMLHSMGPDTVVITSSDLPSPQGSNYLIVLGSQRRRNPAGSVVMERIRMDIRKVDAVFVGTGDLFAAMLLAWTHKHPNNLKVACEKTVSTLHHVLQRTIQCAKAQAGEGVRPSPMQLELRMVQSKRDIEDPEIVVQATVL

SEQ ID NO: 70168 - protein, 272 aa, Homo sapiens
  Payload ID: 13940
  Gene Symbol: PDXK
  Gene Name: pyridoxal (pyridoxine, vitamin B6) kinase
  ENSP ID: ENSP00000420708
MGRSRPPGYAHWKGQVLNSDELQELYEGLRLNNMNKYDYVLTGYTRDKSFLAMVVDIVQELKQQNPRLVYVCDPVLGDKWDGEGSMYVPEDLLPVYKEKVVPLADIITPNQFEAELLSGRKIHSQEEALRVMDMLHSMGPDTVVITSSDLPSPQGSNYLIVLGSQRRRNPAGSVVMERIRMDIRKVDAVFVGTGDLFAAMLLAWTHKHPNNLKVACEKTVSTLHHVLQRTIQCAKAQAGEGVRPSPMQLELRMVQSKRDIEDPEIVVQATVL

SEQ ID NO: 70169 - protein, 162 aa, Homo sapiens
  Payload ID: 13940
  Gene Symbol: PDXK
  Gene Name: pyridoxal (pyridoxine, vitamin B6) kinase
  ENSP ID: ENSP00000479315
MGHKARLPAGTRVFHTSCVVGSLTPFRLGGGKADPPSACRAHLAQASPPRGCCSHFCPFPRPGPRSLRPYHKVRSFFHTVSWAWQSLHLVASIPSGPFERISWSSLSELPGLRALGRSLRSWRSAGGRVALSWLSECRARGDGTGALLLGLVVPAAGKGQLV

SEQ ID NO: 70170 - protein, 296 aa, Homo sapiens
  Payload ID: 13941
  Gene Symbol: PDXP
  Gene Name: pyridoxal (pyridoxine, vitamin B6) phosphatase
  Uniprot ID: Q96GD0
  ENSP ID: ENSP00000215904
MARCERLRGAALRDVLGRAQGVLFDCDGVLWNGERAVPGAPELLERLARAGKAALFVSNNSRRARPELALRFARLGFGGLRAEQLFSSALCAARLLRQRLPGPPDAPGAVFVLGGEGLRAELRAAGLRLAGDPSAGDGAAPRVRAVLVGYDEHFSFAKLREACAHLRDPECLLVATDRDPWHPLSDGSRTPGTGSLAAAVETASGRQALVVGKPSPYMFECITENFSIDPARTLMVGDRLETDILFGHRCGMTTVLTLTGVSRLEEAQAYLAAGQHDLVPHYYVESIADLTEGLED

SEQ ID NO: 70171 - protein, 79 aa, Homo sapiens
  Payload ID: 13941
  Gene Symbol: PDXP
  Gene Name: pyridoxal (pyridoxine, vitamin B6) phosphatase
  ENSP ID: ENSP00000385336
MFECITENFSIDPARTLMVGDRLETDILFGHRCGMTTVLTLTGVSRLEEAQAYLAAGQHDLVPHYYVESIADLTEGLED

SEQ ID NO: 70172 - protein, 370 aa, Homo sapiens
  Payload ID: 13942
  Gene Symbol: PDXDC1
  Gene Name: pyridoxal-dependent decarboxylase domain containing 1
  ENSP ID: ENSP00000322807
MDASLEKIADPTLAEMGKNLKEAVKMLEDSQRRTEEENGKKLISGDIPGPLQGSGQDMVSILQLVQNLMHGDEDEEPQSPRIQNIGEQGHMALLGHSLGAYISTLDKEKLRKLTTRILSDTTLWLCRIFRYENGCAYFHEEEREGLAKICRLAIHSRYEDFVVDGFNVLYNKKPVIYLSAAARPGLGQYLCNQLGLPFPCLCRVPCNTVFGSQHQMDVAFLEKLIKDDIERGRLPLLLVANAGTAAVGHTDKIGRLKELCEQYGIWLHVEGVNLATLALGYVSSSVLAAAKCDSMTMTPGPWLGLPAVPAVTLYKHDDPALTLVAGLTSNKPTDKLRALPLWLSLQYLGLDGFVERIKHACQLSQRLQKV

SEQ ID NO: 70173 - protein, 788 aa, Homo sapiens
  Payload ID: 13942
  Gene Symbol: PDXDC1
  Gene Name: pyridoxal-dependent decarboxylase domain containing 1
  Uniprot ID: Q6P996
  ENSP ID: ENSP00000379691
MDASLEKIADPTLAEMGKNLKEAVKMLEDSQRRTEEENGKKLISGDIPGPLQGSGQDMVSILQLVQNLMHGDEDEEPQSPRIQNIGEQGHMALLGHSLGAYISTLDKEKLRKLTTRILSDTTLWLCRIFRYENGCAYFHEEEREGLAKICRLAIHSRYEDFVVDGFNVLYNKKPVIYLSAAARPGLGQYLCNQLGLPFPCLCRVPCNTVFGSQHQMDVAFLEKLIKDDIERGRLPLLLVANAGTAAVGHTDKIGRLKELCEQYGIWLHVEGVNLATLALGYVSSSVLAAAKCDSMTMTPGPWLGLPAVPAVTLYKHDDPALTLVAGLTSNKPTDKLRALPLWLSLQYLGLDGFVERIKHACQLSQRLQESLKKVNYIKILVEDELSSPVVVFRFFQELPGSDPVFKAVPVPNMTPSGVGRERHSCDALNRWLGEQLKQLVPASGLTVMDLEAEGTCLRFSPLMTAAVLGTRGEDVDQLVACIESKLPVLCCTLQLREEFKQEVEATAGLLYVDDPNWSGIGVVRYEHANDDKSSLKSDPEGENIHAGLLKKLNELESDLTFKIGPEYKSMKSCLYVGMASDNVDAAELVETIAATAREIEENSRLLENMTEVVRKGIQEAQVELQKASEERLLEEGVLRQIPVVGSVLNWFSPVQALQKGRTFNLTAGSLESTEPIYVYKAQGAGVTLPPTPSGSRTKQRLPGQKPFKRSLRGSDALSETSSVSHIEDLEKVERLSSGPEQITLEASSTEGHPGAPSPQHTDQTEAFQKGVPHPEDDHSQVEGPESLR

SEQ ID NO: 70174 - protein, 697 aa, Homo sapiens
  Payload ID: 13942
  Gene Symbol: PDXDC1
  Gene Name: pyridoxal-dependent decarboxylase domain containing 1
  Uniprot ID: Q6P996
  ENSP ID: ENSP00000391147
MGKNLKEAVKMLEDSQRRTEEENGKKLISGDIPGPLQGRYENGCAYFHEEEREGLAKICRLAIHSRYEDFVVDGFNVLYNKKPVIYLSAAARPGLGQYLCNQLGLPFPCLCRVPCNTVFGSQHQMDVAFLEKLIKDDIERGRLPLLLVANAGTAAVGHTDKIGRLKELCEQYGIWLHVEGVNLATLALGYVSSSVLAAAKCDSMTMTPGPWLGLPAVPAVTLYKHDDPALTLVAGLTSNKPTDKLRALPLWLSLQYLGLDGFVERIKHACQLSQRLQESLKKVNYIKILVEDELSSPVVVFRFFQELPGSDPVFKAVPVPNMTPSGVGRERHSCDALNRWLGEQLKQLVPASGLTVMDLEAEGTCLRFSPLMTAAVLGTRGEDVDQLVACIESKLPVLCCTLQLREEFKQEVEATAGLLYVDDPNWSGIGVVRYEHANDDKSSLKSDPEGENIHAGLLKKLNELESDLTFKIGPEYKSMKSCLYVGMASDNVDAAELVETIAATAREIEENSRLLENMTEVVRKGIQEAQVELQKASEERLLEEGVLRQIPVVGSVLNWFSPVQALQKGRTFNLTAGSLESTEPIYVYKAQGAGVTLPPTPSGSRTKQRLPGQKPFKRSLRGSDALSETSSVSHIEDLEKVERLSSGPEQITLEASSTEGHPGAPSPQHTDQTEAFQKGVPHPEDDHSQVEGPESLR

SEQ ID NO: 70175 - protein, 429 aa, Homo sapiens
  Payload ID: 13942
  Gene Symbol: PDXDC1
  Gene Name: pyridoxal-dependent decarboxylase domain containing 1
  Uniprot ID: Q6P996
  ENSP ID: ENSP00000406703
MDASLEKIADPTLAEMGKNLKEAVKMLEDSQRRTEEENGKKLISGDIPGPLQGSGQDMVSILQLVQNLMHGDEDEEPQSPRIQNIGEQGHMALLGHSLGAYISTLDKEKLRKLTTRILSDTTLWLCRIFRYENGCAYFHEEEREGLAKICRLAIHSRYEDFVVDGFNVLYNKKPVIYLSAAARPGLGQYLCNQDVAFLEKLIKDDIERGRLPLLLVANAGTAAVGHTDKIGRLKELCEQYGIWLHVEGVNLATLALGYVSSSVLAAAKCDSMTMTPGPWLGLPAVPAVTLYKHDDPALTLVAGLTSNKPTDKLRALPLWLSLQYLGLDGFVERIKHACQLSQRLQESLKKVNYIKILVEDELSSPVVVFRFFQELPGSDPVFKAVPVPNMTPSGVGRERHSCDALNRWVRMAVTPLSFQVPVHHHPTCW

SEQ ID NO: 70176 - protein, 498 aa, Homo sapiens
  Payload ID: 13942
  Gene Symbol: PDXDC1
  Gene Name: pyridoxal-dependent decarboxylase domain containing 1
  ENSP ID: ENSP00000437835
MDASLEKIADPTLAEMGKNLKEAVKMLEDSQRRTEEENGKKLISGDIPGPLQGSGQDMVSILQLVQNLMHGDEDEEPQSPRIQNIGEQGHMALLGHSLGAYISTLDKEKLRKLTTRILSDTTLWLCRIFRYENGCAYFHEEEREGLAKICRLAIHSRYEDFVVDGFNVLYNKKPVIYLSAAARPGLGQYLCNQLGLPFPCLCRVPCNTVFGSQHQMDVAFLEKLIKDDIERGRLPLLLVANAGTAAVGHTDKIGRLKELCEQYGIWLHVEGVNLATLALGYVSSSVLAAAKCDSMTMTPGPWLGLPAVPAVTLYKHDDPALTLVAGLTSNKPTDKLRALPLWLSLQYLGLDGFVERIKHACQLSQRLQESLKKVNYIKILVEDELSSPVVVFRFFQELPGSDPVFKAVPVPNMTPSGVGRERHSCDALNRWLGEQLKQLVPASGLTVMDLEAEGTCLRFSPLMTAAGWSHCGTTTRYDCVRSRLTTRLPGSTGEQAPP

SEQ ID NO: 70177 - protein, 81 aa, Homo sapiens
  Payload ID: 13942
  Gene Symbol: PDXDC1
  Gene Name: pyridoxal-dependent decarboxylase domain containing 1
  ENSP ID: ENSP00000454279
MDASLEKIADPTLAEMGKNLKEAVKMLEDSQRRTEEENGKKLISGDIPGPLQGSGQDMVSILQLVQNLMHGDEDEEPQSPR

SEQ ID NO: 70178 - protein, 806 aa, Homo sapiens
  Payload ID: 13942
  Gene Symbol: PDXDC1
  Gene Name: pyridoxal-dependent decarboxylase domain containing 1
  ENSP ID: ENSP00000454791
MACSILEGCRREVRRETWKPGPGSEIADPTLAEMGKNLKEAVKMLEDSQRRTEEENGKKLISGDIPGPLQGSGQDMVSILQLVQNLMHGDEDEEPQSPRIQNIGEQGHMALLGHSLGAYISTLDKEKLRKLTTRILSDTTLWLCRIFRYENGCAYFHEEEREGLAKICRLAIHSRYEDFVVDGFNVLYNKKPVIYLSAAARPGLGQYLCNQLGLPFPCLCRVPCNTVFGSQHQMDVAFLEKLIKDDIERGRLPLLLVANAGTAAVGHTDKIGRLKELCEQYGIWLHVEGVNLATLALGYVSSSVLAAAKCDSMTMTPGPWLGLPAVPAVTLYKHDDPALTLVAGLTSNKPTDKLRALPLWLSLQYLGLDGFVERIKHACQLSQRLQESLKKVNYIKILVEDELSSPVVVFRFFQELPGSDPVFKAVPVPNMTPSGVGRERHSCDALNRWLGEQLKQLVPASGLTVMDLEAEGTCLRFSPLMTAAVLGTRGEDVDQLVACIESKLPVLCCTLQLREEFKQEVEATAGLLYVDDPNWSGIGVVRYEHANDDKSSLKSDPEGENIHAGLLKKLNELESDLTFKIGPEYKSMKSCLYVGMASDNVDAAELVETIAATAREIEENSRLLENMTEVVRKGIQEAQVELQKASEERLLEEGVLRQIPVVGSVLNWFSPVQALQKGRTFNLTAGSLESTEPIYVYKAQGAGVTLPPTPSGSRTKQRLPGQKPFKRSLRGSDALSETSSVSHIEDLEKVERLSSGPEQITLEASSTEGHPGAPSPQHTDQTEAFQKGVPHPEDDHSQVEGPESLR

SEQ ID NO: 70179 - protein, 271 aa, Homo sapiens
  Payload ID: 13942
  Gene Symbol: PDXDC1
  Gene Name: pyridoxal-dependent decarboxylase domain containing 1
  ENSP ID: ENSP00000454910
MGKNLKEAVKMLEDSQRRTEEENGKKLISGDIPGPLQGSGQDMVSILQLVQNLMHGDEDEEPQSPRIQNIGEQGHMALLGHSLGAYISTLDKEKLRKLTTRILSDTTLWLCRIFRYENGCAYFHEEEREGLAKICRLAIHSRYEDFVVDGFNVLYNKKPVIYLSAAARPGLGQYLCNQDVAFLEKLIKDDIERGRLPLLLVANAGTAAVGHTDKIGRLKELCEQYGIWLHVEGVNLATLALGYVSSSVLAAAKCDSMTMTPGPWLGLPAVP

SEQ ID NO: 70180 - protein, 761 aa, Homo sapiens
  Payload ID: 13942
  Gene Symbol: PDXDC1
  Gene Name: pyridoxal-dependent decarboxylase domain containing 1
  Uniprot ID: Q6P996
  ENSP ID: ENSP00000455070
MDASLEKIADPTLAEMGKNLKEAVKMLEDSQRRTEEENGKKLISGDIPGPLQGRIQNIGEQGHMALLGHSLGAYISTLDKEKLRKLTTRILSDTTLWLCRIFRYENGCAYFHEEEREGLAKICRLAIHSRYEDFVVDGFNVLYNKKPVIYLSAAARPGLGQYLCNQLGLPFPCLCRVPCNTVFGSQHQMDVAFLEKLIKDDIERGRLPLLLVANAGTAAVGHTDKIGRLKELCEQYGIWLHVEGVNLATLALGYVSSSVLAAAKCDSMTMTPGPWLGLPAVPAVTLYKHDDPALTLVAGLTSNKPTDKLRALPLWLSLQYLGLDGFVERIKHACQLSQRLQESLKKVNYIKILVEDELSSPVVVFRFFQELPGSDPVFKAVPVPNMTPSGVGRERHSCDALNRWLGEQLKQLVPASGLTVMDLEAEGTCLRFSPLMTAAVLGTRGEDVDQLVACIESKLPVLCCTLQLREEFKQEVEATAGLLYVDDPNWSGIGVVRYEHANDDKSSLKSDPEGENIHAGLLKKLNELESDLTFKIGPEYKSMKSCLYVGMASDNVDAAELVETIAATAREIEENSRLLENMTEVVRKGIQEAQVELQKASEERLLEEGVLRQIPVVGSVLNWFSPVQALQKGRTFNLTAGSLESTEPIYVYKAQGAGVTLPPTPSGSRTKQRLPGQKPFKRSLRGSDALSETSSVSHIEDLEKVERLSSGPEQITLEASSTEGHPGAPSPQHTDQTEAFQKGVPHPEDDHSQVEGPESLR

SEQ ID NO: 70181 - protein, 64 aa, Homo sapiens
  Payload ID: 13942
  Gene Symbol: PDXDC1
  Gene Name: pyridoxal-dependent decarboxylase domain containing 1
  ENSP ID: ENSP00000455486
MDASLEKIADPTLAEMGKNLKEAVKMLEDSQRRTEEENGKKLISGDIPGPLQGSGQDMALSIRA

SEQ ID NO: 70182 - protein, 185 aa, Homo sapiens
  Payload ID: 13942
  Gene Symbol: PDXDC1
  Gene Name: pyridoxal-dependent decarboxylase domain containing 1
  ENSP ID: ENSP00000455613
  MOD_RES (1)..(1): Any amino acid
XSILEGCRREVRRETWKPGPGSEAAGKSLVNNPPGILPPSPAHVREGRRGAQIADPTLAEMGKNLKEAVKMLEDSQRRTEEENGKKLISGDIPGPLQGSGQDMVSILQLVQNLMHGDEDEEPQSPRIQNIGEQGHMALLGHSLGAYISTLDKEKLRKLTTRILSDTTLWLCRIFRYENGCAYFHE

SEQ ID NO: 70183 - protein, 24 aa, Homo sapiens
  Payload ID: 13942
  Gene Symbol: PDXDC1
  Gene Name: pyridoxal-dependent decarboxylase domain containing 1
  ENSP ID: ENSP00000455914
MGKNLKEAVKMLEDSQRRTEEENG

SEQ ID NO: 70184 - protein, 120 aa, Homo sapiens
  Payload ID: 13942
  Gene Symbol: PDXDC1
  Gene Name: pyridoxal-dependent decarboxylase domain containing 1
  ENSP ID: ENSP00000457417
MGKNLKEAVKMLEDSQRRTEEENGKKLISGDIPGPLQGSGQDMVSILQLVQNLMHGDEDEEPQSPRIQNIGEQGHMALLGHSLGAYISTLDKEKLRKLTTRILSDTTLWLCRIFRYENGC

SEQ ID NO: 70185 - protein, 370 aa, Homo sapiens; identical to SEQ ID NO: 70172
  Payload ID: 13942
  Gene Symbol: PDXDC1
  Gene Name: pyridoxal-dependent decarboxylase domain containing 1
  ENSP ID: ENSP00000478642

SEQ ID NO: 70186 - protein, 761 aa, Homo sapiens; identical to SEQ ID NO: 70180
  Payload ID: 13942
  Gene Symbol: PDXDC1
  Gene Name: pyridoxal-dependent decarboxylase domain containing 1
  Uniprot ID: Q6P996
  ENSP ID: ENSP00000478686

SEQ ID NO: 70187 - protein, 429 aa, Homo sapiens; identical to SEQ ID NO: 70175
  Payload ID: 13942
  Gene Symbol: PDXDC1
  Gene Name: pyridoxal-dependent decarboxylase domain containing 1
  Uniprot ID: Q6P996
  ENSP ID: ENSP00000479054

SEQ ID NO: 70188 - protein, 697 aa, Homo sapiens; identical to SEQ ID NO: 70174
  Payload ID: 13942
  Gene Symbol: PDXDC1
  Gene Name: pyridoxal-dependent decarboxylase domain containing 1
  Uniprot ID: Q6P996
  ENSP ID: ENSP00000480418

SEQ ID NO: 70189 - protein, 429 aa, Homo sapiens; identical to SEQ ID NO: 70175
  Payload ID: 13942
  Gene Symbol: PDXDC1
  Gene Name: pyridoxal-dependent decarboxylase domain containing 1
  Uniprot ID: Q6P996
  ENSP ID: ENSP00000481784

SEQ ID NO: 70190 - protein, 498 aa, Homo sapiens; identical to SEQ ID NO: 70176
  Payload ID: 13942
  Gene Symbol: PDXDC1
  Gene Name: pyridoxal-dependent decarboxylase domain containing 1
  ENSP ID: ENSP00000481952

SEQ ID NO: 70191 - protein, 204 aa, Homo sapiens
  Payload ID: 13942
  Gene Symbol: PDXDC1
  Gene Name: pyridoxal-dependent decarboxylase domain containing 1
  ENSP ID: ENSP00000482152
MTMTPGPWLGLPAVPAVTLYKHDDPALTLVAGLTSNKPTDKLRALPLWLSLQYLGLDGFVERIKHACQLSQRLQESLKKVNYIKILVEDELSSPVVVFRFFQELPGSDPVFKAVPVPNMTPSGVGRERHSCDALNRWLGEQLKQLVPASGLTVMDLEAEGTCLRFSPLMTAAGWSHCGTTTRYDCVRSRLTTRLPGSTGEQAPP

SEQ ID NO: 70192 - protein, 370 aa, Homo sapiens; identical to SEQ ID NO: 70172
  Payload ID: 13942
  Gene Symbol: PDXDC1
  Gene Name: pyridoxal-dependent decarboxylase domain containing 1
  ENSP ID: ENSP00000483586

SEQ ID NO: 70193 - protein, 498 aa, Homo sapiens; identical to SEQ ID NO: 70176
  Payload ID: 13942
  Gene Symbol: PDXDC1
  Gene Name: pyridoxal-dependent decarboxylase domain containing 1
  ENSP ID: ENSP00000483785

SEQ ID NO: 70194 - protein, 204 aa, Homo sapiens; identical to SEQ ID NO: 70191
  Payload ID: 13942
  Gene Symbol: PDXDC1
  Gene Name: pyridoxal-dependent decarboxylase domain containing 1
  ENSP ID: ENSP00000483806

SEQ ID NO: 70195 - protein, 788 aa, Homo sapiens; identical to SEQ ID NO: 70173
  Payload ID: 13942
  Gene Symbol: PDXDC1
  Gene Name: pyridoxal-dependent decarboxylase domain containing 1
  Uniprot ID: Q6P996
  ENSP ID: ENSP00000484595

SEQ ID NO: 70196 - protein, 806 aa, Homo sapiens; identical to SEQ ID NO: 70178
  Payload ID: 13942
  Gene Symbol: PDXDC1
  Gene Name: pyridoxal-dependent decarboxylase domain containing 1
  ENSP ID: ENSP00000484608

SEQ ID NO: 70197 - protein, 760 aa, Homo sapiens
  Payload ID: 13942
  Gene Symbol: PDXDC1
  Gene Name: pyridoxal-dependent decarboxylase domain containing 1
  Uniprot ID: Q6P996
  ENSP ID: ENSP00000486662
MDASLEKIADPTLAEMGKNLKEAVKMLEDSQRTEEENGKKLISGDIPGPLQGRIQNIGEQGHMALLGHSLGAYISTLDKEKLRKLTTRILSDTTLWLCRIFRYENGCAYFHEEEREGLAKICRLAIHSRYEDFVVDGFNVLYNKKPVIYLSAAARPGLGQYLCNQLGLPFPCLCRVPCNTVFGSQHQMDVAFLEKLIKDDIERGRLPLLLVANAGTAAVGHTDKIGRLKELCEQYGIWLHVEGVNLATLALGYVSSSVLAAAKCDSMTMTPGPWLGLPAVPAVTLYKHDDPALTLVAGLTSNKPTDKLRALPLWLSLQYLGLDGFVERIKHACQLSQRLQESLKKVNYIKILVEDELSSPVVVFRFFQELPGSDPVFKAVPVPNMTPSGVGRERHSCDALNRWLGEQLKQLVPASGLTVMDLEAEGTCLRFSPLMTAAVLGTRGEDVDQLVACIESKLPVLCCTLQLREEFKQEVEATAGLLYVDDPNWSGIGVVRYEHANDDKSSLKSDPEGENIHAGLLKKLNELESDLTFKIGPEYKSMKSCLYVGMASDNVDAAELVETIAATAREIEENSRLLENMTEVVRKGIQEAQVELQKASEERLLEEGVLRQIPVVGSVLNWFSPVQALQKGRTFNLTAGSLESTEPIYVYKAQGAGVTLPPTPSGSRTKQRLPGQKPFKRSLRGSDALSETSSVSHIEDLEKVERLSSGPEQITLEASSTEGHPGAPSPQHTDQTEAFQKGVPHPEDDHSQVEGPESLR

SEQ ID NO: 70198 - protein, 64 aa, Homo sapiens; identical to SEQ ID NO: 70181
  Payload ID: 13942
  Gene Symbol: PDXDC1
  Gene Name: pyridoxal-dependent decarboxylase domain containing 1
  ENSP ID: ENSP00000487882

SEQ ID NO: 70199 - protein, 185 aa, Homo sapiens; identical to SEQ ID NO: 70182
  Payload ID: 13942
  Gene Symbol: PDXDC1
  Gene Name: pyridoxal-dependent decarboxylase domain containing 1
  ENSP ID: ENSP00000487950
  MOD_RES (1)..(1): Any amino acid

SEQ ID NO: 70200 - protein, 98 aa, Homo sapiens
  Payload ID: 13942
  Gene Symbol: PDXDC1
  Gene Name: pyridoxal-dependent decarboxylase domain containing 1
  ENSP ID: ENSP00000488405
MDASLEKIADPTLAEMGKNLKEAVKMLEDSQRRTEEENGKKLISGDIPGPLQGRIQNIGEQGHMALLGHSLGAYISTLDKEKLRKLTTRILSDTTLWL

SEQ ID NO: 70201 - protein, 760 aa, Homo sapiens; identical to SEQ ID NO: 70197
  Payload ID: 13942
  Gene Symbol: PDXDC1
  Gene Name: pyridoxal-dependent decarboxylase domain containing 1
  Uniprot ID: Q6P996
  ENSP ID: ENSP00000488664

SEQ ID NO: 70202 - protein, 261 aa, Homo sapiens
  Payload ID: 13943
  Gene Symbol: PNPO
  Gene Name: pyridoxamine 5'-phosphate oxidase
  Uniprot ID: Q9NVS9
  ENSP ID: ENSP00000225573
MTCWLRGVTATFGRPAEWPGYLSHLCGRSAAMDLGPMRKSYRGDREAFEETHLTSLDPVKQFAAWFEEAVQCPDIGEANAMCLATCTRDGKPSARMLLLKGFGKDGFRFFTNFESRKGKELDSNPFASLVFYWEPLNRQVRVEGPVKKLPEEEAECYFHSRPKSSQIGAVVSHQSSVIPDREYLRKKNEELEQLYQDQEVPKPKSWGGYVLYPQVMEFWQGQTNRLHDRIVFRRGLPTGDSPLGPMTHRGEEDWLYERLAP

SEQ ID NO: 70203 - protein, 218 aa, Homo sapiens
  Payload ID: 13943
  Gene Symbol: PNPO
  Gene Name: pyridoxamine 5'-phosphate oxidase
  Uniprot ID: Q9NVS9
  ENSP ID: ENSP00000399960
MTCWLRGVTATFGRPAEWPGYLSHLCGRSAAMDLGPMRKSYRGDREAFEETHLTSLDPVKQFAAWFEEAVQCPDIGEANAMCLATCTRDGKPSARMLLLKGFGKDGFRFFTNFESRKGKELDSNPFASLVFYWEPLNRQYLRKKNEELEQLYQDQEVPKPKSWGGYVLYPQVMEFWQGQTNRLHDRIVFRRGLPTGDSPLGPMTHRGEEDWLYERLAP

SEQ ID NO: 70204 - protein, 69 aa, Homo sapiens
  Payload ID: 13943
  Gene Symbol: PNPO
  Gene Name: pyridoxamine 5'-phosphate oxidase
  ENSP ID: ENSP00000462345
MTCWLRGVTATFGRPAEWPGYLSHLCGRSAAMDLGPMRKSYRGDRERWKTLCSHVAAEGLRERWLPLLH

SEQ ID NO: 70205 - protein, 72 aa, Homo sapiens
  Payload ID: 13943
  Gene Symbol: PNPO
  Gene Name: pyridoxamine 5'-phosphate oxidase
  ENSP ID: ENSP00000463520
MTCWLRGVTATFGRPAEWPGYLSHLCGRSAAMDLGPMRKSYRGDREVPPLGPGLLQGRGKRGPRSHLQRGGE

SEQ ID NO: 70206 - protein, 120 aa, Homo sapiens
  Payload ID: 13943
  Gene Symbol: PNPO
  Gene Name: pyridoxamine 5'-phosphate oxidase
  ENSP ID: ENSP00000463919
MCLATCTRDGKPSARMLLLKGFGKDGFRFFTNFESRKGKELDSNPFASLVFYWEPLNRQVRVEGPVKKLPEEEAECYFHSRPKSSQIGAVVSHQSSVIPDREYLRKKNEELEQLYQDQEV

SEQ ID NO: 70207 - protein, 46 aa, Homo sapiens
  Payload ID: 13943
  Gene Symbol: PNPO
  Gene Name: pyridoxamine 5'-phosphate oxidase
  ENSP ID: ENSP00000463972
MTCWLRGVTATFGRPAEWPGYLSHLCGRSAAMDLGPMRKSYRGDRE

SEQ ID NO: 70208 - protein, 69 aa, Homo sapiens; identical to SEQ ID NO: 70204
  Payload ID: 13943
  Gene Symbol: PNPO
  Gene Name: pyridoxamine 5'-phosphate oxidase
  ENSP ID: ENSP00000463994

SEQ ID NO: 70209 - protein, 365 aa, Homo sapiens
  Payload ID: 13944
  Gene Symbol: P2RY4
  Gene Name: pyrimidinergic receptor P2Y, G-protein coupled, 4
  Uniprot ID: P51582
  ENSP ID: ENSP00000363643
MASTESSLLRSLGLSPGPGSSEVELDCWFDEDFKFILLPVSYAVVFVLGLGLNAPTLWLFIFRLRPWDATATYMFHLALSDTLYVLSLPTLIYYYAAHNHWPFGTEICKFVRFLFYWNLYCSVLFLTCISVHRYLGICHPLRALRWGRPRLAGLLCLAVWLVVAGCLVPNLFFVTTSNKGTTVLCHDTTRPEEFDHYVHFSSAVMGLLFGVPCLVTLVCYGLMARRLYQPLPGSAQSSSRLRSLRTIAVVLTVFAVCFVPFHITRTIYYLARLLEADCRVLNIVNVVYKVTRPLASANSCLDPVLYLLTGDKYRRQLRQLCGGGKPQPRTAASSLALVSLPEDSSCRWAATPQDSSCSTPRADRL

SEQ ID NO: 70210 - protein, 328 aa, Homo sapiens
  Payload ID: 13945
  Gene Symbol: P2RY6
  Gene Name: pyrimidinergic receptor P2Y, G-protein coupled, 6
  Uniprot ID: Q15077
  ENSP ID: ENSP00000309771
MEWDNGTGQALGLPPTTCVYRENFKQLLLPPVYSAVLAAGLPLNICVITQICTSRRALTRTAVYTLNLALADLLYACSLPLLIYNYAQGDHWPFGDFACRLVRFLFYANLHGSILFLTCISFQRYLGICHPLAPWHKRGGRRAAWLVCVAVWLAVTTQCLPTAIFAATGIQRNRTVCYDLSPPALATHYMPYGMALTVIGFLLPFAALLACYCLLACRLCRQDGPAEPVAQERRGKAARMAVVVAAAFAISFLPFHITKTAYLAVRSTPGVPCTVLEAFAAAYKGTRPFASANSVLDPILFYFTQKKFRRRPHELLQKLTAKWQRQGR

SEQ ID NO: 70211 - protein, 328 aa, Homo sapiens; identical to SEQ ID NO: 70210
  Payload ID: 13945
  Gene Symbol: P2RY6
  Gene Name: pyrimidinergic receptor P2Y, G-protein coupled, 6
  Uniprot ID: Q15077
  ENSP ID: ENSP00000377215

SEQ ID NO: 70212 - protein, 328 aa, Homo sapiens; identical to SEQ ID NO: 70210
  Payload ID: 13945
  Gene Symbol: P2RY6
  Gene Name: pyrimidinergic receptor P2Y, G-protein coupled, 6
  Uniprot ID: Q15077
  ENSP ID: ENSP00000377216

SEQ ID NO: 70213 - protein, 328 aa, Homo sapiens; identical to SEQ ID NO: 70210
  Payload ID: 13945
  Gene Symbol: P2RY6
  Gene Name: pyrimidinergic receptor P2Y, G-protein coupled, 6
  Uniprot ID: Q15077
  ENSP ID: ENSP00000377217

SEQ ID NO: 70214 - protein, 245 aa, Homo sapiens
  Payload ID: 13945
  Gene Symbol: P2RY6
  Gene Name: pyrimidinergic receptor P2Y, G-protein coupled, 6
  ENSP ID: ENSP00000440770
MEWDNGTGQALGLPPTTCVYRENFKQLLLPPVYSAVLAAGLPLNICVITQICTSRRALTRTAVYTLNLALADLLYACSLPLLIYNYAQGDHWPFGDFACRLVRFLFYANLHGSILFLTCISFQRYLGICHPLAPWHKRGGRRAAWLVCVAVWLAVTTQCLPTAIFAATGIQRNRTVCYDLSPPALATHYMPYGMALTVIGFLLPFAALLACYCLLACRLCRQDGPAEPVAQERRGKAARMAVVVA

SEQ ID NO: 70215 - protein, 128 aa, Homo sapiens
  Payload ID: 13945
  Gene Symbol: P2RY6
  Gene Name: pyrimidinergic receptor P2Y, G-protein coupled, 6
  ENSP ID: ENSP00000441079
MEWDNGTGQALGLPPTTCVYRENFKQLLLPPVYSAVLAAGLPLNICVITQICTSRRALTRTAVYTLNLALADLLYACSLPLLIYNYAQGDHWPFGDFACRLVRFLFYANLHGSILFLTCISFQRYLGI

SEQ ID NO: 70216 - protein, 56 aa, Homo sapiens
  Payload ID: 13945
  Gene Symbol: P2RY6
  Gene Name: pyrimidinergic receptor P2Y, G-protein coupled, 6
  ENSP ID: ENSP00000442509
MEWDNGTGIQRNRTVCYDLSPPALATHYMPYGMALTVIGFLLPFAALLACYCLLAC

SEQ ID NO: 70217 - protein, 328 aa, Homo sapiens; identical to SEQ ID NO: 70210
  Payload ID: 13945
  Gene Symbol: P2RY6
  Gene Name: pyrimidinergic receptor P2Y, G-protein coupled, 6
  Uniprot ID: Q15077
  ENSP ID: ENSP00000442551

SEQ ID NO: 70218 - protein, 328 aa, Homo sapiens; identical to SEQ ID NO: 70210
  Payload ID: 13945
  Gene Symbol: P2RY6
  Gene Name: pyrimidinergic receptor P2Y, G-protein coupled, 6
  Uniprot ID: Q15077
  ENSP ID: ENSP00000442990

SEQ ID NO: 70219 - protein, 328 aa, Homo sapiens; identical to SEQ ID NO: 70210
  Payload ID: 13945
  Gene Symbol: P2RY6
  Gene Name: pyrimidinergic receptor P2Y, G-protein coupled, 6
  Uniprot ID: Q15077
  ENSP ID: ENSP00000443427

SEQ ID NO: 70220 - protein, 328 aa, Homo sapiens; identical to SEQ ID NO: 70210
  Payload ID: 13945
  Gene Symbol: P2RY6
  Gene Name: pyrimidinergic receptor P2Y, G-protein coupled, 6
  Uniprot ID: Q15077
  ENSP ID: ENSP00000445652

SEQ ID NO: 70221 - protein, 328 aa, Homo sapiens; identical to SEQ ID NO: 70210
  Payload ID: 13945
  Gene Symbol: P2RY6
  Gene Name: pyrimidinergic receptor P2Y, G-protein coupled, 6
  Uniprot ID: Q15077
  ENSP ID: ENSP00000480966

SEQ ID NO: 70222 - protein, 245 aa, Homo sapiens
  Payload ID: 13946
  Gene Symbol: PYHIN1
  Gene Name: pyrin and HIN domain family, member 1
  Uniprot ID: Q6K0P9
  ENSP ID: ENSP00000357117
MANNYKKIVLLKGLEVINDYHFRIVKSLLSNDLKLNPKMKEEYDKIQIADLMEEKFPGDAGLGKLIEFFKEIPTLGDLAETLKREKLKVANKIESIPVKGIIPSKKTKQKEVYPATPACTPSNRLTAKGAEETLGPQKRKKPSEEETGTKRSKMSKEQTRPSCSAGASTSTAMGRSPPPQTSSSAPPNTSSTEAYLMNLTLSLTAGSFLSCAVWGRDRELRNLELSATDSLSTAPIYYTPIPFAH

SEQ ID NO: 70223 - protein, 483 aa, Homo sapiens
  Payload ID: 13946
  Gene Symbol: PYHIN1
  Gene Name: pyrin and HIN domain family, member 1
  Uniprot ID: Q6K0P9
  ENSP ID: ENSP00000357120
MANNYKKIVLLKGLEVINDYHFRIVKSLLSNDLKLNPKMKEEYDKIQIADLMEEKFPGDAGLGKLIEFFKEIPTLGDLAETLKREKLKVKGIIPSKKTKQKEVYPATPACTPSNRLTAKGAEETLGPQKRKKPSEEETGTKRSKMSKEQTRPSCSAGASTSTAMGRSPPPQTSSSAPPNTSSTESLKPLANRHATASKNIFREDPIIAMVLNATKVFKYESSENEQRRMFHATVATQTQFFHVKVLNINLKRKFIKKRIIIISNYSKRNSLLEVNEASSVSEAGPDQTFEVPKDIIRRAKKIPKINILHKQTSGYIVYGLFMLHTKIVNRKTTIYEIQDKTGSMAVVGKGECHNIPCEKGDKLRLFCFRLRKRENMSKLMSEMHSFIQIQKNTNQRSHDSRSMALPQEQSQHPKPSEASTTLPESHLKTPQMPPTTPSSSSFTKKDETHPGAQSSPANFRITSPTVAPPLSSDTSTNRHPAVP

SEQ ID NO: 70224 - protein, 492 aa, Homo sapiens
  Payload ID: 13946
  Gene Symbol: PYHIN1
  Gene Name: pyrin and HIN domain family, member 1
  Uniprot ID: Q6K0P9
  ENSP ID: ENSP00000357122
MANNYKKIVLLKGLEVINDYHFRIVKSLLSNDLKLNPKMKEEYDKIQIADLMEEKFPGDAGLGKLIEFFKEIPTLGDLAETLKREKLKVANKIESIPVKGIIPSKKTKQKEVYPATPACTPSNRLTAKGAEETLGPQKRKKPSEEETGTKRSKMSKEQTRPSCSAGASTSTAMGRSPPPQTSSSAPPNTSSTESLKPLANRHATASKNIFREDPIIAMVLNATKVFKYESSENEQRRMFHATVATQTQFFHVKVLNINLKRKFIKKRIIIISNYSKRNSLLEVNEASSVSEAGPDQTFEVPKDIIRRAKKIPKINILHKQTSGYIVYGLFMLHTKIVNRKTTIYEIQDKTGSMAVVGKGECHNIPCEKGDKLRLFCFRLRKRENMSKLMSEMHSFIQIQKNTNQRSHDSRSMALPQEQSQHPKPSEASTTLPESHLKTPQMPPTTPSSSSFTKKDETHPGAQSSPANFRITSPTVAPPLSSDTSTNRHPAVP

SEQ ID NO: 70225 - protein, 452 aa, Homo sapiens
  Payload ID: 13946
  Gene Symbol: PYHIN1
  Gene Name: pyrin and HIN domain family, member 1
  Uniprot ID: Q6K0P9
  ENSP ID: ENSP00000376082
MANNYKKIVLLKGLEVINDYHFRIVKSLLSNDLKLNPKMKEEYDKIQIADLMEEKFPGDAGLGKLIEFFKEIPTLGDLAETLKREKLKVKGIIPSKKTKQKEVYPATPACTPSNRLTAKGAEETLGPQKRKKPSEEETGTKRSKMSKEQTRPSCSAGASTSTAMGRSPPPQTSSSAPPNTSSTESLKPLANRHATASKNIFREDPIIAMVLNATKVFKYESSENEQRRMFHATVATQTQFFHVKVLNINLKRKFIKKRIIIISNYSKRNSLLEVNEASSVSEAGPDQTFEVPKDIIRRAKKIPKINILHKQTSGYIVYGLFMLHTKIVNRKTTIYEIQDKTGSMAVVGKGECHNIPCEKGDKLRLFCFRLRKRENMSKLMSEMHSFIQIQKNTNQRSHDSRSMALPQEQSQHPKPSEASTTLPESHLKTPQMPPTTPSSSSFTKVTKDKDIK

SEQ ID NO: 70226 - protein, 461 aa, Homo sapiens
  Payload ID: 13946
  Gene Symbol: PYHIN1
  Gene Name: pyrin and HIN domain family, member 1
  Uniprot ID: Q6K0P9
  ENSP ID: ENSP00000376083
MANNYKKIVLLKGLEVINDYHFRIVKSLLSNDLKLNPKMKEEYDKIQIADLMEEKFPGDAGLGKLIEFFKEIPTLGDLAETLKREKLKVANKIESIPVKGIIPSKKTKQKEVYPATPACTPSNRLTAKGAEETLGPQKRKKPSEEETGTKRSKMSKEQTRPSCSAGASTSTAMGRSPPPQTSSSAPPNTSSTESLKPLANRHATASKNIFREDPIIAMVLNATKVFKYESSENEQRRMFHATVATQTQFFHVKVLNINLKRKFIKKRIIIISNYSKRNSLLEVNEASSVSEAGPDQTFEVPKDIIRRAKKIPKINILHKQTSGYIVYGLFMLHTKIVNRKTTIYEIQDKTGSMAVVGKGECHNIPCEKGDKLRLFCFRLRKRENMSKLMSEMHSFIQIQKNTNQRSHDSRSMALPQEQSQHPKPSEASTTLPESHLKTPQMPPTTPSSSSFTKVTKDKDIK

SEQ ID NO: 70227 - protein, 150 aa, Homo sapiens
  Payload ID: 13946
  Gene Symbol: PYHIN1
  Gene Name: pyrin and HIN domain family, member 1
  ENSP ID: ENSP00000407616
MANNYKKIVLLKGLEVINDYHFRIVKSLLSNDLKLNPKMKEEYDKIQIADLMEEKFPGDAGLGKLIEFFKEIPTLGDLAETLKREKLKVANKIESIPVKGIIPSKKTKQKEVYPATPACTPSNRLTAKGAEETLGPQKRKKPSEEETGTK

SEQ ID NO: 70228 - protein, 97 aa, Homo sapiens
  Payload ID: 13947
  Gene Symbol: PYDC2
  Gene Name: pyrin domain containing 2
  Uniprot ID: Q56P42
  ENSP ID: ENSP00000428325
MASSAELDFNLQALLEQLSQDELSKFKSLIRTISLGKELQTVPQTEVDKANGKQLVEIFTSHSCSYWAGMAAIQVFEKMNQTHLSGRADEHCVMPPP

SEQ ID NO: 70229 - protein, 136 aa, Homo sapiens
  Payload ID: 13948
  Gene Symbol: QRFP
  Gene Name: pyroglutamylated RFamide peptide
  Uniprot ID: P83859
  ENSP ID: ENSP00000345487
MVRPYPLIYFLFLPLGACFPLLDRREPTDAMGGLGAGERWADLAMGPRPHSVWGSSRWLRASQPQALLVIARGLQTSGREHAGCRFRFGRQDEGSEATGFLPAAGEKTSGPLGNLAEELNGYSRKKGGFSFRFGRR

SEQ ID NO: 70230 - protein, 136 aa, Homo sapiens; identical to SEQ ID NO: 70229
  Payload ID: 13948
  Gene Symbol: QRFP
  Gene Name: pyroglutamylated RFamide peptide
  Uniprot ID: P83859
  ENSP ID: ENSP00000485512

SEQ ID NO: 70231 - protein, 258 aa, Homo sapiens
  Payload ID: 13949
  Gene Symbol: QRFPR
  Gene Name: pyroglutamylated RFamide peptide receptor
  ENSP ID: ENSP00000335610
MQALNITPEQFSRLLRDHNLTREQFIALYRLRPLVYTPELPGRAKLALVLTGVLIFALALFGNALVFYVVTRSKAMRTVTNIFICSLALSDLLITFFCIPVTMLQNISDNWLGGAFICKMVPFVQSTAVVTEILTMTCIAVERHQGLVHPFKMKWQYTNRRAFTMLGVVWLVAVIVGSPMWHVQQLEIKYDFLYEKEHICCLEEWTSPVHQKIYTTFILVILFLLPLMEEETSCHYDGDSGGSLCCVLGTIPCCPYDD

SEQ ID NO: 70232 - protein, 431 aa, Homo sapiens
  Payload ID: 13949
  Gene Symbol: QRFPR
  Gene Name: pyroglutamylated RFamide peptide receptor
  Uniprot ID: Q96P65
  ENSP ID: ENSP00000377948
MQALNITPEQFSRLLRDHNLTREQFIALYRLRPLVYTPELPGRAKLALVLTGVLIFALALFGNALVFYVVTRSKAMRTVTNIFICSLALSDLLITFFCIPVTMLQNISDNWLGGAFICKMVPFVQSTAVVTEILTMTCIAVERHQGLVHPFKMKWQYTNRRAFTMLGVVWLVAVIVGSPMWHVQQLEIKYDFLYEKEHICCLEEWTSPVHQKIYTTFILVILFLLPLMVMLILYSKIGYELWIKKRVGDGSVLRTIHGKEMSKIARKKKRAVIMMVTVVALFAVCWAPFHVVHMMIEYSNFEKEYDDVTIKMIFAIVQIIGFSNSICNPIVYAFMNENFKKNVLSAVCYCIVNKTFSPAQRHGNSGITMMRKKAKFSLRENPVEETKGEAFSDGNIEVKLCEQTEEKKKLKRHLALFRSELAENSPLDSGH

SEQ ID NO: 70233 - protein, 190 aa, Homo sapiens
  Payload ID: 13949
  Gene Symbol: QRFPR
  Gene Name: pyroglutamylated RFamide peptide receptor
  ENSP ID: ENSP00000423369
MQALNITPEQFSRLLRDHNLTREQFIALYRLRPLVYTPELPGRAKLALVLTGVLIFALALFGNALVFYVVTRSKAMRTVTNIFICSLALSDLLITFFCIPVTMLQNISDNWLGGAFICKMVPFVQSTAVVTEILTMTCIAVERHQGLVHPFKMKWQYTNRRAFTMLGVVWLVAVIVGSPMWHVQQLEALP

SEQ ID NO: 70234 - protein, 132 aa, Homo sapiens
  Payload ID: 13950
  Gene Symbol: PGPEP1
  Gene Name: pyroglutamyl-peptidase I
  Uniprot ID: Q9NXJ5
  ENSP ID: ENSP00000252813
MATTVTLEKCGHNKGYKGLDNCRFCPGSQCCVEDGPESIDSIIDMDAVCKRVTTLGLDVSVTISQDAGRYLCDFTYYTSLYQSHGRSAFVHVPPLGKPYNADQLGRALRAIIEEMLDLLEQSEGKINYCHKH

SEQ ID NO: 70235 - protein, 209 aa, Homo sapiens
  Payload ID: 13950
  Gene Symbol: PGPEP1
  Gene Name: pyroglutamyl-peptidase I
  Uniprot ID: Q9NXJ5
  ENSP ID: ENSP00000269919
MEQPRKAVVVTGFGPFGEHTVNASWIAVQELEKLGLGDSVDLHVYEIPVEYQTVQRLIPALWEKHSPQLVVHVGVSGMATTVTLEKCGHNKGYKGLDNCRFCPGSQCCVEDGPESIDSIIDMDAVCKRVTTLGLDVSVTISQDAGRYLCDFTYYTSLYQSHGRSAFVHVPPLGKPYNADQLGRALRAIIEEMLDLLEQSEGKINYCHKH

SEQ ID NO: 70236 - protein, 89 aa, Homo sapiens
  Payload ID: 13950
  Gene Symbol: PGPEP1
  Gene Name: pyroglutamyl-peptidase I
  ENSP ID: ENSP00000468932
MEQPRKAVVVTGFGPFGEHTVNASWIAVQRWDLTILPWLVLNFRAQMILPPRPPKEAGIIGVSHRALPSGARKARPWRQRGPACVRDSG

SEQ ID NO: 70237 - protein, 89 aa, Homo sapiens; identical to SEQ ID NO: 70236
  Payload ID: 13950
  Gene Symbol: PGPEP1
  Gene Name: pyroglutamyl-peptidase I
  ENSP ID: ENSP00000470622

SEQ ID NO: 70238 - protein, 87 aa, Homo sapiens
  Payload ID: 13950
  Gene Symbol: PGPEP1
  Gene Name: pyroglutamyl-peptidase I
  ENSP ID: ENSP00000471130
EDGPESIDSIIDMDAVCKRVTTLGLDVSVTISQDAGSLGSQKSKVKVVAGLVPSGGAEGKNPSLPKVTVFSAAEGGPGPSRLSVASP

SEQ ID NO: 70239 - protein, 110 aa, Homo sapiens
  Payload ID: 13950
  Gene Symbol: PGPEP1
  Gene Name: pyroglutamyl-peptidase I
  ENSP ID: ENSP00000473226
  MOD_RES (1)..(1): Any amino acid
XFCPGSQCCVEDGPESIDSIIDMDAVCKRVTTLGLDVSVTISQDAGRKKPFPAKGDCVFCRRRRARSLQAQCGFSLTPALELLPVPFLKLLCPGPPRRRRICRILPGAGL

SEQ ID NO: 70240 - protein, 171 aa, Homo sapiens
  Payload ID: 13950
  Gene Symbol: PGPEP1
  Gene Name: pyroglutamyl-peptidase I
  ENSP ID: ENSP00000473772
MEQPRKAVVVTGFGPFGEHTVNASWIAVQELEKLGLGDSVDLHVYEIPVEYQTVQRLIPALWEKHSPQLVVHVGVSGMATTVTLEKCGHNKGYKGLDNCRFCPGSQCCVEDGPESIDSIIDMDAVCKRVTTLGLDVSVTISQDAGRVTVDQPSSTCPHWGSRTTRTSWAGH

SEQ ID NO: 70241 - protein, 111 aa, Homo sapiens
  Payload ID: 13950
  Gene Symbol: PGPEP1
  Gene Name: pyroglutamyl-peptidase I
  ENSP ID: ENSP00000475477
MEQPRKAVVVTGFGPFGEHTVNASWIAVQELEKLGLGDSVDLHVYEIPVEYQTVQRLIPALWEKHSPQISLRLYLLHLFVPESRSISLRPRAPTGEAVQRGPAGQGTESHH

SEQ ID NO: 70242 - protein, 146 aa, Homo sapiens
  Payload ID: 13950
  Gene Symbol: PGPEP1
  Gene Name: pyroglutamyl-peptidase I
  ENSP ID: ENSP00000475867
MEQPRKAVVVTGFGPFGEHTVNASWIAVQELEKLGLGDSVDLHVYEIPVEYQTVQRLIPALWEKHSPQLVVHVGVSGMATTVTLEKCGHNKGYKGLDNCRFCPGSQCCVEDGPESIDSIIDMDAVCKRVTTLGLDVSVTISQDAGR

SEQ ID NO: 70243 - protein, 196 aa, Homo sapiens
  Payload ID: 13951
  Gene Symbol: PGPEP1L
  Gene Name: pyroglutamyl-peptidase I-like
  Uniprot ID: A6NFU8
  ENSP ID: ENSP00000368199
MKPRTLVELSKLGLGNETVVQLRTLELPVDYREAKRRVTGIWEDHQPQLVVHVGMDTAAKAIILEQSGKNQGYRDADIRSFWPEGGVCLPGSPDVLESGVCMKAVCKRVAVEGVDVIFSRDAGRYVCDYTYYLSLHHGKGCAALIHVPPLSRGLPASLLGRALRVIIQEMLEEVGKPKHRAQFEENSTMVLPAKGN

SEQ ID NO: 70244 - protein, 142 aa, Homo sapiens
  Payload ID: 13951
  Gene Symbol: PGPEP1L
  Gene Name: pyroglutamyl-peptidase I-like
  Uniprot ID: A6NFU8
  ENSP ID: ENSP00000437560
MDTAAKAIILEQSGKNQGYRDADIRSFWPEGGVCLPGSPDVLESGVCMKAVCKRVAVEGVDVIFSRDAGRYVCDYTYYLSLHHGKGCAALIHVPPLSRGLPASLLGRALRVIIQEMLEEVGKPKHRAQFEENSTMVLPAKGN

SEQ ID NO: 70245 - protein, 178 aa, Homo sapiens
  Payload ID: 13952
  Gene Symbol: PPA1
  Gene Name: pyrophosphatase (inorganic) 1
  ENSP ID: ENSP00000362327
MSGFSTEERAAPFSLEYRVFLKNEKGQYISPFHDIPIYADKDVFHMVVEVPRWSNAKMEIATKDPLNPIKQDVKKGKLRYVANLFPYKGYIWNYGAIPQTWEDPGHNDKHTGCCGDNDPIDVCEIGSKVCARGEIIGVKVLGILAMIDEGETDWKVIAINVDDPDAANYNVCNSVVIL

SEQ ID NO: 70246 - protein, 289 aa, Homo sapiens
  Payload ID: 13952
  Gene Symbol: PPA1
  Gene Name: pyrophosphatase (inorganic) 1
  Uniprot ID: Q15181
  ENSP ID: ENSP00000362329
MSGFSTEERAAPFSLEYRVFLKNEKGQYISPFHDIPIYADKDVFHMVVEVPRWSNAKMEIATKDPLNPIKQDVKKGKLRYVANLFPYKGYIWNYGAIPQTWEDPGHNDKHTGCCGDNDPIDVCEIGSKVCARGEIIGVKVLGILAMIDEGETDWKVIAINVDDPDAANYNDINDVKRLKPGYLEATVDWFRRYKVPDGKPENEFAFNAEFKDKDFAIDIIKSTHDHWKALVTKKTNGKGISCMNTTLSESPFKCDPDAARAIVDALPPPCESACTVPTDVDKWFHHQKN

SEQ ID NO: 70247 - protein, 178 aa, Homo sapiens; identical to SEQ ID NO: 70245
  Payload ID: 13952
  Gene Symbol: PPA1
  Gene Name: pyrophosphatase (inorganic) 1
  ENSP ID: ENSP00000486162

SEQ ID NO: 70248 - protein, 55 aa, Homo sapiens
  Payload ID: 13953
  Gene Symbol: PPA2
  Gene Name: pyrophosphatase (inorganic) 2
  ENSP ID: ENSP00000273977
MSALLRLLRTGAPAAACLRLGTSAGTGSRRAMALYHTEERGQPCSQNYRLFFKSV

SEQ ID NO: 70249 - protein, 305 aa, Homo sapiens
  Payload ID: 13953
  Gene Symbol: PPA2
  Gene Name: pyrophosphatase (inorganic) 2
  Uniprot ID: Q9H2U2
  ENSP ID: ENSP00000313061
MSALLRLLRTGAPAAACLRLGTSAGTGSRRAMALYHTEERGQPCSQNYRLFFKNVTGHYISPFHDIPLKVNSKEENGIPMKKARNDEYENLFNMIVEIPRWTNAKMEIATKEPMNPIKQYVKDGKLRYVANIFPYKGYIWNYGTLPQILSCGEVIHVKILGILALIDEGETDWKLIAINANDPEASKFHDIDDVKKFKPGYLEATLNWFRLYKVPDGKPENQFAFNGEFKNKAFALEVIKSTHQCWKALLMKKCNGGAINCTNVQISDSPFRCTQEEARSLVESVSSSPNKESNEEEQVWHFLGK

SEQ ID NO: 70250 - protein, 168 aa, Homo sapiens
  Payload ID: 13953
  Gene Symbol: PPA2
  Gene Name: pyrophosphatase (inorganic) 2
  Uniprot ID: Q9H2U2
  ENSP ID: ENSP00000340352
MSALLRLLRTGAPAAACLRLGTSAGTGSRRAMALYHTEERGQPCSQNYRLFFNIDDVKKFKPGYLEATLNWFRLYKVPDGKPENQFAFNGEFKNKAFALEVIKSTHQCWKALLMKKCNGGAINCTNVQISDSPFRCTQEEARSLVESVSSSPNKESNEEEQVWHFLGK

SEQ ID NO: 70251 - protein, 334 aa, Homo sapiens
  Payload ID: 13953
  Gene Symbol: PPA2
  Gene Name: pyrophosphatase (inorganic) 2
  Uniprot ID: Q9H2U2
  ENSP ID: ENSP00000343885
MSALLRLLRTGAPAAACLRLGTSAGTGSRRAMALYHTEERGQPCSQNYRLFFKNVTGHYISPFHDIPLKVNSKEENGIPMKKARNDEYENLFNMIVEIPRWTNAKMEIATKEPMNPIKQYVKDGKLRYVANIFPYKGYIWNYGTLPQTWEDPHEKDKSTNCFGDNDPIDVCEIGSKILSCGEVIHVKILGILALIDEGETDWKLIAINANDPEASKFHDIDDVKKFKPGYLEATLNWFRLYKVPDGKPENQFAFNGEFKNKAFALEVIKSTHQCWKALLMKKCNGGAINCTNVQISDSPFRCTQEEARSLVESVSSSPNKESNEEEQVWHFLGK

SEQ ID NO: 70252 - protein, 232 aa, Homo sapiens
  Payload ID: 13953
  Gene Symbol: PPA2
  Gene Name: pyrophosphatase (inorganic) 2
  Uniprot ID: Q9H2U2
  ENSP ID: ENSP00000389957
MSALLRLLRTGAPAAACLRLGTSAGTGSRRAMALYHTEERGQPCSQNYRLFFKNVTGHYISPFHDIPLKVNSKEILSCGEVIHVKILGILALIDEGETDWKLIAINANDPEASKFHDIDDVKKFKPGYLEATLNWFRLYKVPDGKPENQFAFNGEFKNKAFALEVIKSTHQCWKALLMKKCNGGAINCTNVQISDSPFRCTQEEARSLVESVSSSPNKESNEEEQVWHFLGK

SEQ ID NO: 70253 - protein, 195 aa, Homo sapiens
  Payload ID: 13953
  Gene Symbol: PPA2
  Gene Name: pyrophosphatase (inorganic) 2
  ENSP ID: ENSP00000421177
MSALLRLLRTGAPAAACLRLGTSAGTGSRRAMALYHTEERGQPCSQNYRLFFKNVTGHYISPFHDIPLKENGIPMKKARNDEYENLFNMIVEIPRWTNAKMEIATKEPMNPIKQYVKDGKLRYVANIFPYKGYIWNYGTLPQTWEDPHEKDKSTNCFGDNDPIDVCEIGSKILSCGEVIHVKILGILALIDEGET

SEQ ID NO: 70254 - protein, 42 aa, Homo sapiens
  Payload ID: 13953
  Gene Symbol: PPA2
  Gene Name: pyrophosphatase (inorganic) 2
  ENSP ID: ENSP00000422405
TSAGTGSRRAMALYHTEERGQPCSQNYRLFFRKWHSYEESTK

SEQ ID NO: 70255 - protein, 113 aa, Homo sapiens
  Payload ID: 13953
  Gene Symbol: PPA2
  Gene Name: pyrophosphatase (inorganic) 2
  ENSP ID: ENSP00000422738
MSALLRLLRTGAPAAACLRLGTSAGTGSRRAMALYHTEERGQPCSQNYRLFFKNVTGHYISPFHDIPLKVNSKEENGIPMKKARNDEYENLFNMIVEIPRWTNAKMEVLKIAM

SEQ ID NO: 70256 - protein, 191 aa, Homo sapiens
  Payload ID: 13953
  Gene Symbol: PPA2
  Gene Name: pyrophosphatase (inorganic) 2
  ENSP ID: ENSP00000423363
MSALLRLLRTGAPAAACLRLGTSAGTGSRRAMALYHTEERGQPCSQNYRLFFKNVTGHYISPFHDIPLKVNSKETWEDPHEKDKSTNCFGDNDPIDVCEIGSKILSCGEVIHVKILGILALIDEGETDWKLIAINANDPEASKFHDIDDVKKFKPGYLEATLNWFRLYKVPDGKPENQFAFNGEFKNKAFA

SEQ ID NO: 70257 - protein, 63 aa, Homo sapiens
  Payload ID: 13953
  Gene Symbol: PPA2
  Gene Name: pyrophosphatase (inorganic) 2
  ENSP ID: ENSP00000423467
MALYHTEERGQPCSQNYRLFFKNVTGHYISPFHDIPLKVNSKEDTEAQGIFIDLSKIWKMAFL

SEQ ID NO: 70258 - protein, 226 aa, Homo sapiens
  Payload ID: 13953
  Gene Symbol: PPA2
  Gene Name: pyrophosphatase (inorganic) 2
  ENSP ID: ENSP00000423889
  MOD_RES (1)..(1): Any amino acid
XLRLLRTGAPAAACLRLGTSAGTGSRRAMALYHTEERGQPCSQNYRLFFKNVTGHYISPFHDIPLKVNSKEENGIPMKKARNDEYEIATKEPMNPIKQYVKDGKLRYVANIFPYKGYIWNYGTLPQTWEDPHEKDKSTNCFGDNDPIDVCEIGSKILSCGEVIHVKILGILALIDEGETDWKLIAINANDPEASKFHDIDDVKKFKPGYLEATLNWFRLYKVPDGK

SEQ ID NO: 70259 - protein, 55 aa, Homo sapiens; identical to SEQ ID NO: 70248
  Payload ID: 13953
  Gene Symbol: PPA2
  Gene Name: pyrophosphatase (inorganic) 2
  ENSP ID: ENSP00000424988

SEQ ID NO: 70260 - protein, 88 aa, Homo sapiens
  Payload ID: 13953
  Gene Symbol: PPA2
  Gene Name: pyrophosphatase (inorganic) 2
  ENSP ID: ENSP00000426347
MKKARNDEYENLFNMIVEIPRWTNAKMEIATKEPMNPIKQYVKDGKLRYVANIFPYKGYIWNYGTLPQTWEDPHEKDKSTNCFGDNDP

SEQ ID NO: 70261 - protein, 69 aa, Homo sapiens
  Payload ID: 13953
  Gene Symbol: PPA2
  Gene Name: pyrophosphatase (inorganic) 2
  ENSP ID: ENSP00000427375
  MOD_RES (1)..(1): Any amino acid
XWTNAKMEIATKEPMNPIKQYVKDGKLRYVANIFPYKGYIWNYGTLPQVSSSPNKESNEEEQVWHFLGK

SEQ ID NO: 70262 - protein, 319 aa, Homo sapiens
  Payload ID: 13954
  Gene Symbol: PYCR1
  Gene Name: pyrroline-5-carboxylate reductase 1
  Uniprot ID: P32322
  ENSP ID: ENSP00000328858
MSVGFIGAGQLAFALAKGFTAAGVLAAHKIMASSPDMDLATVSALRKMGVKLTPHNKETVQHSDVLFLAVKPHIIPFILDEIGADIEDRHIVVSCAAGVTISSIEKKLSAFRPAPRVIRCMTNTPVVVREGATVYATGTHAQVEDGRLMEQLLSSVGFCTEVEEDLIDAVTGLSGSGPAYAFTALDALADGGVKMGLPRRLAVRLGAQALLGAAKMLLHSEQHPGQLKDNVSSPGGATIHALHVLESGGFRSLLINAVEASCIRTRELQSMADQEQVSPAAIKKTILDKVKLDSPAGTALSPSGHTKLLPRSLAPAGKD

SEQ ID NO: 70263 - protein, 316 aa, Homo sapiens
  Payload ID: 13954
  Gene Symbol: PYCR1
  Gene Name: pyrroline-5-carboxylate reductase 1
  Uniprot ID: P32322
  ENSP ID: ENSP00000336579
MSVGFIGAGQLAFALAKGFTAAGVLAAHKIMASSPDMDLATVSALRKMGVKLTPHNKETVQHSDVLFLAVKPHIIPFILDEIGADIEDRHIVVSCAAGVTISSIEKKLSAFRPAPRVIRCMTNTPVVVREGATVYATGTHAQVEDGRLMEQLLSSVGFCTEVEEDLIDAVTGLSGSGPAYAFTALDALADGGVKMGLPRRLAVRLGAQALLGAAKMLLHSEQHPGQLKDNVSSPGGATIHALHVLESGGFRSLLINAVEASCIRTRELQSMADQEQVSPAAIKKTILDKDHLPLELGSPEGLHPLLLQYQLARAPS

SEQ ID NO: 70264 - protein, 346 aa, Homo sapiens
  Payload ID: 13954
  Gene Symbol: PYCR1
  Gene Name: pyrroline-5-carboxylate reductase 1
  Uniprot ID: P32322
  ENSP ID: ENSP00000384949
MVGGGRRVGRDEPVPSVGALGQGSPDSMSVGFIGAGQLAFALAKGFTAAGVLAAHKIMASSPDMDLATVSALRKMGVKLTPHNKETVQHSDVLFLAVKPHIIPFILDEIGADIEDRHIVVSCAAGVTISSIEKKLSAFRPAPRVIRCMTNTPVVVREGATVYATGTHAQVEDGRLMEQLLSSVGFCTEVEEDLIDAVTGLSGSGPAYAFTALDALADGGVKMGLPRRLAVRLGAQALLGAAKMLLHSEQHPGQLKDNVSSPGGATIHALHVLESGGFRSLLINAVEASCIRTRELQSMADQEQVSPAAIKKTILDKVKLDSPAGTALSPSGHTKLLPRSLAPAGKD

SEQ ID NO: 70265 - protein, 288 aa, Homo sapiens
  Payload ID: 13954
  Gene Symbol: PYCR1
  Gene Name: pyrroline-5-carboxylate reductase 1
  ENSP ID: ENSP00000385483
MSVGFIGAGQLAFALAKGFTAAGVLAAHKIMASSPDMDLATVSALRKMGVKLTPHNKETVQHSDVLFLAVKPHIIPFILDEIGADIEDRHIVVSCAAGVTISSIEKKLSAFRPAPRVIRCMTNTPVVVREGATVYATGTHAQVEDGRLMEQLLSSVGFCTEVEEDLIDAVTGLSGSGPAYGAAKMLLHSEQHPGQLKDNVSSPGGATIHALHVLESGGFRSLLINAVEASCIRTRELQSMADQEQVSPAAIKKTILDKVKLDSPAGTALSPSGHTKLLPRSLAPAGKD

SEQ ID NO: 70266 - protein, 253 aa, Homo sapiens
  Payload ID: 13954
  Gene Symbol: PYCR1
  Gene Name: pyrroline-5-carboxylate reductase 1
  ENSP ID: ENSP00000386002
MSVGFIGAGQLAFALAKGFTAAGVLAAHKIMASSPDMDLATVSALRKMGVKLTPHNKETVQHSDVLFLAVKPHIIPFILDEIGADIEDRHIVVSCAAGVTISSIEKKLSAFRPAPRVIRCMTNTPVVVREGATVYATGTHAQVEDGRLMEQLLSSVGFCTEVEEDLIDAVTGLSGSGPAYAFTALDALADGGVKMGLPRRLAVRLGAQALLGAAKMLLHSEQHPGQLKDNVSSPGGATIHALHVLESGGFRSL

SEQ ID NO: 70267 - protein, 109 aa, Homo sapiens
  Payload ID: 13954
  Gene Symbol: PYCR1
  Gene Name: pyrroline-5-carboxylate reductase 1
  ENSP ID: ENSP00000462398
MASSPDMDLATVSALRKMGVKLTPHNKETVQHSDVLFLAVKPHIIPFILDEIGADIEDRHIVVSCAAGVTISSIEKKLSAFRPAPRVIRCMTNTPVVVREGATVYATGT

SEQ ID NO: 70268 - protein, 84 aa, Homo sapiens
  Payload ID: 13954
  Gene Symbol: PYCR1
  Gene Name: pyrroline-5-carboxylate reductase 1
  ENSP ID: ENSP00000462892
MSVGFIGAGQLAFALAKGFTAAGVLAAHKIMASSPDMDLATVSALRKMGVKLTPHNKETVQHSDVLFLAVKPHIIPFILDEIGA

SEQ ID NO: 70269 - protein, 94 aa, Homo sapiens
  Payload ID: 13954
  Gene Symbol: PYCR1
  Gene Name: pyrroline-5-carboxylate reductase 1
  ENSP ID: ENSP00000463225
MSVGFIGAGQLAFALAKGFTAAGVLAAHKIMASSPDMDLATVSALRKMGVKLTPHNKETVQHSDVLFLAVKPHIIPFILDEIGADIEDRHIVVS

SEQ ID NO: 70270 - protein, 242 aa, Homo sapiens
  Payload ID: 13954
  Gene Symbol: PYCR1
  Gene Name: pyrroline-5-carboxylate reductase 1
  ENSP ID: ENSP00000463226
MASSPDMDLATVSALRKMGVKLTPHNKETVQHSDVLFLAVKPHIIPFILDEIGADIEDRHIVVSCAAGVTISSIEKKLSAFRPAPRVIRCMTNTPVVVREGATVYATGTHAQVEDGRLMEQLLSSVGFCTEVEEDLIDAVTGLSGSGPAYAFTALDALADGGVKMGLPRRLAVRLGAQALLGAAKMLLHSEQHPGQLKDNVSSPGGATIHALHVLESGGFRSLLINAVEASCIRTRELQSMA

SEQ ID NO: 70271 - protein, 173 aa, Homo sapiens
  Payload ID: 13954
  Gene Symbol: PYCR1
  Gene Name: pyrroline-5-carboxylate reductase 1
  ENSP ID: ENSP00000463342
ALAKGFTAAGVLAAHKIMASSPDMDLATVSALRKMGVKLTPHNKETVQHSDVLFLAVKPHIIPFILDEIGADIEDRHIVVSCAAGVTISSIEKKLSAFRPAPRVIRCMTNTPVVVREGATVYATGTHAQVEDGRLMEQLLSSVGFCTEVEEDLIDAVTGLSGSGPAYGAAVHG

SEQ ID NO: 70272 - protein, 225 aa, Homo sapiens
  Payload ID: 13954
  Gene Symbol: PYCR1
  Gene Name: pyrroline-5-carboxylate reductase 1
  ENSP ID: ENSP00000463343
MSVGFIGAGQLAFALAKGFTAAGVLAAHKIMASSPDMDLATVSALRKMGVKLTPHNKETVQHSDVLFLAVKPHIIPFILDEIGADIEDRHIVVSCAAGVTISSIEKKLSAFRPAPRVIRCMTNTPVVVREGATVYATGTHAQVEDGRLMEQLLSSVGFCTEVEEDLIDAVTGLSGSGPAYAFTALDALADGGVKMGLPRRLAVRLGAQALLGAAKMLLHSEQHPG

SEQ ID NO: 70273 - protein, 217 aa, Homo sapiens
  Payload ID: 13954
  Gene Symbol: PYCR1
  Gene Name: pyrroline-5-carboxylate reductase 1
  ENSP ID: ENSP00000463352
MSVGFIGAGQLAFALAKGFTAAGVLAAHKIMASSPDMDLATVSALRKMGVKLTPHNKETVQHSDVLFLAVKPHIIPFILDEIGADIEDRHIVVSCAAGVTISSIEKKLSAFRPAPRVIRCMTNTPVVVREGATVYATGTHAQVEDGRLMEQLLSSVGFCTEVEEDLIDAVTGLSGSGPAYAFTALDALADGGVKMGLPRRLAVRLGAQALLGAAVHG

SEQ ID NO: 70274 - protein, 165 aa, Homo sapiens
  Payload ID: 13954
  Gene Symbol: PYCR1
  Gene Name: pyrroline-5-carboxylate reductase 1
  ENSP ID: ENSP00000463601
MSVGFIGAGQLAFALAKGFTAAGVLAAHKIMASSPDMDLATVSALRKMGVKLTPHNKETVQHSDVLFLAVKPHIIPFILDEIGADIEDRHIVVSCAAGVTISSIEKKLSAFRPAPRVIRCMTNTPVVVREGATVYATGTHAQVEDGRLMEQLLSSVGFCTEVEED

SEQ ID NO: 70275 - protein, 132 aa, Homo sapiens
  Payload ID: 13954
  Gene Symbol: PYCR1
  Gene Name: pyrroline-5-carboxylate reductase 1
  ENSP ID: ENSP00000464098
MSVGFIGAGQLAFALAKGFTAAGVLAAHKIMASSPDMDLATVSALRLSAFRPAPRVIRCMTNTPVVVREGATVYATGTHAQVEDGRLMEQLLSSVGFCTEVEEDLIDAVTGLSGSGPAYAFTALDALADGGV

SEQ ID NO: 70276 - protein, 115 aa, Homo sapiens
  Payload ID: 13954
  Gene Symbol: PYCR1
  Gene Name: pyrroline-5-carboxylate reductase 1
  ENSP ID: ENSP00000464440
MSVGFIGAGQLAFALAKGFTAAGVLAAHKIMASSPDMDLATVSALRKMGVKLTPHNKETVQHSDVLFLAVKPHIIPFILDEIGADIEDRHIVVSCAAGVTISSIEKKLSAFRPAP

SEQ ID NO: 70277 - protein, 319 aa, Homo sapiens; identical to SEQ ID NO: 70262
  Payload ID: 13954
  Gene Symbol: PYCR1
  Gene Name: pyrroline-5-carboxylate reductase 1
  Uniprot ID: P32322
  ENSP ID: ENSP00000479793

SEQ ID NO: 70278 - protein, 217 aa, Homo sapiens; identical to SEQ ID NO: 70273
  Payload ID: 13954
  Gene Symbol: PYCR1
  Gene Name: pyrroline-5-carboxylate reductase 1
  ENSP ID: ENSP00000485679

SEQ ID NO: 70279 - protein, 320 aa, Homo sapiens
  Payload ID: 13955
  Gene Symbol: PYCR2
  Gene Name: pyrroline-5-carboxylate reductase family, member 2
  Uniprot ID: Q96C36
  ENSP ID: ENSP00000342502
MSVGFIGAGQLAYALARGFTAAGILSAHKIIASSPEMNLPTVSALRKMGVNLTRSNKETVKHSDVLFLAVKPHIIPFILDEIGADVQARHIVVSCAAGVTISSVEKKLMAFQPAPKVIRCMTNTPVVVQEGATVYATGTHALVEDGQLLEQLMSSVGFCTEVEEDLIDAVTGLSGSGPAYAFMALDALADGGVKMGLPRRLAIQLGAQALLGAAKMLLDSEQHPCQLKDNVCSPGGATIHALHFLESGGFRSLLINAVEASCIRTRELQSMADQEKISPAALKKTLLDRVKLESPTVSTLTPSSPGKLLTRSLALGGKKD

SEQ ID NO: 70280 - protein, 246 aa, Homo sapiens
  Payload ID: 13955
  Gene Symbol: PYCR2
  Gene Name: pyrroline-5-carboxylate reductase family, member 2
  ENSP ID: ENSP00000478165
MSVGFIGAGQLAYALARGFTAAGILSAHKIIASSPEMNLPTVSALRKMGVNLTRSNKETVKHSDVLFLAVKPHIIPFILDEIGADVQARHIVVSCAAGVTISSVEKAFMALDALADGGVKMGLPRRLAIQLGAQALLGAAKMLLDSEQHPCQLKDNVCSPGGATIHALHFLESGGFRSLLINAVEASCIRTRELQSMADQEKISPAALKKTLLDRVKLESPTVSTLTPSSPGKLLTRSLALGGKKD

SEQ ID NO: 70281 - protein, 87 aa, Homo sapiens
  Payload ID: 13955
  Gene Symbol: PYCR2
  Gene Name: pyrroline-5-carboxylate reductase family, member 2
  ENSP ID: ENSP00000480779
MNLPTVSALRKMGVNLTRSNKETVKHSDVLFLAVKPHIIPFILDEIGADVQARHIVVSCAAGVTISSVEKKLMAFQPAPKVIRCMTN

SEQ ID NO: 70282 - protein, 157 aa, Homo sapiens
  Payload ID: 13955
  Gene Symbol: PYCR2
  Gene Name: pyrroline-5-carboxylate reductase family, member 2
  ENSP ID: ENSP00000482614
MNLPTVSALRKMGVNLTRSNKETVKHSDVLFLAVKPHIIPFILDEIGADVQARHIVVSCAAGVTISSVEKKLMAFQPAPKVIRCMTNTPVVVQEGATVYATGTHALVEDGQLLEQLMSSVGFCTEVEEDLIDAVTGLSGSGPAYAFMALDALADGGV

SEQ ID NO: 70283 - protein, 319 aa, Homo sapiens [sequence omitted]

SEQ ID NO: 70284 - protein, 286 aa, Homo sapiens
  Payload ID: 13956
  Gene Symbol: PYCRL
  Gene Name: pyrroline-5-carboxylate reductase-like
  ENSP ID: ENSP00000220966
MGGERSGVRGNKMAAAEPSPRRVGFVGAGRMAGAIAQGLIRAGKVEAQHILASAPTDRNLCHFQALGCRTTHSNQEVLQSCLLVIFATKPHVLPAVLAEVAPVVTTEHILVSVAAGVSLSTLEELLPPNTRVLRVLPNLPCVVQEGAIVMARGRHVGSSETKLLQHLLEACGRCEEVPEAYVDIHTGLSGSGVAFVCAFSEALAEGAVKMGMPSSLAHRIAAQTLLGTAKMLLHEGQHPAQLRSDVCTPGGTTIYGLHALEQGGLRAATMSAVEAATCRAKELSRK

SEQ ID NO: 70285 - protein, 137 aa, Homo sapiens
  Payload ID: 13956
  Gene Symbol: PYCRL
  Gene Name: pyrroline-5-carboxylate reductase-like
  ENSP ID: ENSP00000366802
MARGRHVGSSETKLLQHLLEACGRCEEVPEAYVDIHTGLSGSGVAFVCAFSEALAEGAVKMGMPSSLAHRIAAQTLLGTAKMLLHEGQHPAQLRSDVCTPGGTTIYGLHALEQGGLRAATMSAVEAATCRAKELSRK

SEQ ID NO: 70286 - protein, 44 aa, Homo sapiens
  Payload ID: 13956
  Gene Symbol: PYCRL
  Gene Name: pyrroline-5-carboxylate reductase-like
  ENSP ID: ENSP00000401804
MAAAEPSPRRVGFVGAGRMAGAIAQGLIRAAILQGPEESRSIGK

SEQ ID NO: 70287 - protein, 254 aa, Homo sapiens
  Payload ID: 13956
  Gene Symbol: PYCRL
  Gene Name: pyrroline-5-carboxylate reductase-like
  Uniprot ID: Q53H96
  ENSP ID: ENSP00000404493
MAAAEPSPRRVGFVGAGRMAGAIAQGLIRAGKVEAQHILASAPTDRNLCHFQALGCRTTHSNQEVLQSCLLVIFATKPHVLPAVLAEVAPVVTTEHILVSVAAGVSLSTLEEEGAIVMARGRHVGSSETKLLQHLLEACGRCEEVPEAYVDIHTGLSGSGVAFVCAFSEALAEGAVKMGMPSSLAHRIAAQTLLGTAKMLLHEGQHPAQLRSDVCTPGGTTIYGLHALEQGGLRAATMSAVEAATCRAKELSRK

SEQ ID NO: 70288 - protein, 59 aa, Homo sapiens
  Payload ID: 13956
  Gene Symbol: PYCRL
  Gene Name: pyrroline-5-carboxylate reductase-like
  ENSP ID: ENSP00000478138
MARGRHVGSSETKLLQHLLEACGRCEEVPEAYVDIHTGLSGSGVAFVCAFSEALAEGAV

SEQ ID NO: 70289 - protein, 274 aa, Homo sapiens
  Payload ID: 13956
  Gene Symbol: PYCRL
  Gene Name: pyrroline-5-carboxylate reductase-like
  Uniprot ID: Q53H96
  ENSP ID: ENSP00000480945
MAAAEPSPRRVGFVGAGRMAGAIAQGLIRAGKVEAQHILASAPTDRNLCHFQALGCRTTHSNQEVLQSCLLVIFATKPHVLPAVLAEVAPVVTTEHILVSVAAGVSLSTLEELLPPNTRVLRVLPNLPCVVQEGAIVMARGRHVGSSETKLLQHLLEACGRCEEVPEAYVDIHTGLSGSGVAFVCAFSEALAEGAVKMGMPSSLAHRIAAQTLLGTAKMLLHEGQHPAQLRSDVCTPGGTTIYGLHALEQGGLRAATMSAVEAATCRAKELSRK

SEQ ID NO: 70290 - protein, 286 aa, Homo sapiens; identical to SEQ ID NO: 70284
  Payload ID: 13956
  Gene Symbol: PYCRL
  Gene Name: pyrroline-5-carboxylate reductase-like
  ENSP ID: ENSP00000484458

SEQ ID NO: 70291 - protein, 137 aa, Homo sapiens; identical to SEQ ID NO: 70285
  Payload ID: 13956
  Gene Symbol: PYCRL
  Gene Name: pyrroline-5-carboxylate reductase-like
  ENSP ID: ENSP00000487676

SEQ ID NO: 70292 - protein, 274 aa, Homo sapiens; identical to SEQ ID NO: 70289
  Payload ID: 13956
  Gene Symbol: PYCRL
  Gene Name: pyrroline-5-carboxylate reductase-like
  Uniprot ID: Q53H96
  ENSP ID: ENSP00000488371

SEQ ID NO: 70293 - protein, 44 aa, Homo sapiens; identical to SEQ ID NO: 70286
  Payload ID: 13956
  Gene Symbol: PYCRL
  Gene Name: pyrroline-5-carboxylate reductase-like
  ENSP ID: ENSP00000488701

SEQ ID NO: 70294 - protein, 59 aa, Homo sapiens; identical to SEQ ID NO: 70288
  Payload ID: 13956
  Gene Symbol: PYCRL
  Gene Name: pyrroline-5-carboxylate reductase-like
  ENSP ID: ENSP00000488777

SEQ ID NO: 70295 - protein, 254 aa, Homo sapiens; identical to SEQ ID NO: 70287
  Payload ID: 13956
  Gene Symbol: PYCRL
  Gene Name: pyrroline-5-carboxylate reductase-like
  Uniprot ID: Q53H96
  ENSP ID: ENSP00000488877

SEQ ID NO: 70296 - protein, 1178 aa, Homo sapiens
  Payload ID: 13957
  Gene Symbol: PC
  Gene Name: pyruvate carboxylase
  Uniprot ID: P11498
  ENSP ID: ENSP00000377527
MLKFRTVHGGLRLLGIRRTSTAPAASPNVRRLEYKPIKKVMVANRGEIAIRVFRACTELGIRTVAIYSEQDTGQMHRQKADEAYLIGRGLAPVQAYLHIPDIIKVAKENNVDAVHPGYGFLSERADFAQACQDAGVRFIGPSPEVVRKMGDKVEARAIAIAAGVPVVPGTDAPITSLHEAHEFSNTYGFPIIFKAAYGGGGRGMRVVHSYEELEENYTRAYSEALAAFGNGALFVEKFIEKPRHIEVQILGDQYGNILHLYERDCSIQRRHQKVVEIAPAAHLDPQLRTRLTSDSVKLAKQVGYENAGTVEFLVDRHGKHYFIEVNSRLQVEHTVTEEITDVDLVHAQIHVAEGRSLPDLGLRQENIRINGCAIQCRVTTEDPARSFQPDTGRIEVFRSGEGMGIRLDNASAFQGAVISPHYDSLLVKVIAHGKDHPTAATKMSRALAEFRVRGVKTNIAFLQNVLNNQQFLAGTVDTQFIDENPELFQLRPAQNRAQKLLHYLGHVMVNGPTTPIPVKASPSPTDPVVPAVPIGPPPAGFRDILLREGPEGFARAVRNHPGLLLMDTTFRDAHQSLLATRVRTHDLKKIAPYVAHNFSKLFSMENWGGATFDVAMRFLYECPWRRLQELRELIPNIPFQMLLRGANAVGYTNYPDNVVFKFCEVAKENGMDVFRVFDSLNYLPNMLLGMEAAGSAGGVVEAAISYTGDVADPSRTKYSLQYYMGLAEELVRAGTHILCIKDMAGLLKPTACTMLVSSLRDRFPDLPLHIHTHDTSGAGVAAMLACAQAGADVVDVAADSMSGMTSQPSMGALVACTRGTPLDTEVPMERVFDYSEYWEGARGLYAAFDCTATMKSGNSDVYENEIPGGQYTNLHFQAHSMGLGSKFKEVKKAYVEANQMLGDLIKVTPSSKIVGDLAQFMVQNGLSRAEAEAQAEELSFPRSVVEFLQGYIGVPHGGFPEPFRSKVLKDLPRVEGRPGASLPPLDLQALEKELVDRHGEEVTPEDVLSAAMYPDVFAHFKDFTATFGPLDSLNTRLFLQGPKIAEEFEVELERGKTLHIKALAVSDLNRAGQRQVFFELNGQLRSILVKDTQAMKEMHFHPKALKDVKGQIGAPMPGKVIDIKVVAGAKVAKGQPLCVLSAMKMETVVTSPMEGTVRKVHVTKDMTLEGDDLILEIE

SEQ ID NO: 70297 - protein, 1178 aa, Homo sapiens; identical to SEQ ID NO: 70296
  Payload ID: 13957
  Gene Symbol: PC
  Gene Name: pyruvate carboxylase
  Uniprot ID: P11498
  ENSP ID: ENSP00000377530

SEQ ID NO: 70298 - protein, 1178 aa, Homo sapiens; identical to SEQ ID NO: 70296
  Payload ID: 13957
  Gene Symbol: PC
  Gene Name: pyruvate carboxylase
  Uniprot ID: P11498
  ENSP ID: ENSP00000377532

SEQ ID NO: 70299 - protein, 489 aa, Homo sapiens
  Payload ID: 13957
  Gene Symbol: PC
  Gene Name: pyruvate carboxylase
  ENSP ID: ENSP00000434192
MVANRGEIAIRVFRACTELGIRTVAIYSEQDTGQMHRQKADEAYLIGRGLAPVQAYLHIPDIIKVAKENNVDAVHPGYGFLSERADFAQACQDAGVRFIGPSPEVVRKMGDKVEARAIAIAAGVPVVPGTDAPITSLHEAHEFSNTYGFPIIFKAAYGGGGRGMRVVHSYEELEENYTRAYSEALAAFGNGALFVEKFIEKPRHIEVQILGDQYGNILHLYERDCSIQRRHQKVVEIAPAAHLDPQLRTRLTSDSVKLAKQVGYENAGTVEFLVDRHGKHYFIEVNSRLQVEHTVTEEITDVDLVHAQIHVAEGRSLPDLGLRQENIRINGCAIQCRVTTEDPARSFQPDTGRIEVFRSGEGMGIRLDNASAFQGAVISPHYDSLLVKVIAHGKDHPTAATKMSRALAEFRVRGVKVRRHQAQPLAAALGRPCGQEARRPQAAVTAPTGPGSPTLVRVPPAARVLSSRLGGPSQTTPETSTEVSPTILL

SEQ ID NO: 70300 - protein, 298 aa, Homo sapiens [sequence omitted]

SEQ ID NO: 70301 - protein, 489 aa, Homo sapiens; identical to SEQ ID NO: 70299
  Payload ID: 13957
  Gene Symbol: PC
  Gene Name: pyruvate carboxylase
  ENSP ID: ENSP00000486373

SEQ ID NO: 70302 - protein, 203 aa, Homo sapiens
  Payload ID: 13958
  Gene Symbol: PDHA1
  Gene Name: pyruvate dehydrogenase (lipoamide) alpha 1
  ENSP ID: ENSP00000348062
MRKMLAAVSRVLSGASQKPASRVLVASRNFANDATFEIKKCDLHRLEEGPPVTTVLTREDGLKYYRMMQTVRRMELKADQLYKQKIIRGFCHLCDGQFLLPLTQEACCVGLEAGINPTDHLITAYRAHGFTFTRGLSVREILAELTGRKGGCAKGKGGSMHMYAKNFYGGNGIVGAQVPLGAGIALACKYNGKDEVCLTLYGD

SEQ ID NO: 70303 - protein, 109 aa, Homo sapiens
  Payload ID: 13958
  Gene Symbol: PDHA1
  Gene Name: pyruvate dehydrogenase (lipoamide) alpha 1
  ENSP ID: ENSP00000369132
MELQTYRYHGHSMSDPGVSYRTREEIQEVRSKSDPIMLLKDRMVNSNLASVEELKEIDVEVRKEIEDAAQFATADPEPPLEELGYHIYSSDPPFEVRGANQWIKFKSVS

SEQ ID NO: 70304 - protein, 180 aa, Homo sapiens
  Payload ID: 13958
  Gene Symbol: PDHA1
  Gene Name: pyruvate dehydrogenase (lipoamide) alpha 1
  ENSP ID: ENSP00000369133
MRKMLAAVSRVLSGASQKPASRVLVASRNFANDATFEIKKCDLHRLEEGPPVTTVLTREDGLKYYRMMQTVRRMELKADQLYKQKIIRGFCHLCDGQEACCVGLEAGINPTDHLITAYRAHGFTFTRGLSVREILAELTGRKGGCAKGKGGSMHMYAKNFYGGNGIVGAQVVKDEDCVLL

SEQ ID NO: 70305 - protein, 428 aa, Homo sapiens
  Payload ID: 13958
  Gene Symbol: PDHA1
  Gene Name: pyruvate dehydrogenase (lipoamide) alpha 1
  Uniprot ID: P08559
  ENSP ID: ENSP00000369134
MRKMLAAVSRVLSGASQKPRHGLATLPSLVSISRLKQSSHLGLPKCWDYSHSLKTRQASRVLVASRNFANDATFEIKKCDLHRLEEGPPVTTVLTREDGLKYYRMMQTVRRMELKADQLYKQKIIRGFCHLCDGQEACCVGLEAGINPTDHLITAYRAHGFTFTRGLSVREILAELTGRKGGCAKGKGGSMHMYAKNFYGGNGIVGAQVPLGAGIALACKYNGKDEVCLTLYGDGAANQGQIFEAYNMAALWKLPCIFICENNRYGMGTSVERAAASTDYYKRGDFIPGLRVDGMDILCVREATRFAAAYCRSGKGPILMELQTYRYHGHSMSDPGVSYRTREEIQEVRSKSDPIMLLKDRMVNSNLASVEELKEIDVEVRKEIEDAAQFATADPEPPLEELGYHIYSSDPPFEVRGANQWIKFKSVS

SEQ ID NO: 70306 - protein, 390 aa, Homo sapiens
  Payload ID: 13958
  Gene Symbol: PDHA1
  Gene Name: pyruvate dehydrogenase (lipoamide) alpha 1
  Uniprot ID: P08559
  ENSP ID: ENSP00000394382
MRKMLAAVSRVLSGASQKPASRVLVASRNFANDATFEIKKCDLHRLEEGPPVTTVLTREDGLKYYRMMQTVRRMELKADQLYKQKIIRGFCHLCDGQEACCVGLEAGINPTDHLITAYRAHGFTFTRGLSVREILAELTGRKGGCAKGKGGSMHMYAKNFYGGNGIVGAQVPLGAGIALACKYNGKDEVCLTLYGDGAANQGQIFEAYNMAALWKLPCIFICENNRYGMGTSVERAAASTDYYKRGDFIPGLRVDGMDILCVREATRFAAAYCRSGKGPILMELQTYRYHGHSMSDPGVSYRTREEIQEVRSKSDPIMLLKDRMVNSNLASVEELKEIDVEVRKEIEDAAQFATADPEPPLEELGYHIYSSDPPFEVRGANQWIKFKSVS

SEQ ID NO: 70307 - protein, 121 aa, Homo sapiens
  Payload ID: 13958
  Gene Symbol: PDHA1
  Gene Name: pyruvate dehydrogenase (lipoamide) alpha 1
  ENSP ID: ENSP00000404616
MRKMLAAVSRVLSGASQKPFAGSPPPRHLTVGRKLSSRYEVTFESAQASRVLVASRNFANDATFEIKKCDLHRLEEGPPVTTVLTREDGLKYYRMMQTVRRMELKADQLYKQKIIRGFCHL

SEQ ID NO: 70308 - protein, 205 aa, Homo sapiens
  Payload ID: 13958
  Gene Symbol: PDHA1
  Gene Name: pyruvate dehydrogenase (lipoamide) alpha 1
  ENSP ID: ENSP00000406473
MRKMLAAVSRVLSGASQKPRHGLATLPSLVSISRLKQSSHLGLPKCWDYSHSLKTRQASRVLVASRNFANDATFEIKKCDLHRLEEGPPVTTVLTREDGLKYYRMMQTVRRMELKADQLYKQKIIRGFCHLCDGQEACCVGLEAGINPTDHLITAYRAHGFTFTRGLSVREILAELTGRKGGCAKGKGGSMHMYAKNFYGGNGIV

SEQ ID NO: 70309 - protein, 397 aa, Homo sapiens
  Payload ID: 13958
  Gene Symbol: PDHA1
  Gene Name: pyruvate dehydrogenase (lipoamide) alpha 1
  Uniprot ID: P08559
  ENSP ID: ENSP00000438550
MRKMLAAVSRVLSGASQKPASRVLVASRNFANDATFEIKKCDLHRLEEGPPVTTVLTREDGLKYYRMMQTVRRMELKADQLYKQKIIRGFCHLCDGQFLLPLTQEACCVGLEAGINPTDHLITAYRAHGFTFTRGLSVREILAELTGRKGGCAKGKGGSMHMYAKNFYGGNGIVGAQVPLGAGIALACKYNGKDEVCLTLYGDGAANQGQIFEAYNMAALWKLPCIFICENNRYGMGTSVERAAASTDYYKRGDFIPGLRVDGMDILCVREATRFAAAYCRSGKGPILMELQTYRYHGHSMSDPGVSYRTREEIQEVRSKSDPIMLLKDRMVNSNLASVEELKEIDVEVRKEIEDAAQFATADPEPPLEELGYHIYSSDPPFEVRGANQWIKFKSVS

SEQ ID NO: 70310 - protein, 359 aa, Homo sapiens
  Payload ID: 13958
  Gene Symbol: PDHA1
  Gene Name: pyruvate dehydrogenase (lipoamide) alpha 1
  Uniprot ID: P08559
  ENSP ID: ENSP00000440761
MRKMLAAVSRVLSGASQKPASRVLVASRNFANDATFEIKKCDLHRLEEGPPVTTVLTREDGLKYYRMMQTVRRMELKADQLYKQKIIRGFCHLCDGQEACCVGLEAGINPTDHLITAYRAHGFTFTRGLSVREILAELTGRKGGCAKGKGGSMHMYAKNFYGGNGIVGAQGQIFEAYNMAALWKLPCIFICENNRYGMGTSVERAAASTDYYKRGDFIPGLRVDGMDILCVREATRFAAAYCRSGKGPILMELQTYRYHGHSMSDPGVSYRTREEIQEVRSKSDPIMLLKDRMVNSNLASVEELKEIDVEVRKEIEDAAQFATADPEPPLEELGYHIYSSDPPFEVRGANQWIKFKSVS

SEQ ID NO: 70311 - protein, 388 aa, Homo sapiens
  Payload ID: 13959
  Gene Symbol: PDHA2
  Gene Name: pyruvate dehydrogenase (lipoamide) alpha 2
  Uniprot ID: P29803
  ENSP ID: ENSP00000295266
MLAAFISRVLRRVAQKSARRVLVASRNSSNDATFEIKKCDLYLLEEGPPVTTVLTRAEGLKYYRMMLTVRRMELKADQLYKQKFIRGFCHLCDGQEACCVGLEAGINPSDHVITSYRAHGVCYTRGLSVRSILAELTGRRGGCAKGKGGSMHMYTKNFYGGNGIVGAQGPLGAGIALACKYKGNDEICLTLYGDGAANQGQIAEAFNMAALWKLPCVFICENNLYGMGTSTERAAASPDYYKRGNFIPGLKVDGMDVLCVREATKFAANYCRSGKGPILMELQTYRYHGHSMSDPGVSYRTREEIQEVRSKRDPIIILQDRMVNSKLATVEELKEIGAEVRKEIDDAAQFATTDPEPHLEELGHHIYSSDSSFEVRGANPWIKFKSVS

SEQ ID NO: 70312 - protein, 359 aa, Homo sapiens
  Payload ID: 13960
  Gene Symbol: PDHB
  Gene Name: pyruvate dehydrogenase (lipoamide) beta
  Uniprot ID: P11177
  ENSP ID: ENSP00000307241
MAAVSGLVRRPLREVSGLLKRRFHWTAPAALQVTVRDAINQGMDEELERDEKVFLLGEEVAQYDGAYKVSRGLWKKYGDKRIIDTPISEMGFAGIAVGAAMAGLRPICEFMTFNFSMQAIDQVINSAAKTYYMSGGLQPVPIVFRGPNGASAGVAAQHSQCFAAWYGHCPGLKVVSPWNSEDAKGLIKSAIRDNNPVVVLENELMYGVPFEFPPEAQSKDFLIPIGKAKIERQGTHITVVSHSRPVGHCLEAAAVLSKEGVECEVINMRTIRPMDMETIEASVMKTNHLVTVEGGWPQFGVGAEICARIMEGPAFNFLDAPAVRVTGADVPMPYAKILEDNSIPQVKDIIFAIKKTLNI

SEQ ID NO: 70313 - protein, 341 aa, Homo sapiens
  Payload ID: 13960
  Gene Symbol: PDHB
  Gene Name: pyruvate dehydrogenase (lipoamide) beta
  Uniprot ID: P11177
  ENSP ID: ENSP00000373220
MAAVSGLVRRPLREVTVRDAINQGMDEELERDEKVFLLGEEVAQYDGAYKVSRGLWKKYGDKRIIDTPISEMGFAGIAVGAAMAGLRPICEFMTFNFSMQAIDQVINSAAKTYYMSGGLQPVPIVFRGPNGASAGVAAQHSQCFAAWYGHCPGLKVVSPWNSEDAKGLIKSAIRDNNPVVVLENELMYGVPFEFPPEAQSKDFLIPIGKAKIERQGTHITVVSHSRPVGHCLEAAAVLSKEGVECEVINMRTIRPMDMETIEASVMKTNHLVTVEGGWPQFGVGAEICARIMEGPAFNFLDAPAVRVTGADVPMPYAKILEDNSIPQVKDIIFAIKKTLNI

SEQ ID NO: 70314 - protein, 341 aa, Homo sapiens
  Payload ID: 13960
  Gene Symbol: PDHB
  Gene Name: pyruvate dehydrogenase (lipoamide) beta
  Uniprot ID: P11177
  ENSP ID: ENSP00000417267
MAAVSGLVRRPLREVSGLLKRRFHWTAPAALQVTVRDAINQGMDEELERDEKVFLLGEEVAQYDGAYKVSRGLWKKYGDKRIIDTPISEMGFAGIAVGAAMAGLRPICEFMTFNFSMQAIDQVINSAAKTYYMSGVAAQHSQCFAAWYGHCPGLKVVSPWNSEDAKGLIKSAIRDNNPVVVLENELMYGVPFEFPPEAQSKDFLIPIGKAKIERQGTHITVVSHSRPVGHCLEAAAVLSKEGVECEVINMRTIRPMDMETIEASVMKTNHLVTVEGGWPQFGVGAEICARIMEGPAFNFLDAPAVRVTGADVPMPYAKILEDNSIPQVKDIIFAIKKTLNI

SEQ ID NO: 70315 - protein, 350 aa, Homo sapiens
  Payload ID: 13960
  Gene Symbol: PDHB
  Gene Name: pyruvate dehydrogenase (lipoamide) beta
  ENSP ID: ENSP00000418448
MAAVSGLVRRPLREVTVRDAINQGMDEELERDEKVFLLGEEVAQYDGAYKVSRGLWKKYGDKRIIDTPISEMGFAGIAVGAAMAGLRPICEFMTFNFSMQAIDQVINSAAKTYYMSGGLQPVPIVFRGPNGASAGVAAQHSQCFAAWYGHCPGLKVVSPWNSEDAKGLIKSAIRDNNPVVVLENELMYGVPFEFPPEAQSKDFLIPIGKAKIERQGTHITVVSHSRPVGHCLEAAAVLSKEGVECEVINMRTIRPMDMETIEASVMKTNHLVTVEGGWPQFGVGAEICARIMEGISKKLVLEYSQAIVNIMYLNTYRIKRLKARSGQTTSTLNLSCVQFPGCSCCSCHWC

SEQ ID NO: 70316 - protein, 251 aa, Homo sapiens
  Payload ID: 13960
  Gene Symbol: PDHB
  Gene Name: pyruvate dehydrogenase (lipoamide) beta
  ENSP ID: ENSP00000419580
MAAVSGLVRRPLREVSGLLKRRFHWTAPAALQVTVRDAINQGMDEELERDEKVFLLGEEVAQYDGAYKVSRGLWKKYGDKRIIDTPISEMGFAGIAVGAAMAGLRPICEFMTFNFSMQAIDQVINSAAKTYYMSGGLQPVPIVFRGPNGASAGVAAQHSQCFAAWYGHCPGLKVVSPWNSEDAKGLIKSAIRDNNPVVVLENELMYGVPFEFPPEAQSKDFLIPIGKAKIERQGRLPHSSAHWNEVELKTL

SEQ ID NO: 70317 - protein, 501 aa, Homo sapiens
  Payload ID: 13961
  Gene Symbol: PDHX
  Gene Name: pyruvate dehydrogenase complex, component X
  Uniprot ID: O00330
  ENSP ID: ENSP00000227868
MAASWRLGCDPRLLRYLVGFPGRRSVGLVKGALGWSVSRGANWRWFHSTQWLRGDPIKILMPSLSPTMEEGNIVKWLKKEGEAVSAGDALCEIETDKAVVTLDASDDGILAKIVVEEGSKNIRLGSLIGLIVEEGEDWKHVEIPKDVGPPPPVSKPSEPRPSPEPQISIPVKKEHIPGTLRFRLSPAARNILEKHSLDASQGTATGPRGIFTKEDALKLVQLKQTGKITESRPTPAPTATPTAPSPLQATAGPSYPRPVIPPVSTPGQPNAVGTFTEIPASNIRRVIAKRLTESKSTVPHAYATADCDLGAVLKVRQDLVKDDIKVSVNDFIIKAAAVTLKQMPDVNVSWDGEGPKQLPFIDISVAVATDKGLLTPIIKDAAAKGIQEIADSVKALSKKARDGKLLPEEYQGGSFSISNLGMFGIDEFTAVINPPQACILAVGRFRPVLKLTEDEEGNAKLQQRQLITVTMSSDSRVVDDELATRFLKSFKANLENPIRLA

SEQ ID NO: 70318 - protein, 486 aa, Homo sapiens
  Payload ID: 13961
  Gene Symbol: PDHX
  Gene Name: pyruvate dehydrogenase complex, component X
  Uniprot ID: O00330
  ENSP ID: ENSP00000389404
MQSGGAEGSPGAGRTGRGPGSGKAPPAEISSGAPDFPGGDPIKILMPSLSPTMEEGNIVKWLKKEGEAVSAGDALCEIETDKAVVTLDASDDGILAKIVVEEGSKNIRLGSLIGLIVEEGEDWKHVEIPKDVGPPPPVSKPSEPRPSPEPQISIPVKKEHIPGTLRFRLSPAARNILEKHSLDASQGTATGPRGIFTKEDALKLVQLKQTGKITESRPTPAPTATPTAPSPLQATAGPSYPRPVIPPVSTPGQPNAVGTFTEIPASNIRRVIAKRLTESKSTVPHAYATADCDLGAVLKVRQDLVKDDIKVSVNDFIIKAAAVTLKQMPDVNVSWDGEGPKQLPFIDISVAVATDKGLLTPIIKDAAAKGIQEIADSVKALSKKARDGKLLPEEYQGGSFSISNLGMFGIDEFTAVINPPQACILAVGRFRPVLKLTEDEEGNAKLQQRQLITVTMSSDSRVVDDELATRFLKSFKANLENPIRLA

SEQ ID NO: 70319 - protein, 274 aa, Homo sapiens
  Payload ID: 13961
  Gene Symbol: PDHX
  Gene Name: pyruvate dehydrogenase complex, component X
  Uniprot ID: O00330
  ENSP ID: ENSP00000415695
MAASWRLGCDPRLLRYLVGFPGRRSVGLVKGALGWSVSRGANWRWFHSTQWLRGDPIKILMPSLSPTMEEGNIVKWLKKEGEAVSAGDALCEIETDKAVVTLDASDDGILAKIVQMPDVNVSWDGEGPKQLPFIDISVAVATDKGLLTPIIKDAAAKGIQEIADSVKALSKKARDGKLLPEEYQGGSFSISNLGMFGIDEFTAVINPPQACILAVGRFRPVLKLTEDEEGNAKLQQRQLITVTMSSDSRVVDDELATRFLKSFKANLENPIRLA

SEQ ID NO: 70320 - protein, 151 aa, Homo sapiens
  Payload ID: 13961
  Gene Symbol: PDHX
  Gene Name: pyruvate dehydrogenase complex, component X
  ENSP ID: ENSP00000431281
MPSLSPTMEEGNIVKWLKKEGEAVSAGDALCEIETDKAVVTLDASDDGILAKIVVEEGSKNIRLGSLIGLIVEEGEDWKHVEIPKDVGPPPPVSKPSEPRPSPEPQISIPVKKEHIPGTLRFRLSPAARNILEKHSLDASQGTATGPRGIF

SEQ ID NO: 70321 - protein, 182 aa, Homo sapiens
  Payload ID: 13961
  Gene Symbol: PDHX
  Gene Name: pyruvate dehydrogenase complex, component X
  ENSP ID: ENSP00000432277
MAASWRLGCDPRLLRYLVGFPGRRSVGLVKGALGWSVSRGANWRWFHSTQWLRGEAVSAGDALCEIETDKAVVTLDASDDGILAKIVVEEGSKNIRLGSLIGLIVEEGEDWKHVEIPKDVGPPPPVSKPSEPRPSPEPQISIPVKKEHIPGTLRFRLSPAARNILEKHSLDASQGTATGPRG

SEQ ID NO: 70322 - protein, 189 aa, Homo sapiens
  Payload ID: 13961
  Gene Symbol: PDHX
  Gene Name: pyruvate dehydrogenase complex, component X
  ENSP ID: ENSP00000433204
  MOD_RES (1)..(1): Any amino acid
XHLSFSRHRNDIKVSVNDFIIKAAAVTLKQMPDVNVSWDGEGPKQLPFIDISVAVATDKGLLTPIIKDAAAKGIQEIADSVKALSKKARDGKLLPEEYQGGSFSISNLGMFGIDEFTAVINPPQACILAVGRFRPVLKLTEDEEGNAKLQQRQLITVTMSSDSRVVDDELATRFLKSFKANLENPIRLA

SEQ ID NO: 70323 - protein, 436 aa, Homo sapiens
  Payload ID: 13962
  Gene Symbol: PDK1
  Gene Name: pyruvate dehydrogenase kinase, isozyme 1
  Uniprot ID: Q15118
  ENSP ID: ENSP00000282077
MRLARLLRGAALAGPGPGLRAAGFSRSFSSDSGSSPASERGVPGQVDFYARFSPSPLSMKQFLDFGSVNACEKTSFMFLRQELPVRLANIMKEISLLPDNLLRTPSVQLVQSWYIQSLQELLDFKDKSAEDAKAIYDFTDTVIRIRNRHNDVIPTMAQGVIEYKESFGVDPVTSQNVQYFLDRFYMSRISIRMLLNQHSLLFGGKGKGSPSHRKHIGSINPNCNVLEVIKDGYENARRLCDLYYINSPELELEELNAKSPGQPIQVVYVPSHLYHMVFELFKNAMRATMEHHANRGVYPPIQVHVTLGNEDLTVKMSDRGGGVPLRKIDRLFNYMYSTAPRPRVETSRAVPLAGFGYGLPISRLYAQYFQGDLKLYSLEGYGTDAVIYIKALSTDSIERLPVYNKAAWKHYNTNHEADDWCVPSREPKDMTTFRSA

SEQ ID NO: 70324 - protein, 456 aa, Homo sapiens
  Payload ID: 13962
  Gene Symbol: PDK1
  Gene Name: pyruvate dehydrogenase kinase, isozyme 1
  Uniprot ID: Q15118
  ENSP ID: ENSP00000376352
MRLARLLRGAALAGPGPGLRAAGFSRSFSSDSGSSPASERGVPGQVDFYARFSPSPLSMKQFLDFGSVNACEKTSFMFLRQELPVRLANIMKEISLLPDNLLRTPSVQLVQSWYIQSLQELLDFKDKSAEDAKAIYERPRRTWLQVSSLCCMACKMIFTDTVIRIRNRHNDVIPTMAQGVIEYKESFGVDPVTSQNVQYFLDRFYMSRISIRMLLNQHSLLFGGKGKGSPSHRKHIGSINPNCNVLEVIKDGYENARRLCDLYYINSPELELEELNAKSPGQPIQVVYVPSHLYHMVFELFKNAMRATMEHHANRGVYPPIQVHVTLGNEDLTVKMSDRGGGVPLRKIDRLFNYMYSTAPRPRVETSRAVPLAGFGYGLPISRLYAQYFQGDLKLYSLEGYGTDAVIYIKALSTDSIERLPVYNKAAWKHYNTNHEADDWCVPSREPKDMTTFRSA

SEQ ID NO: 70325 - protein, 436 aa, Homo sapiens; identical to SEQ ID NO: 70323
  Payload ID: 13962
  Gene Symbol: PDK1
  Gene Name: pyruvate dehydrogenase kinase, isozyme 1
  Uniprot ID: Q15118
  ENSP ID: ENSP00000386985

SEQ ID NO: 70326 - protein, 154 aa, Homo sapiens
  Payload ID: 13962
  Gene Symbol: PDK1
  Gene Name: pyruvate dehydrogenase kinase, isozyme 1
  ENSP ID: ENSP00000388366
MFLRQELPVRLANIMKEISLLPDNLLRTPSVQLVQSWYIQSLQELLDFKDKSAEDAKAIYDFTDTVIRIRNRHNDVIPTMAQGVIEYKESFGVDPVTSQNVQYFLDRFYMSRISIRMLLNQHSLLFGGKGKGSPSHRKHIGSINPNCNVLEVIK

SEQ ID NO: 70327 - protein, 229 aa, Homo sapiens
  Payload ID: 13962
  Gene Symbol: PDK1
  Gene Name: pyruvate dehydrogenase kinase, isozyme 1
  ENSP ID: ENSP00000399160
MKQFLDFGSVNACEKTSFMFLRQELPVRLANIMKEISLLPDNLLRTPSVQLVQSCFTDTVIRIRNRHNDVIPTMAQGVIEYKESFGVDPVTSQNVQYFLDRFYMSRISIRMLLNQHSLLFGGKGKGSPSHRKHIGSINPNCNVLEVIKDGYENARRLCDLYYINSPELELEELNAKSPGQPIQVVYVPSHLYHMVFELFKNAMRATMEHHANRGVYPPIQVHVTLGNED

SEQ ID NO: 70328 - protein, 154 aa, Homo sapiens; identical to SEQ ID NO: 70326
  Payload ID: 13962
  Gene Symbol: PDK1
  Gene Name: pyruvate dehydrogenase kinase, isozyme 1
  ENSP ID: ENSP00000399558

SEQ ID NO: 70329 - protein, 62 aa, Homo sapiens
  Payload ID: 13962
  Gene Symbol: PDK1
  Gene Name: pyruvate dehydrogenase kinase, isozyme 1
  ENSP ID: ENSP00000406608
MFLRQELPVRLANIMKEISLLPDNLLRTPSVQLVQSWYIQSLQELLDFKDKSAEDAKAIYEE

SEQ ID NO: 70330 - protein, 164 aa, Homo sapiens
  Payload ID: 13962
  Gene Symbol: PDK1
  Gene Name: pyruvate dehydrogenase kinase, isozyme 1
  ENSP ID: ENSP00000413629
MRLARLLRGAALAGPGPGLRAAGFSRSFSSDSGSSPASERGVPGQVDFYARFSPSPLSMKQFLDFGSVNACEKTSFMFLRQELPVRLANIMKEISLLPDNLLRTPSVQLVQSWYIQSLQELLDFKDKSAEDAKAIYDFIVWWKRQRKSISSKTHWKHKSKLQCT

SEQ ID NO: 70331 - protein, 343 aa, Homo sapiens
  Payload ID: 13963
  Gene Symbol: PDK2
  Gene Name: pyruvate dehydrogenase kinase, isozyme 2
  Uniprot ID: Q15119
  ENSP ID: ENSP00000007708
MKEINLLPDRVLSTPSVQLVQSWYVQSLLDIMEFLDKDPEDHRTLSQFTDALVTIRNRHNDVVPTMAQGVLEYKDTYGDDPVSNQNIQYFLDRFYLSRISIRMLINQHTLIFDGSTNPAHPKHIGSIDPNCNVSEVVKDAYDMAKLLCDKYYMASPDLEIQEINAANSKQPIHMVYVPSHLYHMLFELFKNAMRATVESHESSLILPPIKVMVALGEEDLSIKMSDRGGGVPLRKIERLFSYMYSTAPTPQPGTGGTPLAGFGYGLPISRLYAKYFQGDLQLFSMEGFGTDAVIYLKALSTDSVERLPVYNKSAWRHYQTIQEAGDWCVPSTEPKNTSTYRVS

SEQ ID NO: 70332 - protein, 407 aa, Homo sapiens
  Payload ID: 13963
  Gene Symbol: PDK2
  Gene Name: pyruvate dehydrogenase kinase, isozyme 2
  Uniprot ID: Q15119
  ENSP ID: ENSP00000420927
MRWVWALLKNASLAGAPKYIEHFSKFSPSPLSMKQFLDFGSSNACEKTSFTFLRQELPVRLANIMKEINLLPDRVLSTPSVQLVQSWYVQSLLDIMEFLDKDPEDHRTLSQFTDALVTIRNRHNDVVPTMAQGVLEYKDTYGDDPVSNQNIQYFLDRFYLSRISIRMLINQHTLIFDGSTNPAHPKHIGSIDPNCNVSEVVKDAYDMAKLLCDKYYMASPDLEIQEINAANSKQPIHMVYVPSHLYHMLFELFKNAMRATVESHESSLILPPIKVMVALGEEDLSIKMSDRGGGVPLRKIERLFSYMYSTAPTPQPGTGGTPLAGFGYGLPISRLYAKYFQGDLQLFSMEGFGTDAVIYLKALSTDSVERLPVYNKSAWRHYQTIQEAGDWCVPSTEPKNTSTYRVS

SEQ ID NO: 70333 - protein, 98 aa, Homo sapiens
  Payload ID: 13963
  Gene Symbol: PDK2
  Gene Name: pyruvate dehydrogenase kinase, isozyme 2
  ENSP ID: ENSP00000421178
MKEINLLPDRVLSTPSVQLVQSWYVQSLLDIMEFLDKDPEDHRTLSQFTDALVTIRNRHNDVVPTMAQGVLEYKDTYGDDPVSNQNIQYFLDRFYLSR

SEQ ID NO: 70334 - protein, 160 aa, Homo sapiens
  Payload ID: 13963
  Gene Symbol: PDK2
  Gene Name: pyruvate dehydrogenase kinase, isozyme 2
  ENSP ID: ENSP00000423310
MEFLDKDPEDHRTLSQFTDALVTIRNRHNDVVPTMAQGVLEYKDTYGDDPVSNQNIQYFLDRFYLSRISIRMLINQHTLIFDGSTNPAHPKHIGSIDPNCNVSEVVKDAYDMAKLLCDKYYMASPDLEIQEINAANSKQPIHMVYVPSHLYHMLFELFKN

SEQ ID NO: 70335 - protein, 259 aa, Homo sapiens
  Payload ID: 13963
  Gene Symbol: PDK2
  Gene Name: pyruvate dehydrogenase kinase, isozyme 2
  ENSP ID: ENSP00000425265
MKEINLLPDRVLSTPSVQLVQSWYVQSLLDIMEFLDKDPEDHRTLSQFTDALVTIRNRHNDVVPTMAQGVLEYKDTYGDDPVSNQNIQYFLDRFYLSRISIRMLINQHTLIFDGSTNPAHPKHIGSIDPNCNVSEVVKDAYDMAKLLCDKYYMASPDLEIQEINAANSKQPIHMVYVPSHLYHMLFELFKNAMRATVESHESSLILPPIKVMVALGEEDLSIKMSDRGGGVPLRKIERLFSYMYSTAPTPQPGTGGTPL

SEQ ID NO: 70336 - protein, 141 aa, Homo sapiens
  Payload ID: 13963
  Gene Symbol: PDK2
  Gene Name: pyruvate dehydrogenase kinase, isozyme 2
  ENSP ID: ENSP00000425615
MKEINLLPDRVLSTPSVQLVQSWYVQSLLDIMEFLDKDPEDHRTLSQFTDALVTIRNRHNDVVPTMAQGVLEYKDTYGDDPVSNQNIQYFLDRFYLSRISIRMLINQHTLIFDGSTNPAHPKHIGSIDPNCNVSEVVKDAY

SEQ ID NO: 70337 - protein, 129 aa, Homo sapiens
  Payload ID: 13963
  Gene Symbol: PDK2
  Gene Name: pyruvate dehydrogenase kinase, isozyme 2
  ENSP ID: ENSP00000427682
MKEINLLPDRVLSTPSVQLVQSWYVQSLLDIMEFLDKDPEDHRTLSQFTDALVTIRNRHNDVVPTMAQGVLEYKDTYGDDPVSNQNIQYFLDRFYLSRISIRMLINQHTLIFDGSTNPAHPKHIGSIDP

SEQ ID NO: 70338 - protein, 343 aa, Homo sapiens; identical to SEQ ID NO: 70331
  Payload ID: 13963
  Gene Symbol: PDK2
  Gene Name: pyruvate dehydrogenase kinase, isozyme 2
  Uniprot ID: Q15119
  ENSP ID: ENSP00000481915

SEQ ID NO: 70339 - protein, 406 aa, Homo sapiens
  Payload ID: 13964
  Gene Symbol: PDK3
  Gene Name: pyruvate dehydrogenase kinase, isozyme 3
  Uniprot ID: Q15120
  ENSP ID: ENSP00000368460
MRLFRWLLKQPVPKQIERYSRFSPSPLSIKQFLDFGRDNACEKTSYMFLRKELPVRLANTMREVNLLPDNLLNRPSVGLVQSWYMQSFLELLEYENKSPEDPQVLDNFLQVLIKVRNRHNDVVPTMAQGVIEYKEKFGFDPFISTNIQYFLDRFYTNRISFRMLINQHTLLFGGDTNPVHPKHIGSIDPTCNVADVVKDAYETAKMLCEQYYLVAPELEVEEFNAKAPDKPIQVVYVPSHLFHMLFELFKNSMRATVELYEDRKEGYPAVKTLVTLGKEDLSIKISDLGGGVPLRKIDRLFNYMYSTAPRPSLEPTRAAPLAGFGYGLPISRLYARYFQGDLKLYSMEGVGTDAVIYLKALSSESFERLPVFNKSAWRHYKTTPEADDWSNPSSEPRDASKYKAKQ

SEQ ID NO: 70340 - protein, 415 aa, Homo sapiens
  Payload ID: 13964
  Gene Symbol: PDK3
  Gene Name: pyruvate dehydrogenase kinase, isozyme 3
  Uniprot ID: Q15120
  ENSP ID: ENSP00000387536
MRLFRWLLKQPVPKQIERYSRFSPSPLSIKQFLDFGRDNACEKTSYMFLRKELPVRLANTMREVNLLPDNLLNRPSVGLVQSWYMQSFLELLEYENKSPEDPQVLDNFLQVLIKVRNRHNDVVPTMAQGVIEYKEKFGFDPFISTNIQYFLDRFYTNRISFRMLINQHTLLFGGDTNPVHPKHIGSIDPTCNVADVVKDAYETAKMLCEQYYLVAPELEVEEFNAKAPDKPIQVVYVPSHLFHMLFELFKNSMRATVELYEDRKEGYPAVKTLVTLGKEDLSIKISDLGGGVPLRKIDRLFNYMYSTAPRPSLEPTRAAPLAGFGYGLPISRLYARYFQGDLKLYSMEGVGTDAVIYLKALSSESFERLPVFNKSAWRHYKTTPEADDWSNPSSEPRDASKYKAKQDKIKTNRTF

SEQ ID NO: 70341 - protein, 411 aa, Homo sapiens
  Payload ID: 13965
  Gene Symbol: PDK4
  Gene Name: pyruvate dehydrogenase kinase, isozyme 4
  Uniprot ID: Q16654
  ENSP ID: ENSP00000005178
MKAARFVLRSAGSLNGAGLVPREVEHFSRYSPSPLSMKQLLDFGSENACERTSFAFLRQELPVRLANILKEIDILPTQLVNTSSVQLVKSWYIQSLMDLVEFHEKSPDDQKALSDFVDTLIKVRNRHHNVVPTMAQGIIEYKDACTVDPVTNQNLQYFLDRFYMNRISTRMLMNQHILIFSDSQTGNPSHIGSIDPNCDVVAVVQDAFECSRMLCDQYYLSSPELKLTQVNGKFPDQPIHIVYVPSHLHHMLFELFKNAMRATVEHQENQPSLTPIEVIVVLGKEDLTIKISDRGGGVPLRIIDRLFSYTYSTAPTPVMDNSRNAPLAGFGYGLPISRLYAKYFQGDLNLYSLSGYGTDAIIYLKALSSESIEKLPVFNKSAFKHYQMSSEADDWCIPSREPKNLAKEVAM

SEQ ID NO: 70342 - protein, 879 aa, Homo sapiens
  Payload ID: 13966
  Gene Symbol: PDPR
  Gene Name: pyruvate dehydrogenase phosphatase regulatory subunit
  Uniprot ID: Q8NCN5
  ENSP ID: ENSP00000288050
MMFYRLLSIVGRQRASPGWQNWSSARNSTSAAEARSMALPTQAQVVICGGGITGTSVAYHLSKMGWKDIVLLEQGRLAAGSTRFCAGILSTARHLTIEQKMADYSNKLYYQLEQETGIQTGYTRTGSIFLAQTQDRLISLKRINAGLNVIGIPSEIISPKKVAELHHLLNVHDLVGAMHVPEDAVVSSADVALALASAASQNGVQIYDRTSVLHVMVKKGQVTGVETDKGQIECQYFVNCAGQWAYELGLSNEEPVSIPLHACEHFYLLTRPLETPLQSSTPTIVDADGRIYIRNWQGGILSGGFEKNPKPIFTEGKNQLEIQNLQEDWDHFEPLLSSLLRRMPELETLEIMKLVNCPETFTPDMRCIMGESPAVQGYFVLAGMNSAGLSFGGGAGKYLAEWMVHGYPSENVWELDLKRFGALQSSRTFLRHRVMEVMPLMYDLKVPRWDFQTGRQLRTSPLYDRLDAQGARWMEKHGFERPKYFVPPDKDLLALEQSKTFYKPDWFDIVESEVKCCKEAVCVIDMSSFTKFEITSTGDQALEVLQYLFSNDLDVPVGHIVHTGMLNEGGGYENDCSIARLNKRSFFMISPTDQQVHCWAWLKKHMPKDSNLLLEDVTWKYTALNLIGPRAVDVLSELSYAPMTPDHFPSLFCKEMSVGYANGIRVMSMTHTGEPGFMLYIPIEYALHVYNEVMSVGQKYGIRNAGYYALRSLRIEKFFAFWGQDINNLTTPLECGRESRVKLEKGMDFIGRDALLQQKQNGVYKRLTMFILDDHDSDLDLWPWWGEPIYRNGQYVGKTTSSAYSYSLERHVCLGFVHNFSEDTGEEQVVTADFINRGEYEIDIAGYRFQAKAKLYPVASLFTQKRRKDDMELSDLHGK

SEQ ID NO: 70343 - protein, 779 aa, Homo sapiens
  Payload ID: 13966
  Gene Symbol: PDPR
  Gene Name: pyruvate dehydrogenase phosphatase regulatory subunit
  ENSP ID: ENSP00000381190
MADYSNKLYYQLEQETGIQTGYTRTGSIFLAQTQDRLISLKRINAGLNVIGIPSEIISPKKVAELHHLLNVHDLVGAMHVPEDAVVSSADVALALASAASQNGVQIYDRTSVLHVMVKKGQVTGVETDKGQIECQYFVNCAGQWAYELGLSNEEPVSIPLHACEHFYLLTRPLETPLQSSTPTIVDADGRIYIRNWQGGILSGGFEKNPKPIFTEGKNQLEIQNLQEDWDHFEPLLSSLLRRMPELETLEIMKLVNCPETFTPDMRCIMGESPAVQGYFVLAGMNSAGLSFGGGAGKYLAEWMVHGYPSENVWELDLKRFGALQSSRTFLRHRVMEVMPLMYDLKVPRWDFQTGRQLRTSPLYDRLDAQGARWMEKHGFERPKYFVPPDKDLLALEQSKTFYKPDWFDIVESEVKCCKEAVCVIDMSSFTKFEITSTGDQALEVLQYLFSNDLDVPVGHIVHTGMLNEGGGYENDCSIARLNKRSFFMISPTDQQVHCWAWLKKHMPKDSNLLLEDVTWKYTALNLIGPRAVDVLSELSYAPMTPDHFPSLFCKEMSVGYANGIRVMSMTHTGEPGFMLYIPIEYALHVYNEVMSVGQKYGIRNAGYYALRSLRIEKFFAFWGQDINNLTTPLECGRESRVKLEKGMDFIGRDALLQQKQNGVYKRLTMFILDDHDSDLDLWPWWGEPIYRNGQYVGKTTSSAYSYSLERHVCLGFVHNFSEDTGEEQVVTADFINRGEYEIDIAGYRFQAKAKLYPVASLFTQKRRKDDMELSDLHGK

SEQ ID NO: 70344 - protein, 491 aa, Homo sapiens
  Payload ID: 13966
  Gene Symbol: PDPR
  Gene Name: pyruvate dehydrogenase phosphatase regulatory subunit
  ENSP ID: ENSP00000455764
MMFYRLLSIVGRQRASPGWQNWSSARNSTSAAEARSMALPTQAQVVICGGGITGTSVAYHLSKMGWKDIVLLEQGRLAAGSTRFCAGILSTARHLTIEQKMADYSNKLYYQLEQETGIQTGYTRTGSIFLAQTQDRLISLKRINAGLNVIGIPSEIISPKKVAELHHLLNVHDLVGAMHVPEDAVVSSADVALALASAASQNGVQIYDRTSVLHVMVKKGQVTGVETDKGQIECQYFVNCAGQWAYELGLSNEEPVSIPLHACEHFYLLTRPLETPLQSSTPTIVDADGRIYIRNWQGGILSGGFEKNPKPIFTEGKNQLEIQNLQEDWDHFEPLLSSLLRRMPELETLEIMKLVNCPETFTPDMRCIMGESPAVQGYFVLAGMNSAGLSFGGGAGKYLAEWMVHGYPSENVWELDLKRFGALQSSRTFLRHRVMEVMPLMYDLKVPRWDFQTGRQLRTSPLYDRLDAQGARWMEKHGFERPKYFVPPDKG

SEQ ID NO: 70345 - protein, 37 aa, Homo sapiens
  Payload ID: 13966
  Gene Symbol: PDPR
  Gene Name: pyruvate dehydrogenase phosphatase regulatory subunit
  ENSP ID: ENSP00000456385
MTPDHFPSLFCKWQPQLSETNCNRMKAMTTESSPGSC

SEQ ID NO: 70346 - protein, 237 aa, Homo sapiens
  Payload ID: 13966
  Gene Symbol: PDPR
  Gene Name: pyruvate dehydrogenase phosphatase regulatory subunit
  ENSP ID: ENSP00000456959
MTPDHFPSLFCKEMSVGYANGIRVMSMTHTGEPGFMLYIPIEYALHVYNEVMSVGQKYGIRNAGYYALRSLRIEKFFAFWGQDINNLTTPLECGRESRVKLEKGMDFIGRDALLQQKQNGVYKRLTMFILDDHDSDLDLWPWWGEPIYRNGQYVGKTTSSAYSYSLERHVCLGFVHNFSEDTGEEQVVTADFINRGEYEIDIAGYRFQAKAKLYPVASLFTQKRRKDDMELSDLHGK

SEQ ID NO: 70347 - protein, 100 aa, Homo sapiens
  Payload ID: 13966
  Gene Symbol: PDPR
  Gene Name: pyruvate dehydrogenase phosphatase regulatory subunit
  ENSP ID: ENSP00000457484
MTPDHFPSLFCKEMSVGYANGIRVMSMTHTGEPGFMLYIPIEYALHVYNEVMSVGQKYGIRNAGYYALRSLRIEKFFAFWGQDINNLTTPLECGRESRVK

SEQ ID NO: 70348 - protein, 197 aa, Homo sapiens
  Payload ID: 13966
  Gene Symbol: PDPR
  Gene Name: pyruvate dehydrogenase phosphatase regulatory subunit
  ENSP ID: ENSP00000457636
MLSLSTLNLIGPRAVDVLSELSYAPMTPDHFPSLFCKEMSVGYANGIRVMSMTHTGEPGFMLYIPIEYALHVYNEVMSVGQKYGIRNAGYYALRSLRIEKFFAFWGQDINNLTTPLECGRESRVKLEKGMDFIGRDALLQQKQNGVYKRLTMFILDDHDSDLDLWPWWGEPIYRNGQYVGKTTSSAYSYSLERHVCL

SEQ ID NO: 70349 - protein, 879 aa, Homo sapiens; identical to SEQ ID NO: 70342
  Payload ID: 13966
  Gene Symbol: PDPR
  Gene Name: pyruvate dehydrogenase phosphatase regulatory subunit
  Uniprot ID: Q8NCN5
  ENSP ID: ENSP00000457916

SEQ ID NO: 70350 - protein, 149 aa, Homo sapiens
  Payload ID: 13966
  Gene Symbol: PDPR
  Gene Name: pyruvate dehydrogenase phosphatase regulatory subunit
  ENSP ID: ENSP00000457961
MTPDHFPSLFCKEMSVGYANGIRVMSMTHTGEPGFMLYIPIEYALHVYNEVMSVGQKYGIRNAGYYALRSLRIEKFFAFWGQDINNLTTPLECGRESRVKLEKGMDFIGRDALLQQKQNGVYKRLTMFILDDHDSDLDLWPWWGEPIYR

SEQ ID NO: 70351 - protein, 537 aa, Homo sapiens
  Payload ID: 13967
  Gene Symbol: PDP1
  Gene Name: pyruvate dehyrogenase phosphatase catalytic subunit 1
  Uniprot ID: Q9P0J1
  ENSP ID: ENSP00000297598
MPAPTQLFFPLIRNCELSRIYGTACYCHHKHLCCSSSYIPQSRLRYTPHPAYATFCRPKENWWQYTQGRRYASTPQKFYLTPPQVNSILKANEYSFKVPEFDGKNVSSILGFDSNQLPANAPIEDRRSAATCLQTRGMLLGVFDGHAGCACSQAVSERLFYYIAVSLLPHETLLEIENAVESGRALLPILQWHKHPNDYFSKEASKLYFNSLRTYWQELIDLNTGESTDIDVKEALINAFKRLDNDISLEAQVGDPNSFLNYLVLRVAFSGATACVAHVDGVDLHVANTGDSRAMLGVQEEDGSWSAVTLSNDHNAQNERELERLKLEHPKSEAKSVVKQDRLLGLLMPFRAFGDVKFKWSIDLQKRVIESGPDQLNDNEYTKFIPPNYHTPPYLTAEPEVTYHRLRPQDKFLVLATDGLWETMHRQDVVRIVGEYLTGMHHQQPIAVGGYKVTLGQMHGLLTERRTKMSSVFEDQNAATHLIRHAVGNNEFGTVDHERLSKMLSLPEELARMYRDDITIIVVQFNSHVVGAYQNQE

SEQ ID NO: 70352 - protein, 562 aa, Homo sapiens
  Payload ID: 13967
  Gene Symbol: PDP1
  Gene Name: pyruvate dehyrogenase phosphatase catalytic subunit 1
  Uniprot ID: Q9P0J1
  ENSP ID: ENSP00000379503
MCVCPGPRRIGIPVRSSSLPLFSDAMPAPTQLFFPLIRNCELSRIYGTACYCHHKHLCCSSSYIPQSRLRYTPHPAYATFCRPKENWWQYTQGRRYASTPQKFYLTPPQVNSILKANEYSFKVPEFDGKNVSSILGFDSNQLPANAPIEDRRSAATCLQTRGMLLGVFDGHAGCACSQAVSERLFYYIAVSLLPHETLLEIENAVESGRALLPILQWHKHPNDYFSKEASKLYFNSLRTYWQELIDLNTGESTDIDVKEALINAFKRLDNDISLEAQVGDPNSFLNYLVLRVAFSGATACVAHVDGVDLHVANTGDSRAMLGVQEEDGSWSAVTLSNDHNAQNERELERLKLEHPKSEAKSVVKQDRLLGLLMPFRAFGDVKFKWSIDLQKRVIESGPDQLNDNEYTKFIPPNYHTPPYLTAEPEVTYHRLRPQDKFLVLATDGLWETMHRQDVVRIVGEYLTGMHHQQPIAVGGYKVTLGQMHGLLTERRTKMSSVFEDQNAATHLIRHAVGNNEFGTVDHERLSKMLSLPEELARMYRDDITIIVVQFNSHVVGAYQNQE

SEQ ID NO: 70353 - protein, 537 aa, Homo sapiens; identical to SEQ ID NO: 70351
  Payload ID: 13967
  Gene Symbol: PDP1
  Gene Name: pyruvate dehyrogenase phosphatase catalytic subunit 1
  Uniprot ID: Q9P0J1
  ENSP ID: ENSP00000428317

SEQ ID NO: 70354 - protein, 128 aa, Homo sapiens
  Payload ID: 13967
  Gene Symbol: PDP1
  Gene Name: pyruvate dehyrogenase phosphatase catalytic subunit 1
  ENSP ID: ENSP00000428433
MPAPTQLFFPLIRNCELSRIYGTACYCHHKHLCCSSSYIPQSRLRYTPHPAYATFCRPKENWWQYTQGRRYASTPQKFYLTPPQVNSILKANEYSFKVPEFDGKNVSSILGFDSNQLPANAPIEDRRS

SEQ ID NO: 70355 - protein, 147 aa, Homo sapiens
  Payload ID: 13967
  Gene Symbol: PDP1
  Gene Name: pyruvate dehyrogenase phosphatase catalytic subunit 1
  ENSP ID: ENSP00000429492
MPAPTQLFFPLIRNCELSRIYGTACYCHHKHLCCSSSYIPQSRLRYTPHPAYATFCRPKENWWQYTQGRRYASTPQKFYLTPPQVNSILKANEYSFKVPEFDGKNVSSILGFDSNQLPANAPIEDRRSAATCLQTRGMLLGVFDGHA

SEQ ID NO: 70356 - protein, 76 aa, Homo sapiens
  Payload ID: 13967
  Gene Symbol: PDP1
  Gene Name: pyruvate dehyrogenase phosphatase catalytic subunit 1
  ENSP ID: ENSP00000430366
MPAPTQLFFPLIRNCELSRIYGTACYCHHKHLCCSSSYIPQSRLRYTPHPAYATFCRPKENWWQYTQGRRYASTPQ

SEQ ID NO: 70357 - protein, 537 aa, Homo sapiens; identical to SEQ ID NO: 70351
  Payload ID: 13967
  Gene Symbol: PDP1
  Gene Name: pyruvate dehyrogenase phosphatase catalytic subunit 1
  Uniprot ID: Q9P0J1
  ENSP ID: ENSP00000430380

SEQ ID NO: 70358 - protein, 232 aa, Homo sapiens
  Payload ID: 13967
  Gene Symbol: PDP1
  Gene Name: pyruvate dehyrogenase phosphatase catalytic subunit 1
  ENSP ID: ENSP00000430655
MPAPTQLFFPLIRNCELSRIYGTACYCHHKHLCCSSSYIPQSRLRYTPHPAYATFCRPKENWWQYTQGRRYASTPQKFYLTPPQVNSILKANEYSFKVPEFDGKNVSSILGFDSNQLPANAPIEDRRSAATCLQTRGMLLGVFDGHAGCACSQAVSERLFYYIAVSLLPHETLLEIENAVESGRALLPILQWHKHPNDYFSKEASKLYFNSLRTYWQELIDLNTGESTDIDV

SEQ ID NO: 70359 - protein, 72 aa, Homo sapiens
  Payload ID: 13967
  Gene Symbol: PDP1
  Gene Name: pyruvate dehyrogenase phosphatase catalytic subunit 1
  ENSP ID: ENSP00000430931
MPAPTQLFFPLIRNCELSRIYGTACYCHHKHLCCSSSYIPQSRLRYTPHPAYATFCRPKENWWQYTQGRRYA

SEQ ID NO: 70360 - protein, 529 aa, Homo sapiens
  Payload ID: 13968
  Gene Symbol: PDP2
  Gene Name: pyruvate dehyrogenase phosphatase catalytic subunit 2
  Uniprot ID: Q9P2J9
  ENSP ID: ENSP00000309548
MSSTVSYWILNSTRNSIATLQGGRRLYSRYVSNRNKLKWRLFSRVPPTLNSSPCGGFTLCKAYRHTSTEEDDFHLQLSPEQINEVLRAGETTHKILDLESRVPNSVLRFESNQLAANSPVEDRRGVASCLQTNGLMFGIFDGHGGHACAQAVSERLFYYVAVSLMSHQTLEHMEGAMESMKPLLPILHWLKHPGDSIYKDVTSVHLDHLRVYWQELLDLHMEMGLSIEEALMYSFQRLDSDISLEIQAPLEDEVTRNLSLQVAFSGATACMAHVDGIHLHVANAGDCRAILGVQEDNGMWSCLPLTRDHNAWNQAELSRLKREHPESEDRTIIMEDRLLGVLIPCRAFGDVQLKWSKELQRSILERGFNTEALNIYQFTPPHYYTPPYLTAEPEVTYHRLRPQDKFLVLASDGLWDMLSNEDVVRLVVGHLAEADWHKTDLAQRPANLGLMQSLLLQRKASGLHEADQNAATRLIRHAIGNNEYGEMEAERLAAMLTLPEDLARMYRDDITVTVVYFNSESIGAYYKGG

SEQ ID NO: 70361 - protein, 242 aa, Homo sapiens
  Payload ID: 13968
  Gene Symbol: PDP2
  Gene Name: pyruvate dehyrogenase phosphatase catalytic subunit 2
  ENSP ID: ENSP00000455975
MSSTVSYWILNSTRNSIATLQGGRRLYSRYVSNRNKLKWRLFSRVPPTLNSSPCGGFTLCKAYRHTSTEEDDFHLQLSPEQINEVLRAGETTHKILDLESRVPNSVLRFESNQLAANSPVEDRRGVASCLQTNGLMFGIFDGHGGHACAQAVSERLFYYVAVSLMSHQTLEHMEGAMESMKPLLPILHWLKHPGDSIYKDVTSVHLDHLRVYWQELLDLHMEMGLSIEEALMYSFQRLDSDI

SEQ ID NO: 70362 - protein, 27 aa, Homo sapiens
  Payload ID: 13968
  Gene Symbol: PDP2
  Gene Name: pyruvate dehyrogenase phosphatase catalytic subunit 2
  ENSP ID: ENSP00000456171
MSSTVSYWILNSTRNSIATLQGGRRLY

SEQ ID NO: 70363 - protein, 155 aa, Homo sapiens
  Payload ID: 13968
  Gene Symbol: PDP2
  Gene Name: pyruvate dehyrogenase phosphatase catalytic subunit 2
  ENSP ID: ENSP00000456611
MSSTVSYWILNSTRNSIATLQGGRRLYSRYVSNRNKLKWRLFSRVPPTLNSSPCGGFTLCKAYRHTSTEEDDFHLQLSPEQINEVLRAGETTHKILDLESRVPNSVLRFESNQLAANSPVEDRRGVASCLQTNGLMFGIFDGHGGHACAQAVSER

SEQ ID NO: 70364 - protein, 151 aa, Homo sapiens
  Payload ID: 13968
  Gene Symbol: PDP2
  Gene Name: pyruvate dehyrogenase phosphatase catalytic subunit 2
  ENSP ID: ENSP00000457331
MSSTVSYWILNSTRNSIATLQGGRRLYSRYVSNRNKLKWRLFSRVPPTLNSSPCGGFTLCKAYRHTSTEEDDFHLQLSPEQINEVLRAGETTHKILDLESRVPNSVLRFESNQLAANSPVEDRRGVASCLQTNGLMFGIFDGHGGHACAQA

SEQ ID NO: 70365 - protein, 103 aa, Homo sapiens
  Payload ID: 13968
  Gene Symbol: PDP2
  Gene Name: pyruvate dehyrogenase phosphatase catalytic subunit 2
  ENSP ID: ENSP00000457951
MSSTVSYWILNSTRNSIATLQGGRRLYSRYVSNRNKLKWRLFSRVPPTLNSSPCGGFTLCKAYRHTSTEEDDFHLQLSPEQINEVLRAGETTHKILDLESRVP

SEQ ID NO: 70366 - protein, 574 aa, Homo sapiens
  Payload ID: 13969
  Gene Symbol: PKLR
  Gene Name: pyruvate kinase, liver and RBC
  Uniprot ID: P30613
  ENSP ID: ENSP00000339933
MSIQENISSLQLRSWVSKSQRDLAKSILIGAPGGPAGYLRRASVAQLTQELGTAFFQQQQLPAAMADTFLEHLCLLDIDSEPVAARSTSIIATIGPASRSVERLKEMIKAGMNIARLNFSHGSHEYHAESIANVREAVESFAGSPLSYRPVAIALDTKGPEIRTGILQGGPESEVELVKGSQVLVTVDPAFRTRGNANTVWVDYPNIVRVVPVGGRIYIDDGLISLVVQKIGPEGLVTQVENGGVLGSRKGVNLPGAQVDLPGLSEQDVRDLRFGVEHGVDIVFASFVRKASDVAAVRAALGPEGHGIKIISKIENHEGVKRFDEILEVSDGIMVARGDLGIEIPAEKVFLAQKMMIGRCNLAGKPVVCATQMLESMITKPRPTRAETSDVANAVLDGADCIMLSGETAKGNFPVEAVKMQHAIAREAEAAVYHRQLFEELRRAAPLSRDPTEVTAIGAVEAAFKCCAAAIIVLTTTGRSAQLLSRYRPRAAVIAVTRSAQAARQVHLCRGVFPLLYREPPEAIWADDVDRRVQFGIESGKLRGFLRVGDLVIVVTGWRPGSGYTNIMRVLSIS

SEQ ID NO: 70367 - protein, 543 aa, Homo sapiens
  Payload ID: 13969
  Gene Symbol: PKLR
  Gene Name: pyruvate kinase, liver and RBC
  Uniprot ID: P30613
  ENSP ID: ENSP00000376214
MEGPAGYLRRASVAQLTQELGTAFFQQQQLPAAMADTFLEHLCLLDIDSEPVAARSTSIIATIGPASRSVERLKEMIKAGMNIARLNFSHGSHEYHAESIANVREAVESFAGSPLSYRPVAIALDTKGPEIRTGILQGGPESEVELVKGSQVLVTVDPAFRTRGNANTVWVDYPNIVRVVPVGGRIYIDDGLISLVVQKIGPEGLVTQVENGGVLGSRKGVNLPGAQVDLPGLSEQDVRDLRFGVEHGVDIVFASFVRKASDVAAVRAALGPEGHGIKIISKIENHEGVKRFDEILEVSDGIMVARGDLGIEIPAEKVFLAQKMMIGRCNLAGKPVVCATQMLESMITKPRPTRAETSDVANAVLDGADCIMLSGETAKGNFPVEAVKMQHAIAREAEAAVYHRQLFEELRRAAPLSRDPTEVTAIGAVEAAFKCCAAAIIVLTTTGRSAQLLSRYRPRAAVIAVTRSAQAARQVHLCRGVFPLLYREPPEAIWADDVDRRVQFGIESGKLRGFLRVGDLVIVVTGWRPGSGYTNIMRVLSIS

SEQ ID NO: 70368 - protein, 46 aa, Homo sapiens
  Payload ID: 13969
  Gene Symbol: PKLR
  Gene Name: pyruvate kinase, liver and RBC
  ENSP ID: ENSP00000398037
MPLTTQQCGADPQRGRPREVCSGMEAAAAASCYGRHLPGTPLPTGH

SEQ ID NO: 70369 - protein, 46 aa, Homo sapiens; identical to SEQ ID NO: 70368
  Payload ID: 13969
  Gene Symbol: PKLR
  Gene Name: pyruvate kinase, liver and RBC
  ENSP ID: ENSP00000459447

SEQ ID NO: 70370 - protein, 574 aa, Homo sapiens; identical to SEQ ID NO: 70366
  Payload ID: 13969
  Gene Symbol: PKLR
  Gene Name: pyruvate kinase, liver and RBC
  Uniprot ID: P30613
  ENSP ID: ENSP00000459921

SEQ ID NO: 70371 - protein, 543 aa, Homo sapiens; identical to SEQ ID NO: 70367
  Payload ID: 13969
  Gene Symbol: PKLR
  Gene Name: pyruvate kinase, liver and RBC
  Uniprot ID: P30613
  ENSP ID: ENSP00000461487

SEQ ID NO: 70372 - protein, 531 aa, Homo sapiens
  Payload ID: 13970
  Gene Symbol: PKM
  Gene Name: pyruvate kinase, muscle
  Uniprot ID: P14618
  ENSP ID: ENSP00000320171
MSKPHSEAGTAFIQTQQLHAAMADTFLEHMCRLDIDSPPITARNTGIICTIGPASRSVETLKEMIKSGMNVARLNFSHGTHEYHAETIKNVRTATESFASDPILYRPVAVALDTKGPEIRTGLIKGSGTAEVELKKGATLKITLDNAYMEKCDENILWLDYKNICKVVEVGSKIYVDDGLISLQVKQKGADFLVTEVENGGSLGSKKGVNLPGAAVDLPAVSEKDIQDLKFGVEQDVDMVFASFIRKASDVHEVRKVLGEKGKNIKIISKIENHEGVRRFDEILEASDGIMVARGDLGIEIPAEKVFLAQKMMIGRCNRAGKPVICATQMLESMIKKPRPTRAEGSDVANAVLDGADCIMLSGETAKGDYPLEAVRMQHLIAREAEAAMFHRKLFEELVRASSHSTDLMEAMAMGSVEASYKCLAAALIVLTESGRSAHQVARYRPRAPIIAVTRNPQTARQAHLYRGIFPVLCKDPVQEAWAEDVDLRVNFAMNVGKARGFFKKGDVVIVLTGWRPGSGFTNTMRVVPVP

SEQ ID NO: 70373 - protein, 531 aa, Homo sapiens
  Payload ID: 13970
  Gene Symbol: PKM
  Gene Name: pyruvate kinase, muscle
  Uniprot ID: P14618
  ENSP ID: ENSP00000334983
MSKPHSEAGTAFIQTQQLHAAMADTFLEHMCRLDIDSPPITARNTGIICTIGPASRSVETLKEMIKSGMNVARLNFSHGTHEYHAETIKNVRTATESFASDPILYRPVAVALDTKGPEIRTGLIKGSGTAEVELKKGATLKITLDNAYMEKCDENILWLDYKNICKVVEVGSKIYVDDGLISLQVKQKGADFLVTEVENGGSLGSKKGVNLPGAAVDLPAVSEKDIQDLKFGVEQDVDMVFASFIRKASDVHEVRKVLGEKGKNIKIISKIENHEGVRRFDEILEASDGIMVARGDLGIEIPAEKVFLAQKMMIGRCNRAGKPVICATQMLESMIKKPRPTRAEGSDVANAVLDGADCIMLSGETAKGDYPLEAVRMQHLIAREAEAAIYHLQLFEELRRLAPITSDPTEATAVGAVEASFKCCSGAIIVLTKSGRSAHQVARYRPRAPIIAVTRNPQTARQAHLYRGIFPVLCKDPVQEAWAEDVDLRVNFAMNVGKARGFFKKGDVVIVLTGWRPGSGFTNTMRVVPVP

SEQ ID NO: 70374 - protein, 457 aa, Homo sapiens
  Payload ID: 13970
  Gene Symbol: PKM
  Gene Name: pyruvate kinase, muscle
  ENSP ID: ENSP00000373745
MSKPHSEAGTAFIQTQQLHAAMADTFLEHMCRLDIDSPPITARNTGIICTIGPASRSVELKKGATLKITLDNAYMEKCDENILWLDYKNICKVVEVGSKIYVDDGLISLQVKQKGADFLVTEVENGGSLGSKKGVNLPGAAVDLPAVSEKDIQDLKFGVEQDVDMVFASFIRKASDVHEVRKVLGEKGKNIKIISKIENHEGVRRFDEILEASDGIMVARGDLGIEIPAEKVFLAQKMMIGRCNRAGKPVICATQMLESMIKKPRPTRAEGSDVANAVLDGADCIMLSGETAKGDYPLEAVRMQHLIAREAEAAIYHLQLFEELRRLAPITSDPTEATAVGAVEASFKCCSGAIIVLTKSGRSAHQVARYRPRAPIIAVTRNPQTARQAHLYRGIFPVLCKDPVQEAWAEDVDLRVNFAMNVGKARGFFKKGDVVIVLTGWRPGSGFTNTMRVVPVP

SEQ ID NO: 70375 - protein, 516 aa, Homo sapiens
  Payload ID: 13970
  Gene Symbol: PKM
  Gene Name: pyruvate kinase, muscle
  Uniprot ID: P14618
  ENSP ID: ENSP00000403365
MSPEAQPQRTKGPQQPCRSPIVKPGLPSFRPSSCTQPWLTHSWSTCAAWTLIHHPSQPGTLASSVPLYHAETIKNVRTATESFASDPILYRPVAVALDTKGPEIRTGLIKGSGTAEVELKKGATLKITLDNAYMEKCDENILWLDYKNICKVVEVGSKIYVDDGLISLQVKQKGADFLVTEVENGGSLGSKKGVNLPGAAVDLPAVSEKDIQDLKFGVEQDVDMVFASFIRKASDVHEVRKVLGEKGKNIKIISKIENHEGVRRFDEILEASDGIMVARGDLGIEIPAEKVFLAQKMMIGRCNRAGKPVICATQMLESMIKKPRPTRAEGSDVANAVLDGADCIMLSGETAKGDYPLEAVRMQHLIAREAEAAIYHLQLFEELRRLAPITSDPTEATAVGAVEASFKCCSGAIIVLTKSGRSAHQVARYRPRAPIIAVTRNPQTARQAHLYRGIFPVLCKDPVQEAWAEDVDLRVNFAMNVGKARGFFKKGDVVIVLTGWRPGSGFTNTMRVVPVP

SEQ ID NO: 70376 - protein, 51 aa, Homo sapiens
  Payload ID: 13970
  Gene Symbol: PKM
  Gene Name: pyruvate kinase, muscle
  ENSP ID: ENSP00000454668
MSKPHSEAGTAFIQTQQLHAAMADTFLEHMCRLDIDSPPITARNTGIICTI

SEQ ID NO: 70377 - protein, 281 aa, Homo sapiens
  Payload ID: 13970
  Gene Symbol: PKM
  Gene Name: pyruvate kinase, muscle
  ENSP ID: ENSP00000455584
MSKPHSEAGTAFIQTQQLHAAMADTFLEHMCRLDIDSPPITARNTGIICTIGPASRSVETLKEMIKSGMNVARLNFSHGTHEYHAETIKNVRTATESFASDPILYRPVAVALDTKGPEIRTGLIKGSGTAEVELKKGATLKITLDNAYMEKCDENILWLDYKNICKVVEVGSKIYVDDGLISLQVKQKGADFLVTEVENGGSLGSKKGVNLPGAAVDLPAVSEKDIQDLKFGVEQDVDMVFASFIRKASDVHEVRKVLGEKGKNIKIISKIENHEGVRRQV

SEQ ID NO: 70378 - protein, 531 aa, Homo sapiens; identical to SEQ ID NO: 70372
  Payload ID: 13970
  Gene Symbol: PKM
  Gene Name: pyruvate kinase, muscle
  Uniprot ID: P14618
  ENSP ID: ENSP00000455736

SEQ ID NO: 70379 - protein, 531 aa, Homo sapiens; identical to SEQ ID NO: 70372
  Payload ID: 13970
  Gene Symbol: PKM
  Gene Name: pyruvate kinase, muscle
  Uniprot ID: P14618
  ENSP ID: ENSP00000455901

SEQ ID NO: 70380 - protein, 69 aa, Homo sapiens
  Payload ID: 13970
  Gene Symbol: PKM
  Gene Name: pyruvate kinase, muscle
  ENSP ID: ENSP00000456004
MSKPHSEAGTAFIQTQQLHAAMADTFLEHMCRLDIDSPPITARNTGIICTIVPCGDHQECAHSHGKLCF

SEQ ID NO: 70381 - protein, 366 aa, Homo sapiens
  Payload ID: 13970
  Gene Symbol: PKM
  Gene Name: pyruvate kinase, muscle
  ENSP ID: ENSP00000456100
MSKPHSEAGTAFIQTQQLHAAMADTFLEHMCRLDIDSPPIKKGVNLPGAAVDLPAVSEKDIQDLKFGVEQDVDMVFASFIRKASDVHEVRKVLGEKGKNIKIISKIENHEGVRRFDEILEASDGIMVARGDLGIEIPAEKVFLAQKMMIGRCNRAGKPVICATQMLESMIKKPRPTRAEGSDVANAVLDGADCIMLSGETAKGDYPLEAVRMQHLIAREAEAAMFHRKLFEELVRASSHSTDLMEAMAMGSVEASYKCLAAALIVLTESGRSAHQVARYRPRAPIIAVTRNPQTARQAHLYRGIFPVLCKDPVQEAWAEDVDLRVNFAMNVGKARGFFKKGDVVIVLTGWRPGSGFTNTMRVVPVP

SEQ ID NO: 70382 - protein, 531 aa, Homo sapiens; identical to SEQ ID NO: 70372
  Payload ID: 13970
  Gene Symbol: PKM
  Gene Name: pyruvate kinase, muscle
  Uniprot ID: P14618
  ENSP ID: ENSP00000456970

SEQ ID NO: 70383 - protein, 151 aa, Homo sapiens
  Payload ID: 13970
  Gene Symbol: PKM
  Gene Name: pyruvate kinase, muscle
  ENSP ID: ENSP00000456984
MSKPHSEAGTAFIQTQQLHAAMADTFLEHMCRLDIDSPPITARNTGIICTIGPASRSVETLKEMIKSGMNVARLNFSHGTHEYHAETIKNVRTATESFASDPILYRPVAVALDTKGPEIRTGLIKGSGTAEVELKKGATLKITLDNAYMEK

SEQ ID NO: 70384 - protein, 168 aa, Homo sapiens
  Payload ID: 13970
  Gene Symbol: PKM
  Gene Name: pyruvate kinase, muscle
  ENSP ID: ENSP00000457198
MSKPHSEAGTAFIQTQQLHAAMADTFLEHMCRLDIDSPPITARNTGIICTIGPASRSVETLKEMIKSGMNVARLNFSHGTHEYHAETIKNVRTATESFASDPILYRPVAVALDTKGPEIRTGLIKGSGTAEVELKKGATLKITLDNAYMEKCDENILWLDYKNICKVV

SEQ ID NO: 70385 - protein, 485 aa, Homo sapiens
  Payload ID: 13970
  Gene Symbol: PKM
  Gene Name: pyruvate kinase, muscle
  ENSP ID: ENSP00000457253
MSKPHSEAGTAFIQTQQLHAAMADTFLEHMCRLDIDSPPITARNTGIICTIGPASRSVETLKEMIKSGMNVARLNFSHGTHEYHAETIKNVRTATESFASDPILYRPVAVALDTKGPEIRTGLIKGSGTAEVELKKGATLKITLDNAYMEKCDENILWLDYKNICKVVEVGSKIYVDDGLISLQVKQKGADFLVTEVENGGSLGSKKGVNLPGAAVDLPAVSEKDIQDLKFGVEQDVDMVFASFIRKASDVHEVRKVLGEKGKNIKIISKIENHEGVRRFDEILEASDGIMVARGDLGIEIPAEKVFLAQKMMIGRCNRAGKPVICATQMLESMIKKPRPTRAEGSDVANAVLDGADCIMLSGETAKGDYPLEAVRMQHLIAREAEAAMFHRKLFEELVRASSHSTDLMEAMAMGSVEASYKCLAAALIVLTESGRSAHQVARYRPRAPIIAVTRNPQTARQAHLYRGIFPVLCKDPVQEAWAED

SEQ ID NO: 70386 - protein, 82 aa, Homo sapiens
  Payload ID: 13970
  Gene Symbol: PKM
  Gene Name: pyruvate kinase, muscle
  ENSP ID: ENSP00000457420
MSKPHSEAGTAFIQTQQLHAAMADTFLEHMCRLDIDSPPITARNTGIICTIGPASRSVETLKEMIKSGMNVARLNFSHGTHE

SEQ ID NO: 70387 - protein, 162 aa, Homo sapiens
  Payload ID: 13970
  Gene Symbol: PKM
  Gene Name: pyruvate kinase, muscle
  ENSP ID: ENSP00000457830
MSKPHSEAGTAFIQTQQLHAAMADTFLEHMCRLDIDSPPITARNTGIICTIGPASRSVETLKEMIKSGMNVARLNFSHGTHEYHAETIKNVRTATESFASDPILYRPVAVALDTKGPEIRTGLIKGSGTAEVELKKGATLKITLDNAYMEKCDENILWLDYK

SEQ ID NO: 70388 - protein, 325 aa, Homo sapiens
  Payload ID: 13971
  Gene Symbol: QKI
  Gene Name: QKI, KH domain containing, RNA binding
  Uniprot ID: Q96PU8
  ENSP ID: ENSP00000275262
MVGEMETKEKPKPTPDYLMQLMNDKKLMSSLPNFCGIFNHLERLLDEEISRVRKDMYNDTLNGSTEKRSAELPDAVGPIVQLQEKLYVPVKEYPDFNFVGRILGPRGLTAKQLEAETGCKIMVRGKGSMRDKKKEEQNRGKPNWEHLNEDLHVLITVEDAQNRAEIKLKRAVEEVKKLLVPAAEGEDSLKKMQLMELAILNGTYRDANIKSPALAFSLAATAQAAPRIITGPAPVLPPAALRTPTPAGPTIMPLIRQIQTAVMPNGTPHPTAAIVPPGPEAGLIYTPYEYPYTLAPATSILEYPIEPSGVLEWIEMPVMPDISAH

SEQ ID NO: 70389 - protein, 333 aa, Homo sapiens
  Payload ID: 13971
  Gene Symbol: QKI
  Gene Name: QKI, KH domain containing, RNA binding
  Uniprot ID: Q96PU8
  ENSP ID: ENSP00000354867
MVGEMETKEKPKPTPDYLMQLMNDKKLMSSLPNFCGIFNHLERLLDEEISRVRKDMYNDTLNGSTEKRSAELPDAVGPIVQLQEKLYVPVKEYPDFNFVGRILGPRGLTAKQLEAETGCKIMVRGKGSMRDKKKEEQNRGKPNWEHLNEDLHVLITVEDAQNRAEIKLKRAVEEVKKLLVPAAEGEDSLKKMQLMELAILNGTYRDANIKSPTAQAAPRIITGPAPVLPPAALRTPTPAGPTIMPLIRQIQTAVMPNGTPHPTAAIVPPGPEAGLIYTPYEYPYTLAPATSILEYPIEPSGVLGAVATKVRRHDMRVHPYQRIVTADRAATGN

SEQ ID NO: 70390 - protein, 319 aa, Homo sapiens
  Payload ID: 13971
  Gene Symbol: QKI
  Gene Name: QKI, KH domain containing, RNA binding
  Uniprot ID: Q96PU8
  ENSP ID: ENSP00000354951
MVGEMETKEKPKPTPDYLMQLMNDKKLMSSLPNFCGIFNHLERLLDEEISRVRKDMYNDTLNGSTEKRSAELPDAVGPIVQLQEKLYVPVKEYPDFNFVGRILGPRGLTAKQLEAETGCKIMVRGKGSMRDKKKEEQNRGKPNWEHLNEDLHVLITVEDAQNRAEIKLKRAVEEVKKLLVPAAEGEDSLKKMQLMELAILNGTYRDANIKSPALAFSLAATAQAAPRIITGPAPVLPPAALRTPTPAGPTIMPLIRQIQTAVMPNGTPHPTAAIVPPGPEAGLIYTPYEYPYTLAPATSILEYPIEPSGVLGMAFPTKG

SEQ ID NO: 70391 - protein, 341 aa, Homo sapiens
  Payload ID: 13971
  Gene Symbol: QKI
  Gene Name: QKI, KH domain containing, RNA binding
  Uniprot ID: Q96PU8
  ENSP ID: ENSP00000355094
MVGEMETKEKPKPTPDYLMQLMNDKKLMSSLPNFCGIFNHLERLLDEEISRVRKDMYNDTLNGSTEKRSAELPDAVGPIVQLQEKLYVPVKEYPDFNFVGRILGPRGLTAKQLEAETGCKIMVRGKGSMRDKKKEEQNRGKPNWEHLNEDLHVLITVEDAQNRAEIKLKRAVEEVKKLLVPAAEGEDSLKKMQLMELAILNGTYRDANIKSPALAFSLAATAQAAPRIITGPAPVLPPAALRTPTPAGPTIMPLIRQIQTAVMPNGTPHPTAAIVPPGPEAGLIYTPYEYPYTLAPATSILEYPIEPSGVLGAVATKVRRHDMRVHPYQRIVTADRAATGN

SEQ ID NO: 70392 - protein, 319 aa, Homo sapiens
  Payload ID: 13971
  Gene Symbol: QKI
  Gene Name: QKI, KH domain containing, RNA binding
  Uniprot ID: Q96PU8
  ENSP ID: ENSP00000375973
MVGEMETKEKPKPTPDYLMQLMNDKKLMSSLPNFCGIFNHLERLLDEEISRVRKDMYNDTLNGSTEKRSAELPDAVGPIVQLQEKLYVPVKEYPDFNFVGRILGPRGLTAKQLEAETGCKIMVRGKGSMRDKKKEEQNRGKPNWEHLNEDLHVLITVEDAQNRAEIKLKRAVEEVKKLLVPAAEGEDSLKKMQLMELAILNGTYRDANIKSPALAFSLAATAQAAPRIITGPAPVLPPAALRTPTPAGPTIMPLIRQIQTAVMPNGTPHPTAAIVPPGPEAGLIYTPYEYPYTLAPATSILEYPIEPSGVLGKFFSPWG

SEQ ID NO: 70393 - protein, 317 aa, Homo sapiens
  Payload ID: 13971
  Gene Symbol: QKI
  Gene Name: QKI, KH domain containing, RNA binding
  Uniprot ID: Q96PU8
  ENSP ID: ENSP00000408382
MVGEMETKEKPKPTPDYLMQLMNDKKLMSSLPNFCGIFNHLERLLDEEISRVRKDMYNDTLNGSTEKRSAELPDAVGPIVQLQEKLYVPVKEYPDFNFVGRILGPRGLTAKQLEAETGCKIMVRGKGSMRDKKKEEQNRGKPNWEHLNEDLHVLITVEDAQNRAEIKLKRAVEEVKKLLVPAAEGEDSLKKMQLMELAILNGTYRDANIKSPTAQAAPRIITGPAPVLPPAALRTPTPAGPTIMPLIRQIQTAVMPNGTPHPTAAIVPPGPEAGLIYTPYEYPYTLAPATSILEYPIEPSGVLEWIEMPVMPDISAH

SEQ ID NO: 70394 - protein, 319 aa, Homo sapiens; identical to SEQ ID NO: 70390
  Payload ID: 13971
  Gene Symbol: QKI
  Gene Name: QKI, KH domain containing, RNA binding
  Uniprot ID: Q96PU8
  ENSP ID: ENSP00000408775

SEQ ID NO: 70395 - protein, 34 aa, Homo sapiens
  Payload ID: 13971
  Gene Symbol: QKI
  Gene Name: QKI, KH domain containing, RNA binding
  ENSP ID: ENSP00000437867
  MOD_RES (1)..(1): Any amino acid
XDYLMQLMNDKKLMSSLPNFCGIFNHLERLLDEV

SEQ ID NO: 70396 - protein, 170 aa, Homo sapiens
  Payload ID: 13971
  Gene Symbol: QKI
  Gene Name: QKI, KH domain containing, RNA binding
  ENSP ID: ENSP00000440599
MYNDTLNGSTEKRSAELPDAVGPIVQLQEKLYVPVKEYPDFNFVGRILGPRGLTAKQLEAETGCKIMVRGKGSMRDKKKEEQNRGKPNWEHLNEDLHVLITVEDAQNRAEIKLKRAVEEVKKLLVPAAEGEDSLKKMQLMELAILNGTYRDANIKSPALAFSLAATAQAA

SEQ ID NO: 70397 - protein, 160 aa, Homo sapiens
  Payload ID: 13971
  Gene Symbol: QKI
  Gene Name: QKI, KH domain containing, RNA binding
  ENSP ID: ENSP00000440991
MYNDTLNGSTEKRSAELPDAVGPIVQLQEKLYVPVKEYPDFNFVGRILGPRGLTAKQLEAETGCKIMVRGKGSMRDKKKEEQNRGKPNWEHLNEDLHVLITVEDAQNRAEIKLKRAVEEVKKLLVPAAEGEDSLKKMQLMELAILNGTYRDANIKSPTAQ

SEQ ID NO: 70398 - protein, 41 aa, Homo sapiens
  Payload ID: 13971
  Gene Symbol: QKI
  Gene Name: QKI, KH domain containing, RNA binding
  ENSP ID: ENSP00000441252
MYNDTLNGSTEKRSAELPDAVGPIVQLQEKLYVPVKEYPDL

SEQ ID NO: 70399 - protein, 238 aa, Homo sapiens
  Payload ID: 13971
  Gene Symbol: QKI
  Gene Name: QKI, KH domain containing, RNA binding
  ENSP ID: ENSP00000441773
  MOD_RES (1)..(1): Any amino acid
XEKRSAELPDAVGPIVQLQEKLYVPVKEYPDEEQNRGKPNWEHLNEDLHVLITVEDAQNRAEIKLKRAVEEVKKLLVPAAEGEDSLKKMQLMELAILNGTYRDANIKSPALAFSLAATAQAAPRIITGPAPVLPPAALRTPTPAGPTIMPLIRQIQTAVMPNGTPHPTAAIVPPGPEAGLIYTPYEYPYTLAPATSILEYPIEPSGVLGAVATKVRRHDMRVHPYQRIVTADRAATGN

SEQ ID NO: 70400 - protein, 185 aa, Homo sapiens
  Payload ID: 13971
  Gene Symbol: QKI
  Gene Name: QKI, KH domain containing, RNA binding
  ENSP ID: ENSP00000442848
  MOD_RES (1)..(1): Any amino acid
XLKRAVEEVKKLLVPAAEGEDSLKKMQLMELAILNGTYRDANIKSPALAFSLAATAQAAPRIITGPAPVLPPAALRTPTPAGPTIMPLIRQIQTAVMPNGTPHPTAAIVPPGPEAGLIYTPYEYPYTLAPATSILEYPIEPSGVLGAVATKVRRHDMRVHPYQRIVTADRVTMATVQKILSNLRI

SEQ ID NO: 70401 - protein, 47 aa, Homo sapiens
  Payload ID: 13971
  Gene Symbol: QKI
  Gene Name: QKI, KH domain containing, RNA binding
  ENSP ID: ENSP00000443106
MYNDTLNGSTEKRSAELPDAVGPIVQLQEKLYVPVKEYPDFNFVGRI

SEQ ID NO: 70402 - protein, 100 aa, Homo sapiens
  Payload ID: 13971
  Gene Symbol: QKI
  Gene Name: QKI, KH domain containing, RNA binding
  ENSP ID: ENSP00000443690
MYNDTLNGSTEKRSAELPDAVGPIVQLQEKLYVPVKEYPDFNFVGRILGPRGLTAKQLEAETGCKIMVRGKGSMRDKKKEEQNRGKPNWEHLNEDLHVLI

SEQ ID NO: 70403 - protein, 403 aa, Homo sapiens
  Payload ID: 13972
  Gene Symbol: QTRT1
  Gene Name: queuine tRNA-ribosyltransferase 1
  Uniprot ID: Q9BXR0
  ENSP ID: ENSP00000250237
MAGAATQASLESAPRIMRLVAECSRSRARAGELWLPHGTVATPVFMPVGTQATMKGITTEQLDALGCRICLGNTYHLGLRPGPELIQKANGLHGFMNWPHNLLTDSGGFQMVSLVSLSEVTEEGVRFRSPYDGNETLLSPEKSVQIQNALGSDIIMQLDDVVSSTVTGPRVEEAMYRSIRWLDRCIAAHQRPDKQNLFAIIQGGLDADLRATCLEEMTKRDVPGFAIGGLSGGESKSQFWRMVALSTSRLPKDKPRYLMGVGYATDLVVCVALGCDMFDCVFPTRTARFGSALVPTGNLQLRKKVFEKDFGPIDPECTCPTCQKHSRAFLHALLHSDNTAALHHLTVHNIAYQLQLMSAVRTSIVEKRFPDFVRDFMGAMYGDPTLCPTWATDALASVGITLG

SEQ ID NO: 70404 - protein, 225 aa, Homo sapiens
  Payload ID: 13972
  Gene Symbol: QTRT1
  Gene Name: queuine tRNA-ribosyltransferase 1
  Uniprot ID: Q9BXR0
  ENSP ID: ENSP00000389126
MAGAATQASLESAPRIMRLVAECSRSRARAGELWLPHGTVATPVFMPVGTQATMKGITTEQLDALGCRICLGNTYHLGLRPGPELIQKANGLHGFMNWPHNLLTDSGGFQMVSLVSLSEVTEEGVRFRSPYDGNETLLSPEKSVQIQNALGSDIIMQLDDVVSSTVTGPRVEEAMYRPLGLVTGALLQVNPLAGPVHCSPSAAGQAEPLRHYPGWAGRRSPGHLP

SEQ ID NO: 70405 - protein, 203 aa, Homo sapiens
  Payload ID: 13972
  Gene Symbol: QTRT1
  Gene Name: queuine tRNA-ribosyltransferase 1
  ENSP ID: ENSP00000464990
  MOD_RES (1)..(1): Any amino acid
XGAATQASLESAPRIMRLVAECSRSRARAGELWLPHGTVATPVFMPVGTQATMKGITTEQLDALGCRICLGNTYHLGLRPGPELIQKANGLHGFMNWPHNLLTDSGGFQMVSLVSLSEVTEEGVRFRSPYDGNETLLSPEKSVQIQNALALLCHPGWSAVAQSWLTATSVSQIQAILLSLPSKQLGIQARTSSCSWTTWLAVL

SEQ ID NO: 70406 - protein, 136 aa, Homo sapiens
  Payload ID: 13972
  Gene Symbol: QTRT1
  Gene Name: queuine tRNA-ribosyltransferase 1
  ENSP ID: ENSP00000465974
DLVVCVALGCDMFDCVFPTRTARFGSALVPTGNLQLRKKVFEKDFGPIDPECTCPTCQKHSRAFLHALLHSDNTAALHHLTVHNIAYQLMSAVRTSIVEKRFPDFVRDFMGAMYGDPTLCPTWATDALASVGITLG

SEQ ID NO: 70407 - protein, 124 aa, Homo sapiens
  Payload ID: 13972
  Gene Symbol: QTRT1
  Gene Name: queuine tRNA-ribosyltransferase 1
  ENSP ID: ENSP00000467394
  MOD_RES (1)..(1): Any amino acid
XDIIMQLDDVVSSTVTGPRVEEAMYRSIRWLDRCIAAHQRPDKQNLFAIIQGGLDADLRATCLEGPQSESLKSRTLAGYHSSHLNPSTLGGQEMTKRDVPGFAIGGLSGGESKSQFWRMVALST

SEQ ID NO: 70408 - protein, 180 aa, Homo sapiens
  Payload ID: 13972
  Gene Symbol: QTRT1
  Gene Name: queuine tRNA-ribosyltransferase 1
  ENSP ID: ENSP00000468811
  MOD_RES (1)..(1): Any amino acid
XATQASLESAPRIMRLVAECSRSRARAGELWLPHGTVATPVFMPVGTQATMKGITTEQLDALGCRICLGNTYHLGLRPGPELIQKANGLHGFMNWPHNLLTVTEEGVRFRSPYDGNETLLSPEKSVQIQNALGSDIIMQLDDVVSSTVTGPRVEEAMYRSIRWLDRCIAAHQRPDKQNLF

SEQ ID NO: 70409 - protein, 415 aa, Homo sapiens
  Payload ID: 13973
  Gene Symbol: QTRTD1
  Gene Name: queuine tRNA-ribosyltransferase domain containing 1
  Uniprot ID: Q9H974
  ENSP ID: ENSP00000281273
MKLSLTKVVNGCRLGKIKNLGKTGDHTMDIPGCLLYTKTGSAPHLTHHTLHNIHGVPAMAQLTLSSLAEHHEVLTEYKEGVGKFIGMPESLLYCSLHDPVSPCPAGYVTNKSVSVWSVAGRVEMTVSKFMAIQKALQPDWFQCLSDGEVSCKEATSIKRVRKSVDRSLLFLDNCLRLQEESEVLQKSVIIGVIEGGDVMEERLRSARETAKRPVGGFLLDGFQGNPTTLEARLRLLSSVTAELPEDKPRLISGVSRPDEVLECIERGVDLFESFFPYQVTERGCALTFSFDYQPNPEETLLQQNGTQEEIKCMDQIKKIETTGCNQEITSFEINLKEKKYQEDFNPLVRGCSCYCCKNHTRAYIHHLLVTNELLAGVLLMMHNFEHYFGFFHYIREALKSDKLAQLKELIHRQAS

SEQ ID NO: 70410 - protein, 292 aa, Homo sapiens
  Payload ID: 13973
  Gene Symbol: QTRTD1
  Gene Name: queuine tRNA-ribosyltransferase domain containing 1
  Uniprot ID: Q9H974
  ENSP ID: ENSP00000418056
MTVSKFMAIQKALQPDWFQCLSDGEVSCKEATSIKRVRKSVDRSLLFLDNCLRLQEESEVLQKSVIIGVIEGGDVMEERLRSARETAKRPVGGFLLDGFQGNPTTLEARLRLLSSVTAELPEDKPRLISGVSRPDEVLECIERGVDLFESFFPYQVTERGCALTFSFDYQPNPEETLLQQNGTQEEIKCMDQIKKIETTGCNQEITSFEINLKEKKYQEDFNPLVRGCSCYCCKNHTRAYIHHLLVTNELLAGVLLMMHNFEHYFGFFHYIREALKSDKLAQLKELIHRQAS

SEQ ID NO: 70411 - protein, 9 aa, Homo sapiens
  Payload ID: 13973
  Gene Symbol: QTRTD1
  Gene Name: queuine tRNA-ribosyltransferase domain containing 1
  ENSP ID: ENSP00000418180
FEINLKEKK

SEQ ID NO: 70412 - protein, 309 aa, Homo sapiens
  Payload ID: 13973
  Gene Symbol: QTRTD1
  Gene Name: queuine tRNA-ribosyltransferase domain containing 1
  Uniprot ID: Q9H974
  ENSP ID: ENSP00000419169
MVCWQSVSVWSVAGRVEMTVSKFMAIQKALQPDWFQCLSDGEVSCKEATSIKRVRKSVDRSLLFLDNCLRLQEESEVLQKSVIIGVIEGGDVMEERLRSARETAKRPVGGFLLDGFQGNPTTLEARLRLLSSVTAELPEDKPRLISGVSRPDEVLECIERGVDLFESFFPYQVTERGCALTFSFDYQPNPEETLLQQNGTQEEIKCMDQIKKIETTGCNQEITSFEINLKEKKYQEDFNPLVRGCSCYCCKNHTRAYIHHLLVTNELLAGVLLMMHNFEHYFGFFHYIREALKSDKLAQLKELIHRQAS

SEQ ID NO: 70413 - protein, 145 aa, Homo sapiens
  Payload ID: 13973
  Gene Symbol: QTRTD1
  Gene Name: queuine tRNA-ribosyltransferase domain containing 1
  ENSP ID: ENSP00000419655
MKLSLTKVVNGCRLGKIKNLGKTGDHTMDIPGCLLYTKTGSAPHLTHHTLHNIHGVPAMAQLTLSSLAEHHEVLTEYKEGVGKFIGMPESLLYCSLHDPVSPCPAGYVTNKVLQKSVIIGVIEGGDVMEERLRSARETAKRPVGG

SEQ ID NO: 70414 - protein, 427 aa, Homo sapiens
  Payload ID: 13973
  Gene Symbol: QTRTD1
  Gene Name: queuine tRNA-ribosyltransferase domain containing 1
  Uniprot ID: Q9H974
  ENSP ID: ENSP00000420682
MVCWQDLEESLRMKLSLTKVVNGCRLGKIKNLGKTGDHTMDIPGCLLYTKTGSAPHLTHHTLHNIHGVPAMAQLTLSSLAEHHEVLTEYKEGVGKFIGMPESLLYCSLHDPVSPCPAGYVTNKSVSVWSVAGRVEMTVSKFMAIQKALQPDWFQCLSDGEVSCKEATSIKRVRKSVDRSLLFLDNCLRLQEESEVLQKSVIIGVIEGGDVMEERLRSARETAKRPVGGFLLDGFQGNPTTLEARLRLLSSVTAELPEDKPRLISGVSRPDEVLECIERGVDLFESFFPYQVTERGCALTFSFDYQPNPEETLLQQNGTQEEIKCMDQIKKIETTGCNQEITSFEINLKEKKYQEDFNPLVRGCSCYCCKNHTRAYIHHLLVTNELLAGVLLMMHNFEHYFGFFHYIREALKSDKLAQLKELIHRQAS

SEQ ID NO: 70415 - protein, 167 aa, Homo sapiens
  Payload ID: 13973
  Gene Symbol: QTRTD1
  Gene Name: queuine tRNA-ribosyltransferase domain containing 1
  ENSP ID: ENSP00000420806
MKSNIYEDLEESLRMKLSLTKVVNGCRLGKIKNLGKTGDHTMDIPGCLLYTKTGSAPHLTHHTLHNIHGVPAMAQLTLSSLAEHHEVLTEYKEGVGKFIGMPESLLYCSLHDPVSPCPAGYVTNKSVSVWSVAGRVEMTVSKFMAIQKALQPDWFQCLSDGEVSCKE

SEQ ID NO: 70416 - protein, 604 aa, Homo sapiens
  Payload ID: 13974
  Gene Symbol: QSOX1
  Gene Name: quiescin Q6 sulfhydryl oxidase 1
  Uniprot ID: O00391
  ENSP ID: ENSP00000356572
MRRCNSGSGPPPSLLLLLLWLLAVPGANAAPRSALYSPSDPLTLLQADTVRGAVLGSRSAWAVEFFASWCGHCIAFAPTWKALAEDVKAWRPALYLAALDCAEETNSAVCRDFNIPGFPTVRFFKAFTKNGSGAVFPVAGADVQTLRERLIDALESHHDTWPPACPPLEPAKLEEIDGFFARNNEEYLALIFEKGGSYLGREVALDLSQHKGVAVRRVLNTEANVVRKFGVTDFPSCYLLFRNGSVSRVPVLMESRSFYTAYLQRLSGLTREAAQTTVAPTTANKIAPTVWKLADRSKIYMADLESALHYILRIEVGRFPVLEGQRLVALKKFVAVLAKYFPGRPLVQNFLHSVNEWLKRQKRNKIPYSFFKTALDDRKEGAVLAKKVNWIGCQGSEPHFRGFPCSLWVLFHFLTVQAARQNVDHSQEAAKAKEVLPAIRGYVHYFFGCRDCASHFEQMAAASMHRVGSPNAAVLWLWSSHNRVNARLAGAPSEDPQFPKVQWPPRELCSACHNERLDVPVWDVEATLNFLKAHFSPSNIILDFPAAGSAARRDVQNVAAAPELAMGALELESRNSTLDPGKPEMMKSPTNTTPHVPAEGPELI

SEQ ID NO: 70417 - protein, 747 aa, Homo sapiens
  Payload ID: 13974
  Gene Symbol: QSOX1
  Gene Name: quiescin Q6 sulfhydryl oxidase 1
  Uniprot ID: O00391
  ENSP ID: ENSP00000356574
MRRCNSGSGPPPSLLLLLLWLLAVPGANAAPRSALYSPSDPLTLLQADTVRGAVLGSRSAWAVEFFASWCGHCIAFAPTWKALAEDVKAWRPALYLAALDCAEETNSAVCRDFNIPGFPTVRFFKAFTKNGSGAVFPVAGADVQTLRERLIDALESHHDTWPPACPPLEPAKLEEIDGFFARNNEEYLALIFEKGGSYLGREVALDLSQHKGVAVRRVLNTEANVVRKFGVTDFPSCYLLFRNGSVSRVPVLMESRSFYTAYLQRLSGLTREAAQTTVAPTTANKIAPTVWKLADRSKIYMADLESALHYILRIEVGRFPVLEGQRLVALKKFVAVLAKYFPGRPLVQNFLHSVNEWLKRQKRNKIPYSFFKTALDDRKEGAVLAKKVNWIGCQGSEPHFRGFPCSLWVLFHFLTVQAARQNVDHSQEAAKAKEVLPAIRGYVHYFFGCRDCASHFEQMAAASMHRVGSPNAAVLWLWSSHNRVNARLAGAPSEDPQFPKVQWPPRELCSACHNERLDVPVWDVEATLNFLKAHFSPSNIILDFPAAGSAARRDVQNVAAAPELAMGALELESRNSTLDPGKPEMMKSPTNTTPHVPAEGPEASRPPKLHPGLRAAPGQEPPEHMAELQRNEQEQPLGQWHLSKRDTGAALLAESRAEKNRLWGPLEVRRVGRSSKQLVDIPEGQLEARAGRGRGQWLQVLGGGFSYLDISLCVGLYSLSFMGLLAMYTYFQAKIRALKGHAGHPAA

SEQ ID NO: 70418 - protein, 155 aa, Homo sapiens
  Payload ID: 13974
  Gene Symbol: QSOX1
  Gene Name: quiescin Q6 sulfhydryl oxidase 1
  ENSP ID: ENSP00000375883
MRRCNSGSGPPPSLLLLLLWLLAVPGANAAPRSALYSPSDPLTLLQADTVRGAVLGSRSAWAVEFFASWCGHCIAFAPTWKALAEDVKAWRPALYLAALDCAEETNSAVCRDFNIPGFPTVRFFKAFTKNGSGAVFPGWRRLMDSLREITKSTWL

SEQ ID NO: 70419 - protein, 72 aa, Homo sapiens
  Payload ID: 13974
  Gene Symbol: QSOX1
  Gene Name: quiescin Q6 sulfhydryl oxidase 1
  ENSP ID: ENSP00000402170
  MOD_RES (1)..(1): Any amino acid
XNEQEQPLGQWHLSKRDTGAALLAESRAEKNRLWGPLEVRRVGRSSKQLVDIPEGQLEARAGRGRGQWLQLI

SEQ ID NO: 70420 - protein, 698 aa, Homo sapiens
  Payload ID: 13975
  Gene Symbol: QSOX2
  Gene Name: quiescin Q6 sulfhydryl oxidase 2
  Uniprot ID: Q6ZRP7
  ENSP ID: ENSP00000351536
MAAAGAAVARSPGIGAGPALRARRSPPPRAARLPRLLVLLAAAAVGPGAGGAARLYRAGEDAVWVLDSGSVRGATANSSAAWLVQFYSSWCGHCIGYAPTWRALAGDVRDWASAIRVAALDCMEEKNQAVCHDYDIHFYPTFRYFKAFTKEFTTGENFKGPDRELRTVRQTMIDFLQNHTEGSRPPACPRLDPIQPSDVLSLLDNRGSHYVAIVFESNSSYLGREVILDLIPYESIVVTRALDGDKAFLEKLGVSSVPSCYLIYPNGSHGLINVVKPLRAFFSSYLKSLPDVRKKSLPLPEKPHKEENSEIVVWREFDKSKLYTVDLESGLHYLLRVELAAHKSLAGAELKTLKDFVTVLAKLFPGRPPVKKLLEMLQEWLASLPLDRIPYNAVLDLVNNKMRISGIFLTNHIKWVGCQGSRSELRGYPCSLWKLFHTLTVEASTHPDALVGTGFEDDPQAVLQTMRRYVHTFFGCKECGEHFEEMAKESMDSVKTPDQAILWLWKKHNMVNGRLAGHLSEDPRFPKLQWPTPDLCPACHEEIKGLASWDEGHVLTFLKQHYGRDNLLDTYSADQGDSSEGGTLARGEEEEKRLTPPEVSHGDRDTQSVRPPGALGPRPALPESLHHSLDGKLQSLDGPGAHKEVGGAAPFLGVDFSSLDMSLCVVLYVASSLFLMVMYFFFRVRSRRWKVKHHHPAV

SEQ ID NO: 70421 - protein, 284 aa, Homo sapiens
  Payload ID: 13975
  Gene Symbol: QSOX2
  Gene Name: quiescin Q6 sulfhydryl oxidase 2
  ENSP ID: ENSP00000389089
  MOD_RES (1)..(1): Any amino acid
XGENFKGPDRELRTVRQTMIDFLQNHTEGSRPPACPRLDPIHVKPLRAFFSSYLKSLPDVRKKSLPLPEKPHKEENSEIVVWREFDKSKLYTVDLESGLHYLLRVELAAHKSLAGAELKTLKDFVTVLAKLFPGRPPVKKLLEMLQEWLASLPLDRIPYNAVLDLVNNKMRISGIFLTNHIKWVGCQGSRSELRGYPCSLWKLFHTLTVEASTHPDALVGTGFEDDPQAVLQTMRRYVHTFFGCKECGEHFEEMAKESMDSVKTPDQAILWLWKKHNMVNGRLA

SEQ ID NO: 70422 - protein, 696 aa, Homo sapiens
  Payload ID: 13975
  Gene Symbol: QSOX2
  Gene Name: quiescin Q6 sulfhydryl oxidase 2
  ENSP ID: ENSP00000483961
MAAAGAAVARSPGIGAGPALRARRSPPPRAARLPRLLVLLAAAAVGPGAGGAARLYRAGEDAVWVLDSGSVRGATANSSAAWLVQFYSSWCGHCIGYAPTWRALAGDVRDWASAIRVAALDCMEEKNQAVCHDYDIHFYPTFRYFKAFTKEFTTGENFKGPDRELRTVRQTMIDFLQNHTEGSRPPACPRLDPIQPSDVLSLLDNRGSHYVAIVFESNSSYLGREVILDLIPYESIVVTRALDGDKAFLEKLGVSSVPSCYLIYPNGSHGLINVVKPLRAFFSSYLKSLPDVRKKSLPLPEKPHKEENSEIVVWREFDKSKLYTVDLESGLHYLLRVELAAHKSLAGAELKTLKDFCLGQAVPWTAAVKKLLEMLQEWLASLPLDRIPYNAVLDLVNNKMRISGIFLTNHIKWVGCQGSRSELRGYPCSLWKLFHTLTVEASTHPDALVGTGFEDDPQAVLQTMRRYVHTFFGCKECGEHFEEMAKESMDSVKTPDQAILWLWKKHNMVNGRLAGHLSEDPRFPKLQWPTPDLCPACHEEIKGLASWDEGHVLTFLKQHYGRDNLLDTYSADQGDSSEGGTLARGEEEEKRLTPPEVSHGDRDTQSVRPPGALGPRPALPESLHHSLDGKLQSLDGPGAHKEVGGAAPFLGVDFSSLDMSLCVVLYVASSLFLMVMYFFFRVRSRRWKVKHHHPAV

SEQ ID NO: 70423 - protein, 244 aa, Homo sapiens
  Payload ID: 13976
  Gene Symbol: QDPR
  Gene Name: quinoid dihydropteridine reductase
  Uniprot ID: P09417
  ENSP ID: ENSP00000281243
MAAAAAAGEARRVLVYGGRGALGSRCVQAFRARNWWVASVDVVENEEASASIIVKMTDSFTEQADQVTAEVGKLLGEEKVDAILCVAGGWAGGNAKSKSLFKNCDLMWKQSIWTSTISSHLATKHLKEGGLLTLAGAKAALDGTPGMIGYGMAKGAVHQLCQSLAGKNSGMPPGAAAIAVLPVTLDTPMNRKSMPEADFSSWTPLEFLVETFHDWITGKNRPSSGSLIQVVTTEGRTELTPAYF

SEQ ID NO: 70424 - protein, 213 aa, Homo sapiens
  Payload ID: 13976
  Gene Symbol: QDPR
  Gene Name: quinoid dihydropteridine reductase
  Uniprot ID: P09417
  ENSP ID: ENSP00000390944
MAAAAAAGEARRVLVYGGRGALGSRCVQAFRARNWVTAEVGKLLGEEKVDAILCVAGGWAGGNAKSKSLFKNCDLMWKQSIWTSTISSHLATKHLKEGGLLTLAGAKAALDGTPGMIGYGMAKGAVHQLCQSLAGKNSGMPPGAAAIAVLPVTLDTPMNRKSMPEADFSSWTPLEFLVETFHDWITGKNRPSSGSLIQVVTTEGRTELTPAYF

SEQ ID NO: 70425 - protein, 128 aa, Homo sapiens
  Payload ID: 13976
  Gene Symbol: QDPR
  Gene Name: quinoid dihydropteridine reductase
  ENSP ID: ENSP00000420873
  MOD_RES (1)..(1): Any amino acid
XCVQAFRARNWWVASVDVVENEEASASIIVKMTDSFTEQADQVTAEVGKLLGEEKVDAILCVAGGWAGGNAKSKSLFKNCDLMWKQSIWTSTISSHLATKHLKEGGLLTLAGAKAALDGTPGLPWIPR

SEQ ID NO: 70426 - protein, 152 aa, Homo sapiens
  Payload ID: 13976
  Gene Symbol: QDPR
  Gene Name: quinoid dihydropteridine reductase
  ENSP ID: ENSP00000422759
MAAAAAAGEARRVLVYGGRGALGSRCVQAFRARNWWVASVDVVENEEASASIIVKMTDSFTEQADQVTAEVGKLLGEEKVDAILCVAGGWAGGNAKSKSLFKNCDLMWKQSIWTSTISSHLATKHLKEGGLLTLAGAKAALDGTPGLPWIPR

SEQ ID NO: 70427 - protein, 152 aa, Homo sapiens; identical to SEQ ID NO: 70426
  Payload ID: 13976
  Gene Symbol: QDPR
  Gene Name: quinoid dihydropteridine reductase
  ENSP ID: ENSP00000423227

SEQ ID NO: 70428 - protein, 36 aa, Homo sapiens
  Payload ID: 13976
  Gene Symbol: QDPR
  Gene Name: quinoid dihydropteridine reductase
  ENSP ID: ENSP00000426039
MAAAAAAGEARRVLVYGGRGALGSRCVQAFRARNWI

SEQ ID NO: 70429 - protein, 162 aa, Homo sapiens
  Payload ID: 13976
  Gene Symbol: QDPR
  Gene Name: quinoid dihydropteridine reductase
  ENSP ID: ENSP00000426377
MAAAAAAGEARRVLVYGGRGALGSRCVQAFRARNWWVASVDVVENEEASASIIVKMTDSFTEQADQVTAEVGKLLGEEKVDAILCVAGGWAGGNAKSKSLFKNCDLMWKQSIWTSTISSHLATKHLKEGGLLTLAGAKAALDGTPELSMTGSQGKTDRAQEA

SEQ ID NO: 70430 - protein, 297 aa, Homo sapiens
  Payload ID: 13977
  Gene Symbol: QPRT
  Gene Name: quinolinate phosphoribosyltransferase
  Uniprot ID: Q15274
  ENSP ID: ENSP00000378782
MDAEGLALLLPPVTLAALVDSWLREDCPGLNYAALVSGAGPSQAALWAKSPGVLAGQPFFDAIFTQLNCQVSWFLPEGSKLVPVARVAEVRGPAHCLLLGERVALNTLARCSGIASAAAAAVEAARGAGWTGHVAGTRKTTPGFRLVEKYGLLVGGAASHRYDLGGLVMVKDNHVVAAGGVEKAVRAARQAADFTLKVEVECSSLQEAVQAAEAGADLVLLDNFKPEELHPTATVLKAQFPSVAVEASGGITLDNLPQFCGPHIDVISMGMLTQAAPALDFSLKLFAKEVAPVPKIH

SEQ ID NO: 70431 - protein, 149 aa, Homo sapiens
  Payload ID: 13977
  Gene Symbol: QPRT
  Gene Name: quinolinate phosphoribosyltransferase
  ENSP ID: ENSP00000455183
MDAEGLALLLPPVTLAALVDSWLREDCPGLNYAALAVRAARQAADFTLKVEVECSSLQEAVQAAEAGADLVLLDNFKPEELHPTATVLKAQFPSVAVEASGGITLDNLPQFCGPHIDVISMGMLTQAAPALDFSLKLFAKEVAPVPKIH

SEQ ID NO: 70432 - protein, 440 aa, Homo sapiens
  Payload ID: 13978
  Gene Symbol: R3HCC1
  Gene Name: R3H domain and coiled-coil containing 1
  ENSP ID: ENSP00000265806
LALLCLDGVFLSSAENDFVHRIQEELDRFLLQKQLSKVLLFPPLSSRLRYLIHRTAENFDLLSSFSVGEGWKRRTVICHQDIRVPSSDGLSGPCRAPASCPSRYHGPRPISNQGAAAVPRGARAGRWYRGRKPDQPLYVPRVLRRQEEWGLTSTSVLKREAPAGRDPEEPGDVGAGDPNSDQGLPVLMTQGTEDLKGPGQRCENEPLLDPVGPEPLGPESQSGKGDMVEMATRFGSTLQLDLEKGKESLLEKRLVAEEEEDEEEVEEDGPSSCSEDDYSELLQEITDNLTKKEIQIEKIHLDTSSFVEELPGEKDLAHVVEIYDFEPALKTEDLLATFSEFQEKGFRIQWVDDTHALGIFPCLASAAEALTREFSVLKIRPLTQGTKQSKLKALQRPKLLRLVKERPQTNATVARRLVARALGLQHKKKERPAVRGPLPP

SEQ ID NO: 70433 - protein, 480 aa, Homo sapiens
  Payload ID: 13978
  Gene Symbol: R3HCC1
  Gene Name: R3H domain and coiled-coil containing 1
  Uniprot ID: Q9Y3T6
  ENSP ID: ENSP00000397555
MNMKASRVTLGEAGARARWPLGTPRAAATRREAAALPPVTLALLCLDGVFLSSAENDFVHRIQEELDRFLLQKQLSKVLLFPPLSSRLRYLIHRTAENFDLLSSFSVGEGWKRRTVICHQDIRVPSSDGLSGPCRAPASCPSRYHGPRPISNQGAAAVPRGARAGRWYRGRKPDQPLYVPRVLRRQEEWGLTSTSVLKREAPAGRDPEEPGDVGAGDPNSDQGLPVLMTQGTEDLKGPGQRCENEPLLDPVGPEPLGPESQSGKGDMVEMATRFGSTLQLDLEKGKESLLEKRLVAEEEEDEEEVEEDGPSSCSEDDYSELLQEITDNLTKKEIQIEKIHLDTSSFVEELPGEKDLAHVVEIYDFEPALKTEDLLATFSEFQEKGFRIQWVDDTHALGIFPCLASAAEALTREFSVLKIRPLTQGTKQSKLKALQRPKLLRLVKERPQTNATVARRLVARALGLQHKKKERPAVRGPLPP

SEQ ID NO: 70434 - protein, 283 aa, Homo sapiens
  Payload ID: 13978
  Gene Symbol: R3HCC1
  Gene Name: R3H domain and coiled-coil containing 1
  ENSP ID: ENSP00000428395
LALLCLDGVFLSSAENDFVHRIQEELDRFLLQKQLSKVLLFPPLSSRLRYLIHRTAENFDLLSSFSVGEGWKRRTVICHQDIRVPSSDGLSGPCRAPASCPSRYHGPRPISNQGAAAVPRGARAGRWYRGRKPDQPLYVPRVLRRQEEWGLTSTSVLKREAPAGRDPEEPGDVGAGDPNSDQGLPVLMTQGTEDLKGPGQRCENEPLLDPVGPEPLGPESQSGKGDMVEMATRFGSTLQLDLEKGKESLLEKRLVAEEEEDEEEVEEDGPSSCSEDDYSELLQ

SEQ ID NO: 70435 - protein, 311 aa, Homo sapiens
  Payload ID: 13978
  Gene Symbol: R3HCC1
  Gene Name: R3H domain and coiled-coil containing 1
  ENSP ID: ENSP00000429417
LALLCLDGVFLSSAENDFVHRIQEELDRFLLQKQLSNRLRYLIHRTAENFDLLSSFSVGEGWKRRTVICHQDIRVPSSDGLSGPCRAPASCPSRYHGPRPISNQGAAAVPRGARAGRWYRGRKPDQPLYVPRVLRRQEEWGLTSTSVLKREAPAGRDPEEPGDVGAGDPNSDQGLPVLMTQGTEDLKGPGQRCENEPLLDPVGPEPLGPESQSGKGDMVEMATRFGSTLQLDLEKGKESLLEKRLVAEEEEDEEEVEEDGPSSCSEDDYSELLQEITDNLTKKEIQIEKIHLDTSSFVEELPGEKDLAHVV

SEQ ID NO: 70436 - protein, 223 aa, Homo sapiens
  Payload ID: 13978
  Gene Symbol: R3HCC1
  Gene Name: R3H domain and coiled-coil containing 1
  ENSP ID: ENSP00000429604
LALLCLDGVFLSSAENDFVHRIQEELDRFLLQKQLSKVLLFPPLSSRLRYLIHRTAENFDLLSSFSVGEGWKRRTVICHQDIRVPSSDGLSGPCRAPASCPSRYHGPRPISNQGAAAVPRGARAGRWYRGRKPDQPLYVPRVLRRQEEWGLTSTSVLKREAPAGRDPEEPGDVGAGDPNSDQGLPVLMTQGTEDLKGPGQRCENEPLLDPVGPEPLGPESQSG

SEQ ID NO: 70437 - protein, 148 aa, Homo sapiens
  Payload ID: 13978
  Gene Symbol: R3HCC1
  Gene Name: R3H domain and coiled-coil containing 1
  ENSP ID: ENSP00000430339
EEDGPSSCSEDDYSELLQEITDNLTKKEIQIEKIHLDTSSFVEELPGEKDLAHVVEIYDFEPALKTEDLLATFSEFQEKGFRIQWVDDTHALGIFPCLASAAEALTREFSVLKIRPLTQGTKQSKLKALQRPKTMVRDFRHEFSMTSK

SEQ ID NO: 70438 - protein, 398 aa, Homo sapiens
  Payload ID: 13978
  Gene Symbol: R3HCC1
  Gene Name: R3H domain and coiled-coil containing 1
  ENSP ID: ENSP00000486278
LALLCLDGVFLSSAENDFVHRIQEELDRFLLQKQLSKVLLFPPLSSRLRYLIHRTAENFDLLSSFSVGEGWKRRTVICHQDIRVPSSDGLSGPCRAPASCPSRQEEWGLTSTSVLKREAPAGRDPEEPGDVGAGDPNSDQGLPVLMTQGTEDLKGPGQRCENEPLLDPVGPEPLGPESQSGKGDMVEMATRFGSTLQLDLEKGKESLLEKRLVAEEEEDEEEVEEDGPSSCSEDDYSELLQEITDNLTKKEIQIEKIHLDTSSFVEELPGEKDLAHVVEIYDFEPALKTEDLLATFSEFQEKGFRIQWVDDTHALGIFPCLASAAEALTREFSVLKIRPLTQGTKQSKLKALQRPKLLRLVKERPQTNATVARRLVARALGLQHKKKERPAVRGPLPP

SEQ ID NO: 70439 - protein, 43 aa, Homo sapiens
  Payload ID: 13978
  Gene Symbol: R3HCC1
  Gene Name: R3H domain and coiled-coil containing 1
  ENSP ID: ENSP00000486624
LALLCLDGVFLSSAENDFVHRIQEELDRFLLQKQLSKVLLFPP

SEQ ID NO: 70440 - protein, 201 aa, Homo sapiens
  Payload ID: 13978
  Gene Symbol: R3HCC1
  Gene Name: R3H domain and coiled-coil containing 1
  ENSP ID: ENSP00000487121
LALLCLDGVFLSSAENDFVHRIQEELDRFLLQKQLSKVLLFPPLSSRLRYLIHRTAENFDLLSSFSVGEGWKRRTVICHQDIRVPSSDGLSGPCRAPASCPSRYHGPRPISNQGAAAVPRGARAGRWYRGRKPDQPLYVPRVLRRQEEWGLTSTSVLKREAPAGRDPEEPGDVGAGDPNSDQGLPVLMTQGTEDLKGPGQS

SEQ ID NO: 70441 - protein, 778 aa, Homo sapiens
  Payload ID: 13979
  Gene Symbol: R3HCC1L
  Gene Name: R3H domain and coiled-coil containing 1-like
  Uniprot ID: Q7Z5L2
  ENSP ID: ENSP00000298999
MQQESERCRVRARRPDMALYVPKARRGAVLLKTGDEEESCGSPNSVVKEKQKESSLSQKEVFKDKPEARRLNINPDRKEHNCREEKKSSTKLRMDTCLQKTNRVCSKRGTTESKEVLSQGQQQGAPNAGVITNAPLQRHFKPKKVECLEVETTDVTGHERILLSQACLEISEAQVPSKPFQNVEFCDFSRHEPDGEAFEDKDLEGRIETDTKVLEILYEFPRVFSSVMKPENMIVPIKLSSDSEIVQQSMQTSDGILNPSSGGITTTSVPGSPDGVFDQTCVDFEVESVGGIANSTGFILDQKDTDSIPATMGHISLSESTNDTVSPVMIRECEKNDSTADELHVKHEPPDTAVLAHETHRDSGFKNVGDITNKACMMDTTGMSCSDHVTVDSPYVVAVRIADETSINTRSFSKFVGMSADATPLHVARSGNDTEDFSNPSACSDIYGESISSHFTESTGKLIESLSDCASSLPIKKIAGSNYNTFLDSELSMLNGTKVLSDSAVGIDLGSTGDTTEALHELRTAEEFKTEEQDDSGSIEFGVSFPDRESSSMETSIEPKATETSHTEGITAIEESWESMFNDDGDCLDPRLLQELSGNTKSRESIQEPRSDYYNHEVPDIDLSDCEFPHVIEIYDFPQEFHTEDLLRVFCSYQKKGFDIKWVDDTHALGVFSSPITARDALGIKHTMVKIRPLSQATRAAKAKARAYAEFLQPAKERPETSAALARRLVISALGVRSKQSKTEREAELKKLQEARERKRLEAKQREDIWEGRDQSTV

SEQ ID NO: 70442 - protein, 778 aa, Homo sapiens; identical to SEQ ID NO: 70441
  Payload ID: 13979
  Gene Symbol: R3HCC1L
  Gene Name: R3H domain and coiled-coil containing 1-like
  Uniprot ID: Q7Z5L2
  ENSP ID: ENSP00000314018

SEQ ID NO: 70443 - protein, 778 aa, Homo sapiens; identical to SEQ ID NO: 70441
  Payload ID: 13979
  Gene Symbol: R3HCC1L
  Gene Name: R3H domain and coiled-coil containing 1-like
  Uniprot ID: Q7Z5L2
  ENSP ID: ENSP00000359616

SEQ ID NO: 70444 - protein, 184 aa, Homo sapiens
  Payload ID: 13979
  Gene Symbol: R3HCC1L
  Gene Name: R3H domain and coiled-coil containing 1-like
  Uniprot ID: Q7Z5L2
  ENSP ID: ENSP00000359618
MLSGNTKSRESIQEPRSDYYNHEVPDIDLSDCEFPHVIEIYDFPQEFHTEDLLRVFCSYQKKGFDIKWVDDTHALGVFSSPITARDALGIKHTMVKIRPLSQATRAAKAKARAYAEFLQPAKERPETSAALARRLVISALGVRSKQSKTEREAELKKLQEARERKRLEAKQREDIWEGRDQSTV

SEQ ID NO: 70445 - protein, 184 aa, Homo sapiens; identical to SEQ ID NO: 70444
  Payload ID: 13979
  Gene Symbol: R3HCC1L
  Gene Name: R3H domain and coiled-coil containing 1-like
  Uniprot ID: Q7Z5L2
  ENSP ID: ENSP00000479916

SEQ ID NO: 70446 - protein, 792 aa, Homo sapiens
  Payload ID: 13979
  Gene Symbol: R3HCC1L
  Gene Name: R3H domain and coiled-coil containing 1-like
  ENSP ID: ENSP00000483494
MQQESERCRVRARRPDMALYVPKARRGAVLLKTGDEEESCGSPNSVVKEKQKESSLSQKEVFKDKPEARRLNINPDRKEHNCREEKKSSTKLRMDTCLQKTNRVCSKRGTTESKEVLSQGQQQGAPNAGVITNAPLQRHFKPKKVECLEVETTDVTGHERILLSQACLEISEAQVPSKPFQNVEFCDFSRHEPDGEAFEDKDLEGRIETDTKVLEILYEFPRVFSSVMKPENMIVPIKLSSDSEIVQQSMQTSDGILNPSSGGITTTSVPGSPDGVFDQTCVDFEVESVGGIANSTGFILDQKDTDSIPATMGHISLSESTNDTVSPVMIRECEKNDSTADELHVKHEPPDTAVLAHETHRDSGFKNVGDITNKACMMDTTGMSCSDHVTVDSPYVVAVRIADETSINTRSFSKFVGMSADATPLHVARSGNDTEDFSNPSACSDIYGESISSHFTESTGKLIESLSDCASSLPIKKIAGSNYNTFLDSELSMLNGTKVLSDSAVGIDLGSTGDTTEALHELRTAEEFKTEEQDDSGSIEFGVSFPDRESSSMETSIEPKATETSHTEGITAIEESWESMFNDDGDCLDPRLLQEGILMHIKPENHCSKLSGNTKSRESIQEPRSDYYNHEVPDIDLSDCEFPHVIEIYDFPQEFHTEDLLRVFCSYQKKGFDIKWVDDTHALGVFSSPITARDALGIKHTMVKIRPLSQATRAAKAKARAYAEFLQPAKERPETSAALARRLVISALGVRSKQSKTEREAELKKLQEARERKRLEAKQREDIWEGRDQSTV

SEQ ID NO: 70447 - protein, 1099 aa, Homo sapiens
  Payload ID: 13980
  Gene Symbol: R3HDM1
  Gene Name: R3H domain containing 1
  Uniprot ID: Q15032
  ENSP ID: ENSP00000264160
MRMSDTVTVKDETATMKDLEAEVKDTTRVENLIKSENYGKILVEKNEHCIENNIDLQRPLQSFGQTGKRSKSSSKLKLVRSLAVCEESPPPPAPEISQENQEKIQIQLTQSFEKEEKPSKDEAEKEKASDKLPRKMLSRDSSQEYTDSTGIDLHEFLVNTLKNNPRDRMMLLKLEQEILDFIGNNESPRKKFPPMTSYHRMLLHRVAAYFGLDHNVDQSGKSVIVNKTSNTRIPDQKFNEHIKDDKGEDFQKRYILKRDNSSFDKDDNQMRIRLKDDRRSKSIEEREEEYQRARDRIFSQDSLCSQENYIIDKRLQDEDASSTQQRRQIFRVNKDASGRSTNSHQSSTENELKYSEPRPWSSTDSDSSLRNLKPAVTKASSFSGISVLTRGDSSGSSKSIGRLSKTGSESSGSVGSSTGSLSHIQQPLPGTALSQSSHGAPVVYPTVSTHSSLSFDGGLNGQVASPSTSFFLLPLEAAGIPPGSILINPQTGQPFINPDGSPVVYNPPMTQQPVRSQVPGPPQPPLPAPPQQPAANHIFSQDNLGSQFSHMSLARQPSADGSDPHAAMFQSTVVLQSPQQSGYIMTAAPPPHPPPPPPPPPPPPPLPPGQPVPTAGYPASGHPVSQPVLQQQGYIQQPSPQMPACYCAPGHYHSSQPQYRPVPSVHYNSHLNQPLPQPAQQTGYQVIPNQQQNYQGIVGVQQPQSQSLVSGQPNSIGNQIQGVVIPYTSVPTYQVSLPQGSQGIPHQTYQQPVMFPNQSNQGSMPTTGMPVYYSVIPPGQQNNLSSSVGYLQHPGSEQVQFPRTTSPCSSQQLQGHQCTAGPPPPPGGGMVMMQLSVPNNPQSCAHSPPQWKQNKYYCDHQRGQKCVEFSSVDNIVQHSPQLSSPIISPAQSPAPAQLSTLKTVRPSGPPLSIMPQFSRPFVPGQGDSRYPLLGQPLQYNPPAVLHGHIPNQQGQPGSRHGNRGRRQAKKAASTDLGAGETVVGKVLEITELPDGITRMEAEKLFGELFKIGAKIRWLRDPQSQPRRHPLCCGSGDNTANPERSKPSDLASTYTVLATFPSISAAQNALKKQINSVNKFKLRTSKKHYDFHILERASSQ

SEQ ID NO: 70448 - protein, 971 aa, Homo sapiens
  Payload ID: 13980
  Gene Symbol: R3HDM1
  Gene Name: R3H domain containing 1
  Uniprot ID: Q15032
  ENSP ID: ENSP00000386457
MRMSDTVTVKDETATMKDLEAEVKDTTRVENLIKSENYGKILVEKNEHCIENNIDLQEKIQIQLTQSFEKEEKPSKDEAEKEKASDKLPRKMLSRDSSQEYTDSTGIDLHEFLVNTLKNNPRDRMMLLKLEQEILDFIGNNESPRKKFPPMTSYHRMLLHRVAAYFGLDHNVDQSGKSVIVNKTSNTRIPDQKFNEHIKDDKGEDFQKRYILKRDNSSFDKDDNQMRIRLKDDRRSKSIEEREEEYQRARDRIFSQDSLCSQENYIIDKRLQDEDASSTQQRRQIFRVNKDASGRSTNSHQSSTENELKYSEPRPWSSTDSDSSLRNLKPAVTKASSFSGISVLTRGDSSGSSKSIGRLSKTGQPFINPDGSPVVYNPPMTQQPVRSQVPGPPQPPLPAPPQQPAANHIFSQQDNLGSQFSHMSLARQPSADGSDPHAAMFQSTVVLQSPQQSGYIMTAAPPPHPPPPPPPPPPPPPLPPGQPVPTAGYPASGHPVSQPVLQQQGYIQQPSPQMPACYCAPGHYHSSQPQYRPVPSVHYNSHLNQPLPQPAQQTGYQVIPNQQQNYQGIVGVQQPQSQSLVSGQPNSIGNQIQGVVIPYTSVPTYQVSLPQGSQGIPHQTYQQPVMFPNQSNQGSMPTTGMPVYYSVIPPGQQNNLSSSVGYLQHPGSEQVQFPRTTSPCSSQQLQGHQCTAGPPPPPGGGMVMMQLSVPNNPQSCAHSPPQWKQNKYYCDHQRGQKCVEFSSVDNIVQHSPQLSSPIISPAQSPAPAQLSTLKTVRPSGPPLSIMPQFSRPFVPGQGDSRYPLLGQPLQYNPPAVLHGHIPNQQGQPGSRHGNRGRRQAKKAASTDLGAGETVVGKVLEITELPDGITRMEAEKLFGELFKIGAKIRWLRDPQSQPRRHPLCCGSGDNTANPERSKPSDLASTYTVLATFPSISAAQNALKKQINSVNKFKLRTSKKHYDFHILERASSQ

SEQ ID NO: 70449 - protein, 1044 aa, Homo sapiens
  Payload ID: 13980
  Gene Symbol: R3HDM1
  Gene Name: R3H domain containing 1
  Uniprot ID: Q15032
  ENSP ID: ENSP00000386877
MGLLLPDYRWFTTVDILADNCEKEPWIILFYFCGTPQSQIQRTHQEKIQIQLTQSFEKEEKPSKDEAEKEKASDKLPRKMLSRDSSQEYTDSTGIDLHEFLVNTLKNNPRDRMMLLKLEQEILDFIGNNESPRKKFPPMTSYHRMLLHRVAAYFGLDHNVDQSGKSVIVNKTSNTRIPDQKFNEHIKDDKGEDFQKRYILKRDNSSFDKDDNQMRIRLKDDRRSKSIEEREEEYQRARDRIFSQDSLCSQENYIIDKRLQDEDASSTQQRRQIFRVNKDASGRSTNSHQSSTENELKYSEPRPWSSTDSDSSLRNLKPAVTKASSFSGISVLTRGDSSGSSKSIGRLSKTGSESSGSVGSSTGSLSHIQQPLPGTALSQSSHGAPVVYPTVSTHSSLSFDGGLNGQVASPSTSFFLLPLEAAGIPPGSILINPQTGQPFINPDGSPVVYNPPMTQQPVRSQVPGPPQPPLPAPPQQPAANHIFSQQDNLGSQFSHMSLARQPSADGSDPHAAMFQSTVVLQSPQQSGYIMTAAPPPHPPPPPPPPPPPPPLPPGQPVPTAGYPASGHPVSQPVLQQQGYIQQPSPQMPACYCAPGHYHSSQPQYRPVPSVHYNSHLNQPLPQPAQQTGYQVIPNQQQNYQGIVGVQQPQSQSLVSGQPNSIGNQIQGVVIPYTSVPTYQVSLPQGSQGIPHQTYQQPVMFPNQSNQGSMPTTGMPVYYSVIPPGQQNNLSSSVGYLQHPGSEQVQFPRTTSPCSSQQLQGHQCTAGPPPPPGGGMVMMQLSVPNNPQSCAHSPPQWKQNKYYCDHQRGQKCVEFSSVDNIVQHSPQLSSPIISPAQSPAPAQLSTLKTVRPSGPPLSIMPQFSRPFVPGQGDSRYPLLGQPLQYNPPAVLHGHIPNQQGQPGSRHGNRGRRQAKKAASTDLGAGETVVGKVLEITELPDGITRMEAEKLFGELFKIGAKIRWLRDPQSQPRRHPLCCGSGDNTANPERSKPSDLASTYTVLATFPSISAAQNALKKQINSVNKFKLRTSKKHYDFHILERASSQ

SEQ ID NO: 70450 - protein, 1100 aa, Homo sapiens
  Payload ID: 13980
  Gene Symbol: R3HDM1
  Gene Name: R3H domain containing 1
  Uniprot ID: Q15032
  ENSP ID: ENSP00000387010
MRMSDTVTVKDETATMKDLEAEVKDTTRVENLIKSENYGKILVEKNEHCIENNIDLQRPLQSFGQTGKRSKSSSKLKLVRSLAVCEESPPPPAPEISQENQEKIQIQLTQSFEKEEKPSKDEAEKEKASDKLPRKMLSRDSSQEYTDSTGIDLHEFLVNTLKNNPRDRMMLLKLEQEILDFIGNNESPRKKFPPMTSYHRMLLHRVAAYFGLDHNVDQSGKSVIVNKTSNTRIPDQKFNEHIKDDKGEDFQKRYILKRDNSSFDKDDNQMRIRLKDDRRSKSIEEREEEYQRARDRIFSQDSLCSQENYIIDKRLQDEDASSTQQRRQIFRVNKDASGRSTNSHQSSTENELKYSEPRPWSSTDSDSSLRNLKPAVTKASSFSGISVLTRGDSSGSSKSIGRLSKTGSESSGSVGSSTGSLSHIQQPLPGTALSQSSHGAPVVYPTVSTHSSLSFDGGLNGQVASPSTSFFLLPLEAAGIPPGSILINPQTGQPFINPDGSPVVYNPPMTQQPVRSQVPGPPQPPLPAPPQQPAANHIFSQQDNLGSQFSHMSLARQPSADGSDPHAAMFQSTVVLQSPQQSGYIMTAAPPPHPPPPPPPPPPPPPLPPGQPVPTAGYPASGHPVSQPVLQQQGYIQQPSPQMPACYCAPGHYHSSQPQYRPVPSVHYNSHLNQPLPQPAQQTGYQVIPNQQQNYQGIVGVQQPQSQSLVSGQPNSIGNQIQGVVIPYTSVPTYQVSLPQGSQGIPHQTYQQPVMFPNQSNQGSMPTTGMPVYYSVIPPGQQNNLSSSVGYLQHPGSEQVQFPRTTSPCSSQQLQGHQCTAGPPPPPGGGMVMMQLSVPNNPQSCAHSPPQWKQNKYYCDHQRGQKCVEFSSVDNIVQHSPQLSSPIISPAQSPAPAQLSTLKTVRPSGPPLSIMPQFSRPFVPGQGDSRYPLLGQPLQYNPPAVLHGHIPNQQGQPGSRHGNRGRRQAKKAASTDLGAGETVVGKVLEITELPDGITRMEAEKLFGELFKIGAKIRWLRDPQSQPRRHPLCCGSGDNTANPERSKPSDLASTYTVLATFPSISAAQNALKKQINSVNKFKLRTSKKHYDFHILERASSQ

SEQ ID NO: 70451 - protein, 194 aa, Homo sapiens
  Payload ID: 13980
  Gene Symbol: R3HDM1
  Gene Name: R3H domain containing 1
  ENSP ID: ENSP00000387750
  MOD_RES (1)..(1): Any amino acid
XNKDASGRSTNSHQSSTENELKYSEPRPWSSTDSDSSLRNLKPAVTKASSFSGISVLTRGDSSGSSKSIGRLSKTGQPFINPDGSPVVYNPPMTQQPVRSQVPGPPQPPLPAPPQQPAANHIFSQDNLGSQFSHMSLARQPSADGSDPHAAMFQSTVVLQSPQQSGYIMTAAPPPHPPPPPPPPPPPPPLPPGQ

SEQ ID NO: 70452 - protein, 186 aa, Homo sapiens
  Payload ID: 13980
  Gene Symbol: R3HDM1
  Gene Name: R3H domain containing 1
  ENSP ID: ENSP00000402940
  MOD_RES (1)..(1): Any amino acid
XIIDKRLQDEDASSTQQRRQIFRVNKDASGRSTNSHQSSTENELKYSEPRPWSSTDSDSSLRNLKPAVTKASSFSGISVLTRGDSSGSSKSIGRLSKTGSESSGSVGSSTGSLSHIQQPLPGQPFINPDGSPVVYNPPMTQQPVRSQVPGPPQPPLPAPPQQPAANHIFSQQDNLGSQFSHMSLAR

SEQ ID NO: 70453 - protein, 823 aa, Homo sapiens
  Payload ID: 13980
  Gene Symbol: R3HDM1
  Gene Name: R3H domain containing 1
  ENSP ID: ENSP00000403406
  MOD_RES (1)..(1): Any amino acid
XNRLQDEDASSTQQRRQIFRVNKDASGRSTNSHQSSTENELKYSEPRPWSSTDSDSSLRNLKPAVTKASSFSGISVLTRGDSSGSSKSIGRLSKTGSESSGSVGSSTGSLSHIQQPLPGTALSQSSHGAPVVYPTVSTHSSLSFDGGLNGQVASPSTSFFLLPLEAAGIPPGSILINPQTGQPFINPDGSPVVYNPPMTQQPVRSQVPGPPQPPLPAPPQQPAANHIFSQPVHPLQSSSQPVQYSTAPYPSPFLPVSPTQQYSVQDNLGSQFSHMSLARQPSADGSDPHAAMFQSTVVLQSPQQSGYIMTAAPPPHPPPPPPPPPPPPPLPPGQPVPTAGYPASGHPVSQPVLQQQGYIQQPSPQMPACYCAPGHYHSSQPQYRPVPSVHYNSHLNQPLPQPAQQTGYQVIPNQQQNYQGIVGVQQPQSQSLVSGQPNSIGNQIQGVVIPYTSVPTYQVSLPQGSQGIPHQTYQQPVMFPNQSNQGSMPTTGMPVYYSVIPPGQQNNLSSSVGYLQHPGSEQVQFPRTTSPCSSQQLQGHQCTAGPPPPPGGGMVMMQLSVPNNPQSCAHSPPQWKQNKYYCDHQRGQKCVEFSSVDNIVQHSPQLSSPIISPAQSPAPAQLSTLKTVRPSGPPLSIMPQFSRPFVPGQGDSRYPLLGQPLQYNPPAVLHGHIPNQQGQPGSRHGNRGRRQAKKAASTDLGAGETVVGKVLEITELPDGITRMEAEKLFGELFKIGAKIRWLRDPQSQPRRHPLCCGSGDNTANPERSKPSDLASTYTVLATFPSISAAQNALKKQINSVNKFKLRTSKKHYDFHILERASSQ

SEQ ID NO: 70454 - protein, 50 aa, Homo sapiens
  Payload ID: 13980
  Gene Symbol: R3HDM1
  Gene Name: R3H domain containing 1
  ENSP ID: ENSP00000404098
MGLLLPDYRWFTTVDILADNCEKEPWIILFYFCGTPQSQIQRTHQASSSL

SEQ ID NO: 70455 - protein, 284 aa, Homo sapiens
  Payload ID: 13980
  Gene Symbol: R3HDM1
  Gene Name: R3H domain containing 1
  ENSP ID: ENSP00000405668
  MOD_RES (1)..(1): Any amino acid
XDTVTVKDETATMKDLEAEVKDTTRVENLIKSENYGKILVEKNEHCIENNIDLQSSSKLKLVRSLAVCEESPPPPAPEISQENQEKIQIQLTQSFEKEEKPSKDEAEKEKASDKLPRKMLSRDSSQEYTDSTGIDLHEFLVNTLKNNPRDRMMLLKLEQEILDFIGNNESPRKKFPPMTSYHRMLLHRVAAYFGLDHNVDQSGKSVIVNKTSNTRIPDQKFNEHIKDDKGEDFQKRYILKRDNSSFDKDDNQMRIRLKDDRRSKSIEEREEEYQRARDRIFSQD

SEQ ID NO: 70456 - protein, 223 aa, Homo sapiens
  Payload ID: 13980
  Gene Symbol: R3HDM1
  Gene Name: R3H domain containing 1
  ENSP ID: ENSP00000413763
  MOD_RES (1)..(1): Any amino acid
XQSLVSGQPNSIGNQIQGVVIPYTSVPTYQVSLPQGSQGIPHQTYQQPVMFPNQSNQGSMPTTGMPVYYSVIPPGQQNNLSSSVGYLQHPGSEQVQFPRTTSPCSSQQLQGHQCTAGPPPPPGGGMVMMQLSVPNNPQSCAHSPPQWKQNKYYCDHQRGQKCVEFSSVDNIVQEIPGIHYLASHCSTILLLFCTDTFQTNRVSLAAGMETEEGDKLKKLHPQT

SEQ ID NO: 70457 - protein, 65 aa, Homo sapiens
  Payload ID: 13980
  Gene Symbol: R3HDM1
  Gene Name: R3H domain containing 1
  ENSP ID: ENSP00000416082
MRMSDTVTVKDETATMKDLEAEVKDTTRVENLIKSENYGKILVEKNEHCIENNIDLQGQNDAAEI

SEQ ID NO: 70458 - protein, 971 aa, Homo sapiens; identical to SEQ ID NO: 70448
  Payload ID: 13980
  Gene Symbol: R3HDM1
  Gene Name: R3H domain containing 1
  Uniprot ID: Q15032
  ENSP ID: ENSP00000486837

SEQ ID NO: 70459 - protein, 976 aa, Homo sapiens
  Payload ID: 13981
  Gene Symbol: R3HDM2
  Gene Name: R3H domain containing 2
  Uniprot ID: Q9Y2K5
  ENSP ID: ENSP00000317903
MSNSNTTQETLEIMKESEKKLVEESVNKNKFISKTPSKEEIEKECEDTSLRQETQRRTSNHGHARKRAKSNSKLKLVRSLAVCEESSTPFADGPLETQDIIQLHISCPSDKEEEKSTKDVSEKEDKDKNKEKIPRKMLSRDSSQEYTDSTGIDLHEFLVNTLKKNPRDRMMLLKLEQEILEFINDNNNQFKKFPQMTSYHRMLLHRVAAYFGMDHNVDQTGKAVIINKTSNTRIPEQRFSEHIKDEKNTEFQQRFILKRDDASMDRDDNQTGQNGYLNDIRLSKEAFSSSSHKRRQIFRGNREGLSRTSSSRQSSTDSELKSLEPRPWSSTDSDGSVRSMRPPVTKASSFSGISILTRGDSIGSSKGGSAGRISRPGMALGAPEVCNQVTSSQSVRGLLPCTAQQQQQQQQQQLPALPPTPQQQPPLNNHMISQADDLSNPFGQMSLSRQGSTEAADPSAALFQTPLISQHPQQTSFIMASTGQPLPTSNYSTSSHAPPTQQVLPPQGYMQPPQQIQVSYYPPGQYPNSNQQYRPLSHPVAYSPQRGQQLPQPSQQPGLQPMMPNQQQAAYQGMIGVQQPQNQGLLSSQRSSMGGQMQGLVVQYTPLPSYQVPVGSDSQNVVQPPFQQPMLVPVSQSVQGGLPAAGVPVYYSMIPPAQQNGTSPSVGFLQPPGSEQYQMPQSPSPCSPPQMPQQYSGVSPSGPGVVVMQLNVPNGPQPPQNPSMVQWSHCKYYSMDQRGQKPGDLYSPDSSPQANTQMSSSPVTSPTQSPAPSPVTSLSSVCTGLSPLPVLTQFPRPGGPAQGDGRYSLLGQPLQYNLSICPPLLHGQSTYTVHQGQSGLKHGNRGKRQALKSASTDLGTADVVLGRVLEVTDLPEGITRTEADKLFTQLAMSGAKIQWLKDAQGLPGGGGGDNSGTAENGRHSDLAALYTIVAVFPSPLAAQNASLRLNNSVSRFKLRMAKKNYDLRILERASSQ

SEQ ID NO: 70460 - protein, 976 aa, Homo sapiens; identical to SEQ ID NO: 70459
  Payload ID: 13981
  Gene Symbol: R3HDM2
  Gene Name: R3H domain containing 2
  Uniprot ID: Q9Y2K5
  ENSP ID: ENSP00000351784

SEQ ID NO: 70461 - protein, 1010 aa, Homo sapiens
  Payload ID: 13981
  Gene Symbol: R3HDM2
  Gene Name: R3H domain containing 2
  ENSP ID: ENSP00000385169
MSNSNTTQETLEIMKESEKKLVEESVNKNKFISKTPSKEEIEKECEDTSLRQETQRRTSNHGHARKRAKSNSKLKLVRSLAVCEESSTPFADGPLETQDIIQLHISCPSDKEEEKSTKDVSEKEDKDKNKEKIPRKMLSRDSSQEYTDSTGIDLHEFLVNTLKKNPRDRMMLLKLEQEILEFINDNNNQFKKFPQMTSYHRMLLHRVAAYFGMDHNVDQTGKAVIINKTSNTRIPEQRFSEHIKDEKNTEFQQRFILKRDDASMDRDDNQTGQNGYLNDIRLSKEAFSSSSHKRRQIFRGNREGLSRTSSSRQSSTDSELKSLEPRPWSSTDSDGSVRSMRPPVTKASSFSGISILTRGDSIGSSKGGSAGRISRPGMALGAPEVCNQVTSSQSVRGLLPCTAQQQQQQQQQQLPALPPTPQQQPPLNNHMISQPVPALQPSPQPVQFSPSSCPQVLLPVSPPQQYNMADDLSNPFGQMSLSRQGSTEAADPSAALFQTPLISQHPQQTSFIMASTGQPLPTSNYSTSSHAPPTQQVLPPQGYMQPPQQIQVSYYPPGQYPNSNQQYRPLSHPVAYSPQRGQQLPQPSQQPGLQPMMPNQQQAAYQGMIGVQQPQNQGLLSSQRSSMGGQMQGLVVQYTPLPSYQVPVGSDSQNVVQPPFQQPMLVPVSQSVQGGLPAAGVPVYYSMIPPAQQNGTSPSVGFLQPPGSEQYQMPQSPSPCSPPQMPQQYSGVSPSGPGVVVMQLNVPNGPQPPQNPSMVQWSHCKYYSMDQRGQKPGDLYSPDSSPQANTQMSSSPVTSPTQSPAPSPVTSLSSVCTGLSPLPVLTQFPRPGGPAQGDGRYSLLGQPLQYNLSICPPLLHGQSTYTVHQGQSGLKHGNRGKRQALKSASTDLGTADVVLGRVLEVTDLPEGITRTEADKLFTQLAMSGAKIQWLKDAQGLPGGGGGDNSGTAENGRHSDLAALYTIVAVFPSPLAAQNASLRLNNSVSRFKLRMAKKNYDLRILERASSQ

SEQ ID NO: 70462 - protein, 990 aa, Homo sapiens
  Payload ID: 13981
  Gene Symbol: R3HDM2
  Gene Name: R3H domain containing 2
  ENSP ID: ENSP00000385839
MSNSNTTQETLEIMKESEKKLVEESVNKNKFISKTPSKEEIEKECEDTSLRQETQRRTSNHGHARKRAKSNSKLKLVRSLAVCEESSTPFADGPLETQDIIQLHISCPSDKEEEKSTKDVSEKEDKDKNKEKIPRKMLSRDSSQEYTDSTGIDLHEFLVNTLKKNPRDRMMLLKLEQEILEFINDNNNQFKKFPQMTSYHRMLLHRVAAYFGMDHNVDQTGKAVIINKTSNTRIPEQRFSEHIKDEKNTEFQQRFILKRDDASMDRDDNQIRVPLQDGRRSKSIEEREEEYQRVRERIFARETGQNGYLNDIRGNREGLSRTSSSRQSSTDSELKSLEPRPWSSTDSDGSVRSMRPPVTKASSFSGISILTRGDSIGSSKGGSAGRISRPGMALGAPEVCNQVTSSQSVRGLLPCTAQQQQQQQQQQLPALPPTPQQQPPLNNHMISQADDLSNPFGQMSLSRQGSTEAADPSAALFQTPLISQHPQQTSFIMASTGQPLPTSNYSTSSHAPPTQQVLPPQGYMQPPQQIQVSYYPPGQYPNSNQQYRPLSHPVAYSPQRGQQLPQPSQQPGLQPMMPNQQQAAYQGMIGVQQPQNQGLLSSQRSSMGGQMQGLVVQYTPLPSYQVPVGSDSQNVVQPPFQQPMLVPVSQSVQGGLPAAGVPVYYSMIPPAQQNGTSPSVGFLQPPGSEQYQMPQSPSPCSPPQMPQQYSGVSPSGPGVVVMQLNVPNGPQPPQNPSMVQWSHCKYYSMDQRGQKPGDLYSPDSSPQANTQMSSSPVTSPTQSPAPSPVTSLSSVCTGLSPLPVLTQFPRPGGPAQGDGRYSLLGQPLQYNLSICPPLLHGQSTYTVHQGQSGLKHGNRGKRQALKSASTDLGTADVVLGRVLEVTDLPEGITRTEADKLFTQLAMSGAKIQWLKDAQGLPGGGGGDNSGTAENGRHSDLAALYTIVAVFPSPLAAQNASLRLNNSVSRFKLRMAKKNYDLRILERASSQ

SEQ ID NO: 70463 - protein, 741 aa, Homo sapiens
  Payload ID: 13981
  Gene Symbol: R3HDM2
  Gene Name: R3H domain containing 2
  ENSP ID: ENSP00000394676
KDEKNTEFQQRFILKRDDASMDRDDNQDGRRSKSIEEREEEYQRVRERIFARETGQNGYLNDIRGNREGLSRTSSSRQSSTDSELKSLEPRPWSSTDSDGSVRSMRPPVTKASSFSGISILTRGDSIGSSKGGSAGRISRPGMALGAPEVCNQVTSSQSVRGLLPCTAQQQQQQQQQQLPALPPTPQQQPPLNNHMISQADDLSNPFGQMSLSRQGSTEAADPSAALFQTPLISQHPQQTSFIMASTGQPLPTSNYSTSSHAPPTQQVLPPQGYMQPPQQIQVSYYPPGQYPNSNQQYRPLSHPVAYSPQRGQQLPQPSQQPGLQPMMPNQQQAAYQGMIGVQQPQNQGLLSSQRSSMGGQMQGLVVQYTPLPSYQVPVGSDSQNVVQPPFQQPMLVPVSQSVQGGLPAAGVPVYYSMIPPAQQNGTSPSVGFLQPPGSEQYQMPQSPSPCSPPQMPQQYSGVSPSGPGVVVMQLNVPNGPQPPQNPSMVQWSHCKYYSMDQRGQKPGDLYSPDSSPQANTQMSSSPVTSPTQSPAPSPVTSLSSVCTGLSPLPVLTQFPRPGGPAQGDGRYSLLGQPLQYNLSICPPLLHGQSTYTVHQGQSGLKHGNRGKRQALKSASTDLGTADVVLGRVLEVTDLPEGITRTEADKLFTQLAMSGAKIQWLKDAQGLPGGGGGDNSGTAENGRHSDLAALYTIVAVFPSPLAAQNASLRLNNSVSRFKLRMAKKNYDLRILERASSQ

SEQ ID NO: 70464 - protein, 29 aa, Homo sapiens
  Payload ID: 13981
  Gene Symbol: R3HDM2
  Gene Name: R3H domain containing 2
  ENSP ID: ENSP00000405777
MSNSNTTQETLEIMKESEKKLVEESVNKN

SEQ ID NO: 70465 - protein, 671 aa, Homo sapiens
  Payload ID: 13981
  Gene Symbol: R3HDM2
  Gene Name: R3H domain containing 2
  Uniprot ID: Q9Y2K5
  ENSP ID: ENSP00000408536
MRPPVTKASSFSGISILTRGDSIGSSKGGSAGRISRPGMALGAPEVCNQVTSSQSVRGLLPCTAQQQQQQQQQQLPALPPTPQQQPPLNNHMISQPVPALQPSPQPVQFSPSSCPQVLLPVSPPQQYNMADDLSNPFGQMSLSRQGSTEAADPSAALFQTPLISQHPQQTSFIMASTGQPLPTSNYSTSSHAPPTQQVLPPQGYMQPPQQIQVSYYPPGQYPNSNQQYRPLSHPVAYSPQRGQQLPQPSQQPGLQPMMPNQQQAAYQGMIGVQQPQNQGLLSSQRSSMGGQMQGLVVQYTPLPSYQVPVGSDSQNVVQPPFQQPMLVPVSQSVQGGLPAAGVPVYYSMIPPAQQNGTSPSVGFLQPPGSEQYQMPQSPSPCSPPQMPQQYSGVSPSGPGVVVMQLNVPNGPQPPQNPSMVQWSHCKYYSMDQRGQKPGDLYSPDSSPQANTQMSSSPVTSPTQSPAPSPVTSLSSVCTGLSPLPVLTQFPRPGGPAQGDGRYSLLGQPLQYNLSICPPLLHGQSTYTVHQGQSGLKHGNRGKRQALKSASTDLGTADVVLGRVLEVTDLPEGITRTEADKLFTQLAMSGAKIQWLKDAQGLPGGGGGDNSGTAENGRHSDLAALYTIVAVFPSPLAAQNASLRLNNSVSRFKLRMAKKNYDLRILERASSQ

SEQ ID NO: 70466 - protein, 280 aa, Homo sapiens
  Payload ID: 13981
  Gene Symbol: R3HDM2
  Gene Name: R3H domain containing 2
  ENSP ID: ENSP00000450411
EEKSTKDVSEKEDKDKNKEKIPRKMLSRDSSQEYTDSTGIDLHEFLVNTLKKNPRDRMMLLKLEQEILEFINDNNNQFKKFPQMTSYHRMLLHRVAAYFGMDHNVDQTGKAVIINKTSNTRIPEQRFSEHIKDEKNTEFQQRFILKRDDASMDRDDNQTGQNGYLNDIRGNREGLSRTSSSRQSSTDSELKSLEPRPWSSTDSDGSVRSMRPPVTKASSFSGISILTRGDSIGSSKGGSAGRISRPGMALGAPEVCNQVTSSQSVRGLLPCTAQQQQQQQ

SEQ ID NO: 70467 - protein, 966 aa, Homo sapiens
  Payload ID: 13981
  Gene Symbol: R3HDM2
  Gene Name: R3H domain containing 2
  ENSP ID: ENSP00000489424
MSNSNTTQETLEIMKESEKKLVEESVNKNKFISKTPSKEEIEKECEDTSLRQETQDYEFLFDKRRTSNHGHARKRAKSNSKLKLVRSLAVCEESSTPFADGPLETQDIIQLHISCPSDKEEEKSTKDVSEKEDKDKNKEKIPRKMLSRDSSQEYTDSTGIDLHEFLVNTLKKNPRDRMMLLKLEQEILEFINDNNNQFKKFPQMTSYHRMLLHRVAAYFGMDHNVDQTGKAVIINKTSNTRIPEQRFSEHIKDEKNTEFQQRFILKRDDASMDRDDNQTGQNGYLNDIRGNREGLSRTSSSRQSSTDSELKSLEPRPWSSTDSDGSVRSMRPPVTKASSFSGISILTRGDSIGSSKGGSAGRISRPGMALGAPEVCNQVTSSQSVRGLLPCTAQQQQQQQQQQLPALPPTPQQQPPLNNHMISQADDLSNPFGQMSLSRQGSTEAADPSAALFQTPLISQHPQQTSFIMASTGQPLPTSNYSTSSHAPPTQQVLPPQGYMQPPQQIQVSYYPPGQYPNSNQQYRPLSHPVAYSPQRGQQLPQPSQQPGLQPMMPNQQQAAYQGMIGVQQPQNQGLLSSQRSSMGGQMQGLVVQYTPLPSYQVPVGSDSQNVVQPPFQQPMLVPVSQSVQGGLPAAGVPVYYSMIPPAQQNGTSPSVGFLQPPGSEQYQMPQSPSPCSPPQMPQQYSGVSPSGPGVVVMQLNVPNGPQPPQNPSMVQWSHCKYYSMDQRGQKPGDLYSPDSSPQANTQMSSSPVTSPTQSPAPSPVTSLSSVCTGLSPLPVLTQFPRPGGPAQGDGRYSLLGQPLQYNLSICPPLLHGQSTYTVHQGQSGLKHGNRGKRQALKSASTDLGTADVVLGRVLEVTDLPEGITRTEADKLFTQLAMSGAKIQWLKDAQGLPGGGGGDNSGTAENGRHSDLAALYTIVAVFPSPLAAQNASLRLNNSVSRFKLRMAKKNYDLRILERASSQ

SEQ ID NO: 70468 - protein, 268 aa, Homo sapiens
  Payload ID: 13982
  Gene Symbol: R3HDM4
  Gene Name: R3H domain containing 4
  Uniprot ID: Q96D70
  ENSP ID: ENSP00000355385
MVALENPECGPEAAEGTPGGRRLLPLPSCLPALASSQVKRLSASRRKQHFINQAVRNSDLVPKAKGRKSLQRLENTQYLLTLLETDGGLPGLEDGDLAPPASPGIFAEACNNATYVEVWNDFMNRSGEEQERVLRYLEDEGRSKARRRGPGRGEDRRREDPAYTPRECFQRISRRLRAVLKRSRIPMETLETWEERLLRFFSVSPQAVYTAMLDNSFERLLLHAVCQYMDLISASADLEGKRQMKVSNRHLDFLPPGLLLSAYLEQHS

SEQ ID NO: 70469 - protein, 247 aa, Homo sapiens
  Payload ID: 13982
  Gene Symbol: R3HDM4
  Gene Name: R3H domain containing 4
  ENSP ID: ENSP00000464744
MVALENPECGPEAAEGTPGGRRLLRKQHFINQAVRNSDLVPKAKGRKSLQRLENTQYLLTLLETDGGLPGLEDGDLAPPASPGIFAEACNNATYVEVWNDFMNRSGEEQERVLRYLEDEGRSKARRRGPGRGEDRRREDPAYTPRECFQRISRRLRAVLKRSRIPMETLETWEERLLRFFSVSPQAVYTAMLDNSFERLLLHAVCQYMDLISASADLEGKRQMKVSNRHLDFLPPGLLLSAYLEQHS

SEQ ID NO: 70470 - protein, 97 aa, Homo sapiens
  Payload ID: 13982
  Gene Symbol: R3HDM4
  Gene Name: R3H domain containing 4
  ENSP ID: ENSP00000466823
MVALENPECGPEAAEGTPGGRRLLPLPSCLPALASSQVKRLSASRRKQHFINQAVRNSDLVPKAKGRKSLQRLENSLERFHEPLRGGAGAGSSLPGG

SEQ ID NO: 70471 - protein, 45 aa, Homo sapiens
  Payload ID: 13982
  Gene Symbol: R3HDM4
  Gene Name: R3H domain containing 4
  ENSP ID: ENSP00000468026
MVALENPECGPEAAEGTPGGRRLLLALLPRLECSGAIMPTSTSWT

SEQ ID NO: 70472 - protein, 45 aa, Homo sapiens; identical to SEQ ID NO: 70471
  Payload ID: 13982
  Gene Symbol: R3HDM4
  Gene Name: R3H domain containing 4
  ENSP ID: ENSP00000486092

SEQ ID NO: 70473 - protein, 253 aa, Homo sapiens
  Payload ID: 13983
  Gene Symbol: R3HDML
  Gene Name: R3H domain containing-like
  Uniprot ID: Q9H3Y0
  ENSP ID: ENSP00000217043
MPLLPSTVGLAGLLFWAGQAVNALIMPNATPAPAQPESTAMRLLSGLEVPRYRRKRHISVRDMNALLDYHNHIRASVYPPAANMEYMVWDKRLARAAEAWATQCIWAHGPSQLMRYVGQNLSIHSGQYRSVVDLMKSWSEEKWHYLFPAPRDCNPHCPWRCDGPTCSHYTQMVWASSNRLGCAIHTCSSISVWGNTWHRAAYLVCNYAIKGNWIGESPYKMGKPCSSCPPSYQGSCNSNMCFKGLKSNKFTWF

SEQ ID NO: 70474 - protein, 185 aa, Homo sapiens
  Payload ID: 13984
  Gene Symbol: RABAC1
  Gene Name: Rab acceptor 1 (prenylated)
  Uniprot ID: Q9UI14
  ENSP ID: ENSP00000222008
MAAQKDQQKDAEAEGLSGTTLLPKLIPSGAGREWLERRRATIRPWSTFVDQQRFSRPRNLGELCQRLVRNVEYYQSNYVFVFLGLILYCVVTSPMLLVALAVFFGACYILYLRTLESKLVLFGREVSPAHQYALAGGISFPFFWLAGAGSAVFWVLGATLVVIGSHAAFHQIEAVDGEELQMEPV

SEQ ID NO: 70475 - protein, 109 aa, Homo sapiens
  Payload ID: 13984
  Gene Symbol: RABAC1
  Gene Name: Rab acceptor 1 (prenylated)
  ENSP ID: ENSP00000469161
GREWLERRRATIRPWSTFVDQQRFSRPRNLGELCQRLVRNVEYYQSNYVFVFLGLILYCVPRGEPSASVCSGWRHLLPLLLAGWCGLGRLLGAGSHPGGHRLPRCLPPD

SEQ ID NO: 70476 - protein, 91 aa, Homo sapiens
  Payload ID: 13984
  Gene Symbol: RABAC1
  Gene Name: Rab acceptor 1 (prenylated)
  ENSP ID: ENSP00000469392
MLLVALAVFFGACYILYLRTLESKLVLFGREVSPAHQYALAGGISFPFFWLAGAGSAVFWVLGATLVVIGSHAAFHQIEAVDGEELQMEPV

SEQ ID NO: 70477 - protein, 149 aa, Homo sapiens
  Payload ID: 13984
  Gene Symbol: RABAC1
  Gene Name: Rab acceptor 1 (prenylated)
  ENSP ID: ENSP00000471877
  MOD_RES (1)..(1): Any amino acid
XDAEAEGLSGTTLLPKLIPSGAGREWLERRRATIRPWSTFVDQQRFSRPRNLGELCQRLVRNVEYYQSNYVFVFLGLILYCVVTSPMLLVALAVFFGACYILYLRTLESKLVLFGREVSPAHQYALAGGISFPFFWLAGAGSAVFWVLD

SEQ ID NO: 70478 - protein, 151 aa, Homo sapiens
  Payload ID: 13984
  Gene Symbol: RABAC1
  Gene Name: Rab acceptor 1 (prenylated)
  ENSP ID: ENSP00000473152
MAAQKDQQKDAEAEGLSGTTLLPKLIPSGAGREWLERRRATIRPWSTFVDQQRFSRPRNLGELCQRLVRNVEYYQSNYVFVFLGLILYCVVTSPMLLVALAVFFGACYILYLRTLESKLVLFGATLVVIGSHAAFHQIEAVDGEELQMEPV

SEQ ID NO: 70479 - protein, 567 aa, Homo sapiens
  Payload ID: 13985
  Gene Symbol: RABGGTA
  Gene Name: Rab geranylgeranyltransferase, alpha subunit
  Uniprot ID: Q92696
  ENSP ID: ENSP00000216840
MHGRLKVKTSEEQAEAKRLEREQKLKLYQSATQAVFQKRQAGELDESVLELTSQILGANPDFATLWNCRREVLQQLETQKSPEELAALVKAELGFLESCLRVNPKSYGTWHHRCWLLGRLPEPNWTRELELCARFLEVDERNFHCWDYRRFVATQAAVPPAEELAFTDSLITRNFSNYSSWHYRSCLLPQLHPQPDSGPQGRLPEDVLLKELELVQNAFFTDPNDQSAWFYHRWLLGRADPQDALRCLHVSRDEACLTVSFSRPLLVGSRMEILLLMVDDSPLIVEWRTPDGRNRPSHVWLCDLPAASLNDQLPQHTFRVIWTAGDVQKECVLLKGRQEGWCRDSTTDEQLFRCELSVEKSTVLQSELESCKELQELEPENKWCLLTIILLMRALDPLLYEKETLQYFQTLKAVDPMRATYLDDLRSKFLLENSVLKMEYAEVRVLHLAHKDLTVLCHLEQLLLVTHLDLSHNRLRTLPPALAALRCLEVLQASDNAIESLDGVTNLPRLQELLLCNNRLQQPAVLQPLASCPRLVLLNLQGNPLCQAVGILEQLAELLPSVSSVLT

SEQ ID NO: 70480 - protein, 567 aa, Homo sapiens; identical to SEQ ID NO: 70479
  Payload ID: 13985
  Gene Symbol: RABGGTA
  Gene Name: Rab geranylgeranyltransferase, alpha subunit
  Uniprot ID: Q92696
  ENSP ID: ENSP00000382341

SEQ ID NO: 70481 - protein, 73 aa, Homo sapiens
  Payload ID: 13985
  Gene Symbol: RABGGTA
  Gene Name: Rab geranylgeranyltransferase, alpha subunit
  ENSP ID: ENSP00000452890
MHGRLKVKTSEEQAEAKRLEREQKLKLYQSATQAVFQKRQAGELDESVLELTSQILGANPDFATLWNCRREVS

SEQ ID NO: 70482 - protein, 136 aa, Homo sapiens
  Payload ID: 13985
  Gene Symbol: RABGGTA
  Gene Name: Rab geranylgeranyltransferase, alpha subunit
  ENSP ID: ENSP00000453001
QSELESCKELQELEPENKWCLLTIILLMRALDPLLYEKETLQYFQTLKAVDPMRATYLDDLRSKFLLENSVLKMEYAEVRVLHLAHKDLTVLCHLEQLLLVTHLDLSHNRLRTLPPALAALRCLEDPPPRTGAAGQ

SEQ ID NO: 70483 - protein, 176 aa, Homo sapiens
  Payload ID: 13985
  Gene Symbol: RABGGTA
  Gene Name: Rab geranylgeranyltransferase, alpha subunit
  ENSP ID: ENSP00000453201
MRALDPLLYEKETLQYFQTLKAVDPMRATYLDDLRSKFLLENSVLKMEYAEVRVLHLAHKDLTVLCHLEQLLLVTHLDLSHNRLRTLPPALAALRCLEVLQASDNAIESLDGVTNLPRLQELLLCNNRLQQPAVLQPLASCPRLVLLNLQGNPLCQAVGILEQLAELLPSVSSVLT

SEQ ID NO: 70484 - protein, 424 aa, Homo sapiens
  Payload ID: 13985
  Gene Symbol: RABGGTA
  Gene Name: Rab geranylgeranyltransferase, alpha subunit
  ENSP ID: ENSP00000453207
MHGRLKVKTSEEQAEAKRLEREQKLKLYQSATQAVFQKRQAGELDESVLELTSQILGANPDFATLWNCRREVLQQLETQKSPEELAALVKAELGFLESCLRVNPKSYGTWHHRCWLLGRLPEPNWTRELELCARFLEVDERNFHCWDYRRFVATQAAVPPAEELAFTDSLITRNFSNYSSWHYRSCLLPQLHPQPDSGPQGRLPEDVLLKELELVQNAFFTDPNDQSAWFYHRWLLGRADPQDALRCLHVSRDEACLTVSFSRPLLVGSRMEILLLMVDDSPLIVEWRTPDGRNRPSHVWLCDLPAASLNDQLPQHTFRVIWTAGDVQKECVLLKGRQEGWCRDSTTDEQLFRCELSVEKSTVLQSELESCKELQELEPENKWCLLTIILLMRALDPLLYEKETLQYFQTLKASRGPHAGNVSG

SEQ ID NO: 70485 - protein, 175 aa, Homo sapiens
  Payload ID: 13985
  Gene Symbol: RABGGTA
  Gene Name: Rab geranylgeranyltransferase, alpha subunit
  ENSP ID: ENSP00000453596
  MOD_RES (1)..(1): Any amino acid
XSELESCKELQELEPENKWCLLTIILLMRALDPLLYEKETLQYFQTLKAVDPMRATYLDDLRSKFLLENSVLKMEYAEVRVLHLAHKDLTVLCHLEQLLLVTHLDLSHNRLRTLPPALAALRCLEVLQASDNAIESLDGVTNLPRLQELLLCNNPACSAPASCLLPQAGPPQPAG

SEQ ID NO: 70486 - protein, 424 aa, Homo sapiens; identical to SEQ ID NO: 70484
  Payload ID: 13985
  Gene Symbol: RABGGTA
  Gene Name: Rab geranylgeranyltransferase, alpha subunit
  ENSP ID: ENSP00000453890

SEQ ID NO: 70487 - protein, 331 aa, Homo sapiens
  Payload ID: 13986
  Gene Symbol: RABGGTB
  Gene Name: Rab geranylgeranyltransferase, beta subunit
  Uniprot ID: P53611
  ENSP ID: ENSP00000317473
MGTPQKDVIIKSDAPDTLLLEKHADYIASYGSKKDDYEYCMSEYLRMSGIYWGLTVMDLMGQLHRMNREEILAFIKSCQHECGGISASIGHDPHLLYTLSAVQILTLYDSINVIDVNKVVEYVKGLQKEDGSFAGDIWGEIDTRFSFCAVATLALLGKLDAINVEKAIEFVLSCMNFDGGFGCRPGSESHAGQIYCCTGFLAITSQLHQVNSDLLGWWLCERQLPSGGLNGRPEKLPDVCYSWWVLASLKIIGRLHWIDREKLRNFILACQDEETGGFADRPGDMVDPFHTLFGIAGLSLLGEEQIKPVNPVFCMPEEVLQRVNVQPELVS

SEQ ID NO: 70488 - protein, 152 aa, Homo sapiens
  Payload ID: 13986
  Gene Symbol: RABGGTB
  Gene Name: Rab geranylgeranyltransferase, beta subunit
  ENSP ID: ENSP00000359862
MGTPQKDVIIKSDAPDTLLLEKHADYIASYGSKKDDYEYCMSEYLRMSGIYWGLTVMDLMGQLHRMNREEILAFIKSCQHECGGISASIGHDPHLLYTLSAVQILTLYDSINVIDVNKVVEYVKGLQKEDGSFAGDIWGNVRFSPFYPKYQY

SEQ ID NO: 70489 - protein, 1069 aa, Homo sapiens
  Payload ID: 13987
  Gene Symbol: RABGAP1
  Gene Name: RAB GTPase activating protein 1
  Uniprot ID: Q9Y3P9
  ENSP ID: ENSP00000362751
MDDKASVGKISVSSDSVSTLNSEDFVLVSRQGDETPSTNNGSDDEKTGLKIVGNGSEQQLQKELADVLMDPPMDDQPGEKELVKRSQLDGEGDGPLSNQLSASSTINPVPLVGLQKPEMSLPVKPGQGDSEASSPFTPVADEDSVVFSKLTYLGCASVNAPRSEVEALRMMSILRSQCQISLDVTLSVPNVSEGIVRLLDPQTNTEIANYPIYKILFCVRGHDGTPESDCFAFTESHYNAELFRIHVFRCEIQEAVSRILYSFATAFRRSAKQTPLSATAAPQTPDSDIFTFSVSLEIKEDDGKGYFSAVPKDKDRQCFKLRQGIDKKIVIYVQQTTNKELAIERCFGLLLSPGKDVRNSDMHLLDLESMGKSSDGKSYVITGSWNPKSPHFQVVNEETPKDKVLFMTTAVDLVITEVQEPVRFLLETKVRVCSPNERLFWPFSKRSTTENFFLKLKQIKQRERKNNTDTLYEVVCLESESERERRKTTASPSVRLPQSGSQSSVIPSPPEDDEEEDNDEPLLSGSGDVSKECAEKILETWGELLSKWHLNLNVRPKQLSSLVRNGVPEALRGEVWQLLAGCHNNDHLVEKYRILITKESPQDSAITRDINRTFPAHDYFKDTGGDGQDSLYKICKAYSVYDEEIGYCQGQSFLAAVLLLHMPEEQAFSVLVKIMFDYGLRELFKQNFEDLHCKFYQLERLMQEYIPDLYNHFLDISLEAHMYASQWFLTLFTAKFPLYMVFHIIDLLLCEGISVIFNVALGLLKTSKDDLLLTDFEGALKFFRVQLPKRYRSEENAKKLMELACNMKISQKKLKKYEKEYHTMREQQAQQEDPIERFERENRRLQEANMRLEQENDDLAHELVTSKIALRKDLDNAEEKADALNKELLMTKQKLIDAEEEKRRLEEESAQLKEMCRRELDKAESEIKKNSSIIGDYKQICSQLSERLEKQQTANKVEIEKIRQKVDDCERCREFFNKEGRVKGISSTKEVLDEDTDEEKETLKNQLREMELELAQTKLQLVEAECKIQDLEHHLGLALNEVQAAKKTWFNRTLSSIKTATGVQGKETC

SEQ ID NO: 70490 - protein, 112 aa, Homo sapiens
  Payload ID: 13987
  Gene Symbol: RABGAP1
  Gene Name: RAB GTPase activating protein 1
  ENSP ID: ENSP00000384119
MDDKASVGKISVSSDSVSTLNSEDFVLVSRQGDETPSTNNGSDDEKTGLKIVGNGSEQQLQKELADVLMDPPMDDQPGEKELVKRSQLDGEGDGPLSNQLSASSTINPVPLV

SEQ ID NO: 70491 - protein, 599 aa, Homo sapiens
  Payload ID: 13987
  Gene Symbol: RABGAP1
  Gene Name: RAB GTPase activating protein 1
  Uniprot ID: Q9Y3P9
  ENSP ID: ENSP00000414386
MDPPMDDQPGEKELVKRSQLDGEGDGPLSNQLSASSTINPVPLVGLQKPEMSLPVKPGQGDSEASSPFTPVADEDSVVFSKLTYLGCASVNAPRSEVEALRMMSILRSQCQISLDVTLSVPNVSEGIVRLLDPQTNTEIANYPIYKILFCVRGHDGTPESDCFAFTESHYNAELFRIHVFRCEIQEAVSRILYSFATAFRRSAKQTPLSATAAPQTPDSDIFTFSVSLEIKEDDGKGYFSAVPKDKDRQCFKLRQGIDKKIVIYVQQTTNKELAIERCFGLLLSPGKDVRNSDMHLLDLESMGKSSDGKSYVITGSWNPKSPHFQVVNEETPKDKVLFMTTAVDLVITEVQEPVRFLLETKVRVCSPNERLFWPFSKRSTTENFFLKLKQIKQRERKNNTDTLYEVVCLESESERERRKTTASPSVRLPQSGSQSSVIPSPPEDDEEEDNDEPLLSGSGDVSKECAEKILETWGELLSKWHLNLNVRPKQLSSLVRNGVPEALRGEVWQLLAGCHNNDHLVEKYRILITKESPQDSAITRDINRTFPAHDYFKDTGGDGQDSLYKICKVFHVKKKKDSILSGGSTLKLHKKQLQSVICI

SEQ ID NO: 70492 - protein, 66 aa, Homo sapiens
  Payload ID: 13987
  Gene Symbol: RABGAP1
  Gene Name: RAB GTPase activating protein 1
  ENSP ID: ENSP00000416327
MDDKASVGKISVSSDSVSTLNSEDFVLVSRQGDETPSTNNGSDDEKTGLKILKLQVLSHQWPMRTA

SEQ ID NO: 70493 - protein, 349 aa, Homo sapiens; identical to SEQ ID NO: 33535
  Payload ID: 13987
  Gene Symbol: RABGAP1
  Gene Name: RAB GTPase activating protein 1
  ENSP ID: ENSP00000482287

SEQ ID NO: 70494 - protein, 815 aa, Homo sapiens
  Payload ID: 13988
  Gene Symbol: RABGAP1L
  Gene Name: RAB GTPase activating protein 1-like
  Uniprot ID: Q5R372
  ENSP ID: ENSP00000251507
MEVRASLQKVSGSSDSVATMNSEEFVLVPQYADDNSTKHEEKPQLKIVSNGDEQLEKAMEEILRDSEKRPSSLLVDCQSSSEISDHSFGDIPASQTNKPSLQLILDPSNTEISTPRPSSPGGLPEEDSVLFNKLTYLGCMKVSSPRNEVEALRAMATMKSSSQYPFPVTLYVPNVPEGSVRIIDQSSNVEIASFPIYKVLFCARGHDGTTESNCFAFTESSHGSEEFQIHVFSCEIKEAVSRILYSFCTAFKRSSRQVSDVKDSVIPTPDSDVFTFSVSLEVKEDDGKGNFSPVPKDRDKFYFKLKQGIEKKVVITVQQLSNKELAIERCFGMLLSPGRNVKNSDMHLLDMESMGKSYDGRAYVITGMWNPNAPVFLALNEETPKDKQVYMTVAVDMVVTEVVEPVRFLLETVVRVYPANERFWYFSRKTFTETFFMRLKQSEGKGHTNAGDAIYEVVSLQRESDKEEPVTPTSGGGPMSPQDDEAEEESDNELSSGTGDVSKDCPEKILYSWGELLGKWHSNLGARPKGLSTLVKSGVPEALRAEVWQLLAGCHDNQAMLDRYRILITKDSAQESVITRDIHRTFPAHDYFKDTGGDGQESLYKICKAYSVYDEDIGYCQGQSFLAAVLLLHMPEEQAFCVLVKIMYDYGLRDLYRNNFEDLHCKFYQLERLMQEQLPDLHSHFSDLNLEAHMYASQWFLTLFTAKFPLCMVFHIIDLLLCEGLNIIFHVALALLKTSKEDLLQADFEGALKFFRVQLPKRYRAEENARRLMEQACNIKVPTKKLKKYEKEYQTMRESQLQQEDPMDRYKFVYL

SEQ ID NO: 70495 - protein, 378 aa, Homo sapiens
  Payload ID: 13988
  Gene Symbol: RABGAP1L
  Gene Name: RAB GTPase activating protein 1-like
  Uniprot ID: Q5R372
  ENSP ID: ENSP00000281844
MKEQLPDLHSHFSDLNLEAHMYASQWFLTLFTAKFPLCMVFHIIDLLLCEGLNIIFHVALALLKTSKEDLLQADFEGALKFFRVQLPKRYRAEENARRLMEQACNIKVPTKKLKKYEKEYQTMRESQLQQEDPMDRYKRENRRLQEASMRLEQENDDLAHELVTSKIALRNDLDQAEDKADVLNKELLLTKQRLVETEEEKRKQEEETAQLKEVFRKQLEKAEYEIKKTTAIIAEYKQICSQLSTRLEKQQAASKEELEVVKGKMMACKHCSDIFSKEGALKLAATGREDQGIETDDEKDSLKKQLREMELELAQTKLQLVEAKCKIQELEHQRGALMNEIQAAKNSWFSKTLNSIKTATGTQPLQPAPVTQPPKEST

SEQ ID NO: 70496 - protein, 358 aa, Homo sapiens
  Payload ID: 13988
  Gene Symbol: RABGAP1L
  Gene Name: RAB GTPase activating protein 1-like
  Uniprot ID: Q5R372
  ENSP ID: ENSP00000318603
MYASQWFLTLFTAKFPLCMVFHIIDLLLCEGLNIIFHVALALLKTSKEDLLQADFEGALKFFRVQLPKRYRAEENARRLMEQACNIKVPTKKLKKYEKEYQTMRESQLQQEDPMDRYKRENRRLQEASMRLEQENDDLAHELVTSKIALRNDLDQAEDKADVLNKELLLTKQRLVETEEEKRKQEEETAQLKEVFRKQLEKAEYEIKKTTAIIAEYKQICSQLSTRLEKQQAASKEELEVVKGKMMACKHCSDIFSKEGALKLAATGREDQGIETDDEKDSLKKQLREMELELAQTKLQLVEAKCKIQELEHQRGALMNEIQAAKNSWFSKTLNSIKTATGTQPLQPAPVTQPPKEST

SEQ ID NO: 70497 - protein, 605 aa, Homo sapiens
  Payload ID: 13988
  Gene Symbol: RABGAP1L
  Gene Name: RAB GTPase activating protein 1-like
  Uniprot ID: Q5R372
  ENSP ID: ENSP00000350027
MEVRASLQKIVSNGDEQLEKAMEEILRDSEKRPSSLLVDCQSSSEISDHSFGDIPASQTNKPSLQLILDPSNTEISTPRPSSPGGLPEEDSVLFNKLTYLGCMKVSSPRNEVEALRAMATMKSSSQYPFPVTLYVPNVPEGSVRIIDQSSNVEIASFPIYKVLFCARGHDGTTESNCFAFTESSHGSEEFQIHVFSCEIKEAVSRILYSFCTAFKRSSRQVSDVKDSVIPTPDSDVFTFSVSLEVKEDDGKGNFSPVPKDRDKFYFKLKQGIEKKVVITVQQLSNKELAIERCFGMLLSPGRNVKNSDMHLLDMESMGKSYDGRAYVITGMWNPNAPVFLALNEETPKDKQVYMTVAVDMVVTEVVEPVRFLLETVVRVYPANERFWYFSRKTFTETFFMRLKQSEGKGHTNAGDAIYEVVSLQRESDKEEPVTPTSGGGPMSPQDDEAEEESDNELSSGTGDVSKDCPEKILYSWGELLGKWHSNLGARPKGLSTLVKSGVPEALRAEVWQLLAGCHDNQAMLDRYRILITKQQMKFSLTPRQTIHLVKYEGSMKVSMTPCNQLQFDIRLDVLITYTFCFSSFPEPELYKYVLKHQLIKRLNAC

SEQ ID NO: 70498 - protein, 377 aa, Homo sapiens
  Payload ID: 13988
  Gene Symbol: RABGAP1L
  Gene Name: RAB GTPase activating protein 1-like
  Uniprot ID: Q5R372
  ENSP ID: ENSP00000356660
MEQLPDLHSHFSDLNLEAHMYASQWFLTLFTAKFPLCMVFHIIDLLLCEGLNIIFHVALALLKTSKEDLLQADFEGALKFFRVQLPKRYRAEENARRLMEQACNIKVPTKKLKKYEKEYQTMRESQLQQEDPMDRYKRENRRLQEASMRLEQENDDLAHELVTSKIALRNDLDQAEDKADVLNKELLLTKQRLVETEEEKRKQEEETAQLKEVFRKQLEKAEYEIKKTTAIIAEYKQICSQLSTRLEKQQAASKEELEVVKGKMMACKHCSDIFSKEGALKLAATGREDQGIETDDEKDSLKKQLREMELELAQTKLQLVEAKCKIQELEHQRGALMNEIQAAKNSWFSKTLNSIKTATGTQPLQPAPVTQPPKEST

SEQ ID NO: 70499 - protein, 253 aa, Homo sapiens
  Payload ID: 13988
  Gene Symbol: RABGAP1L
  Gene Name: RAB GTPase activating protein 1-like
  Uniprot ID: B7ZAP0
  ENSP ID: ENSP00000356661
MIENSSWSMTFEERENRRLQEASMRLEQENDDLAHELVTSKIALRNDLDQAEDKADVLNKELLLTKQRLVETEEEKRKQEEETAQLKEVFRKQLEKAEYEIKKTTAIIAEYKQICSQLSTRLEKQQAASKEELEVVKGKMMACKHCSDIFSKEGALKLAATGREDQGIETDDEKDSLKKQLREMELELAQTKLQLVEAKCKIQELEHQRGALMNEIQAAKNSWFSKTLNSIKTATGTQPLQPAPVTQPPKEST

SEQ ID NO: 70500 - protein, 308 aa, Homo sapiens
  Payload ID: 13988
  Gene Symbol: RABGAP1L
  Gene Name: RAB GTPase activating protein 1-like
  ENSP ID: ENSP00000375916
MMEEISIMVAYDAHVFSQLHDEDFLTSLVAISKPRSMVPTKKLKKYEKEYQTMRESQLQQEDPMDRYKRENRRLQEASMRLEQENDDLAHELVTSKIALRNDLDQAEDKADVLNKELLLTKQRLVETEEEKRKQEEETAQLKEVFRKQLEKAEYEIKKTTAIIAEYKQICSQLSTRLEKQQAASKEELEVVKGKMMACKHCSDIFSKEGALKLAATGREDQGIETDDEKDSLKKQLREMELELAQTKLQLVEAKCKIQELEHQRGALMNEIQAAKNSWFSKTLNSIKTATGTQPLQPAPVTQPPKEST

SEQ ID NO: 70501 - protein, 582 aa, Homo sapiens
  Payload ID: 13988
  Gene Symbol: RABGAP1L
  Gene Name: RAB GTPase activating protein 1-like
  ENSP ID: ENSP00000403136
MEVRASLQKVSGSSDSVATMNSEEFVLVPQYADDNSTKHEEKPQLKIVSNGDEQLEKAMEEILRDSEKRPSSLLVDCQSSSEISDHSFGDIPASQTNKPSLQLILDPSNTEISTPRPSSPGGLPEEDSVLFNKLTYLGCMKVSSPRNEVEALRAMATMKSSSQYPFPVTLYVPNVPEGSVRIIDQSSNVEIASFPIYKVLFCARGHDGTTESNCFAFTESSHGSEEFQIHVFSCEIKEAVSRILYSFCTAFKRSSRQVSDVKDSVIPTPDSDVFTFSVSLEVKEDDGKGNFRLLVIPIPFEYFSPVPKDRDKFYFKLKQGIEKKVVITVQQLSNKELAIERCFGMLLSPGRNVKNSDMHLLDMESMGKSYDGRAYVITGMWNPNAPVFLALNEETPKDKQVYMTVAVDMVVTEVVEPVRFLLETVVRVYPANERFWYFSRKTFTETFFMRLKQSEGKGHTNAGDAIYEVVSLQRESDKEEPVTPTSGGGPMSPQDDEAEEESDNELSSGTGDVSKDCPEKILYSWGELLGKWHSNLGARPKGLSTLVKSGVPEALRAEVWQLLAGCHDNQAMLDRYRILITK

SEQ ID NO: 70502 - protein, 370 aa, Homo sapiens
  Payload ID: 13988
  Gene Symbol: RABGAP1L
  Gene Name: RAB GTPase activating protein 1-like
  Uniprot ID: Q5R372
  ENSP ID: ENSP00000420660
MEEGVPCPAPAAKLTPPVKKSQDMHDERSKLVNEYACRVLELLGMGHRLFVPRLLATSKEDLLQADFEGALKFFRVQLPKRYRAEENARRLMEQACNIKVPTKKLKKYEKEYQTMRESQLQQEDPMDRYKRENRRLQEASMRLEQENDDLAHELVTSKIALRNDLDQAEDKADVLNKELLLTKQRLVETEEEKRKQEEETAQLKEVFRKQLEKAEYEIKKTTAIIAEYKQICSQLSTRLEKQQAASKEELEVVKGKMMACKHCSDIFSKEGALKLAATGREDQGIETDDEKDSLKKQLREMELELAQTKLQLVEAKCKIQELEHQRGALMNEIQAAKNSWFSKTLNSIKTATGTQPLQPAPVTQPPKEST

SEQ ID NO: 70503 - protein, 72 aa, Homo sapiens
  Payload ID: 13988
  Gene Symbol: RABGAP1L
  Gene Name: RAB GTPase activating protein 1-like
  Uniprot ID: Q5R372
  ENSP ID: ENSP00000432490
MMEEISIMVAYDAHVFSQLHDEDFLTSLVAISKPRSMVPTKKLKKYEKEYQTMRESQLQQEDPMDRYKFVYL

SEQ ID NO: 70504 - protein, 97 aa, Homo sapiens
  Payload ID: 13988
  Gene Symbol: RABGAP1L
  Gene Name: RAB GTPase activating protein 1-like
  ENSP ID: ENSP00000432734
MYASQWFLTLFTAKFPLCMVFHIIDLLLCEGLNIIFHVALALLKTSKEDLLQADFEGALKFFRVQLPKRYRAEENARRLMEQACNIKVGVYTGTELQ

SEQ ID NO: 70505 - protein, 72 aa, Homo sapiens; identical to SEQ ID NO: 70503
  Payload ID: 13988
  Gene Symbol: RABGAP1L
  Gene Name: RAB GTPase activating protein 1-like
  Uniprot ID: Q5R372
  ENSP ID: ENSP00000434600

SEQ ID NO: 70506 - protein, 190 aa, Homo sapiens
  Payload ID: 13988
  Gene Symbol: RABGAP1L
  Gene Name: RAB GTPase activating protein 1-like
  ENSP ID: ENSP00000435911
MMEEISIMVAYDAHVFSQLHDEDFLTSLVAISKPRSMVPTKKLKKYEKEYQTMRESQLQQEDPMDRYKRENRRLQEASMRLEQENDDLAHELVTSKIALRNDLDQAEDKADVLNKELLLTKQRLVETEEEKRKQEEETAQLKEVFRKQLEKAEYEIKKTTAIIAEYKQICSQLSTRLEKQQAASKEELEV

SEQ ID NO: 70507 - protein, 111 aa, Homo sapiens
  Payload ID: 13988
  Gene Symbol: RABGAP1L
  Gene Name: RAB GTPase activating protein 1-like
  ENSP ID: ENSP00000489163
MYASQWFLTLFTAKFPLCMVFHIIDLLLCEGLNIIFHVALALLKTSKEDLLQADFEGALKFFRVQLPKRYRAEENARRLMEQACNIKVPTKKLKKYEKEYQTMRESQLQQE

SEQ ID NO: 70508 - protein, 97 aa, Homo sapiens; identical to SEQ ID NO: 70504
  Payload ID: 13988
  Gene Symbol: RABGAP1L
  Gene Name: RAB GTPase activating protein 1-like
  ENSP ID: ENSP00000489178

SEQ ID NO: 70509 - protein, 87 aa, Homo sapiens
  Payload ID: 13988
  Gene Symbol: RABGAP1L
  Gene Name: RAB GTPase activating protein 1-like
  ENSP ID: ENSP00000489188
SSWSMTFEERENRRLQEASMRLEQENDDLAHELVTSKIALRNDLDQAEDKADVLNKELLLTKQRLVETEEEKRKQEEETAQENHMCN

SEQ ID NO: 70510 - protein, 166 aa, Homo sapiens
  Payload ID: 13988
  Gene Symbol: RABGAP1L
  Gene Name: RAB GTPase activating protein 1-like
  ENSP ID: ENSP00000489213
SAQESVITRDIHRTFPAHDYFKDTGGDGQESLYKICKAYSVYDEDIGYCQGQSFLAAVLLLHMPEEQAFCVLVKIMYDYGLRDLYRNNFEDLHCKFYQLERLMQEQLPDLHSHFSDLNLEAHMYASQWFLTLFTAKFPLCMVFHIIDLLLCESGISALQFTGMVTF

SEQ ID NO: 70511 - protein, 245 aa, Homo sapiens
  Payload ID: 13988
  Gene Symbol: RABGAP1L
  Gene Name: RAB GTPase activating protein 1-like
  ENSP ID: ENSP00000489232
MEVRASLQKVSGSSDSVATMNSEEFVLVPQYADDNSTKHEEKPQLKIVSNGDEQLEKAMEEILRDSEKRPSSLLVDCQSSSEISDHSFGDIPASQTNKPSLQLILDPSNTEISTPRPSSPGGLPEEDSVLFNKLTYLGCMKVSSPRNEVEALRAMATMKSSSQYPFPVTLYVPNVPEGSVRIIDQSSNVEIASFPIYKVLFCARGHDGTTESNCFAFTESSHGSEEFQIHVFSCEIKEARWGSRW

SEQ ID NO: 70512 - protein, 252 aa, Homo sapiens
  Payload ID: 13988
  Gene Symbol: RABGAP1L
  Gene Name: RAB GTPase activating protein 1-like
  ENSP ID: ENSP00000489605
MGKSYDGRAYVITGMWNPNAPVFLALNEETPKDKQVYMTVAVDMVVTEVVEPVRFLLETVVRVYPANERFWYFSRKTFTETFFMRLKQSEGKGHTNAGDAIYEVVSLQRESDKEEPVTPTSGGGPMSPQDDEAEEESDNELSSGTGDVSKDCPEKILYSWGELLGKWHSNLGARPKGLSTLVKSGVPEALRAEVWQLLAGCHDNQAMLDRYRILITKVCWSLLEVHSRPCLPGYHQWKLQNSKYCRMANVAA

SEQ ID NO: 70513 - protein, 491 aa, Homo sapiens
  Payload ID: 13989
  Gene Symbol: RABGEF1
  Gene Name: RAB guanine nucleotide exchange factor (GEF) 1
  Uniprot ID: Q9UJ41
  ENSP ID: ENSP00000284957
MSLKSERRGIHVDQSDLLCKKGCGYYGNPAWQGFCSKCWREEYHKARQKQIQEDWELAERLQREEEEAFASSQSSQGAQSLTFSKFEEKKTNEKTRKVTTVKKFFSASSRVGSKKEIQEAKAPSPSINRQTSIETDRVSKEFIEFLKTFHKTGQEIYKQTKLFLEGMHYKRDLSIEEQSECAQDFYHNVAERMQTRGKVPPERVEKIMDQIEKYIMTRLYKYVFCPETTDDEKKDLAIQKRIRALRWVTPQMLCVPVNEDIPEVSDMVVKAITDIIEMDSKRVPRDKLACITKCSKHIFNAIKITKNEPASADDFLPTLIYIVLKGNPPRLQSNIQYITRFCNPSRLMTGEDGYYFTNLCCAVAFIEKLDAQSLNLSQEDFDRYMSGQTSPRKQEAESWSPDACLGVKQMYKNLDLLSQLNERQERIMNEAKKLEKDLIDWTDGIAREVQDIVEKYPLEIKPPNQPLAAIDSENVENDKLPPPLQPQVYAG

SEQ ID NO: 70514 - protein, 505 aa, Homo sapiens
  Payload ID: 13989
  Gene Symbol: RABGEF1
  Gene Name: RAB guanine nucleotide exchange factor (GEF) 1
  Uniprot ID: Q9UJ41
  ENSP ID: ENSP00000370208
MMASSYHEVVSRKKMSLKSERRGIHVDQSDLLCKKGCGYYGNPAWQGFCSKCWREEYHKARQKQIQEDWELAERLQREEEEAFASSQSSQGAQSLTFSKFEEKKTNEKTRKVTTVKKFFSASSRVGSKKEIQEAKAPSPSINRQTSIETDRVSKEFIEFLKTFHKTGQEIYKQTKLFLEGMHYKRDLSIEEQSECAQDFYHNVAERMQTRGKVPPERVEKIMDQIEKYIMTRLYKYVFCPETTDDEKKDLAIQKRIRALRWVTPQMLCVPVNEDIPEVSDMVVKAITDIIEMDSKRVPRDKLACITKCSKHIFNAIKITKNEPASADDFLPTLIYIVLKGNPPRLQSNIQYITRFCNPSRLMTGEDGYYFTNLCCAVAFIEKLDAQSLNLSQEDFDRYMSGQTSPRKQEAESWSPDACLGVKQMYKNLDLLSQLNERQERIMNEAKKLEKDLIDWTDGIAREVQDIVEKYPLEIKPPNQPLAAIDSENVENDKLPPPLQPQVYAG

SEQ ID NO: 70515 - protein, 299 aa, Homo sapiens
  Payload ID: 13989
  Gene Symbol: RABGEF1
  Gene Name: RAB guanine nucleotide exchange factor (GEF) 1
  ENSP ID: ENSP00000390480
MQTRGKVPPERVEKIMDQIEKYIMTRLYKYVFCPETTDDEKKDLAIQKRIRALRWVTPQMLCVPVNEDIPEVSDMVVKAITDIIEMDSKRVPRDKLACITKCSKHIFNAIKITKNEPASADDFLPTLIYIVLKGNPPRLQSNIQYITRFCNPSRLMTGEDGYYFTNLCCAVAFIEKLDAQSLNLSQEDFDRYMSGQTSPRKQEAESWSPDACLGVKQMYKNLDLLSQLNERQERIMNEAKKLEKDLIDWTDGIAREVQDIVEKYPLEIKPPNQPLAAIDSENVENDKLPPPLQPQVYAG

SEQ ID NO: 70516 - protein, 504 aa, Homo sapiens
  Payload ID: 13989
  Gene Symbol: RABGEF1
  Gene Name: RAB guanine nucleotide exchange factor (GEF) 1
  ENSP ID: ENSP00000403429
MASSYHEVVSRKKMSLKSERRGIHVDQSDLLCKKGCGYYGNPAWQGFCSKCWREEYHKARQKQIQEDWELAERLQREEEEAFASSQSSQGAQSLTFSKFEEKKTNEKTRKVTTVKKFFSASSRVGSKKEIQEAKAPSPSINRQTSIETDRVSKEFIEFLKTFHKTGQEIYKQTKLFLEGMHYKRDLSIEEQSECAQDFYHNVAERMQTRGKVPPERVEKIMDQIEKYIMTRLYKYVFCPETTDDEKKDLAIQKRIRALRWVTPQMLCVPVNEDIPEVSDMVVKAITDIIEMDSKRVPRDKLACITKCSKHIFNAIKITKNEPASADDFLPTLIYIVLKGNPPRLQSNIQYITRFCNPSRLMTGEDGYYFTNLCCAVAFIEKLDAQSLNLSQEDFDRYMSGQTSPRKQEAESWSPDACLGVKQMYKNLDLLSQLNERQERIMNEAKKLEKDLIDWTDGIAREVQDIVEKYPLEIKPPNQPLAAIDSENVENDKLPPPLQPQVYAG

SEQ ID NO: 70517 - protein, 45 aa, Homo sapiens
  Payload ID: 13989
  Gene Symbol: RABGEF1
  Gene Name: RAB guanine nucleotide exchange factor (GEF) 1
  ENSP ID: ENSP00000415503
MSLKSERRGIHVDQSDLLCKKGCGYYGNPAWQGFCSKCWREEYHK

SEQ ID NO: 70518 - protein, 491 aa, Homo sapiens; identical to SEQ ID NO: 70513
  Payload ID: 13989
  Gene Symbol: RABGEF1
  Gene Name: RAB guanine nucleotide exchange factor (GEF) 1
  Uniprot ID: Q9UJ41
  ENSP ID: ENSP00000415815

SEQ ID NO: 70519 - protein, 407 aa, Homo sapiens
  Payload ID: 13989
  Gene Symbol: RABGEF1
  Gene Name: RAB guanine nucleotide exchange factor (GEF) 1
  ENSP ID: ENSP00000421124
MSLKSERRGIHVDQSDLLCKKGCGYYGNPAWQGFCSKCWREEYHKARQKQIQEDWELAERLQREEEEAFASSQSSQGAQSLTFSKFEEKKTNEKTRKVTTVKKFFSASSRVGSKKPPERVEKIMDQIEKYIMTRLYKYVFCPETTDDEKKDLAIQKRIRALRWVTPQMLCVPVNEDIPEVSDMVVKAITDIIEMDSKRVPRDKLACITKCSKHIFNAIKITKNEPASADDFLPTLIYIVLKGNPPRLQSNIQYITRFCNPSRLMTGEDGYYFTNLCCAVAFIEKLDAQSLNLSQEDFDRYMSGQTSPRKQEAESWSPDACLGVKQMYKNLDLLSQLNERQERIMNEAKKLEKDLIDWTDGIAREVQDIVEKYPLEIKPPNQPLAAIDSENVENDKLPPPLQPQVYAG

SEQ ID NO: 70520 - protein, 119 aa, Homo sapiens
  Payload ID: 13989
  Gene Symbol: RABGEF1
  Gene Name: RAB guanine nucleotide exchange factor (GEF) 1
  ENSP ID: ENSP00000476796
MSLKSERRGIHVDQSDLLCKKGCGYYGNPAWQGFCSKCWREEYHKARQKQIQEDWELAERLQREEEEAFASSQSSQGAQSLTFSKFEEKKTNEKTRKVTTVKKFFSASSRVGSKKGSKH

SEQ ID NO: 70521 - protein, 123 aa, Homo sapiens
  Payload ID: 13990
  Gene Symbol: RABIF
  Gene Name: RAB interacting factor
  Uniprot ID: P47224
  ENSP ID: ENSP00000356231
MEPAEQPSELVSAEGRNRKAVLCQRCGSRVLQPGTALFSRRQLFLPSMRKKPALSDGSNPDGDLLQEHWLVEDMFIFENVGFTKDVGNIKFLVCADCEIGPIGWHCLDDKNSFYVALERVSHE

SEQ ID NO: 70522 - protein, 401 aa, Homo sapiens
  Payload ID: 13991
  Gene Symbol: RILP
  Gene Name: Rab interacting lysosomal protein
  Uniprot ID: Q96NA2
  ENSP ID: ENSP00000301336
MEPRRAAPGVPGWGSREAAGSASAAELVYHLAGALGTELQDLARRFGPEAAAGLVPLVVRALELLEQAAVGPAPDSLQVSAQPAEQELRRLREENERLRRELRAGPQEERALLRQLKEVTDRQRDELRAHNRDLRQRGQETEALQEQLQRLLLVNAELRHKLAAMQTQLRAAQDRERERQQPGEAATPQAKERARGQAGRPGHQHGQEPEWATAGAGAPGNPEDPAEAAQQLGRPSEAGQCRFSREEFEQILQERNELKAKVFLLKEELAYFQRELLTDHRVPGLLLEAMKVAVRKQRKKIKAKMLGTPEEAESSEDEAGPWILLSDDKGDHPPPPESKIQSFFGLWYRGKAESSEDETSSPAPSKLGGEEEAQPQSPAPDPPCSALHEHLCLGASAAPEA

SEQ ID NO: 70523 - protein, 226 aa, Homo sapiens
  Payload ID: 13991
  Gene Symbol: RILP
  Gene Name: Rab interacting lysosomal protein
  ENSP ID: ENSP00000459101
LQRLLLVNAELRHKLAAMQTQLRAAQDRERERQQPGEAATPQAKERARGQAGRPGHQHGQEPEWATAGAGAPGNPEDPAEAAQQLGRPSEAGQCRFSREEFEQILQERNELKAKVFLLKEELAYFQRELLTDHRVPGLLLEAMKVAVRKQRKKIKAKMLGTPEEAESSFGLWYRGKAESSEDETSSPAPSKLGGEEEAQPQSPAPDPPCSALHEHLCLGASAAPEA

SEQ ID NO: 70524 - protein, 401 aa, Homo sapiens; identical to SEQ ID NO: 70522
  Payload ID: 13991
  Gene Symbol: RILP
  Gene Name: Rab interacting lysosomal protein
  Uniprot ID: Q96NA2
  ENSP ID: ENSP00000481849

SEQ ID NO: 70525 - protein, 226 aa, Homo sapiens; identical to SEQ ID NO: 70523
  Payload ID: 13991
  Gene Symbol: RILP
  Gene Name: Rab interacting lysosomal protein
  ENSP ID: ENSP00000488063

SEQ ID NO: 70526 - protein, 283 aa, Homo sapiens
  Payload ID: 13992
  Gene Symbol: RILPL1
  Gene Name: Rab interacting lysosomal protein-like 1
  ENSP ID: ENSP00000345874
MSMSERERQVMKKLKEVVDKQRDEIRAKDRELGLKNEDVEALQQQQTRLMKINHDLRHRVTVVEAQGKALIEQKVELEADLQTKEQEMGSLRAELGKLRERLQGEHSQNGEEEPETEPVGEESISDAEKVAMDLKDPNRPRFTLQELRDVLHERNELKSKVFLLQEELAYYKRFPHETTSNMRPEVLFILSMAKFPALRMELGTHEEMEEENRIPQPPPIAHPRTSPQPESGIKRLFSFFSRDKKRLANTQRNVHIQESFGQWANTHRDDGYTEQGQEALQHL

SEQ ID NO: 70527 - protein, 403 aa, Homo sapiens
  Payload ID: 13992
  Gene Symbol: RILPL1
  Gene Name: Rab interacting lysosomal protein-like 1
  Uniprot ID: Q5EBL4
  ENSP ID: ENSP00000366070
MEEERGSALAAESALEKNVAELTVMDVYDIASLVGHEFERVIDQHGCEAIARLMPKVVRVLEILEVLVSRHHVAPELDELRLELDRLRLERMDRIEKERKHQKELELVEDVWRGEAQDLLSQIAQLQEENKQLMTNLSHKDVNFSEEEFQKHEGMSERERQVMKKLKEVVDKQRDEIRAKDRELGLKNEDVEALQQQQTRLMKINHDLRHRVTVVEAQGKALIEQKVELEADLQTKEQEMGSLRAELGKLRERLQGEHSQNGEEEPETEPVGEESISDAEKVAMDLKDPNRPRFTLQELRDVLHERNELKSKVFLLQEELAYYKSEEMEEENRIPQPPPIAHPRTSPQPESGIKRLFSFFSRDKKRLANTQRNVHIQESFGQWANTHRDDGYTEQGQEALQHL

SEQ ID NO: 70528 - protein, 76 aa, Homo sapiens [sequence omitted]

SEQ ID NO: 70529 - protein, 211 aa, Homo sapiens
  Payload ID: 13993
  Gene Symbol: RILPL2
  Gene Name: Rab interacting lysosomal protein-like 2
  Uniprot ID: Q969X0
  ENSP ID: ENSP00000280571
MEEPPVREEEEEEGEEDEERDEVGPEGALGKSPFQLTAEDVYDISYLLGRELMALGSDPRVTQLQFKVVRVLEMLEALVNEGSLALEELKMERDHLRKEVEGLRRQSPPASGEVNLGPNKMVVDLTDPNRPRFTLQELRDVLQERNKLKSQLLVVQEELQCYKSGLIPPREGPGGRREKDAVVTSAKNAGRNKEEKTIIKKLFFFRSGKQT

SEQ ID NO: 70530 - protein, 165 aa, Homo sapiens
  Payload ID: 13994
  Gene Symbol: RABL2A
  Gene Name: RAB, member of RAS oncogene family-like 2A
  ENSP ID: ENSP00000365622
MAEDKTKPSELDQGKYDADDNVKIICLGDSAVGKSKLMERFLMDGFQPQQLSTYALTLYKHTATVDGKTILVADINVTQKSFNFAKKFSLPLYFVSAADGTNVVKLFNDAIRLAVSYKQNSQDFMDEIFQELENFSLEQEEEDVPDQEQSSSIETPSEEVASPHS

SEQ ID NO: 70531 - protein, 229 aa, Homo sapiens
  Payload ID: 13994
  Gene Symbol: RABL2A
  Gene Name: RAB, member of RAS oncogene family-like 2A
  Uniprot ID: Q9UBK7
  ENSP ID: ENSP00000376870
MAEDKTKPSELDQGKYDADDNVKIICLGDSAVGKSKLMERFLMDGFQPQQLSTYALTLYKHTATVDGKTILVDFWDTAGQERFQSMHASYYHKAHACIMVFDIQRKVTYRNLSTWYTELREFRPEIPCIVVANKIDADINVTQKSFNFAKKFSLPLYFVSAADGTNVVKLFNDAIRLAVSYKQNSQDFMDEIFQELENFSLEQEEEDVPDQEQSSSIETPSEEVASPHS

SEQ ID NO: 70532 - protein, 228 aa, Homo sapiens
  Payload ID: 13994
  Gene Symbol: RABL2A
  Gene Name: RAB, member of RAS oncogene family-like 2A
  Uniprot ID: Q9UBK7
  ENSP ID: ENSP00000376871
MAEDKTKPSELDQGKYDADDNVKIICLGDSAVGKSKLMERFLMDGFQPQQLSTYALTLYKHTATVDGKTILVDFWDTAGQERFQSMHASYYHKAHACIMVFDIQRKVTYRNLSTWYTELREFRPEIPCIVVANKIDDINVTQKSFNFAKKFSLPLYFVSAADGTNVVKLFNDAIRLAVSYKQNSQDFMDEIFQELENFSLEQEEEDVPDQEQSSSIETPSEEVASPHS

SEQ ID NO: 70533 - protein, 228 aa, Homo sapiens; identical to SEQ ID NO: 70532
  Payload ID: 13994
  Gene Symbol: RABL2A
  Gene Name: RAB, member of RAS oncogene family-like 2A
  Uniprot ID: Q9UBK7
  ENSP ID: ENSP00000376872

SEQ ID NO: 70534 - protein, 165 aa, Homo sapiens; identical to SEQ ID NO: 70530
  Payload ID: 13994
  Gene Symbol: RABL2A
  Gene Name: RAB, member of RAS oncogene family-like 2A
  ENSP ID: ENSP00000386460

SEQ ID NO: 70535 - protein, 238 aa, Homo sapiens
  Payload ID: 13994
  Gene Symbol: RABL2A
  Gene Name: RAB, member of RAS oncogene family-like 2A
  Uniprot ID: Q9UBK7
  ENSP ID: ENSP00000387229
MAEDKTKPSELDQGKYDADDNVKIICLGDSAVGKSKLMERFLMDGFQPQQLSTYALTLYKHTATVDGKTILVDFWDTAGQERFQSMHASYYHKAHACIMVFDIQRKVTYRNLSTWYTELREFRPEIPCIVVANKIDDINVTQKSFNFAKKFSLPLYFVSAADGTNVVKVWLTAEVASKLFNDAIRLAVSYKQNSQDFMDEIFQELENFSLEQEEEDVPDQEQSSSIETPSEEVASPHS

SEQ ID NO: 70536 - protein, 114 aa, Homo sapiens
  Payload ID: 13994
  Gene Symbol: RABL2A
  Gene Name: RAB, member of RAS oncogene family-like 2A
  ENSP ID: ENSP00000388944
MAEDKTKPSELDQGKYDADDNVKIICLGDSAVGKSKLMERFLMDGFQPQQLSTYALTLYKHTATVDGKTILVDFWDTAGQERFQSMHASYYHKAHACIMVFDIQRKVTYRNLST

SEQ ID NO: 70537 - protein, 101 aa, Homo sapiens
  Payload ID: 13994
  Gene Symbol: RABL2A
  Gene Name: RAB, member of RAS oncogene family-like 2A
  ENSP ID: ENSP00000399360
MAEDKTKPSELDQGKYDADDNVKIICLGDSAVGKSKLMERFLMDGFQPQQLSTYALTLYKHTATVDGKTILVDFWDTAGQERFQSMHASYYHKAHACIMQT

SEQ ID NO: 70538 - protein, 54 aa, Homo sapiens
  Payload ID: 13994
  Gene Symbol: RABL2A
  Gene Name: RAB, member of RAS oncogene family-like 2A
  ENSP ID: ENSP00000415510
MAEDKTKPSELDQGKYDADDNVKIICLGDSAVGKSKLMERFLMDGFHSSCPRTP

SEQ ID NO: 70539 - protein, 229 aa, Homo sapiens
  Payload ID: 13995
  Gene Symbol: RABL2B
  Gene Name: RAB, member of RAS oncogene family-like 2B
  Uniprot ID: Q9UNT1
  ENSP ID: ENSP00000346940
MAEDKTKPSELDQGKYDADDNVKIICLGDSAVGKSKLMERFLMDGFQPQQLSTYALTLYKHTATVDGRTILVDFWDTAGQERFQSMHASYYHKAHACIMVFDVQRKVTYRNLSTWYTELREFRPEIPCIVVANKIDADINVTQKSFNFAKKFSLPLYFVSAADGTNVVKLFNDAIRLAVSYKQNSQDFMDEIFQELENFSLEQEEEDVPDQEQSSSIETPSEEAASPHS

SEQ ID NO: 70540 - protein, 99 aa, Homo sapiens
  Payload ID: 13995
  Gene Symbol: RABL2B
  Gene Name: RAB, member of RAS oncogene family-like 2B
  ENSP ID: ENSP00000378955
MAEDKTKPSELDQGKYDADDNVKIICLGDSAVGKSKLMERFLMDGFQPQQLSTYALTLYKHTATVDGRTILVDFWDTAGQERFQSMHASYYHKAHACIM

SEQ ID NO: 70541 - protein, 165 aa, Homo sapiens
  Payload ID: 13995
  Gene Symbol: RABL2B
  Gene Name: RAB, member of RAS oncogene family-like 2B
  ENSP ID: ENSP00000378956
MAEDKTKPSELDQGKYDADDNVKIICLGDSAVGKSKLMERFLMDGFQPQQLSTYALTLYKHTATVDGRTILVADINVTQKSFNFAKKFSLPLYFVSAADGTNVVKLFNDAIRLAVSYKQNSQDFMDEIFQELENFSLEQEEEDVPDQEQSSSIETPSEEAASPHS

SEQ ID NO: 70542 - protein, 238 aa, Homo sapiens
  Payload ID: 13995
  Gene Symbol: RABL2B
  Gene Name: RAB, member of RAS oncogene family-like 2B
  Uniprot ID: Q9UNT1
  ENSP ID: ENSP00000378958
MAEDKTKPSELDQGKYDADDNVKIICLGDSAVGKSKLMERFLMDGFQPQQLSTYALTLYKHTATVDGRTILVDFWDTAGQERFQSMHASYYHKAHACIMVFDVQRKVTYRNLSTWYTELREFRPEIPCIVVANKIDDINVTQKSFNFAKKFSLPLYFVSAADGTNVVKVWLTAEVASKLFNDAIRLAVSYKQNSQDFMDEIFQELENFSLEQEEEDVPDQEQSSSIETPSEEAASPHS

SEQ ID NO: 70543 - protein, 229 aa, Homo sapiens; identical to SEQ ID NO: 70539
  Payload ID: 13995
  Gene Symbol: RABL2B
  Gene Name: RAB, member of RAS oncogene family-like 2B
  Uniprot ID: Q9UNT1
  ENSP ID: ENSP00000378960

SEQ ID NO: 70544 - protein, 228 aa, Homo sapiens
  Payload ID: 13995
  Gene Symbol: RABL2B
  Gene Name: RAB, member of RAS oncogene family-like 2B
  Uniprot ID: Q9UNT1
  ENSP ID: ENSP00000378962
MAEDKTKPSELDQGKYDADDNVKIICLGDSAVGKSKLMERFLMDGFQPQQLSTYALTLYKHTATVDGRTILVDFWDTAGQERFQSMHASYYHKAHACIMVFDVQRKVTYRNLSTWYTELREFRPEIPCIVVANKIDDINVTQKSFNFAKKFSLPLYFVSAADGTNVVKLFNDAIRLAVSYKQNSQDFMDEIFQELENFSLEQEEEDVPDQEQSSSIETPSEEAASPHS

SEQ ID NO: 70545 - protein, 101 aa, Homo sapiens
  Payload ID: 13995
  Gene Symbol: RABL2B
  Gene Name: RAB, member of RAS oncogene family-like 2B
  ENSP ID: ENSP00000398282
MAEDKTKPSELDQGKYDADDNVKIICLGDSAVGKSKLMERFLMDGFQPQQLSTYALTLYKHTATVDGRTILVDFWDTAGQERFQSMHASYYHKAHACIMQT

SEQ ID NO: 70546 - protein, 101 aa, Homo sapiens; identical to SEQ ID NO: 70545
  Payload ID: 13995
  Gene Symbol: RABL2B
  Gene Name: RAB, member of RAS oncogene family-like 2B
  ENSP ID: ENSP00000399988

SEQ ID NO: 70547 - protein, 228 aa, Homo sapiens; identical to SEQ ID NO: 70544
  Payload ID: 13995
  Gene Symbol: RABL2B
  Gene Name: RAB, member of RAS oncogene family-like 2B
  Uniprot ID: Q9UNT1
  ENSP ID: ENSP00000401906

SEQ ID NO: 70548 - protein, 20 aa, Homo sapiens
  Payload ID: 13995
  Gene Symbol: RABL2B
  Gene Name: RAB, member of RAS oncogene family-like 2B
  ENSP ID: ENSP00000415180
MAEDKTKPSELDQGKYDADD

SEQ ID NO: 70549 - protein, 39 aa, Homo sapiens
  Payload ID: 13995
  Gene Symbol: RABL2B
  Gene Name: RAB, member of RAS oncogene family-like 2B
  ENSP ID: ENSP00000419811
MAEDKTKPSELDQGKYDADDNVKIICLGDSAVGKSKHNN

SEQ ID NO: 70550 - protein, 236 aa, Homo sapiens
  Payload ID: 13996
  Gene Symbol: RABL3
  Gene Name: RAB, member of RAS oncogene family-like 3
  Uniprot ID: Q5HYI8
  ENSP ID: ENSP00000273375
MASLDRVKVLVLGDSGVGKSSLVHLLCQNQVLGNPSWTVGCSVDVRVHDYKEGTPEEKTYYIELWDVGGSVGSASSVKSTRAVFYNSVNGIIFVHDLTNKKSSQNLRRWSLEALNRDLVPTGVLVTNGDYDQEQFADNQIPLLVIGTKLDQIHETKRHEVLTRTAFLAEDFNPEEINLDCTNPRYLAAGSSNAVKLSRFFDKVIEKRYFLREGNQIPGFPDRKRFGAGTLKSLHYD

SEQ ID NO: 70551 - protein, 53 aa, Homo sapiens
  Payload ID: 13996
  Gene Symbol: RABL3
  Gene Name: RAB, member of RAS oncogene family-like 3
  ENSP ID: ENSP00000417266
MASLDRVKVLVLGDSGVGKSSLVHLLCQNQVLGNPSWTVGCSVDVRVLFSYTT

SEQ ID NO: 70552 - protein, 53 aa, Homo sapiens
  Payload ID: 13996
  Gene Symbol: RABL3
  Gene Name: RAB, member of RAS oncogene family-like 3
  ENSP ID: ENSP00000418854
  MOD_RES (1)..(1): Any amino acid
XASLDRVKVLVLGDSGVGKSSLVHLLCQNQVLGNPSWTVGCSVDVRVLFSYTT

SEQ ID NO: 70553 - protein, 129 aa, Homo sapiens
  Payload ID: 13996
  Gene Symbol: RABL3
  Gene Name: RAB, member of RAS oncogene family-like 3
  ENSP ID: ENSP00000419310
MASLDRVKVLVLGDSGVGKSSLVHLLCQNQVLGNPSWTVGCSVDVRVHDYKEGTPEEKTYYIELWDVGGSVGSASSVKSTRAVFYNSVNGIIFVHDLTNKKSSQNLRRWSLEALNRDLVPTGVLVTNGD

SEQ ID NO: 70554 - protein, 212 aa, Homo sapiens
  Payload ID: 13996
  Gene Symbol: RABL3
  Gene Name: RAB, member of RAS oncogene family-like 3
  ENSP ID: ENSP00000419986
MASLDRVKVLVLGDSGVGKSSLVHLLCQNQVLGNPSWTVGCSVDVRVHDYKEGTPEEKTYYIELWDVGGSVGSASSVKSTRAVFYNSVNGIIFVHDLTNKKSSQNLRRWSLEALNRDLVPTGVLVTNGDYDQEQFADNQIPLLVIGTKLDQIHETKRHEVLTRTAFLAEDFNPEEINLVIEKRYFLREGNQIPGFPDRKRFGAGTLKSLHYD

SEQ ID NO: 70555 - protein, 135 aa, Homo sapiens
  Payload ID: 13996
  Gene Symbol: RABL3
  Gene Name: RAB, member of RAS oncogene family-like 3
  ENSP ID: ENSP00000420573
MASLDRVKVLVLGDSGVGKSSLVHLLCQNQVLGNPSWTVGCSVDVRVHDYKEGTPEEKTYYIELWDVGGSVGSASSVKSTRAVFYNSVNGIIFVHDLTNKKSSQNLRRWSLEALNRDLVPTGVLVTNGTAQIHGT

SEQ ID NO: 70556 - protein, 729 aa, Homo sapiens
  Payload ID: 13997
  Gene Symbol: RABL6
  Gene Name: RAB, member RAS oncogene family-like 6
  Uniprot ID: Q3YEC7
  ENSP ID: ENSP00000311134
MFSALKKLVGSDQAPGRDKNIPAGLQSMNQALQRRFAKGVQYNMKIVIRGDRNTGKTALWHRLQGRPFVEEYIPTQEIQVTSIHWSYKTTDDIVKVEVWDVVDKGKCKKRGDGLKMENDPQEAESEMALDAEFLDVYKNCNGVVMMFDITKQWTFNYILRELPKVPTHVPVCVLGNYRDMGEHRVILPDDVRDFIDNLDRPPGSSYFRYAESSMKNSFGLKYLHKFFNIPFLQLQRETLLRQLETNQLDMDATLEELSVQQETEDQNYGIFLEMMEARSRGHASPLAANGQSPSPGSQSPVVPAGAVSTGSSSPGTPQPAPQLPLNAAPPSSVPPVPPSEALPPPACPSAPAPRRSIISRLFGTSPATEAAPPPPEPVPAAEGPATVQSVEDFVPDDRLDRSFLEDTTPARDEKKVGAKAAQQDSDSDGEALGGNPMVAGFQDDVDLEDQPRGSPPLPAGPVPSQDITLSSEEEAEVAAPTKGPAPAPQQCSEPETKWSSIPASKPRRGTAPTRTAAPPWPGGVSVRTGPEKRSSTRPPAEMEPGKGEQASSSESDPEGPIAAQMLSFVMDDPDFESEGSDTQRRADDFPVRDDPSDVTDEDEGPAEPPPPPKLPLPAFRLKNDSDLFGLGLEEAGPKESSEEGKEGKTPSKEKKKKKKKGKEEEEKAAKKKSKHKKSKDKEEGKEERRRRQQRPPRSRERTAADELEAFLGGGAPGGRHPGGGDYEEL

SEQ ID NO: 70557 - protein, 520 aa, Homo sapiens
  Payload ID: 13997
  Gene Symbol: RABL6
  Gene Name: RAB, member RAS oncogene family-like 6
  Uniprot ID: Q3YEC7
  ENSP ID: ENSP00000350056
MFSALKKLVGSDQAPGRDKNIPAGLQSMNQALQRRFAKGVQYNMKIVIRGDRNTGKTALWHRLQGRPFVEEYIPTQEIQVTSIHWSYKTTDDIVKVEVWDVVDKGKCKKRGDGLKMENDPQEAESEMALDAEFLDVYKNCNGVVMMFDITKQWTFNYILRELPKVPTHVPVCVLGNYRDMGEHRVILPDDVRDFIDNLDRPPGSSYFRYAESSMKNSFGLKYLHKFFNIPFLQLQRETLLRQLETNQLDMDATLEELSVQQETEDQNYGIFLEMMEARSRGHASPLAANGQSPSPGSQSPVVPAGAVSTGSSSPGTPQPAPQLPLNAAPPSSVPPVPPSEALPPPACPSAPAPRRSIISRPPPWGWRLRGALGRRGQWPPWGGGRACHCLGRHLPLYHRLCRCPVAAVCASELEEAGHWWSPGWALQVLGLQAQCEPALQEGRGQLASARLGGHPGPLGAEPPVFLRDVTEAQEGPVRVCLQRLGRGRLAVGCALPRHLLALRAHLGPQHAYGSASGREP

SEQ ID NO: 70558 - protein, 716 aa, Homo sapiens
  Payload ID: 13997
  Gene Symbol: RABL6
  Gene Name: RAB, member RAS oncogene family-like 6
  Uniprot ID: Q3YEC7
  ENSP ID: ENSP00000360727
MFSALKKLVGSDQAPGRDKNIPAGLQSMNQALQRRFAKGVQYNMKIVIRGDRNTGKTALWHRLQGRPFVEEYIPTQEIQVTSIHWSYKTTDDIVKVEVWDVVDKGKCKKRGDGLKMENDPQEAESEMALDAEFLDVYKNCNGVVMMFDITKQWTFNYILRELPKVPTHVPVCVLGNYRDMGEHRVILPDDVRDFIDNLDSRPPGSSYFRYAESSMKNSFGLKYLHKFFNIPFLQLQRETLLRQLETNQLDMDATLEELSVQQETEDQNYGIFLEMMEARSRGHASPLAANGQSPSPGSQSPVVPAGAVSTGSSSPGTPQPAPQLPLNAAPPSSVPPVPPSEALPPPACPSAPAPRRSIISRLFGTSPATEAAPPPPEPVPAAEGPATVQSVEDFVPDDRLDRSFLEDTTPARDEKKVGAKAAQQDSDSDGEALGGNPMVAGFQDDVDLEDQPRGSPPLPAGPVPSQDITLSSEEEAEVAAPTKGPAPAPQQCSEPETKWSSIPASKPRRGTAPTRTAAPPWPGGVSVRTGPEKRSSTRPPAEMEPGKGEQASSSESDPEGPIAAQMLSFVMDDPDFESEGSDTQRRADDFPVRDDPSDVTDEDEGPAEPPPPPKLPLPAFRLKNDSDLFGLGLEEAGPKESSEEGKEGKTPSKEKKKKKKKGKEEEEKAAKKKSKHKKSKDKEEGKEERRRRQQRPPRSRERTAADELEAFLGGGA

SEQ ID NO: 70559 - protein, 314 aa, Homo sapiens
  Payload ID: 13997
  Gene Symbol: RABL6
  Gene Name: RAB, member RAS oncogene family-like 6
  Uniprot ID: Q3YEC7
  ENSP ID: ENSP00000360736
MFSALKKLVGSDQAPGRDKNIPAGLQSMNQALQRRFAKGVQYNMKIVIRGDRNTGKTALWHRLQGRPFVEEYIPTQEIQVTSIHWSYKTTDDIVKVEVWDVVDKGKCKKRGDGLKMENDPQEAESEMALDAEFLDVYKNCNGVVMMFDITKQWTFNYILRELPKVPTHVPVCVLGNYRDMGEHRVILPDDVRDFIDNLDRPPGSSYFRYAESSMKNSFGLKYLHKFFNIPFLQLQKDVRLAQERGCAVVLVSEEVRMPAGWDCCWGRLGWKEGGSQTCPVPALLGRPLLPAEPSPHHWVDYSLESSPLLSCSIP

SEQ ID NO: 70560 - protein, 215 aa, Homo sapiens
  Payload ID: 13997
  Gene Symbol: RABL6
  Gene Name: RAB, member RAS oncogene family-like 6
  ENSP ID: ENSP00000412757
  MOD_RES (1)..(1): Any amino acid
XKIVIRGDRNTGKTALWHRLQGRPFVEEYIPTQEIQVTSIHWSYKTTDDIVKVEVWDVVDKGKCKKRGDGLKMENDPQEAESEMALDAEFLDVYKNCNGVVMMFDITKQWTFNYILRELPKVPTHVPVCVLGNYRDMGEHRVILPDDVRDFIDNLDSRPPGSSYFRYAESSMKNSFGLKYLHKFFNIPFLQLQVSTHHVGWSGCWSLTSFQVSPV

SEQ ID NO: 70561 - protein, 190 aa, Homo sapiens
  Payload ID: 13997
  Gene Symbol: RABL6
  Gene Name: RAB, member RAS oncogene family-like 6
  ENSP ID: ENSP00000414081
MAGPGTVCWGTVCQGEVLALWGHLQKGTRLSCLAGLSRVLWPQEPAGGGRAVRTHSCGPRGDPWHQGKGLSLASFFLSESRPPGSSYFRYAESSMKNSFGLKYLHKFFNIPFLQLQRETLLRQLETNQLDMDATLEELSVQQETEDQNYGMYVAGPARAGGVGAAGVAVVQGHGLHQGDSRGECPLFGVN

SEQ ID NO: 70562 - protein, 471 aa, Homo sapiens
  Payload ID: 13997
  Gene Symbol: RABL6
  Gene Name: RAB, member RAS oncogene family-like 6
  ENSP ID: ENSP00000431675
MTVGTVKIVIRGDRNTGKTALWHRLQGRPFVEEYIPTQEIQVTSIHWSYKTTDDIVKVEVWDVVDKGKCKKRGDGLKMENDPQEAESEMALDAEFLDVYKNCNGVVMMFDITKQWTFNYILRELPKVPTHVPVCVLGNYRDMGEHRVILPDDVRDFIDNLDRPPGSSYFRYAESSMKNSFGLKYLHKFFNIPFLQLQRETLLRQLETNQLDMDATLEELSVQQETEDQNYGIFLEMMEARSRGHASPLAANGQSPSPGSQSPVVPAGAVSTGSSSPGTPQPAPQLPLNAAPPSSVPPVPPSEALPPPACPSAPAPRRSIISRLFGTSPATEAAPPPPEPVPAAEGPATVQSVEDFVPDDRLDRSFLEDTTPARDEKKVGAKAAQQDSDSDGEALGGNPMVAGFQDDVDLEDQPRGSPPLPAGPVPSQDITLSSEEEAEVAAPTKGPAPAPQQCSEPETKWSGEAQQHQAPC

SEQ ID NO: 70563 - protein, 484 aa, Homo sapiens
  Payload ID: 13997
  Gene Symbol: RABL6
  Gene Name: RAB, member RAS oncogene family-like 6
  ENSP ID: ENSP00000433031
MFSALKKLVGSDQAPGRDKNIPAGLQSMNQALQRRFAKGVQYNMKIVIRGDRNTGKTALWHRLQGRPFVEEYIPTQEIQVTSIHWSYKTTDDIVKVEVWDVVDKGKCKKRGDGLKMENDPQEAESEMALDAEFLDVYKNCNGVVMMFDITKQWTFNYILRELPKVPTHVPVCVLGNYRDMGEHRVILPDDVRDFIDNLDRPPGSSYFRYAESSMKNSFGLKYLHKFFNIPFLQLQRETLLRQLETNQLDMDATLEELSVQQETEDQNYGIFLEMMEARSRGHASPLAANGQSPSPGSQSPVVPAGAVSTGSSSPGTPQPAPQLPLNAAPPSSVPPVPPSEALPPPACPSAPAPRRSIISRLFGTSPATEAAPPPPEPVPAAEGPATVQSVEDFVPDDRLDRSFLEDTTPARDEKKVRRSAAAPGPLLRWSRGRVSRPPRRRVTPRDPLLHKCCPSSWMTPTLRARDQTHSAGRMTFPCEMTPPM

SEQ ID NO: 70564 - protein, 471 aa, Homo sapiens; identical to SEQ ID NO: 70562
  Payload ID: 13997
  Gene Symbol: RABL6
  Gene Name: RAB, member RAS oncogene family-like 6
  ENSP ID: ENSP00000486100

SEQ ID NO: 70565 - protein, 730 aa, Homo sapiens
  Payload ID: 13998
  Gene Symbol:
  Gene Name: RAB, member RAS oncogene family-like 6 [Source:EntrezGene
  Acc:55684]
  ENSP ID: ENSP00000395490
MFSALKKLVGSDQAPGRDKNIPAGLQSMNQALQRRFAKGVQYNMKIVIRGDRNTGKTALWHRLQGRPFVEEYIPTQEIQVTSIHWSYKTTDDIVKVEVWDVVDKGKCKKRGDGLKMENDPQEAESEMALDAEFLDVYKNCNGVVMMFDITKQWTFNYILRELPKVPTHVPVCVLGNYRDMGEHRVILPDDVRDFIDNLDSRPPGSSYFRYAESSMKNSFGLKYLHKFFNIPFLQLQRETLLRQLETNQLDMDATLEELSVQQETEDQNYGIFLEMMEARSRGHASPLAANGQSPSPGSQSPVVPAGAVSTGSSSPGTPQPAPQLPLNAAPPSSVPPVPPSEALPPPACPSAPAPRRSIISRLFGTSPATEAAPPPPEPVPAAEGPATVQSVEDFVPDDRLDRSFLEDTTPARDEKKVGAKAAQQDSDSDGEALGGNPMVAGFQDDVDLEDQPRGSPPLPAGPVPSQDITLSSEEEAEVAAPTKGPAPAPQQCSEPETKWSSIPASKPRRGTAPTRTAAPPWPGGVSVRTGPEKRSSTRPPAEMEPGKGEQASSSESDPEGPIAAQMLSFVMDDPDFESEGSDTQRRADDFPVRDDPSDVTDEDEGPAEPPPPPKLPLPAFRLKNDSDLFGLGLEEAGPKESSEEGKEGKTPSKEKKKKKKKGKEEEEKAAKKKSKHKKSKDKEEGKEERRRRQQRPPRSRERTAADELEAFLGGGAPGGRHPGGGDYEEL

SEQ ID NO: 70566 - protein, 200 aa, Homo sapiens
  Payload ID: 13999
  Gene Symbol: RAB10
  Gene Name: RAB10, member RAS oncogene family
  Uniprot ID: P61026
  ENSP ID: ENSP00000264710
MAKKTYDLLFKLLLIGDSGVGKTCVLFRFSDDAFNTTFISTIGIDFKIKTVELQGKKIKLQIWDTAGQERFHTITTSYYRGAMGIMLVYDITNGKSFENISKWLRNIDEHANEDVERMLLGNKCDMDDKRVVPKGKGEQIAREHGIRFFETSAKANINIEKAFLTLAEDILRKTPVKEPNSENVDISSGGGVTGWKSKCC

SEQ ID NO: 70567 - protein, 649 aa, Homo sapiens
  Payload ID: 14000
  Gene Symbol: RAB11FIP1
  Gene Name: RAB11 family interacting protein 1 (class I)
  Uniprot ID: Q6WKZ4
  ENSP ID: ENSP00000287263
MSLMVSAGRGLGAVWSPTHVQVTVLQARGLRAKGPGGTSDAYAVIQVGKEKYATSVSERSLGAPVWREEATFELPSLLSSGPAAAATLQLTVLHRALLGLDKFLGRAEVDLRDLHRDQGRRKTQWYKLKSKPGKKDKERGEIEVDIQFMRNNMTASMFDLSMKDKSRNPFGKLKDKIKGKNKDSGSDTASAIIPSTTPSVDSDDESVVKDKKKKSKIKTLLSKSNLQKTPLSQSMSVLPTSKPEKVLLRPGDFQSQWDEDDNEDESSSASDVMSHKRTASTDLKQLNQVNFTLPKKEGLSFLGGLRSKNDVLSRSNVCINGNHVYLEQPEAKGEIKDSSPSSSPSPKGFRKKHLFSSTENLAAGSWKEPAEGGGLSSDRQLSESSTKDSLKSMTLPSYRPAPLVSGDLRENMAPANSEATKEAKESKKPESRRSSLLSLMTGKKDVAKGSEGENPLTVPGREKEGMLMGVKPGEDASGPAEDLVRRSEKDTAAVVSRQGSSLNLFEDVQITEPEAEPESKSEPRPPISSPRAPQTRAVKPRLHPVKPMNAMATKVANCSLGTATIISENLNNEVMMKKYSPSDPAFAYAQLTHDELIQLVLKQKETISKKEFQVRELEDYIDNLLVRVMEETPNILRIPTQVGKKAGKM

SEQ ID NO: 70568 - protein, 1283 aa, Homo sapiens [sequence omitted]

SEQ ID NO: 70569 - protein, 501 aa, Homo sapiens
  Payload ID: 14000
  Gene Symbol: RAB11FIP1
  Gene Name: RAB11 family interacting protein 1 (class I)
  ENSP ID: ENSP00000430009
MRNNMTASMFDLSMKDKSRNPFGKLKDKIKGKNKDSGSDTASAIIPSTTPSVDSDDESVVKDKKKKSKIKTLLSKSNLQKTPLSQSMSVLPTSKPEKVLLRPGDFQSQWDEDDNEDESSSASDVMSHKRTASTDLKQLNQVNFTLPKKEGLSFLGGLRSKNDVLSRSNVCINGNHVYLEQPEAKGEIKDSSPSSSPSPKGFRKKHLFSSTENLAAGSWKEPAEGGGLSSDRQLSESSTKDSLKSMTLPSYRPAPLVSGDLRENMAPANSEATKEAKESKKPESRRSSLLSLMTGKKDVAKGSEGENPLTVPGREKEGMLMGVKPGEDASGPAEDLVRRSEKDTAAVVSRQGSSLNLFEDVQITEPEAEPESKSEPRPPISSPRAPQTRAVKPRLHPVKPMNAMATKVANCSLGTATIISENLNNEVMMKKYSPSDPAFAYAQLTHDELIQLVLKQKETISKKEFQVRELEDYIDNLLVRVMEETPNILRIPTQVGKKAGKM

SEQ ID NO: 70570 - protein, 439 aa, Homo sapiens
  Payload ID: 14000
  Gene Symbol: RAB11FIP1
  Gene Name: RAB11 family interacting protein 1 (class I)
  Uniprot ID: Q6WKZ4
  ENSP ID: ENSP00000430680
MRNNMTASMFDLSMKDKSRNPFGKLKDKIKGKNKDSGSDTASAIIPSTTPSVDSDDESVVKDKKKKSKIKTLLSKSNLQKTPLSQSMSVLPTSKPEKVLLRPGDFQSQWDEDDNEDESSSASDVMSHKRTASTDLKQLNQVNFTLPKKEGLSFLGGLRSKNDVLSRSNVCINGNHVYLEQPEAKGEIKDSSPSSSPSPKGFRKKHLFSSTENLAAGSWKEPAEGGGLSSDRQLSESSTKDSLKSMTLPSYRPAPLVSGDLRENMAPANSEATKEAKESKKPESRRSSLLSLMTGKKDVAKGSEGENPLTVPGREKEGMLMGVKPGEDASGPAEDLVRRSEKDTAAVVSRQGSSLNLFEDVQITEPEAEPESKSEPRPPISSPRAPQTRAVKPRLHPVKPMNAMATKVANCSLGTATIISENLNNEVMMKVCPLRSWCVR

SEQ ID NO: 70571 - protein, 512 aa, Homo sapiens
  Payload ID: 14001
  Gene Symbol: RAB11FIP2
  Gene Name: RAB11 family interacting protein 2 (class I)
  Uniprot ID: Q7L804
  ENSP ID: ENSP00000347839
MMLSEQAQKWFPTHVQVTVLQAKDLKPKGKSGTNDTYTIIQLGKEKYSTSVAEKTLEPVWKEEASFELPGLLIQGSPEKYILFLIVMHRSLVGLDKFLGQVAINLNDIFEDKQRRKTEWFRLESKQGKRIKNRGEIKVNIQFMRNNMTASMFDLSMKDKTRSPFAKLKDKMKGRKNDGTFSDTSSAIIPSTHMPDANSEFSSGEIQMKSKPKKPFLLGPQRLSSAHSMSDLSGSHMSSEKLKAGTIGQTHLLGHQLDSFGTVPESGSLKSPHRRTLSFDTSKMNQPDSIVDEGELCFGRQNDPFTNVTASLPQKFATLPRKKNPFEESSETWDSSMNLFSKPIEIRKENKREKREKVSLFERVTGKKDSRRSDKLNNGGSDSPCDLKSPNAFSENRQDYFDYESTNPFTAKFRASNIMPSSSFHMSPTSNEDLRKIPDSNPFDATAGYRSLTYEEVLQELVKHKELLRRKDTHIRELEDYIDNLLVRVMEETPSILRVPYEPSRKAGKFSNS

SEQ ID NO: 70572 - protein, 532 aa, Homo sapiens
  Payload ID: 14001
  Gene Symbol: RAB11FIP2
  Gene Name: RAB11 family interacting protein 2 (class I)
  Uniprot ID: Q7L804
  ENSP ID: ENSP00000358200
MMLSEQAQKWFPTHVQVTVLQAKDLKPKGKSGTNDTYTIIQLGKEKYSTSVAEKTLEPVWKEEASFELPGLLIQGSPEKYILFLIVMHRSLVGLDKFLGQVAINLNDIFEDKQRRKTEWFRLESKQGKRIKNRGEIKVNIQFMRNNMTASMFDLSMKDKTRSPFAKLKDKMKGRKNDGTFSDTSSAIIPSTHMPDANSEFSSGEIQMKSKPKKPFLLGPQRLSSAHSMSDLSGSHMSSEKLKAGTIGQTHLLGHQLDSFGTVPESGSLKSPHRRTLSFDTSKMNQPDSIVDEGELCFGRQNDPFTNVTASLPQKFATLPRKKNPFEESSETWDSSMNLFSKPIEIRKENKREKREKVSLFERVTGKKDSRRSDKLNNGGSDSPCDLKSPNAFSENRQDYFDYESTNPFTAKFRASNIMPSSRNTLLTPAVAEWRGSLRWAELFHMSPTSNEDLRKIPDSNPFDATAGYRSLTYEEVLQELVKHKELLRRKDTHIRELEDYIDNLLVRVMEETPSILRVPYEPSRKAGKFSNS

SEQ ID NO: 70573 - protein, 756 aa, Homo sapiens
  Payload ID: 14002
  Gene Symbol: RAB11FIP3
  Gene Name: RAB11 family interacting protein 3 (class II)
  Uniprot ID: O75154
  ENSP ID: ENSP00000262305
MASAPPASPPGSEPPGPDPEPGGPDGPGAAQLAPGPAELRLGAPVGGPDPQSPGLDEPAPGAAADGGARWSAGPAPGLEGGPRDPGPSAPPPRSGPRGQLASPDAPGPGPRSEAPLPELDPLFSWTEEPEECGPASCPESAPFRLQGSSSSHRARGEVDVFSPFPAPTAGELALEQGPGSPPQPSDLSQTHPLPSEPVGSQEDGPRLRAVFDALDGDGDGFVRIEDFIQFATVYGAEQVKDLTKYLDPSGLGVISFEDFYQGITAIRNGDPDGQCYGGVASAQDEEPLACPDEFDDFVTYEANEVTDSAYMGSESTYSECETFTDEDTSTLVHPELQPEGDADSAGGSAVPSECLDAMEEPDHGALLLLPGRPHPHGQSVITVIGGEEHFEDYGEGSEAELSPETLCNGQLGCSDPAFLTPSPTKRLSSKKVARYLHQSGALTMEALEDPSPELMEGPEEDIADKVVFLERRVLELEKDTAATGEQHSRLRQENLQLVHRANALEEQLKEQELRACEMVLEETRRQKELLCKMEREKSIEIENLQTRLQQLDEENSELRSCTPCLKANIERLEEEKQKLLDEIESLTLRLSEEQENKRRMGDRLSHERHQFQRDKEATQELIEDLRKQLEHLQLLKLEAEQRRGRSSSMGLQEYHSRARESELEQEVRRLKQDNRNLKEQNEELNGQIITLSIQGAKSLFSTAFSESLAAEISSVSRDELMEAIQKQEEINFRLQDYIDRIIVAIMETNPSILEVK

SEQ ID NO: 70574 - protein, 182 aa, Homo sapiens
  Payload ID: 14002
  Gene Symbol: RAB11FIP3
  Gene Name: RAB11 family interacting protein 3 (class II)
  ENSP ID: ENSP00000399614
MGSESTYSECETFTDEDTSTLVHPELQPEGDADSAGGSAVPSECLDAMEEPDHGALLLLPGRPHPHGQSVITVIGGEEHFEDYGEGSEAELSPETLCNGQLGCSDPAFLTPSPTKRLSSKKVARYLHQSGALTMEALEDPSPELMEGPEEDIADKVVFLERRVLELEKDTAATGEQHSRLRQ

SEQ ID NO: 70575 - protein, 677 aa, Homo sapiens
  Payload ID: 14002
  Gene Symbol: RAB11FIP3
  Gene Name: RAB11 family interacting protein 3 (class II)
  ENSP ID: ENSP00000399644
WTEEPEECGPASCPESAPFRLQGSSSSHRARGEVDVFSPFPAPTAGELALEQGPGSPPQPSDLSQTHPLPSEPVGSQEDGPRLRAVFDALDGDGDGFVRIEDFIQFATVYGAEQVKDLTKYLDPSGLGVISFEDFYQGITAIRNGDPDGQCYGGVASAQDEEPLACPDEFDDFVTYEANEVTDSAYMGSESTYSECETFTDEDTSTLVHPELQPEGDADSAGGSAVPSECLDAMEEPDHGALLLLPGRPHPHGQSVITVIGGEEHFEDYGEGSEAELSPETLCNGQLGCSDPAFLTPSTDPLAAKLHSILTDEAFEFYCSQCHKQINRLEDLSARLSDLEMNSPTKRLSSKKVARYLHQSGALTMEALEDPSPELMEGPEEDIADKVVFLERRVLELEKDTAATGEQHSRLRQENLQLVHRANALEEQLKEQELRACEMVLEETRRQKELLCKMEREKSIEIENLQTRLQQLDEENSELRSCTPCLKANIERLEEEKQKLLDEIESLTLRLSEEQENKRRMGDRLSHERHQFQRDKEATQELIEDLRKQLEHLQLLKLEAEQRRGRSSSMGLQEYHSRARESELEQEVRRLKQDNRNLKEQNEELNGQIITLSIQGAKSLFSTAFSESLAAEISSVSRDELMEAIQKQEEINFRLQDYIDRIIVAIMETNPSILEVK

SEQ ID NO: 70576 - protein, 157 aa, Homo sapiens
  Payload ID: 14002
  Gene Symbol: RAB11FIP3
  Gene Name: RAB11 family interacting protein 3 (class II)
  ENSP ID: ENSP00000404331
MPFLKANEVTDSAYMGSESTYSECETFTDEDTSTLVHPELQPEGDADSAGGSAVPSECLDAMEEPDHGALLLLPGRPHPHGQSVITVIGGEEHFEDYGEGSEAELSPETLCNGQLGCSDPAFLTPSPTKRLSSKKVARYLHQSGALTMEALEDPSPE

SEQ ID NO: 70577 - protein, 136 aa, Homo sapiens
  Payload ID: 14002
  Gene Symbol: RAB11FIP3
  Gene Name: RAB11 family interacting protein 3 (class II)
  ENSP ID: ENSP00000412502
GGSAVPSECLDAMEEPDHGALLLLPGRPHPHGQSVITVIGGEEHFEDYGEGSEAELSPETLCNGQLGCSDPAFLTPSTDPLAAKLHSILTDEAFEFYCSQCHKQINRLEDLSARLSDLEMNSPTKRLSSKKVASFV

SEQ ID NO: 70578 - protein, 460 aa, Homo sapiens
  Payload ID: 14002
  Gene Symbol: RAB11FIP3
  Gene Name: RAB11 family interacting protein 3 (class II)
  Uniprot ID: O75154
  ENSP ID: ENSP00000415919
MPFLKANEVTDSAYMGSESTYSECETFTDEDTSTLVHPELQPEGDADSAGGSAVPSECLDAMEEPDHGALLLLPGRPHPHGQSVITVIGGEEHFEDYGEGSEAELSPETLCNGQLGCSDPAFLTPSPTKRLSSKKVARYLHQSGALTMEALEDPSPELMEGPEEDIADKVVFLERRVLELEKDTAATGEQHSRLRQENLQLVHRANALEEQLKEQELRACEMVLEETRRQKELLCKMEREKSIEIENLQTRLQQLDEENSELRSCTPCLKANIERLEEEKQKLLDEIESLTLRLSEEQENKRRMGDRLSHERHQFQRDKEATQELIEDLRKQLEHLQLLKLEAEQRRGRSSSMGLQEYHSRARESELEQEVRRLKQDNRNLKEQNEELNGQIITLSIQGAKSLFSTAFSESLAAEISSVSRDELMEAIQKQEEINFRLQDYIDRIIVAIMETNPSILEVK

SEQ ID NO: 70579 - protein, 756 aa, Homo sapiens; identical to SEQ ID NO: 70573
  Payload ID: 14002
  Gene Symbol: RAB11FIP3
  Gene Name: RAB11 family interacting protein 3 (class II)
  Uniprot ID: O75154
  ENSP ID: ENSP00000482156

SEQ ID NO: 70580 - protein, 460 aa, Homo sapiens; identical to SEQ ID NO: 70578
  Payload ID: 14002
  Gene Symbol: RAB11FIP3
  Gene Name: RAB11 family interacting protein 3 (class II)
  Uniprot ID: O75154
  ENSP ID: ENSP00000484620

SEQ ID NO: 70581 - protein, 157 aa, Homo sapiens; identical to SEQ ID NO: 70576
  Payload ID: 14002
  Gene Symbol: RAB11FIP3
  Gene Name: RAB11 family interacting protein 3 (class II)
  ENSP ID: ENSP00000488023

SEQ ID NO: 70582 - protein, 677 aa, Homo sapiens; identical to SEQ ID NO: 70575
  Payload ID: 14002
  Gene Symbol: RAB11FIP3
  Gene Name: RAB11 family interacting protein 3 (class II)
  ENSP ID: ENSP00000488133

SEQ ID NO: 70583 - protein, 136 aa, Homo sapiens; identical to SEQ ID NO: 70577
  Payload ID: 14002
  Gene Symbol: RAB11FIP3
  Gene Name: RAB11 family interacting protein 3 (class II)
  ENSP ID: ENSP00000488615

SEQ ID NO: 70584 - protein, 182 aa, Homo sapiens; identical to SEQ ID NO: 70574
  Payload ID: 14002
  Gene Symbol: RAB11FIP3
  Gene Name: RAB11 family interacting protein 3 (class II)
  ENSP ID: ENSP00000488688

SEQ ID NO: 70585 - protein, 535 aa, Homo sapiens
  Payload ID: 14003
  Gene Symbol: RAB11FIP4
  Gene Name: RAB11 family interacting protein 4 (class II)
  Uniprot ID: Q86YS3
  ENSP ID: ENSP00000378227
MRTPPALGSQGSEVTGPTFADGELIPREPGFFPEDEEEAMTLAPPEGPQELYTDSPMESTQSLEGSVGSPAEKDGGLGGLFLPEDKSLVHTPSMTTSDLSTHSTTSLISNEEQFEDYGEGDDVDCAPSSPCPDDETRTNVYSDLGSSVSSSAGQTPRKMRHVYNSELLDVYCSQCCKKINLLNDLEARLKNLKANSPNRKISSTAFGRQLMHSSNFSSSNGSTEDLFRDSIDSCDNDITEKVSFLEKKVTELENDSLTNGDLKSKLKQENTQLVHRVHELEEMVKDQETTAEQALEEEARRHREAYGKLEREKATEVELLNARVQQLEEENTELRTTVTRLKSQTEKLDEERQRMSDRLEDTSLRLKDEMDLYKRMMDKLRQNRLEFQKEREATQELIEDLRKELEHLQMYKLDCERPGRGRSASSGLGEFNARAREVELEHEVKRLKQENYKLRDQNDDLNGQILSLSLYEAKNLFAAQTKAQSLAAEIDTASRDELMEALKEQEEINFRLRQYMDKIILAILDHNPSILEIKH

SEQ ID NO: 70586 - protein, 163 aa, Homo sapiens
  Payload ID: 14003
  Gene Symbol: RAB11FIP4
  Gene Name: RAB11 family interacting protein 4 (class II)
  ENSP ID: ENSP00000463206
MADTDPRVRVEKLVKYLDPNDLGRINFKDFCRGVFAMKGCEELLKDVLSVESAGTLPCAPEIPDCVEQGSEVTGPTFADGELIPREPGFFPEDEEEAMTLAPPEGPQELYTDSPMESTQSLEGSVGSPAEKDGGLGGLFLPEDKSLVHTPSMTTSDLSTHSTT

SEQ ID NO: 70587 - protein, 50 aa, Homo sapiens
  Payload ID: 14003
  Gene Symbol: RAB11FIP4
  Gene Name: RAB11 family interacting protein 4 (class II)
  ENSP ID: ENSP00000463616
MRTPPALGSQVSGGPGAGARRAPAARTWLGPARGPGKLAESGLGLGGRVT

SEQ ID NO: 70588 - protein, 126 aa, Homo sapiens
  Payload ID: 14003
  Gene Symbol: RAB11FIP4
  Gene Name: RAB11 family interacting protein 4 (class II)
  ENSP ID: ENSP00000465929
MRHVYNSELLDVYCSQCCKKINLLNDLEARLKNLKANSPNRKISSTAFGRQLMHSSNFSSSNGSTEDLFRDSIDSCDNDITEKVSFLEKKVTELENDSLTNGDLKSKLKQENTQLVHRVHELEEMV

SEQ ID NO: 70589 - protein, 50 aa, Homo sapiens
  Payload ID: 14003
  Gene Symbol: RAB11FIP4
  Gene Name: RAB11 family interacting protein 4 (class II)
  ENSP ID: ENSP00000466538
MRTPPALGSQHQPEVPQPVCARSRTEPNLPKSLSLHIFKPRSLKPAQETW

SEQ ID NO: 70590 - protein, 637 aa, Homo sapiens
  Payload ID: 14003
  Gene Symbol: RAB11FIP4
  Gene Name: RAB11 family interacting protein 4 (class II)
  Uniprot ID: Q86YS3
  ENSP ID: ENSP00000482620
MAGGAGWSGAPAALLRSVRRLREVFEVCGRDPDGFLRVERVAALGLRFGQGEEVEKLVKYLDPNDLGRINFKDFCRGVFAMKGCEELLKDVLSVESAGTLPCAPEIPDCVEQGSEVTGPTFADGELIPREPGFFPEDEEEAMTLAPPEGPQELYTDSPMESTQSLEGSVGSPAEKDGGLGGLFLPEDKSLVHTPSMTTSDLSTHSTTSLISNEEQFEDYGEGDDVDCAPSSPCPDDETRTNVYSDLGSSVSSSAGQTPRKMRHVYNSELLDVYCSQCCKKINLLNDLEARLKNLKANSPNRKISSTAFGRQLMHSSNFSSSNGSTEDLFRDSIDSCDNDITEKVSFLEKKVTELENDSLTNGDLKSKLKQENTQLVHRVHELEEMVKDQETTAEQALEEEARRHREAYGKLEREKATEVELLNARVQQLEEENTELRTTVTRLKSQTEKLDEERQRMSDRLEDTSLRLKDEMDLYKRMMDKLRQNRLEFQKEREATQELIEDLRKELEHLQMYKLDCERPGRGRSASSGLGEFNARAREVELEHEVKRLKQENYKLRDQNDDLNGQILSLSLYEAKNLFAAQTKAQSLAAEIDTASRDELMEALKEQEEINFRLRQYMDKIILAILDHNPSILEIKH

SEQ ID NO: 70591 - protein, 653 aa, Homo sapiens
  Payload ID: 14004
  Gene Symbol: RAB11FIP5
  Gene Name: RAB11 family interacting protein 5 (class I)
  Uniprot ID: Q9BXF6
  ENSP ID: ENSP00000258098
MALVRGAEPAAGPSRWLPTHVQVTVLRARGLRGKSSGAGSTSDAYTVIQVGREKYSTSVVEKTHGCPEWREECSFELPPGALDGLLRAQEADAGPAPWAASSAAACELVLTTMHRSLIGVDKFLGQATVALDEVFGAGRAQHTQWYKLHSKPGKKEKERGEIEVTIQFTRNNLSASMFDLSMKDKPRSPFSKIRDKMKGKKKYDLESASAILPSSAIEDPDLGSLGKMGKAKGFFLRNKLRKSSLTQSNTSLGSDSTLSSASGSLAYQGPGAELLTRSPSRSSWLSTEGGRDSAQSPKLFTHKRTYSDEANQMRVAPPRALLDLQGHLDAASRSSLCVNGSHIYNEEPQGPVRHRSSISGSLPSSGSLQAVSSRFSEEGPRSTDDTWPRGSRSNSSSEAVLGQEELSAQAKVLAPGASHPGEEEGARLPEGKPVQVATPIVASSEAVAEKEGARKEERKPRMGLFHHHHQGLSRSELGRRSSLGEKGGPILGASPHHSSSGEEKAKSSWFGLREAKDPTQKPSPHPVKPLSAAPVEGSPDRKQSRSSLSIALSSGLEKLKTVTSGSIQPVTQAPQAGQMVDTKRLKDSAVLDQSAKYYHLTHDELISLLLQRERELSQRDEHVQELESYIDRLLVRIMETSPTLLQIPPGPPK

SEQ ID NO: 70592 - protein, 216 aa, Homo sapiens
  Payload ID: 14005
  Gene Symbol: RAB11A
  Gene Name: RAB11A, member RAS oncogene family
  Uniprot ID: P62491
  ENSP ID: ENSP00000261890
MGTRDDEYDYLFKVVLIGDSGVGKSNLLSRFTRNEFNLESKSTIGVEFATRSIQVDGKTIKAQIWDTAGQERYRAITSAYYRGAVGALLVYDIAKHLTYENVERWLKELRDHADSNIVIMLVGNKSDLRHLRAVPTDEARAFAEKNGLSFIETSALDSTNVEAAFQTILTEIYRIVSQKQMSDRRENDMSPSNNVVPIHVPPTTENKPKVQCCQNI

SEQ ID NO: 70593 - protein, 155 aa, Homo sapiens
  Payload ID: 14005
  Gene Symbol: RAB11A
  Gene Name: RAB11A, member RAS oncogene family
  ENSP ID: ENSP00000454381
MGTRDDEYDYLFKVVLIGDSGVGKSNLLSRFTRNEFNLESKSTIGVEFATRSIQVDGKTIKAQIWDTAGQERYRAITSAYYRGAVGALLVYDIAKHLTYENVERWLKELRDHADSNIVIMLVGNKSDLRHLRAVPTDEARAFAEIYRIVSQKQMS

SEQ ID NO: 70594 - protein, 81 aa, Homo sapiens
  Payload ID: 14005
  Gene Symbol: RAB11A
  Gene Name: RAB11A, member RAS oncogene family
  ENSP ID: ENSP00000454673
MLVGNKSDLRHLRAVPTDEARAFAEKNGLSFIETSALDSTNVEAAFQTILTEIYRIVSQKQMSDRRENDMSPSNNVVPIHV

SEQ ID NO: 70595 - protein, 146 aa, Homo sapiens
  Payload ID: 14005
  Gene Symbol: RAB11A
  Gene Name: RAB11A, member RAS oncogene family
  ENSP ID: ENSP00000455567
MGTRDDEYDYLFKVVLIGDSGVGKSNLTYENVERWLKELRDHADSNIVIMLVGNKSDLRHLRAVPTDEARAFAEKNGLSFIETSALDSTNVEAAFQTILTEIYRIVSQKQMSDRRENDMSPSNNVVPIHVPPTTENKPKVQCCQNI

SEQ ID NO: 70596 - protein, 155 aa, Homo sapiens
  Payload ID: 14005
  Gene Symbol: RAB11A
  Gene Name: RAB11A, member RAS oncogene family
  Uniprot ID: P62491
  ENSP ID: ENSP00000456420
MGTRDDEYDYLFKVVLIGDSGVGKSNLLSRFTRNEFNLESKSTIGVEFATRSIQVDGKTIKAQIWDTAGQERYRAITSAYYRGAVGALLVYDIAKHLTYENVERWLKELRDHADSNIVIMLVGNKSDLRHLRAVPTDEARAFAEKNEANVRQTRK

SEQ ID NO: 70597 - protein, 198 aa, Homo sapiens
  Payload ID: 14005
  Gene Symbol: RAB11A
  Gene Name: RAB11A, member RAS oncogene family
  ENSP ID: ENSP00000456638
MGTRDDEYDYLFKVVLIGDSGVGKSNLLSRFTRNEFNLESKSTIGVEFATRSIQVDGKTIKAQIWDTAGQERYRAITSAYYRGAVGALLVYDIAKHLTYENVERWLKELRDHADSNIVIMLVGNKSDLRHLRAVPTDEARAFAEAAFQTILTEIYRIVSQKQMSDRRENDMSPSNNVVPIHVPPTTENKPKVQCCQNI

SEQ ID NO: 70598 - protein, 218 aa, Homo sapiens
  Payload ID: 14006
  Gene Symbol: RAB11B
  Gene Name: RAB11B, member RAS oncogene family
  Uniprot ID: Q15907
  ENSP ID: ENSP00000333547
MGTRDDEYDYLFKVVLIGDSGVGKSNLLSRFTRNEFNLESKSTIGVEFATRSIQVDGKTIKAQIWDTAGQERYRAITSAYYRGAVGALLVYDIAKHLTYENVERWLKELRDHADSNIVIMLVGNKSDLRHLRAVPTDEARAFAEKNNLSFIETSALDSTNVEEAFKNILTEIYRIVSQKQIADRAAHDESPGNNVVDISVPPTTDGQKPNKLQCCQNL

SEQ ID NO: 70599 - protein, 179 aa, Homo sapiens
  Payload ID: 14006
  Gene Symbol: RAB11B
  Gene Name: RAB11B, member RAS oncogene family
  Uniprot ID: Q15907
  ENSP ID: ENSP00000471148
MGTRDDEYDYLFKVVLIGDSGVGKSNLLSRFTRNEFNLESKSTIGVEFATRSIQVDGKTIKAQIWDTAGQERYRAITSAYYRGAVGALLVYDIAKHLTYENVERWLKELRDHADSNIVIMLVGNKSDLRHLRAVPTDEARAFAEKNNLSFIETSALDSTNVEEAFKNILTGGRGPDGCG

SEQ ID NO: 70600 - protein, 60 aa, Homo sapiens
  Payload ID: 14006
  Gene Symbol: RAB11B
  Gene Name: RAB11B, member RAS oncogene family
  ENSP ID: ENSP00000472473
MLVGNKSDLRHLRAVPTDEARAFAEKNNLSFIETSALDSTNVEEAFKNILTGGRGPDGCG

SEQ ID NO: 70601 - protein, 46 aa, Homo sapiens
  Payload ID: 14006
  Gene Symbol: RAB11B
  Gene Name: RAB11B, member RAS oncogene family
  ENSP ID: ENSP00000473042
MLVGNKSDLRHLRAVPTDEARAFAEKNNLSFIETSALDSTNVEEAF

SEQ ID NO: 70602 - protein, 244 aa, Homo sapiens
  Payload ID: 14007
  Gene Symbol: RAB12
  Gene Name: RAB12, member RAS oncogene family
  Uniprot ID: Q6IQ22
  ENSP ID: ENSP00000331748
MDPGAALQRRAGGGGGLGAGSPALSGGQGRRRKQPPRPADFKLQVIIIGSRGVGKTSLMERFTDDTFCEACKSTVGVDFKIKTVELRGKKIRLQIWDTAGQERFNSITSAYYRSAKGIILVYDITKKETFDDLPKWMKMIDKYASEDAELLLVGNKLDCETDREITRQQGEKFAQQITGMRFCEASAKDNFNVDEIFLKLVDDILKKMPLDILRNELSNSILSLQPEPEIPPELPPPRPHVRCC

SEQ ID NO: 70603 - protein, 203 aa, Homo sapiens
  Payload ID: 14008
  Gene Symbol: RAB13
  Gene Name: RAB13, member RAS oncogene family
  Uniprot ID: P51153
  ENSP ID: ENSP00000357564
MAKAYDHLFKLLLIGDSGVGKTCLIIRFAEDNFNNTYISTIGIDFKIRTVDIEGKKIKLQVWDTAGQERFKTITTAYYRGAMGIILVYDITDEKSFENIQNWMKSIKENASAGVERLLLGNKCDMEAKRKVQKEQADKLAREHGIRFFETSAKSSMNVDEAFSSLARDILLKSGGRRSGNGNKPPSTDLKTCDKKNTNKCSLG

SEQ ID NO: 70604 - protein, 122 aa, Homo sapiens
  Payload ID: 14008
  Gene Symbol: RAB13
  Gene Name: RAB13, member RAS oncogene family
  ENSP ID: ENSP00000480103
MGIILVYDITDEKSFENIQNWMKSIKENASAGVERLLLGNKCDMEAKRKVQKEQADKLAREHGIRFFETSAKSSMNVDEAFSSLARDILLKSGGRRSGNGNKPPSTDLKTCDKKNTNKCSLG

SEQ ID NO: 70605 - protein, 215 aa, Homo sapiens
  Payload ID: 14009
  Gene Symbol: RAB14
  Gene Name: RAB14, member RAS oncogene family
  Uniprot ID: P61106
  ENSP ID: ENSP00000362946
MATAPYNYSYIFKYIIIGDMGVGKSCLLHQFTEKKFMADCPHTIGVEFGTRIIEVSGQKIKLQIWDTAGQERFRAVTRSYYRGAAGALMVYDITRRSTYNHLSSWLTDARNLTNPNTVIILIGNKADLEAQRDVTYEEAKQFAEENGLLFLEASAKTGENVEDAFLEAAKKIYQNIQDGSLDLNAAESGVQHKPSAPQGGRLTSEPQPQREGCGC

SEQ ID NO: 70606 - protein, 181 aa, Homo sapiens
  Payload ID: 14009
  Gene Symbol: RAB14
  Gene Name: RAB14, member RAS oncogene family
  ENSP ID: ENSP00000400107
MATAPYNYSYIFKYIIIGDMGVGKSCLLHQFTEKKFMADCPHTIGVEFGTRIIEVSGQKIKLQIWDTAGQERFRAVTRSYYRGAAGALMVYDITRRSTYNHLSSWLTDARNLTNPNTVIILIGNKADLEAQRDVTYEEAKQFAEENGLLFLEASAKTGENVEDAFLEAAKKIYQNIQDGSL

SEQ ID NO: 70607 - protein, 236 aa, Homo sapiens
  Payload ID: 14010
  Gene Symbol: REP15
  Gene Name: RAB15 effector protein
  Uniprot ID: Q6BDI9
  ENSP ID: ENSP00000310335
MGQKASQQLALKDSKEVPVVCEVVSEAIVHAAQKLKEYLGFEYPPSKLCPAANTLNEIFLIHFITFCQEKGVDEWLTTTKMTKHQAFLFGADWIWTFWGSNKQIKLQLAVQTLQMSSPPPVESKPCDLSNPESRVEESSWKKSRFDKLEEFCNLIGEDCLGLFIIFGMPGKPKDIRGVVLDSVKSQMVRSHLPGGKAVAQFVLETEDCVFIKELLRNCLSKKDGLREVGKVYISIL

SEQ ID NO: 70608 - protein, 208 aa, Homo sapiens
  Payload ID: 14011
  Gene Symbol: RAB15
  Gene Name: RAB15, member RAS oncogene family
  Uniprot ID: P59190
  ENSP ID: ENSP00000267512
MAKQYDVLFRLLLIGDSGVGKTCLLCRFTDNEFHSSHISTIGVDFKMKTIEVDGIKVRIQIWDTAGQERYQTITKQYYRRAQGIFLVYDISSERSYQHIMKWVSDVDEVGDATSLPGCGEGASPGKARRGPDGKANASRKLCLPQPWMKTSGTHQKASRRSLLGIRLMRSRNGRWEESKGSSWRRSMAWTSMKQVPAPTSTLKSHSRV

SEQ ID NO: 70609 - protein, 166 aa, Homo sapiens
  Payload ID: 14011
  Gene Symbol: RAB15
  Gene Name: RAB15, member RAS oncogene family
  ENSP ID: ENSP00000433485
MKTIEVDGIKVRIQIWDTAGQERYQTITKQYYRRAQGIFLVYDISSERSYQHIMKWVSDVDEYAPEGVQKILIGNKADEEQKRQVGREQGQQLAKEYGMDFYETSACTNLNIKESFTRLTELVLQAHRKELEGLRMRASNELALAELEEEEGKPEGPANSSKTCWC

SEQ ID NO: 70610 - protein, 212 aa, Homo sapiens
  Payload ID: 14011
  Gene Symbol: RAB15
  Gene Name: RAB15, member RAS oncogene family
  Uniprot ID: P59190
  ENSP ID: ENSP00000434103
MAKQYDVLFRLLLIGDSGVGKTCLLCRFTDNEFHSSHISTIGVDFKMKTIEVDGIKVRIQIWDTAGQERYQTITKQYYRRAQGIFLVYDISSERSYQHIMKWVSDVDEYAPEGVQKILIGNKADEEQKRQVGREQGQQLAKEYGMDFYETSACTNLNIKESFTRLTELVLQAHRKELEGLRMRASNELALAELEEEEGKPEGPANSSKTCWC

SEQ ID NO: 70611 - protein, 150 aa, Homo sapiens
  Payload ID: 14011
  Gene Symbol: RAB15
  Gene Name: RAB15, member RAS oncogene family
  ENSP ID: ENSP00000452195
MKTIEVDGIKVRIQIWDTAGQERYQTITKQYYRRAQGIFLVYDISSERSYQHIMKWVSDVDEYAPEGVQKILIGNKADEEQKRQVGREQGQQLAKEYGMDFYETSACTNLNIKESFTRLTELVLQAHRKELEGLRMRASNELALAELEEE

SEQ ID NO: 70612 - protein, 140 aa, Homo sapiens
  Payload ID: 14011
  Gene Symbol: RAB15
  Gene Name: RAB15, member RAS oncogene family
  ENSP ID: ENSP00000464662
  MOD_RES (1)..(1): Any amino acid
XPRPQLGRNCQPLRLEAVAPEAGVRDKSRGVDFKMKTIEVDGIKVRIQIWDTAGQERYQTITKQYYRRAQGIFLVYDISSERSYQHIMKWVSDVDEVGDATSLPGCGEGASPGKARRGPDGKANASRKLCLPQPWMKTSG

SEQ ID NO: 70613 - protein, 212 aa, Homo sapiens
  Payload ID: 14012
  Gene Symbol: RAB17
  Gene Name: RAB17, member RAS oncogene family
  Uniprot ID: Q9H0T7
  ENSP ID: ENSP00000264601
MAQAHRTPQPRAAPSQPRVFKLVLLGSGSVGKSSLALRYVKNDFKSILPTVGCAFFTKVVDVGATSLKLEIWDTAGQEKYHSVCHLYFRGANAALLVYDITRKDSFLKAQQWLKDLEEELHPGEVLVMLVGNKTDLSQEREVTFQEGKEFADSQKLLFMETSAKLNHQVSEVFNTVAQELLQRSDEEGQALRGDAAVALNKGPARQAKCCAH

SEQ ID NO: 70614 - protein, 52 aa, Homo sapiens
  Payload ID: 14012
  Gene Symbol: RAB17
  Gene Name: RAB17, member RAS oncogene family
  ENSP ID: ENSP00000375858
MAQAHRTPQPRAAPSQPRVFKLVLLGSGSVGKSSLALRYVKNDFKSILPTVG

SEQ ID NO: 70615 - protein, 85 aa, Homo sapiens
  Payload ID: 14012
  Gene Symbol: RAB17
  Gene Name: RAB17, member RAS oncogene family
  Uniprot ID: Q9H0T7
  ENSP ID: ENSP00000386589
MLVGNKTDLSQEREVTFQEGKEFADSQKLLFMETSAKLNHQVSEVFNTVAQELLQRSDEEGQALRGDAAVALNKGPARQAKCCAH

SEQ ID NO: 70616 - protein, 53 aa, Homo sapiens
  Payload ID: 14012
  Gene Symbol: RAB17
  Gene Name: RAB17, member RAS oncogene family
  ENSP ID: ENSP00000386792
MAQMEVVVPGRNGAMTDCGVGPGFPHLGEVAPGKGSWGQWRQFPSMVSRLAMW

SEQ ID NO: 70617 - protein, 54 aa, Homo sapiens
  Payload ID: 14012
  Gene Symbol: RAB17
  Gene Name: RAB17, member RAS oncogene family
  ENSP ID: ENSP00000389332
MAQAHRTPQPRAAPSQPRVFKLVLLGSGSVGKSSLALRCVLHKGGGCGCHLSEA

SEQ ID NO: 70618 - protein, 130 aa, Homo sapiens
  Payload ID: 14012
  Gene Symbol: RAB17
  Gene Name: RAB17, member RAS oncogene family
  ENSP ID: ENSP00000400240
MAQAHRTPQPRAAPSQPRVFKLVLLGSGSVGAFFTKVVDVGATSLKLEIWDTAGQEKYHSVCHLYFRGANAALLVYDITRKDSFLKAQQWLKDLEEELHPGEVLVMLVGNKTDLSQEREVTFQEGKEFAD

SEQ ID NO: 70619 - protein, 140 aa, Homo sapiens
  Payload ID: 14012
  Gene Symbol: RAB17
  Gene Name: RAB17, member RAS oncogene family
  ENSP ID: ENSP00000401495
  MOD_RES (1)..(1): Any amino acid
XFKLVLLGSGSVGAFFTKVVDVGATSLKLEIWDTAGQEKYHSVCHLYFRGANAALLVYDITRKDSFLKAQQWLKDLEEELHPGEVLVMLVGNKTDLSQEREVTFQDEDRVNSCRQVADGETPHTLEAGAGEDPTQGLDRR

SEQ ID NO: 70620 - protein, 206 aa, Homo sapiens
  Payload ID: 14013
  Gene Symbol: RAB18
  Gene Name: RAB18, member RAS oncogene family
  Uniprot ID: Q9NP72
  ENSP ID: ENSP00000349415
MDEDVLTTLKILIIGESGVGKSSLLLRFTDDTFDPELAATIGVDFKVKTISVDGNKAKLAIWDTAGQERFRTLTPSYYRGAQGVILVYDVTRRDTFVKLDNWLNELETYCTRNDIVNMLVGNKIDKENREVDRNEGLKFARKHSMLFIEASAKTCDGVQCAFEELVEKIIQTPGLWESENQNKGVKLSHREEGQGGGACGGYCSVL

SEQ ID NO: 70621 - protein, 161 aa, Homo sapiens
  Payload ID: 14013
  Gene Symbol: RAB18
  Gene Name: RAB18, member RAS oncogene family
  ENSP ID: ENSP00000364960
MDEDVLTTLKILIIGESGVGKSSLLLRFTDDTFDPELAATIVYDVTRRDTFVKLDNWLNELETYCTRNDIVNMLVGNKIDKENREVDRNEGLKFARKHSMLFIEASAKTCDGVQCAFEELVEKIIQTPGLWESENQNKGVKLSHREEGQGGGACGGYCSVL

SEQ ID NO: 70622 - protein, 291 aa, Homo sapiens
  Payload ID: 14013
  Gene Symbol: RAB18
  Gene Name: RAB18, member RAS oncogene family
  ENSP ID: ENSP00000407872
  MOD_RES (1)..(1): Any amino acid
XRLPGSRPLPGPSSLGRSPSCSAEKTPFRGPPLGRQSAVKELDLVTAGKFRFSVRSECFSRGPPLKIKCNCYFSFCHILWRQKISVVLSFFTFSLGKIILTVELSISLLLRFTDDTFDPELAATIGVDFKVKTISVDGNKAKLAIWVTLHQQTANFFLKSQIGNSPILKWAMWQYDTAGQERFRTLTPSYYRGAQGVILVYDVTRRDTFVKLDNWLNELETYCTRNDIVNMLVGNKIDKENREVDRNEGLKFARKHSMLFIEASAKTCDGVQCAFEELVEKIIQTPGLWES

SEQ ID NO: 70623 - protein, 142 aa, Homo sapiens
  Payload ID: 14013
  Gene Symbol: RAB18
  Gene Name: RAB18, member RAS oncogene family
  Uniprot ID: Q9NP72
  ENSP ID: ENSP00000439321
MDEDVLTTLKILIIGESGVGKSSLLLRFTDDTFDPELAATIGVDFKVKTISVDGNKAKLAIWENREVDRNEGLKFARKHSMLFIEASAKTCDGVQCAFEELVEKIIQTPGLWESENQNKGVKLSHREEGQGGGACGGYCSVL

SEQ ID NO: 70624 - protein, 235 aa, Homo sapiens
  Payload ID: 14013
  Gene Symbol: RAB18
  Gene Name: RAB18, member RAS oncogene family
  Uniprot ID: Q9NP72
  ENSP ID: ENSP00000478479
MDEDVLTTLKILIIGESGVGKSSLLLRFTDDTFDPELAATIGVDFKVKTISVDGNKAKLAIWVTLHQQTANFFLKSQIGNSPILKWAMWQYDTAGQERFRTLTPSYYRGAQGVILVYDVTRRDTFVKLDNWLNELETYCTRNDIVNMLVGNKIDKENREVDRNEGLKFARKHSMLFIEASAKTCDGVQCAFEELVEKIIQTPGLWESENQNKGVKLSHREEGQGGGACGGYCSVL

SEQ ID NO: 70625 - protein, 182 aa, Homo sapiens
  Payload ID: 14013
  Gene Symbol: RAB18
  Gene Name: RAB18, member RAS oncogene family
  ENSP ID: ENSP00000483927
MDEDVLTTLKILIIGESGVGKSSLLLRFTDDTFDPELADTAGQERFRTLTPSYYRGAQGVILVYDVTRRDTFVKLDNWLNELETYCTRNDIVNMLVGNKIDKENREVDRNEGLKFARKHSMLFIEASAKTCDGVQCAFEELVEKIIQTPGLWESENQNKGVKLSHREEGQGGGACGGYCSVL

SEQ ID NO: 70626 - protein, 217 aa, Homo sapiens
  Payload ID: 14014
  Gene Symbol: RAB19
  Gene Name: RAB19, member RAS oncogene family
  Uniprot ID: A4D1S5
  ENSP ID: ENSP00000348778
MHFSSSARAADENFDYLFKIILIGDSNVGKTCVVQHFKSGVYTETQQNTIGVDFTVRSLDIDGKKVKMQVWDTAGQERFRTITQSYYRSAHAAIIAYDLTRRSTFESIPHWIHEIEKYGAANVVIMLIGNKCDLWEKRHVLFEDACTLAEKYGLLAVLETSAKESKNIEEVFVLMAKELIARNSLHLYGESALNGLPLDSSPVLMAQGPSEKTHCTC

SEQ ID NO: 70627 - protein, 149 aa, Homo sapiens
  Payload ID: 14014
  Gene Symbol: RAB19
  Gene Name: RAB19, member RAS oncogene family
  ENSP ID: ENSP00000420782
MHFSSSARAADENFDYLFKIILIGDSNVGKTCVVQHFKSGVYTETQQNTIGVDFTVRSLDIDGKKVKMQVWDTAGQERFRTITQSYYRSAHAAIIAYDLTRRSTFESIPHWIHEIEKYGAANVVIMLIGNKCDLWEKRHVLFEDACTLA

SEQ ID NO: 70628 - protein, 217 aa, Homo sapiens; identical to SEQ ID NO: 70626
  Payload ID: 14014
  Gene Symbol: RAB19
  Gene Name: RAB19, member RAS oncogene family
  Uniprot ID: A4D1S5
  ENSP ID: ENSP00000440167

SEQ ID NO: 70629 - protein, 129 aa, Homo sapiens
  Payload ID: 14015
  Gene Symbol: RAB1A
  Gene Name: RAB1A, member RAS oncogene family
  Uniprot ID: P62820
  ENSP ID: ENSP00000381540
MSSMNPEYDYLFKLLLIGDSGVGKSCLLLRFADDTYTESYISTIGVDFKIRTIELDGKTIKLQIEFADSLGIPFLETSAKNATNVEQSFMTMAAEIKKRMGPGATAGGAEKSNVKIQSTPVKQSGGGCC

SEQ ID NO: 70630 - protein, 141 aa, Homo sapiens
  Payload ID: 14015
  Gene Symbol: RAB1A
  Gene Name: RAB1A, member RAS oncogene family
  Uniprot ID: P62820
  ENSP ID: ENSP00000386451
MSSMNPEYDYLFKLLLIGDSGVGKSCLLLRFAESFNNVKQWLQEIDRYASENVNKLLVGNKCDLTTKKVVDYTTAKEFADSLGIPFLETSAKNATNVEQSFMTMAAEIKKRMGPGATAGGAEKSNVKIQSTPVKQSGGGCC

SEQ ID NO: 70631 - protein, 173 aa, Homo sapiens
  Payload ID: 14015
  Gene Symbol: RAB1A
  Gene Name: RAB1A, member RAS oncogene family
  ENSP ID: ENSP00000386672
MSSMNPEYDYLFKLLLIGDSGVGKSCLLLRFAWDTAGQERFRTITSSYYRGAHGIIVVYDVTDQESFNNVKQWLQEIDRYASENVNKLLVGNKCDLTTKKVVDYTTAKEFADSLGIPFLETSAKNATNVEQSFMTMAAEIKKRMGPGATAGGAEKSNVKIQSTPVKQSGGGCC

SEQ ID NO: 70632 - protein, 205 aa, Homo sapiens
  Payload ID: 14015
  Gene Symbol: RAB1A
  Gene Name: RAB1A, member RAS oncogene family
  Uniprot ID: P62820
  ENSP ID: ENSP00000387286
MSSMNPEYDYLFKLLLIGDSGVGKSCLLLRFADDTYTESYISTIGVDFKIRTIELDGKTIKLQIWDTAGQERFRTITSSYYRGAHGIIVVYDVTDQESFNNVKQWLQEIDRYASENVNKLLVGNKCDLTTKKVVDYTTAKEFADSLGIPFLETSAKNATNVEQSFMTMAAEIKKRMGPGATAGGAEKSNVKIQSTPVKQSGGGCC

SEQ ID NO: 70633 - protein, 201 aa, Homo sapiens
  Payload ID: 14016
  Gene Symbol: RAB1B
  Gene Name: RAB1B, member RAS oncogene family
  Uniprot ID: Q9H0U4
  ENSP ID: ENSP00000310226
MNPEYDYLFKLLLIGDSGVGKSCLLLRFADDTYTESYISTIGVDFKIRTIELDGKTIKLQIWDTAGQERFRTITSSYYRGAHGIIVVYDVTDQESYANVKQWLQEIDRYASENVNKLLVGNKSDLTTKKVVDNTTAKEFADSLGIPFLETSAKNATNVEQAFMTMAAEIKKRMGPGAASGGERPNLKIDSTPVKPAGGGCC

SEQ ID NO: 70634 - protein, 169 aa, Homo sapiens
  Payload ID: 14016
  Gene Symbol: RAB1B
  Gene Name: RAB1B, member RAS oncogene family
  ENSP ID: ENSP00000435195
MNPEYDYLFKLLLIGDSGVGKSCLLLRFADDTYTESYISTIGVDFKIRTIELDGKTIKLQIESYANVKQWLQEIDRYASENVNKLLVGNKSDLTTKKVVDNTTAKEFADSLGIPFLETSAKNATNVEQAFMTMAAEIKKRMGPGAASGGERPNLKIDSTPVKPAGGGCC

SEQ ID NO: 70635 - protein, 162 aa, Homo sapiens
  Payload ID: 14016
  Gene Symbol: RAB1B
  Gene Name: RAB1B, member RAS oncogene family
  ENSP ID: ENSP00000477893
MNPEYDYLFKLLLIGDSGVGKSCLLLRFADDTYTESYISTIGVDFKIRTIELDGKTIKLQIWDTAGQERFRTITSSYYRGAHGIIVVYDVTDQESYANVKQGCRRLTAMPARTSISSWWATRATSPPRRWWTTPQPRSLQTLWASPSWRRAPRMPPMSSRRS

SEQ ID NO: 70636 - protein, 234 aa, Homo sapiens
  Payload ID: 14017
  Gene Symbol: RAB20
  Gene Name: RAB20, member RAS oncogene family
  Uniprot ID: Q9NX57
  ENSP ID: ENSP00000267328
MRKPDSKIVLLGDMNVGKTSLLQRYMERRFPDTVSTVGGAFYLKQWRSYNISIWDTAGREQFHGLGSMYCRGAAAIILTYDVNHRQSLVELEDRFLGLTDTASKDCLFAIVGNKVDLTEEGALAGQEKEECSPNMDAGDRVSPRAPKQVQLEDAVALYKKILKYKMLDEQDVPAAEQMCFETSAKTGYNVDLLFETLFDLVVPMILQQRAERPSHTVDISSHKPPKRTRSGCCA

SEQ ID NO: 70637 - protein, 225 aa, Homo sapiens
  Payload ID: 14018
  Gene Symbol: RAB21
  Gene Name: RAB21, member RAS oncogene family
  Uniprot ID: Q9UL25
  ENSP ID: ENSP00000261263
MAAAGGGGGGAAAAGRAYSFKVVLLGEGCVGKTSLVLRYCENKFNDKHITTLQASFLTKKLNIGGKRVNLAIWDTAGQERFHALGPIYYRDSNGAILVYDITDEDSFQKVKNWVKELRKMLGNEICLCIVGNKIDLEKERHVSIQEAESYAESVGAKHYHTSAKQNKGIEELFLDLCKRMIETAQVDERAKGNGSSQPGTARRGVQIIDDEPQAQTSGGGCCSSG

SEQ ID NO: 70638 - protein, 194 aa, Homo sapiens
  Payload ID: 14019
  Gene Symbol: RAB22A
  Gene Name: RAB22A, member RAS oncogene family
  Uniprot ID: Q9UL26
  ENSP ID: ENSP00000244040
MALRELKVCLLGDTGVGKSSIVWRFVEDSFDPNINPTIGASFMTKTVQYQNELHKFLIWDTAGQERFRALAPMYYRGSAAAIIVYDITKEETFSTLKNWVKELRQHGPPNIVVAIAGNKCDLIDVREVMERDAKDYADSIHAIFVETSAKNAININELFIEISRRIPSTDANLPSGGKGFKLRRQPSEPKRSCC

SEQ ID NO: 70639 - protein, 237 aa, Homo sapiens
  Payload ID: 14020
  Gene Symbol: RAB23
  Gene Name: RAB23, member RAS oncogene family
  Uniprot ID: Q9ULC3
  ENSP ID: ENSP00000320413
MLEEDMEVAIKMVVVGNGAVGKSSMIQRYCKGIFTKDYKKTIGVDFLERQIQVNDEDVRLMLWDTAGQEEFDAITKAYYRGAQACVLVFSTTDRESFEAVSSWREKVVAEVGDIPTVLVQNKIDLLDDSCIKNEEAEALAKRLKLRFYRTSVKEDLNVNEVFKYLAEKYLQKLKQQIAEDPELTHSSSNKIGVFNTSGGSHSGQNSGTLNGGDVINLRPNKQRTKKNRNPFSSCSIP

SEQ ID NO: 70640 - protein, 237 aa, Homo sapiens; identical to SEQ ID NO: 70639
  Payload ID: 14020
  Gene Symbol: RAB23
  Gene Name: RAB23, member RAS oncogene family
  Uniprot ID: Q9ULC3
  ENSP ID: ENSP00000417610

SEQ ID NO: 70641 - protein, 174 aa, Homo sapiens
  Payload ID: 14021
  Gene Symbol: RAB24
  Gene Name: RAB24, member RAS oncogene family
  ENSP ID: ENSP00000302085
MAPISSLSLQTIGAAFVAKVMSVGDRTVTLGIWDTAGSERYEAMSRIYYRGAKAAIVCYDLTDSSSFERAKFWVKELRSLEEGCQIYLCGTKSDLLEEDRRRRRVDFHDVQDYADNIKAQLFETSSKTGQSVDELFQKVAEDYVSVAAFQVMTEDKGVDLGQKPNPYFYSCCHH

SEQ ID NO: 70642 - protein, 203 aa, Homo sapiens
  Payload ID: 14021
  Gene Symbol: RAB24
  Gene Name: RAB24, member RAS oncogene family
  Uniprot ID: Q969Q5
  ENSP ID: ENSP00000304376
MSGQRVDVKVVMLGKEYVGKTSLVERYVHDRFLVGPYQNTIGAAFVAKVMSVGDRTVTLGIWDTAGSERYEAMSRIYYRGAKAAIVCYDLTDSSSFERAKFWVKELRSLEEGCQIYLCGTKSDLLEEDRRRRRVDFHDVQDYADNIKAQLFETSSKTGQSVDELFQKVAEDYVSVAAFQVMTEDKGVDLGQKPNPYFYSCCHH

SEQ ID NO: 70643 - protein, 203 aa, Homo sapiens; identical to SEQ ID NO: 70642
  Payload ID: 14021
  Gene Symbol: RAB24
  Gene Name: RAB24, member RAS oncogene family
  Uniprot ID: Q969Q5
  ENSP ID: ENSP00000377235

SEQ ID NO: 70644 - protein, 65 aa, Homo sapiens
  Payload ID: 14021
  Gene Symbol: RAB24
  Gene Name: RAB24, member RAS oncogene family
  ENSP ID: ENSP00000421442
MSGQRVDVKVVMLGKEYVGKTSLVERYVHDRFLVGPYQNTIGAAFVAKVMSVGDRTVTLGIWDTA

SEQ ID NO: 70645 - protein, 213 aa, Homo sapiens
  Payload ID: 14022
  Gene Symbol: RAB25
  Gene Name: RAB25, member RAS oncogene family
  Uniprot ID: P57735
  ENSP ID: ENSP00000354376
MGNGTEEDYNFVFKVVLIGESGVGKTNLLSRFTRNEFSHDSRTTIGVEFSTRTVMLGTAAVKAQIWDTAGLERYRAITSAYYRGAVGALLVFDLTKHQTYAVVERWLKELYDHAEATIVVMLVGNKSDLSQAREVPTEEARMFAENNGLLFLETSALDSTNVELAFETVLKEIFAKVSKQRQNSIRTNAITLGSAQAGQEPGPGEKRACCISL

SEQ ID NO: 70646 - protein, 256 aa, Homo sapiens
  Payload ID: 14022
  Gene Symbol: RAB25
  Gene Name: RAB25, member RAS oncogene family
  ENSP ID: ENSP00000482161
MGNGTEEDYNFVFKVVLIGESGVGKTNLLSRFTRNEFSHDSRTTIGVEFSTRTVMLGTAAVKAQIWDTAGLERYRAITSAYYRGAVGALLVFDLTKHQTYAVVERWLKELYDHAEATIVVMLVGNKSDLSQAREVPTEEARMFAENNGLLFLETSALDSTNVELAFETVLKEIFAKVSKQRQNSIRTNAITLGSARLDRSLAWGEEGLLHQPLTLASTTCPHWLFVPLVPTSAPGPFLALWFQISDCSLFTAPSGS

SEQ ID NO: 70647 - protein, 256 aa, Homo sapiens
  Payload ID: 14023
  Gene Symbol: RAB26
  Gene Name: RAB26, member RAS oncogene family
  Uniprot ID: Q9ULW5
  ENSP ID: ENSP00000210187
MSRKKTPKSKGASTPAASTLPTANGARPARSGTALSGPDAPPNGPLQPGRPSLGGGVDFYDVAFKVMLVGDSGVGKTCLLVRFKDGAFLAGTFISTVGIDFRNKVLDVDGVKVKLQMWDTAGQERFRSVTHAYYRDAHALLLLYDVTNKASFDNIQAWLTEIHEYAQHDVALMLLGNKVDSAHERVVKREDGEKLAKEYGLPFMETSAKTGLNVDLAFTAIAKELKQRSMKAPSEPRFRLHDYVKREGRGASCCRP

SEQ ID NO: 70648 - protein, 190 aa, Homo sapiens
  Payload ID: 14023
  Gene Symbol: RAB26
  Gene Name: RAB26, member RAS oncogene family
  Uniprot ID: Q9ULW5
  ENSP ID: ENSP00000441580
MLVGDSGVGKTCLLVRFKDGAFLAGTFISTVGIDFRNKVLDVDGVKVKLQMWDTAGQERFRSVTHAYYRDAHALLLLYDVTNKASFDNIQAWLTEIHEYAQHDVALMLLGNKVDSAHERVVKREDGEKLAKEYGLPFMETSAKTGLNVDLAFTAIAKELKQRSMKAPSEPRFRLHDYVKREGRGASCCRP

SEQ ID NO: 70649 - protein, 64 aa, Homo sapiens
  Payload ID: 14023
  Gene Symbol: RAB26
  Gene Name: RAB26, member RAS oncogene family
  ENSP ID: ENSP00000454373
MLVGDSGVGKTCLLVRFKDGAFLAGTFISTVGIDFRQGLTLSPWLECSGDHGGLQPPTSGFKPS

SEQ ID NO: 70650 - protein, 136 aa, Homo sapiens
  Payload ID: 14023
  Gene Symbol: RAB26
  Gene Name: RAB26, member RAS oncogene family
  ENSP ID: ENSP00000455675
  MOD_RES (1)..(1): Any amino acid
XKEYGLPFMETSAKTGLNVDLAFTAIANNSPNKQASESPWPHTGRHGKAVFCTGRGAASGQTLPRCSAAPSWARPGEGGLGLAPRTVPNPRKAMSSAAHAQAAKGGRLPTPGTEGFTANHIVHLCVLGAACSRPTL

SEQ ID NO: 70651 - protein, 221 aa, Homo sapiens
  Payload ID: 14024
  Gene Symbol: RAB27A
  Gene Name: RAB27A, member RAS oncogene family
  Uniprot ID: P51159
  ENSP ID: ENSP00000337761
MSDGDYDYLIKFLALGDSGVGKTSVLYQYTDGKFNSKFITTVGIDFREKRVVYRASGPDGATGRGQRIHLQLWDTAGQERFRSLTTAFFRDAMGFLLLFDLTNEQSFLNVRNWISQLQMHAYCENPDIVLCGNKSDLEDQRVVKEEEAIALAEKYGIPYFETSAANGTNISQAIEMLLDLIMKRMERCVDKSWIPEGVVRSNGHASTDQLSEEKEKGACGC

SEQ ID NO: 70652 - protein, 221 aa, Homo sapiens; identical to SEQ ID NO: 70651
  Payload ID: 14024
  Gene Symbol: RAB27A
  Gene Name: RAB27A, member RAS oncogene family
  Uniprot ID: P51159
  ENSP ID: ENSP00000379601

SEQ ID NO: 70653 - protein, 185 aa, Homo sapiens
  Payload ID: 14024
  Gene Symbol: RAB27A
  Gene Name: RAB27A, member RAS oncogene family
  ENSP ID: ENSP00000454695
MSDGDYDYLIKFLALGDSGVGKTSVLYQYTDGKFNSKFITTVGIDFREKRVVYRASGPDGATGRGQRIHLQLWDTAGQERFRSLTTAFFRDAMGFLLLFDLTNEQSFLNVRNWISQLQMHAYCENPDIVLCGNKSDLEDQRVVKEEEAIALAEKYGIPYFETSAANGTNISQAIEMLLDLIMKRM

SEQ ID NO: 70654 - protein, 221 aa, Homo sapiens; identical to SEQ ID NO: 70651
  Payload ID: 14024
  Gene Symbol: RAB27A
  Gene Name: RAB27A, member RAS oncogene family
  Uniprot ID: P51159
  ENSP ID: ENSP00000455012

SEQ ID NO: 70655 - protein, 221 aa, Homo sapiens; identical to SEQ ID NO: 70651
  Payload ID: 14024
  Gene Symbol: RAB27A
  Gene Name: RAB27A, member RAS oncogene family
  Uniprot ID: P51159
  ENSP ID: ENSP00000456059

SEQ ID NO: 70656 - protein, 136 aa, Homo sapiens
  Payload ID: 14024
  Gene Symbol: RAB27A
  Gene Name: RAB27A, member RAS oncogene family
  ENSP ID: ENSP00000456536
MSDGDYDYLIKFLALGDSGVGKTSVLYQYTDGKFNSKFITTVGIDFREKRVVYRASGPDGATGRGQRIHLQLWDTAGQERFRSLTTAFFRDAMGFLLLFDLTNEQSFLNVRNWISQLQMHAYCENPDIVLCGNKSD

SEQ ID NO: 70657 - protein, 71 aa, Homo sapiens
  Payload ID: 14024
  Gene Symbol: RAB27A
  Gene Name: RAB27A, member RAS oncogene family
  ENSP ID: ENSP00000457517
MSDGDYDYLIKFLALGDSGVGKTSVLYQYTDGKFNSKFITTVGIDFREKRVVYRASGPDGATGRGQRIHLQ

SEQ ID NO: 70658 - protein, 95 aa, Homo sapiens
  Payload ID: 14024
  Gene Symbol: RAB27A
  Gene Name: RAB27A, member RAS oncogene family
  ENSP ID: ENSP00000457595
MSDGDYDYLIKFLALGDSGVGKTSVLYQYTDGKFNSKFITTVGIDFREKRVVYRASGPDGATGRGQRIHLQLWDTAGQERFRSLTTAFFRDAMGF

SEQ ID NO: 70659 - protein, 146 aa, Homo sapiens
  Payload ID: 14024
  Gene Symbol: RAB27A
  Gene Name: RAB27A, member RAS oncogene family
  ENSP ID: ENSP00000458127
MSDGDYDYLIKFLALGDSGVGKTSVLYQYTDGKFNSKFITTVGIDFREKRVVYRASGPDGATGRGQRIHLQLWDTAGQERFRSLTTAFFRDAMGFLLLFDLTNEQSFLNVRNWISQLQMHAYCENPDIVLCGNKSDLEDQRVVKEE

SEQ ID NO: 70660 - protein, 218 aa, Homo sapiens
  Payload ID: 14025
  Gene Symbol: RAB27B
  Gene Name: RAB27B, member RAS oncogene family
  Uniprot ID: O00194
  ENSP ID: ENSP00000262094
MTDGDYDYLIKLLALGDSGVGKTTFLYRYTDNKFNPKFITTVGIDFREKRVVYNAQGPNGSSGKAFKVHLQLWDTAGQERFRSLTTAFFRDAMGFLLMFDLTSQQSFLNVRNWMSQLQANAYCENPDIVLIGNKADLPDQREVNERQARELADKYGIPYFETSAATGQNVEKAVETLLDLIMKRMEQCVEKTQIPDTVNGGNSGNLDGEKPPEKKCIC

SEQ ID NO: 70661 - protein, 131 aa, Homo sapiens
  Payload ID: 14025
  Gene Symbol: RAB27B
  Gene Name: RAB27B, member RAS oncogene family
  ENSP ID: ENSP00000465009
  MOD_RES (1)..(1): Any amino acid
XFRDAMGFLLMFDLTSQQSFLNVRNWMSQLQANAYCENPDIVLIGNKADLPDQREVNERQARELADKYGCKLSTLGINKFDEACLSLHQWSCSLFCISLHLKRIHNSFLIAYYTKRLREKSSFVKDFGCII

SEQ ID NO: 70662 - protein, 87 aa, Homo sapiens
  Payload ID: 14025
  Gene Symbol: RAB27B
  Gene Name: RAB27B, member RAS oncogene family
  ENSP ID: ENSP00000468542
MTDGDYDYLIKLLALGDSGVGKTTFLYRYTDNKFNPKFITTVGIDFREKRVVYNAQGPNGSSGKAFKVHLQLWDTAGQERFRSLTTA

SEQ ID NO: 70663 - protein, 220 aa, Homo sapiens
  Payload ID: 14026
  Gene Symbol: RAB28
  Gene Name: RAB28, member RAS oncogene family
  Uniprot ID: P51157
  ENSP ID: ENSP00000288723
MSDSEEESQDRQLKIVVLGDGASGKTSLTTCFAQETFGKQYKQTIGLDFFLRRITLPGNLNVTLQIWDIGGQTIGGKMLDKYIYGAQGVLLVYDITNYQSFENLEDWYTVVKKVSEESETQPLVALVGNKIDLEHMRTIKPEKHLRFCQENGFSSHFVSAKTGDSVFLCFQKVAAEILGIKLNKAEIEQSQRIVRAEIVKYPEEENQHTTSTQSRICSVQ

SEQ ID NO: 70664 - protein, 221 aa, Homo sapiens
  Payload ID: 14026
  Gene Symbol: RAB28
  Gene Name: RAB28, member RAS oncogene family
  Uniprot ID: P51157
  ENSP ID: ENSP00000328551
MSDSEEESQDRQLKIVVLGDGASGKTSLTTCFAQETFGKQYKQTIGLDFFLRRITLPGNLNVTLQIWDIGGQTIGGKMLDKYIYGAQGVLLVYDITNYQSFENLEDWYTVVKKVSEESETQPLVALVGNKIDLEHMRTIKPEKHLRFCQENGFSSHFVSAKTGDSVFLCFQKVAAEILGIKLNKAEIEQSQRVVKADIVNYNQEPMSRTVNPPRSSMCAVQ

SEQ ID NO: 70665 - protein, 204 aa, Homo sapiens
  Payload ID: 14026
  Gene Symbol: RAB28
  Gene Name: RAB28, member RAS oncogene family
  Uniprot ID: P51157
  ENSP ID: ENSP00000340079
MSDSEEESQDRQLKIVVLGDGASGKTSLTTCFAQETFGKQYKQTIGLDFFLRRITLPGNLNVTLQIWDIGGQTIGGKMLDKYIYGAQGVLLVYDITNYQSFENLEDWYTVVKKVSEESETQPLVALVGNKIDLEHMRTIKPEKHLRFCQENGFSSHFVSAKTGDSVFLCFQKVAAEILGIKLNKAEIEQSQGHFIIFISSTNRE

SEQ ID NO: 70666 - protein, 74 aa, Homo sapiens
  Payload ID: 14026
  Gene Symbol: RAB28
  Gene Name: RAB28, member RAS oncogene family
  ENSP ID: ENSP00000422816
  MOD_RES (1)..(1): Any amino acid
XDLEHMRTIKPEKHLRFCQENGFSSHFVSAKTGDSVFLCFQKVAAEILGIKLNKAEIEQSQGHFIIFISSTNRE

SEQ ID NO: 70667 - protein, 95 aa, Homo sapiens
  Payload ID: 14026
  Gene Symbol: RAB28
  Gene Name: RAB28, member RAS oncogene family
  ENSP ID: ENSP00000424043
MSDSEEESQDRQLKIVVLGDGASGKTSLTTCFAQETFGKQYKQTIGLDFFLRRITLPGNLNVTLQIWDIGGQTIGGKMLDKYIYGAQLIWSICEQ

SEQ ID NO: 70668 - protein, 51 aa, Homo sapiens
  Payload ID: 14026
  Gene Symbol: RAB28
  Gene Name: RAB28, member RAS oncogene family
  ENSP ID: ENSP00000424091
  MOD_RES (1)..(1): Any amino acid
XQGVLLVYDITNYQSFENLEDWYTVVKKVSEESETQPLVALVGNKRKQHGL

SEQ ID NO: 70669 - protein, 143 aa, Homo sapiens
  Payload ID: 14026
  Gene Symbol: RAB28
  Gene Name: RAB28, member RAS oncogene family
  ENSP ID: ENSP00000424899
  MOD_RES (1)..(1): Any amino acid
XLDKYIYGAQGVLLVYDITNYQSFENLEDWYTVVKKVSEESETQPLVALVGNKIDLEHMRTIKPEKHLRFCQENGFSSHFVSAKTGDSVFLCFQKVAAEILGIKLNKAEIEQSQRIVRAEIVKYPEEENQHTTSTQSRICSVQ

SEQ ID NO: 70670 - protein, 95 aa, Homo sapiens; identical to SEQ ID NO: 70667
  Payload ID: 14026
  Gene Symbol: RAB28
  Gene Name: RAB28, member RAS oncogene family
  ENSP ID: ENSP00000485808

SEQ ID NO: 70671 - protein, 203 aa, Homo sapiens
  Payload ID: 14027
  Gene Symbol: RAB29
  Gene Name: RAB29, member RAS oncogene family
  Uniprot ID: O14966
  ENSP ID: ENSP00000235932
MGSRDHLFKVLVVGDAAVGKTSLVQRYSQDSFSKHYKSTVGVDFALKVLQWSDYEIVRLQLWDIAGQERFTSMTRLYYRDASACVIMFDVTNATTFSNSQRWKQDLDSKLTLPNGEPVPCLLLANKCDLSPWAVSRDQIDRFSKENGFTGWTETSVKENKNINEAMRVLIEKMMRNSTEDIMSLSTQGDYINLQTKSSSWSCC

SEQ ID NO: 70672 - protein, 203 aa, Homo sapiens; identical to SEQ ID NO: 70671
  Payload ID: 14027
  Gene Symbol: RAB29
  Gene Name: RAB29, member RAS oncogene family
  Uniprot ID: O14966
  ENSP ID: ENSP00000356107

SEQ ID NO: 70673 - protein, 179 aa, Homo sapiens
  Payload ID: 14027
  Gene Symbol: RAB29
  Gene Name: RAB29, member RAS oncogene family
  Uniprot ID: O14966
  ENSP ID: ENSP00000389899
MGSRDHLFKVLVVGDAAVGKTSLVQRYSQDSFSKHYKSTVGGQERFTSMTRLYYRDASACVIMFDVTNATTFSNSQRWKQDLDSKLTLPNGEPVPCLLLANKCDLSPWAVSRDQIDRFSKENGFTGWTETSVKENKNINEAMRVLIEKMMRNSTEDIMSLSTQGDYINLQTKSSSWSCC

SEQ ID NO: 70674 - protein, 203 aa, Homo sapiens; identical to SEQ ID NO: 70671
  Payload ID: 14027
  Gene Symbol: RAB29
  Gene Name: RAB29, member RAS oncogene family
  Uniprot ID: O14966
  ENSP ID: ENSP00000402910

SEQ ID NO: 70675 - protein, 131 aa, Homo sapiens
  Payload ID: 14027
  Gene Symbol: RAB29
  Gene Name: RAB29, member RAS oncogene family
  Uniprot ID: O14966
  ENSP ID: ENSP00000416613
MTRLYYRDASACVIMFDVTNATTFSNSQRWKQDLDSKLTLPNGEPVPCLLLANKCDLSPWAVSRDQIDRFSKENGFTGWTETSVKENKNINEAMRVLIEKMMRNSTEDIMSLSTQGDYINLQTKSSSWSCC

SEQ ID NO: 70676 - protein, 42 aa, Homo sapiens
  Payload ID: 14027
  Gene Symbol: RAB29
  Gene Name: RAB29, member RAS oncogene family
  ENSP ID: ENSP00000431483
MGSRDHLFKVLVVGDAAVGKTSLVQRYSQDSFSKHYKSTVGV

SEQ ID NO: 70677 - protein, 212 aa, Homo sapiens
  Payload ID: 14028
  Gene Symbol: RAB2A
  Gene Name: RAB2A, member RAS oncogene family
  Uniprot ID: P61019
  ENSP ID: ENSP00000262646
MAYAYLFKYIIIGDTGVGKSCLLLQFTDKRFQPVHDLTIGVEFGARMITIDGKQIKLQIWDTAGQESFRSITRSYYRGAAGALLVYDITRRDTFNHLTTWLEDARQHSNSNMVIMLIGNKSDLESRREVKKEEGEAFAREHGLIFMETSAKTASNVEEAFINTAKEIYEKIQEGVFDINNEANGIKIGPQHAATNATHAGNQGGQQAGGGCC

SEQ ID NO: 70678 - protein, 104 aa, Homo sapiens
  Payload ID: 14028
  Gene Symbol: RAB2A
  Gene Name: RAB2A, member RAS oncogene family
  ENSP ID: ENSP00000398054
  MOD_RES (1)..(1): Any amino acid
XRDTFNHLTTWLEDARQHSNSNMVIMLIGNKSDLESRREVKKEEGEAFAREHGLIFMETSAKTASNVEEAFINTAKEIYEKIQEGVFDINNEVYTYKYCWSILI

SEQ ID NO: 70679 - protein, 181 aa, Homo sapiens
  Payload ID: 14028
  Gene Symbol: RAB2A
  Gene Name: RAB2A, member RAS oncogene family
  ENSP ID: ENSP00000431589
MAYAYLFKYIIIGDTGVGKSCLLLQFTDKRFQPVHDLTIGVEFGARMITIDGKQIKLQIWDTAGQESFRSITRSYYRGAAGALLVYDITRRDTFNHLTTWLEDARQHSNSNMVIMLIGNKRHLLIQQKKFMKKFKKESLTLIMRQMALKLALSMLLPMQHMQAIREDSRLGAAAVESVFTV

SEQ ID NO: 70680 - protein, 188 aa, Homo sapiens
  Payload ID: 14028
  Gene Symbol: RAB2A
  Gene Name: RAB2A, member RAS oncogene family
  Uniprot ID: P61019
  ENSP ID: ENSP00000431846
MAYAYLFKYIIIGDTGVEFGARMITIDGKQIKLQIWDTAGQESFRSITRSYYRGAAGALLVYDITRRDTFNHLTTWLEDARQHSNSNMVIMLIGNKSDLESRREVKKEEGEAFAREHGLIFMETSAKTASNVEEAFINTAKEIYEKIQEGVFDINNEANGIKIGPQHAATNATHAGNQGGQQAGGGCC

SEQ ID NO: 70681 - protein, 10 aa, Homo sapiens
  Payload ID: 14028
  Gene Symbol: RAB2A
  Gene Name: RAB2A, member RAS oncogene family
  ENSP ID: ENSP00000432735
MITIDGKQIK

SEQ ID NO: 70682 - protein, 135 aa, Homo sapiens
  Payload ID: 14028
  Gene Symbol: RAB2A
  Gene Name: RAB2A, member RAS oncogene family
  ENSP ID: ENSP00000432855
  MOD_RES (1)..(1): Any amino acid
XFKYIIIGDTGVGKSCLLLQFTDKRFQPVHDLTIGVEFGARMITIDGKQIKLQIWDTGKSKKKHTLPLVSVHWQKKGRGRARILSFHHKVVLQRCSRSFTSLRYYTERYIQPLDNLVRRCPPAFQFQHGHYAYWK

SEQ ID NO: 70683 - protein, 69 aa, Homo sapiens
  Payload ID: 14028
  Gene Symbol: RAB2A
  Gene Name: RAB2A, member RAS oncogene family
  ENSP ID: ENSP00000433875
  MOD_RES (1)..(1): Any amino acid
XVGKSCLLLQFTDKRFQPVHDLTIGTKHLGAQEAETVKSYPAAGAVVLASHLLGWNGHRCRVRCSNDNY

SEQ ID NO: 70684 - protein, 216 aa, Homo sapiens
  Payload ID: 14029
  Gene Symbol: RAB2B
  Gene Name: RAB2B, member RAS oncogene family
  Uniprot ID: Q8WUD1
  ENSP ID: ENSP00000380869
MTYAYLFKYIIIGDTGVGKSCLLLQFTDKRFQPVHDLTIGVEFGARMVNIDGKQIKLQIWDTAGQESFRSITRSYYRGAAGALLVYDITRRETFNHLTSWLEDARQHSSSNMVIMLIGNKSDLESRRDVKREEGEAFAREHGLIFMETSAKTACNVEEAFINTAKEIYRKIQQGLFDVHNEANGIKIGPQQSISTSVGPSASQRNSRDIGSNSGCC

SEQ ID NO: 70685 - protein, 62 aa, Homo sapiens
  Payload ID: 14029
  Gene Symbol: RAB2B
  Gene Name: RAB2B, member RAS oncogene family
  ENSP ID: ENSP00000405441
MTYAYLFKYIIIGDTGVGKSCLLLQFTDKRFQPVHDLTIGVEFGARMVNIDGKQIKLQIWDT

SEQ ID NO: 70686 - protein, 209 aa, Homo sapiens [sequence omitted]

SEQ ID NO: 70687 - protein, 981 aa, Homo sapiens
  Payload ID: 14030
  Gene Symbol: RAB3GAP1
  Gene Name: RAB3 GTPase activating protein subunit 1 (catalytic)
  Uniprot ID: Q15042
  ENSP ID: ENSP00000264158
MAADSEPESEVFEITDFTTASEWERFISKVEEVLNDWKLIGNSLGKPLEKGIFTSGTWEEKSDEISFADFKFSVTHHYLVQESTDKEGKDELLEDVVPQSMQDLLGMNNDFPPRAHCLVRWYGLREFVVIAPAAHSDAVLSESKCNLLLSSVSIALGNTGCQVPLFVQIHHKWRRMYVGECQGPGVRTDFEMVHLRKVPNQYTHLSGLLDIFKSKIGCPLTPLPPVSIAIRFTYVLQDWQQYFWPQQPPDIDALVGGEVGGLEFGKLPFGACEDPISELHLATTWPHLTEGIIVDNDVYSDLDPIQAPHWSVRVRKAENPQCLLGDFVTEFFKICRRKESTDEILGRSAFEEEGKETADITHALSKLTEPASVPIHKLSVSNMVHTAKKKIRKHRGVEESPLNNDVLNTILLFLFPDAVSEKPLDGTTSTDNNNPPSESEDYNLYNQFKSAPSDSLTYKLALCLCMINFYHGGLKGVAHLWQEFVLEMRFRWENNFLIPGLASGPPDLRCCLLHQKLQMLNCCIERKKARDEGKKTSASDVTNIYPGDAGKAGDQLVPDNLKETDKEKGEVGKSWDSWSDSEEEFFECLSDTEELKGNGQESGKKGGPKEMANLRPEGRLYQHGKLTLLHNGEPLYIPVTQEPAPMTEDLLEEQSEVLAKLGTSAEGAHLRARMQSACLLSDMESFKAANPGCSLEDFVRWYSPRDYIEEEVIDEKGNVVLKGELSARMKIPSNMWVEAWETAKPIPARRQRRLFDDTREAEKVLHYLAIQKPADLARHLLPCVIHAAVLKVKEEESLENISSVKKIIKQIISHSSKVLHFPNPEDKKLEEIIHQITNVEALIARARSLKAKFGTEKCEQEEEKEDLERFVSCLLEQPEVLVTGAGRGHAGRIIHKLFVNAQRAAAMTPPEEELKRMGSPEERRQNSVSDFPPPAGREFILRTTVPRPAPYSKALPQRMYSVLTKEDFRLAGAFSSDTSFF

SEQ ID NO: 70688 - protein, 58 aa, Homo sapiens
  Payload ID: 14030
  Gene Symbol: RAB3GAP1
  Gene Name: RAB3 GTPase activating protein subunit 1 (catalytic)
  ENSP ID: ENSP00000400761
MAADSEPESEVFEITDFTTASEWERFISKVEEVLNDWKLIGNSLGKPLEKVRSICWCL

SEQ ID NO: 70689 - protein, 988 aa, Homo sapiens
  Payload ID: 14030
  Gene Symbol: RAB3GAP1
  Gene Name: RAB3 GTPase activating protein subunit 1 (catalytic)
  Uniprot ID: Q15042
  ENSP ID: ENSP00000411418
MAADSEPESEVFEITDFTTASEWERFISKVEEVLNDWKLIGNSLGKPLEKGIFTSGTWEEKSDEISFADFKFSVTHHYLVQESTDKEGKDELLEDVVPQSMQDLLGMNNDFPPRAHCLVRWYGLREFVVIAPAAHSDAVLSESKCNLLLSSVSIALGNTGCQVPLFVQIHHKWRRMYVGECQGPGVRTDFEMVHLRKVPNQYTHLSGLLDIFKSKIGCPLTPLPPVSIAIRFTYVLQDWQQYFWPQQPPDIDALVGGEVGGLEFGKLPFGACEDPISELHLATTWPHLTEGIIVDNDVYSDLDPIQAPHWSVRVRKAENPQCLLGDFVTEFFKICRRKESTDEILGRSAFEEEGKETADITHALSKLTEPASVPIHKLSVSNMVHTAKKKIRKHRGVEESPLNNDVLNTILLFLFPDAVSEKPLDGTTSTDNNNPPSESEDYNLYNQFKSAPSDSLTYKLALCLCMINFYHGGLKGVAHLWQEFVLEMRFRWENNFLIPGLASGPPDLRCCLLHQKLQMLNCCIERKKARDEGKKTSASDVTNIYPGDAGKAGDQLVPDNLKETDKEKGEVGKSWDSWSDSEEEFFECLSDTEELKGNGQESGKKGGPKEMANLRPEGRLYQHGKLTLLHNGEPLYIPVTQEPAPMTEDLLEEQSEVLAKLGTSAEGAHLRARMQSACLLSDMESFKAANPGCSLEDFVRWYSPRDYIEEEVIDEKGNVVLKGELSARMKIPSNMWVEAWETAKPIPARRQRRLFDDTREAEKVLHYLAIQKPADLARHLLPCVIHAAVLKVKEEESLENISSVKKIIKQIISHSSKVLHFPNPEDKKLEEIIHQITNVEALIARARSLKAKFGTEKCEQEEEKEDLERFVSCLLEQPEVLVTGAGRGHAGRIIHKLFVNAQRLTESSDEAAAMTPPEEELKRMGSPEERRQNSVSDFPPPAGREFILRTTVPRPAPYSKALPQRMYSVLTKEDFRLAGAFSSDTSFF

SEQ ID NO: 70690 - protein, 935 aa, Homo sapiens
  Payload ID: 14030
  Gene Symbol: RAB3GAP1
  Gene Name: RAB3 GTPase activating protein subunit 1 (catalytic)
  Uniprot ID: Q15042
  ENSP ID: ENSP00000444306
MFSLISGIFTSGTWEEKSDEISFADFKFSVTHHYLVQESTDKEGKDELLEDVVPQSMQDLLGMNNDFPPRAHCLVRWYGLREFVVIAPAAHSDAVLSESKCNLLLSSVSIALGNTGCQVPLFVQIHHKWRRMYVGECQGPGVRTDFEMVHLRKVPNQYTHLSGLLDIFKSKIGCPLTPLPPVSIAIRFTYVLQDWQQYFWPQQPPDIDALVGGEVGGLEFGKLPFGACEDPISELHLATTWPHLTEGIIVDNDVYSDLDPIQAPHWSVRVRKAENPQCLLGDFVTEFFKICRRKESTDEILGRSAFEEEGKETADITHALSKLTEPASVPIHKLSVSNMVHTAKKKIRKHRGVEESPLNNDVLNTILLFLFPDAVSEKPLDGTTSTDNNNPPSESEDYNLYNQFKSAPSDSLTYKLALCLCMINFYHGGLKGVAHLWQEFVLEMRFRWENNFLIPGLASGPPDLRCCLLHQKLQMLNCCIERKKARDEGKKTSASDVTNIYPGDAGKAGDQLVPDNLKETDKEKGEVGKSWDSWSDSEEEFFECLSDTEELKGNGQESGKKGGPKEMANLRPEGRLYQHGKLTLLHNGEPLYIPVTQEPAPMTEDLLEEQSEVLAKLGTSAEGAHLRARMQSACLLSDMESFKAANPGCSLEDFVRWYSPRDYIEEEVIDEKGNVVLKGELSARMKIPSNMWVEAWETAKPIPARRQRRLFDDTREAEKVLHYLAIQKPADLARHLLPCVIHAAVLKVKEEESLENISSVKKIIKQIISHSSKVLHFPNPEDKKLEEIIHQITNVEALIARARSLKAKFGTEKCEQEEEKEDLERFVSCLLEQPEVLVTGAGRGHAGRIIHKLFVNAQRAAAMTPPEEELKRMGSPEERRQNSVSDFPPPAGREFILRTTVPRPAPYSKALPQRMYSVLTKEDFRLAVKIIDGDV

SEQ ID NO: 70691 - protein, 1393 aa, Homo sapiens
  Payload ID: 14031
  Gene Symbol: RAB3GAP2
  Gene Name: RAB3 GTPase activating protein subunit 2 (non-catalytic)
  Uniprot ID: Q9H2M9
  ENSP ID: ENSP00000351832
MACSIVQFCYFQDLQAARDFLFPHLREEILSGALRRDPSKSTDWEDDGWGAWEENEPQEPEEEGNTCKTQKTSWLQDCVLSLSPTNDLMVIAREQKAVFLVPKWKYSDKGKEEMQFAVGWSGSLNVEEGECVTSALCIPLASQKRSSTGRPDWTCIVVGFTSGYVRFYTENGVLLLAQLLNEDPVLQLKCRTYEIPRHPGVTEQNEELSILYPAAIVTIDGFSLFQSLRACRNQVAKAAASGNENIQPPPLAYKKWGLQDIDTIIDHASVGIMTLSPFDQMKTASNIGGFNAAIKNSPPAMSQYITVGSNPFTGFFYALEGSTQPLLSHVALAVASKLTSALFNAASGWLGWKSKHEEEAVQKQKPKVEPATPLAVRFGLPDSRRHGESICLSPCNTLAAVTDDFGRVILLDVARGIAIRMWKGYRDAQIGWIQTVEDLHERVPEKADFSPFGNSQGPSRVAQFLVIYAPRRGILEVWSTQQGPRVGAFNVGKHCRLLYPGYKIMGLNNVTSQSWQPQTYQICLVDPVSGSVKTVNVPFHLALSDKKSERAKDMHLVKKLAALLKTKSPNLDLVETEIKELILDIKYPATKKQALESILASERLPFSCLRNITQTLMDTLKSQELESVDEGLLQFCANKLKLLQLYESVSQLNSLDFHLDTPFSDNDLALLLRLDEKELLKLQALLEKYKQENTRTNVRFSDDKDGVLPVKTFLEYLEYEKDVLNIKKISEEEYVALGSFFFWKCLHGESSTEDMCHTLESAGLSPQLLLSLLLSVWLSKEKDILDKPQSICCLHTMLSLLSKMKVAIDETWDSQSVSPWWQQMRTACIQSENNGAALLSAHVGHSVAAQISNNMTEKKFSQTVLGADSEALTDSWEALSLDTEYWKLLLKQLEDCLILQTLLHSKGNTQTSKVSSLQAEPLPRLSVKKLLEGGKGGIADSVAKWIFKQDFSPEVLKLANEERDAENPDEPKEGVNRSFLEVSEMEMDLGAIPDLLHLAYEQFPCSLELDVLHAHCCWEYVVQWNKDPEEARFFVRSIEHLKQIFNAHVQNGIALMMWNTFLVKRFSAATYLMDKVGKSPKDRLCRRDVGMSDTAMTSFLGSCLDLLQILMEADVSRDEIQVPVLDTEDAWLSVEGPISIVELALEQKHIHYPLVEHHSILCSILYAVMRFSLKTVKPLSLFDSKGKNAFFKDLTSIQLLPSGEMDPNFISVRQQFLLKVVSAAVQAQHSATKVKDPTEEATPTPFGKDQDWPALAVDLAHHLQVSEDVVRRHYVGELYNYGVDHLGEEAILQVHDKEVLASQLLVLTGQRLAHALLHTQTKEGMELLARLPPTLCTWLKAMDPQDLQNTEVPIATTAKLVNKVIELLPEKHGQYGLALHLIEAVEAISLPSL

SEQ ID NO: 70692 - protein, 172 aa, Homo sapiens
  Payload ID: 14031
  Gene Symbol: RAB3GAP2
  Gene Name: RAB3 GTPase activating protein subunit 2 (non-catalytic)
  ENSP ID: ENSP00000418560
  MOD_RES (1)..(1): Any amino acid
XAEAEERERDSRKWLRGDHLSFAQLCIQSVVECVTSALCIPLASQKRSSTGRPDWTCIVVGFTSGYVRFYTENGVLLLAQLLNEDPVLQLKCRTYEIPRHPGVTEQNEELSILYPAAIVTIDGFSLFQSLRACRNQVAKAAASGNENIQPPPLAYKKWGLQDIDTIIDHASV

SEQ ID NO: 70693 - protein, 82 aa, Homo sapiens
  Payload ID: 14031
  Gene Symbol: RAB3GAP2
  Gene Name: RAB3 GTPase activating protein subunit 2 (non-catalytic)
  ENSP ID: ENSP00000420156
MACSIVQFCYFQDLQAARDFLFPHLREEILSGALRRDPSKSTDWEDDGWGAWEENEPQEPGMCNQCSMYPTSKPKEEFHWAS

SEQ ID NO: 70694 - protein, 203 aa, Homo sapiens
  Payload ID: 14032
  Gene Symbol: RAB30
  Gene Name: RAB30, member RAS oncogene family
  Uniprot ID: Q15771
  ENSP ID: ENSP00000260056
MSMEDYDFLFKIVLIGNAGVGKTCLVRRFTQGLFPPGQGATIGVDFMIKTVEINGEKVKLQIWDTAGQERFRSITQSYYRSANALILTYDITCEESFRCLPEWLREIEQYASNKVITVLVGNKIDLAERREVSQQRAEEFSEAQDMYYLETSAKESDNVEKLFLDLACRLISEARQNTLVNNVSSPLPGEGKSISYLTCCNFN

SEQ ID NO: 70695 - protein, 139 aa, Homo sapiens
  Payload ID: 14032
  Gene Symbol: RAB30
  Gene Name: RAB30, member RAS oncogene family
  ENSP ID: ENSP00000432193
MSMEDYDFLFKIVLIGNAGVGKTCLVRRFTQGLFPPGQGATIGVDFMIKTVEINGEKVKLQIWDTAGQERFRSITQSYYRSANALILTYDITCEESFRCLPEWLREIEQYASNKVITVLVGNKIDLAERREVSQQRAEE

SEQ ID NO: 70696 - protein, 114 aa, Homo sapiens
  Payload ID: 14032
  Gene Symbol: RAB30
  Gene Name: RAB30, member RAS oncogene family
  ENSP ID: ENSP00000432336
MSMEDYDFLFKIVLIGNAGVGKTCLVRRFTQGLFPPGQGATIGVDFMIKTVEINGEKVKLQIWDTAGQERFRSITQSYYRSANALILTYDITCEESFRCLPEWLREIEQYASNK

SEQ ID NO: 70697 - protein, 94 aa, Homo sapiens
  Payload ID: 14032
  Gene Symbol: RAB30
  Gene Name: RAB30, member RAS oncogene family
  ENSP ID: ENSP00000433243
MSMEDYDFLFKIVLIGNAGVGKTCLVRRFTQLQIWDTAGQERFRSITQSYYRSANALILTYDITCEESFRCLPEWLREIEQYASNKVITVLVGK

SEQ ID NO: 70698 - protein, 167 aa, Homo sapiens
  Payload ID: 14032
  Gene Symbol: RAB30
  Gene Name: RAB30, member RAS oncogene family
  ENSP ID: ENSP00000433832
YCRDIHTKYSSEWGAGALEDKSRLQIWDTAGQERFRSITQSYYRSANALILTYDITCEESFRCLPEWLREIEQYASNKVITVLVGNKIDLAERREVSQQRAEEFSEAQDMYYLETSAKESDNVEKLFLDLACRLISEARQNTLVNNVSSPLPGEGKSISYLTCCNFN

SEQ ID NO: 70699 - protein, 55 aa, Homo sapiens
  Payload ID: 14032
  Gene Symbol: RAB30
  Gene Name: RAB30, member RAS oncogene family
  ENSP ID: ENSP00000434106
MSMEDYDFLFKIVLIGNAGVGKTCLVRRFTQGLFPPGQGATIGVDFMIKTVEING

SEQ ID NO: 70700 - protein, 59 aa, Homo sapiens
  Payload ID: 14032
  Gene Symbol: RAB30
  Gene Name: RAB30, member RAS oncogene family
  ENSP ID: ENSP00000434528
MSMEDYDFLFKIVLIGNAGVGKTCLVRRFTQGLFPPGQGATIGVDFMIKTVEINGEKVK

SEQ ID NO: 70701 - protein, 168 aa, Homo sapiens
  Payload ID: 14032
  Gene Symbol: RAB30
  Gene Name: RAB30, member RAS oncogene family
  ENSP ID: ENSP00000434953
MSMEDYDFLFKIVLIGNAGVGKTCLVRRFTQGLFPPGQGATIGVDFMIKTVEINGEKVKLQIWDTAGQERFRSITQSYYRSANALILTYDITCEESFRCLPEWLREIEQYASNKVITVLVGNKIDLAERREVSQQRAEEFSEAQDMYYLETSAKESDNVEKLFLDLAC

SEQ ID NO: 70702 - protein, 164 aa, Homo sapiens
  Payload ID: 14032
  Gene Symbol: RAB30
  Gene Name: RAB30, member RAS oncogene family
  Uniprot ID: Q15771
  ENSP ID: ENSP00000434974
MSMEDYDFLFKIVLIGNAGVGKTCLVRRFTQGLFPPGQGATIGVDFMIKTVEINGEKVKLQIWDTAGQERFRSITQSYYRSANALILTYDITCEESFRCLPEWLREIEQYASNKVITVLATRLTWLKGERFPSSELKNSQKLRTCIIWRPQPRNLIMWRNSSLT

SEQ ID NO: 70703 - protein, 203 aa, Homo sapiens; identical to SEQ ID NO: 70694
  Payload ID: 14032
  Gene Symbol: RAB30
  Gene Name: RAB30, member RAS oncogene family
  Uniprot ID: Q15771
  ENSP ID: ENSP00000435089

SEQ ID NO: 70704 - protein, 203 aa, Homo sapiens; identical to SEQ ID NO: 70694
  Payload ID: 14032
  Gene Symbol: RAB30
  Gene Name: RAB30, member RAS oncogene family
  Uniprot ID: Q15771
  ENSP ID: ENSP00000435189

SEQ ID NO: 70705 - protein, 100 aa, Homo sapiens
  Payload ID: 14032
  Gene Symbol: RAB30
  Gene Name: RAB30, member RAS oncogene family
  ENSP ID: ENSP00000435542
MSMEDYDFLFKIVLIGNAGVGKTCLVRRFTQGLFPPGQGATIGVDFMIKTVEINGEKVKLQIWDTAGQERFRSITQSYYRSANALILTYDITCEESFRCL

SEQ ID NO: 70706 - protein, 37 aa, Homo sapiens
  Payload ID: 14032
  Gene Symbol: RAB30
  Gene Name: RAB30, member RAS oncogene family
  ENSP ID: ENSP00000436282
MSMEDYDFLFKIVLIGNAGVGKTCLVRRFTQLQIWDT

SEQ ID NO: 70707 - protein, 75 aa, Homo sapiens
  Payload ID: 14032
  Gene Symbol: RAB30
  Gene Name: RAB30, member RAS oncogene family
  ENSP ID: ENSP00000436587
MIKTVEINGEKVKLQIWDTAGQERFRSITQSYYRSANALILTYDITCEESFRCLPEWLREIEQYASNKVITVLVG

SEQ ID NO: 70708 - protein, 122 aa, Homo sapiens
  Payload ID: 14032
  Gene Symbol: RAB30
  Gene Name: RAB30, member RAS oncogene family
  ENSP ID: ENSP00000437235
MSMEDYDFLFKIVLIGNAGVGKTCLVRRFTQGLFPPGQGATIGVDFMIKTVEINGEKVKLQIWDTAGQERFRSITQSYYRSANALILTYDITCEESFRCLPEWLREIEQYASNKVITVLVGK

SEQ ID NO: 70709 - protein, 203 aa, Homo sapiens; identical to SEQ ID NO: 70694
  Payload ID: 14032
  Gene Symbol: RAB30
  Gene Name: RAB30, member RAS oncogene family
  Uniprot ID: Q15771
  ENSP ID: ENSP00000478702

SEQ ID NO: 70710 - protein, 195 aa, Homo sapiens
  Payload ID: 14033
  Gene Symbol: RAB31
  Gene Name: RAB31, member RAS oncogene family
  Uniprot ID: Q13636
  ENSP ID: ENSP00000461945
MMAIRELKVCLLGDTGVGKSSIVCRFVQDHFDHNISPTIGASFMTKTVPCGNELHKFLIWDTAGQERFHSLAPMYYRGSAAAVIVYDITKQDSFYTLKKWVKELKEHGPENIVMAIAGNKCDLSDIREVPLKDAKEYAESIGAIVVETSAKNAINIEELFQGISRQIPPLDPHENGNNGTIKVEKPTMQASRRCC

SEQ ID NO: 70711 - protein, 25 aa, Homo sapiens
  Payload ID: 14033
  Gene Symbol: RAB31
  Gene Name: RAB31, member RAS oncogene family
  ENSP ID: ENSP00000462164
MMAIRELKVCLLGGIFYDQNCALWK

SEQ ID NO: 70712 - protein, 59 aa, Homo sapiens
  Payload ID: 14033
  Gene Symbol: RAB31
  Gene Name: RAB31, member RAS oncogene family
  ENSP ID: ENSP00000462561
MMAIRELKVCLLGGLMEPICSLTKCHSIGRTLDKDKEGCIPVAPPGGRWRYVLRTPATG

SEQ ID NO: 70713 - protein, 74 aa, Homo sapiens
  Payload ID: 14033
  Gene Symbol: RAB31
  Gene Name: RAB31, member RAS oncogene family
  ENSP ID: ENSP00000464046
MMAIRELKVCLLGDTGVGKSSIVCRFVQDHFDHNISPTIGASFMTKTVPCGNELHKFLIWDTAGQERGGSPEGC

SEQ ID NO: 70714 - protein, 225 aa, Homo sapiens
  Payload ID: 14034
  Gene Symbol: RAB32
  Gene Name: RAB32, member RAS oncogene family
  Uniprot ID: Q13637
  ENSP ID: ENSP00000356465
MAGGGAGDPGLGAAAAPAPETREHLFKVLVIGELGVGKTSIIKRYVHQLFSQHYRATIGVDFALKVLNWDSRTLVRLQLWDIAGQERFGNMTRVYYKEAVGAFVVFDISRSSTFEAVLKWKSDLDSKVHLPNGSPIPAVLLANKCDQNKDSSQSPSQVDQFCKEHGFAGWFETSAKDNINIEEAARFLVEKILVNHQSFPNEENDVDKIKLDQETLRAENKSQCC

SEQ ID NO: 70715 - protein, 237 aa, Homo sapiens
  Payload ID: 14035
  Gene Symbol: RAB33A
  Gene Name: RAB33A, member RAS oncogene family
  Uniprot ID: Q14088
  ENSP ID: ENSP00000257017
MAQPILGHGSLQPASAAGLASLELDSSLDQYVQIRIFKIIVIGDSNVGKTCLTFRFCGGTFPDKTEATIGVDFREKTVEIEGEKIKVQVWDTAGQERFRKSMVEHYYRNVHAVVFVYDVTKMTSFTNLKMWIQECNGHAVPPLVPKVLVGNKCDLREQIQVPSNLALKFADAHNMLLFETSAKDPKESQNVESIFMCLACRLKAQKSLLYRDAERQQGKVQKLEFPQEANSKTSCPC

SEQ ID NO: 70716 - protein, 229 aa, Homo sapiens
  Payload ID: 14036
  Gene Symbol: RAB33B
  Gene Name: RAB33B, member RAS oncogene family
  Uniprot ID: Q9H082
  ENSP ID: ENSP00000306496
MAEEMESSLEASFSSSGAVSGASGFLPPARSRIFKIIVIGDSNVGKTCLTYRFCAGRFPDRTEATIGVDFRERAVEIDGERIKIQLWDTAGQERFRKSMVQHYYRNVHAVVFVYDMTNMASFHSLPSWIEECKQHLLANDIPRILVGNKCDLRSAIQVPTDLAQKFADTHSMPLFETSAKNPNDNDHVEAIFMTLAHKLKSHKPLMLSQPPDNGIILKPEPKPAMTCWC

SEQ ID NO: 70717 - protein, 210 aa, Homo sapiens
  Payload ID: 14037
  Gene Symbol: RAB34
  Gene Name: RAB34, member RAS oncogene family
  ENSP ID: ENSP00000226259
MNILAPVRRDRVLAELPQCLRKEAALHGHKDFHPRVTCACQEHRTGTVGFKISKVIVVGDLSVGKTCLINRFCKDTFDKNYKATIGVDFEMERFEVLGIPFSLQLWDTAGQERFKCIASTYYRGAQAIIIVFNLNDVASLEHTKQWLADALKENDPSSVLLFLVGSKKDLSTPAQYALMEKDALQVAQEMKAEYWAVSSLTGENVREFFF

SEQ ID NO: 70718 - protein, 259 aa, Homo sapiens
  Payload ID: 14037
  Gene Symbol: RAB34
  Gene Name: RAB34, member RAS oncogene family
  Uniprot ID: Q9BZG1
  ENSP ID: ENSP00000301043
MNILAPVRRDRVLAELPQCLRKEAALHGHKDFHPRVTCACQEHRTGTVGFKISKVIVVGDLSVGKTCLINRFCKDTFDKNYKATIGVDFEMERFEVLGIPFSLQLWDTAGQERFKCIASTYYRGAQAIIIVFNLNDVASLEHTKQWLADALKENDPSSVLLFLVGSKKDLSTPAQYALMEKDALQVAQEMKAEYWAVSSLTGENVREFFFRVAALTFEANVLAELEKSGARRIGDVVRINSDDSNLYLTASKKKPTCCP

SEQ ID NO: 70719 - protein, 260 aa, Homo sapiens
  Payload ID: 14037
  Gene Symbol: RAB34
  Gene Name: RAB34, member RAS oncogene family
  ENSP ID: ENSP00000378663
MNILAPVRRDRVLAELPQCLRKEAALHGHKDFHPRVTCACQEHRTGTVGRFKISKVIVVGDLSVGKTCLINRFCKDTFDKNYKATIGVDFEMERFEVLGIPFSLQLWDTAGQERFKCIASTYYRGAQAIIIVFNLNDVASLEHTKQWLADALKENDPSSVLLFLVGSKKDLSTPAQYALMEKDALQVAQEMKAEYWAVSSLTGENVREFFFRVAALTFEANVLAELEKSGARRIGDVVRINSDDSNLYLTASKKKPTCCP

SEQ ID NO: 70720 - protein, 251 aa, Homo sapiens
  Payload ID: 14037
  Gene Symbol: RAB34
  Gene Name: RAB34, member RAS oncogene family
  Uniprot ID: Q9BZG1
  ENSP ID: ENSP00000378664
MNILAPVRRDRVLAELPQCLRKEAALHGHKDFHPRVTCACQEHRTGTVGFKISKVIVVGDLSVGKTCLINRFCKDTFDKNYKATIGVDFEMERFEVLGIPFSLQLWDTAGQERFKCIASTYYRGAQAIIIVFNLNDVASLEHTKQWLADALKENDPSSVLLFLTPAQYALMEKDALQVAQEMKAEYWAVSSLTGENVREFFFRVAALTFEANVLAELEKSGARRIGDVVRINSDDSNLYLTASKKKPTCCP

SEQ ID NO: 70721 - protein, 259 aa, Homo sapiens; identical to SEQ ID NO: 70718
  Payload ID: 14037
  Gene Symbol: RAB34
  Gene Name: RAB34, member RAS oncogene family
  Uniprot ID: Q9BZG1
  ENSP ID: ENSP00000378666

SEQ ID NO: 70722 - protein, 251 aa, Homo sapiens; identical to SEQ ID NO: 70720
  Payload ID: 14037
  Gene Symbol: RAB34
  Gene Name: RAB34, member RAS oncogene family
  Uniprot ID: Q9BZG1
  ENSP ID: ENSP00000391048

SEQ ID NO: 70723 - protein, 171 aa, Homo sapiens
  Payload ID: 14037
  Gene Symbol: RAB34
  Gene Name: RAB34, member RAS oncogene family
  ENSP ID: ENSP00000397499
MNILAPVRRDRVLAELPQCLRKEAALHGHKDFHPRVTCACQEHRTGTVGFKISKVIVVGDLSVGKTCLINRFCKDTFDKNYKATIGVDFEMERFEVLGIPFSLQLWDTAGQERFKCIASTYYRGAQAIIIVFNLNDVASLEHTKFQEGSEYPCSVCADGERRPPGGPGDEG

SEQ ID NO: 70724 - protein, 210 aa, Homo sapiens; identical to SEQ ID NO: 70717
  Payload ID: 14037
  Gene Symbol: RAB34
  Gene Name: RAB34, member RAS oncogene family
  ENSP ID: ENSP00000398706

SEQ ID NO: 70725 - protein, 259 aa, Homo sapiens; identical to SEQ ID NO: 70718
  Payload ID: 14037
  Gene Symbol: RAB34
  Gene Name: RAB34, member RAS oncogene family
  Uniprot ID: Q9BZG1
  ENSP ID: ENSP00000404180

SEQ ID NO: 70726 - protein, 258 aa, Homo sapiens
  Payload ID: 14037
  Gene Symbol: RAB34
  Gene Name: RAB34, member RAS oncogene family
  ENSP ID: ENSP00000407953
MSHLPGLELRREAPPLLGPLLSPFPLPAGSWHRQMLRSSLRFPITNSAGFKISKVIVVGDLSVGKTCLINRFCKDTFDKNYKATIGVDFEMERFEVLGIPFSLQLWDTAGQERFKCIASTYYRGAQAIIIVFNLNDVASLEHTKQWLADALKENDPSSVLLFLVGSKKDLSTPAQYALMEKDALQVAQEMKAEYWAVSSLTGENVREFFFRVAALTFEANVLAELEKSGARRIGDVVRINSDDSNLYLTASKKKPTCC

SEQ ID NO: 70727 - protein, 237 aa, Homo sapiens
  Payload ID: 14037
  Gene Symbol: RAB34
  Gene Name: RAB34, member RAS oncogene family
  Uniprot ID: Q9BZG1
  ENSP ID: ENSP00000410279
MNILAPVRRDRVLAELPQCLRKEAALHGHKDFHPRVTCACQEHRTGTVGFCKDTFDKNYKATIGVDFEMERFEVLGIPFSLQLWDTAGQERFKCIASTYYRGAQAIIIVFNLNDVASLEHTKQWLADALKENDPSSVLLFLVGSKKDLSTPAQYALMEKDALQVAQEMKAEYWAVSSLTGENVREFFFRVAALTFEANVLAELEKSGARRIGDVVRINSDDSNLYLTASKKKPTCCP

SEQ ID NO: 70728 - protein, 268 aa, Homo sapiens
  Payload ID: 14037
  Gene Symbol: RAB34
  Gene Name: RAB34, member RAS oncogene family
  ENSP ID: ENSP00000413156
MSHLPGLELRREAPPLLGPLLSPFPLPAGSWHRQMLRSSLRFPITNSAGAPCKAAGRMNILAPVRRDRVLAELPQCLRKEAALHGHKDFHPRVTCACQEHRTGTVGRFKISKVIVVGDLSVGKTCLINRFCKDTFDKNYKATIGVDFEMERFEVLGIPFSLQLWDTAGQERFKCIASTYYRGAQAIIIVFNLNDVASLEHTKQWLADALKENDPSSVLLFLVGSKKDLSTPAQYALMEKDALQVAQEMKTVQRLPSPRALCHPHSSRA

SEQ ID NO: 70729 - protein, 156 aa, Homo sapiens
  Payload ID: 14037
  Gene Symbol: RAB34
  Gene Name: RAB34, member RAS oncogene family
  ENSP ID: ENSP00000463488
  MOD_RES (1)..(1): Any amino acid
XMLRSSLRFPITNSAGLQLWDTAGQERFKCIASTYYRGAQAIIIVFNLNDVASLEHTKQWLADALKENDPSSVLLFLTPAQYALMEKDALQVAQEMKAEYWAVSSLTGENVREFFFRVAALTFEANVLAELEKSGARRIGDVVRINSDDSNLYLTA

SEQ ID NO: 70730 - protein, 149 aa, Homo sapiens
  Payload ID: 14037
  Gene Symbol: RAB34
  Gene Name: RAB34, member RAS oncogene family
  ENSP ID: ENSP00000464723
MNILAPVRRDRVLAELPQCLRKEAALHGHKDFHPRVTCACQEHRTGTVGFKISKVIVVGDLSVGKTCLINRFCKDTFDKNYKATIGVDFEMERFEVLGIPFSLQLWDTAGQERFKCIASTYYRGAQAIIIVFNLNDVASLEHTKQWLAD

SEQ ID NO: 70731 - protein, 51 aa, Homo sapiens
  Payload ID: 14037
  Gene Symbol: RAB34
  Gene Name: RAB34, member RAS oncogene family
  ENSP ID: ENSP00000465352
MNILAPVRRDRVLAELPQCLRKEAALHGHKDFHPRVTCACQEHRTGTVGRF

SEQ ID NO: 70732 - protein, 48 aa, Homo sapiens
  Payload ID: 14037
  Gene Symbol: RAB34
  Gene Name: RAB34, member RAS oncogene family
  ENSP ID: ENSP00000476427
MNILAPVRRDRVLAELPQCLRKEAALHGHKDFHPRVTCACQEHRTGTV

SEQ ID NO: 70733 - protein, 211 aa, Homo sapiens
  Payload ID: 14037
  Gene Symbol: RAB34
  Gene Name: RAB34, member RAS oncogene family
  ENSP ID: ENSP00000487160
MNILAPVRRDRVLAELPQCLRKEAALHGHKDFHPRVTCACQEHRTGTVGRFKISKVIVVGDLSVGKTCLINRFCKDTFDKNYKATIGVDFEMERFEVLGIPFSLQLWDTAGQERFKCIASTYYRGAQAIIIVFNLNDVASLEHTKQWLADALKENDPSSVLLFLVGSKKDLSTPAQYALMEKDALQVAQEMKTVQRLPSPRALCHPHSSRA

SEQ ID NO: 70734 - protein, 201 aa, Homo sapiens
  Payload ID: 14038
  Gene Symbol: RAB35
  Gene Name: RAB35, member RAS oncogene family
  Uniprot ID: Q15286
  ENSP ID: ENSP00000229340
MARDYDHLFKLLIIGDSGVGKSSLLLRFADNTFSGSYITTIGVDFKIRTVEINGEKVKLQIWDTAGQERFRTITSTYYRGTHGVIVVYDVTSAESFVNVKRWLHEINQNCDDVCRILVGNKNDDPERKVVETEDAYKFAGQMGIQLFETSAKENVNVEEMFNCITELVLRAKKDNLAKQQQQQQNDVVKLTKNSKRKKRCC

SEQ ID NO: 70735 - protein, 152 aa, Homo sapiens
  Payload ID: 14038
  Gene Symbol: RAB35
  Gene Name: RAB35, member RAS oncogene family
  Uniprot ID: Q15286
  ENSP ID: ENSP00000441883
MARDYDHLFKLLIIGDSGVGKSSLLLRFADNTFSGSYITTIGVDFKIRTVEINGEKVKLQIWDTAGQERFRTITSTYYRGTHGVIVVYDVTSAESFVNVKRWLHEINQNCDDVCRILDVQLHHGAGPPSKERQPGKTAAATTERCGEAHEEQ

SEQ ID NO: 70736 - protein, 147 aa, Homo sapiens
  Payload ID: 14038
  Gene Symbol: RAB35
  Gene Name: RAB35, member RAS oncogene family
  ENSP ID: ENSP00000442555
MARDYDHLFKLLIIGDSGDLGAACLTQGRRKRSGIEWKRCSWCVAAQGGGKSIEKCGQEQFTVAFCRQHFLRQLHHHDRSGFQDPDRGDQRGEGEAADLGHSGAGALPHHHLHVLSGDPRGHCGLRRHQCRVLCQRQAVASRNQPEL

SEQ ID NO: 70737 - protein, 185 aa, Homo sapiens
  Payload ID: 14038
  Gene Symbol: RAB35
  Gene Name: RAB35, member RAS oncogene family
  ENSP ID: ENSP00000443994
MARDYDHLFKLLIIGDSGVGKSSLLLRFADNTFSGSYITTIGVDFKIRTVEINGEKVKLQIWDTAGQERFRTITSTAESFVNVKRWLHEINQNCDDVCRILVGNKNDDPERKVVETEDAYKFAGQMGIQLFETSAKENVNVEEMFNCITELVLRAKKDNLAKQQQQQQNDVVKLTKNSKRKKRCC

SEQ ID NO: 70738 - protein, 333 aa, Homo sapiens
  Payload ID: 14039
  Gene Symbol: RAB36
  Gene Name: RAB36, member RAS oncogene family
  Uniprot ID: O95755
  ENSP ID: ENSP00000263116
MVIAGASWMLGRAAASPTQTPPTTSTIRVARRSRVALVAMVIAAAGSGGPGRAEPQLSQPSLDCGRMRSSLTPLGPPVSRDRVIASFPKWYTPEACLQLREHFHGQVSAACQRRNTGTVGLKLSKVVVVGDLYVGKTSLIHRFCKNVFDRDYKATIGVDFEIERFEIAGIPYSLQIWDTAGQEKFKCIASAYYRGAQVIITAFDLTDVQTLEHTRQWLEDALRENEAGSCFIFLVGTKKDLLSGAACEQAEADAVHLAREMQAEYWSVSAKTGENVKAFFSRVAALAFEQSVLQDLERQSSARLQVGNGDLIQMEGSPPETQESKRPSSLGCC

SEQ ID NO: 70739 - protein, 311 aa, Homo sapiens
  Payload ID: 14039
  Gene Symbol: RAB36
  Gene Name: RAB36, member RAS oncogene family
  Uniprot ID: O95755
  ENSP ID: ENSP00000343494
MVIAGASWMLGRAAASPTQTPPTTSTIRVARRSRVALVAMVIAAAGSGGPGRAEPQLSQPSLDCGRMRSSLTPLGPPVSRDRVIASFPKWYTPEACLQLREHFHGQVSAACQRRNTGTVGFCKNVFDRDYKATIGVDFEIERFEIAGIPYSLQIWDTAGQEKFKCIASAYYRGAQVIITAFDLTDVQTLEHTRQWLEDALRENEAGSCFIFLVGTKKDLLSGAACEQAEADAVHLAREMQAEYWSVSAKTGENVKAFFSRVAALAFEQSVLQDLERQSSARLQVGNGDLIQMEGSPPETQESKRPSSLGCC

SEQ ID NO: 70740 - protein, 132 aa, Homo sapiens
  Payload ID: 14039
  Gene Symbol: RAB36
  Gene Name: RAB36, member RAS oncogene family
  ENSP ID: ENSP00000397594
  MOD_RES (1)..(1): Any amino acid
XVSAACQRRNTGTVGLKLSKVVVVGDLYVGKTSLIHRFCKNVFDRDYKATIGVDFEIERFEIAGIPYSLQIWDTAGQEKFKCIASAYYRGAQGEQHATSGLNCMQQRGPCRAPQWESRVLCTGTSFLSSKTH

SEQ ID NO: 70741 - protein, 182 aa, Homo sapiens
  Payload ID: 14040
  Gene Symbol: RAB37
  Gene Name: RAB37, member RAS oncogene family
  ENSP ID: ENSP00000341354
MDLQRPDSYQGGAGPDFNDHVLHKTILVGDSGVGKTSLLVQFDQGKFIPGSFSATVGIGFTNKVVTVDGVRVKLQIWDTAGQERFRSVTHAYYRDAQALLLLYDITNKSSFDNIRAWLTEIHEYAQRDVVIMLLGNKADMSSERVIRSEDGETLAREYGVPFLETSAKTGMNVELAFLAIAK

SEQ ID NO: 70742 - protein, 189 aa, Homo sapiens
  Payload ID: 14040
  Gene Symbol: RAB37
  Gene Name: RAB37, member RAS oncogene family
  ENSP ID: ENSP00000376387
MTGTPGAVATRDGEAPERSPPCSPSYDLTGKVMLLGDTGVGKTCFLIQFKDGAFLSGTFIATVGIDFRNKVVTVDGVRVKLQIWDTAGQERFRSVTHAYYRDAQALLLLYDITNKSSFDNIRAWLTEIHEYAQRDVVIMLLGNKADMSSERVIRSEDGETLAREYGVPFLETSAKTGMNVELAFLAIAK

SEQ ID NO: 70743 - protein, 186 aa, Homo sapiens
  Payload ID: 14040
  Gene Symbol: RAB37
  Gene Name: RAB37, member RAS oncogene family
  Uniprot ID: Q96AX2
  ENSP ID: ENSP00000376388
MTGTPGAVATRDGEAPERSPPCSPSYDLTGKNKVVTVDGVRVKLQIWDTAGQERFRSVTHAYYRDAQALLLLYDITNKSSFDNIRAWLTEIHEYAQRDVVIMLLGNKADMSSERVIRSEDGETLAREYGVPFLETSAKTGMNVELAFLAIAKELKYRAGHQADEPSFQIRDYVESQKKRSSCCSFM

SEQ ID NO: 70744 - protein, 223 aa, Homo sapiens
  Payload ID: 14040
  Gene Symbol: RAB37
  Gene Name: RAB37, member RAS oncogene family
  Uniprot ID: Q96AX2
  ENSP ID: ENSP00000376389
MTGTPGAVATRDGEAPERSPPCSPSYDLTGKVMLLGDTGVGKTCFLIQFKDGAFLSGTFIATVGIDFRNKVVTVDGVRVKLQIWDTAGQERFRSVTHAYYRDAQALLLLYDITNKSSFDNIRAWLTEIHEYAQRDVVIMLLGNKADMSSERVIRSEDGETLAREYGVPFLETSAKTGMNVELAFLAIAKELKYRAGHQADEPSFQIRDYVESQKKRSSCCSFM

SEQ ID NO: 70745 - protein, 228 aa, Homo sapiens
  Payload ID: 14040
  Gene Symbol: RAB37
  Gene Name: RAB37, member RAS oncogene family
  Uniprot ID: Q96AX2
  ENSP ID: ENSP00000376390
MWLMSEAHGAEPVLLREAARPFTQTLRLCVPSGNSKVMLLGDTGVGKTCFLIQFKDGAFLSGTFIATVGIDFRNKVVTVDGVRVKLQIWDTAGQERFRSVTHAYYRDAQALLLLYDITNKSSFDNIRAWLTEIHEYAQRDVVIMLLGNKADMSSERVIRSEDGETLAREYGVPFLETSAKTGMNVELAFLAIAKELKYRAGHQADEPSFQIRDYVESQKKRSSCCSFM

SEQ ID NO: 70746 - protein, 191 aa, Homo sapiens
  Payload ID: 14040
  Gene Symbol: RAB37
  Gene Name: RAB37, member RAS oncogene family
  ENSP ID: ENSP00000376391
MWLMSEAHGAEPVLLREAARPFTQTLRLCVPSGNSKNKVVTVDGVRVKLQIWDTAGQERFRSVTHAYYRDAQALLLLYDITNKSSFDNIRAWLTEIHEYAQRDVVIMLLGNKADMSSERVIRSEDGETLAREYGVPFLETSAKTGMNVELAFLAIAKELKYRAGHQADEPSFQIRDYVESQKKRSSCCSFM

SEQ ID NO: 70747 - protein, 216 aa, Homo sapiens
  Payload ID: 14040
  Gene Symbol: RAB37
  Gene Name: RAB37, member RAS oncogene family
  Uniprot ID: Q96AX2
  ENSP ID: ENSP00000383934
MDLQRPDSYQGGAGPDFNDHVLHKTILVGDSGVGKTSLLVQFDQGKFIPGSFSATVGIGFTNKVVTVDGVRVKLQIWDTAGQERFRSVTHAYYRDAQALLLLYDITNKSSFDNIRAWLTEIHEYAQRDVVIMLLGNKADMSSERVIRSEDGETLAREYGVPFLETSAKTGMNVELAFLAIAKELKYRAGHQADEPSFQIRDYVESQKKRSSCCSFM

SEQ ID NO: 70748 - protein, 196 aa, Homo sapiens
  Payload ID: 14040
  Gene Symbol: RAB37
  Gene Name: RAB37, member RAS oncogene family
  ENSP ID: ENSP00000432086
MCCKVMLLGDTGVGKTCFLIQFKDGAFLSGTFIATVGIDFRNKVVTVDGVRVKLQIWDTAGQERFRSVTHAYYRDAQALLLLYDITNKSSFDNIRAWLTEIHEYAQRDVVIMLLGNKADMSSERVIRSEDGETLAREYGVPFLETSAKTGMNVELAFLAIAKELKYRAGHQADEPSFQIRDYVESQKKRSSCCSFM

SEQ ID NO: 70749 - protein, 223 aa, Homo sapiens; identical to SEQ ID NO: 70744
  Payload ID: 14040
  Gene Symbol: RAB37
  Gene Name: RAB37, member RAS oncogene family
  Uniprot ID: Q96AX2
  ENSP ID: ENSP00000436563

SEQ ID NO: 70750 - protein, 223 aa, Homo sapiens; identical to SEQ ID NO: 70744
  Payload ID: 14040
  Gene Symbol: RAB37
  Gene Name: RAB37, member RAS oncogene family
  Uniprot ID: Q96AX2
  ENSP ID: ENSP00000483155

SEQ ID NO: 70751 - protein, 211 aa, Homo sapiens
  Payload ID: 14041
  Gene Symbol: RAB38
  Gene Name: RAB38, member RAS oncogene family
  Uniprot ID: P57729
  ENSP ID: ENSP00000243662
MQAPHKEHLYKLLVIGDLGVGKTSIIKRYVHQNFSSHYRATIGVDFALKVLHWDPETVVRLQLWDIAGQERFGNMTRVYYREAMGAFIVFDVTRPATFEAVAKWKNDLDSKLSLPNGKPVSVVLLANKCDQGKDVLMNNGLKMDQFCKEHGFVGWFETSAKENINIDEASRCLVKHILANECDLMESIEPDVVKPHLTSTKVASCSGCAKS

SEQ ID NO: 70752 - protein, 210 aa, Homo sapiens
  Payload ID: 14041
  Gene Symbol: RAB38
  Gene Name: RAB38, member RAS oncogene family
  ENSP ID: ENSP00000433317
  MOD_RES (1)..(1): Any amino acid
XQAALPWSGTARLAGRQDAGPAQGAPVQVAGDWRPGRGEDQYHQALRAPELLFALPGHNRRGLRAQGQERFGNMTRVYYREAMGAFIVFDVTRPATFEAVAKWKNDLDSKLSLPNGKPVSVVLLANKCDQGKDVLMNNGLKMDQFCKEHGFVGWFETSAKENINIDEASRCLVKHILANECDLMESIEPDVVKPHLTSTKVASCSGCAKS

SEQ ID NO: 70753 - protein, 89 aa, Homo sapiens
  Payload ID: 14041
  Gene Symbol: RAB38
  Gene Name: RAB38, member RAS oncogene family
  ENSP ID: ENSP00000435340
  MOD_RES (1)..(1): Any amino acid
XRLRFPGQARHVWPAARMQAPHKEHLYKLLVIGDLGVGKTSIIKRYVHQNFSSHYRATIGVDFALKVLHWDPETVVRLQLWDIAGKYKH

SEQ ID NO: 70754 - protein, 217 aa, Homo sapiens
  Payload ID: 14042
  Gene Symbol: RAB39A
  Gene Name: RAB39A, member RAS oncogene family
  Uniprot ID: Q14964
  ENSP ID: ENSP00000322594
METIWIYQFRLIVIGDSTVGKSCLLHRFTQGRFPGLRSPACDPTVGVDFFSRLLEIEPGKRIKLQLWDTAGQERFRSITRSYYRNSVGGFLVFDITNRRSFEHVKDWLEEAKMYVQPFRIVFLLVGHKCDLASQRQVTREEAEKLSADCGMKYIETSAKDATNVEESFTILTRDIYELIKKGEICIQDGWEGVKSGFVPNTVHSSEEAVKPRKECFC

SEQ ID NO: 70755 - protein, 213 aa, Homo sapiens
  Payload ID: 14043
  Gene Symbol: RAB39B
  Gene Name: RAB39B, member RAS oncogene family
  Uniprot ID: Q96DA2
  ENSP ID: ENSP00000358466
MEAIWLYQFRLIVIGDSTVGKSCLIRRFTEGRFAQVSDPTVGVDFFSRLVEIEPGKRIKLQIWDTAGQERFRSITRAYYRNSVGGLLLFDITNRRSFQNVHEWLEETKVHVQPYQIVFVLVGHKCDLDTQRQVTRHEAEKLAAAYGMKYIETSARDAINVEKAFTDLTRDIYELVKRGEITIQEGWEGVKSGFVPNVVHSSEEVVKSERRCLC

SEQ ID NO: 70756 - protein, 460 aa, Homo sapiens
  Payload ID: 14044
  Gene Symbol: RAB3IP
  Gene Name: RAB3A interacting protein
  Uniprot ID: Q96QF0
  ENSP ID: ENSP00000247833
MANDPLEGFHEVNLASPTSPDLLGVYESGTQEQTTSPSVIYRPHPSALSSVPIQANALDVSELPTQPVYSSPRRLNCAEISSISFHVTDPAPCSTSGVTAGLTKLTTRKDNYNAEREFLQGATITEACDGSDDIFGLSTDSLSRLRSPSVLEVREKGYERLKEELAKAQRELKLKDEECERLSKVRDQLGQELEELTASLFEEAHKMVREANIKQATAEKQLKEAQGKIDVLQAEVAALKTLVLSSSPTSPTQEPLPGGKTPFKKGHTRNKSTSSAMSGSHQDLSVIQPIVKDCKEADLSLYNEFRLWKDEPTMDRTCPFLDKIYQEDIFPCLTFSKSELASAVLEAVENNTLSIEPVGLQPIRFVKASAVECGGPKKCALTGQSKSCKHRIKLGDSSNYYYISPFCRYRITSVCNFFTYIRYIQQGLVKQQDVDQMFWEVMQLRKEMSLAKLGYFKEEL

SEQ ID NO: 70757 - protein, 411 aa, Homo sapiens
  Payload ID: 14044
  Gene Symbol: RAB3IP
  Gene Name: RAB3A interacting protein
  Uniprot ID: Q96QF0
  ENSP ID: ENSP00000355381
MGLKKMKGLSYDEAFAMANDPLEGFHEVNLASPTSPDLLGVYESGTQEQTTSPSVIYRPHPSALSSVPIQANALDVSELPTQPVYSSPRRLNCAEISSISFHVTDPAPCSTSGVTAGLTKLTTRKDNYNAEREFLQGATITEACDGSDDIFGLSTDSLSRLRSPSVLEVREKGYERLKEELAKAQRELKLKDEECERLSKVRDQLGQELEELTASLFEEAHKMVREANIKQATAEKQLKEAQGKIDVLQAEVAALKTLVLSSSPTSPTQEPLPGGKTPFKKGHTRNKSTSSAMSGSHQDLSVIQPIVKDCKEADLSLYNEFRLWKDEPTMDRTCPFLDKIYQEDIFPCLTFSKSELASAVLEAVENNTLSIEPVGLQPIRFVKASAVECGGPKSLLYVTFLHTFDTFSRDS

SEQ ID NO: 70758 - protein, 369 aa, Homo sapiens
  Payload ID: 14044
  Gene Symbol: RAB3IP
  Gene Name: RAB3A interacting protein
  ENSP ID: ENSP00000368086
MGLKKMKGLSYDEAFAMANDPLEGFHEVNLASPTSPDLLGVYESGTQEQTTSPSVIYRPHPSALSSVPIQANALDVSELPTQPVYSSPRRLNCAEISSISFHVTDPAPCSTSGVTAGLTKLTTRKDNYNAEREFLQGATITEACDGSDDIFGLSTDSLSRLRSPSVLEVREKGYERLKEELAKAQRELKLKDEECERLSKVRDQLGQELEELTASLFEEAHKMVREANIKQATAEKQLKEAQGKIDVLQAEVAALKTLVLSSSPTSPTQEPLPGGKTPFKKGHTRNKSTSSAMSGSHQDLSVIQPIVKDCKEADLSLYNEFRLWKDEPTMDRTCPFLDKIYQEDIFPCLTFSKIGFSCSGGCGKQYSKH

SEQ ID NO: 70759 - protein, 315 aa, Homo sapiens
  Payload ID: 14044
  Gene Symbol: RAB3IP
  Gene Name: RAB3A interacting protein
  Uniprot ID: Q96QF0
  ENSP ID: ENSP00000368092
MANDPLEGFHEVNLASPTSPDLLGVYESGTQEQTTSPSVIYRPHPSALSSVPIQANALDVSELPTQPVYSSPRRLNCAEISSISFHVTDPAPCSTSGVTAGLTKLTTRKDNYNAEREFLQGATITEACDGSDDIFGLSTDSLSRLRSPSVLEVREKGYERLKEELAKAQRELKLKDEECERLSKVRDQLGQELEELTASLFEEAHKMVREANIKQATAEKQLKEAQGKIDVLQAEVAALKTLVLSSSPTSPTQEPLPGGKTPFKKGHTRNKSTSSAMSGSHQDLSVIQPIVKDCKEVTHQGLSPLTLLILVSSHH

SEQ ID NO: 70760 - protein, 395 aa, Homo sapiens
  Payload ID: 14044
  Gene Symbol: RAB3IP
  Gene Name: RAB3A interacting protein
  Uniprot ID: Q96QF0
  ENSP ID: ENSP00000419216
MANDPLEGFHEVNLASPTSPDLLGVYESGTQEQTTSPSVIYRPHPSALSSVPIQANALDVSELPTQPVYSSPRRLNCAEISSISFHVTDPAPCSTSGVTAGLTKLTTRKDNYNAEREFLQGATITEACDGSDDIFGLSTDSLSRLRSPSVLEVREKGYERLKEELAKAQRELKLKDEECERLSKVRDQLGQELEELTASLFEEAHKMVREANIKQATAEKQLKEAQGKIDVLQAEVAALKTLVLSSSPTSPTQEPLPGGKTPFKKGHTRNKSTSSAMSGSHQDLSVIQPIVKDCKEADLSLYNEFRLWKDEPTMDRTCPFLDKIYQEDIFPCLTFSKSELASAVLEAVENNTLSIEPVGLQPIRFVKASAVECGGPKSLLYVTFLHTFDTFSRDS

SEQ ID NO: 70761 - protein, 189 aa, Homo sapiens
  Payload ID: 14044
  Gene Symbol: RAB3IP
  Gene Name: RAB3A interacting protein
  ENSP ID: ENSP00000432634
  MOD_RES (1)..(1): Any amino acid
XNKSTSSAMSGSHQDLSVIQPIVKDCKEADLSLYNEFRLWKDEPTMDRTCPFLDKIYQEDIFPCLTFSKSELASAVLEAVENNTLSIEPVGLQPIRFVKASAVECGGPKKCALTGQSKSCKHRIKLGDSSNYYYISPFCRYRVSDLTMNFNKACFDMGHLTIHDIFSIWPRSLLYVTFLHTFDTFSRDS

SEQ ID NO: 70762 - protein, 304 aa, Homo sapiens
  Payload ID: 14044
  Gene Symbol: RAB3IP
  Gene Name: RAB3A interacting protein
  Uniprot ID: Q96QF0
  ENSP ID: ENSP00000436304
MANDPLEGFHEVNLASPTSPDLLGVYESGTQEQTTSPSVIYRPHPSALSSVPIQANALDVSELPTQPVYSSPRRLNCAEISSISFHVTDPAPCSTSGVTAGLTKLTTRKDNYNAEREFLQGATITEACDGSDDIFGLSTDSLSRLRSPSVLEVREKGYERLKEELAKAQRELKLKDEECERLSKVRDQLGQELEELTASLFEEAHKMVREANIKQATAEKQLKEAQGKIDVLQAEVAALKTLVLSSSPTSPTQEPLPGGKTPFKKGHTRNKSTSSAMSGSHQDLSVIQPIVKDCKEKMCSHWPE

SEQ ID NO: 70763 - protein, 476 aa, Homo sapiens
  Payload ID: 14044
  Gene Symbol: RAB3IP
  Gene Name: RAB3A interacting protein
  Uniprot ID: Q96QF0
  ENSP ID: ENSP00000447300
MGLKKMKGLSYDEAFAMANDPLEGFHEVNLASPTSPDLLGVYESGTQEQTTSPSVIYRPHPSALSSVPIQANALDVSELPTQPVYSSPRRLNCAEISSISFHVTDPAPCSTSGVTAGLTKLTTRKDNYNAEREFLQGATITEACDGSDDIFGLSTDSLSRLRSPSVLEVREKGYERLKEELAKAQRELKLKDEECERLSKVRDQLGQELEELTASLFEEAHKMVREANIKQATAEKQLKEAQGKIDVLQAEVAALKTLVLSSSPTSPTQEPLPGGKTPFKKGHTRNKSTSSAMSGSHQDLSVIQPIVKDCKEADLSLYNEFRLWKDEPTMDRTCPFLDKIYQEDIFPCLTFSKSELASAVLEAVENNTLSIEPVGLQPIRFVKASAVECGGPKKCALTGQSKSCKHRIKLGDSSNYYYISPFCRYRITSVCNFFTYIRYIQQGLVKQQDVDQMFWEVMQLRKEMSLAKLGYFKEEL

SEQ ID NO: 70764 - protein, 21 aa, Homo sapiens
  Payload ID: 14044
  Gene Symbol: RAB3IP
  Gene Name: RAB3A interacting protein
  ENSP ID: ENSP00000447499
  MOD_RES (1)..(1): Any amino acid
XGYLMMRLLLWLMIPWKASMK

SEQ ID NO: 70765 - protein, 254 aa, Homo sapiens
  Payload ID: 14044
  Gene Symbol: RAB3IP
  Gene Name: RAB3A interacting protein
  Uniprot ID: Q96QF0
  ENSP ID: ENSP00000448027
MVREANIKQATAEKQLKEAQGKIDVLQAEVAALKTLVLSSSPTSPTQEPLPGGKTPFKKGHTRNKSTSSAMSGSHQDLSVIQPIVKDCKEADLSLYNEFRLWKDEPTMDRTCPFLDKIYQEDIFPCLTFSKSELASAVLEAVENNTLSIEPVGLQPIRFVKASAVECGGPKKCALTGQSKSCKHRIKLGDSSNYYYISPFCRYRITSVCNFFTYIRYIQQGLVKQQDVDQMFWEVMQLRKEMSLAKLGYFKEEL

SEQ ID NO: 70766 - protein, 167 aa, Homo sapiens
  Payload ID: 14044
  Gene Symbol: RAB3IP
  Gene Name: RAB3A interacting protein
  ENSP ID: ENSP00000448102
MMLADLSLYNEFRLWKDEPTMDRTCPFLDKIYQEDIFPCLTFSKSELASAVLEAVENNTLSIEPVGLQPIRFVKASAVECGGPKKCALTGQSKSCKHRIKLGDSSNYYYISPFCRYRITSVCNFFTYIRYIQQGLVKQQDVDQMFWEVMQLRKEMSLAKLGYFKEEL

SEQ ID NO: 70767 - protein, 237 aa, Homo sapiens
  Payload ID: 14044
  Gene Symbol: RAB3IP
  Gene Name: RAB3A interacting protein
  ENSP ID: ENSP00000448218
  MOD_RES (1)..(1): Any amino acid
XYNAEREFLQGATITEACDGSDDIFGLSTDSLSRLRSPSVLEVREKGYERLKEELAKAQRELKLKDEECERLSKVRDQLGQELEELTASLFEEAHKMVREANIKQATAEKQLKEAQGKIDVLQAEVAALKTLVLSSSPTSPTQEPLPGGKTPFKKGHTRNKSTSSAMSGSHQDLSVIQPIVKDCKEADLSLYNEFRLWKDEPTMDRTCPFLDKIYQEDIFPCLTFSKSEKMCSHWPE

SEQ ID NO: 70768 - protein, 91 aa, Homo sapiens
  Payload ID: 14044
  Gene Symbol: RAB3IP
  Gene Name: RAB3A interacting protein
  ENSP ID: ENSP00000448688
ITEACDGSDDIFGLSTDSLSRLRSPSVLEVREKGYERLKEELAKAQRELKLKDEECERLSKVRDQLGQELEELTASLFEVGLFTSWPTATS

SEQ ID NO: 70769 - protein, 254 aa, Homo sapiens; identical to SEQ ID NO: 70765
  Payload ID: 14044
  Gene Symbol: RAB3IP
  Gene Name: RAB3A interacting protein
  Uniprot ID: Q96QF0
  ENSP ID: ENSP00000448773

SEQ ID NO: 70770 - protein, 320 aa, Homo sapiens
  Payload ID: 14044
  Gene Symbol: RAB3IP
  Gene Name: RAB3A interacting protein
  Uniprot ID: Q96QF0
  ENSP ID: ENSP00000448944
MGLKKMKGLSYDEAFAMANDPLEGFHEVNLASPTSPDLLGVYESGTQEQTTSPSVIYRPHPSALSSVPIQANALDVSELPTQPVYSSPRRLNCAEISSISFHVTDPAPCSTSGVTAGLTKLTTRKDNYNAEREFLQGATITEACDGSDDIFGLSTDSLSRLRSPSVLEVREKGYERLKEELAKAQRELKLKDEECERLSKVRDQLGQELEELTASLFEEAHKMVREANIKQATAEKQLKEAQGKIDVLQAEVAALKTLVLSSSPTSPTQEPLPGGKTPFKKGHTRNKSTSSAMSGSHQDLSVIQPIVKDCKEKMCSHWPE

SEQ ID NO: 70771 - protein, 165 aa, Homo sapiens
  Payload ID: 14044
  Gene Symbol: RAB3IP
  Gene Name: RAB3A interacting protein
  ENSP ID: ENSP00000450355
MANDPLEGFHEVNLASPTSPDLLGVYESGTQEQTTSPSVIYRPHPSALSSVPIQANALDVSELPTQPVYSSPRRLNCAEISSISFHVTDPAPCSTSGVTAGLTKLTTRKDNYNAEREFLQGATITEACDGSDDIFGLSTDSLSRLRSPSVLEVREKGYERLKEEL

SEQ ID NO: 70772 - protein, 356 aa, Homo sapiens
  Payload ID: 14045
  Gene Symbol: RAB3IL1
  Gene Name: RAB3A interacting protein (rabin3)-like 1
  Uniprot ID: Q8TBN0
  ENSP ID: ENSP00000301773
MDSSEEHAGCPARGTCPVFLAMSAGTVRYAPSGLCPVLEGNLREEPWGTDSPPQPDQGLPPPLAAVPVPWKSTDPCQGHRESPGALVETSAGEEAQGQEGPAAAQLDVLRLRSSSMEIREKGSEFLKEELHRAQKELKLKDEECERLSKVREQLEQELEELTASLFEEAHKMVREANMKQAASEKQLKEARGKVDTILFAEFQAWRESPTLDKTCPFLERVYREDVGPCLDFTMQELSVLVRAAVEDNTLTIEPVASQTLPTVKVAEVDCSSTNTCALSGLTRTCRHRIRLGDSKSHYYISPSSRARITAVCNFFTYIRYIQQGLVRQDAEPMFWEIMRLRKEMSLAKLGFFPQEA

SEQ ID NO: 70773 - protein, 382 aa, Homo sapiens
  Payload ID: 14045
  Gene Symbol: RAB3IL1
  Gene Name: RAB3A interacting protein (rabin3)-like 1
  Uniprot ID: Q8TBN0
  ENSP ID: ENSP00000378313
MWSGPPQPDQGLPPPLAAVPVPWKSTDPCQGHRESPGALVETSAGEEAQGQEGPAAAQLDVLRLRSSSMEIREKGSEFLKEELHRAQKELKLKDEECERLSKVREQLEQELEELTASLFEEAHKMVREANMKQAASEKQLKEARGKIDMLQAEVTALKTLVITSTPASPNRELHPQLLSPTKAGPRKGHSRHKSTSSTLCPAVCPAAGHTLTPDREGKEVDTILFAEFQAWRESPTLDKTCPFLERVYREDVGPCLDFTMQELSVLVRAAVEDNTLTIEPVASQTLPTVKVAEVDCSSTNTCALSGLTRTCRHRIRLGDSKSHYYISPSSRARITAVCNFFTYIRYIQQGLVRQDAEPMFWEIMRLRKEMSLAKLGFFPQEA

SEQ ID NO: 70774 - protein, 65 aa, Homo sapiens
  Payload ID: 14045
  Gene Symbol: RAB3IL1
  Gene Name: RAB3A interacting protein (rabin3)-like 1
  ENSP ID: ENSP00000432745
QQGLVRQDAHSARPGSPLLHQPLLAAESSPEPVWPDPLTEPMFWEIMRLRKEMSLAKLGFFPQEA

SEQ ID NO: 70775 - protein, 263 aa, Homo sapiens
  Payload ID: 14045
  Gene Symbol: RAB3IL1
  Gene Name: RAB3A interacting protein (rabin3)-like 1
  ENSP ID: ENSP00000435444
MDSSEEHAGCPARGTCPVFLAMSAGTVRYAPSGLCPVLEGNLREEPWGTDSPPQPDQGLPPPLAAVPVPWKSTDPCQGHRESPGALVETSAGEEAQGQEGPAAAQLDVLRLRSSSMEIREKGSEFLKEELHRAQKELKLKDEECERLSKVREQLEQELEELTASLFEEAHKMVREANMKQAASEKQLKEARGKIDMLQAEVTALKTLVITSTPASPNRELHPQLLSPTKAGPRKGHSRHKSTSSTLCPAVCPAAGHTLTPDRE

SEQ ID NO: 70776 - protein, 220 aa, Homo sapiens
  Payload ID: 14046
  Gene Symbol: RAB3A
  Gene Name: RAB3A, member RAS oncogene family
  Uniprot ID: P20336
  ENSP ID: ENSP00000222256
MASATDSRYGQKESSDQNFDYMFKILIIGNSSVGKTSFLFRYADDSFTPAFVSTVGIDFKVKTIYRNDKRIKLQIWDTAGQERYRTITTAYYRGAMGFILMYDITNEESFNAVQDWSTQIKTYSWDNAQVLLVGNKCDMEDERVVSSERGRQLADHLGFEFFEASAKDNINVKQTFERLVDVICEKMSESLDTADPAVTGAKQGPQLSDQQVPPHQDCAC

SEQ ID NO: 70777 - protein, 115 aa, Homo sapiens
  Payload ID: 14046
  Gene Symbol: RAB3A
  Gene Name: RAB3A, member RAS oncogene family
  ENSP ID: ENSP00000472335
MASATDSRYGQKESSDQNFDYMFKILIIGNSSVGKTSFLFRYADDSFTPAFVSTVGIDFKVKTIYRNDKRIKLQIWDTAGQERYRTITTAYYRGAMGFILMYDITNEESFNAVQD

SEQ ID NO: 70778 - protein, 125 aa, Homo sapiens
  Payload ID: 14046
  Gene Symbol: RAB3A
  Gene Name: RAB3A, member RAS oncogene family
  ENSP ID: ENSP00000474603
MGFILMYDITNEESFNAVQDWSTQIKTYSWDNAQVLLVGNKCDMEDERVVSSERGRQLADHLGFEFFEASAKDNINVKQTFERLVDVICEKMSESLDTADPAVTGAKQGPQLSDQQVPPHQDCAC

SEQ ID NO: 70779 - protein, 219 aa, Homo sapiens
  Payload ID: 14047
  Gene Symbol: RAB3B
  Gene Name: RAB3B, member RAS oncogene family
  Uniprot ID: P20337
  ENSP ID: ENSP00000360718
MASVTDGKTGVKDASDQNFDYMFKLLIIGNSSVGKTSFLFRYADDTFTPAFVSTVGIDFKVKTVYRHEKRVKLQIWDTAGQERYRTITTAYYRGAMGFILMYDITNEESFNAVQDWATQIKTYSWDNAQVILVGNKCDMEEERVVPTEKGQLLAEQLGFDFFEASAKENISVRQAFERLVDAICDKMSDSLDTDPSMLGSSKNTRLSDTPPLLQQNCSC

SEQ ID NO: 70780 - protein, 227 aa, Homo sapiens
  Payload ID: 14048
  Gene Symbol: RAB3C
  Gene Name: RAB3C, member RAS oncogene family
  Uniprot ID: Q96E17
  ENSP ID: ENSP00000282878
MRHEAPMQMASAQDARYGQKDSSDQNFDYMFKLLIIGNSSVGKTSFLFRYADDSFTSAFVSTVGIDFKVKTVFKNEKRIKLQIWDTAGQERYRTITTAYYRGAMGFILMYDITNEESFNAVQDWSTQIKTYSWDNAQVILVGNKCDMEDERVISTERGQHLGEQLGFEFFETSAKDNINVKQTFERLVDIICDKMSESLETDPAITAAKQNTRLKETPPPPQPNCAC

SEQ ID NO: 70781 - protein, 219 aa, Homo sapiens
  Payload ID: 14049
  Gene Symbol: RAB3D
  Gene Name: RAB3D, member RAS oncogene family
  Uniprot ID: O95716
  ENSP ID: ENSP00000222120
MASAGDTQAGPRDAADQNFDYMFKLLLIGNSSVGKTSFLFRYADDSFTPAFVSTVGIDFKVKTVYRHDKRIKLQIWDTAGQERYRTITTAYYRGAMGFLLMYDIANQESFAAVQDWATQIKTYSWDNAQVILVGNKCDLEDERVVPAEDGRRLADDLGFEFFEASAKENINVKQVFERLVDVICEKMNESLEPSSSSGSNGKGPAVGDAPAPQPSSCSC

SEQ ID NO: 70782 - protein, 219 aa, Homo sapiens; identical to SEQ ID NO: 70781
  Payload ID: 14049
  Gene Symbol: RAB3D
  Gene Name: RAB3D, member RAS oncogene family
  Uniprot ID: O95716
  ENSP ID: ENSP00000466000

SEQ ID NO: 70783 - protein, 277 aa, Homo sapiens
  Payload ID: 14050
  Gene Symbol: RAB40A
  Gene Name: RAB40A, member RAS oncogene family
  Uniprot ID: Q8WXH6
  ENSP ID: ENSP00000305648
MSAPGSPDQAYDFLLKFLLVGDRDVGKSEILESLQDGAAESPYSHLGGIDYKTTTILLDGQRVKLKLWDTSGQGRFCTIFRSYSRGAQGVILVYDIANRWSFEGMDRWIKKIEEHAPGVPKILVGNRLHLAFKRQVPREQAQAYAERLGVTFFEVSPLCNFNIIESFTELARIVLLRHRMNWLGRPSKVLSLQDLCCRTIVSCTPVHLVDKLPLPSTLRSHLKSFSMAKGLNARMMRGLSYSLTTSSTHKSSLCKVEIVCPPQSPPKNCTRNSCKIS

SEQ ID NO: 70784 - protein, 277 aa, Homo sapiens; identical to SEQ ID NO: 70783
  Payload ID: 14050
  Gene Symbol: RAB40A
  Gene Name: RAB40A, member RAS oncogene family
  Uniprot ID: Q8WXH6
  ENSP ID: ENSP00000361716

SEQ ID NO: 70785 - protein, 278 aa, Homo sapiens
  Payload ID: 14051
  Gene Symbol: RAB40AL
  Gene Name: RAB40A, member RAS oncogene family-like
  Uniprot ID: P0C0E4
  ENSP ID: ENSP00000218249
MSAPGSPDQAYDFLLKFLLVGDRDVGKSEILESLQDGTAESPYSHLGGIDYKTTTILLDGQRVKLKLWDTSGQGRFCTIFRSYSRGAQGVILVYDIANRWSFEGMDRWIKKIEEHAPGVPKILVGNRLHLAFKRQVPREQAQAYAERLGVTFFEVSPLCNFNIIESFTELARIVLLRHRLNWLGRPSKVLSLQDLCCRTIVSCTPVHLVDKLPLPIALRSHLKSFSMAKGLNARMMRGLSYSLTTSSTHKRSSLCKVKIVCPPQSPPKNCTRNSCKIS

SEQ ID NO: 70786 - protein, 99 aa, Homo sapiens
  Payload ID: 14052
  Gene Symbol: RAB40B
  Gene Name: RAB40B, member RAS oncogene family
  ENSP ID: ENSP00000269347
MDRLWRPSKVLSLQDLCCRAVVSCTPVHLVDKLPLPIALRSHLKSFSMANGLNARMMHGGSYSLTTSSTHKRSSLRKVKLVRPPQSPPKNCTRNSCKIS

SEQ ID NO: 70787 - protein, 139 aa, Homo sapiens
  Payload ID: 14052
  Gene Symbol: RAB40B
  Gene Name: RAB40B, member RAS oncogene family
  ENSP ID: ENSP00000438897
MSALGSPVRAYDFLLKFLLVGDSDVGKGEILASLQDGAAESPYGHPAGIDYKTTTILLDGRRVKLQLWDTSGQGRFCTIFRSYSRGAQGVILVYDIANRWSFDGIDRWIKEIDESRSRSWPGSCCCGMGWTGSGGRARC

SEQ ID NO: 70788 - protein, 42 aa, Homo sapiens
  Payload ID: 14052
  Gene Symbol: RAB40B
  Gene Name: RAB40B, member RAS oncogene family
  ENSP ID: ENSP00000458638
GRFCTIFRSYSRGAQGVILVYDIANRWSFDGIDRWIKEIDEC

SEQ ID NO: 70789 - protein, 278 aa, Homo sapiens
  Payload ID: 14052
  Gene Symbol: RAB40B
  Gene Name: RAB40B, member RAS oncogene family
  Uniprot ID: Q12829
  ENSP ID: ENSP00000461785
MSALGSPVRAYDFLLKFLLVGDSDVGKGEILASLQDGAAESPYGHPAGIDYKTTTILLDGRRVKLQLWDTSGQGRFCTIFRSYSRGAQGVILVYDIANRWSFDGIDRWIKEIDEHAPGVPKILVGNRLHLAFKRQVPTEQAQAYAERLGVTFFEVSPLCNFNITESFTELARIVLLRHGMDRLWRPSKVLSLQDLCCRAVVSCTPVHLVDKLPLPIALRSHLKSFSMANGLNARMMHGGSYSLTTSSTHKRSSLRKVKLVRPPQSPPKNCTRNSCKIS

SEQ ID NO: 70790 - protein, 281 aa, Homo sapiens
  Payload ID: 14053
  Gene Symbol: RAB40C
  Gene Name: RAB40C, member RAS oncogene family
  Uniprot ID: Q96S21
  ENSP ID: ENSP00000248139
MGSQGSPVKSYDYLLKFLLVGDSDVGKGEILESLQDGAAESPYAYSNGIDYKTTTILLDGRRVKLELWDTSGQGRFCTIFRSYSRGAQGILLVYDITNRWSFDGIDRWIKEIDEHAPGVPRILVGNRLHLAFKRQVPTEQARAYAEKNCMTFFEVSPLCNFNVIESFTELSRIVLMRHGMEKIWRPNRVFSLQDLCCRAIVSCTPVHLIDKLPLPVTIKSHLKSFSMANGMNAVMMHGRSYSLASGAGGGGSKGNSLKRSKSIRPPQSPPQNCSRSNCKIS

SEQ ID NO: 70791 - protein, 281 aa, Homo sapiens; identical to SEQ ID NO: 70790
  Payload ID: 14053
  Gene Symbol: RAB40C
  Gene Name: RAB40C, member RAS oncogene family
  Uniprot ID: Q96S21
  ENSP ID: ENSP00000438382

SEQ ID NO: 70792 - protein, 281 aa, Homo sapiens; identical to SEQ ID NO: 70790
  Payload ID: 14053
  Gene Symbol: RAB40C
  Gene Name: RAB40C, member RAS oncogene family
  Uniprot ID: Q96S21
  ENSP ID: ENSP00000438492

SEQ ID NO: 70793 - protein, 281 aa, Homo sapiens; identical to SEQ ID NO: 70790
  Payload ID: 14053
  Gene Symbol: RAB40C
  Gene Name: RAB40C, member RAS oncogene family
  Uniprot ID: Q96S21
  ENSP ID: ENSP00000445050

SEQ ID NO: 70794 - protein, 156 aa, Homo sapiens
  Payload ID: 14053
  Gene Symbol: RAB40C
  Gene Name: RAB40C, member RAS oncogene family
  ENSP ID: ENSP00000454347
MGSQGSPVKSYDYLLKFLLVGDSDVGKGEILESLQDGAAESPYAYSNGIDYKTTTILLDGRRVKLELWDTSGQGRFCTIFRSYSRGAQGILLVYDITNRWSFDGIDRWIKEIDEHAPGVPRILVGNRLHLAFKRQVPTEQARAYAEKNCMTFFEVS

SEQ ID NO: 70795 - protein, 38 aa, Homo sapiens
  Payload ID: 14053
  Gene Symbol: RAB40C
  Gene Name: RAB40C, member RAS oncogene family
  ENSP ID: ENSP00000454383
MTFFEVSPLCNFNVIESFTELSRIVLMRHGMEKIWRPN

SEQ ID NO: 70796 - protein, 213 aa, Homo sapiens
  Payload ID: 14053
  Gene Symbol: RAB40C
  Gene Name: RAB40C, member RAS oncogene family
  ENSP ID: ENSP00000455029
MGSQGSPVKSYDYLLKFLLVGDSDVGKGEILESLQDGAAESPYAYSNGIDYKTTTILLDGRRVKLELWDTSGQGRFCTIFRSYSRGAQGILLVYDITNRWSFDGIDRWIKEIDEHAPGVPRILVGNRLHLAFKRQVPTEQARAYAEKNCMTFFEVSPLCNFNVIESFTELSRIVLMRHGMEKIWRPNRVFSLQDLCCRAIVSCTPVHLIDKLP

SEQ ID NO: 70797 - protein, 237 aa, Homo sapiens
  Payload ID: 14053
  Gene Symbol: RAB40C
  Gene Name: RAB40C, member RAS oncogene family
  ENSP ID: ENSP00000455225
  MOD_RES (1)..(1): Any amino acid
XLKFLLVGDSDVGKGEILESLQDGAAESPYAYSNGIDYKTTTILLDGRRVKLELWDTSGQGRFCTIFRSYSRGAQGILLVYDITNRWSFDGIDRWIKEIDERQVPTEQARAYAEKNCMTFFEVSPLCNFNVIESFTELSRIVLMRHGMEKIWRPNRVFSLQDLCCRAIVSCTPVHLIDKLPLPVTIKSHLKSFSMANGMNAVMMHGRSYSLASGAGGGGSKGNSLKRSKSIRPPQSP

SEQ ID NO: 70798 - protein, 49 aa, Homo sapiens
  Payload ID: 14053
  Gene Symbol: RAB40C
  Gene Name: RAB40C, member RAS oncogene family
  ENSP ID: ENSP00000455232
  MOD_RES (1)..(1): Any amino acid
XSQGSPVKSYDYLLKFLLVGDSDVGKGEILESLQDGAAESPYAYSNDCS

SEQ ID NO: 70799 - protein, 188 aa, Homo sapiens
  Payload ID: 14053
  Gene Symbol: RAB40C
  Gene Name: RAB40C, member RAS oncogene family
  ENSP ID: ENSP00000457116
MGSQGSPVKSYDYLLKFLLVGDSDVGKGEILESLQDGAAESPYAYSNGIDYKTTTILLDGRRVKLELWDTSGQGRFCTIFRSYSRGAQGILLVYDITNRWSFDGIDRWIKEIDEHAPGVPRILVGNRLHLAFKRQVPTEQARAYAEKNCMTFFEVSPLCNFNVIESFTELSRIVLMRHGMEKIWRPNR

SEQ ID NO: 70800 - protein, 130 aa, Homo sapiens
  Payload ID: 14053
  Gene Symbol: RAB40C
  Gene Name: RAB40C, member RAS oncogene family
  ENSP ID: ENSP00000457845
MGSQGSPVKSYDYLLKFLLVGDSDVGKGEILESLQDGAAESPYAYSNGIDYKTTTILLDGRRVKLELWDTSGQGRFCTIFRSYSRGAQLCPRYSRGDSLMDWPRGHLASTAARPPAARTPHLPAQETSTG

SEQ ID NO: 70801 - protein, 221 aa, Homo sapiens
  Payload ID: 14054
  Gene Symbol: RAB41
  Gene Name: RAB41, member RAS oncogene family
  Uniprot ID: Q5JT25
  ENSP ID: ENSP00000276066
MSAFGHDEAWMEAGGFGLEAAERTEYQSLCKSKLLFLGEQSGKTSIISRFMYNSFGCACQATVGIDFLSKTMYLEDQIVQLQLWDTAGQERFHSLIPSYIRDSTIAVVVYDITNINSFKETDKWVEHVRAERGDDVVIMLLGNKIDLDNKRQVTAEQGEEKSRNLNVMFIETSAKTGYNVKKLFRRVASALLSTRTSPPPKEGTVEIELESFEESGNRSYC

SEQ ID NO: 70802 - protein, 222 aa, Homo sapiens
  Payload ID: 14054
  Gene Symbol: RAB41
  Gene Name: RAB41, member RAS oncogene family
  Uniprot ID: Q5JT25
  ENSP ID: ENSP00000363597
MSAFGHDEAWMEAGGFGLEAAERTEYQSLCKSKLLFLGEQSVGKTSIISRFMYNSFGCACQATVGIDFLSKTMYLEDQIVQLQLWDTAGQERFHSLIPSYIRDSTIAVVVYDITNINSFKETDKWVEHVRAERGDDVVIMLLGNKIDLDNKRQVTAEQGEEKSRNLNVMFIETSAKTGYNVKKLFRRVASALLSTRTSPPPKEGTVEIELESFEESGNRSYC

SEQ ID NO: 70803 - protein, 34 aa, Homo sapiens
  Payload ID: 14054
  Gene Symbol: RAB41
  Gene Name: RAB41, member RAS oncogene family
  ENSP ID: ENSP00000421643
MYNSFGCACQATVGIDFLSKTMYLEDQIVQLQLW

SEQ ID NO: 70804 - protein, 105 aa, Homo sapiens
  Payload ID: 14055
  Gene Symbol: RAB42
  Gene Name: RAB42, member RAS oncogene family
  Uniprot ID: Q8N4Z0
  ENSP ID: ENSP00000362932
MATQGPDKVIFLLVGHKSDLQSTRCVSAQEAEELAASLGMAFVETSVKNNCNVDLAFDTLADAIQQALQQGDIKLEEGWGGVRLIHKTQIPRSPSRKQHSGPCQC

SEQ ID NO: 70805 - protein, 212 aa, Homo sapiens
  Payload ID: 14056
  Gene Symbol: RAB43
  Gene Name: RAB43, member RAS oncogene family
  Uniprot ID: Q86YS6
  ENSP ID: ENSP00000319781
MAGPGPGPGDPDEQYDFLFKLVLVGDASVGKTCVVQRFKTGAFSERQGSTIGVDFTMKTLEIQGKRVKLQIWDTAGQERFRTITQSYYRSANGAILAYDITKRSSFLSVPHWIEDVRKYAGSNIVQLLIGNKSDLSELREVSLAEAQSLAEHYDILCAIETSAKDSSNVEEAFLRVATELIMRHGGPLFSEKSPDHIQLNSKDIGEGWGCGC

SEQ ID NO: 70806 - protein, 212 aa, Homo sapiens; identical to SEQ ID NO: 70805
  Payload ID: 14056
  Gene Symbol: RAB43
  Gene Name: RAB43, member RAS oncogene family
  Uniprot ID: Q86YS6
  ENSP ID: ENSP00000376981

SEQ ID NO: 70807 - protein, 212 aa, Homo sapiens; identical to SEQ ID NO: 70805
  Payload ID: 14056
  Gene Symbol: RAB43
  Gene Name: RAB43, member RAS oncogene family
  Uniprot ID: Q86YS6
  ENSP ID: ENSP00000376982

SEQ ID NO: 70808 - protein, 212 aa, Homo sapiens; identical to SEQ ID NO: 70805
  Payload ID: 14056
  Gene Symbol: RAB43
  Gene Name: RAB43, member RAS oncogene family
  Uniprot ID: Q86YS6
  ENSP ID: ENSP00000376984

SEQ ID NO: 70809 - protein, 212 aa, Homo sapiens; identical to SEQ ID NO: 70805
  Payload ID: 14056
  Gene Symbol: RAB43
  Gene Name: RAB43, member RAS oncogene family
  Uniprot ID: Q86YS6
  ENSP ID: ENSP00000376985

SEQ ID NO: 70810 - protein, 86 aa, Homo sapiens
  Payload ID: 14056
  Gene Symbol: RAB43
  Gene Name: RAB43, member RAS oncogene family
  ENSP ID: ENSP00000390782
MAGPGPGPGDPDEQYDFLFKLVLVGDASVGKTCVVQRFKTGAFSERQGSTIGVDFTMKTLEIQGKRVKLQIWDTAGQERFRTITQS

SEQ ID NO: 70811 - protein, 155 aa, Homo sapiens
  Payload ID: 14056
  Gene Symbol: RAB43
  Gene Name: RAB43, member RAS oncogene family
  Uniprot ID: Q86YS6
  ENSP ID: ENSP00000427632
MAGPGPGPGDPDEQYDFLFKLVLVGDASVGKTCVVQRFKTGAFSERQGSTIGVDFTMKTLEIQGKRVKLQIWDTAGQERFRTITQSYYRSANGAILAYDITKRSSFLSVPHWIEDVRKYAGSNIVQLLIEMQSCYVAQADLELLASSNPPASTSK

SEQ ID NO: 70812 - protein, 155 aa, Homo sapiens; identical to SEQ ID NO: 70811
  Payload ID: 14056
  Gene Symbol: RAB43
  Gene Name: RAB43, member RAS oncogene family
  Uniprot ID: Q86YS6
  ENSP ID: ENSP00000481399

SEQ ID NO: 70813 - protein, 920 aa, Homo sapiens
  Payload ID: 14057
  Gene Symbol: RAB44
  Gene Name: RAB44, member RAS oncogene family
  Uniprot ID: Q7Z6P3
  ENSP ID: ENSP00000229824
  MOD_RES (1)..(1): Any amino acid
XFCPTENIFGSSQSPHRLRRRKPLPSKRVSATTSFPALEEADAEEKEAFLAFMEQLGTGHLLPKQMEIWQLWGQLRQEEPQLAGNLAGFLAKMTSRLQEAQADKEALELTLRKRDSDHHREVQQLYEEMEQQIRQEKQQLQAESDSRGLALTSQMQDVLEAKEREVQRLAEGQRELEAQLSHLRSTHQEAASENQQLQEAKRDLAGRLEEVRGQLQVTRGRLDAARGRVSWQVEEKLSFPGAGEKTPDPQAASPEEAPLPGLFGDNDDWDQLLSNFGSPPHGALQLCWSPPPTPRATSGPQTPRVVRQISISEPQAFLFGQEPSSDPDGAPRTPPGVTFSAKDNKGVDPHEQDIRAEQPVEPHDPDPNQEPGSTPEGRLLWGLSGSLVAPAFKVLIPLEDGPPPPANSPPPQAPAGSSKQIQASDPDDKGPGSWAPPSGAQPGAGAGPQEPTQTPPTMTERETQPGPSPTTALTGVGPAKPPRQRDALQQDLHATGSEPRLGTQRARALTLGPAEPFQGLEFVGPVPTERLEQGQAGPAVQEGLPEGLREAHGQVLGLGELSAFPHQELEEEPRSEEGKQEGRGGQDLSSEQSEQSVEAHGLETAHSELPQQDSLLVSLPSATPQAQVEAEGPTPGKSAPPRGSPPRGAQPGAGAGPQEPTQTPPTMAEQEAQPRPSLTTAHAEEQGPPHSREPRAESRLEDPGMDSREAGLTPSPGDPMAGGGPQANPDYLFHVIFLGDSNVGKTSFLHLLHQNSFATGLTATVGVDFRVKTLLVDNKCFVLQLWDTAGQERYHSMTRQLLRKADGVVLMYDITSQESFAHVRYWLDCLQDAGSDGVVILLLGNKMDCEEERQVSVEAGQQLAQELGVYFGECSAALGHNILEPVVNLARSLRMQEEGLKDSLVKVAPKRPPKRFGCCS

SEQ ID NO: 70814 - protein, 1021 aa, Homo sapiens
  Payload ID: 14057
  Gene Symbol: RAB44
  Gene Name: RAB44, member RAS oncogene family
  ENSP ID: ENSP00000481054
METGQRTSRKVRKLGSNRRRQTREPADGEGAAVAPEPESWSSQAAAELQAFFQDCGAKERGFVTREDLAVAKFSFLGSKEESEMIFDWVDVERKGHLSLEEFSSGLKNIFGSSQSPHRLRRRKPLPSKRVSATTSFPALEEADAEEKEAFLAFMEQLGTGHLLPKQMEIWQLWGQLRQEEPQLAGNLAGFLAKMTSRLQEAQADKEALELTLRKRDSDHHREVQQLYEEMEQQIRQEKQQLQAESDSRGLALTSQMQDVLEAKEREVQRLAEGQRELEAQLSHLRSTHQEAASENQQLQEAKRDLAGRLEEVRGQLQVTRGRLDAARGRVSWQVEEKLSFPGAGEKTPDPQAASPEEAPLPGLFGDNDDWDQLLSNFGSPPHGALQLCWSPPPTPRATSGPQTPRVVRQISISEPQAFLFGQEPSSDPDGAPRTPPGVTFSAKDNKGVDPHEQDIRAEQPVEPHDPDPNQEPGSTPEGRLLWGLSGSLVAPAFKVLIPLEDGPPPPANSPPPQAPAGSSKQIQASDPDDKGPGSWAPPSGAQPGAGAGPQEPTQTPPTMTERETQPGPSPTTALTGVGPAKPPRQRDALQQDLHATGSEPRLGTQRARALTLGPAEPFQGLEFVGPVPTERLEQGQAGPAVQEGLPEGLREAHGQVLGLGELSAFPHQELEEEPRSEEGKQEGRGGQDLSSEQSEQSVEAHGLETAHSELPQQDSLLVSLPSATPQAQVEAEGPTPGKSAPPRGSPPRGAQPGAGAGPQEPTQTPPTMAEQEAQPRPSLTTAHAEEQGPPHSREPRAESRLEDPGMDSREAGLTPSPGDPMAGGGPQANPDYLFHVIFLGDSNVGKTSFLHLLHQNSFATGLTATVGVDFRVKTLLVDNKCFVLQLWDTAGQERYHSMTRQLLRKADGVVLMYDITSQESFAHVRYWLDCLQDAGSDGVVILLLGNKMDCEEERQVSVEAGQQLAQELGVYFGECSAALGHNILEPVVNLARSLRMQEEGLKDSLVKVAPKRPPKRFGCCS

SEQ ID NO: 70815 - protein, 218 aa, Homo sapiens
  Payload ID: 14058
  Gene Symbol: RAB4A
  Gene Name: RAB4A, member RAS oncogene family
  Uniprot ID: P20338
  ENSP ID: ENSP00000355651
MSQTAMSETYDFLFKFLVIGNAGTGKSCLLHQFIEKKFKDDSNHTIGVEFGSKIINVGGKYVKLQIWDTAGQERFRSVTRSYYRGAAGALLVYDITSRETYNALTNWLTDARMLASQNIVIILCGNKKDLDADREVTFLEASRFAQENELMFLETSALTGENVEEAFVQCARKILNKIESGELDPERMGSGIQYGDAALRQLRSPRRAQAPNAQECGC

SEQ ID NO: 70816 - protein, 113 aa, Homo sapiens
  Payload ID: 14058
  Gene Symbol: RAB4A
  Gene Name: RAB4A, member RAS oncogene family
  ENSP ID: ENSP00000482077
MISPDARMLASQNIVIILCGNKKDLDADREVTFLEASRFAQENELMFLETSALTGENVEEAFVQCARKILNKIESGELDPERMGSGIQYGDAALRQLRSPRRAQAPNAQECGC

SEQ ID NO: 70817 - protein, 213 aa, Homo sapiens
  Payload ID: 14059
  Gene Symbol: RAB4B
  Gene Name: RAB4B, member RAS oncogene family
  Uniprot ID: P61018
  ENSP ID: ENSP00000349560
MAETYDFLFKFLVIGSAGTGKSCLLHQFIENKFKQDSNHTIGVEFGSRVVNVGGKTVKLQIWDTAGQERFRSVTRSYYRGAAGALLVYDITSRETYNSLAAWLTDARTLASPNIVVILCGNKKDLDPEREVTFLEASRFAQENELMFLETSALTGENVEEAFLKCARTILNKIDSGELDPERMGSGIQYGDASLRQLRQPRSAQAVAPQPCGC

SEQ ID NO: 70818 - protein, 121 aa, Homo sapiens
  Payload ID: 14059
  Gene Symbol: RAB4B
  Gene Name: RAB4B, member RAS oncogene family
  ENSP ID: ENSP00000367557
MAETYDFLFKFLVIGSAGTGKSCLLHQFIENKFKQDSNHTIGVEFGSRVVNVGGKTVKLQIWDTAGQERFRSVTRSYYRGAAGALLVYDITRADVPGDQRSHRRERGGGVPQVCPHYPQQD

SEQ ID NO: 70819 - protein, 213 aa, Homo sapiens; identical to SEQ ID NO: 70817
  Payload ID: 14059
  Gene Symbol: RAB4B
  Gene Name: RAB4B, member RAS oncogene family
  Uniprot ID: P61018
  ENSP ID: ENSP00000470246

SEQ ID NO: 70820 - protein, 192 aa, Homo sapiens
  Payload ID: 14059
  Gene Symbol: RAB4B
  Gene Name: RAB4B, member RAS oncogene family
  ENSP ID: ENSP00000471504
  MOD_RES (1)..(1): Any amino acid
XAETYDFLFKFLVIGSAGTGKSCLLHQFIENKFKQDSNHTIGVEFGSRVVNVGGKTVKLQIWDTAGQERFRRETYNSLAAWLTDARTLASPNIVVILCGNKKDLDPEREVTFLEASRFAQENELMFLETSALTGENVEEAFLKCARTILNKIDSGELDPERMGSGIQYGDASLRQLRQPRSAQAVAPQPCGC

SEQ ID NO: 70821 - protein, 213 aa, Homo sapiens; identical to SEQ ID NO: 70817
  Payload ID: 14060
  Gene Symbol: RAB4B-EGLN2
  Gene Name: RAB4B-EGLN2 readthrough (NMD candidate)
  ENSP ID: ENSP00000469872

SEQ ID NO: 70822 - protein, 215 aa, Homo sapiens
  Payload ID: 14061
  Gene Symbol: RAB5A
  Gene Name: RAB5A, member RAS oncogene family
  Uniprot ID: P20339
  ENSP ID: ENSP00000273047
MASRGATRPNGPNTGNKICQFKLVLLGESAVGKSSLVLRFVKGQFHEFQESTIGAAFLTQTVCLDDTTVKFEIWDTAGQERYHSLAPMYYRGAQAAIVVYDITNEESFARAKNWVKELQRQASPNIVIALSGNKADLANKRAVDFQEAQSYADDNSLLFMETSAKTSMNVNEIFMAIAKKLPKNEPQNPGANSARGRGVDLTEPTQPTRNQCCSN

SEQ ID NO: 70823 - protein, 65 aa, Homo sapiens
  Payload ID: 14061
  Gene Symbol: RAB5A
  Gene Name: RAB5A, member RAS oncogene family
  ENSP ID: ENSP00000396632
MASRGATRPNGPNTGNKICQFKLVLLGESAVGKSSLVLRFVKGQFHEFQESTIGVTLEVIKAVSL

SEQ ID NO: 70824 - protein, 15 aa, Homo sapiens
  Payload ID: 14061
  Gene Symbol: RAB5A
  Gene Name: RAB5A, member RAS oncogene family
  ENSP ID: ENSP00000398450
MASRGATRPNGPNTG

SEQ ID NO: 70825 - protein, 62 aa, Homo sapiens
  Payload ID: 14061
  Gene Symbol: RAB5A
  Gene Name: RAB5A, member RAS oncogene family
  ENSP ID: ENSP00000403533
MASRGATRPNGPNTGNKICQFKLVLLGESAVGKSSLVLRFVKGQFHEFQESTIGVLFFQLLF

SEQ ID NO: 70826 - protein, 201 aa, Homo sapiens
  Payload ID: 14061
  Gene Symbol: RAB5A
  Gene Name: RAB5A, member RAS oncogene family
  Uniprot ID: P20339
  ENSP ID: ENSP00000411941
MASRGATRPNGPNTGNKICQFKLVLLGESAVGKSSLVLRFVKGQFHEFQESTIGVKFEIWDTAGQERYHSLAPMYYRGAQAAIVVYDITNEESFARAKNWVKELQRQASPNIVIALSGNKADLANKRAVDFQEAQSYADDNSLLFMETSAKTSMNVNEIFMAIAKKLPKNEPQNPGANSARGRGVDLTEPTQPTRNQCCSN

SEQ ID NO: 70827 - protein, 215 aa, Homo sapiens
  Payload ID: 14062
  Gene Symbol: RAB5B
  Gene Name: RAB5B, member RAS oncogene family
  Uniprot ID: P61020
  ENSP ID: ENSP00000353444
MTSRSTARPNGQPQASKICQFKLVLLGESAVGKSSLVLRFVKGQFHEYQESTIGAAFLTQSVCLDDTTVKFEIWDTAGQERYHSLAPMYYRGAQAAIVVYDITNQETFARAKTWVKELQRQASPSIVIALAGNKADLANKRMVEYEEAQAYADDNSLLFMETSAKTAMNVNDLFLAIAKKLPKSEPQNLGGAAGRSRGVDLHEQSQQNKSQCCSN

SEQ ID NO: 70828 - protein, 174 aa, Homo sapiens
  Payload ID: 14062
  Gene Symbol: RAB5B
  Gene Name: RAB5B, member RAS oncogene family
  Uniprot ID: P61020
  ENSP ID: ENSP00000391319
MTSRSTARPNGQPQASKICQFKLVLLGESAVGKSSLVLRFVKGQFHEYQESTIGAAFLTQSVCLDDTTVKFEIWDTAGQERYHSLAPMYYRGAQAAIVVYDITNQEAQAYADDNSLLFMETSAKTAMNVNDLFLAIAKKLPKSEPQNLGGAAGRSRGVDLHEQSQQNKSQCCSN

SEQ ID NO: 70829 - protein, 115 aa, Homo sapiens
  Payload ID: 14062
  Gene Symbol: RAB5B
  Gene Name: RAB5B, member RAS oncogene family
  ENSP ID: ENSP00000447895
MTSRSTARPNGQPQASKICQFKLVLLGESAVGKSSLVLRFVKGQFHEYQESTIGAAFLTQSVCLDDTTVKFEIWDTAGQERYHSLAPMYYRGAQAAIVVYDITNQETFARAKTWV

SEQ ID NO: 70830 - protein, 100 aa, Homo sapiens
  Payload ID: 14062
  Gene Symbol: RAB5B
  Gene Name: RAB5B, member RAS oncogene family
  ENSP ID: ENSP00000449554
MTSRSTARPNGQPQASKICQFKLVLLGESAVGKSSLVLRFVKGQFHEYQESTIGAAFLTQSVCLDDTTVKFEIWDTAGQERYHSLAPMYYRGAQAAIVVY

SEQ ID NO: 70831 - protein, 79 aa, Homo sapiens
  Payload ID: 14062
  Gene Symbol: RAB5B
  Gene Name: RAB5B, member RAS oncogene family
  ENSP ID: ENSP00000449762
MSLEGVLKPGNPLPFPLPPLQYPPPSTLSHSDNLAMTSRSTARPNGQPQASKICQFKLVLLGESAVGKSSLVLRFVKGQ

SEQ ID NO: 70832 - protein, 215 aa, Homo sapiens; identical to SEQ ID NO: 70827
  Payload ID: 14062
  Gene Symbol: RAB5B
  Gene Name: RAB5B, member RAS oncogene family
  Uniprot ID: P61020
  ENSP ID: ENSP00000450168

SEQ ID NO: 70833 - protein, 73 aa, Homo sapiens
  Payload ID: 14062
  Gene Symbol: RAB5B
  Gene Name: RAB5B, member RAS oncogene family
  ENSP ID: ENSP00000450285
MTSRSTARPNGQPQASKICQFKLVLLGESAVGKSSLVLRFVKGQFHEYQESTIGGNLCPSKDMGEGTTATGQS

SEQ ID NO: 70834 - protein, 73 aa, Homo sapiens; identical to SEQ ID NO: 70833
  Payload ID: 14062
  Gene Symbol: RAB5B
  Gene Name: RAB5B, member RAS oncogene family
  ENSP ID: ENSP00000487368

SEQ ID NO: 70835 - protein, 216 aa, Homo sapiens
  Payload ID: 14063
  Gene Symbol: RAB5C
  Gene Name: RAB5C, member RAS oncogene family
  Uniprot ID: P51148
  ENSP ID: ENSP00000345689
MAGRGGAARPNGPAAGNKICQFKLVLLGESAVGKSSLVLRFVKGQFHEYQESTIGAAFLTQTVCLDDTTVKFEIWDTAGQERYHSLAPMYYRGAQAAIVVYDITNTDTFARAKNWVKELQRQASPNIVIALAGNKADLASKRAVEFQEAQAYADDNSLLFMETSAKTAMNVNEIFMAIAKKLPKNEPQNATGAPGRNRGVDLQENNPASRSQCCSN

SEQ ID NO: 70836 - protein, 216 aa, Homo sapiens; identical to SEQ ID NO: 70835
  Payload ID: 14063
  Gene Symbol: RAB5C
  Gene Name: RAB5C, member RAS oncogene family
  Uniprot ID: P51148
  ENSP ID: ENSP00000377440

SEQ ID NO: 70837 - protein, 249 aa, Homo sapiens
  Payload ID: 14063
  Gene Symbol: RAB5C
  Gene Name: RAB5C, member RAS oncogene family
  Uniprot ID: P51148
  ENSP ID: ENSP00000447053
MELSWRSPSPLSASLHSTSPHPHALWTTTAGRAMAGRGGAARPNGPAAGNKICQFKLVLLGESAVGKSSLVLRFVKGQFHEYQESTIGAAFLTQTVCLDDTTVKFEIWDTAGQERYHSLAPMYYRGAQAAIVVYDITNTDTFARAKNWVKELQRQASPNIVIALAGNKADLASKRAVEFQEAQAYADDNSLLFMETSAKTAMNVNEIFMAIAKKLPKNEPQNATGAPGRNRGVDLQENNPASRSQCCSN

SEQ ID NO: 70838 - protein, 74 aa, Homo sapiens
  Payload ID: 14063
  Gene Symbol: RAB5C
  Gene Name: RAB5C, member RAS oncogene family
  ENSP ID: ENSP00000448314
MAGRGGAARPNGPAAGNKICQFKLVLLGESAVGKSSLVLRFVKGQFHEYQESTIGAAFLTQTVCLDDTTVKFEI

SEQ ID NO: 70839 - protein, 124 aa, Homo sapiens
  Payload ID: 14063
  Gene Symbol: RAB5C
  Gene Name: RAB5C, member RAS oncogene family
  ENSP ID: ENSP00000449612
MAGRGGAARPNGPAAGNKICQFKLVLLGESAVGKSSLVLRFVKGQFHEYQESTIGAAFLTQTVCLDDTTVKFEIWDTAGQERYHSLAPMYYRGAQAAIVVYDITNTDTFARAKNWVKELQRQAS

SEQ ID NO: 70840 - protein, 91 aa, Homo sapiens
  Payload ID: 14063
  Gene Symbol: RAB5C
  Gene Name: RAB5C, member RAS oncogene family
  ENSP ID: ENSP00000449777
MAGRGGAARPNGPAAGNKICQFKLVLLGESAVGKSSLVLRFVKGQFHEYQESTIGAAFLTQTVCLDDTTVKFEIWDTAGQERYHSLAPMYY

SEQ ID NO: 70841 - protein, 150 aa, Homo sapiens
  Payload ID: 14063
  Gene Symbol: RAB5C
  Gene Name: RAB5C, member RAS oncogene family
  ENSP ID: ENSP00000467144
VKFEIWDTAGQERYHSLAPMYYRGAQAAIVVYDITNTDTFARAKNWVKELQRQASPNIVIALAGNKADLASKRAVEFQEAQAYADDNSLLFMETSAKTAMNVNEIFMAIGQLLLLPSSLHHSKGISPVCWSRVGLRGPFTTLFFFFFFFF

SEQ ID NO: 70842 - protein, 208 aa, Homo sapiens
  Payload ID: 14064
  Gene Symbol: RAB6A
  Gene Name: RAB6A, member RAS oncogene family
  Uniprot ID: P20340
  ENSP ID: ENSP00000311449
MSTGGDFGNPLRKFKLVFLGEQSVGKTSLITRFMYDSFDNTYQATIGIDFLSKTMYLEDRTIRLQLWDTAGQERFRSLIPSYIRDSAAAVVVYDITNVNSFQQTTKWIDDVRTERGSDVIIMLVGNKTDLADKRQVSIEEGERKAKELNVMFIETSAKAGYNVKQLFRRVAAALPGMESTQDRSREDMIDIKLEKPQEQPVSEGGCSC

SEQ ID NO: 70843 - protein, 208 aa, Homo sapiens
  Payload ID: 14064
  Gene Symbol: RAB6A
  Gene Name: RAB6A, member RAS oncogene family
  Uniprot ID: P20340
  ENSP ID: ENSP00000336850
MSTGGDFGNPLRKFKLVFLGEQSVGKTSLITRFMYDSFDNTYQATIGIDFLSKTMYLEDRTVRLQLWDTAGQERFRSLIPSYIRDSTVAVVVYDITNVNSFQQTTKWIDDVRTERGSDVIIMLVGNKTDLADKRQVSIEEGERKAKELNVMFIETSAKAGYNVKQLFRRVAAALPGMESTQDRSREDMIDIKLEKPQEQPVSEGGCSC

SEQ ID NO: 70844 - protein, 87 aa, Homo sapiens
  Payload ID: 14064
  Gene Symbol: RAB6A
  Gene Name: RAB6A, member RAS oncogene family
  ENSP ID: ENSP00000437863
MSTGGDFGNPLRKFKLVFLGEQSVGKTSLITRFMYDSFDNTYQATIGIDFLSKTMYLEDRTMLTHSSKLQSGLMMSEQKEEVMLSSC

SEQ ID NO: 70845 - protein, 71 aa, Homo sapiens
  Payload ID: 14064
  Gene Symbol: RAB6A
  Gene Name: RAB6A, member RAS oncogene family
  ENSP ID: ENSP00000438842
MSTGGDFGNPLRKFKLVFLGEQSVGKTSLITRFMYDSFDNTYQLFRRVAAALPGMESTQDRSREDMIDIKL

SEQ ID NO: 70846 - protein, 87 aa, Homo sapiens; identical to SEQ ID NO: 70844
  Payload ID: 14064
  Gene Symbol: RAB6A
  Gene Name: RAB6A, member RAS oncogene family
  ENSP ID: ENSP00000440469

SEQ ID NO: 70847 - protein, 87 aa, Homo sapiens; identical to SEQ ID NO: 70844
  Payload ID: 14064
  Gene Symbol: RAB6A
  Gene Name: RAB6A, member RAS oncogene family
  ENSP ID: ENSP00000443470

SEQ ID NO: 70848 - protein, 175 aa, Homo sapiens
  Payload ID: 14064
  Gene Symbol: RAB6A
  Gene Name: RAB6A, member RAS oncogene family
  Uniprot ID: P20340
  ENSP ID: ENSP00000443782
MYDSFDNTYQATIGIDFLSKTMYLEDRTIRLQLWDTAGQERFRSLIPSYIRDSAAAVVVYDITNVNSFQQTTKWIDDVRTERGSDVIIMLVGNKTDLADKRQVSIEEGERKAKELNVMFIETSAKAGYNVKQLFRRVAAALPGMESTQDRSREDMIDIKLEKPQEQPVSEGGCSC

SEQ ID NO: 70849 - protein, 104 aa, Homo sapiens
  Payload ID: 14064
  Gene Symbol: RAB6A
  Gene Name: RAB6A, member RAS oncogene family
  Uniprot ID: P20340
  ENSP ID: ENSP00000445350
MSTGGDFGNPLRKFKLVFLGEQSVGKTSLITRFMYDSFDNTYQATIGIDFLSKTMYLEDRTLFRRVAAALPGMESTQDRSREDMIDIKLEKPQEQPVSEGGCSC

SEQ ID NO: 70850 - protein, 208 aa, Homo sapiens
  Payload ID: 14065
  Gene Symbol: RAB6B
  Gene Name: RAB6B, member RAS oncogene family
  Uniprot ID: Q9NRW1
  ENSP ID: ENSP00000285208
MSAGGDFGNPLRKFKLVFLGEQSVGKTSLITRFMYDSFDNTYQATIGIDFLSKTMYLEDRTVRLQLWDTAGQERFRSLIPSYIRDSTVAVVVYDITNLNSFQQTSKWIDDVRTERGSDVIIMLVGNKTDLADKRQITIEEGEQRAKELSVMFIETSAKTGYNVKQLFRRVASALPGMENVQEKSKEGMIDIKLDKPQEPPASEGGCSC

SEQ ID NO: 70851 - protein, 49 aa, Homo sapiens
  Payload ID: 14065
  Gene Symbol: RAB6B
  Gene Name: RAB6B, member RAS oncogene family
  ENSP ID: ENSP00000417433
MYDSFDNTYQATIGIDFLSKTMYLEDRTVRLQLWDTAGQERFRSLIPSY

SEQ ID NO: 70852 - protein, 71 aa, Homo sapiens
  Payload ID: 14065
  Gene Symbol: RAB6B
  Gene Name: RAB6B, member RAS oncogene family
  ENSP ID: ENSP00000418540
MSAGGDFGNPLRKFKLVFLGEQSVGKTSLITRCCWQLQLRGAWFIDWGAMCTSENILTSPPSSQYTCLGQV

SEQ ID NO: 70853 - protein, 195 aa, Homo sapiens
  Payload ID: 14065
  Gene Symbol: RAB6B
  Gene Name: RAB6B, member RAS oncogene family
  Uniprot ID: Q9NRW1
  ENSP ID: ENSP00000419381
MWHMTRNWPLVGKTSLITRFMYDSFDNTYQATIGIDFLSKTMYLEDRTVRLQLWDTAGQERFRSLIPSYIRDSTVAVVVYDITNLNSFQQTSKWIDDVRTERGSDVIIMLVGNKTDLADKRQITIEEGEQRAKELSVMFIETSAKTGYNVKQLFRRVASALPGMENVQEKSKEGMIDIKLDKPQEPPASEGGCSC

SEQ ID NO: 70854 - protein, 83 aa, Homo sapiens
  Payload ID: 14065
  Gene Symbol: RAB6B
  Gene Name: RAB6B, member RAS oncogene family
  ENSP ID: ENSP00000419526
MYLEDRTVRLQLWDTAGQERFRSLIPSYIRDSTVAVVVYDITNLNSFQQTSKWIDDVRTERGSDVIIMLVGNKTDLADKRQIT

SEQ ID NO: 70855 - protein, 124 aa, Homo sapiens
  Payload ID: 14065
  Gene Symbol: RAB6B
  Gene Name: RAB6B, member RAS oncogene family
  ENSP ID: ENSP00000419941
MYDSFDNTYQATIGIDFLSKTMYLEDRTVRLQLWDTAGQERFRSLIPSYIRDSTVAVVVYDITNLNSFQQTSKWIDDVRTERGSDVIIMLVGNKTDLADKRQITIEEGEQRAKELSVMFIETSA

SEQ ID NO: 70856 - protein, 208 aa, Homo sapiens; identical to SEQ ID NO: 70850
  Payload ID: 14065
  Gene Symbol: RAB6B
  Gene Name: RAB6B, member RAS oncogene family
  Uniprot ID: Q9NRW1
  ENSP ID: ENSP00000437797

SEQ ID NO: 70857 - protein, 254 aa, Homo sapiens
  Payload ID: 14066
  Gene Symbol: RAB6C
  Gene Name: RAB6C, member RAS oncogene family
  Uniprot ID: Q9H0N0
  ENSP ID: ENSP00000387307
MSAGGDFGNPLRKFKLVFLGEQSVAKTSLITRFRYDSFDNTYQAIIGIDFLSKTMYLEDGTIGLRLWDTAGQERLRSLIPRYIRDSAAAVVVYDITNVNSFQQTTKWIDDVRTERGSDVIITLVGNRTDLADKRQVSVEEGERKAKGLNVTFIETRAKAGYNVKQLFRRVAAALPGMESTQDGSREDMSDIKLEKPQEQTVSEGGCSCYSPMSSSTLPQKPPYSFIDCSVNIGLNLFPSLITFCNSSLLPVSWR

SEQ ID NO: 70858 - protein, 207 aa, Homo sapiens
  Payload ID: 14067
  Gene Symbol: RAB7A
  Gene Name: RAB7A, member RAS oncogene family
  Uniprot ID: P51149
  ENSP ID: ENSP00000265062
MTSRKKVLLKVIILGDSGVGKTSLMNQYVNKKFSNQYKATIGADFLTKEVMVDDRLVTMQIWDTAGQERFQSLGVAFYRGADCCVLVFDVTAPNTFKTLDSWRDEFLIQASPRDPENFPFVVLGNKIDLENRQVATKRAQAWCYSKNNIPYFETSAKEAINVEQAFQTIARNALKQETEVELYNEFPEPIKLDKNDRAKASAESCSC

SEQ ID NO: 70859 - protein, 134 aa, Homo sapiens
  Payload ID: 14067
  Gene Symbol: RAB7A
  Gene Name: RAB7A, member RAS oncogene family
  ENSP ID: ENSP00000417155
MTSRKKVLLKVIILGDSGVGKTSLMNQYVNKKFSNQYKATIGADFLTKEVMVDDRLVTMQVATKRAQAWCYSKNNIPYFETSAKEAINVEQAFQTIARNALKQETEVELYNEFPEPIKLDKNDRAKASAESCSC

SEQ ID NO: 70860 - protein, 98 aa, Homo sapiens
  Payload ID: 14067
  Gene Symbol: RAB7A
  Gene Name: RAB7A, member RAS oncogene family
  ENSP ID: ENSP00000417189
MTSRKKVLLKVIILGDSGVGKTSLMNQYVNKKFSNQYKATIGADFLTKEAINVEQAFQTIARNALKQETEVELYNEFPEPIKLDKNDRAKASAESCSC

SEQ ID NO: 70861 - protein, 160 aa, Homo sapiens
  Payload ID: 14067
  Gene Symbol: RAB7A
  Gene Name: RAB7A, member RAS oncogene family
  ENSP ID: ENSP00000417668
MTSRKKVLLKVIILGDSGVGKTSLMNQYVNKKFSNQYKATIGADFLTKEVMVDDRLVTMQIWDTAGQERFQSLGVAFYRGADCCVLVATKRAQAWCYSKNNIPYFETSAKEAINVEQAFQTIARNALKQETEVELYNEFPEPIKLDKNDRAKASAESCSC

SEQ ID NO: 70862 - protein, 150 aa, Homo sapiens
  Payload ID: 14067
  Gene Symbol: RAB7A
  Gene Name: RAB7A, member RAS oncogene family
  ENSP ID: ENSP00000417978
MTSRKKVLLKVIILGDSGVGKTSLMNQYVNKKFSNQYKATIGADFLTKEVMVDDRLVTMQIWDTAGQERFQSLGVAFYRGADCCVLVFDVTAPNTFKTLDSWRDEFLIQASPRDPENFPFVVLGNKIDLENRQVATKRAQAWCYSKNNIP

SEQ ID NO: 70863 - protein, 91 aa, Homo sapiens
  Payload ID: 14067
  Gene Symbol: RAB7A
  Gene Name: RAB7A, member RAS oncogene family
  ENSP ID: ENSP00000418283
MTSRKKVLLKVIILGDSGVGKTSLMNQYVNKKFSNQYKATIGADFLTKEVMVDDRLVTMQETEVELYNEFPEPIKLDKNDRAKASAESCSC

SEQ ID NO: 70864 - protein, 116 aa, Homo sapiens
  Payload ID: 14067
  Gene Symbol: RAB7A
  Gene Name: RAB7A, member RAS oncogene family
  ENSP ID: ENSP00000418955
MTSRKKVLLKVIILGDSGVGKTSLMNQYVNKKFSNQYKATIGADFLTKEVMVDDRLVTMQIWDTAGQERFQSLGVAFYRGADCCVLVFDVTAPNTKRAQAWCYSKNNIPYFETSAK

SEQ ID NO: 70865 - protein, 199 aa, Homo sapiens
  Payload ID: 14068
  Gene Symbol: RAB7B
  Gene Name: RAB7B, member RAS oncogene family
  Uniprot ID: Q96AH8
  ENSP ID: ENSP00000479762
MNPRKKVDLKLIIVGAIGVGKTSLLHQYVHKTFYEEYQTTLGASILSKIIILGDTTLKLQIWDTGGQERFRSMVSTFYKGSDGCILAFDVTDLESFEALDIWRGDVLAKIVPMEQSYPMVLLGNKIDLADRKVPQEVAQGWCREKDIPYFEVSAKNDINVVQAFEMLASRALSRYQSILENHLTESIKLSPDQSRSRCC

SEQ ID NO: 70866 - protein, 199 aa, Homo sapiens; identical to SEQ ID NO: 70865
  Payload ID: 14068
  Gene Symbol: RAB7B
  Gene Name: RAB7B, member RAS oncogene family
  Uniprot ID: Q96AH8
  ENSP ID: ENSP00000482499

SEQ ID NO: 70867 - protein, 157 aa, Homo sapiens
  Payload ID: 14068
  Gene Symbol: RAB7B
  Gene Name: RAB7B, member RAS oncogene family
  ENSP ID: ENSP00000485386
MNPRKKVDLKLIIVGAIGVGKTSLLHQYVHKTFYEEYQTTLGASILSKIIILGDTTLKLQIWDTGGQERFRSMVSTFYKGSDGCILAFDVTDLESFEALDIWRGDVLAKIVPMEQSYPMVLLGNKIDLADRKYQSILENHLTESIKLSPDQSRSRCC

SEQ ID NO: 70868 - protein, 199 aa, Homo sapiens; identical to SEQ ID NO: 70865
  Payload ID: 14068
  Gene Symbol: RAB7B
  Gene Name: RAB7B, member RAS oncogene family
  Uniprot ID: Q96AH8
  ENSP ID: ENSP00000485468

SEQ ID NO: 70869 - protein, 91 aa, Homo sapiens
  Payload ID: 14068
  Gene Symbol: RAB7B
  Gene Name: RAB7B, member RAS oncogene family
  ENSP ID: ENSP00000485563
  MOD_RES (1)..(1): Any amino acid
XDIWRGDVLAKIVPMEQSYPMVLLGNKIDLADRKVPQEVAQGWCREKDIPYFEVSAKNDINVVQAFEMLASRALSRPSLSRERKSREVSLS

SEQ ID NO: 70870 - protein, 207 aa, Homo sapiens
  Payload ID: 14069
  Gene Symbol: RAB8A
  Gene Name: RAB8A, member RAS oncogene family
  Uniprot ID: P61006
  ENSP ID: ENSP00000300935
MAKTYDYLFKLLLIGDSGVGKTCVLFRFSEDAFNSTFISTIGIDFKIRTIELDGKRIKLQIWDTAGQERFRTITTAYYRGAMGIMLVYDITNEKSFDNIRNWIRNIEEHASADVEKMILGNKCDVNDKRQVSKERGEKLALDYGIKFMETSAKANINVENAFFTLARDIKAKMDKKLEGNSPQGSNQGVKITPDQQKRSSFFRCVLL

SEQ ID NO: 70871 - protein, 207 aa, Homo sapiens
  Payload ID: 14069
  Gene Symbol: RAB8A
  Gene Name: RAB8A, member RAS oncogene family
  Uniprot ID: P61006
  ENSP ID: ENSP00000467501
MAKTYDYLFKLLLIGDSGVGKTCVLFRFSEDAFNSTFISTIGIDFKIRTIELDGKRIKLQIWDTAGQERFRTITTAYYRGAMGIMLVYDITNEKSFDNIRNWIRNIEEHASADVEKMILGNKCDVNDKRQVSKERGEKLALDYGIKFMETSAKANINVENRYQSKNGQKIGRQQPPGEQPGSQNHTGPAEEEQLFPMCSSVRNTALL

SEQ ID NO: 70872 - protein, 207 aa, Homo sapiens
  Payload ID: 14070
  Gene Symbol: RAB8B
  Gene Name: RAB8B, member RAS oncogene family
  Uniprot ID: Q92930
  ENSP ID: ENSP00000312734
MAKTYDYLFKLLLIGDSGVGKTCLLFRFSEDAFNTTFISTIGIDFKIRTIELDGKKIKLQIWDTAGQERFRTITTAYYRGAMGIMLVYDITNEKSFDNIKNWIRNIEEHASSDVERMILGNKCDMNDKRQVSKERGEKLAIDYGIKFLETSAKSSANVEEAFFTLARDIMTKLNRKMNDSNSAGAGGPVKITENRSKKTSFFRCSLL

SEQ ID NO: 70873 - protein, 48 aa, Homo sapiens
  Payload ID: 14070
  Gene Symbol: RAB8B
  Gene Name: RAB8B, member RAS oncogene family
  ENSP ID: ENSP00000453111
MAKTYDYLFKLLLIGDSGVGKTCLLFRFSEDAFNTTFISTIVRPHIEE

SEQ ID NO: 70874 - protein, 47 aa, Homo sapiens
  Payload ID: 14070
  Gene Symbol: RAB8B
  Gene Name: RAB8B, member RAS oncogene family
  ENSP ID: ENSP00000453236
MAKTYDYLFKLLLIGDSGVGKTCLLFRFSEDAFNTTFISTIEQLPVL

SEQ ID NO: 70875 - protein, 92 aa, Homo sapiens
  Payload ID: 14070
  Gene Symbol: RAB8B
  Gene Name: RAB8B, member RAS oncogene family
  ENSP ID: ENSP00000453679
MAKTYDYLFKLLLIGDSGVGKTCLLFRFSEDAFNTTFISTIGIDFKIRTIELDGKKIKLQIWDTAGQERFRTITTAYYRGAMEGILGIKRTS

SEQ ID NO: 70876 - protein, 188 aa, Homo sapiens
  Payload ID: 14070
  Gene Symbol: RAB8B
  Gene Name: RAB8B, member RAS oncogene family
  ENSP ID: ENSP00000453982
MAKTYDYLFKLLLIGDSGVGKTCLLFRFSEDAFNTTFISTIGIDFKIRTIELDGKKIKLQIWDTAGQERFRTITTAYYRGAMGIMLVYDITNEKSFDNIKNWIRNIEEHASSDVERMILGNKCDMNDKRQVSKERGEKLAIDYGIKFLETSAKSSANVEEAFFTLARDIMTKLNRKMVCITYNFYFHY

SEQ ID NO: 70877 - protein, 321 aa, Homo sapiens
  Payload ID: 14071
  Gene Symbol: RABEPK
  Gene Name: Rab9 effector protein with kelch motifs
  Uniprot ID: Q7Z6M1
  ENSP ID: ENSP00000259460
MKQLPVLEPGDKPRKATWYTLTVPGDSPCARVGHSCSYLPPVGNAKRGKVFIVGGANPNRSFSDVHTMDLETRTWTTPEVTSPPPSPRTFHTSSAAIGNQLYVFGGGERGAQPVQDTKLHVFDANTLTWSQPETLGNPPSPRHGHVMVAAGTKLFIHGGLAGDRFYDDLHCIDISDMKWQKLNPTGAAPAGCAAHSAVAMGKHVYIFGGMTPAGALDTMYQYHTEEQHWTLLKFDTLLPPGRLDHSMCIIPWPVTCASEKEDSNSLTLNHEAEKEDSADKVMSHSGDSHEESQTATLLCLVFGGMNTEGEIYDDCIVTVVD

SEQ ID NO: 70878 - protein, 372 aa, Homo sapiens
  Payload ID: 14071
  Gene Symbol: RABEPK
  Gene Name: Rab9 effector protein with kelch motifs
  Uniprot ID: Q7Z6M1
  ENSP ID: ENSP00000362639
MKQLPVLEPGDKPRKATWYTLTVPGDSPCARVGHSCSYLPPVGNAKRGKVFIVGGANPNRSFSDVHTMDLGKHQWDLDTCKGLLPRYEHASFIPSCTPDRIWVFGGANQSGNRNCLQVLNPETRTWTTPEVTSPPPSPRTFHTSSAAIGNQLYVFGGGERGAQPVQDTKLHVFDANTLTWSQPETLGNPPSPRHGHVMVAAGTKLFIHGGLAGDRFYDDLHCIDISDMKWQKLNPTGAAPAGCAAHSAVAMGKHVYIFGGMTPAGALDTMYQYHTEEQHWTLLKFDTLLPPGRLDHSMCIIPWPVTCASEKEDSNSLTLNHEAEKEDSADKVMSHSGDSHEESQTATLLCLVFGGMNTEGEIYDDCIVTVVD

SEQ ID NO: 70879 - protein, 154 aa, Homo sapiens
  Payload ID: 14071
  Gene Symbol: RABEPK
  Gene Name: Rab9 effector protein with kelch motifs
  ENSP ID: ENSP00000362645
MKQLPVLEPGDKPRKATWYTLTVPGDSPCARVGHSCSYLPPVGNAKRGKVFIVGGANPNRSFSDVHTMDLGKHQWDLDTCKGLLPRYEHASFIPSCTPDRIWVFGGANQSGNRNCLQVLNPAFKSWGFWTVLANPKYHLHSSLMFKPGRGPRQK

SEQ ID NO: 70880 - protein, 372 aa, Homo sapiens; identical to SEQ ID NO: 70878
  Payload ID: 14071
  Gene Symbol: RABEPK
  Gene Name: Rab9 effector protein with kelch motifs
  Uniprot ID: Q7Z6M1
  ENSP ID: ENSP00000377683

SEQ ID NO: 70881 - protein, 244 aa, Homo sapiens
  Payload ID: 14071
  Gene Symbol: RABEPK
  Gene Name: Rab9 effector protein with kelch motifs
  ENSP ID: ENSP00000402234
GRGSPDTGSITVSGRESESFRGVGPSRVQRTGKGLPWLRPGHFDRISLFFPDPVSYPLELPRGDEICWAGSGGCCGRSRPREASLTELWTLGTAVSGLGRRYTLTVPGDSPCARVGHSCSYLPPVGNAKRGKVFIVGGANPNRSFSDVHTMDLGKHQWDLDTCKGLLPRYEHASFIPSCTPDRIWVFGGANQSGNRNCLQVLNPETRTWTTPEVTSPPPSPRTFHTSSAAIGNQLYVFGGGERG

SEQ ID NO: 70882 - protein, 154 aa, Homo sapiens; identical to SEQ ID NO: 70879
  Payload ID: 14071
  Gene Symbol: RABEPK
  Gene Name: Rab9 effector protein with kelch motifs
  ENSP ID: ENSP00000487422

SEQ ID NO: 70883 - protein, 201 aa, Homo sapiens
  Payload ID: 14072
  Gene Symbol: RAB9A
  Gene Name: RAB9A, member RAS oncogene family
  Uniprot ID: P51151
  ENSP ID: ENSP00000420127
MAGKSSLFKVILLGDGGVGKSSLMNRYVTNKFDTQLFHTIGVEFLNKDLEVDGHFVTMQIWDTAGQERFRSLRTPFYRGSDCCLLTFSVDDSQSFQNLSNWKKEFIYYADVKEPESFPFVILGNKIDISERQVSTEEAQAWCRDNGDYPYFETSAKDATNVAAAFEEAVRRVLATEDRSDHLIQTDTVNLHRKPKPSSSCC

SEQ ID NO: 70884 - protein, 201 aa, Homo sapiens; identical to SEQ ID NO: 70883
  Payload ID: 14072
  Gene Symbol: RAB9A
  Gene Name: RAB9A, member RAS oncogene family
  Uniprot ID: P51151
  ENSP ID: ENSP00000480777

SEQ ID NO: 70885 - protein, 201 aa, Homo sapiens
  Payload ID: 14073
  Gene Symbol: RAB9B
  Gene Name: RAB9B, member RAS oncogene family
  Uniprot ID: Q9NP90
  ENSP ID: ENSP00000243298
MSGKSLLLKVILLGDGGVGKSSLMNRYVTNKFDSQAFHTIGVEFLNRDLEVDGRFVTLQIWDTAGQERFKSLRTPFYRGADCCLLTFSVDDRQSFENLGNWQKEFIYYADVKDPEHFPFVVLGNKVDKEDRQVTTEEAQTWCMENGDYPYLETSAKDDTNVTVAFEEAVRQVLAVEEQLEHCMLGHTIDLNSGSKAGSSCC

SEQ ID NO: 70886 - protein, 829 aa, Homo sapiens
  Payload ID: 14074
  Gene Symbol: RABEP1
  Gene Name: rabaptin, RAB GTPase binding effector protein 1
  Uniprot ID: Q15276
  ENSP ID: ENSP00000339569
MAQPGPASQPDVSLQQRVAELEKINAEFLRAQQQLEQEFNQKRAKFKELYLAKEEDLKRQNAVLQAAQDDLGHLRTQLWEAQAEMENIKAIATVSENTKQEAIDEVKRQWREEVASLQAVMKETVRDYEHQFHLRLEQERTQWAQYRESAEREIADLRRRLSEGQEEENLENEMKKAQEDAEKLRSVVMPMEKEIAALKDKLTEAEDKIKELEASKVKELNHYLEAEKSCRTDLEMYVAVLNTQKSVLQEDAEKLRKELHEVCHLLEQERQQHNQLKHTWQKANDQFLESQRLLMRDMQRMEIVLTSEQLRQVEELKKKDQEDDEQQRLNKRKDHKKADVEEEIKIPVVCALTQEESSAQLSNEEEHLDSTRGSVHSLDAGLLLPSGDPFSKSDNDMFKDGLRRAQSTDSLGTSGSLQSKALGYNYKAKSAGNLDESDFGPLVGADSVSENFDTASLGSLQMPSGFMLTKDQERAIKAMTPEQEETASLLSSVTQGMESAYVSPSGYRLVSETEWNLLQKEVHNAGNKLGRRCDMCSNYEKQLQGIQIQEAETRDQVKKLQLMLRQANDQLEKTMKDKQELEDFIKQSSEDSSHQISALVLRAQASEILLEELQQGLSQAKRDVQEQMAVLMQSREQVSEELVRLQKDNDSLQGKHSLHVSLQQAEDFILPDTTEALRELVLKYREDIINVRTAADHVEEKLKAEILFLKEQIQAEQCLKENLEETLQLEIENCKEEIASISSLKAELERIKVEKGQATVEQLMFEEKNKAQRLQTELDVSEQVQRDFVKLSQTLQVQLERIRQADSLERIRAILNDTKLTDINQLPET

SEQ ID NO: 70887 - protein, 862 aa, Homo sapiens
  Payload ID: 14074
  Gene Symbol: RABEP1
  Gene Name: rabaptin, RAB GTPase binding effector protein 1
  Uniprot ID: Q15276
  ENSP ID: ENSP00000445408
MAQPGPASQPDVSLQQRVAELEKINAEFLRAQQQLEQEFNQKRAKFKELYLAKEEDLKRQNAVLQAAQDDLGHLRTQLWEAQAEMENIKAIATVSENTKQEAIDEVKRQWREEVASLQAVMKETVRDYEHQFHLRLEQERTQWAQYRESAEREIADLRRRLSEGQEEENLENEMKKAQEDAEKLRSVVMPMEKEIAALKDKLTEAEDKIKELEASKVKELNHYLEAEKSCRTDLEMYVAVLNTQKSVLQEDAEKLRKELHEVCHLLEQERQQHNQLKHTWQKANDQFLESQRLLMRDMQRMEIVLTSEQLRQVEELKKKDQEDDEQQRLNKRKDHKKADVEEEIKIPVVCALTQEESSAQLSNEEEHLDSTRGSVHSLDAGLLLPSGDPFSKSDNDMFKDGLRRAQSTDSLGTSGSLQSKALGYNYKAKSAGNLDESDFGPLVGADSVSENFDTASLGSLQMPSGFMLTKDQERAIKAMTPEQEETASLLSSVTQGMESAYVSPSGYRLVSETEWNLLQKEVHNAGNKLGRRCDMCSNYEKQLQGIQIQEAETRDQVKKLQLMLRQANDQLEKTMKDKQELEDFIKQSSEDSSHQISALVLRAQASEILLEELQQGLSQAKRDVQEQMAVLMQSREQVSEELVRLQKDNDSLQGKHSLHVSLQQAEDFILPDTTEALRELVLKYREDIINVRTAADHVEEKLKAEILFLKEQIQAEQCLKENLEETLQLEIENCKEEIASISSLKAELERIKVEKGQLESTLREKSQQLESLQEIKISLEEQLKKETAAKATVEQLMFEEKNKAQRLQTELDVSEQVQRDFVKLSQTLQVQLERIRQADSLERIRAILNDTKLTDINQLPET

SEQ ID NO: 70888 - protein, 109 aa, Homo sapiens
  Payload ID: 14074
  Gene Symbol: RABEP1
  Gene Name: rabaptin, RAB GTPase binding effector protein 1
  ENSP ID: ENSP00000459550
MAQPGPASQPDGEGKGSIFGGLSERGNWDVFRLHFNDHLLHLVSGKKTLFFHNPTLLLHTEARYRELVVLNRSVSLQQRVAELEKINAEFLRAQQQLEQEFNQKRAKFK

SEQ ID NO: 70889 - protein, 192 aa, Homo sapiens
  Payload ID: 14074
  Gene Symbol: RABEP1
  Gene Name: rabaptin, RAB GTPase binding effector protein 1
  ENSP ID: ENSP00000460980
KKADVEEEIKIPVVCALTQEESSAQLSNEEKTPFKIKITDRSSYPEVTTNILEHLDSTRGSVHSLDAGLLLPSGDPFSKSDNDMFKDGLRRAQSTDSLGTSGSLQSKALGYNYKAKSAGNLDESDFGPLVGADSVSENFDTASLGSLQMPSGFMLTKDQERAIKAMTPEQEETASLLSSVTQGMESAYVSPS

SEQ ID NO: 70890 - protein, 153 aa, Homo sapiens
  Payload ID: 14074
  Gene Symbol: RABEP1
  Gene Name: rabaptin, RAB GTPase binding effector protein 1
  ENSP ID: ENSP00000466981
  MOD_RES (1)..(1): Any amino acid
XFLKEQIQAEQCLKENLEETLQLEIENCKEEIASISSLKAELERIKVEKGQLESTLREKSQQLESLQEIKISLEEQLKKETAAKATVEQLMFEEKNKAQRLQTELDVSEQVQRDFVKLSQTLQVRHLGNHIQSTKAVLGDRTLPIPDLTTGSS

SEQ ID NO: 70891 - protein, 101 aa, Homo sapiens
  Payload ID: 14074
  Gene Symbol: RABEP1
  Gene Name: rabaptin, RAB GTPase binding effector protein 1
  ENSP ID: ENSP00000482983
  MOD_RES (1)..(1): Any amino acid
XIATVSENTKQEAIDEVKRQWREEVASLQAVMKETVRDYEHQFHLRLEQERTQWAQYRESAEREIADLRRRLSEGQEEENLENEMKKDPIQDTILHLVVSP

SEQ ID NO: 70892 - protein, 533 aa, Homo sapiens
  Payload ID: 14075
  Gene Symbol: RABEP2
  Gene Name: rabaptin, RAB GTPase binding effector protein 2
  Uniprot ID: Q9H5N1
  ENSP ID: ENSP00000350186
MAAAAPVAADDDERRRRPGAALEDSRSQEGANGEAESGELSRLRAELAGALAEMETMKAVAEVSESTKAEAVAAVQRQCQEEVASLQAILKDSISSYEAQITALKQERQQQQQDCEEKERELGRLKQLLSRAYPLDSLEKQMEKAHEDSEKLREIVLPMEKEIEELKAKLLRAEELIQEIQRRPRHAPSLHGSTELLPLSRDPSPPLEPLEELSGDGGPAAEAFAHNCDDSASISSFSLGGGVGSSSSLPQSRQGLSPEQEETASLVSTGTLVPEGIYLPPPGYQLVPDTQWEQLQTEMQVLLAQVQNSEQLLRTLQGTVSQAQERVQLQMAELVTTHKCLHHEVKRLNEENQGLRAEQLPSSAPQGSQQEQGEEESLPSSVPELQQLLCCTRQEARARLQAQEHGAERLRIEIVTLREALEEETVARASLEGQLRVQREETASLCSLRTEMERVQQEQSKAQLPDLLSEQRAKVLRLQAELETSEQVQRDFVRLSQALQVRLERIRQAETLEQVRSIMDEAPLTDVRDIKDT

SEQ ID NO: 70893 - protein, 569 aa, Homo sapiens
  Payload ID: 14075
  Gene Symbol: RABEP2
  Gene Name: rabaptin, RAB GTPase binding effector protein 2
  Uniprot ID: Q9H5N1
  ENSP ID: ENSP00000350934
MAAAAPVAADDDERRRRPGAALEDSRSQEGANGEAESGELSRLRAELAGALAEMETMKAVAEVSESTKAEAVAAVQRQCQEEVASLQAILKDSISSYEAQITALKQERQQQQQDCEEKERELGRLKQLLSRAYPLDSLEKQMEKAHEDSEKLREIVLPMEKEIEELKAKLLRAEELIQEIQRRPRHAPSLHGSTELLPLSRDPSPPLEPLEELSGDGGPAAEAFAHNCDDSASISSFSLGGGVGSSSSLPQSRQGLSPEQEETASLVSTGTLVPEGIYLPPPGYQLVPDTQWEQLQTEGRQLQKDLESVSRERDELQEGLRRSNEDCAKQMQVLLAQVQNSEQLLRTLQGTVSQAQERVQLQMAELVTTHKCLHHEVKRLNEENQGLRAEQLPSSAPQGSQQEQGEEESLPSSVPELQQLLCCTRQEARARLQAQEHGAERLRIEIVTLREALEEETVARASLEGQLRVQREETEVLEASLCSLRTEMERVQQEQSKAQLPDLLSEQRAKVLRLQAELETSEQVQRDFVRLSQALQVRLERIRQAETLEQVRSIMDEAPLTDVRDIKDT

SEQ ID NO: 70894 - protein, 498 aa, Homo sapiens
  Payload ID: 14075
  Gene Symbol: RABEP2
  Gene Name: rabaptin, RAB GTPase binding effector protein 2
  ENSP ID: ENSP00000442798
MAAAAPVAADDDERRRRPGADSISSYEAQITALKQERQQQQQDCEEKERELGRLKQLLSRAYPLDSLEKQMEKAHEDSEKLREIVLPMEKEIEELKAKLLRAEELIQEIQRRPRHAPSLHGSTELLPLSRDPSPPLEPLEELSGDGGPAAEAFAHNCDDSASISSFSLGGGVGSSSSLPQSRQGLSPEQEETASLVSTGTLVPEGIYLPPPGYQLVPDTQWEQLQTEGRQLQKDLESVSRERDELQEGLRRSNEDCAKQMQVLLAQVQNSEQLLRTLQGTVSQAQERVQLQMAELVTTHKCLHHEVKRLNEENQGLRAEQLPSSAPQGSQQEQGEEESLPSSVPELQQLLCCTRQEARARLQAQEHGAERLRIEIVTLREALEEETVARASLEGQLRVQREETEVLEASLCSLRTEMERVQQEQSKAQLPDLLSEQRAKVLRLQAELETSEQVQRDFVRLSQALQVRLERIRQAETLEQVRSIMDEAPLTDVRDIKDT

SEQ ID NO: 70895 - protein, 47 aa, Homo sapiens
  Payload ID: 14075
  Gene Symbol: RABEP2
  Gene Name: rabaptin, RAB GTPase binding effector protein 2
  ENSP ID: ENSP00000454510
METMKAVAEVSESTKAEAVAAVQRQCQEEVASLQAILKEPSSESDPA

SEQ ID NO: 70896 - protein, 245 aa, Homo sapiens
  Payload ID: 14075
  Gene Symbol: RABEP2
  Gene Name: rabaptin, RAB GTPase binding effector protein 2
  ENSP ID: ENSP00000454968
METMKAVAEVSESTKAEAVAAVQRQCQEEVASLQAILKDSISSYEAQITALKQERQQQQQDCEEKERELGRLKQLLSRAYPLDSLEKQMEKAHEDSEKLREIVLPMEKEIEELKAKLLRAEELIQEIQRRPRHAPSLHGSTELLPLSRDPSPPLEPLEELSGDGGPAAEAFAHNCDDSASISSFSLGGGVGSSSSLPQSRQGLSPEQEETASLVSTGTLVPEGIYLPPPGYQLVPDTQWEQLQTE

SEQ ID NO: 70897 - protein, 44 aa, Homo sapiens
  Payload ID: 14075
  Gene Symbol: RABEP2
  Gene Name: rabaptin, RAB GTPase binding effector protein 2
  ENSP ID: ENSP00000454974
MEKAHEDSEKLREIVLPMEKEIEELKAKLLRAEELIQEIQRRPR

SEQ ID NO: 70898 - protein, 280 aa, Homo sapiens
  Payload ID: 14075
  Gene Symbol: RABEP2
  Gene Name: rabaptin, RAB GTPase binding effector protein 2
  ENSP ID: ENSP00000457040
PAIEGVGPVTALEDSRSQEGANGEAESGELSRLRAELAGALAEMETMKAVAEVSESTKAEAVAAVQRQCQEEVASLQAILKDSISSYEAQITALKQERQQQQQDCEEKERELGRLKQLLSRAYPLDSLEKQMEKAHEDSEKLREIVLPMEKEIEELKAKLLRAEELIQEIQRRPRHAPSLHGSTELLPLSRDPSPPLEPLEELSGDGGPAAEAFAHNCDDSASISSFSLGGGVGSSSSLPQSRQGLSPEQEETASLVSTGTLVPEGIYLPPPGYQLVPDT

SEQ ID NO: 70899 - protein, 72 aa, Homo sapiens
  Payload ID: 14075
  Gene Symbol: RABEP2
  Gene Name: rabaptin, RAB GTPase binding effector protein 2
  ENSP ID: ENSP00000457495
MEKAHEDSEKLREIVLPMEKEIEELKAKLLRAEELIQEIQRRPRHAPSLHGSTELLPLSRDPSPPLEPLEEL

SEQ ID NO: 70900 - protein, 784 aa, Homo sapiens
  Payload ID: 14076
  Gene Symbol: RBSN
  Gene Name: rabenosyn, RAB effector
  Uniprot ID: Q9H1K0
  ENSP ID: ENSP00000253699
MASLDDPGEVREGFLCPLCLKDLQSFYQLHSHYEEEHSGEDRDVKGQIKSLVQKAKKAKDRLLKREGDDRAESGTQGYESFSYGGVDPYMWEPQELGAVRSHLSDFKKHRAARIDHYVVEVNKLIIRLEKLTAFDRTNTESAKIRAIEKSVVPWVNDQDVPFCPDCGNKFSIRNRRHHCRLCGSIMCKKCMELISLPLANKLTSASKESLSTHTSPSQSPNSVHGSRRGSISSMSSVSSVLDEKDDDRIRCCTHCKDTLLKREQQIDEKEHTPDIVKLYEKLRLCMEKVDQKAPEYIRMAASLNAGETTYSLEHASDLRVEVQKVYELIDALSKKILTLGLNQDPPPHPSNLRLQRMIRYSATLFVQEKLLGLMSLPTKEQFEELKKKRKEEMERKRAVERQAALESQRRLEERQSGLASRAANGEVASLRRGPAPLRKAEGWLPLSGGQGQSEDSDPLLQQIHNITSFIRQAKAAGRMDEVRTLQENLRQLQDEYDQQQTEKAIELSRRQAEEEDLQREQLQMLRERELEREREQFRVASLHTRTRSLDFREIGPFQLEPSREPRTHLAYALDLGSSPVPSSTAPKTPSLSSTQPTRVWSGPPAVGQERLPQSSMPQQHEGPSLNPFDEEDLSSPMEEATTGPPAAGVSLDPSARILKEYNPFEEEDEEEEAVAGNPFIQPDSPAPNPFSEEDEHPQQRLSSPLVPGNPFEEPTCINPFEMDSDSGPEAEEPIEEELLLQQIDNIKAYIFDAKQCGRLDEVEVLTENLRELKHTLAKQKGGTD

SEQ ID NO: 70901 - protein, 88 aa, Homo sapiens
  Payload ID: 14076
  Gene Symbol: RBSN
  Gene Name: rabenosyn, RAB effector
  ENSP ID: ENSP00000387724
MASLDDPGEVREGFLCPLCLKDLQSFYQLHSHYEEEHSGEDRDVKGQIKSKRRGPCLSPAVVESFNSRDSSHQLWCCHRNMIIVVANR

SEQ ID NO: 70902 - protein, 156 aa, Homo sapiens
  Payload ID: 14076
  Gene Symbol: RBSN
  Gene Name: rabenosyn, RAB effector
  ENSP ID: ENSP00000403368
  MOD_RES (1)..(1): Any amino acid
XDTLLKREQQIDEKEHTPDIVKLYEKLRLCMEKVDQKAPEYIRMAASLNAGETTYSLEHASDLRVEVQKVYELIDALSKKILTLGLNQDPPPHPSNLRLQRMIRYSATLFVQEKLLGLMSLPTKEQFEELKKKRKEEMERKRAVERQGLFFFQSFC

SEQ ID NO: 70903 - protein, 55 aa, Homo sapiens
  Payload ID: 14076
  Gene Symbol: RBSN
  Gene Name: rabenosyn, RAB effector
  ENSP ID: ENSP00000414020
MASLDDPGEVREGFLCPLCLKDLQSFYQLHSHYEEEHSGEDRDVKGQIKNVISVS

SEQ ID NO: 70904 - protein, 784 aa, Homo sapiens; identical to SEQ ID NO: 70900
  Payload ID: 14076
  Gene Symbol: RBSN
  Gene Name: rabenosyn, RAB effector
  Uniprot ID: Q9H1K0
  ENSP ID: ENSP00000422551

SEQ ID NO: 70905 - protein, 41 aa, Homo sapiens
  Payload ID: 14076
  Gene Symbol: RBSN
  Gene Name: rabenosyn, RAB effector
  ENSP ID: ENSP00000427038
MASLDDPGEVREGFLCPLCLKDLQSFYQLHSHYEEEHSGED

SEQ ID NO: 70906 - protein, 694 aa, Homo sapiens
  Payload ID: 14077
  Gene Symbol: RPH3A
  Gene Name: rabphilin 3A
  Uniprot ID: Q9Y2J0
  ENSP ID: ENSP00000374036
MTDTVFSNSSNRWMYPSDRPLQSNDKEQLQAGWSVHPGGQPDRQRKQEELTDEEKEIINRVIARAEKMEEMEQERIGRLVDRLENMRKNVAGDGVNRCILCGEQLGMLGSACVVCEDCKKNVCTKCGVETNNRLHSVWLCKICIEQREVWKRSGAWFFKGFPKQVLPQPMPIKKTKPQQPVSEPAAPEQPAPEPKHPARAPARGDSEDRRGPGQKTGPDPASAPGRGNYGPPVRRASEARMSSSSRDSESWDHSGGAGDSSRSPAGLRRANSVQASRPAPGSVQSPAPPQPGQPGTPGGSRPGPGPAGRFPDQKPEVAPSDPGTTAPPREERTGGVGGYPAVGAREDRMSHPSGPYSQASAAAPQPAAARQPPPPEEEEEEANSYDSDEATTLGALEFSLLYDQDNSSLQCTIIKAKGLKPMDSNGLADPYVKLHLLPGASKSNKLRTKTLRNTRNPIWNETLVYHGITDEDMQRKTLRISVCDEDKFGHNEFIGETRFSLKKLKPNQRKNFNICLERVIPMKRAGTTGSARGMALYEEEQVERVGDIEERGKILVSLMYSTQQGGLIVGIIRCVHLAAMDANGYSDPFVKLWLKPDMGKKAKHKTQIKKKTLNPEFNEEFFYDIKHSDLAKKSLDISVWDYDIGKSNDYIGGCQLGISAKGERLKHWYECLKNKDKKIERWHQLQNENHVSSD

SEQ ID NO: 70907 - protein, 694 aa, Homo sapiens; identical to SEQ ID NO: 70906
  Payload ID: 14077
  Gene Symbol: RPH3A
  Gene Name: rabphilin 3A
  Uniprot ID: Q9Y2J0
  ENSP ID: ENSP00000405357

SEQ ID NO: 70908 - protein, 694 aa, Homo sapiens; identical to SEQ ID NO: 70906
  Payload ID: 14077
  Gene Symbol: RPH3A
  Gene Name: rabphilin 3A
  Uniprot ID: Q9Y2J0
  ENSP ID: ENSP00000440384

SEQ ID NO: 70909 - protein, 83 aa, Homo sapiens
  Payload ID: 14077
  Gene Symbol: RPH3A
  Gene Name: rabphilin 3A
  ENSP ID: ENSP00000446556
MTDTVFSNSSNRWMYPSDRPLQSNDKEQLQAGWSVHPGGQPDRQRKQEELTDEEKEIINRVIARAEKMEEMEQERIGRLVDRL

SEQ ID NO: 70910 - protein, 104 aa, Homo sapiens
  Payload ID: 14077
  Gene Symbol: RPH3A
  Gene Name: rabphilin 3A
  ENSP ID: ENSP00000446570
MTDTVFSNSSNRWMYPSDRPLQSNDKEQLQAGWSVHPGGQPDRQRKQEELTDEEKEIINRVIARAEKMEEMEQERIGRLVDRLENMRKNVAGDGVNRCILCGEQ

SEQ ID NO: 70911 - protein, 181 aa, Homo sapiens
  Payload ID: 14077
  Gene Symbol: RPH3A
  Gene Name: rabphilin 3A
  ENSP ID: ENSP00000446780
MTDTVFSNSSNRWMYPSDRPLQSNDKEQLQAGWSVHPGGQPDRQRKQEELTDEEKEIINRVIARAEKMEEMEQERIGRLVDRLENMRKNVAGDGVNRCILCGEQLGMLGSACVVCEDCKKNVCTKCGVETNNRLHSVWLCKICIEQREVWKRSGAWFFKGFPKQVLPQPMPIKKTKPQQPV

SEQ ID NO: 70912 - protein, 39 aa, Homo sapiens
  Payload ID: 14077
  Gene Symbol: RPH3A
  Gene Name: rabphilin 3A
  ENSP ID: ENSP00000446789
MTDTVFSNSSNRWMYPSDRPLQSNDKEQLQAGWSVHPGG

SEQ ID NO: 70913 - protein, 125 aa, Homo sapiens
  Payload ID: 14077
  Gene Symbol: RPH3A
  Gene Name: rabphilin 3A
  ENSP ID: ENSP00000447083
MTDTVFSNSSNRWMYPSDRPLQSNDKEQLQAGWSVHPGGQPDRQRKQEELTDEEKEIINRVIARAEKMEEMEQERIGRLVDRLENMRKNVAGDGVNRCILCGEQLGMLGSACVVCEDCKKNVCTK

SEQ ID NO: 70914 - protein, 94 aa, Homo sapiens
  Payload ID: 14077
  Gene Symbol: RPH3A
  Gene Name: rabphilin 3A
  ENSP ID: ENSP00000447306
MTDTVFSNSSNRWMYPSDRPLQSNDKEQLQAGWSVHPGGQPDRQRKQEELTDEEKEIINRVIARAEKMEEMEQERIGRLVDRLENMRKNVAGDG

SEQ ID NO: 70915 - protein, 115 aa, Homo sapiens
  Payload ID: 14077
  Gene Symbol: RPH3A
  Gene Name: rabphilin 3A
  ENSP ID: ENSP00000447505
MTDTVFSNSSNRWMYPSDRPLQSNDKEQLQAGWSVHPGGQPDRQRKQEELTDEEKEIINRVIARAEKMEEMEQERIGRLVDRLENMRKNVAGDGVNRCILCGEQLGMLGSACVVC

SEQ ID NO: 70916 - protein, 12 aa, Homo sapiens
  Payload ID: 14077
  Gene Symbol: RPH3A
  Gene Name: rabphilin 3A
  ENSP ID: ENSP00000447639
MTDTVFSNSSNR

SEQ ID NO: 70917 - protein, 80 aa, Homo sapiens
  Payload ID: 14077
  Gene Symbol: RPH3A
  Gene Name: rabphilin 3A
  ENSP ID: ENSP00000448100
MEEMEQERIGRLVDRLENMRKNVAGDGVNRCILCGEQLGMLGSACVVCEDCKKNVCTKCGVETNNRLHSVWLCKICIEQR

SEQ ID NO: 70918 - protein, 690 aa, Homo sapiens
  Payload ID: 14077
  Gene Symbol: RPH3A
  Gene Name: rabphilin 3A
  Uniprot ID: Q9Y2J0
  ENSP ID: ENSP00000448297
MTDTVFSNSSNRWMYPSDRPLQSKLQAGWSVHPGGQPDRQRKQEELTDEEKEIINRVIARAEKMEEMEQERIGRLVDRLENMRKNVAGDGVNRCILCGEQLGMLGSACVVCEDCKKNVCTKCGVETNNRLHSVWLCKICIEQREVWKRSGAWFFKGFPKQVLPQPMPIKKTKPQQPVSEPAAPEQPAPEPKHPARAPARGDSEDRRGPGQKTGPDPASAPGRGNYGPPVRRASEARMSSSSRDSESWDHSGGAGDSSRSPAGLRRANSVQASRPAPGSVQSPAPPQPGQPGTPGGSRPGPGPAGRFPDQKPEVAPSDPGTTAPPREERTGGVGGYPAVGAREDRMSHPSGPYSQASAAAPQPAAARQPPPPEEEEEEANSYDSDEATTLGALEFSLLYDQDNSSLQCTIIKAKGLKPMDSNGLADPYVKLHLLPGASKSNKLRTKTLRNTRNPIWNETLVYHGITDEDMQRKTLRISVCDEDKFGHNEFIGETRFSLKKLKPNQRKNFNICLERVIPMKRAGTTGSARGMALYEEEQVERVGDIEERGKILVSLMYSTQQGGLIVGIIRCVHLAAMDANGYSDPFVKLWLKPDMGKKAKHKTQIKKKTLNPEFNEEFFYDIKHSDLAKKSLDISVWDYDIGKSNDYIGGCQLGISAKGERLKHWYECLKNKDKKIERWHQLQNENHVSSD

SEQ ID NO: 70919 - protein, 60 aa, Homo sapiens
  Payload ID: 14077
  Gene Symbol: RPH3A
  Gene Name: rabphilin 3A
  ENSP ID: ENSP00000448662
MTDTVFSNSSNRWMYPSDRPLQSKLQHSRWTLKDWLCFQVSVKSLKPTNCPSSVDGFSFH

SEQ ID NO: 70920 - protein, 163 aa, Homo sapiens
  Payload ID: 14077
  Gene Symbol: RPH3A
  Gene Name: rabphilin 3A
  ENSP ID: ENSP00000449613
MTDTVFSNSSNRWMYPSDRPLQSNDKEQLQAGWSVHPGGQPDRQRKQEELTDEEKEIINRVIARAEKMEEMEQERIGRLVDRLENMRKNVAGDGVNRCILCGEQLGMLGSACVVCEDCKKNVCTKCGVETNNRLHSVWLCKICIEQREVWKRSGAWFFKGFPK

SEQ ID NO: 70921 - protein, 120 aa, Homo sapiens
  Payload ID: 14077
  Gene Symbol: RPH3A
  Gene Name: rabphilin 3A
  ENSP ID: ENSP00000449650
MTDTVFSNSSNRWMYPSDRPLQSNDKEQLQAGWSVHPGGQPDRQRKQEELTDEEKEIINRVIARAEKMEEMEQERIGRLVDRLENMRKNVAGDGVNRCILCGEQLGMLGSACVVCEDCKK

SEQ ID NO: 70922 - protein, 94 aa, Homo sapiens; identical to SEQ ID NO: 70914
  Payload ID: 14077
  Gene Symbol: RPH3A
  Gene Name: rabphilin 3A
  ENSP ID: ENSP00000449705

SEQ ID NO: 70923 - protein, 133 aa, Homo sapiens
  Payload ID: 14077
  Gene Symbol: RPH3A
  Gene Name: rabphilin 3A
  ENSP ID: ENSP00000450216
MTDTVFSNSSNRWMYPSDRPLQSNDKEQLQAGWSVHPGGQPDRQRKQEELTDEEKEIINRVIARAEKMEEMEQERIGRLVDRLENMRKNVAGDGVNRCILCGEQLGMLGSACVVCEDCKKNVCTKCGVETNNR

SEQ ID NO: 70924 - protein, 645 aa, Homo sapiens
  Payload ID: 14077
  Gene Symbol: RPH3A
  Gene Name: rabphilin 3A
  ENSP ID: ENSP00000450347
MTDTVFSNSSNRWMYPSDRPLQSNDKEQRLVDRLENMRKNVAGDGVNRCILCGEQLGMLGSACVVCEDCKKNVCTKCGVETNNRLHSVWLCKICIEQREVWKRSGAWFFKGFPKQVLPQPMPIKKTKPQQPVSEPAAPEQPAPEPKHPARAPARGDSEDRRGPGQKTGPDPASAPGRGNYGPPVRRASEARMSSSSRDSESWDHSGGAGDSSRSPAGLRRANSVQASRPAPGSVQSPAPPQPGQPGTPGGSRPGPGPAGRFPDQKPEVAPSDPGTTAPPREERTGGVGGYPAVGAREDRMSHPSGPYSQASAAAPQPAAARQPPPPEEEEEEANSYDSDEATTLGALEFSLLYDQDNSSLQCTIIKAKGLKPMDSNGLADPYVKLHLLPGASKSNKLRTKTLRNTRNPIWNETLVYHGITDEDMQRKTLRISVCDEDKFGHNEFIGETRFSLKKLKPNQRKNFNICLERVIPMKRAGTTGSARGMALYEEEQVERVGDIEERGKILVSLMYSTQQGGLIVGIIRCVHLAAMDANGYSDPFVKLWLKPDMGKKAKHKTQIKKKTLNPEFNEEFFYDIKHSDLAKKSLDISVWDYDIGKSNDYIGGCQLGISAKGERLKHWYECLKNKDKKIERWHQLQNENHVSSD

SEQ ID NO: 70925 - protein, 127 aa, Homo sapiens
  Payload ID: 14077
  Gene Symbol: RPH3A
  Gene Name: rabphilin 3A
  ENSP ID: ENSP00000450382
MTDTVFSNSSNRWMYPSDRPLQSNDKEQLQAGWSVHPGGQPDRQRKQEELTDEEKEIINRVIARAEKMEEMEQERIGRLVDRLENMRKNVAGDGVNRCILCGEQLGMLGSACVVCEDCKKNVCTKCG

SEQ ID NO: 70926 - protein, 286 aa, Homo sapiens
  Payload ID: 14078
  Gene Symbol: RPH3AL
  Gene Name: rabphilin 3A-like (without C2 domains)
  Uniprot ID: Q9UNE2
  ENSP ID: ENSP00000319210
MADTIFGSGNDQWVCPNDRQLALRAKLQTGWSVHTYQTEKQRRKQHLSPAEVEAILQVIQRAERLDVLEQQRIGRLVERLETMRRNVMGNGLSQCLLCGEVLGFLGSSSVFCKDCRKVWKRSGAWFYKGLPKYILPLKTPGRADDPHFRPLPTEPAEREPRSSETSRIYTWARGRVVSSDSDSDSDLSSSSLEDRLPSTGVRDRKGDKPWKESGGSVEAPRMGFTHPPGHLSGCQSSLASGETGTGSADPPGGPRPGLTRRAPVKDTPGRAPAADAAPAGPSSCLG

SEQ ID NO: 70927 - protein, 315 aa, Homo sapiens
  Payload ID: 14078
  Gene Symbol: RPH3AL
  Gene Name: rabphilin 3A-like (without C2 domains)
  Uniprot ID: Q9UNE2
  ENSP ID: ENSP00000328977
MADTIFGSGNDQWVCPNDRQLALRAKLQTGWSVHTYQTEKQRRKQHLSPAEVEAILQVIQRAERLDVLEQQRIGRLVERLETMRRNVMGNGLSQCLLCGEVLGFLGSSSVFCKDCRKKVCTKCGIEASPGQKRPLWLCKICSEQREVWKRSGAWFYKGLPKYILPLKTPGRADDPHFRPLPTEPAEREPRSSETSRIYTWARGRVVSSDSDSDSDLSSSSLEDRLPSTGVRDRKGDKPWKESGGSVEAPRMGFTHPPGHLSGCQSSLASGETGTGSADPPGGPRPGLTRRAPVKDTPGRAPAADAAPAGPSSCLG

SEQ ID NO: 70928 - protein, 286 aa, Homo sapiens; identical to SEQ ID NO: 70926
  Payload ID: 14078
  Gene Symbol: RPH3AL
  Gene Name: rabphilin 3A-like (without C2 domains)
  Uniprot ID: Q9UNE2
  ENSP ID: ENSP00000438224

SEQ ID NO: 70929 - protein, 37 aa, Homo sapiens
  Payload ID: 14078
  Gene Symbol: RPH3AL
  Gene Name: rabphilin 3A-like (without C2 domains)
  ENSP ID: ENSP00000458643
MADTIFGSGNDQWVCPNDRQLALRAKLQTGWSVHTYQ

SEQ ID NO: 70930 - protein, 126 aa, Homo sapiens
  Payload ID: 14078
  Gene Symbol: RPH3AL
  Gene Name: rabphilin 3A-like (without C2 domains)
  ENSP ID: ENSP00000459001
MADTIFGSGNDQWVCPNDRQLALRAKLQTGWSVHTYQTEKQRRKQHLSPAEVEAILQVIQRAERLDVLEQQRIGRLVERLETMRRNVMGNGLSQCLLCGEVLGFLGSSSVFCKDCRKKVCTKCGIE

SEQ ID NO: 70931 - protein, 157 aa, Homo sapiens
  Payload ID: 14078
  Gene Symbol: RPH3AL
  Gene Name: rabphilin 3A-like (without C2 domains)
  ENSP ID: ENSP00000459666
IFGSGNDQWVCPNDRQLALRAKLQTGWSVHTYQTEKQRRKQHLSPAEVEAILQVIQRAERLDVLEQQRIGRLVERLETMRRNVMGNGLSQCLLCGEVLGFLGSSSVFCKDCRKKVCTKCGIEASPGQKRPLWLCKICSEQRELFYFTIYRVEPSVFL

SEQ ID NO: 70932 - protein, 148 aa, Homo sapiens
  Payload ID: 14078
  Gene Symbol: RPH3AL
  Gene Name: rabphilin 3A-like (without C2 domains)
  ENSP ID: ENSP00000459716
MADTIFGSGNDQWVCPNDRQLALRAKLQTGWSVHTYQTEKQRRKQHLSPAEVEAILQVIQRAERLDVLEQQRIGRLVERLETMRRNVMGNGLSQCLLCGEVLGFLGSSSVFCKDCRKVWKRSGAWFYKGLPKYILPLKTPGRADDPHF

SEQ ID NO: 70933 - protein, 193 aa, Homo sapiens
  Payload ID: 14078
  Gene Symbol: RPH3AL
  Gene Name: rabphilin 3A-like (without C2 domains)
  ENSP ID: ENSP00000459795
MADTIFGSGNDQWVCPNDRQLALRAKLQTGWSVHTYQTEKQRRKQHLSPAEVEAILQVIQRAERLDVLEQQRIGRLVERLETMRRNVMGNGLSQCLLCGEVLGFLGSSSVFCKDCRKKVCTKCGIEASPGQKRPLWLCKICSEQREVWKRSGAWFYKGLPKYILPLKTPGRADDPHFRPLPTEPAEREPRSSE

SEQ ID NO: 70934 - protein, 83 aa, Homo sapiens
  Payload ID: 14078
  Gene Symbol: RPH3AL
  Gene Name: rabphilin 3A-like (without C2 domains)
  ENSP ID: ENSP00000459975
MADTIFGSGNDQWVCPNDRQLALRAKLQTGWSVHTYQTEKQRRKQHLSPAEVEAILQVIQRAERLDVLEQQRIGRLVERLETM

SEQ ID NO: 70935 - protein, 145 aa, Homo sapiens
  Payload ID: 14078
  Gene Symbol: RPH3AL
  Gene Name: rabphilin 3A-like (without C2 domains)
  ENSP ID: ENSP00000459992
MADTIFGSGNDQWVCPNDRQLALRAKLQTGWSVHTYQTEKQRRKQHLSPAEVEAILQVIQRAERLDVLEQQRIGRLVERLETMRRNVMGNGLSQCLLCGEVLGFLGSSSVFCKDCRKKVCTKCGIEASPGQKRPLWLCKICSEQR

SEQ ID NO: 70936 - protein, 201 aa, Homo sapiens
  Payload ID: 14078
  Gene Symbol: RPH3AL
  Gene Name: rabphilin 3A-like (without C2 domains)
  ENSP ID: ENSP00000460080
MADTIFGSGNDQWVCPNDRQLALRAKLQTGWSVHTYQTEKQRRKQHLSPAEVEAILQVIQRAERLDVLEQQRIGRLVERLETMRRNVMGNGLSQCLLCGEVLGFLGSSSVFCKDCRKKVCTKCGIEASPGQKRPLWLCKICSEQREVWKRSGAWFYKGLPKYILPLKTPGRADDPHFRPLPTEPAEREPRSSETSRIYTWA

SEQ ID NO: 70937 - protein, 110 aa, Homo sapiens
  Payload ID: 14078
  Gene Symbol: RPH3AL
  Gene Name: rabphilin 3A-like (without C2 domains)
  ENSP ID: ENSP00000460171
MADTIFGSGNDQWVCPNDRQLALRAKLQTGWSVHTYQTEKQRRKQHLSPAEVEAILQVIQRAERLDVLEQQRIGRLVERLETMRRNVMGNGLSQCLLCGEVLGFLGSSSV

SEQ ID NO: 70938 - protein, 152 aa, Homo sapiens
  Payload ID: 14078
  Gene Symbol: RPH3AL
  Gene Name: rabphilin 3A-like (without C2 domains)
  ENSP ID: ENSP00000460580
MADTIFGSGNDQWVCPNDRQLALRAKLQTGWSVHTYQTEKQRRKQHLSPAEVEAILQVIQRAERLDVLEQQRIGRLVERLETMRRNVMGNGLSQCLLCGEVLGFLGSSSVFCKDCRKKVCTKCGIEASPGQKRPLWLCKICSEQREVWKRSG

SEQ ID NO: 70939 - protein, 88 aa, Homo sapiens
  Payload ID: 14078
  Gene Symbol: RPH3AL
  Gene Name: rabphilin 3A-like (without C2 domains)
  ENSP ID: ENSP00000461885
MADTIFGSGNDQWVCPNDRQLALRAKLQTGWSVHTYQTEKQRRKQHLSPAEVEAILQVIQRAERLDVLEQQRIGRLVERLETMRRNVM

SEQ ID NO: 70940 - protein, 110 aa, Homo sapiens; identical to SEQ ID NO: 70937
  Payload ID: 14078
  Gene Symbol: RPH3AL
  Gene Name: rabphilin 3A-like (without C2 domains)
  ENSP ID: ENSP00000476362

SEQ ID NO: 70941 - protein, 286 aa, Homo sapiens; identical to SEQ ID NO: 70926
  Payload ID: 14078
  Gene Symbol: RPH3AL
  Gene Name: rabphilin 3A-like (without C2 domains)
  Uniprot ID: Q9UNE2
  ENSP ID: ENSP00000476394

SEQ ID NO: 70942 - protein, 315 aa, Homo sapiens; identical to SEQ ID NO: 70927
  Payload ID: 14078
  Gene Symbol: RPH3AL
  Gene Name: rabphilin 3A-like (without C2 domains)
  Uniprot ID: Q9UNE2
  ENSP ID: ENSP00000479485

SEQ ID NO: 70943 - protein, 315 aa, Homo sapiens; identical to SEQ ID NO: 70927
  Payload ID: 14078
  Gene Symbol: RPH3AL
  Gene Name: rabphilin 3A-like (without C2 domains)
  Uniprot ID: Q9UNE2
  ENSP ID: ENSP00000483035

SEQ ID NO: 70944 - protein, 145 aa, Homo sapiens; identical to SEQ ID NO: 70935
  Payload ID: 14078
  Gene Symbol: RPH3AL
  Gene Name: rabphilin 3A-like (without C2 domains)
  ENSP ID: ENSP00000487593

SEQ ID NO: 70945 - protein, 157 aa, Homo sapiens; identical to SEQ ID NO: 70931
  Payload ID: 14078
  Gene Symbol: RPH3AL
  Gene Name: rabphilin 3A-like (without C2 domains)
  ENSP ID: ENSP00000487624

SEQ ID NO: 70946 - protein, 315 aa, Homo sapiens; identical to SEQ ID NO: 70927
  Payload ID: 14078
  Gene Symbol: RPH3AL
  Gene Name: rabphilin 3A-like (without C2 domains)
  Uniprot ID: Q9UNE2
  ENSP ID: ENSP00000487649

SEQ ID NO: 70947 - protein, 286 aa, Homo sapiens; identical to SEQ ID NO: 70926
  Payload ID: 14078
  Gene Symbol: RPH3AL
  Gene Name: rabphilin 3A-like (without C2 domains)
  Uniprot ID: Q9UNE2
  ENSP ID: ENSP00000487689

SEQ ID NO: 70948 - protein, 117 aa, Homo sapiens
  Payload ID: 14078
  Gene Symbol: RPH3AL
  Gene Name: rabphilin 3A-like (without C2 domains)
  ENSP ID: ENSP00000487768
MADTIFGSGNDQWVCPNDRQLALRAKLQTGWSVHTYQTEKQRRKQHLSPAEVEAILQVIQRAERLDVLEQQRIGRLVERLETMRRNVMGNGLSQCLLCGEVLGFLGSSSVFCKDCRK

SEQ ID NO: 70949 - protein, 286 aa, Homo sapiens; identical to SEQ ID NO: 70926
  Payload ID: 14078
  Gene Symbol: RPH3AL
  Gene Name: rabphilin 3A-like (without C2 domains)
  Uniprot ID: Q9UNE2
  ENSP ID: ENSP00000487851

SEQ ID NO: 70950 - protein, 37 aa, Homo sapiens; identical to SEQ ID NO: 70929
  Payload ID: 14078
  Gene Symbol: RPH3AL
  Gene Name: rabphilin 3A-like (without C2 domains)
  ENSP ID: ENSP00000487862

SEQ ID NO: 70951 - protein, 37 aa, Homo sapiens; identical to SEQ ID NO: 70929
  Payload ID: 14078
  Gene Symbol: RPH3AL
  Gene Name: rabphilin 3A-like (without C2 domains)
  ENSP ID: ENSP00000487865

SEQ ID NO: 70952 - protein, 117 aa, Homo sapiens; identical to SEQ ID NO: 70948
  Payload ID: 14078
  Gene Symbol: RPH3AL
  Gene Name: rabphilin 3A-like (without C2 domains)
  ENSP ID: ENSP00000487877

SEQ ID NO: 70953 - protein, 110 aa, Homo sapiens; identical to SEQ ID NO: 70937
  Payload ID: 14078
  Gene Symbol: RPH3AL
  Gene Name: rabphilin 3A-like (without C2 domains)
  ENSP ID: ENSP00000488018

SEQ ID NO: 70954 - protein, 193 aa, Homo sapiens; identical to SEQ ID NO: 70933
  Payload ID: 14078
  Gene Symbol: RPH3AL
  Gene Name: rabphilin 3A-like (without C2 domains)
  ENSP ID: ENSP00000488103

SEQ ID NO: 70955 - protein, 201 aa, Homo sapiens; identical to SEQ ID NO: 70936
  Payload ID: 14078
  Gene Symbol: RPH3AL
  Gene Name: rabphilin 3A-like (without C2 domains)
  ENSP ID: ENSP00000488105

SEQ ID NO: 70956 - protein, 88 aa, Homo sapiens; identical to SEQ ID NO: 70939
  Payload ID: 14078
  Gene Symbol: RPH3AL
  Gene Name: rabphilin 3A-like (without C2 domains)
  ENSP ID: ENSP00000488111

SEQ ID NO: 70957 - protein, 88 aa, Homo sapiens; identical to SEQ ID NO: 70939
  Payload ID: 14078
  Gene Symbol: RPH3AL
  Gene Name: rabphilin 3A-like (without C2 domains)
  ENSP ID: ENSP00000488116

SEQ ID NO: 70958 - protein, 126 aa, Homo sapiens; identical to SEQ ID NO: 70930
  Payload ID: 14078
  Gene Symbol: RPH3AL
  Gene Name: rabphilin 3A-like (without C2 domains)
  ENSP ID: ENSP00000488186

SEQ ID NO: 70959 - protein, 146 aa, Homo sapiens
  Payload ID: 14078
  Gene Symbol: RPH3AL
  Gene Name: rabphilin 3A-like (without C2 domains)
  ENSP ID: ENSP00000488277
MADTIFGSGNDQWVCPNDRQLALRAKLQTGWSVHTYQTEKQRRKQHLSPAEVEAILQVIQRAERLDVLEQQRIGRLVERLETMRRNVMGNGLSQCLLCGEVLGFLGSSSVFCKDCRKKVCTKCGIEASPGQKRPLWLCKICSEQRE

SEQ ID NO: 70960 - protein, 145 aa, Homo sapiens; identical to SEQ ID NO: 70935
  Payload ID: 14078
  Gene Symbol: RPH3AL
  Gene Name: rabphilin 3A-like (without C2 domains)
  ENSP ID: ENSP00000488328

SEQ ID NO: 70961 - protein, 148 aa, Homo sapiens; identical to SEQ ID NO: 70932
  Payload ID: 14078
  Gene Symbol: RPH3AL
  Gene Name: rabphilin 3A-like (without C2 domains)
  ENSP ID: ENSP00000488347

SEQ ID NO: 70962 - protein, 126 aa, Homo sapiens; identical to SEQ ID NO: 70930
  Payload ID: 14078
  Gene Symbol: RPH3AL
  Gene Name: rabphilin 3A-like (without C2 domains)
  ENSP ID: ENSP00000488403

SEQ ID NO: 70963 - protein, 117 aa, Homo sapiens; identical to SEQ ID NO: 70948
  Payload ID: 14078
  Gene Symbol: RPH3AL
  Gene Name: rabphilin 3A-like (without C2 domains)
  ENSP ID: ENSP00000488444

SEQ ID NO: 70964 - protein, 146 aa, Homo sapiens; identical to SEQ ID NO: 70959
  Payload ID: 14078
  Gene Symbol: RPH3AL
  Gene Name: rabphilin 3A-like (without C2 domains)
  ENSP ID: ENSP00000488470

SEQ ID NO: 70965 - protein, 83 aa, Homo sapiens; identical to SEQ ID NO: 70934
  Payload ID: 14078
  Gene Symbol: RPH3AL
  Gene Name: rabphilin 3A-like (without C2 domains)
  ENSP ID: ENSP00000488661

SEQ ID NO: 70966 - protein, 152 aa, Homo sapiens; identical to SEQ ID NO: 70938
  Payload ID: 14078
  Gene Symbol: RPH3AL
  Gene Name: rabphilin 3A-like (without C2 domains)
  ENSP ID: ENSP00000488717

SEQ ID NO: 70967 - protein, 146 aa, Homo sapiens; identical to SEQ ID NO: 70959
  Payload ID: 14078
  Gene Symbol: RPH3AL
  Gene Name: rabphilin 3A-like (without C2 domains)
  ENSP ID: ENSP00000488835

SEQ ID NO: 70968 - protein, 146 aa, Homo sapiens; identical to SEQ ID NO: 70959
  Payload ID: 14078
  Gene Symbol: RPH3AL
  Gene Name: rabphilin 3A-like (without C2 domains)
  ENSP ID: ENSP00000488893

SEQ ID NO: 70969 - protein, 83 aa, Homo sapiens; identical to SEQ ID NO: 70934
  Payload ID: 14078
  Gene Symbol: RPH3AL
  Gene Name: rabphilin 3A-like (without C2 domains)
  ENSP ID: ENSP00000488902

SEQ ID NO: 70970 - protein, 632 aa, Homo sapiens
  Payload ID: 14079
  Gene Symbol: RACGAP1
  Gene Name: Rac GTPase activating protein 1
  Uniprot ID: Q9H0H5
  ENSP ID: ENSP00000309871
MDTMMLNVRNLFEQLVRRVEILSEGNEVQFIQLAKDFEDFRKKWQRTDHELGKYKDLLMKAETERSALDVKLKHARNQVDVEIKRRQRAEADCEKLERQIQLIREMLMCDTSGSIQLSEEQKSALAFLNRGQPSSSNAGNKRLSTIDESGSILSDISFDKTDESLDWDSSLVKTFKLKKREKRRSTSRQFVDGPPGPVKKTRSIGSAVDQGNESIVAKTTVTVPNDGGPIEAVSTIETVPYWTRSRRKTGTLQPWNSDSTLNSRQLEPRTETDSVGTPQSNGGMRLHDFVSKTVIKPESCVPCGKRIKFGKLSLKCRDCRVVSHPECRDRCPLPCIPTLIGTPVKIGEGMLADFVSQTSPMIPSIVVHCVNEIEQRGLTETGLYRISGCDRTVKELKEKFLRVKTVPLLSKVDDIHAICSLLKDFLRNLKEPLLTFRLNRAFMEAAEITDEDNSIAAMYQAVGELPQANRDTLAFLMIHLQRVAQSPHTKMDVANLAKVFGPTIVAHAVPNPDPVTMLQDIKRQPKVVERLLSLPLEYWSQFMMVEQENIDPLHVIENSNAFSTPQTPDIKVSLLGPVTTPEHQLLKTPSSSSLSQRVRSTLTKNTPRFGSKSKSATNLGRQGNFFASPMLK

SEQ ID NO: 70971 - protein, 632 aa, Homo sapiens; identical to SEQ ID NO: 70970
  Payload ID: 14079
  Gene Symbol: RACGAP1
  Gene Name: Rac GTPase activating protein 1
  Uniprot ID: Q9H0H5
  ENSP ID: ENSP00000404190

SEQ ID NO: 70972 - protein, 632 aa, Homo sapiens; identical to SEQ ID NO: 70970
  Payload ID: 14079
  Gene Symbol: RACGAP1
  Gene Name: Rac GTPase activating protein 1
  Uniprot ID: Q9H0H5
  ENSP ID: ENSP00000404808

SEQ ID NO: 70973 - protein, 155 aa, Homo sapiens
  Payload ID: 14079
  Gene Symbol: RACGAP1
  Gene Name: Rac GTPase activating protein 1
  ENSP ID: ENSP00000446642
MCGICLSSLCAGWRFSVKEMKSERQIQLIREMLMCDTSGSIQLSEEQKSALAFLNRGQPSSSNAGNKRLSTIDESGSILSDISFDKTDESLDWDSSLVKTFKLKKREKRRSTSRQFVDGPPGPVKKTRSIGSAVDQGNESIVAKTTVTVPNDGGP

SEQ ID NO: 70974 - protein, 117 aa, Homo sapiens
  Payload ID: 14079
  Gene Symbol: RACGAP1
  Gene Name: Rac GTPase activating protein 1
  ENSP ID: ENSP00000446889
MDVANLAKVFGPTIVAHAVPNPDPVTMLQDIKRQPKVVERLLSLPLEYWSQFMMVEQENIDPLHVIENSNAFSTPQTPDIKAVPGGGLCVHFTAGEAEIQKGPPSCGQNKSTAAFNY

SEQ ID NO: 70975 - protein, 139 aa, Homo sapiens
  Payload ID: 14079
  Gene Symbol: RACGAP1
  Gene Name: Rac GTPase activating protein 1
  ENSP ID: ENSP00000447177
MDTMMLNVRNLFEQLVRRVEILSEGNEVQFIQLAKDFEDFRKKWQRTDHELGKYKDLLMKAETERSALDVKLKHARNQVDVEIKRRQRAEADCEKLERQIQLIREMLMCDTSGSIQLSEEQKSALAFLNRGQPSSSNAG

SEQ ID NO: 70976 - protein, 150 aa, Homo sapiens
  Payload ID: 14079
  Gene Symbol: RACGAP1
  Gene Name: Rac GTPase activating protein 1
  ENSP ID: ENSP00000447393
MDTMMLNVRNLFEQLVRRVEILSEGNEVQFIQLAKDFEDFRKKWQRTDHELGKYKDLLMKAETERSALDVKLKHARNQVDVEIKRRQRAEADCEKLERQIQLIREMLMCDTSGSIQLSEEQKSALAFLNRGQPSSSNAGNKRLSTIDESG

SEQ ID NO: 70977 - protein, 136 aa, Homo sapiens
  Payload ID: 14079
  Gene Symbol: RACGAP1
  Gene Name: Rac GTPase activating protein 1
  ENSP ID: ENSP00000447429
MCGICLSSLCAGWRFSVKEMKSERQIQLIREMLMCDTSGSIQLSEEQKSALAFLNRGQPSSSNAGNKRLSTIDESGSILSDISFDKTDESLDWDSSLVKTFKLKKREKRRSTSRQFVDGPPGPVKKTRSIGSAVDQ

SEQ ID NO: 70978 - protein, 107 aa, Homo sapiens
  Payload ID: 14079
  Gene Symbol: RACGAP1
  Gene Name: Rac GTPase activating protein 1
  ENSP ID: ENSP00000448136
MDTMMLNVRNLFEQLVRRVEILSEGNEVQFIQLAKDFEDFRKKWQRTDHELGKYKDLLMKAETERSALDVKLKHARNQVDVEIKRRQRAEADCEKLERQIQLIREML

SEQ ID NO: 70979 - protein, 34 aa, Homo sapiens
  Payload ID: 14079
  Gene Symbol: RACGAP1
  Gene Name: Rac GTPase activating protein 1
  ENSP ID: ENSP00000448507
MRLHDFVSKTVIKPESCVPCGKRIKFGKLSLKCR

SEQ ID NO: 70980 - protein, 293 aa, Homo sapiens
  Payload ID: 14079
  Gene Symbol: RACGAP1
  Gene Name: Rac GTPase activating protein 1
  ENSP ID: ENSP00000448697
MDTMMLNVRNLFEQLVRRVEILSEGNEVQFIQLAKDFEDFRKKWQRTDHELGKYKDLLMKAETERSALDVKLKHARNQVDVEIKRRQRAEADCEKLERQIQLIREMLMCDTSGSIQLSEEQKSALAFLNRGQPSSSNAGNKRLSTIDESGSILSDISFDKTDESLDWDSSLVKTFKLKKREKRRSTSRQFVDGPPGPVKKTRSIGSAVDQGNESIVAKTTVTVPNDGGPIEAVSTIETVPYWTRSRRKTGTLQPWNSDSTLNSRQLEPRTETDSVGTPQSNGGMRLHDFVSKT

SEQ ID NO: 70981 - protein, 129 aa, Homo sapiens
  Payload ID: 14079
  Gene Symbol: RACGAP1
  Gene Name: Rac GTPase activating protein 1
  ENSP ID: ENSP00000448707
MDTMMLNVRNLFEQLVRRVEILSEGNEVQFIQLAKDFEDFRKKWQRTDHELGKYKDLLMKAETERSALDVKLKHARNQVDVEIKRRQRAEADCEKLERQIQLIREMLMCDTSGSIQLSEEQKSALAFLN

SEQ ID NO: 70982 - protein, 56 aa, Homo sapiens
  Payload ID: 14079
  Gene Symbol: RACGAP1
  Gene Name: Rac GTPase activating protein 1
  ENSP ID: ENSP00000448860
MDTMMLNVRNLFEQLVRRVEILSEGNENLSSWRRTLRISVKSGRGLTMSWGNTRIF

SEQ ID NO: 70983 - protein, 83 aa, Homo sapiens
  Payload ID: 14079
  Gene Symbol: RACGAP1
  Gene Name: Rac GTPase activating protein 1
  ENSP ID: ENSP00000448968
MKAETERSALDVKLKHARNQVDVEIKRRQRAEADCEKLERQIQLIREMLMCDTSGSIQLSEEQKSALAFLNRGQPSSSNAGNK

SEQ ID NO: 70984 - protein, 174 aa, Homo sapiens
  Payload ID: 14079
  Gene Symbol: RACGAP1
  Gene Name: Rac GTPase activating protein 1
  ENSP ID: ENSP00000449170
MDTMMLNVRNLFEQLVRRVEILSEGNEVQFIQLAKDFEDFRKKWQRTDHELGKYKDLLMKAETERSALDVKLKHARNQVDVEIKRRQRAEADCEKLERQIQLIREMLMCDTSGSIQLSEEQKSALAFLNRGQPSSSNAGNKRLSTIDESGSILSDISFDKTDESLDWDSSLVKT

SEQ ID NO: 70985 - protein, 130 aa, Homo sapiens
  Payload ID: 14079
  Gene Symbol: RACGAP1
  Gene Name: Rac GTPase activating protein 1
  ENSP ID: ENSP00000449186
MDTMMLNVRNLFEQLVRRVEILSEGNEVQFIQLAKDFEDFRKKWQRTDHELGKYKDLLMKAETERSALDVKLKHARNQVDVEIKRRQRAEADCEKLERQIQLIREMLMCDTSGSIQLSEEQKSALAFLNR

SEQ ID NO: 70986 - protein, 632 aa, Homo sapiens; identical to SEQ ID NO: 70970
  Payload ID: 14079
  Gene Symbol: RACGAP1
  Gene Name: Rac GTPase activating protein 1
  Uniprot ID: Q9H0H5
  ENSP ID: ENSP00000449370

SEQ ID NO: 70987 - protein, 632 aa, Homo sapiens; identical to SEQ ID NO: 70970
  Payload ID: 14079
  Gene Symbol: RACGAP1
  Gene Name: Rac GTPase activating protein 1
  Uniprot ID: Q9H0H5
  ENSP ID: ENSP00000449374

SEQ ID NO: 70988 - protein, 280 aa, Homo sapiens
  Payload ID: 14079
  Gene Symbol: RACGAP1
  Gene Name: Rac GTPase activating protein 1
  ENSP ID: ENSP00000449565
QGNESIVAKTTVTVPNDGGPIEAVSTIETVPYWTRSRRKTGTLQPWNSDSTLNSRQLEPRTETDSVGTPQSNGGMRLHDFVSKTGMLADFVSQTSPMIPSIVVHCVNEIEQRGLTETGLYRISGCDRTVKELKEKFLRVKTVPLLSKVDDIHAICSLLKDFLRNLKEPLLTFRLNRAFMEAAEITDEDNSIAAMYQAVGELPQANRDTLAFLMIHLQRVAQSPHTKMDVANLAKVFGPTIVAHAVPNPDPVTMLQDIKRQPKVVERLLSLPLEYWSQFMM

SEQ ID NO: 70989 - protein, 49 aa, Homo sapiens
  Payload ID: 14079
  Gene Symbol: RACGAP1
  Gene Name: Rac GTPase activating protein 1
  ENSP ID: ENSP00000449574
MDTMMLNVRNLFEQLVRRVEILSEGNEVRLGLFFGEDFQTEEERKEALY

SEQ ID NO: 70990 - protein, 177 aa, Homo sapiens
  Payload ID: 14079
  Gene Symbol: RACGAP1
  Gene Name: Rac GTPase activating protein 1
  ENSP ID: ENSP00000449620
MSCPCFCPVALRMDTMMLNVRNLFEQLVRRVEILSEGNEVQFIQLAKDFEDFRKKWQRTDHELGKYKDLLMKAETERSALDVKLKHARNQVDVEIKRRQRAEADCEKLERQIQLIREMLMCDTSGSIQLSEEQKSALAFLNRGQPSSSNAGNKRLSTIDESGSILSDISFDKTDESL

SEQ ID NO: 70991 - protein, 155 aa, Homo sapiens
  Payload ID: 14079
  Gene Symbol: RACGAP1
  Gene Name: Rac GTPase activating protein 1
  ENSP ID: ENSP00000449669
MDTMMLNVRNLFEQLVRRVEILSEGNEVQFIQLAKDFEDFRKKWQRTDHELGKYKDLLMKAETERSALDVKLKHARNQVDVEIKRRQRAEADCEKLERQIQLIREMLMCDTSGSIQLSEEQKSALAFLNRGQPSSSNAGNKRLSTIDESGSILSD

SEQ ID NO: 70992 - protein, 111 aa, Homo sapiens
  Payload ID: 14079
  Gene Symbol: RACGAP1
  Gene Name: Rac GTPase activating protein 1
  ENSP ID: ENSP00000449959
MDTMMLNVRNLFEQLVRRVEILSEGNEVQFIQLAKDFEDFRKKWQRTDHELGKYKDLLMKAETERSALDVKLKHARNQVDVEIKRRQRAEADCEKLERQIQLIREMLMCDT

SEQ ID NO: 70993 - protein, 152 aa, Homo sapiens
  Payload ID: 14079
  Gene Symbol: RACGAP1
  Gene Name: Rac GTPase activating protein 1
  ENSP ID: ENSP00000449963
MKAETERSALDVKLKHARNQVDVEIKRRQRAEADCEKLERQIQLIREMLMCDTSGSIQLSEEQKSALAFLNRGQPSSSNAGNKRLSTIDESGSILSDISFDKTDESLDWDSSLVKTFKLKKREKRRSTSRQFVDGPPGPVKKTRSIGSAVDQ

SEQ ID NO: 70994 - protein, 124 aa, Homo sapiens
  Payload ID: 14079
  Gene Symbol: RACGAP1
  Gene Name: Rac GTPase activating protein 1
  ENSP ID: ENSP00000450064
MKAETERSALDVKLKHARNQVDVEIKRRQRAEADCEKLERQIQLIREMLMCDTSGSIQLSEEQKSALAFLNRGQPSSSNAGNKRLSTIDESGSILSDISFDKTDESLDWDSSLVKTFKLKKREK

SEQ ID NO: 70995 - protein, 67 aa, Homo sapiens
  Payload ID: 14079
  Gene Symbol: RACGAP1
  Gene Name: Rac GTPase activating protein 1
  ENSP ID: ENSP00000450074
MCGICLSSLCAGWRFSVKEMKSERQIQLIREMLMCDTSGSIQLSEEQKSALAFLNRGQPSSSNAGNK

SEQ ID NO: 70996 - protein, 776 aa, Homo sapiens
  Payload ID: 14080
  Gene Symbol: ARHGEF6
  Gene Name: Rac/Cdc42 guanine nucleotide exchange factor (GEF) 6
  Uniprot ID: Q15052
  ENSP ID: ENSP00000250617
MNPEEQIVTWLISLGVLESPKKTICDPEEFLKSSLKNGVVLCKLINRLMPGSVEKFCLDPQTEADCINNINDFLKGCATLQVEIFDPDDLYSGVNFSKVLSTLLAVNKATEDQLSERPCGRSSSLSAANTSQTNPQGAVSSTVSGLQRQSKTVEMTENGSHQLIVKARFNFKQTNEDELSVCKGDIIYVTRVEEGGWWEGTLNGRTGWFPSNYVREIKSSERPLSPKAVKGFETAPLTKNYYTVVLQNILDTEKEYAKELQSLLVTYLRPLQSNNNLSTVEVTSLLGNFEEVCTFQQTLCQALEECSKFPENQHKVGGCLLSLMPHFKSMYLAYCANHPSAVNVLTQHSDELEQFMENQGASSPGILILTTNLSKPFMRLEKYVTLLQELERHMEDTHPDHQDILKAIVAFKTLMGQCQDLRKRKQLELQILSEPIQAWEGEDIKNLGNVIFMSQVMVQYGACEEKEERYLMLFSNVLIMLSASPRMSGFIYQGKIPIAGTVVTRLDEIEGNDCTFEITGNTVERIVVHCNNNQDFQEWLEQLNRLIRGPASCSSLSKTSSSSCSAHSSFSSTGQPRGPLEPPQIIKPWSLSCLRPAPPLRPSAALGYKERMSYILKESSKSPKTMKKFLHKRKTERKPSEEEYVIRKSTAALEEDAQILKVIEAYCTSANFQQGHGSSTRKDSIPQVLLPEEEKLIIEETRSNGQTIMEEKSLVDTVYALKDEVRELKQENKRMKQCLEEELKSRRDLEKLVRRLLKQTDECIRGESSSKTSILP

SEQ ID NO: 70997 - protein, 622 aa, Homo sapiens
  Payload ID: 14080
  Gene Symbol: ARHGEF6
  Gene Name: Rac/Cdc42 guanine nucleotide exchange factor (GEF) 6
  Uniprot ID: Q15052
  ENSP ID: ENSP00000359654
MTENGSHQLIVKARFNFKQTNEDELSVCKGDIIYVTRVEEGGWWEGTLNGRTGWFPSNYVREIKSSERPLSPKAVKGFETAPLTKNYYTVVLQNILDTEKEYAKELQSLLVTYLRPLQSNNNLSTVEVTSLLGNFEEVCTFQQTLCQALEECSKFPENQHKVGGCLLSLMPHFKSMYLAYCANHPSAVNVLTQHSDELEQFMENQGASSPGILILTTNLSKPFMRLEKYVTLLQELERHMEDTHPDHQDILKAIVAFKTLMGQCQDLRKRKQLELQILSEPIQAWEGEDIKNLGNVIFMSQVMVQYGACEEKEERYLMLFSNVLIMLSASPRMSGFIYQGKIPIAGTVVTRLDEIEGNDCTFEITGNTVERIVVHCNNNQDFQEWLEQLNRLIRGPASCSSLSKTSSSSCSAHSSFSSTGQPRGPLEPPQIIKPWSLSCLRPAPPLRPSAALGYKERMSYILKESSKSPKTMKKFLHKRKTERKPSEEEYVIRKSTAALEEDAQILKVIEAYCTSANFQQGHGSSTRKDSIPQVLLPEEEKLIIEETRSNGQTIMEEKSLVDTVYALKDEVRELKQENKRMKQCLEEELKSRRDLEKLVRRLLKQTDECIRGESSSKTSILP

SEQ ID NO: 70998 - protein, 622 aa, Homo sapiens; identical to SEQ ID NO: 70997
  Payload ID: 14080
  Gene Symbol: ARHGEF6
  Gene Name: Rac/Cdc42 guanine nucleotide exchange factor (GEF) 6
  Uniprot ID: Q15052
  ENSP ID: ENSP00000359656

SEQ ID NO: 70999 - protein, 68 aa, Homo sapiens
  Payload ID: 14081
  Gene Symbol: RAD1
  Gene Name: RAD1 checkpoint DNA exonuclease
  Uniprot ID: O60671
  ENSP ID: ENSP00000313467
MPLLTQQIQDEDDQYSLVASLDNVRNLSTILKAIHFREHATCFATKNGIKVTVENAKCVQANAFIQGL

SEQ ID NO: 71000 - protein, 282 aa, Homo sapiens
  Payload ID: 14081
  Gene Symbol: RAD1
  Gene Name: RAD1 checkpoint DNA exonuclease
  Uniprot ID: O60671
  ENSP ID: ENSP00000340879
MPLLTQQIQDEDDQYSLVASLDNVRNLSTILKAIHFREHATCFATKNGIKVTVENAKCVQANAFIQAGIFQEFKVQEESVTFRINLTVLLDCLSIFGSSPMPGTLTALRMCYQGYGYPLMLFLEEGGVVTVCKINTQEPEETLDFDFCSTNVINKIILQSEGLREAFSELDMTSEVLQITMSPDKPYFRLSTFGNAGSSHLDYPKDSDLMEAFHCNQTQVNRYKISLLKPSTKALVLSCKVSIRTDNRGFLSLQYMIRNEDGQICFVEYYCCPDEEVPESES

SEQ ID NO: 71001 - protein, 282 aa, Homo sapiens; identical to SEQ ID NO: 71000
  Payload ID: 14081
  Gene Symbol: RAD1
  Gene Name: RAD1 checkpoint DNA exonuclease
  Uniprot ID: O60671
  ENSP ID: ENSP00000371469

SEQ ID NO: 71002 - protein, 84 aa, Homo sapiens
  Payload ID: 14081
  Gene Symbol: RAD1
  Gene Name: RAD1 checkpoint DNA exonuclease
  ENSP ID: ENSP00000421007
MPLLTQQIQDEDDQYSLVASLDNVRNLSTILKAIHFREHATCFATKNGIKVTVENAKCVQANAFIQGHGMVAHTCISSCSGDRG

SEQ ID NO: 71003 - protein, 84 aa, Homo sapiens; identical to SEQ ID NO: 71002
  Payload ID: 14081
  Gene Symbol: RAD1
  Gene Name: RAD1 checkpoint DNA exonuclease
  ENSP ID: ENSP00000423253

SEQ ID NO: 71004 - protein, 84 aa, Homo sapiens; identical to SEQ ID NO: 71002
  Payload ID: 14081
  Gene Symbol: RAD1
  Gene Name: RAD1 checkpoint DNA exonuclease
  ENSP ID: ENSP00000487478

SEQ ID NO: 71005 - protein, 584 aa, Homo sapiens
  Payload ID: 14082
  Gene Symbol: RAD17
  Gene Name: RAD17 checkpoint clamp loader component
  Uniprot ID: O75943
  ENSP ID: ENSP00000282891
MNQHELAVHKKKIEEVETWLKAQVLERQPKQGGSILLITGPPGCGKTTTLKILSKEHGIQVQEWINPVLPDFQKDDFKGMFNTESSFHMFPYQSQIAVFKEFLLRATKYNKLQMLGDDLRTDKKIILVEDLPNQFYRDSHTLHEVLRKYVRIGRCPLIFIISDSLSGDNNQRLLFPKEIQEECSISNISFNPVAPTIMMKFLNRIVTIEANKNGGKITVPDKTSLELLCQGCSGDIRSAINSLQFSSSKGENNLRPRKKGMSLKSDAVLSKSKRRKKPDRVFENQEVQAIGGKDVSLFLFRALGKILYCKRASLTELDSPRLPSHLSEYERDTLLVEPEEVVEMSHMPGDLFNLYLHQNYIDFFMEIDDIVRASEFLSFADILSGDWNTRSLLREYSTSIATRGVMHSNKARGYAHCQGGGSSFRPLHKPQWFLINKKYRENCLAAKALFPDFCLPALCLQTQLLPYLALLTIPMRNQAQISFIQDIGRLPLKRHFGRLKMEALTDREHGMIDPDSGDEAQLNGGHSAEESLGEPTQATVPETWSLPLSQNSASELPASQPQPFSAQGDMEENIIIEDYESDGT

SEQ ID NO: 71006 - protein, 670 aa, Homo sapiens
  Payload ID: 14082
  Gene Symbol: RAD17
  Gene Name: RAD17 checkpoint clamp loader component
  Uniprot ID: O75943
  ENSP ID: ENSP00000303134
MNQVTDWVDPSFDDFLECSGVSTITATSLGVNNSSHRRKNGPSTLESSRFPARKRGNLSSLEQIYGLENSKEYLSENEPWVDKYKPETQHELAVHKKKIEEVETWLKAQVLERQPKQGGSILLITGPPGCGKTTTLKILSKEHGIQVQEWINPVLPDFQKDDFKGMFNTESSFHMFPYQSQIAVFKEFLLRATKYNKLQMLGDDLRTDKKIILVEDLPNQFYRDSHTLHEVLRKYVRIGRCPLIFIISDSLSGDNNQRLLFPKEIQEECSISNISFNPVAPTIMMKFLNRIVTIEANKNGGKITVPDKTSLELLCQGCSGDIRSAINSLQFSSSKGENNLRPRKKGMSLKSDAVLSKSKRRKKPDRVFENQEVQAIGGKDVSLFLFRALGKILYCKRASLTELDSPRLPSHLSEYERDTLLVEPEEVVEMSHMPGDLFNLYLHQNYIDFFMEIDDIVRASEFLSFADILSGDWNTRSLLREYSTSIATRGVMHSNKARGYAHCQGGGSSFRPLHKPQWFLINKKYRENCLAAKALFPDFCLPALCLQTQLLPYLALLTIPMRNQAQISFIQDIGRLPLKRHFGRLKMEALTDREHGMIDPDSGDEAQLNGGHSAEESLGEPTQATVPETWSLPLSQNSASELPASQPQPFSAQGDMEENIIIEDYESDGT

SEQ ID NO: 71007 - protein, 670 aa, Homo sapiens; identical to SEQ ID NO: 71006
  Payload ID: 14082
  Gene Symbol: RAD17
  Gene Name: RAD17 checkpoint clamp loader component
  Uniprot ID: O75943
  ENSP ID: ENSP00000311227

SEQ ID NO: 71008 - protein, 670 aa, Homo sapiens; identical to SEQ ID NO: 71006
  Payload ID: 14082
  Gene Symbol: RAD17
  Gene Name: RAD17 checkpoint clamp loader component
  Uniprot ID: O75943
  ENSP ID: ENSP00000346271

SEQ ID NO: 71009 - protein, 670 aa, Homo sapiens; identical to SEQ ID NO: 71006
  Payload ID: 14082
  Gene Symbol: RAD17
  Gene Name: RAD17 checkpoint clamp loader component
  Uniprot ID: O75943
  ENSP ID: ENSP00000346938

SEQ ID NO: 71010 - protein, 505 aa, Homo sapiens
  Payload ID: 14082
  Gene Symbol: RAD17
  Gene Name: RAD17 checkpoint clamp loader component
  Uniprot ID: O75943
  ENSP ID: ENSP00000350725
MFNTESSFHMFPYQSQIAVFKEFLLRATKYNKLQMLGDDLRTDKKIILVEDLPNQFYRDSHTLHEVLRKYVRIGRCPLIFIISDSLSGDNNQRLLFPKEIQEECSISNISFNPVAPTIMMKFLNRIVTIEANKNGGKITVPDKTSLELLCQGCSGDIRSAINSLQFSSSKGENNLRPRKKGMSLKSDAVLSKSKRRKKPDRVFENQEVQAIGGKDVSLFLFRALGKILYCKRASLTELDSPRLPSHLSEYERDTLLVEPEEVVEMSHMPGDLFNLYLHQNYIDFFMEIDDIVRASEFLSFADILSGDWNTRSLLREYSTSIATRGVMHSNKARGYAHCQGGGSSFRPLHKPQWFLINKKYRENCLAAKALFPDFCLPALCLQTQLLPYLALLTIPMRNQAQISFIQDIGRLPLKRHFGRLKMEALTDREHGMIDPDSGDEAQLNGGHSAEESLGEPTQATVPETWSLPLSQNSASELPASQPQPFSAQGDMEENIIIEDYESDGT

SEQ ID NO: 71011 - protein, 670 aa, Homo sapiens; identical to SEQ ID NO: 71006
  Payload ID: 14082
  Gene Symbol: RAD17
  Gene Name: RAD17 checkpoint clamp loader component
  Uniprot ID: O75943
  ENSP ID: ENSP00000355226

SEQ ID NO: 71012 - protein, 681 aa, Homo sapiens
  Payload ID: 14082
  Gene Symbol: RAD17
  Gene Name: RAD17 checkpoint clamp loader component
  Uniprot ID: O75943
  ENSP ID: ENSP00000370151
MSKTFLRPKVSSTKVTDWVDPSFDDFLECSGVSTITATSLGVNNSSHRRKNGPSTLESSRFPARKRGNLSSLEQIYGLENSKEYLSENEPWVDKYKPETQHELAVHKKKIEEVETWLKAQVLERQPKQGGSILLITGPPGCGKTTTLKILSKEHGIQVQEWINPVLPDFQKDDFKGMFNTESSFHMFPYQSQIAVFKEFLLRATKYNKLQMLGDDLRTDKKIILVEDLPNQFYRDSHTLHEVLRKYVRIGRCPLIFIISDSLSGDNNQRLLFPKEIQEECSISNISFNPVAPTIMMKFLNRIVTIEANKNGGKITVPDKTSLELLCQGCSGDIRSAINSLQFSSSKGENNLRPRKKGMSLKSDAVLSKSKRRKKPDRVFENQEVQAIGGKDVSLFLFRALGKILYCKRASLTELDSPRLPSHLSEYERDTLLVEPEEVVEMSHMPGDLFNLYLHQNYIDFFMEIDDIVRASEFLSFADILSGDWNTRSLLREYSTSIATRGVMHSNKARGYAHCQGGGSSFRPLHKPQWFLINKKYRENCLAAKALFPDFCLPALCLQTQLLPYLALLTIPMRNQAQISFIQDIGRLPLKRHFGRLKMEALTDREHGMIDPDSGDEAQLNGGHSAEESLGEPTQATVPETWSLPLSQNSASELPASQPQPFSAQGDMEENIIIEDYESDGT

SEQ ID NO: 71013 - protein, 20 aa, Homo sapiens
  Payload ID: 14082
  Gene Symbol: RAD17
  Gene Name: RAD17 checkpoint clamp loader component
  ENSP ID: ENSP00000423060
MNQVTDWVDPSFDDFLECSG

SEQ ID NO: 71014 - protein, 165 aa, Homo sapiens
  Payload ID: 14082
  Gene Symbol: RAD17
  Gene Name: RAD17 checkpoint clamp loader component
  ENSP ID: ENSP00000424289
SDSLSGDNNQRLLFPKEIQEECSISNISFNPVAPTIMMKFLNRIVTIEANKNGGKITVPDKTSLELLCQGCSGDIRSAINSLQFSSSKGENNLRPRKKGMSLKSDAVLSKSKRRKKPDRVFENQEVQAIGGKDVSLFLFRALGKILYCKMNGIRILSCREQHLPT

SEQ ID NO: 71015 - protein, 169 aa, Homo sapiens
  Payload ID: 14082
  Gene Symbol: RAD17
  Gene Name: RAD17 checkpoint clamp loader component
  ENSP ID: ENSP00000424696
MNQVTDWVDPSFDDFLECSGVSTITATSLGVNNSSHRRKNGPSTLESSRFPARKRGNLSSLEQIYGLENSKEYLSENEPWVDKYKPETQHELAVHKKKIEEVETWLKAQVLERQPKQGGSILLITGPPGCGKTTTLKILSKEHGIQVQEWINPVLPDFQKDDFKGMFNT

SEQ ID NO: 71016 - protein, 184 aa, Homo sapiens
  Payload ID: 14082
  Gene Symbol: RAD17
  Gene Name: RAD17 checkpoint clamp loader component
  ENSP ID: ENSP00000425005
SLFLFRALGKILYCKRASLTELDSPRLPSHLSEYERDTLLVEPEEVVEMSHMPGDLFNLYLHQNYIDFFMEIDDIVRASEFLSFADILSGDWNTRSLLREYSTSIATRGVMHSNKARGYAHCQGGGSSFRPLHKPQWFLINKKYRENCLAAKALFPDFCLPALCLQTQLLPYLALLTIPMRNQD

SEQ ID NO: 71017 - protein, 681 aa, Homo sapiens; identical to SEQ ID NO: 71012
  Payload ID: 14082
  Gene Symbol: RAD17
  Gene Name: RAD17 checkpoint clamp loader component
  Uniprot ID: O75943
  ENSP ID: ENSP00000426191

SEQ ID NO: 71018 - protein, 50 aa, Homo sapiens
  Payload ID: 14082
  Gene Symbol: RAD17
  Gene Name: RAD17 checkpoint clamp loader component
  ENSP ID: ENSP00000427673
MFNTESSFHMFPYQSQIAVFKEFLLRATKYNKLQMLGDDLRTDKKIILVE

SEQ ID NO: 71019 - protein, 505 aa, Homo sapiens; identical to SEQ ID NO: 71010
  Payload ID: 14082
  Gene Symbol: RAD17
  Gene Name: RAD17 checkpoint clamp loader component
  Uniprot ID: O75943
  ENSP ID: ENSP00000427743

SEQ ID NO: 71020 - protein, 670 aa, Homo sapiens
  Payload ID: 14082
  Gene Symbol: RAD17
  Gene Name: RAD17 checkpoint clamp loader component
  Uniprot ID: O75943
  ENSP ID: ENSP00000477962
MNQVTDWVDPSFDDFLECSGVSTITATSLGVNNSSHRRKNGPSTLESSRFPARKRGNLSSLEQIYGLENSKEYLSENEPWVDKYKPETQHELAVHKKKIEEVETWLKAQVLERQPKQGGSILLITGPPGCGKTTTLKILSKEHGIQVQEWINPVLPDFQKDDFKGMFNTESSFHMFPYQSQIAVFKEFLLRATKYNKLQMLGDDLRTDKKIILVEDLPNQFYRDSHTLHEVLRKYVRIGRCPLIFIISDSLSGDNNQRLLFPKEIQEECSISNISFNPVAPTIMMKFLNRIVTIEANKNGGKITVPDKTSLELLCQGCSGDIRSAINSLQFSSSKGENNLRPRKKGMSLKSDAVLSKSKRRKKPDRVFENQEVQAIGGKDVSLFLFRALGKILYCKRASLTELDSPRLPSHLSEYERDTLLVEPEEVVEMSHMPGDLFNLYLHQNYIDFFMEIDDIVRASEFLSFADILSGDWNTRSLLREYSTSIATRGVMHSNKARGYAHCQGGGSSFRPLHKPQWFLINKKYRENCLAAKALFPDFCLPALCRQTQLLPYLALLTIPMRNQAQISFIQDIGRLPLKRHFGRLKMEALTDREHGMIDPDSGDEAQLNGGHSAEESLGEPTQATVPETWSLPLSQNSASELPASQPQPFSAQGDMEENIIIEDYESDGT

SEQ ID NO: 71021 - protein, 670 aa, Homo sapiens; identical to SEQ ID NO: 71020
  Payload ID: 14082
  Gene Symbol: RAD17
  Gene Name: RAD17 checkpoint clamp loader component
  Uniprot ID: O75943
  ENSP ID: ENSP00000477996

SEQ ID NO: 71022 - protein, 670 aa, Homo sapiens; identical to SEQ ID NO: 71020
  Payload ID: 14082
  Gene Symbol: RAD17
  Gene Name: RAD17 checkpoint clamp loader component
  Uniprot ID: O75943
  ENSP ID: ENSP00000478167

SEQ ID NO: 71023 - protein, 20 aa, Homo sapiens
  Payload ID: 14082
  Gene Symbol: RAD17
  Gene Name: RAD17 checkpoint clamp loader component
  ENSP ID: ENSP00000478321
MNQVTDWVDPSFDDFLECSG

SEQ ID NO: 71024 - protein, 670 aa, Homo sapiens; identical to SEQ ID NO: 71020
  Payload ID: 14082
  Gene Symbol: RAD17
  Gene Name: RAD17 checkpoint clamp loader component
  Uniprot ID: O75943
  ENSP ID: ENSP00000479160

SEQ ID NO: 71025 - protein, 505 aa, Homo sapiens
  Payload ID: 14082
  Gene Symbol: RAD17
  Gene Name: RAD17 checkpoint clamp loader component
  ENSP ID: ENSP00000480230
MFNTESSFHMFPYQSQIAVFKEFLLRATKYNKLQMLGDDLRTDKKIILVEDLPNQFYRDSHTLHEVLRKYVRIGRCPLIFIISDSLSGDNNQRLLFPKEIQEECSISNISFNPVAPTIMMKFLNRIVTIEANKNGGKITVPDKTSLELLCQGCSGDIRSAINSLQFSSSKGENNLRPRKKGMSLKSDAVLSKSKRRKKPDRVFENQEVQAIGGKDVSLFLFRALGKILYCKRASLTELDSPRLPSHLSEYERDTLLVEPEEVVEMSHMPGDLFNLYLHQNYIDFFMEIDDIVRASEFLSFADILSGDWNTRSLLREYSTSIATRGVMHSNKARGYAHCQGGGSSFRPLHKPQWFLINKKYRENCLAAKALFPDFCLPALCRQTQLLPYLALLTIPMRNQAQISFIQDIGRLPLKRHFGRLKMEALTDREHGMIDPDSGDEAQLNGGHSAEESLGEPTQATVPETWSLPLSQNSASELPASQPQPFSAQGDMEENIIIEDYESDGT

SEQ ID NO: 71026 - protein, 50 aa, Homo sapiens; identical to SEQ ID NO: 71018
  Payload ID: 14082
  Gene Symbol: RAD17
  Gene Name: RAD17 checkpoint clamp loader component
  ENSP ID: ENSP00000480453

SEQ ID NO: 71027 - protein, 681 aa, Homo sapiens
  Payload ID: 14082
  Gene Symbol: RAD17
  Gene Name: RAD17 checkpoint clamp loader component
  ENSP ID: ENSP00000480786
MSKTFLRPKVSSTKVTDWVDPSFDDFLECSGVSTITATSLGVNNSSHRRKNGPSTLESSRFPARKRGNLSSLEQIYGLENSKEYLSENEPWVDKYKPETQHELAVHKKKIEEVETWLKAQVLERQPKQGGSILLITGPPGCGKTTTLKILSKEHGIQVQEWINPVLPDFQKDDFKGMFNTESSFHMFPYQSQIAVFKEFLLRATKYNKLQMLGDDLRTDKKIILVEDLPNQFYRDSHTLHEVLRKYVRIGRCPLIFIISDSLSGDNNQRLLFPKEIQEECSISNISFNPVAPTIMMKFLNRIVTIEANKNGGKITVPDKTSLELLCQGCSGDIRSAINSLQFSSSKGENNLRPRKKGMSLKSDAVLSKSKRRKKPDRVFENQEVQAIGGKDVSLFLFRALGKILYCKRASLTELDSPRLPSHLSEYERDTLLVEPEEVVEMSHMPGDLFNLYLHQNYIDFFMEIDDIVRASEFLSFADILSGDWNTRSLLREYSTSIATRGVMHSNKARGYAHCQGGGSSFRPLHKPQWFLINKKYRENCLAAKALFPDFCLPALCRQTQLLPYLALLTIPMRNQAQISFIQDIGRLPLKRHFGRLKMEALTDREHGMIDPDSGDEAQLNGGHSAEESLGEPTQATVPETWSLPLSQNSASELPASQPQPFSAQGDMEENIIIEDYESDGT

SEQ ID NO: 71028 - protein, 505 aa, Homo sapiens; identical to SEQ ID NO: 71025
  Payload ID: 14082
  Gene Symbol: RAD17
  Gene Name: RAD17 checkpoint clamp loader component
  ENSP ID: ENSP00000481388

SEQ ID NO: 71029 - protein, 165 aa, Homo sapiens; identical to SEQ ID NO: 71014
  Payload ID: 14082
  Gene Symbol: RAD17
  Gene Name: RAD17 checkpoint clamp loader component
  ENSP ID: ENSP00000481820

SEQ ID NO: 71030 - protein, 670 aa, Homo sapiens; identical to SEQ ID NO: 71020
  Payload ID: 14082
  Gene Symbol: RAD17
  Gene Name: RAD17 checkpoint clamp loader component
  Uniprot ID: O75943
  ENSP ID: ENSP00000482371

SEQ ID NO: 71031 - protein, 184 aa, Homo sapiens
  Payload ID: 14082
  Gene Symbol: RAD17
  Gene Name: RAD17 checkpoint clamp loader component
  ENSP ID: ENSP00000482765
SLFLFRALGKILYCKRASLTELDSPRLPSHLSEYERDTLLVEPEEVVEMSHMPGDLFNLYLHQNYIDFFMEIDDIVRASEFLSFADILSGDWNTRSLLREYSTSIATRGVMHSNKARGYAHCQGGGSSFRPLHKPQWFLINKKYRENCLAAKALFPDFCLPALCRQTQLLPYLALLTIPMRNQD

SEQ ID NO: 71032 - protein, 670 aa, Homo sapiens; identical to SEQ ID NO: 71006
  Payload ID: 14082
  Gene Symbol: RAD17
  Gene Name: RAD17 checkpoint clamp loader component
  Uniprot ID: O75943
  ENSP ID: ENSP00000482775

SEQ ID NO: 71033 - protein, 584 aa, Homo sapiens
  Payload ID: 14082
  Gene Symbol: RAD17
  Gene Name: RAD17 checkpoint clamp loader component
  ENSP ID: ENSP00000483115
MNQHELAVHKKKIEEVETWLKAQVLERQPKQGGSILLITGPPGCGKTTTLKILSKEHGIQVQEWINPVLPDFQKDDFKGMFNTESSFHMFPYQSQIAVFKEFLLRATKYNKLQMLGDDLRTDKKIILVEDLPNQFYRDSHTLHEVLRKYVRIGRCPLIFIISDSLSGDNNQRLLFPKEIQEECSISNISFNPVAPTIMMKFLNRIVTIEANKNGGKITVPDKTSLELLCQGCSGDIRSAINSLQFSSSKGENNLRPRKKGMSLKSDAVLSKSKRRKKPDRVFENQEVQAIGGKDVSLFLFRALGKILYCKRASLTELDSPRLPSHLSEYERDTLLVEPEEVVEMSHMPGDLFNLYLHQNYIDFFMEIDDIVRASEFLSFADILSGDWNTRSLLREYSTSIATRGVMHSNKARGYAHCQGGGSSFRPLHKPQWFLINKKYRENCLAAKALFPDFCLPALCRQTQLLPYLALLTIPMRNQAQISFIQDIGRLPLKRHFGRLKMEALTDREHGMIDPDSGDEAQLNGGHSAEESLGEPTQATVPETWSLPLSQNSASELPASQPQPFSAQGDMEENIIIEDYESDGT

SEQ ID NO: 71034 - protein, 169 aa, Homo sapiens; identical to SEQ ID NO: 71015
  Payload ID: 14082
  Gene Symbol: RAD17
  Gene Name: RAD17 checkpoint clamp loader component
  ENSP ID: ENSP00000483809

SEQ ID NO: 71035 - protein, 681 aa, Homo sapiens; identical to SEQ ID NO: 71027
  Payload ID: 14082
  Gene Symbol: RAD17
  Gene Name: RAD17 checkpoint clamp loader component
  ENSP ID: ENSP00000484227

SEQ ID NO: 71036 - protein, 670 aa, Homo sapiens; identical to SEQ ID NO: 71020
  Payload ID: 14082
  Gene Symbol: RAD17
  Gene Name: RAD17 checkpoint clamp loader component
  Uniprot ID: O75943
  ENSP ID: ENSP00000484854

SEQ ID NO: 71037 - protein, 495 aa, Homo sapiens
  Payload ID: 14083
  Gene Symbol: RAD18
  Gene Name: RAD18 E3 ubiquitin protein ligase
  Uniprot ID: Q9NS91
  ENSP ID: ENSP00000264926
MDSLAESRWPPGLAVMKTIDDLLRCGICFEYFNIAMIIPQCSHNYCSLCIRKFLSYKTQCPTCCVTVTEPDLKNNRILDELVKSLNFARNHLLQFALESPAKSPASSSSKNLAVKVYTPVASRQSLKQGSRLMDNFLIREMSGSTSELLIKENKSKFSPQKEASPAAKTKETRSVEEIAPDPSEAKRPEPPSTSTLKQVTKVDCPVCGVNIPESHINKHLDSCLSREEKKESLRSSVHKRKPLPKTVYNLLSDRDLKKKLKEHGLSIQGNKQQLIKRHQEFVHMYNAQCDALHPKSAAEIVREIENIEKTRMRLEASKLNESVMVFTKDQTEKEIDEIHSKYRKKHKSEFQLLVDQARKGYKKIAGMSQKTVTITKEDESTEKLSSVCMGQEDNMTSVTNHFSQSKLDSPEELEPDREEDSSSCIDIQEVLSSSESDSCNSSSSDIIRDLLEEEEAWEASHKNDLQDTEISPRQNRRTRAAESAEIEPRNKRNRN

SEQ ID NO: 71038 - protein, 79 aa, Homo sapiens
  Payload ID: 14083
  Gene Symbol: RAD18
  Gene Name: RAD18 E3 ubiquitin protein ligase
  ENSP ID: ENSP00000393783
LSSVCMGQEDNMTSVTNHFSQSKLDSPEELEPDREEDSSSCIDIQEVLSSSESDSCNSSSSDIIRDLLEEEEAWEASHK

SEQ ID NO: 71039 - protein, 53 aa, Homo sapiens
  Payload ID: 14083
  Gene Symbol: RAD18
  Gene Name: RAD18 E3 ubiquitin protein ligase
  ENSP ID: ENSP00000397852
MDSLAESRWPPGLAVMKTIDDLLRCGICFEYFNIAMIIPQCSHNYCHRAGSEK

SEQ ID NO: 71040 - protein, 126 aa, Homo sapiens
  Payload ID: 14083
  Gene Symbol: RAD18
  Gene Name: RAD18 E3 ubiquitin protein ligase
  ENSP ID: ENSP00000399620
MDSLAESRWPPGLAVMKTIDDLLRCGICFEYFNIAMIIPQCSHNYCSLCIRKFLSYKTQCPTCCVTVTEPDLKNNRILDELESSAAVCFRVTSQISCFFLFKESCCQSIYSCSLQTVFKAGEQVNG

SEQ ID NO: 71041 - protein, 310 aa, Homo sapiens
  Payload ID: 14083
  Gene Symbol: RAD18
  Gene Name: RAD18 E3 ubiquitin protein ligase
  ENSP ID: ENSP00000402049
MDSLAESRWPPGLAVMKTIDDLLRCGICFEYFNIAMIIPQCSHNYCSLCIRKFLSYKTQCPTCCVTVTEPDLKNNRILDELVKSLNFARNHLLQFALESPAKSPASSSSKNLAVKVYTPVASRQSLKQGSRLMDNFLIREMSGSTSELLIKENKSKFSPQKEASPAAKTKETRSVEEIAPDPSEAKRPEPPSTSTLKQVTKVDCPVCGVNIPESHINKHLDSCLSREEKKESLRSSVHKRKPLPKTVYNLLSDRDLKKKLKEHGLSIQGNKQQLIKRHQEFVHMYNAQCDALHPKSGNGFYKGPNRKGNR

SEQ ID NO: 71042 - protein, 131 aa, Homo sapiens
  Payload ID: 14083
  Gene Symbol: RAD18
  Gene Name: RAD18 E3 ubiquitin protein ligase
  ENSP ID: ENSP00000412054
  MOD_RES (1)..(1): Any amino acid
XAGMSQKTVTITKEDESTEKLSSVCMGQEDNMTSVTNHFSQSKLDSPEELEPDREEDSSSCIDIQEVLSSSESDSCNSSSSDIIRDLLEEEEAWEASHKLYFSKRRYIFQGSCVSTNPFFCKRTACFYSKL

SEQ ID NO: 71043 - protein, 91 aa, Homo sapiens
  Payload ID: 14083
  Gene Symbol: RAD18
  Gene Name: RAD18 E3 ubiquitin protein ligase
  ENSP ID: ENSP00000412261
MDSLAESRWPPGLAVMKTIDDLLRCGICFEYFNIAMIIPQCSHNYCSLCIRKFLSYKTQCPTCCVTVTEPDLKNNRILDELVKSLNFARNH

SEQ ID NO: 71044 - protein, 631 aa, Homo sapiens
  Payload ID: 14084
  Gene Symbol: RAD21
  Gene Name: RAD21 cohesin complex component
  Uniprot ID: O60216
  ENSP ID: ENSP00000297338
MFYAHFVLSKRGPLAKIWLAAHWDKKLTKAHVFECNLESSVESIISPKVKMALRTSGHLLLGVVRIYHRKAKYLLADCNEAFIKIKMAFRPGVVDLPEENREAAYNAITLPEEFHDFDQPLPDLDDIDVAQQFSLNQSRVEEITMREEVGNISILQENDFGDFGMDDREIMREGSAFEDDDMLVSTTTSNLLLESEQSTSNLNEKINHLEYEDQYKDDNFGEGNDGGILDDKLISNNDGGIFDDPPALSEAGVMLPEQPAHDDMDEDDNVSMGGPDSPDSVDPVEPMPTMTDQTTLVPNEEEAFALEPIDITVKETKAKRKRKLIVDSVKELDSKTIRAQLSDYSDIVTTLDLAPPTKKLMMWKETGGVEKLFSLPAQPLWNNRLLKLFTRCLTPLVPEDLRKRRKGGEADNLDEFLKEFENPEVPREDQQQQHQQRDVIDEPIIEEPSRLQESVMEASRTNIDESAMPPPPPQGVKRKAGQIDPEPVMPPQQVEQMEIPPVELPPEEPPNICQLIPELELLPEKEKEKEKEKEDDEEEEDEDASGGDQDQEERRWNKRTQQMLHGLQRALAKTGAESISLLELCRNTNRKQAAAKFYSFLVLKKQQAIELTQEEPYSDIIATPGPRFHII

SEQ ID NO: 71045 - protein, 225 aa, Homo sapiens
  Payload ID: 14084
  Gene Symbol: RAD21
  Gene Name: RAD21 cohesin complex component
  ENSP ID: ENSP00000427923
MFYAHFVLSKRGPLAKIWLAAHWDKKLTKAHVFECNLESSVESIISPKVKMALRTSGHLLLGVVRIYHRKAKYLLADCNEAFIKIKMAFRPGVVDLPEENREAAYNAITLPEEFHDFDQPLPDLDDIDVAQQFSLNQSRVEEITMREEVGNISILQENDFGDFGMDDREIMREGSAFEDDDMLVSTTTSNLLLESEQSTSNLNEKINHLEYEDQYKDDNFGEGND

SEQ ID NO: 71046 - protein, 176 aa, Homo sapiens
  Payload ID: 14084
  Gene Symbol: RAD21
  Gene Name: RAD21 cohesin complex component
  ENSP ID: ENSP00000428003
MEASRTNIDESAMPPPPPQGVKRKAGQIDPEPVMPPQQVEQMEIPPVELPPEEPPNICQLIPELELLPEKEKEKEKEKEDDEEEEDEDASGGDQDQEERRWNKRTQQMLHGLQRALAKTGAESISLLELCRNTNRKQAAAKFYSFLVLKKQQAIELTQEEPYSDIIATPGPRFHII

SEQ ID NO: 71047 - protein, 120 aa, Homo sapiens
  Payload ID: 14084
  Gene Symbol: RAD21
  Gene Name: RAD21 cohesin complex component
  ENSP ID: ENSP00000428158
MFYAHFVLSKRGPLAKIWLAAHWDKKLTKAHVFECNLESSVESIISPKVKMALRTSGHLLLGVVRIYHRKAKYLLADCNEAFIKIKMAFRPGVVDLPEENREAAYNAITLPEEFHDFDQP

SEQ ID NO: 71048 - protein, 135 aa, Homo sapiens
  Payload ID: 14084
  Gene Symbol: RAD21
  Gene Name: RAD21 cohesin complex component
  ENSP ID: ENSP00000428513
MEIPPVELPPEEPPNICQLIPELELLPEKEKEKEKEKEDDEEEEDEDASGGDQDQEERRWNKRTQQMLHGLQRALAKTGAESISLLELCRNTNRKQAAAKFYSFLVLKKQQAIELTQEEPYSDIIATPGPRFHII

SEQ ID NO: 71049 - protein, 228 aa, Homo sapiens
  Payload ID: 14084
  Gene Symbol: RAD21
  Gene Name: RAD21 cohesin complex component
  ENSP ID: ENSP00000429342
MFYAHFVLSKRGPLAKIWLAAHWDKKLTKAHVFECNLESSVESIISPKVKMALRTSGHLLLGVVRIYHRKAKYLLADCNEAFIKIKMAFRPGVVDLPEENREAAYNAITLPEEFHDFDQPLPDLDDIDVAQQFSLNQSRVEEITMREEVGNISILQENDFGDFGMDDREIMREGSAFEDDDMLVSTTTSNLLLESEQSTSNLNEKINHLEYEDQYKDDNFGEGNDGGI

SEQ ID NO: 71050 - protein, 69 aa, Homo sapiens
  Payload ID: 14084
  Gene Symbol: RAD21
  Gene Name: RAD21 cohesin complex component
  ENSP ID: ENSP00000430273
MLHGLQRALAKTGAESISLLELCRNTNRKQAAAKFYSFLVLKKQQAIELTQEEPYSDIIATPGPRFHII

SEQ ID NO: 71051 - protein, 124 aa, Homo sapiens
  Payload ID: 14084
  Gene Symbol: RAD21
  Gene Name: RAD21 cohesin complex component
  ENSP ID: ENSP00000430524
MFYAHFVLSKRGPLAKIWLAAHWDKKLTKAHVFECNLESSVESIISPKVKMALRTSGHLLLGVVRIYHRKAKYLLADCNEAFIKIKMAFRPGVVDLPEENREAAYNAITLPEEFHDFDQPLPDL

SEQ ID NO: 71052 - protein, 65 aa, Homo sapiens
  Payload ID: 14085
  Gene Symbol: RAD21L1
  Gene Name: RAD21 cohesin complex component like 1
  ENSP ID: ENSP00000246108
MFYTHVLMSKRGPLAKIWLAAHWEKKLTKAHVFECNLEITIEKILSPKVKIALRTSGHLLLGVVR

SEQ ID NO: 71053 - protein, 521 aa, Homo sapiens
  Payload ID: 14085
  Gene Symbol: RAD21L1
  Gene Name: RAD21 cohesin complex component like 1
  Uniprot ID: Q9H4I0
  ENSP ID: ENSP00000385925
MFYTHVLMSKRGPLAKIWLAAHWEKKLTKAHVFECNLEITIEKILSPKVKIALRTSGHLLLGVVRIYNRKAKYLLADCSEAFLKMKMTFCPGLVDLPKENFEASYNAITLPEEFHDFDTQNMNAIDVSEHFTQNQSRPEEITLRENFDNDLIFQAESFGEESEILRRHSFFDDNILLNSSGPLIEHSSGSLTGERSLFYDSGDGFGDEGAAGEMIDNLLQDDQNILLEDMHLNREISLPSEPPNSLAVEPDNSECICVPENEKMNETILLSTEEEGFTLDPIDISDIAEKRKGKKRRLLIDPIKELSSKVIHKQLTSFADTLMVLELAPPTQRLMMWKKRGGVHTLLSTAAQDLIHAELKMLFTKCFLSSGFKLGRKMIQKESVREEVGNQNIVETSMMQEPNYQQELSKPQTWKDVIGGSQHSSHEDTNKNINSEESLSNEENIETERWNGRILQMLNRLRVADQGQAAAAATAEALRQAGPEWCEPAGLRRASGLSPRDTAHPTPYSDPQPHGHVPARK

SEQ ID NO: 71054 - protein, 556 aa, Homo sapiens
  Payload ID: 14085
  Gene Symbol: RAD21L1
  Gene Name: RAD21 cohesin complex component like 1
  Uniprot ID: Q9H4I0
  ENSP ID: ENSP00000386414
MFYTHVLMSKRGPLAKIWLAAHWEKKLTKAHVFECNLEITIEKILSPKVKIALRTSGHLLLGVVRIYNRKAKYLLADCSEAFLKMKMTFCPGLVDLPKENFEASYNAITLPEEFHDFDTQNMNAIDVSEHFTQNQSRPEEITLRENFDNDLIFQAESFGEESEILRRHSFFDDNILLNSSGPLIEHSSGSLTGERSLFYDSGDGFGDEGAAGEMIDNLLQDDQNILLEDMHLNREISLPSEPPNSLAVEPDNSECICVPENEKMNETILLSTEEEGFTLDPIDISDIAEKRKGKKRRLLIDPIKELSSKVIHKQLTSFADTLMVLELAPPTQRLMMWKKRGGVHTLLSTAAQDLIHAELKMLFTKCFLSSGFKLGRKMIQKESVREEVGNQNIVETSMMQEPNYQQELSKPQTWKDVIGGSQHSSHEDTNKNINSEQDIVEMVSLAAEESSLMNDLFAQEIEYSPVELESLSNEENIETERWNGRILQMLNRLRESNKMGMQSFSLMKLCRNSDRKQAAAKFYSFLVLKKQLAIELSQSAPYADIIATMGPMFYNI

SEQ ID NO: 71055 - protein, 362 aa, Homo sapiens
  Payload ID: 14086
  Gene Symbol: RAD23A
  Gene Name: RAD23 homolog A, nucleotide excision repair protein
  Uniprot ID: P54725
  ENSP ID: ENSP00000321365
MAVTITLKTLQQQTFKIRMEPDETVKVLKEKIEAEKGRDAFPVAGQKLIYAGKILSDDVPIRDYRIDEKNFVVVMVTKTKAGQGTSAPPEASPTAAPESSTSFPPAPTSGMSHPPPAAREDKSPSEESAPTTSPESVSGSVPSSGSSGREEDAASTLVTGSEYETMLTEIMSMGYERERVVAALRASYNNPHRAVEYLLTGIPGSPEPEHGSVQESQVSEQPATEAGENPLEFLRDQPQFQNMRQVIQQNPALLPALLQQLGQENPQLLQQISRHQEQFIQMLNEPPGELADISDVEGEVGAIGEEAPQMNYIQVTPQEKEAIERLKALGFPESLVIQAYFACEKNENLAANFLLSQNFDDE

SEQ ID NO: 71056 - protein, 62 aa, Homo sapiens
  Payload ID: 14086
  Gene Symbol: RAD23A
  Gene Name: RAD23 homolog A, nucleotide excision repair protein
  ENSP ID: ENSP00000466226
  MOD_RES (1)..(1): Any amino acid
XGSEYETMLTEIMSMGYERERVVAALRASYNNPHRAVEYLLTQERTPWSSCGTSPSSRTCGR

SEQ ID NO: 71057 - protein, 142 aa, Homo sapiens
  Payload ID: 14086
  Gene Symbol: RAD23A
  Gene Name: RAD23 homolog A, nucleotide excision repair protein
  ENSP ID: ENSP00000466243
MAVTITLKTLQQQTFKIRMEPDETVKVLKEKIEAEKGRDAFPVAGQKLIYAGKILSDDVPIRDYRIDEKNFVVVMVTKTKAGQGTSAPPEASPTAAPESSTSFPPAPTSGMSHPPPAAREDKSPSEESAPTTSPESVSGDGL

SEQ ID NO: 71058 - protein, 139 aa, Homo sapiens
  Payload ID: 14086
  Gene Symbol: RAD23A
  Gene Name: RAD23 homolog A, nucleotide excision repair protein
  ENSP ID: ENSP00000466968
MAVTITLKTLQQQTFKIRMEPDETVKVLKEKIEAEKGRDAFPVAGQKLIYAGKILSDDVPIRDYRIDEKNFVVVMVTKTKAGQGTSAPPEASPTAAPESSTSFPPAPTSGMSHPPPAAREDKSPSEESAPTTSPESVSG

SEQ ID NO: 71059 - protein, 363 aa, Homo sapiens
  Payload ID: 14086
  Gene Symbol: RAD23A
  Gene Name: RAD23 homolog A, nucleotide excision repair protein
  Uniprot ID: P54725
  ENSP ID: ENSP00000467024
MAVTITLKTLQQQTFKIRMEPDETVKVLKEKIEAEKGRDAFPVAGQKLIYAGKILSDDVPIRDYRIDEKNFVVVMVTKTKAGQGTSAPPEASPTAAPESSTSFPPAPTSGMSHPPPAAREDKSPSEESAPTTSPESVSGSVPSSGSSGREEDAASTLVTGSEYETMLTEIMSMGYERERVVAALRASYNNPHRAVEYLLTGIPGSPEPEHGSVQESQVSEQPATEAAGENPLEFLRDQPQFQNMRQVIQQNPALLPALLQQLGQENPQLLQQISRHQEQFIQMLNEPPGELADISDVEGEVGAIGEEAPQMNYIQVTPQEKEAIERLKALGFPESLVIQAYFACEKNENLAANFLLSQNFDDE

SEQ ID NO: 71060 - protein, 150 aa, Homo sapiens
  Payload ID: 14086
  Gene Symbol: RAD23A
  Gene Name: RAD23 homolog A, nucleotide excision repair protein
  ENSP ID: ENSP00000467628
IPGSPEPEHGSVQESQVSEQPATEAGENPLEFLRDQPQFQNMRQVIQQNPALLPALLQQLGQENPQLLQQISRHQEQFIQMLNEPPGELADISDVEGEVGAIGEEAPQMNYIQLKALGFPESLVIQAYFACEKNENLAANFLLSQNFDDE

SEQ ID NO: 71061 - protein, 308 aa, Homo sapiens
  Payload ID: 14086
  Gene Symbol: RAD23A
  Gene Name: RAD23 homolog A, nucleotide excision repair protein
  Uniprot ID: P54725
  ENSP ID: ENSP00000468674
MAVTITLKTLQQQTFKIRMEPDETVKVLKEKIEAEKGRDAFPVAGQKLIYAGKILSDDVPIRDYRIDEKNFVVVMVTKTKAGQGTSAPPEASPTAAPESSTSFPPAPTSGMSHPPPAAREDKSPSEESAPTTSPESVSGSVPSSGSSGREEDAASTLVTGSEYETMLTEIMSMGYERERVVAALRASYNNPHRAVEYLLTGIPGSPEPEHGSVQESQVSEQPATEAAGENPLEFLRDQPQFQNMRQVIQQNPALLPALLQQLGQENPQLLQLKALGFPESLVIQAYFACEKNENLAANFLLSQNFDDE

SEQ ID NO: 71062 - protein, 409 aa, Homo sapiens
  Payload ID: 14087
  Gene Symbol: RAD23B
  Gene Name: RAD23 homolog B, nucleotide excision repair protein
  Uniprot ID: P54727
  ENSP ID: ENSP00000350708
MQVTLKTLQQQTFKIDIDPEETVKALKEKIESEKGKDAFPVAGQKLIYAGKILNDDTALKEYKIDEKNFVVVMVTKPKAVSTPAPATTQQSAPASTTAVTSSTTTTVAQAPTPVPALAPTSTPASITPASATASSEPAPASAAKQEKPAEKPAETPVATSPTATDSTSGDSSRSNLFEDATSALVTGQSYENMVTEIMSMGYEREQVIAALRASFNNPDRAVEYLLMGIPGDRESQAVVDPPQAASTGAPQSSAVAAAAATTTATTTTTSSGGHPLEFLRNQPQFQQMRQIIQQNPSLLPALLQQIGRENPQLLQQISQHQEHFIQMLNEPVQEAGGQGGGGGGGSGGIAEAGSGHMNYIQVTPQEKEAIERLKALGFPEGLVIQAYFACEKNENLAANFLLQQNFDED

SEQ ID NO: 71063 - protein, 114 aa, Homo sapiens
  Payload ID: 14087
  Gene Symbol: RAD23B
  Gene Name: RAD23 homolog B, nucleotide excision repair protein
  ENSP ID: ENSP00000396975
  MOD_RES (1)..(1): Any amino acid
XTASSEPAPASAAKQEKPAEKPAETPVATSPTATDSTSGDSSRSNLFEDATSALVTGQSYENMVTEIMSMGYEREQVIAALRASFNNPDRAVEYLLMIIVKTGNKKKKQPLLGK

SEQ ID NO: 71064 - protein, 337 aa, Homo sapiens
  Payload ID: 14087
  Gene Symbol: RAD23B
  Gene Name: RAD23 homolog B, nucleotide excision repair protein
  Uniprot ID: P54727
  ENSP ID: ENSP00000405623
MVTKPKAVSTPAPATTQQSAPASTTAVTSSTTTTVAQAPTPVPALAPTSTPASITPASATASSEPAPASAAKQEKPAEKPAETPVATSPTATDSTSGDSSRSNLFEDATSALVTGQSYENMVTEIMSMGYEREQVIAALRASFNNPDRAVEYLLMGIPGDRESQAVVDPPQAASTGAPQSSAVAAAAATTTATTTTTSSGGHPLEFLRNQPQFQQMRQIIQQNPSLLPALLQQIGRENPQLLQQISQHQEHFIQMLNEPVQEAGGQGGGGGGGSGGIAEAGSGHMNYIQVTPQEKEAIERLKALGFPEGLVIQAYFACEKNENLAANFLLQQNFDED

SEQ ID NO: 71065 - protein, 80 aa, Homo sapiens
  Payload ID: 14087
  Gene Symbol: RAD23B
  Gene Name: RAD23 homolog B, nucleotide excision repair protein
  ENSP ID: ENSP00000415821
MVKALKEKIESEKGKDAFPVAGQKLIYAGKILNDDTALKEYKIDEKNFVVVMVTKPKAVSTPAPATTQQSAPASTTAVTS

SEQ ID NO: 71066 - protein, 146 aa, Homo sapiens
  Payload ID: 14087
  Gene Symbol: RAD23B
  Gene Name: RAD23 homolog B, nucleotide excision repair protein
  ENSP ID: ENSP00000416868
MQVTLKTLQQQTFKIDIDPEETVKALKEKIESEKGKDAFPVAGQKLIYAGKILNDDTALKEYKIDEKNFVVVMVTKPKAVSTPAPATTQQSAPASTTAVTSSTTTTVAQAPTPVPALAPTSTPASITPASATASSEPAPASAAKQE

SEQ ID NO: 71067 - protein, 1312 aa, Homo sapiens
  Payload ID: 14088
  Gene Symbol: RAD50
  Gene Name: RAD50 homolog, double strand break repair protein
  Uniprot ID: Q92878
  ENSP ID: ENSP00000368100
MSRIEKMSILGVRSFGIEDKDKQIITFFSPLTILVGPNGAGKTTIIECLKYICTGDFPPGTKGNTFVHDPKVAQETDVRAQIRLQFRDVNGELIAVQRSMVCTQKSKKTEFKTLEGVITRTKHGEKVSLSSKCAEIDREMISSLGVSKAVLNNVIFCHQEDSNWPLSEGKALKQKFDEIFSATRYIKALETLRQVRQTQGQKVKEYQMELKYLKQYKEKACEIRDQITSKEAQLTSSKEIVKSYENELDPLKNRLKEIEHNLSKIMKLDNEIKALDSRKKQMEKDNSELEEKMEKVFQGTDEQLNDLYHNHQRTVREKERKLVDCHRELEKLNKESRLLNQEKSELLVEQGRLQLQADRHQEHIRARDSLIQSLATQLELDGFERGPFSERQIKNFHKLVRERQEGEAKTANQLMNDFAEKETLKQKQIDEIRDKKTGLGRIIELKSEILSKKQNELKNVKYELQQLEGSSDRILELDQELIKAERELSKAEKNSNVETLKMEVISLQNEKADLDRTLRKLDQEMEQLNHHTTTRTQMEMLTKDKADKDEQIRKIKSRHSDELTSLLGYFPNKKQLEDWLHSKSKEINQTRDRLAKLNKELASSEQNKNHINNELKRKEEQLSSYEDKLFDVCGSQDFESDLDRLKEEIEKSSKQRAMLAGATAVYSQFITQLTDENQSCCPVCQRVFQTEAELQEVISDLQSKLRLAPDKLKSTESELKKKEKRRDEMLGLVPMRQSIIDLKEKEIPELRNKLQNVNRDIQRLKNDIEEQETLLGTIMPEEESAKVCLTDVTIMERFQMELKDVERKIAQQAAKLQGIDLDRTVQQVNQEKQEKQHKLDTVSSKIELNRKLIQDQQEQIQHLKSTTNELKSEKLQISTNLQRRQQLEEQTVELSTEVQSLYREIKDAKEQVSPLETTLEKFQQEKEELINKKNTSNKIAQDKLNDIKEKVKNIHGYMKDIENYIQDGKDDYKKQKETELNKVIAQLSECEKHKEKINEDMRLMRQDIDTQKIQERWLQDNLTLRKRNEELKEVEEERKQHLKEMGQMQVLQMKSEHQKLEENIDNIKRNHNLALGRQKGYEEEIIHFKKELREPQFRDAEEKYREMMIVMRTTELVNKDLDIYYKTLDQAIMKFHSMKMEEINKIIRDLWRSTYRGQDIEYIEIRSDADENVSASDKRRNYNYRVVMLKGDTALDMRGRCSAGQKVLASLIIRLALAETFCLNCGIIALDEPTTNLDRENIESLAHALVEIIKSRSQQRNFQLLVITHDEDFVELLGRSEYVEKFYRIKKNIDQCSEIVKCSVSSLGFNVH

SEQ ID NO: 71068 - protein, 100 aa, Homo sapiens
  Payload ID: 14088
  Gene Symbol: RAD50
  Gene Name: RAD50 homolog, double strand break repair protein
  ENSP ID: ENSP00000389515
MVCTQKSKKTEFKTLEGVITRTKHGEKVSLSSKCAEIDREMISSLGVSKAVLNNVIFCHQEDSNWPLSEGKALKQKFDEIFSATRYIKALETLRQVRQTQ

SEQ ID NO: 71069 - protein, 551 aa, Homo sapiens
  Payload ID: 14088
  Gene Symbol: RAD50
  Gene Name: RAD50 homolog, double strand break repair protein
  ENSP ID: ENSP00000390971
MSRIEKMSILGVRSFGIEDKDKQIITFFSPLTILVGPNGAGKTTIIECLKYICTGDFPPGTKGNTFVHDPKVAQETDVRAQIRLQFRDVNGELIAVQRSMVCTQKSKKTEFKTLEGVITRTKHGEKVSLSSKCAEIDREMISSLGVSKAVLNNVIFCHQEDSNWPLSEGKALKQKFDEIFSATRYIKALETLRQVRQTQGQKVKEYQMELKYLKQYKEKACEIRDQITSKEAQLTSSKEIVKSYENELDPLKNRLKEIEHNLSKIMKLDNEIKALDSRKKQMEKDNSELEEKMEKVFQGTDEQLNDLYHNHQRTVREKERKLVDCHRELEKLNKESRLLNQEKSELLVEQGRLQLQADRHQEHIRARDSLIQSLATQLELDGFERGPFSERQIKNFHKLVRERQEGEAKTANQLMNDFAEKETLKQKQIDEIRDKKTGLGRIIELKSEILSKKQNELKNVKYELQQLEGSSDRILELDQELIKAERELSKAEKNSNVETLKMEVISLQNEKADLDRTLRKLDQEMEQLNHHTTTRTQMEMLTKDKQGTSFI

SEQ ID NO: 71070 - protein, 158 aa, Homo sapiens
  Payload ID: 14088
  Gene Symbol: RAD50
  Gene Name: RAD50 homolog, double strand break repair protein
  ENSP ID: ENSP00000396100
  MOD_RES (1)..(1): Any amino acid
XEVISLQNEKADLDRTLRKLDQEMEQLNHHTTTRTQMEMLTKDKADKDEQIRKIKSRHSDELTSLLGYFPNKKQLEDWLHSKSKEINQTRDRLAKLKIVLVKPHSITSCYNSLKKCFRNLIPLIEEVLLLSAADLEAVILGIHQVERLLNFNFSVRIV

SEQ ID NO: 71071 - protein, 157 aa, Homo sapiens
  Payload ID: 14088
  Gene Symbol: RAD50
  Gene Name: RAD50 homolog, double strand break repair protein
  ENSP ID: ENSP00000396860
  MOD_RES (1)..(1): Any amino acid
XIYYKTLDQAIMKFHSMKMEEINKIIRDLWRSTYRGQDIEYIEIRSDADENVSASDKRRNYNYRVVMLKGDTALDMRGRCSAGQKVLASLIIRLALAETFCLNCGIIALDEPTTNLDRENIESLAHALVEWSSRLRALSTERKFSTVHTHLWKALTT

SEQ ID NO: 71072 - protein, 660 aa, Homo sapiens
  Payload ID: 14088
  Gene Symbol: RAD50
  Gene Name: RAD50 homolog, double strand break repair protein
  ENSP ID: ENSP00000400049
MSRIEKMSILGVRSFGIEDKDKQIITFFSPLTILVGPNGAGKTTIIECLKYICTGDFPPGTKGNTFVHDPKVAQETDVRAQIRLQFRDVNGELIAVQRSMVCTQKSKKTEFKTLEGVITRTKHGEKVSLSSKCAEIDREMISSLGVSKAVLNNVIFCHQEDSNWPLSEGKALKQKFDEIFSATRYIKALETLRQVRQTQGQKVKEYQMELKYLKQYKEKACEIRDQITSKEAQLTSSKEIVKSYENELDPLKNRLKEIEHNLSKIMKLDNEIKALDSRKKQMEKDNSELEEKMEKVFQGTDEQLNDLYHNHQRTVREKERKLVDCHRELEKLNKESRLLNQEKSELLVEQGRLQLQADRHQEHIRARDSLIQSLATQLELDGFERGPFSERQIKNFHKLVRERQEGEAKTANQLMNDFAEKETLKQKQIDEIRDKKTGLGRIIELKSEILSKKQNELKNVKYELQQLEGSSDRILELDQELIKAADKDEQIRKIKSRHSDELTSLLGYFPNKKQLEDWLHSKSKEINQTRDRLAKLNKELASSEQNKNHINNELKRKEEQLSSYEDKLFDVCGSQDFESDLDRLKEEIEKSSKQRAMLAGATAVYSQFITQLTDENQSCCPVCQRVFQTEAELQEVISDLQSKLRLAPDKLKSTESELKK

SEQ ID NO: 71073 - protein, 102 aa, Homo sapiens
  Payload ID: 14088
  Gene Symbol: RAD50
  Gene Name: RAD50 homolog, double strand break repair protein
  ENSP ID: ENSP00000431225
MSRIEKMSILGVRSFGIEDKDKQIITFFSPLTILVGPNGAGKTTIIECLKYICTGDFPPGTKGNTFVHDPKVAQETDVRAQIRLQFRDVNGELIAVQRSMAW

SEQ ID NO: 71074 - protein, 792 aa, Homo sapiens
  Payload ID: 14089
  Gene Symbol: RINT1
  Gene Name: RAD50 interactor 1
  Uniprot ID: Q6NUQ1
  ENSP ID: ENSP00000257700
MLPAGEIGASPAAPCCSESGDERKNLEEKSDINVTVLIGSKQVSEGTDNGDLPSYVSAFIEKEVGNDLKSLKKLDKLIEQRTVSKMQLEEQVLTISSEIPKRIRSALKNAEESKQFLNQFLEQETHLFSAINSHLLTAQPWMDDLGTMISQIEEIERHLAYLKWISQIEELSDNIQQYLMTNNVPEAASTLVSMAELDIKLQESSCTHLLGFMRATVKFWHKILKDKLTSDFEEILAQLHWPFIAPPQSQTVGLSRPASAPEIYSYLETLFCQLLKLQTSDELLTEPKQLPEKYSLPASPSVILPIQVMLTPLQKRFRYHFRGNRQTNVLSKPEWYLAQVLMWIGNHTEFLDEKIQPILDKVGSLVNARLEFSRGLMMLVLEKLATDIPCLLYDDNLFCHLVDEVLLFERELHSVHGYPGTFASCMHILSEETCFQRWLTVERKFALQKMDSMLSSEAAWVSQYKDITDVDEMKVPDCAETFMTLLLVITDRYKNLPTASRKLQFLELQKDLVDDFRIRLTQVMKEETRASLGFRYCAILNAVNYISTVLADWADNVFFLQLQQAALEVFAENNTLSKLQLGQLASMESSVFDDMINLLERLKHDMLTRQVDHVFREVKDAAKLYKKERWLSLPSQSEQAVMSLSSSACPLLLTLRDHLLQLEQQLCFSLFKIFWQMLVEKLDVYIYQEIILANHFNEGGAAQLQFDMTRNLFPLFSHYCKRPENYFKHIKEACIVLNLNVGSALLLKDVLQSASGQLPATAALNEVGIYKLAQQDVEILLNLRTNWPNTGK

SEQ ID NO: 71075 - protein, 41 aa, Homo sapiens
  Payload ID: 14089
  Gene Symbol: RINT1
  Gene Name: RAD50 interactor 1
  ENSP ID: ENSP00000417107
MLPAGEIGASPAAPCCSESGDERKNLEEKKMRSCSAVQAGM

SEQ ID NO: 71076 - protein, 143 aa, Homo sapiens
  Payload ID: 14089
  Gene Symbol: RINT1
  Gene Name: RAD50 interactor 1
  ENSP ID: ENSP00000417954
MLPAGEIGASPAAPCCSESGDERKNLEEKKKEVGNDLKSLKKLDKLIEQRTVSKMQLEEQVLTISSEIPKRIRSALKNAEESKQFLNQFLEQETHLFSAINSHLLTAQPWMDDLGTMISQIEEIERHLAYLKWISQIEELSDN

SEQ ID NO: 71077 - protein, 54 aa, Homo sapiens
  Payload ID: 14089
  Gene Symbol: RINT1
  Gene Name: RAD50 interactor 1
  ENSP ID: ENSP00000418805
MLPAGEIGASPAAPCCSESGDERKNLEEKSDINVTVLIGSKQVSEGTYNFIRNS

SEQ ID NO: 71078 - protein, 57 aa, Homo sapiens
  Payload ID: 14089
  Gene Symbol: RINT1
  Gene Name: RAD50 interactor 1
  ENSP ID: ENSP00000420582
MLPAGEIGASPAAPCCSESGDERKNLEEKSDINVTVLIGSKQVSEVSGAGNSSLQRH

SEQ ID NO: 71079 - protein, 352 aa, Homo sapiens
  Payload ID: 14090
  Gene Symbol: RAD51AP1
  Gene Name: RAD51 associated protein 1
  Uniprot ID: Q96B01
  ENSP ID: ENSP00000228843
MVRPVRHKKPVNYSQFDHSDSDDDFVSATVPLNKKSRTAPKELKQDKPKPNLNNLRKEEIPVQEKTPKKRLPEGTFSIPASAVPCTKMALDDKLYQRDLEVALALSVKELPTVTTNVQNSQDKSIEKHGSSKIETMNKSPHISNCSVASDYLDLDKITVEDDVGGVQGKRKAASKAAAQQRKILLEGSDGDSANDTEPDFAPGEDSEDDSDFCESEDNDEDFSMRKSKVKEIKKKEVKVKSPVEKKEKKSKSKCNALVTSVDSAPAAVKSESQSLPKKVSLSSDTTRKPLEIRSPSAESKKPKWVPPAASGGSRSSSSPLVVVSVKSPNQSLRLGLSRLARVKPLHPNATST

SEQ ID NO: 71080 - protein, 335 aa, Homo sapiens
  Payload ID: 14090
  Gene Symbol: RAD51AP1
  Gene Name: RAD51 associated protein 1
  Uniprot ID: Q96B01
  ENSP ID: ENSP00000309479
MVRPVRHKKPVNYSQFDHSDSDDDFVSATVPLNKKSRTAPKELKQDKPKPNLNNLRKEEIPVQEKTPKKRMALDDKLYQRDLEVALALSVKELPTVTTNVQNSQDKSIEKHGSSKIETMNKSPHISNCSVASDYLDLDKITVEDDVGGVQGKRKAASKAAAQQRKILLEGSDGDSANDTEPDFAPGEDSEDDSDFCESEDNDEDFSMRKSKVKEIKKKEVKVKSPVEKKEKKSKSKCNALVTSVDSAPAAVKSESQSLPKKVSLSSDTTRKPLEIRSPSAESKKPKWVPPAASGGSRSSSSPLVVVSVKSPNQSLRLGLSRLARVKPLHPNATST

SEQ ID NO: 71081 - protein, 70 aa, Homo sapiens
  Payload ID: 14090
  Gene Symbol: RAD51AP1
  Gene Name: RAD51 associated protein 1
  ENSP ID: ENSP00000399859
MVRPVRHKKPVNYSQFDHSDSDDDFVSATVPLNKKSRTAPKELKQDKPKPNLNNLRKEEIPVQEKTPKKR

SEQ ID NO: 71082 - protein, 71 aa, Homo sapiens
  Payload ID: 14090
  Gene Symbol: RAD51AP1
  Gene Name: RAD51 associated protein 1
  ENSP ID: ENSP00000438172
MVRPVRHKKPVNYSQFDHSDSDDDFVSATVPLNKKSRTAPKELKQDKPKPNLNNLRKEEIPVQEKTPKKRH

SEQ ID NO: 71083 - protein, 71 aa, Homo sapiens; identical to SEQ ID NO: 71082
  Payload ID: 14090
  Gene Symbol: RAD51AP1
  Gene Name: RAD51 associated protein 1
  ENSP ID: ENSP00000438422

SEQ ID NO: 71084 - protein, 68 aa, Homo sapiens
  Payload ID: 14090
  Gene Symbol: RAD51AP1
  Gene Name: RAD51 associated protein 1
  ENSP ID: ENSP00000439019
HKKPVNYSQFDHSDSDDDFVSATVPLNKKSRTAPKELKQDKPKPNLNNLRKEEIPVQEKTPKKSHRKK

SEQ ID NO: 71085 - protein, 70 aa, Homo sapiens; identical to SEQ ID NO: 71081
  Payload ID: 14090
  Gene Symbol: RAD51AP1
  Gene Name: RAD51 associated protein 1
  ENSP ID: ENSP00000439925

SEQ ID NO: 71086 - protein, 74 aa, Homo sapiens
  Payload ID: 14090
  Gene Symbol: RAD51AP1
  Gene Name: RAD51 associated protein 1
  ENSP ID: ENSP00000442890
MVRPVRHKKPVNYSQFDHSDSDDDFVSATVPLNKKSRTAPKELKQDKPKPNLNNLRKEEIPVQEKTPKKSHRKK

SEQ ID NO: 71087 - protein, 70 aa, Homo sapiens; identical to SEQ ID NO: 71081
  Payload ID: 14090
  Gene Symbol: RAD51AP1
  Gene Name: RAD51 associated protein 1
  ENSP ID: ENSP00000443837

SEQ ID NO: 71088 - protein, 258 aa, Homo sapiens
  Payload ID: 14090
  Gene Symbol: RAD51AP1
  Gene Name: RAD51 associated protein 1
  ENSP ID: ENSP00000444769
  MOD_RES (1)..(1): Any amino acid
XHKKPVNYSQFDHSDSDDDFVSATVPLNKKSRTAPKELKQDKPKPNLNNLRKEEIPVQEKTPKKRMALDDKLYQRDLEVALALSVKELPTVTTNVQNSQDKSIEKHGSSKIETMNKSPHISNCSVASDYLDLDKITVEDDVGGVQGKRKAASKAAAQQRKILLEGSDGDSANDTEPDFAPGEDSEDDSDFCESEDNDEDFSMRKSKVKEIKKKEVKVKSPVEKKEKKSKSKCNALDTTRKPLEIRSPSAESKKPKWVP

SEQ ID NO: 71089 - protein, 70 aa, Homo sapiens; identical to SEQ ID NO: 71081
  Payload ID: 14090
  Gene Symbol: RAD51AP1
  Gene Name: RAD51 associated protein 1
  ENSP ID: ENSP00000446002

SEQ ID NO: 71090 - protein, 235 aa, Homo sapiens
  Payload ID: 14090
  Gene Symbol: RAD51AP1
  Gene Name: RAD51 associated protein 1
  ENSP ID: ENSP00000446296
MVRPVRHKKPVNYSQFDHSDSDDDFVSATVPLNKKSRTAPKELKQDKPKPNLNNLRKEEIPVQEKTPKKRMALDDKLYQRDLEVALALSVKELPTVTTNVQNSQDKSIEKHGSSKIETMNKSPHISNCSVASDYLDLDKITVEDDVGGVQGKRKAASKAAAQQRKILLEGSDGDSANDTEPDFAPGEDSEDDSDFCESEDNDEDFSMRKSKVKEIKKKEVKRHLEVAEVAAAHWW

SEQ ID NO: 71091 - protein, 1159 aa, Homo sapiens
  Payload ID: 14091
  Gene Symbol: RAD51AP2
  Gene Name: RAD51 associated protein 2
  Uniprot ID: Q09MP3
  ENSP ID: ENSP00000382030
MSLPQPTPRMAELRKPTSSLTPPEDPDSQPPSSKRLCLEEPGGVFKAGWRLPLVPRLSEAEKVWELSPRPFKGLLVSTNAIFDNSTDSCVEKSVSGKQICNLKCSNLKFQMSSCLQSPPSQSPDSDLRASGRSEAGLHDREAFSVHRSNSSKAGVSQLLPSTSIHDIHGIRNENRKQQFVQGRDNVHKENPFLDVTFYKETKSPFHEIKNRCKANSVVPSNKRENNISSSVLKISKSQNQPSLEIAKPSYFRDSGTISVPQFPMDLNSKMSSVYLKEIAKKKNDKKEAYVRDFTNIYWSQNRPDVKKQKLQNDKKTVEAENIFSKCYENDYPSLSSQNTCKRKDLISSNYCNCSSIQCNVRDSRKNFAILENANWEEAECLDSYVLTRLEKSQNWDCNVRHILRRNRGNCWIINNCKTKCENMKKTEEKWNWLLLLEIDLLSKEDYHCAKVINAYEEQSKLLVREILGSQTALITTVWLNGKGENDNTLQLRYNTTQKVFHVNNPFESFIIEIFYFHKSISGNKKDNSILTCCNILKCKKQIGIIGIQNLITRNMNTNIKNGILSIYLQDSVSEPLDILLKTNIAFLLNNFDSLTRIENDFELEEECIFKCMLYLKYPKNIVENHTAYLVKILTSSRLLEDNMKPMLKKRKLFRTEQVFEKSKKKLINSFSMTTQNTGFPIFETYEKIPLLMDFDDMDEISLIREITCQNMSCPQQVVNVENWAHYNSSTVKAHGNSCPQFIQNNRGYINENFYEVNMHSQDLNMERKQGHNKISNFDCEHIFEDLCNVRQQAIPASHNIIHNEETHTTSITQVLNFWNLLSEIEEKKYDLILKEEVKVTAESLTNSCQVHKDTKIEKEEKDSFFPMDDMFSVQSVSLISKEVNVEENKYVNQNYVTNTNEYESILPEREIANSKDFHRKNDSALYINHQFETGLSEGNDECFQDLAAKYLSTEALTIVKDFEMKRKFDLVLEELRMFHEISRENELLSTVETNNGQENYFGENDAEKVKMEIEKDLKMVVVNKIRASSSFHDTIAGPNMGKSHQSLFKWKTVPNNGEQEVPNESCYPSRSEEELLYSTSEKDCETPLPKRPAFLPDECKEEFNYLLRGGSHFPHGISRVRPLKTCSRPIRIGLSRKARIKQLHPYLKQMCYGNLKENF

SEQ ID NO: 71092 - protein, 279 aa, Homo sapiens
  Payload ID: 14092
  Gene Symbol: RAD51B
  Gene Name: RAD51 paralog B
  ENSP ID: ENSP00000375101
MGSKKLKRVGLSQELCDRLSRHQILTCQDFLCLSPLELMKVTGLSYRGVHELLCMVSRACAPKMQTAYGIKAQRSADFSPAFLSTTLSALDEALHGGVACGSLTEITGPPGCGKTQFCIMMSILATLPTNMGGLEGAVVYIDTESAFSAERLVEIAESRFPRYFNTEEKLLLTSSKVHLYRELTCDEVLQRIESLEEEIISKGIKLVILDSVASVVRKEFDAQLQGNLKERNKFLAREASSLKYLAEEFSIPVSFSFFLFFLFLSFVSFILHSLTYGIK

SEQ ID NO: 71093 - protein, 108 aa, Homo sapiens
  Payload ID: 14092
  Gene Symbol: RAD51B
  Gene Name: RAD51 paralog B
  ENSP ID: ENSP00000417408
MGSKKLKRVGLSQELCDRLSRHQILTCQDFLCLSPLELMKVTGLSYRGVHELLCMVSRACAPKMQTAYGIKAQRSADFSPAFLSTTLSALDEALHGGVACGSLTEDGT

SEQ ID NO: 71094 - protein, 133 aa, Homo sapiens
  Payload ID: 14092
  Gene Symbol: RAD51B
  Gene Name: RAD51 paralog B
  ENSP ID: ENSP00000417948
MGSKKLKRVGLSQELCDRLSRHQILTCQDFLCLSPLELMKVTGLSYRGVHELLCMVSRACAPKMQTAYGIKAQRSADFSPAFLSTTLSALDEALHGGVACGSLTEITGPPGCGKTQFCIMMSILATLPTNMGG

SEQ ID NO: 71095 - protein, 350 aa, Homo sapiens
  Payload ID: 14092
  Gene Symbol: RAD51B
  Gene Name: RAD51 paralog B
  Uniprot ID: O15315
  ENSP ID: ENSP00000418859
MGSKKLKRVGLSQELCDRLSRHQILTCQDFLCLSPLELMKVTGLSYRGVHELLCMVSRACAPKMQTAYGIKAQRSADFSPAFLSTTLSALDEALHGGVACGSLTEITGPPGCGKTQFCIMMSILATLPTNMGGLEGAVVYIDTESAFSAERLVEIAESRFPRYFNTEEKLLLTSSKVHLYRELTCDEVLQRIESLEEEIISKGIKLVILDSVASVVRKEFDAQLQGNLKERNKFLAREASSLKYLAEEFSIPVILTNQITTHLSGALASQADLVSPADDLSLSEGTSGSSCVIAALGNTWSHSVNTRLILQYLDSERRQILIAKSPLAPFTSFVYTIKEEGLVLQGQEKP

SEQ ID NO: 71096 - protein, 384 aa, Homo sapiens
  Payload ID: 14092
  Gene Symbol: RAD51B
  Gene Name: RAD51 paralog B
  Uniprot ID: O15315
  ENSP ID: ENSP00000419471
MGSKKLKRVGLSQELCDRLSRHQILTCQDFLCLSPLELMKVTGLSYRGVHELLCMVSRACAPKMQTAYGIKAQRSADFSPAFLSTTLSALDEALHGGVACGSLTEITGPPGCGKTQFCIMMSILATLPTNMGGLEGAVVYIDTESAFSAERLVEIAESRFPRYFNTEEKLLLTSSKVHLYRELTCDEVLQRIESLEEEIISKGIKLVILDSVASVVRKEFDAQLQGNLKERNKFLAREASSLKYLAEEFSIPVILTNQITTHLSGALASQADLVSPADDLSLSEGTSGSSCVIAALGNTWSHSVNTRLILQYLDSERRQILIAKSPLAPFTSFVYTIKEEGLVLQETTFCSVTQAELNWAPEILPPQPPEQLGLQMCHHTQLIF

SEQ ID NO: 71097 - protein, 425 aa, Homo sapiens
  Payload ID: 14092
  Gene Symbol: RAD51B
  Gene Name: RAD51 paralog B
  ENSP ID: ENSP00000419881
MGSKKLKRVGLSQELCDRLSRHQILTCQDFLCLSPLELMKVTGLSYRGVHELLCMVSRACAPKMQTAYGIKAQRSADFSPAFLSTTLSALDEALHGGVACGSLTEITGPPGCGKTQFCIMMSILATLPTNMGGLEGAVVYIDTESAFSAERLVEIAESRFPRYFNTEEKLLLTSSKVHLYRELTCDEVLQRIESLEEEIISKGIKLVILDSVASVVRKEFDAQLQGNLKERNKFLAREASSLKYLAEEFSIPVILTNQITTHLSGALASQADLVSPADDLSLSEGTSGSSCVIAALGNTWSHSVNTRLILQYLDSERRQILIAKSPLAPFTSFVYTIKEEGLVLQVVRTVARVSPRSECWSAADSHPSPTFLIPDVVLRKTRNPRLLPSVSMCPPQMHSTVLSSALPPTNWATGIRTETLDEHPV

SEQ ID NO: 71098 - protein, 366 aa, Homo sapiens
  Payload ID: 14092
  Gene Symbol: RAD51B
  Gene Name: RAD51 paralog B
  Uniprot ID: O15315
  ENSP ID: ENSP00000420061
MGSKKLKRVGLSQELCDRLSRHQILTCQDFLCLSPLELMKVTGLSYRGVHELLCMVSRACAPKMQTAYGIKAQRSADFSPAFLSTTLSALDEALHGGVACGSLTEITGPPGCGKTQFCIMMSILATLPTNMGGLEGAVVYIDTESAFSAERLVEIAESRFPRYFNTEEKLLLTSSKVHLYRELTCDEVLQRIESLEEEIISKGIKLVILDSVASVVRKEFDAQLQGNLKERNKFLAREASSLKYLAEEFSIPVILTNQITTHLSGALASQADLVSPADDLSLSEGTSGSSCVIAALGNTWSHSVNTRLILQYLDSERRQILIAKSPLAPFTSFVYTIKEEGLVLQEFWHICISGFSIQNRLKENES

SEQ ID NO: 71099 - protein, 35 aa, Homo sapiens
  Payload ID: 14092
  Gene Symbol: RAD51B
  Gene Name: RAD51 paralog B
  ENSP ID: ENSP00000451616
DSERRQILIAKSPLAPFTSFVYTIKEEGLVLQAGK

SEQ ID NO: 71100 - protein, 75 aa, Homo sapiens
  Payload ID: 14092
  Gene Symbol: RAD51B
  Gene Name: RAD51 paralog B
  ENSP ID: ENSP00000452044
MGSKKLKRVGLSQELCDRLSRHQILTCQDFLCLSPLELMKVTGLSYRGVHELLCMVSRACAPKMQTAYGIKAQRS

SEQ ID NO: 71101 - protein, 376 aa, Homo sapiens
  Payload ID: 14093
  Gene Symbol: RAD51C
  Gene Name: RAD51 paralog C
  Uniprot ID: O43502
  ENSP ID: ENSP00000336701
MRGKTFRFEMQRDLVSFPLSPAVRVKLVSAGFQTAEELLEVKPSELSKEVGISKAEALETLQIIRRECLTNKPRYAGTSESHKKCTALELLEQEHTQGFIITFCSALDDILGGGVPLMKTTEICGAPGVGKTQLCMQLAVDVQIPECFGGVAGEAVFIDTEGSFMVDRVVDLATACIQHLQLIAEKHKGEEHRKALEDFTLDNILSHIYYFRCRDYTELLAQVYLLPDFLSEHSKVRLVIVDGIAFPFRHDLDDLSLRTRLLNGLAQQMISLANNHRLAVILTNQMTTKIDRNQALLVPALGESWGHAATIRLIFHWDRKQRLATLYKSPSQKECTVLFQIKPQGFRDTVVTSACSLQTEGSLSTRKRSRDPEEEL

SEQ ID NO: 71102 - protein, 135 aa, Homo sapiens
  Payload ID: 14093
  Gene Symbol: RAD51C
  Gene Name: RAD51 paralog C
  Uniprot ID: O43502
  ENSP ID: ENSP00000391450
MRGKTFRFEMQRDLVSFPLSPAVRVKLVSAGFQTAEELLEVKPSELSKEVGISKAEALETLQIIRRECLTNKPRYAGTSESHKKCTALELLEQEHTQGFIITFCSALDDILGGGVPLMKTTEICGAPGVGKTQLW

SEQ ID NO: 71103 - protein, 257 aa, Homo sapiens
  Payload ID: 14093
  Gene Symbol: RAD51C
  Gene Name: RAD51 paralog C
  ENSP ID: ENSP00000401741
  MOD_RES (1)..(1): Any amino acid
XEICGAPGVGKTQLCMQLAVDVQIPECFGGVAGEAVFIDTEGSFMVDRVVDLATACIQHLQLIAEKHKGEEHRKALEDFTLDNILSHIYYFRCRDYTELLAQVYLLPDFLSEHSKVRLVIVDGIAFPFRHDLDDLSLRTRLLNGLAQQMISLANNHRLAVILTNQMTTKIDRNQALLVPALGESWGHAATIRLIFHWDRKQSRLATLYKSPSQKECTVLFQIKPQGFRDTVVTSACSLQTEGSLSTRKRSRDPEEEL

SEQ ID NO: 71104 - protein, 213 aa, Homo sapiens
  Payload ID: 14093
  Gene Symbol: RAD51C
  Gene Name: RAD51 paralog C
  ENSP ID: ENSP00000407282
LTNKPRYAGTSESHKKCTALELLEQEHTQGFIITFCSALDDILGGGVPLMKTTEICGAPGVGKTQLCMQLAVDVQIPECFGGVAGEAVFIDTEGSFMVDRVVDLATACIQHLQLIAEKHKGEEHRKALEDFTLDNILSHIYYFRCRDYTELLAQVYLLPDFLSEHSKAHCSSRITLLLCGVALPLPLSARAPPSETKDDIALPPGLMVRLVIV

SEQ ID NO: 71105 - protein, 134 aa, Homo sapiens
  Payload ID: 14093
  Gene Symbol: RAD51C
  Gene Name: RAD51 paralog C
  ENSP ID: ENSP00000431637
MRGKTFRFEMQRDLVSFPLSPAVRVKLVSAGFQTAEELLEVKPSELSKEVGISKAEALETLQIIRRECLTNKPRYAGTSESHKKCTALELLEQEHTQGFIITFCSALDDILGGGVPLMKTTEICGAPGVGKTQL

SEQ ID NO: 71106 - protein, 52 aa, Homo sapiens
  Payload ID: 14093
  Gene Symbol: RAD51C
  Gene Name: RAD51 paralog C
  ENSP ID: ENSP00000432421
MRGKTFRFEMQRDLVSFPLSPAVRVKLVSAGFQTAEELLEVKPSELSKGNDS

SEQ ID NO: 71107 - protein, 134 aa, Homo sapiens; identical to SEQ ID NO: 71105
  Payload ID: 14093
  Gene Symbol: RAD51C
  Gene Name: RAD51 paralog C
  ENSP ID: ENSP00000433332

SEQ ID NO: 71108 - protein, 52 aa, Homo sapiens; identical to SEQ ID NO: 71106
  Payload ID: 14093
  Gene Symbol: RAD51C
  Gene Name: RAD51 paralog C
  ENSP ID: ENSP00000436761

SEQ ID NO: 71109 - protein, 346 aa, Homo sapiens
  Payload ID: 14093
  Gene Symbol: RAD51C
  Gene Name: RAD51 paralog C
  ENSP ID: ENSP00000463121
MRGKTFRFEMQRDLVSFPLSPAVRVKLVSAGFQTAEELLEVKPSELSKEVGISKAEALETLQIIRRECLTNKPRYAGTSESHKKCTALELLEQEHTQGFIITFCSALDDILGGGVPLMKTTEICGAPGVGKTQLCMQLAVDVQIPECFGGVAGEAVFIDTEGSFMVDRVVDLATACIQHLQLIAEKHKGEEHRKALEDFTLDNILSHIYYFRCRDYTELLAQVYLLPDFLSEHSKVRLVIVDGIAFPFRHDLDDLSLRTRLLNGLAQQMISLANNHRLAVILTNQMTTKIDRNQALLVPALGESWGHAATIRLIFHWDRKQRLATLYKSPSQKECTVLFQIKVSII

SEQ ID NO: 71110 - protein, 47 aa, Homo sapiens
  Payload ID: 14093
  Gene Symbol: RAD51C
  Gene Name: RAD51 paralog C
  ENSP ID: ENSP00000463473
  MOD_RES (1)..(1): Any amino acid
XFEMQRDLVSFPLSPAVRVKLVSAGFQTAEELLEVKPSELSKVCSWQ

SEQ ID NO: 71111 - protein, 107 aa, Homo sapiens
  Payload ID: 14093
  Gene Symbol: RAD51C
  Gene Name: RAD51 paralog C
  ENSP ID: ENSP00000463658
VRLVIVDGIAFPFRHDLDDLSLRTRLLNGLAQQMISLANNHRLAVILTNQMTTKIDRNQALLVPALGWQHCTSHPARRNAQYCFKSNLRDLEILLLLLHVHCKQKVP

SEQ ID NO: 71112 - protein, 135 aa, Homo sapiens
  Payload ID: 14093
  Gene Symbol: RAD51C
  Gene Name: RAD51 paralog C
  ENSP ID: ENSP00000464056
MKTTEICGAPGVGKTQLCMQLAVDVQIPECFGGVAGEAVFIDTEGSFMVDRVVDLATACIQHLQLIAEKHKGEEHRKALEDFTLDNILSHIYYFRCRDYTELLAQVYLLPDFLSEHSKVRLVIVDGIAFPFRHDL

SEQ ID NO: 71113 - protein, 131 aa, Homo sapiens
  Payload ID: 14093
  Gene Symbol: RAD51C
  Gene Name: RAD51 paralog C
  ENSP ID: ENSP00000482326
ELLEQEHTQGFIITFCSALDDILGGGVPLMKTTEICGAPGVGKTQLCMQLAVDVQIPECFGGVAGEAVFIDTEGSFMVDRVVDLATACIQHLQLIAEKHKGEESGSTARAGVQWRNLGLLRPSPPRFKRFS

SEQ ID NO: 71114 - protein, 216 aa, Homo sapiens
  Payload ID: 14094
  Gene Symbol: RAD51D
  Gene Name: RAD51 paralog D
  Uniprot ID: O75771
  ENSP ID: ENSP00000338408
MGVLRVGLCPGLTEEMIQLLRSHRIKTVVDLVSADLEEVAQKCGLSYKAEALRRIQVVHAFDIFQMLDVLQELRGTVAQQVTGSSGTVKVVVVDSVTAVVSPLLGGQQREGLALMMQLARELKTLARDLGMAVVVTNHITRDRDSGRLKPALGRSWSFVPSTRILLDTIEGAGASGGRRMACLAKSSRQPTGFQEMVDIGTWGTSEQSATLQGDQT

SEQ ID NO: 71115 - protein, 328 aa, Homo sapiens
  Payload ID: 14094
  Gene Symbol: RAD51D
  Gene Name: RAD51 paralog D
  Uniprot ID: O75771
  ENSP ID: ENSP00000338790
MGVLRVGLCPGLTEEMIQLLRSHRIKTVVDLVSADLEEVAQKCGLSYKALVALRRVLLAQFSAFPVNGADLYEELKTSTAILSTGIGSLDKLLDAGLYTGEVTEIVGGPGSGKTQVCLCMAANVAHGLQQNVLYVDSNGGLTASRLLQLLQAKTQDEEEQAEALRRIQVVHAFDIFQMLDVLQELRGTVAQQVTGSSGTVKVVVVDSVTAVVSPLLGGQQREGLALMMQLARELKTLARDLGMAVVVTNHITRDRDSGRLKPALGRSWSFVPSTRILLDTIEGAGASGGRRMACLAKSSRQPTGFQEMVDIGTWGTSEQSATLQGDQT

SEQ ID NO: 71116 - protein, 328 aa, Homo sapiens; identical to SEQ ID NO: 71115
  Payload ID: 14094
  Gene Symbol: RAD51D
  Gene Name: RAD51 paralog D
  Uniprot ID: O75771
  ENSP ID: ENSP00000378090

SEQ ID NO: 71117 - protein, 151 aa, Homo sapiens
  Payload ID: 14094
  Gene Symbol: RAD51D
  Gene Name: RAD51 paralog D
  ENSP ID: ENSP00000464356
MLDVLQELRGTVAQQVTGSSGTVKVVVVDSVTAVVSPLLGGQQREGLALMMQLARELKTLARDLGMAVVVTNHITRDRDSGRLKPALGRSWSFVPSTRILLDTIEGAGASGGRRMACLAKSSRQPTGFQEMVDIGTWGTSEQSATLQGDQT

SEQ ID NO: 71118 - protein, 86 aa, Homo sapiens
  Payload ID: 14094
  Gene Symbol: RAD51D
  Gene Name: RAD51 paralog D
  ENSP ID: ENSP00000465007
  MOD_RES (1)..(1): Any amino acid
XADLEEVAQKCGLSYKALVALRRVLLAQFSAFPVNGADLYEELKTSTAILSTGIGRHGGRTQVGTWEDCSCLRSPQGDRGVGSGML

SEQ ID NO: 71119 - protein, 24 aa, Homo sapiens
  Payload ID: 14094
  Gene Symbol: RAD51D
  Gene Name: RAD51 paralog D
  ENSP ID: ENSP00000465033
MLDVLQELRGTVAQQVTGSSGTVK

SEQ ID NO: 71120 - protein, 49 aa, Homo sapiens
  Payload ID: 14094
  Gene Symbol: RAD51D
  Gene Name: RAD51 paralog D
  Uniprot ID: O75771
  ENSP ID: ENSP00000465366
MGVLRVGLCPGLTEEMIQLLRSHRIKTVVDLVSADLEEVAQKCGLSYKS

SEQ ID NO: 71121 - protein, 49 aa, Homo sapiens; identical to SEQ ID NO: 71120
  Payload ID: 14094
  Gene Symbol: RAD51D
  Gene Name: RAD51 paralog D
  Uniprot ID: O75771
  ENSP ID: ENSP00000465584

SEQ ID NO: 71122 - protein, 107 aa, Homo sapiens
  Payload ID: 14094
  Gene Symbol: RAD51D
  Gene Name: RAD51 paralog D
  ENSP ID: ENSP00000465612
MGVLRVGLCPGLTEEMIQLLRSHRIKTVVDLVSADLEEVAQKCGLSYKALVALRRVLLAQFSAFPVNGADLYEELKTSTAILSTGIGRYVSVWQQMWPMACSKTSYM

SEQ ID NO: 71123 - protein, 348 aa, Homo sapiens
  Payload ID: 14094
  Gene Symbol: RAD51D
  Gene Name: RAD51 paralog D
  Uniprot ID: O75771
  ENSP ID: ENSP00000466399
MGVLRVGLCPGLTEEMIQLLRSHRIKTVVDLVSADLEEVAQKCGLSYKTWRAHSSGNLGGLQLPQVPAGRSWSGVRNALKKAGLGHGGTDGLSLNAFDERGTAVSTSRLDKLLDAGLYTGEVTEIVGGPGSGKTQVCLCMAANVAHGLQQNVLYVDSNGGLTASRLLQLLQAKTQDEEEQAEALRRIQVVHAFDIFQMLDVLQELRGTVAQQVTGSSGTVKVVVVDSVTAVVSPLLGGQQREGLALMMQLARELKTLARDLGMAVVVTNHITRDRDSGRLKPALGRSWSFVPSTRILLDTIEGAGASGGRRMACLAKSSRQPTGFQEMVDIGTWGTSEQSATLQGDQT

SEQ ID NO: 71124 - protein, 141 aa, Homo sapiens
  Payload ID: 14094
  Gene Symbol: RAD51D
  Gene Name: RAD51 paralog D
  ENSP ID: ENSP00000466478
MAANVAHGLQQNVLYVDSNGGLTASRLLQLLQAKTQDEEEQAEALRRIQVVHAFDIFQMLDVLQELRGTVAQQVTGSSGTVKVVVVDSVTAVVSPLLGGQQREGLALMMQLARELKTLARDLGMAVVVTNHITRDRDSGRL

SEQ ID NO: 71125 - protein, 118 aa, Homo sapiens
  Payload ID: 14094
  Gene Symbol: RAD51D
  Gene Name: RAD51 paralog D
  Uniprot ID: O75771
  ENSP ID: ENSP00000466587
MGVLRVGLCPGLTEEMIQLLRSHRIKTVVDLVSADLEEVAQKCGLSYKALVALRRVLLAQFSAFPVNGADLYEELKTSTAILSTGIGRHGGRTQVGTWEDCSCLRSPQGDRGVGSGML

SEQ ID NO: 71126 - protein, 249 aa, Homo sapiens
  Payload ID: 14094
  Gene Symbol: RAD51D
  Gene Name: RAD51 paralog D
  ENSP ID: ENSP00000466839
MTPSPTLGAASSSLLSPPAASAPVSSLGRVVDLVSADLEEVAQKCGLSYKALVALRRVLLAQFSAFPVNGADLYEELKTSTAILSTGIGSLDKLLDAGLYTGEVTEIVGGPGSGKTQVCLCMAANVAHGLQQNVLYVDSNGGLTASRLLQLLQAKTQDEEEQAEALRRIQVVHAFDIFQMLDVLQELRGTVAQQVTGSSGTVKVVVVDSVTAVVSPLLGGQQREGLALMMQLARELKTLARDLGMAVVV

SEQ ID NO: 71127 - protein, 96 aa, Homo sapiens
  Payload ID: 14094
  Gene Symbol: RAD51D
  Gene Name: RAD51 paralog D
  ENSP ID: ENSP00000468273
  MOD_RES (1)..(1): Any amino acid
XADLEEVAQKCGLSYKALVALRRVLLAQFSAFPVNGADLYEELKTSTAILSTGIGSLDKLLDAGLYTGEVTEIVGGPGSGKTQAEALRRIQVVHAF

SEQ ID NO: 71128 - protein, 86 aa, Homo sapiens; identical to SEQ ID NO: 71118
  Payload ID: 14094
  Gene Symbol: RAD51D
  Gene Name: RAD51 paralog D
  ENSP ID: ENSP00000468724
  MOD_RES (1)..(1): Any amino acid

SEQ ID NO: 71129 - protein, 93 aa, Homo sapiens
  Payload ID: 14094
  Gene Symbol: RAD51D
  Gene Name: RAD51 paralog D
  ENSP ID: ENSP00000468764
MAANVAHGLQQNVLYVDSNGGLTASRLLQLLQAKTQDEEEQAEALRRIQVVHAFDIFQMLDVLQELRGTVAQQDGIPEHLNHIPHCLHVHLPC

SEQ ID NO: 71130 - protein, 339 aa, Homo sapiens
  Payload ID: 14095
  Gene Symbol: RAD51
  Gene Name: RAD51 recombinase
  Uniprot ID: Q06609
  ENSP ID: ENSP00000267868
MAMQMQLEANADTSVEEESFGPQPISRLEQCGINANDVKKLEEAGFHTVEAVAYAPKKELINIKGISEAKADKILAEAAKLVPMGFTTATEFHQRRSEIIQITTGSKELDKLLQGGIETGSITEMFGEFRTGKTQICHTLAVTCQLPIDRGGGEGKAMYIDTEGTFRPERLLAVAERYGLSGSDVLDNVAYARAFNTDHQTQLLYQASAMMVESRYALLIVDSATALYRTDYSGRGELSARQMHLARFLRMLLRLADEFGVAVVITNQVVAQVDGAAMFAADPKKPIGGNIIAHASTTRLYLRKGRGETRICKIYDSPCLPEAEAMFAINADGVGDAKD

SEQ ID NO: 71131 - protein, 340 aa, Homo sapiens
  Payload ID: 14095
  Gene Symbol: RAD51
  Gene Name: RAD51 recombinase
  Uniprot ID: Q06609
  ENSP ID: ENSP00000372088
MAMQMQLEANADTSVEEESFGPQPISRLEQCGINANDVKKLEEAGFHTVEAVAYAPKKELINIKGISEAKADKILTESRSVARLECNSVILVYCTLRLSGSSDSPASASRVVGTTGGIETGSITEMFGEFRTGKTQICHTLAVTCQLPIDRGGGEGKAMYIDTEGTFRPERLLAVAERYGLSGSDVLDNVAYARAFNTDHQTQLLYQASAMMVESRYALLIVDSATALYRTDYSGRGELSARQMHLARFLRMLLRLADEFGVAVVITNQVVAQVDGAAMFAADPKKPIGGNIIAHASTTRLYLRKGRGETRICKIYDSPCLPEAEAMFAINADGVGDAKD

SEQ ID NO: 71132 - protein, 280 aa, Homo sapiens
  Payload ID: 14095
  Gene Symbol: RAD51
  Gene Name: RAD51 recombinase
  Uniprot ID: Q06609
  ENSP ID: ENSP00000406602
MAMQMQLEANADTSVEEESFGPQPISRLEQCGINANDVKKLEEAGFHTVEAVAYAPKKELINIKGISEAKADKILAEAAKLVPMGFTTATEFHQRRSEIIQITTGSKELDKLLQGGIETGSITEMFGEFRTGKTQICHTLAVTCQLPIDRGGGEGKAMYIDTEGTFRPERLLAVAERYGLSGSDVLDNVAYARAFNTDHQTQLLYQASAMMVESRYALLIVDSATALYRTDYSGRGELSARQMHLARFLRMLLRLADEIVSEERKRGNQNLQNLRLSLSS

SEQ ID NO: 71133 - protein, 151 aa, Homo sapiens
  Payload ID: 14095
  Gene Symbol: RAD51
  Gene Name: RAD51 recombinase
  ENSP ID: ENSP00000431864
MAMQMQLEANADTSVEEESFGPQPISRLEQCGINANDVKKLEEAGFHTVEAVAYAPKKELINIKGISEAKADKILAEAAKLVPMGFTTATEFHQRRSEIIQITTGSKELDKLLQGGIETGSITEMFGEFRTGKTQICHTLAVTCQVWSLWQ

SEQ ID NO: 71134 - protein, 75 aa, Homo sapiens
  Payload ID: 14095
  Gene Symbol: RAD51
  Gene Name: RAD51 recombinase
  ENSP ID: ENSP00000431897
MAMQMQLEANADTSVEEESFGPQPISRLEQCGINANDVKKLEEAGFHTVEAVAYAPKKELINIKGISEAKADKIL

SEQ ID NO: 71135 - protein, 172 aa, Homo sapiens
  Payload ID: 14095
  Gene Symbol: RAD51
  Gene Name: RAD51 recombinase
  ENSP ID: ENSP00000432759
MAMQMQLEANADTSVEEESFGPQPISRLEQCGINANDVKKLEEAGFHTVEAVAYAPKKELINIKGISEAKADKILAEAAKLVPMGFTTATEFHQRRSEIIQITTGSKELDKLLQGGIETGSITEMFGEFRTGKTQICHTLAVTCQLPIDRGGGEGKAMYIDTEGTFRPERLL

SEQ ID NO: 71136 - protein, 65 aa, Homo sapiens
  Payload ID: 14095
  Gene Symbol: RAD51
  Gene Name: RAD51 recombinase
  ENSP ID: ENSP00000433053
  MOD_RES (1)..(1): Any amino acid
XAYAPKKELINIKGISEAKADKILTESRSVARLECNSVILVYCTLRLSGSSDSPASASRVVGTTG

SEQ ID NO: 71137 - protein, 340 aa, Homo sapiens; identical to SEQ ID NO: 71131
  Payload ID: 14095
  Gene Symbol: RAD51
  Gene Name: RAD51 recombinase
  Uniprot ID: Q06609
  ENSP ID: ENSP00000433924

SEQ ID NO: 71138 - protein, 100 aa, Homo sapiens
  Payload ID: 14095
  Gene Symbol: RAD51
  Gene Name: RAD51 recombinase
  ENSP ID: ENSP00000436512
MAMQMQLEANADTSVEEESFGPQPISRLEQCGINANDVKKLEEAGFHTVEAVAYAPKKELINIKGISEAKADKILVELRLDLSQKCLENSELGRPRSVIR

SEQ ID NO: 71139 - protein, 242 aa, Homo sapiens
  Payload ID: 14095
  Gene Symbol: RAD51
  Gene Name: RAD51 recombinase
  Uniprot ID: Q06609
  ENSP ID: ENSP00000454176
MAMQMQLEANADTSVEEESFGPQPISRLEQCGINANDVKKLEEAGFHTVEAVAYAPKKELINIKGISEAKADKILAVAERYGLSGSDVLDNVAYARAFNTDHQTQLLYQASAMMVESRYALLIVDSATALYRTDYSGRGELSARQMHLARFLRMLLRLADEFGVAVVITNQVVAQVDGAAMFAADPKKPIGGNIIAHASTTRLYLRKGRGETRICKIYDSPCLPEAEAMFAINADGVGDAKD

SEQ ID NO: 71140 - protein, 204 aa, Homo sapiens
  Payload ID: 14096
  Gene Symbol:
  Gene Name: RAD51L3-RFFL
  ENSP ID: ENSP00000464799
MAANVAHGLQQNVLYVDSNGGLTASRLLQLLQAKTQDEEEQAEALRRIQVVHAFDIFQMLDVLQELRGTVAQQVTGSSGTVKVVVVDSVTAVVSPLLGGQQREGLALMMQLARELKTLARDLGMAVVVTNHITRDRDSGRLKPALGRSWSFVPSTRILLDTIEGAGASGGRRMACLAKSSRQILSCGQPAATGSAWMDSLRRSH

SEQ ID NO: 71141 - protein, 272 aa, Homo sapiens
  Payload ID: 14096
  Gene Symbol:
  Gene Name: RAD51L3-RFFL
  ENSP ID: ENSP00000466834
MAEALRRIQVVHAFDIFQMLDVLQELRGTVAQQVTGSSGTVKVVVVDSVTAVVSPLLGGQQREGLALMMQLARELKTLARDLGMAVVVTNHITRDRDSGRLKPALGRSWSFVPSTRILLDTIEGAGASGGRRMACLAKSSRQSIDSEDSFVPGRRASLSDLTDLEDIEGLTVRQLKEILARNFVNYKGCCEKWELMERVTRLYKDQKGLQHLGGAVPSGLEENLCKICMDSPIDCVLLECGHMVTCTKCGKRMNECPICRQYVIRAVHVFRS

SEQ ID NO: 71142 - protein, 128 aa, Homo sapiens
  Payload ID: 14096
  Gene Symbol:
  Gene Name: RAD51L3-RFFL
  ENSP ID: ENSP00000467986
MLDVLQELRGTVAQQVTGSSGTVKVVVVDSVTAVVSPLLGGQQREGLALMMQLARELKTLARDLGMAVVVTNHITRDRDSGRLKPALGRSWSFVPSTRILLDTIEGAGASGGRRMACLAKSSRQSIDS

SEQ ID NO: 71143 - protein, 418 aa, Homo sapiens
  Payload ID: 14097
  Gene Symbol: RAD52
  Gene Name: RAD52 homolog, DNA repair protein
  Uniprot ID: P43351
  ENSP ID: ENSP00000351284
MSGTEEAILGGRDSHPAAGGGSVLCFGQCQYTAEEYQAIQKALRQRLGPEYISSRMAGGGQKVCYIEGHRVINLANEMFGYNGWAHSITQQNVDFVDLNNGKFYVGVCAFVRVQLKDGSYHEDVGYGVSEGLKSKALSLEKARKEAVTDGLKRALRSFGNALGNCILDKDYLRSLNKLPRQLPLEVDLTKAKRQDLEPSVEEARYNSCRPNMALGHPQLQQVTSPSRPSHAVIPADQDCSSRSLSSSAVESEATHQRKLRQKQLQQQFRERMEKQQVRVSTPSAEKSEAAPPAPPVTHSTPVTVSEPLLEKDFLAGVTQELIKTLEDNSEKWAVTPDAGDGVVKPSSRADPAQTSDTLALNNQMVTQNRTPHSVCHQKPQAKSGSWDLQTYSADQRTTGNWESHRKSQDMKKRKYDPS

SEQ ID NO: 71144 - protein, 131 aa, Homo sapiens
  Payload ID: 14097
  Gene Symbol: RAD52
  Gene Name: RAD52 homolog, DNA repair protein
  ENSP ID: ENSP00000380407
MSGTEEAILGGRDSHPAAGGGSVLCFGQCQYTAEEYQAIQKALRQRLGPEYISSRMAGGGQKVCYIEGHRVINLANEMFGYNGWAHSITQQNVDFVDLNNGKFYVGVCAFVRVQLKVRGWSRPAARKDQWV

SEQ ID NO: 71145 - protein, 418 aa, Homo sapiens; identical to SEQ ID NO: 71143
  Payload ID: 14097
  Gene Symbol: RAD52
  Gene Name: RAD52 homolog, DNA repair protein
  Uniprot ID: P43351
  ENSP ID: ENSP00000387901

SEQ ID NO: 71146 - protein, 139 aa, Homo sapiens
  Payload ID: 14097
  Gene Symbol: RAD52
  Gene Name: RAD52 homolog, DNA repair protein
  Uniprot ID: P43351
  ENSP ID: ENSP00000434703
MSGTEEAILGGRDSHPAAGGGSVLCFGQCQYTAEEYQAIQKALRQRLGPEYISSRMAGGGQKVCYIEGHRVINLANEMFGYNGWAHSITQQNVDFVDLNNGKFYVGVCAFVRVQLKVRGWSRPAARKDQWVVGEGWFIS

SEQ ID NO: 71147 - protein, 139 aa, Homo sapiens; identical to SEQ ID NO: 71146
  Payload ID: 14097
  Gene Symbol: RAD52
  Gene Name: RAD52 homolog, DNA repair protein
  Uniprot ID: P43351
  ENSP ID: ENSP00000436008

SEQ ID NO: 71148 - protein, 118 aa, Homo sapiens
  Payload ID: 14097
  Gene Symbol: RAD52
  Gene Name: RAD52 homolog, DNA repair protein
  Uniprot ID: P43351
  ENSP ID: ENSP00000438965
MSGTEEAILGGRDSHPAAGGGSVLCFGQCQYTAEEYQAIQKALRQRLGPEYISSRMAGGGQKVCYIEGHRVINLANEMFGYNGWAHSITQQNVGEYALQQWGLLHCPAPAESLLWVRR

SEQ ID NO: 71149 - protein, 99 aa, Homo sapiens
  Payload ID: 14097
  Gene Symbol: RAD52
  Gene Name: RAD52 homolog, DNA repair protein
  ENSP ID: ENSP00000439583
MSGTEEAILGGRDSHPAAGGGSVLCFGQCQYTAEEYQAIQKALRQRLGPEYISSRMAGGGQKVCYIEGHRVINLANEMFGYNGWAHSITQQNVGFPCWE

SEQ ID NO: 71150 - protein, 226 aa, Homo sapiens
  Payload ID: 14097
  Gene Symbol: RAD52
  Gene Name: RAD52 homolog, DNA repair protein
  Uniprot ID: P43351
  ENSP ID: ENSP00000440268
MSGTEEAILGGRDSHPAAGGGSVLCFGQCQYTAEEYQAIQKALRQRLGPEYISSRMAGGGQKVCYIEGHRVINLANEMFGYNGWAHSITQQNVDFVDLNNGKFYVGVCAFVRVQLKDGSYHEDVGYGVSEGLKSKALSLEKARKEAVTDGLKRALRLPLLGVSGRILYSLFSVHSVMCAGGLPTPTASAQTAPSSPCSSAVLRYAQEFWECTWKLYSGQRLPEITK

SEQ ID NO: 71151 - protein, 301 aa, Homo sapiens
  Payload ID: 14097
  Gene Symbol: RAD52
  Gene Name: RAD52 homolog, DNA repair protein
  ENSP ID: ENSP00000440486
MSGTEEAILGGRDSHPAAGGGSVLCFGQCQYTAEEYQAIQKALRQRLGPEYISSRMAGGGQKVCYIEGHRVINLANEMFGYNGWAHSITQQNVDFVDLNNGKFYVGVCAFVRVQLKDGSYHEDVGYGVSEGLKSKALSLEKARKEAVTDGLKRALRSFGNALGNCILDKDYLRSLNKLPRQLPLEVDLTKAKRQDLEPSVEEARYNSCRPNMALGHPQLQQVTSPSRPSHAVIPADQDCSSRSRGCCSGARPRRRPLMQKPELIRRGERGHAPAEAPAEAAAAAVPGADGEAAGSSLHAVS

SEQ ID NO: 71152 - protein, 129 aa, Homo sapiens
  Payload ID: 14097
  Gene Symbol: RAD52
  Gene Name: RAD52 homolog, DNA repair protein
  ENSP ID: ENSP00000441073
MSGTEEAILGGRDSHPAAGGGSVLCFGQCQYTAEEYQAIQKALRQRLGPEYISSRMAGGGQKVCYIEGHRVINLANEMFGYNGWAHSITQQNVDFVDLNNGKFYVGVCAFVRVQLKDGSYHEDVGYGVS

SEQ ID NO: 71153 - protein, 118 aa, Homo sapiens; identical to SEQ ID NO: 71148
  Payload ID: 14097
  Gene Symbol: RAD52
  Gene Name: RAD52 homolog, DNA repair protein
  Uniprot ID: P43351
  ENSP ID: ENSP00000443254

SEQ ID NO: 71154 - protein, 120 aa, Homo sapiens
  Payload ID: 14097
  Gene Symbol: RAD52
  Gene Name: RAD52 homolog, DNA repair protein
  ENSP ID: ENSP00000445245
MSGTEEAILGGRDSHPAAGGGSVLCFGQCQYTAEEYQAIQKALRQRLGPEYISSRMAGGGQKVCYIEGHRVINLANEMFGYNGWAHSITQQNVDFVDLNNGKFYVGVCAFVRVQLKVRME

SEQ ID NO: 71155 - protein, 137 aa, Homo sapiens
  Payload ID: 14098
  Gene Symbol: RDM1
  Gene Name: RAD52 motif containing 1
  Uniprot ID: Q8NG50
  ENSP ID: ENSP00000477869
MAELVPFAVPIESDKTLLVWELSSGPTAEALHHSLFTAFSQFGLLYSVRVFPNAAVAHPGFYAVIKFYSARAAHRAQKACDRKQLFQKSPVKVRLGTRHKAVQHQALALNSSKCQELANYYFGFNGCSKRIIKKVVK

SEQ ID NO: 71156 - protein, 114 aa, Homo sapiens
  Payload ID: 14098
  Gene Symbol: RDM1
  Gene Name: RAD52 motif containing 1
  Uniprot ID: Q8NG50
  ENSP ID: ENSP00000477995
MHLLVPPPQHSLFTAFSQFGLLYSVRVFPNAAVAHPGFYAVIKFYSARAAHRAQKACDRKQLFQKSPVKVRLGTRHKAVQHQALALNSSKCQELANYYFGFNGCSKRIIKKVVK

SEQ ID NO: 71157 - protein, 79 aa, Homo sapiens
  Payload ID: 14098
  Gene Symbol: RDM1
  Gene Name: RAD52 motif containing 1
  Uniprot ID: Q8NG50
  ENSP ID: ENSP00000478131
MAELVPFAVPIESDKTLLVWELSSGPTAEALHVRLGTRHKAVQHQALALNSSKCQELANYYFGFNGCSKRIIKDHYHSL

SEQ ID NO: 71158 - protein, 166 aa, Homo sapiens
  Payload ID: 14098
  Gene Symbol: RDM1
  Gene Name: RAD52 motif containing 1
  Uniprot ID: Q8NG50
  ENSP ID: ENSP00000478597
MAELVPFAVPIESDKTLLVWELSSGPTAEALHHSLFTAFSQFGLLYSVRVFPNAAVAHPGFYAVIKFYSARAAHRAQKACDRKQLFQKSPVKVRLGTRHKAVQHQALALNSSKCQELANYYFGFNGCSKRIIKVPCSPWKQYGQEEEGYLSDFSLEEEEFRLPELD

SEQ ID NO: 71159 - protein, 251 aa, Homo sapiens
  Payload ID: 14098
  Gene Symbol: RDM1
  Gene Name: RAD52 motif containing 1
  Uniprot ID: Q8NG50
  ENSP ID: ENSP00000478915
MAELVPFAVPIESDKTLLVWELSSGPTAEALHHSLFTAFSQFGLLYSVRVFPNAAVAHPGFYAVIKFYSARAAHRAQKACDRKQLFQKSPVKVRLGTRHKAVQHQALALNSSKCQELANYYFGFNGCSKRIIKLQELSDLEERENEDSMVPLPKQSLKFFCALEVVLPSCDCRSPGIGLVEEPMDKVEEESGKIAVEYRPSEDIVGVRCEEELHGLIQVPCSPWKQYGQEEEGYLSDFSLEEEEFRLPELD

SEQ ID NO: 71160 - protein, 261 aa, Homo sapiens
  Payload ID: 14098
  Gene Symbol: RDM1
  Gene Name: RAD52 motif containing 1
  Uniprot ID: Q8NG50
  ENSP ID: ENSP00000479310
MHLLVPPPQHSLFTAFSQFGLLYSVRVFPNAAVAHPGFYAVIKFYSARAAHRAQKACDRKQLFQKSPVKVRLGTRHKAVQHQALALNSSKCQELANYYFGFNGCSKRIIKLQELSDLEERENEDSMVPLPKQSLKFFCALEVVLPSCDCRSPGIGLVEEPMDKVEEGPLSFLMKRKTAQKLAIQKALSDAFQKLLIVVLESGKIAVEYRPSEDIVGVRCEEELHGLIQVPCSPWKQYGQEEEGYLSDFSLEEEEFRLPELD

SEQ ID NO: 71161 - protein, 143 aa, Homo sapiens
  Payload ID: 14098
  Gene Symbol: RDM1
  Gene Name: RAD52 motif containing 1
  Uniprot ID: Q8NG50
  ENSP ID: ENSP00000479622
MHLLVPPPQHSLFTAFSQFGLLYSVRVFPNAAVAHPGFYAVIKFYSARAAHRAQKACDRKQLFQKSPVKVRLGTRHKAVQHQALALNSSKCQELANYYFGFNGCSKRIIKVPCSPWKQYGQEEEGYLSDFSLEEEEFRLPELD

SEQ ID NO: 71162 - protein, 116 aa, Homo sapiens
  Payload ID: 14098
  Gene Symbol: RDM1
  Gene Name: RAD52 motif containing 1
  Uniprot ID: Q8NG50
  ENSP ID: ENSP00000480131
MHLLVPPPQHSLFTAFSQFGLLYSVRVFPNAAVAHPGFYAVIKFYSARAAHRAQKACDRKQLFQKSPVKVRLGTRHKAVQHQALALNSSKCQELANYYFGFNGCSKRIIKDHYHSL

SEQ ID NO: 71163 - protein, 284 aa, Homo sapiens
  Payload ID: 14098
  Gene Symbol: RDM1
  Gene Name: RAD52 motif containing 1
  Uniprot ID: Q8NG50
  ENSP ID: ENSP00000481061
MAELVPFAVPIESDKTLLVWELSSGPTAEALHHSLFTAFSQFGLLYSVRVFPNAAVAHPGFYAVIKFYSARAAHRAQKACDRKQLFQKSPVKVRLGTRHKAVQHQALALNSSKCQELANYYFGFNGCSKRIIKLQELSDLEERENEDSMVPLPKQSLKFFCALEVVLPSCDCRSPGIGLVEEPMDKVEEGPLSFLMKRKTAQKLAIQKALSDAFQKLLIVVLESGKIAVEYRPSEDIVGVRCEEELHGLIQVPCSPWKQYGQEEEGYLSDFSLEEEEFRLPELD

SEQ ID NO: 71164 - protein, 116 aa, Homo sapiens; identical to SEQ ID NO: 71162
  Payload ID: 14098
  Gene Symbol: RDM1
  Gene Name: RAD52 motif containing 1
  Uniprot ID: Q8NG50
  ENSP ID: ENSP00000481648

SEQ ID NO: 71165 - protein, 116 aa, Homo sapiens; identical to SEQ ID NO: 71162
  Payload ID: 14098
  Gene Symbol: RDM1
  Gene Name: RAD52 motif containing 1
  Uniprot ID: Q8NG50
  ENSP ID: ENSP00000481726

SEQ ID NO: 71166 - protein, 236 aa, Homo sapiens
  Payload ID: 14098
  Gene Symbol: RDM1
  Gene Name: RAD52 motif containing 1
  Uniprot ID: Q8NG50
  ENSP ID: ENSP00000482288
MAELVPFAVPIESDKTLLVWELSSGPTAEALHHSLFTAFSQFGLLYSVRVFPNAAVAHPGFYAVIKFYSARAAHRAQKACDRKQLFQKSPVKVRLGTRHKAVQHQALALNSSKCQELANYYFGFNGCSKRIIKLQELSDLEERENEDSMVPLPKQSLKFFCALEVVLPSCDCRSPGIGLVEEPMDKVEEGPLSFLMKRKTAQKLAIQKALSDAFQKLLIVVLGKTVLIILEVLQFQ

SEQ ID NO: 71167 - protein, 139 aa, Homo sapiens
  Payload ID: 14098
  Gene Symbol: RDM1
  Gene Name: RAD52 motif containing 1
  Uniprot ID: Q8NG50
  ENSP ID: ENSP00000482981
MAELVPFAVPIESDKTLLVWELSSGPTAEALHHSLFTAFSQFGLLYSVRVFPNAAVAHPGFYAVIKFYSARAAHRAQKACDRKQLFQKSPVKVRLGTRHKAVQHQALALNSSKCQELANYYFGFNGCSKRIIKDHYHSL

SEQ ID NO: 71168 - protein, 166 aa, Homo sapiens; identical to SEQ ID NO: 71158
  Payload ID: 14098
  Gene Symbol: RDM1
  Gene Name: RAD52 motif containing 1
  Uniprot ID: Q8NG50
  ENSP ID: ENSP00000483387

SEQ ID NO: 71169 - protein, 284 aa, Homo sapiens; identical to SEQ ID NO: 71163
  Payload ID: 14098
  Gene Symbol: RDM1
  Gene Name: RAD52 motif containing 1
  Uniprot ID: Q8NG50
  ENSP ID: ENSP00000483549

SEQ ID NO: 71170 - protein, 251 aa, Homo sapiens; identical to SEQ ID NO: 71159
  Payload ID: 14098
  Gene Symbol: RDM1
  Gene Name: RAD52 motif containing 1
  Uniprot ID: Q8NG50
  ENSP ID: ENSP00000483566

SEQ ID NO: 71171 - protein, 213 aa, Homo sapiens
  Payload ID: 14098
  Gene Symbol: RDM1
  Gene Name: RAD52 motif containing 1
  ENSP ID: ENSP00000483890
MHLLVPPPQHSLFTAFSQFGLLYSVRVFPNAAVAHPGFYAVIKFYSARAAHRAQKACDRKQLFQKSPVKVRLGTRHKAVQHQALALNSSKCQELANYYFGFNGCSKRIIKLQELSDLEERENEDSMVPLPKQSLKFFCALEVVLPSCDCRSPGIGLVEEPMDKVEEGPLSFLMKRKTAQKLAIQKALSDAFQKLLIVVLGKTVLIILEVLQFQ

SEQ ID NO: 71172 - protein, 228 aa, Homo sapiens
  Payload ID: 14098
  Gene Symbol: RDM1
  Gene Name: RAD52 motif containing 1
  Uniprot ID: Q8NG50
  ENSP ID: ENSP00000483933
MHLLVPPPQHSLFTAFSQFGLLYSVRVFPNAAVAHPGFYAVIKFYSARAAHRAQKACDRKQLFQKSPVKVRLGTRHKAVQHQALALNSSKCQELANYYFGFNGCSKRIIKLQELSDLEERENEDSMVPLPKQSLKFFCALEVVLPSCDCRSPGIGLVEEPMDKVEEESGKIAVEYRPSEDIVGVRCEEELHGLIQVPCSPWKQYGQEEEGYLSDFSLEEEEFRLPELD

SEQ ID NO: 71173 - protein, 139 aa, Homo sapiens; identical to SEQ ID NO: 71167
  Payload ID: 14098
  Gene Symbol: RDM1
  Gene Name: RAD52 motif containing 1
  Uniprot ID: Q8NG50
  ENSP ID: ENSP00000487602

SEQ ID NO: 71174 - protein, 116 aa, Homo sapiens; identical to SEQ ID NO: 71162
  Payload ID: 14098
  Gene Symbol: RDM1
  Gene Name: RAD52 motif containing 1
  Uniprot ID: Q8NG50
  ENSP ID: ENSP00000487670

SEQ ID NO: 71175 - protein, 79 aa, Homo sapiens; identical to SEQ ID NO: 71157
  Payload ID: 14098
  Gene Symbol: RDM1
  Gene Name: RAD52 motif containing 1
  Uniprot ID: Q8NG50
  ENSP ID: ENSP00000487863

SEQ ID NO: 71176 - protein, 236 aa, Homo sapiens; identical to SEQ ID NO: 71166
  Payload ID: 14098
  Gene Symbol: RDM1
  Gene Name: RAD52 motif containing 1
  Uniprot ID: Q8NG50
  ENSP ID: ENSP00000487935

SEQ ID NO: 71177 - protein, 114 aa, Homo sapiens; identical to SEQ ID NO: 71156
  Payload ID: 14098
  Gene Symbol: RDM1
  Gene Name: RAD52 motif containing 1
  Uniprot ID: Q8NG50
  ENSP ID: ENSP00000488160

SEQ ID NO: 71178 - protein, 213 aa, Homo sapiens; identical to SEQ ID NO: 71171
  Payload ID: 14098
  Gene Symbol: RDM1
  Gene Name: RAD52 motif containing 1
  ENSP ID: ENSP00000488202

SEQ ID NO: 71179 - protein, 137 aa, Homo sapiens; identical to SEQ ID NO: 71155
  Payload ID: 14098
  Gene Symbol: RDM1
  Gene Name: RAD52 motif containing 1
  Uniprot ID: Q8NG50
  ENSP ID: ENSP00000488583

SEQ ID NO: 71180 - protein, 228 aa, Homo sapiens; identical to SEQ ID NO: 71172
  Payload ID: 14098
  Gene Symbol: RDM1
  Gene Name: RAD52 motif containing 1
  Uniprot ID: Q8NG50
  ENSP ID: ENSP00000488617

SEQ ID NO: 71181 - protein, 143 aa, Homo sapiens; identical to SEQ ID NO: 71161
  Payload ID: 14098
  Gene Symbol: RDM1
  Gene Name: RAD52 motif containing 1
  Uniprot ID: Q8NG50
  ENSP ID: ENSP00000488806

SEQ ID NO: 71182 - protein, 261 aa, Homo sapiens; identical to SEQ ID NO: 71160
  Payload ID: 14098
  Gene Symbol: RDM1
  Gene Name: RAD52 motif containing 1
  Uniprot ID: Q8NG50
  ENSP ID: ENSP00000488876

SEQ ID NO: 71183 - protein, 910 aa, Homo sapiens
  Payload ID: 14099
  Gene Symbol: RAD54B
  Gene Name: RAD54 homolog B (S. cerevisiae)
  Uniprot ID: Q9Y620
  ENSP ID: ENSP00000336606
MRRSAAPSQLQGNSFKKPKFIPPGRSNPGLNEEITKLNPDIKLFEGVAINNTFLPSQNDLRICSLNLPSEESTREINNRDNCSGKYCFEAPTLATLDPPHTVHSAPKEVAVSKEQEEKSDSLVKYFSVVWCKPSKKKHKKWEGDAVLIVKGKSFILKNLEGKDIGRGIGYKFKELEKIEEGQTLMICGKEIEVMGVISPDDFSSGRCFQLGGGSTAISHSSQVARKCFSNPFKSVCKPSSKENRQNDFQNCKPRHDPYTPNSLVMPRPDKNHQWVFNKNCFPLVDVVIDPYLVYHLRPHQKEGIIFLYECVMGMRMNGRCGAILADEMGLGKTLQCISLIWTLQCQGPYGGKPVIKKTLIVTPGSLVNNWKKEFQKWLGSERIKIFTVDQDHKVEEFIKSIFYSVLIISYEMLLRSLDQIKNIKFDLLICDEGHRLKNSAIKTTTALISLSCEKRIILTGTPIQNDLQEFFALIDFVNPGILGSLSSYRKIYEEPIILSREPSASEEEKELGERRAAELTCLTGLFILRRTQEIINKYLPPKIENVVFCRPGALQIELYRKLLNSQVVRFCLQGLLENSPHLICIGALKKLCNHPCLLFNSIKEKECSSTCDKNEEKSLYKGLLSVFPADYNPLLFTEKESGKLQVLSKLLAVIHELRPTEKVVLVSNYTQTLNILQEVCKRHGYAYTRLDGQTPISQRQQIVDGFNSQHSSFFIFLLSSKAGGVGLNLIGGSHLILYDIDWNPATDIQAMSRVWRDGQKYPVHIYRLLTTGTIEEKIYQRQISKQGLCGAVVDLTKTSEHIQFSVEELKNLFTLHESSDCVTHDLLDCECTGEEVHTGDSLEKFIVSRDCQLGPHHQKSNSLKPLSMSQLKQWKHFSGDHLNLTDPFLERITENVSFIFQNITTQATGT

SEQ ID NO: 71184 - protein, 125 aa, Homo sapiens
  Payload ID: 14099
  Gene Symbol: RAD54B
  Gene Name: RAD54 homolog B (S. cerevisiae)
  ENSP ID: ENSP00000428554
MRRSAAPSQLQGNSFKKPKFIPPGRSNPGLNEEITKLNPDIKLFEGVAINNTFLPSQNDLRICSLNLPSEESTREINNRDNCSGKYCFEAPTLATLDPPHTVHSAPKEVAVSKEQEEKSDSLVKY

SEQ ID NO: 71185 - protein, 117 aa, Homo sapiens
  Payload ID: 14099
  Gene Symbol: RAD54B
  Gene Name: RAD54 homolog B (S. cerevisiae)
  Uniprot ID: Q9Y620
  ENSP ID: ENSP00000430153
MRRSAAPSQLQGNSFKKPKFIPPGRSNPGLNEEITKLNPDIKLFEGVAINNTFLPSQNDLRICSLNLPSEESTREINNRDNCSGKYCFEAPTLATLDPPHTVQTWMRRHRLVPVHYR

SEQ ID NO: 71186 - protein, 52 aa, Homo sapiens
  Payload ID: 14099
  Gene Symbol: RAD54B
  Gene Name: RAD54 homolog B (S. cerevisiae)
  ENSP ID: ENSP00000430570
MRRSAAPSQLQGNSFKKPKFIPPGRSNPGLNEEITKLNPDIKLFEFIRLLKK

SEQ ID NO: 71187 - protein, 121 aa, Homo sapiens
  Payload ID: 14099
  Gene Symbol: RAD54B
  Gene Name: RAD54 homolog B (S. cerevisiae)
  ENSP ID: ENSP00000430808
MRRSAAPSQLQGNSFKKPKFIPPGRSNPGLNEEITKLNPDIKLFEGVAINNTFLPSQNDLRICSLNLPSEESTREINNRDNCSGKYCFEAPTLATLDPPHTVQTWMRRHRLVPVHYSSFGS

SEQ ID NO: 71188 - protein, 726 aa, Homo sapiens
  Payload ID: 14099
  Gene Symbol: RAD54B
  Gene Name: RAD54 homolog B (S. cerevisiae)
  ENSP ID: ENSP00000483397
MICGKEIEVMGVISPDDFSSGRCFQLGGGSTAISHSSQVARKCFSNPFKSVCKPSSKENRQNDFQNCKPRHDPYTPNSLVMPRPDKNHQWVFNKNCFPLVDVVIDPYLVYHLRPHQKEGIIFLYECVMGMRMNGRCGAILADEMGLGKTLQCISLIWTLQCQGPYGGKPVIKKTLIVTPGSLVNNWKKEFQKWLGSERIKIFTVDQDHKVEEFIKSIFYSVLIISYEMLLRSLDQIKNIKFDLLICDEGHRLKNSAIKTTTALISLSCEKRIILTGTPIQNDLQEFFALIDFVNPGILGSLSSYRKIYEEPIILSREPSASEEEKELGERRAAELTCLTGLFILRRTQEIINKYLPPKIENVVFCRPGALQIELYRKLLNSQVVRFCLQGLLENSPHLICIGALKKLCNHPCLLFNSIKEKECSSTCDKNEEKSLYKGLLSVFPADYNPLLFTEKESGKLQVLSKLLAVIHELRPTEKVVLVSNYTQTLNILQEVCKRHGYAYTRLDGQTPISQRQQIVDGFNSQHSSFFIFLLSSKAGGVGLNLIGGSHLILYDIDWNPATDIQAMSRVWRDGQKYPVHIYRLLTTGTIEEKIYQRQISKQGLCGAVVDLTKTSEHIQFSVEELKNLFTLHESSDCVTHDLLDCECTGEEVHTGDSLEKFIVSRDCQLGPHHQKSNSLKPLSMSQLKQWKHFSGDHLNLTDPFLERITENVSFIFQNITTQATGT

SEQ ID NO: 71189 - protein, 747 aa, Homo sapiens
  Payload ID: 14100
  Gene Symbol: RAD54L
  Gene Name: RAD54-like (S. cerevisiae)
  Uniprot ID: Q92698
  ENSP ID: ENSP00000361043
MRRSLAPSQLAKRKPEGRSCDDEDWQPGLVTPRKRKSSSETQIQECFLSPFRKPLSQLTNQPPCLDSSQHEAFIRSILSKPFKVPIPNYQGPLGSRALGLKRAGVRRALHDPLEKDALVLYEPPPLSAHDQLKLDKEKLPVHVVVDPILSKVLRPHQREGVKFLWECVTSRRIPGSHGCIMADEMGLGKTLQCITLMWTLLRQSPECKPEIDKAVVVSPSSLVKNWYNEVGKWLGGRIQPLAIDGGSKDEIDQKLEGFMNQRGARVSSPILIISYETFRLHVGVLQKGSVGLVICDEGHRLKNSENQTYQALDSLNTSRRVLISGTPIQNDLLEYFSLVHFVNSGILGTAHEFKKHFELPILKGRDAAASEADRQLGEERLRELTSIVNRCLIRRTSDILSKYLPVKIEQVVCCRLTPLQTELYKRFLRQAKPAEELLEGKMSVSSLSSITSLKKLCNHPALIYDKCVEEEDGFVGALDLFPPGYSSKALEPQLSGKMLVLDYILAVTRSRSSDKVVLVSNYTQTLDLFEKLCRARRYLYVRLDGTMSIKKRAKVVERFNSPSSPDFVFMLSSKAGGCGLNLIGANRLVMFDPDWNPANDEQAMARVWRDGQKKTCYIYRLLSAGTIEEKIFQRQSHKKALSSCVVDEEQDVERHFSLGELKELFILDEASLSDTHDRLHCRRCVNSRQIRPPPDGSDCTSDLAGWNHCTDKWGLRDEVLQAAWDAASTAITFVFHQRSHEEQRGLR

SEQ ID NO: 71190 - protein, 747 aa, Homo sapiens; identical to SEQ ID NO: 71189
  Payload ID: 14100
  Gene Symbol: RAD54L
  Gene Name: RAD54-like (S. cerevisiae)
  Uniprot ID: Q92698
  ENSP ID: ENSP00000396113

SEQ ID NO: 71191 - protein, 321 aa, Homo sapiens
  Payload ID: 14100
  Gene Symbol: RAD54L
  Gene Name: RAD54-like (S. cerevisiae)
  ENSP ID: ENSP00000476642
  MOD_RES (1)..(1): Any amino acid
XCLIRRTSDILSKYLPVKIEQVVCCRLTPLQTELYKRFLRQAKPAEELLEGKMSVSSLSSITSLKKLCNRKMLVLDYILAVTRSRSSDKVVLVSNYTQTLDLFEKLCRARRYLYVRLDGTMSIKKRAKVVERFNSPSSPDFVFMLSSKAGGCGLNLIGANRLVMFDPDWNPANDEQAMARVWRDGQKKTCYIYRLLSAGTIEEKIFQRQSHKKALSSCVVDEEQDVERHFSLGELKELFILDEASLSDTHDRLHCRRCVNSRQIRPPPDGSDCTSDLAGWNHCTDKWGLRDEVLQAAWDAASTAITFVFHQRSHEEQRGLR

SEQ ID NO: 71192 - protein, 202 aa, Homo sapiens
  Payload ID: 14100
  Gene Symbol: RAD54L
  Gene Name: RAD54-like (S. cerevisiae)
  ENSP ID: ENSP00000477172
MRRSLAPSQLAKRKPEGRSCDDEDWQPGLVTPRKRKSSSETQIQECFLSPFRKPLSQLTNQPPCLDSSQHEAFIRSILSKPFKVPIPNYQGPLGSRALGLKRAGVRRALHDPLEKDALVLYEPPPLSAHDQLKLDKEKLPVHVVVDPILSKVLRPHQREGVKFLWECVTSRRIPGSHGCIMADEMGLGKTLQCITLMWTLLR

SEQ ID NO: 71193 - protein, 256 aa, Homo sapiens
  Payload ID: 14100
  Gene Symbol: RAD54L
  Gene Name: RAD54-like (S. cerevisiae)
  ENSP ID: ENSP00000477729
  MOD_RES (1)..(1): Any amino acid
XPLGSRALGLKRAGVRRALHDPLEKDALVLYEPPPLSAHDQLKLDKEKLPVHVVVDPILSKVLRPHQREGVKFLWECVTSRRIPGSHGCIMADEMGLGKTLQCITLMWTLLRQSPECKPEIDKAVVVSPSSLVKNWYNEVGKWLGGRIQPLAIDGGSKDEIDQKLGFMNQRGARVSSPILIISYETFRLHVGVLQKGSVGLVICDEGHRLKNSENQTYQALDSLNTSRRVLISGTPIQNDLLEYFSLVHFVNSGIL

SEQ ID NO: 71194 - protein, 112 aa, Homo sapiens
  Payload ID: 14100
  Gene Symbol: RAD54L
  Gene Name: RAD54-like (S. cerevisiae)
  ENSP ID: ENSP00000479155
  MOD_RES (1)..(1): Any amino acid
XLPVKIEQVVCCRLTPLQTELYKRFLRQAKPAEELLEGKMSVSSLSSITSLKKLCNHPALIYDKCVEEEDGFVGALDLFPPGYSSKALEPQLSGTYTSAWMARCPLRSEPRL

SEQ ID NO: 71195 - protein, 68 aa, Homo sapiens
  Payload ID: 14100
  Gene Symbol: RAD54L
  Gene Name: RAD54-like (S. cerevisiae)
  ENSP ID: ENSP00000479734
VGVLQKGSVGLVICDEGHRLKNSENQTYQALDSLNTSRRVLISGTPIQNDLLEYFSLVHFVNSGILDA

SEQ ID NO: 71196 - protein, 75 aa, Homo sapiens
  Payload ID: 14100
  Gene Symbol: RAD54L
  Gene Name: RAD54-like (S. cerevisiae)
  ENSP ID: ENSP00000479823
MADEMGLGKTLQCITLMWTLLRQSPECKPEIDKAVVVSPSSLVKNWYNEVGKWLGGRIQPLAIDGGSKDEIDQKL

SEQ ID NO: 71197 - protein, 75 aa, Homo sapiens; identical to SEQ ID NO: 71196
  Payload ID: 14100
  Gene Symbol: RAD54L
  Gene Name: RAD54-like (S. cerevisiae)
  ENSP ID: ENSP00000479995

SEQ ID NO: 71198 - protein, 30 aa, Homo sapiens
  Payload ID: 14100
  Gene Symbol: RAD54L
  Gene Name: RAD54-like (S. cerevisiae)
  ENSP ID: ENSP00000480207
MNQRGARVSSPILIISYETFRLHVGVLQKG

SEQ ID NO: 71199 - protein, 60 aa, Homo sapiens
  Payload ID: 14100
  Gene Symbol: RAD54L
  Gene Name: RAD54-like (S. cerevisiae)
  ENSP ID: ENSP00000483843
  MOD_RES (1)..(1): Any amino acid
XLRQSPECKPEIDKAVVVSPSSLVKNWYNEVGKWLGGRIQPLAIDGGSKDEIDQKLGTEP

SEQ ID NO: 71200 - protein, 1467 aa, Homo sapiens
  Payload ID: 14101
  Gene Symbol: RAD54L2
  Gene Name: RAD54-like 2 (S. cerevisiae)
  Uniprot ID: Q9Y4B4
  ENSP ID: ENSP00000386520
MSDESASGSDPDLDPDVELEDAEEEEEEEEVAVEECDRDDEEDLLDDPSLEGMCGTEHAQLGEDGQQPPRCTSTTSSQSEPSEQLRRHQGKNLASEDPKKKRAQKPSHMRRNIRKLLREDQLEPVTKAAQQEELERRKRLEQQRKDYAAPIPTVPLEFLPEEIALRASDGPQLPPRVLAQEVICLDSSSGSEDEKSSRDEVIELSSGEEDTLHIVDSSESVSEDDEEEEKGGTHVNDVLNQRDALGRVLVNLNHPPEEENVFLAPQLARAVKPHQIGGIRFLYDNLVESLERFKTSSGFGCILAHSMGLGKTLQVISFIDVLFRHTPAKTVLAIVPVNTLQNWLAEFNMWLPPPEALPADNKPEEVQPRFFKVHILNDEHKTMASRAKVMADWVSEGGVLLMGYEMYRLLTLKKSFATGRPKKTKKRSHPVIIDLDEEDRQQEFRREFEKALCRPGPDVVICDEGHRIKNCQASTSQALKNIRSRRRVVLTGYPLQNNLIEYWCMVDFVRPDFLGTRQEFSNMFERPILNGQCIDSTPQDVRLMRYRSHVLHSLLEGFVQRRGHTVLKIHLPAKEENVILVRLSKIQRDLYTQFMDRFRDCGSSGWLGLNPLKAFCVCCKIWNHPDVLYEALQKESLANEQDLDVEELGSAGTSARCPPQGTKGKGEDSTLASSMGEATNSKFLQGVGFNPFQERGNNIVTYEWAKDLLTNYQTGVLENSPKMVLLFHLIEESVKLGDKILVFSQSLSTLALIEEFLGKREVPCPPGTEGQGAQKWVRNISYFRLDGSTPAFERERLINQFNDPSNLTTWLFLLSTRAGCLGVNLIGANRVVVFDASWNPCHDAQAVCRVYRYGQKKPCYIYRLVADYTLEKKIYDRQISKQGMSDRVVDDLNPMLNFTRKEVENLLHFVEKEPAPQVSLNVKGIKESVLQLACLKYPHLITKEPFEHESLLLNRKDHKLTKAEKKAAKKSYEEDKRTSVPYTRPSYAQYYPASDQSLTSIPAFSQRNWQPTLKGDEKPVASVRPVQSTPIPMMPRHVPLGGSVSSASSTNPSMNFPINYLQRAGVLVQKVVTTTDIVIPGLNSSTDVQARINAGESIHIIRGTKGTYIRTSDGRIFAVRATGKPKVPEDGRMAASGSQGPSCESTSNGRHSASSPKAPDPEGLARPVSPDSPEIISELQQYADVAAARESRQSSPSTNAALPGPPAQLMDSSAVPGTALGTEPRLGGHCLNSSLLVTGQPCGDRHPVLDLRGHKRKLATPPAAQESSRRRSRKGHLPAPVQPYEHGYPVSGGFAMPPVSLNHNLTTPFTSQAGENSLFMGSTPSYYQLSNLLADARLVFPVTTDPLVPAGPVSSSSTATSVTASNPSFMLNPSVPGILPSYSLPFSQPLLSEPRMFAPFPSPVLPSNLSRGMSIYPGYMSPHAGYPAGGLLRSQVPPFDSHEVAEVGFSSNDDEDKDDDVIEVTGK

SEQ ID NO: 71201 - protein, 1296 aa, Homo sapiens
  Payload ID: 14101
  Gene Symbol: RAD54L2
  Gene Name: RAD54-like 2 (S. cerevisiae)
  ENSP ID: ENSP00000410283
  MOD_RES (1)..(1): Any amino acid
XLERRKRLEQQRKDYAAPIPTVPLEFLPEVIELSSGEEDTLHIVDSSESVSEDDEEEEKGGTHVNDVLNQRDALGRVLVNLNHPPEEENVFLAPQLARAVKPHQIGGIRFLYDNLVESLERFKTSSGFGCILAHSMGLGKTLQVISFIDVLFRHTPAKTVLAIVPVNTLQNWLAEFNMWLPPPEALPADNKPEEVQPRFFKVHILNDEHKTMASRAKVMADWVSEGGVLLMGYEMYRLLTLKKSFATGRPKKTKKRSHPVIIDLDEEDRQQEFRREFEKALCRPGPDVVICDEGHRIKNCQASTSQALKNIRSRRRVVLTGYPLQNNLIEYWCMVDFVRPDFLGTRQEFSNMFERPILNGQCIDSTPQDVRLMRYRSHVLHSLLEGFVQRRGHTVLKIHLPAKEENVILVRLSKIQRDLYTQFMDRFRDCGSSGWLGLNPLKAFCVCCKIWNHPDVLYEALQKESLANEQDLDVEELGSAGTSARCPPQGTKGKGEDSTLASSMGEATNSKFLQGVGFNPFQERGNNIVTYEWAKDLLTNYQTGVLENSPKMVLLFHLIEESVKLGDKILVFSQSLSTLALIEEFLGKREVPCPPGTEGQGAQKWVRNISYFRLDGSTPAFERERLINQFNDPSNLTTWLFLLSTRAGCLGVNLIGANRVVVFDASWNPCHDAQAVCRVYRYGQKKPCYIYRLVADYTLEKKIYDRQISKQGMSDRVVDDLNPMLNFTRKEVENLLHFVEKEPAPQVSLNVKGIKESVLQLACLKYPHLITKEPFEHESLLLNRKDHKLTKAEKKAAKKSYEEDKRTSVPYTRPSYAQYYPASDQSLTSIPAFSQRNWQPTLKGDEKPVASVRPVQSTPIPMMPRHVPLGGSVSSASSTNPSMNFPINYLQRAGVLVQKVVTTTDIVIPGLNSSTDVQARINAGESIHIIRGTKGTYIRTSDGRIFAVRATGKPKVPEDGRMAASGSQGPSCESTSNGRHSASSPKAPDPEGLARPVSPDSPEIISELQQYADVAAARESRQSSPSTNAALPGPPAQLMDSSAVPGTALGTEPRLGGHCLNSSLLVTGQPCGDRHPVLDLRGHKRKLATPPAAQESSRRRSRKGHLPAPVQPYEHGYPVSGGFAMPPVSLNHNLTTPFTSQAGENSLFMGSTPSYYQLSNLLADARLVFPVTTDPLVPAGPVSSSSTATSVTASNPSFMLNPSVPGILPSYSLPFSQPLLSEPRMFAPFPSPVLPSNLSRGMSIYPGYMSPHAGYPAGGLLRSQVPPFDSHEVAEVGFSSNDDEDKDDDVIEVTGK

SEQ ID NO: 71202 - protein, 391 aa, Homo sapiens
  Payload ID: 14102
  Gene Symbol: RAD9A
  Gene Name: RAD9 checkpoint clamp component A
  Uniprot ID: Q99638
  ENSP ID: ENSP00000311360
MKCLVTGGNVKVLGKAVHSLSRIGDELYLEPLEDGLSLRTVNSSRSAYACFLFAPLFFQQYQAATPGQDLLRCKILMKSFLSVFRSLAMLEKTVEKCCISLNGRSSRLVVQLHCKFGVRKTHNLSFQDCESLQAVFDPASCPHMLRAPARVLGEAVLPFSPALAEVTLGIGRGRRVILRSYHEEEADSTAKAMVTEMCLGEEDFQQLQAQEGVAITFCLKEFRGLLSFAESANLNLSIHFDAPGRPAIFTIKDSLLDGHFVLATLSDTDSHSQDLGSPERHQPVPQLQAHSTPHPDDFANDDIDSYMIAMETTIGNEGSRVLPSISLSPGPQPPKSPGPHSEEEDEAEPSTVPGTPPPKKFRSLFFGSILAPVRSPQGPSPVLAEDSEGEG

SEQ ID NO: 71203 - protein, 49 aa, Homo sapiens
  Payload ID: 14102
  Gene Symbol: RAD9A
  Gene Name: RAD9 checkpoint clamp component A
  ENSP ID: ENSP00000442064
MKCLVTGGNVKALPPDGELLPLCLCLLSLCPALLPAIPGSHPWSGPAAL

SEQ ID NO: 71204 - protein, 247 aa, Homo sapiens
  Payload ID: 14102
  Gene Symbol: RAD9A
  Gene Name: RAD9 checkpoint clamp component A
  ENSP ID: ENSP00000444979
MKCLVTGGNVKVLGKAVHSLSRIGDELYLEPLEDGLSLRTVNSSRSAYACFLFAPLFFQQYQAATPGQDLLRCKILMKTVEKCCISLNGRSSRLVVQLHCKFGVRKTHNLSFQDCESLQAVFDPASCPHMLRAPARVLGEAVLPFSPALAEVTLGIGRGRRVILRSYHEEEADSTAKAMVTEMCLGEEDFQQLQAQEGVAITFCLKEFRGLLSFAESANLNLSIHFDAPGRPAIFTIKDSLLDGHFV

SEQ ID NO: 71205 - protein, 118 aa, Homo sapiens
  Payload ID: 14102
  Gene Symbol: RAD9A
  Gene Name: RAD9 checkpoint clamp component A
  ENSP ID: ENSP00000445137
MKCLVTGGNVKVLGKAVHSLSRIGDELYLEPLEDGLSLRTVNSSRSAYACFLFAPLFFQQYQAATPGQDLLRCKILMKSFLSVFRSLAMLEKTVEKCCISLNGRSSRLVVQLHCKFGL

SEQ ID NO: 71206 - protein, 10 aa, Homo sapiens
  Payload ID: 14102
  Gene Symbol: RAD9A
  Gene Name: RAD9 checkpoint clamp component A
  ENSP ID: ENSP00000478994
MKCLVTGGNV

SEQ ID NO: 71207 - protein, 87 aa, Homo sapiens
  Payload ID: 14103
  Gene Symbol: RAD9B
  Gene Name: RAD9 checkpoint clamp component B
  ENSP ID: ENSP00000350777
MSENELDTTLHLKCKLGMKSILPIFRCLNSLERNIEKCRIFTRSDKCKVVIQFFYRHATWMELEVTMLSEISQAWKVKYCMFSQCGR

SEQ ID NO: 71208 - protein, 429 aa, Homo sapiens
  Payload ID: 14103
  Gene Symbol: RAD9B
  Gene Name: RAD9 checkpoint clamp component B
  ENSP ID: ENSP00000376440
MAAMLKCVMSGSQVKVFGKAVQALSRISDEFWLDPSKKGLALRCVNSSRSAYGCVLFSPVFFQHYQWSALVKMSENELDTTLHLKCKLGMKSILPIFRCLNSLERNIEKCRIFTRSDKCKVVIQFFYRHGIKRTHNICFQESQPLQVIFDKNVCTNTLMIQPRLLADAIVLFTSSQEEVTLAVTPLNFCLKSSNEESMDLSNAVHSEMFVGSDEFDFFQIGMDTEITFCFKELKGILTFSEATHAPISIYFDFPGKPLALSIDDMLVEANFILATLADEQSRASSPQSLCLSQKRKRSDLIEKKAGKNVTGQALECISKKAAPRRLYPKETLTNISALENCGSPAMKRVDGDVSEVSESSVSNTEEVPGSLCLRKFSCMFFGAVSSDQQEHFNHPFDSLARASDSEEDMNNVCCRKEFNGSDAKYFCII

SEQ ID NO: 71209 - protein, 417 aa, Homo sapiens
  Payload ID: 14103
  Gene Symbol: RAD9B
  Gene Name: RAD9 checkpoint clamp component B
  ENSP ID: ENSP00000386434
MAAMLKCVMSGSQVKVFGKAVQALSRISDEFWLDPSKKGLALRCVNSSRSAYGCVLFSPVFFQHYQWSALVKMSENELDTTLHLKCKLGMKSILPIFRCLNSLERNIEKCRIFTRSDKCKVVIQFFYRHGIKRTHNICFQESQPLQVIFDKNVCTNTLMIQPRLLADAIVLFTSSQEEVTLAVTPLNFCLKSSNEESMDLSNAVHSEMFVGSDEFDFFQIGMDTEITFCFKELKGILTFSEATHAPISIYFDFPGKPLALSIDDMLVEANFILATLADEQSRASSPQSLCLSQKRKRSDLIEKKAGKNVTGQALECISKKAAPRRLYPKETLTNISALENCGSPAMKRVDGDVSEVSESSVSNTEEVPGSLCLRKFSCMFFGAVSSDQQEHFNHPFDSLARASDSEEDMNNGSFSIF

SEQ ID NO: 71210 - protein, 345 aa, Homo sapiens
  Payload ID: 14103
  Gene Symbol: RAD9B
  Gene Name: RAD9 checkpoint clamp component B
  Uniprot ID: Q6WBX8
  ENSP ID: ENSP00000386629
MSENELDTTLHLKCKLGMKSILPIFRCLNSLERNIEKCRIFTRSDKCKVVIQFFYRHGIKRTHNICFQESQPLQVIFDKNVCTNTLMIQPRLLADAIVLFTSSQEEVTLAVTPLNFCLKSSNEESMDLSNAVHSEMFVGSDEFDFFQIGMDTEITFCFKELKGILTFSEATHAPISIYFDFPGKPLALSIDDMLVEANFILATLADEQSRASSPQSLCLSQKRKRSDLIEKKAGKNVTGQALECISKKAAPRRLYPKETLTNISALENCGSPAMKRVDGDVSEVSESSVSNTEEVPGSLCLRKFSCMFFGAVSSDQQEHFNHPFDSLARASDSEEDMNNGSFSIF

SEQ ID NO: 71211 - protein, 341 aa, Homo sapiens
  Payload ID: 14103
  Gene Symbol: RAD9B
  Gene Name: RAD9 checkpoint clamp component B
  ENSP ID: ENSP00000386697
MAAMLKCVMSGSQVKVFGKAVQALSRISDEFWLDPSKKGLALRCVNSSRSAYGCVLFSPVFFQHYQWSALVKMSENELDTTLHLKCKLGMKSILPIFRCLNSLERNIEKCRIFTRSDKCKVVIQFFYRHDLSNAVHSEMFVGSDEFDFFQIGMDTEITFCFKELKGILTFSEATHAPISIYFDFPGKPLALSIDDMLVEANFILATLADEQSRASSPQSLCLSQKRKRSDLIEKKAGKNVTGQALECISKKAAPRRLYPKETLTNISALENCGSPAMKRVDGDVSEVSESSVSNTEEVPGSLCLRKCAAGKNLMEVMPNISVLSDIEQYPPLPRQPEFGVE

SEQ ID NO: 71212 - protein, 345 aa, Homo sapiens; identical to SEQ ID NO: 71210
  Payload ID: 14103
  Gene Symbol: RAD9B
  Gene Name: RAD9 checkpoint clamp component B
  Uniprot ID: Q6WBX8
  ENSP ID: ENSP00000387329

SEQ ID NO: 71213 - protein, 238 aa, Homo sapiens
  Payload ID: 14104
  Gene Symbol: RHNO1
  Gene Name: RAD9-HUS1-RAD1 interacting nuclear orphan 1
  Uniprot ID: Q9BSD3
  ENSP ID: ENSP00000438590
MPPRKKRRQPSQKAPLLFHQQPLEGPKHSCASTQLPITHTRQVPSKPIDHSTITSWVSPDFDTAAGSLFPAYQKHQNRARHSSRKPTTSKFPHLTFESPQSSSSETLGIPLIRECPSESEKDVSRRPLVPVLSPQSCGNMSVQALQSLPYVFIPPDIQTPESSSVKEELIPQDQKENSLLSCTLHTGTPNSPEPGPVLVKDTPEDKYGIKVTWRRRQHLLAYLRERGKLSRSQFLVKS

SEQ ID NO: 71214 - protein, 224 aa, Homo sapiens
  Payload ID: 14104
  Gene Symbol: RHNO1
  Gene Name: RAD9-HUS1-RAD1 interacting nuclear orphan 1
  Uniprot ID: Q9BSD3
  ENSP ID: ENSP00000438828
MPPRKKRRQPSQKAPLLFHQQPLEGPKHSCASTQLPITHTRQVSPDFDTAAGSLFPAYQKHQNRARHSSRKPTTSKFPHLTFESPQSSSSETLGIPLIRECPSESEKDVSRRPLVPVLSPQSCGNMSVQALQSLPYVFIPPDIQTPESSSVKEELIPQDQKENSLLSCTLHTGTPNSPEPGPVLVKDTPEDKYGIKVTWRRRQHLLAYLRERGKLSRSQFLVKS

SEQ ID NO: 71215 - protein, 131 aa, Homo sapiens
  Payload ID: 14104
  Gene Symbol: RHNO1
  Gene Name: RAD9-HUS1-RAD1 interacting nuclear orphan 1
  ENSP ID: ENSP00000442319
MPPRKKRRQPSQKAPLLFHQQPLEGPKHSCASTQLPITHTRQVPSKPIDHSTITSWVSPDFDTAAGSLFPAYQKHQNRARHSSRKPTTSKFPHLTFESPQSSSSETLGIPLIRECPSESEKDVSRRPLVPV

SEQ ID NO: 71216 - protein, 59 aa, Homo sapiens
  Payload ID: 14104
  Gene Symbol: RHNO1
  Gene Name: RAD9-HUS1-RAD1 interacting nuclear orphan 1
  ENSP ID: ENSP00000442677
MPPRKKRRQPSQKAPLLFHQQPLEGPKHSCASTQLPITHTRQVPSKPIDHSTITSWAFC

SEQ ID NO: 71217 - protein, 64 aa, Homo sapiens
  Payload ID: 14104
  Gene Symbol: RHNO1
  Gene Name: RAD9-HUS1-RAD1 interacting nuclear orphan 1
  ENSP ID: ENSP00000444654
MPPRKKRRQPSQKAPLLFHQQPLEGPKHSCASTQLPITHTRQVPSKPIDHSTITSWVSPDFDTA

SEQ ID NO: 71218 - protein, 105 aa, Homo sapiens
  Payload ID: 14104
  Gene Symbol: RHNO1
  Gene Name: RAD9-HUS1-RAD1 interacting nuclear orphan 1
  ENSP ID: ENSP00000445936
MPPRKKRRQPSQKAPLLFHQQPLEGPKHSCASTQLPITHTRQVPSKPIDHSTITSWVSPDFDTAAGSLFPAYQKHQNRARHSSRKPTTSKFPHLTFESPQSSSSE

SEQ ID NO: 71219 - protein, 238 aa, Homo sapiens; identical to SEQ ID NO: 71213
  Payload ID: 14104
  Gene Symbol: RHNO1
  Gene Name: RAD9-HUS1-RAD1 interacting nuclear orphan 1
  Uniprot ID: Q9BSD3
  ENSP ID: ENSP00000479598

SEQ ID NO: 71220 - protein, 560 aa, Homo sapiens
  Payload ID: 14105
  Gene Symbol: RSPH3
  Gene Name: radial spoke 3 homolog (Chlamydomonas)
  Uniprot ID: Q86UC2
  ENSP ID: ENSP00000252655
MTVKPAKAASLARNLAKRRRTYLGGAAGRSQEPEVPCAAVLPGKPGDRNCPEFPPPDRTLGCWATDAAPAAGLCGAGSEPSIAPTSCAGNLPSRPPPLLSPLLASRNPCPWHYLHLSGSHNTLAPTCFKAKLHRKRGSQPPDMASALTDRTSRAPSTYTYTSRPRALPCQRSRYRDSLTQPDEEPMHYGNIMYDRRVIRGNTYALQTGPLLGRPDSLELQRQREARKRALARKQAQEQLRPQTPEPVEGRKHVDVQTELYLEEIADRIIEVDMECQTDAFLDRPPTPLFIPAKTGKDVATQILEGELFDFDLEVKPVLEVLVGKTIEQSLLEVMEEEELANLRASQREYEELRNSERAEVQRLEEQERRHREEKERRKKQQWEIMHKHNETSQKIAARAFAQRYLADLLPSVFGSLRDSGYFYDPIERDIEIGFLPWLMNEVEKTMEYSMVGRTVLDMLIREVVEKRLCMYEHGEDTHQSPEPEDEPGGPGAMTESLEASEFLEQSMSQTRELLLDGGYLQRTTYDRRSSQERKFMEERELLGQDEETAMRKSLGEEELS

SEQ ID NO: 71221 - protein, 418 aa, Homo sapiens
  Payload ID: 14105
  Gene Symbol: RSPH3
  Gene Name: radial spoke 3 homolog (Chlamydomonas)
  ENSP ID: ENSP00000356036
MASALTDRTSRAPSTYTYTSRPRALPCQRSRYRDSLTQPDEEPMHYGNIMYDRRVIRGNTYALQTGPLLGRPDSLELQRQREARKRALARKQAQEQLRPQTPEPVEGRKHVDVQTELYLEEIADRIIEVDMECQTDAFLDRPPTPLFIPAKTGKDVATQILEGELFDFDLEVKPVLEVLVGKTIEQSLLEVMEEEELANLRASQREYEELRNSERAEVQRLEEQERRHREEKERRKKQQWEIMHKHNETSQKIAARAFAQRYLADLLPSVFGSLRDSGYFYDPIERDIEIGFLPWLMNEVEKTMEYSMVGRTVLDMLIREVVEKRLCMYEHGEDTHQSPEPEDEPGGPGAMTESLEASEFLEQSMSQTRELLLDGGYLQRTTYDRRSSQERKFMEERELLGQDEETAMRKSLGEEELS

SEQ ID NO: 71222 - protein, 322 aa, Homo sapiens
  Payload ID: 14105
  Gene Symbol: RSPH3
  Gene Name: radial spoke 3 homolog (Chlamydomonas)
  ENSP ID: ENSP00000393195
MASALTDRTSRAPSTYTYTSRPRALPCQRSRYRDSLTQPDEEPMHYGNIMYDRRVIRGNTYALQTGPLLFDFDLEVKPVLEVLVGKTIEQSLLEVMEEEELANLRASQREYEELRNSERAEVQRLEEQERRHREEKERRKKQQWEIMHKHNETSQKIAARAFAQRYLADLLPSVFGSLRDSGYFYDPIERDIEIGFLPWLMNEVEKTMEYSMVGRTVLDMLIREVVEKRLCMYEHGEDTHQSPEPEDEPGGPGAMTESLEASEFLEQSMSQTRELLLDGGYLQRTTYDRRSSQERKFMEERELLGQDEETAMRKSLGEEELS

SEQ ID NO: 71223 - protein, 309 aa, Homo sapiens
  Payload ID: 14106
  Gene Symbol: RSPH1
  Gene Name: radial spoke head 1 homolog (Chlamydomonas)
  Uniprot ID: Q8WYR4
  ENSP ID: ENSP00000291536
MSDLGSEELEEEGENDIGEYEGGRNEAGERHGRGRARLPNGDTYEGSYEFGKRHGQGIYKFKNGARYIGEYVRNKKHGQGTFIYPDGSRYEGEWANDLRHGHGVYYYINNDTYTGEWFAHQRHGQGTYLYAETGSKYVGTWVNGQQEGTAELIHLNHRYQGKFLNKNPVGPGKYVFDVGCEQHGEYRLTDMERGEEEEEEELVTVVPKWKATQITELALWTPTLPKKPTSTDGPGQDAPGAESAGEPGEEAQALLEGFEGEMDMRPGDEDADVLREESREYDQEEFRYDMDEGNINSEEEETRQSDLQD

SEQ ID NO: 71224 - protein, 271 aa, Homo sapiens
  Payload ID: 14106
  Gene Symbol: RSPH1
  Gene Name: radial spoke head 1 homolog (Chlamydomonas)
  Uniprot ID: Q8WYR4
  ENSP ID: ENSP00000381395
MSDLGSEELEEEGENDIGGIYKFKNGARYIGEYVRNKKHGQGTFIYPDGSRYEGEWANDLRHGHGVYYYINNDTYTGEWFAHQRHGQGTYLYAETGSKYVGTWVNGQQEGTAELIHLNHRYQGKFLNKNPVGPGKYVFDVGCEQHGEYRLTDMERGEEEEEEELVTVVPKWKATQITELALWTPTLPKKPTSTDGPGQDAPGAESAGEPGEEAQALLEGFEGEMDMRPGDEDADVLREESREYDQEEFRYDMDEGNINSEEEETRQSDLQD

SEQ ID NO: 71225 - protein, 870 aa, Homo sapiens
  Payload ID: 14107
  Gene Symbol: RSPH10B
  Gene Name: radial spoke head 10 homolog B (Chlamydomonas)
  Uniprot ID: P0C881
  ENSP ID: ENSP00000338556
MVKEKKKADKKGEKSARSPSSLSDNLDFSKQDGNTTRQEMSPAGVPLLGMQLNEVKPKKDRQNVQQNEDATQYEESILTKLIVESYEGEKVRGLYEGEGFAAFQGGCTYRGMFSEGLMHGQGTYIWADGLKYEGDFVKNVPMNHGVYTWPDGSMYEGEVVNGMRNGFGMFKCSTQPVSYIGHWCNGKRHGKGSIYYNQEGTCWYEGDWVQNIKKGWGIRCYKSGNIYEGQWEDNMRHGEGRMRWLTTNEEYTGRWERGIQNGFGTHTWFLKRIRSSQYPLRNEYIGEFVNGYRHGRGKFYYASGAMYDGEWVSNKKHGMGRLTFKNGRVYEGAFSNDHIAGFPDLEVEFISCLDLSSGVAPRLSRSAELIRKLDGSESHSVLGSSIELDLNLLLDMYPETVQPEEKKQVEYAVLRNITELRRIYSFYSSLGCGHSLDNTFLMTKLHFWRFLKDCKFHHHKLTLADMDRILSANNDIPVEEIHSPFTTILLRTFLNYLLHLAYHIYHEEFQKRSPSLFLCFTKLMTENIRPNAFQIKGNLFREQQRTLYSMSYMNKCWEIYLAYCRPSAAPPHEPTMKMRHFLWMLKDFKMINKELTAATFMEVIAEDNRFIYDGIDSNFEPELVFLEFFEALLSFAFICVTDQMTKSYTNVPADDVSGNKHETIYTILNQDAQNKSPSAVMSHESDAAHSDSARSSSSKLELSPDVNKIRKSEPKIKKSVSHERVSKMNFKLTGKGITFFSSESKKYERPKDDREEEFNTWVNNMYVFFVNTLFHAYKREEAIKEKIRADRLRSTAQAQQRKMEDDELEARLNIFILREEEAKRHDYEVDITVLKEPADVSSSHLILDPPKEDVTVSPSSKTITSKKKKK

SEQ ID NO: 71226 - protein, 870 aa, Homo sapiens; identical to SEQ ID NO: 71225
  Payload ID: 14107
  Gene Symbol: RSPH10B
  Gene Name: radial spoke head 10 homolog B (Chlamydomonas)
  Uniprot ID: P0C881
  ENSP ID: ENSP00000384097

SEQ ID NO: 71227 - protein, 870 aa, Homo sapiens; identical to SEQ ID NO: 71225
  Payload ID: 14107
  Gene Symbol: RSPH10B
  Gene Name: radial spoke head 10 homolog B (Chlamydomonas)
  Uniprot ID: P0C881
  ENSP ID: ENSP00000385443

SEQ ID NO: 71228 - protein, 4 aa, Homo sapiens
  Payload ID: 14107
  Gene Symbol: RSPH10B
  Gene Name: radial spoke head 10 homolog B (Chlamydomonas)
  ENSP ID: ENSP00000390326
MVKE

SEQ ID NO: 71229 - protein, 13 aa, Homo sapiens
  Payload ID: 14107
  Gene Symbol: RSPH10B
  Gene Name: radial spoke head 10 homolog B (Chlamydomonas)
  ENSP ID: ENSP00000444512
MVKEKKKADKKGE

SEQ ID NO: 71230 - protein, 280 aa, Homo sapiens
  Payload ID: 14107
  Gene Symbol: RSPH10B
  Gene Name: radial spoke head 10 homolog B (Chlamydomonas)
  ENSP ID: ENSP00000445203
MRHGEGRMRWLTTNEEYTGRWERGIQNGFGTHTWFLKRIRSSQYPLRNEYIGEFVNGYRHGRGKFYYASGAMYDGEWVSNKKHGMGRLTFKNGRVYEGAFSNDHIAGFPDLEVEFISCLDLSSGVAPRLSRSAELIRKLDGSESHSVLGSSIELDLNLLLDMYPETVQPEEKKQVEYAVLRNITELRRIYSFYSSLGCGHSLDNTFLMTKLHFWRFLKDCKFHHHKLTLADMDRILSANNDIPVEEIHSPFTTILLRTFLNYLLHLAYHIYHEEFQQFIP

SEQ ID NO: 71231 - protein, 870 aa, Homo sapiens
  Payload ID: 14108
  Gene Symbol: RSPH10B2
  Gene Name: radial spoke head 10 homolog B2 (Chlamydomonas)
  Uniprot ID: B2RC85
  ENSP ID: ENSP00000297186
MVKEKKKADKKGEKSARSPSSLSDNLDFSKQDGNTTRQEMSPAGVPLLGMQLNEVKPKKDRQNVQQNEDASQYEESILTKLIVESYEGEKVRGLYEGEGFAAFQGGCTYRGMFSEGLMHGQGTYIWADGLKYEGDFVKNVPMNHGVYTWPDGSMYEGEVVNGMRNGFGMFKCSTQPVSYIGHWCNGKRHGKGSIYYNQEGTCWYEGDWVQNIKKGWGIRCYKSGNIYEGQWEDNMRHGEGRMRWLTTNEEYTGRWERGIQNGFGTHTWFLKRIRSSQYPLRNEYIGEFVNGYRHGRGKFYYASGAMYDGEWVSNKKHGMGRLTFKNGRVYEGAFSNDHIAGFPDLEVEFISCLDLSSGVAPRLSRSAELIRKLDGSESHSVLGSSIELDLNLLLDMYPETVQPEEKKQVEYAVLRNITELRRIYSFYSSLGCGHSLDNTFLMTKLHFWRFLKDCKFHHHKLTLADMDRILSANNDIPVEEIHSPFTTILLRTFLNYLLHLAYHIYHEEFQKRSPSLFLCFTKLMTENIRPNACQIKGNLFREQQRTLYSMSYMNKCWEIYLAYCRPSAAPPHEPTMKMRHFLWMLKDFKMINKELTAATFMEVIAEDNRFIYDGIDSNFEPELVFLEFFEALLSFAFICVTDQMTKSYTNVPADDVSGNKHETIYTILNQDAQNKSPSAVMSHESDAAHSDSARSSSSKLELSPDVNKIRKSEPKIKKSVSHERVSKMNFKLTGKGITFFSSESKKYERPKDDREEEFNTWVNNTYVFFVNTLFHAYKREEAIKEKIRADRLRSTAQAQQRKMEDDELEARLNIFILREEEAKRHDYEVDITVLKEPADVSSSHLILDPPKEDVTVSPSSKTITSKKKKK

SEQ ID NO: 71232 - protein, 870 aa, Homo sapiens; identical to SEQ ID NO: 71231
  Payload ID: 14108
  Gene Symbol: RSPH10B2
  Gene Name: radial spoke head 10 homolog B2 (Chlamydomonas)
  Uniprot ID: B2RC85
  ENSP ID: ENSP00000384766

SEQ ID NO: 71233 - protein, 870 aa, Homo sapiens; identical to SEQ ID NO: 71231
  Payload ID: 14108
  Gene Symbol: RSPH10B2
  Gene Name: radial spoke head 10 homolog B2 (Chlamydomonas)
  Uniprot ID: B2RC85
  ENSP ID: ENSP00000386102

SEQ ID NO: 71234 - protein, 59 aa, Homo sapiens
  Payload ID: 14108
  Gene Symbol: RSPH10B2
  Gene Name: radial spoke head 10 homolog B2 (Chlamydomonas)
  ENSP ID: ENSP00000395335
MVKEKKKADKKGEKSARSPSSLSDNLDFSKQDGNTTRQEMSPAGVPLLGMQLNEVKPKK

SEQ ID NO: 71235 - protein, 9 aa, Homo sapiens
  Payload ID: 14108
  Gene Symbol: RSPH10B2
  Gene Name: radial spoke head 10 homolog B2 (Chlamydomonas)
  ENSP ID: ENSP00000396498
MVKEKKKAD

SEQ ID NO: 71236 - protein, 323 aa, Homo sapiens
  Payload ID: 14108
  Gene Symbol: RSPH10B2
  Gene Name: radial spoke head 10 homolog B2 (Chlamydomonas)
  ENSP ID: ENSP00000445255
GSIYYNQEGTCWYEGDWVQNIKKGWGIRCYKSGNIYEGQWEDNMRHGEGRMRWLTTNEEYTGRWERGIQNGFGTHTWFLKRIRSSQYPLRNEYIGEFVNGYRHGRGKFYYASGAMYDGEWVSNKKHGMGRLTFKNGRVYEGAFSNDHIAGFPDLEVEFISCLDLSSGVAPRLSRSAELIRKLDGSESHSVLGSSIELDLNLLLDMYPETVQPEEKKQVEYAVLRNITELRRIYSFYSSLGCGHSLDNTFLMTKLHFWRFLKDCKFHHHKLTLADMDRILSANNDIPVEEIHSPFTTILLRTFLNYLLHLAYHIYHEEFQQFIP

SEQ ID NO: 71237 - protein, 348 aa, Homo sapiens
  Payload ID: 14109
  Gene Symbol: RSPH14
  Gene Name: radial spoke head 14 homolog (Chlamydomonas)
  Uniprot ID: Q9UHP6
  ENSP ID: ENSP00000216036
MAHSQNSLELPININATQITTAYGHRALPKLKEELQSEDLQTRQKALMALCDLMHDPECIYKAMNIGCMENLKALLKDSNSMVRIKTTEVLHITASHSVGRYAFLEHDIVLALSFLLNDPSPVCRGNLYKAYMQLVQVPRGAQEIISKGLISSLVWKLQVEVEEEEFQEFILDTLVLCLQEDATEALGSNVVLVLKQKLLSANQNIRSKAARALLNVSISREGKKQVCHFDVIPILVHLLKDPVEHVKSNAAGALMFATVITEGKYAALEAQAIGLLLELLHSPMTIARLNATKALTMLAEAPEGRKALQTHVPTFRAMEVETYEKPQVAEALQRAARIAISVIEFKP

SEQ ID NO: 71238 - protein, 108 aa, Homo sapiens
  Payload ID: 14109
  Gene Symbol: RSPH14
  Gene Name: radial spoke head 14 homolog (Chlamydomonas)
  ENSP ID: ENSP00000385567
MAHSQNSLELPININATQITTAYGHRALPKLKEELQSEDLQTRQKALMALCDLMHDPECIYKAMNIGCMENLKALLKDSNSMVRIKTTEVLHITASHSVGRSSDRKGE

SEQ ID NO: 71239 - protein, 67 aa, Homo sapiens
  Payload ID: 14109
  Gene Symbol: RSPH14
  Gene Name: radial spoke head 14 homolog (Chlamydomonas)
  ENSP ID: ENSP00000391552
QTRQKALMALCDLMHDPECIYKAMNIGCMENLKALLKDSNSMVRIKTTEVLHITASHSVGSSDRKGE

SEQ ID NO: 71240 - protein, 67 aa, Homo sapiens
  Payload ID: 14109
  Gene Symbol: RSPH14
  Gene Name: radial spoke head 14 homolog (Chlamydomonas)
  ENSP ID: ENSP00000406822
  MOD_RES (1)..(1): Any amino acid
XKDSNSMVRIKTTEVLHITASHSVGRYAFLEHDIVLALSFLLNDPSPVCRGNLYKAYMQLVQVPRGT

SEQ ID NO: 71241 - protein, 73 aa, Homo sapiens
  Payload ID: 14109
  Gene Symbol: RSPH14
  Gene Name: radial spoke head 14 homolog (Chlamydomonas)
  ENSP ID: ENSP00000414155
RGNLYKAYMQLVQVPRAENPTINKRTLQRLMYNTCPARLAQDCHSLQNFFGAERQIVQITTFTLSKPDTKKTT

SEQ ID NO: 71242 - protein, 716 aa, Homo sapiens
  Payload ID: 14110
  Gene Symbol: RSPH4A
  Gene Name: radial spoke head 4 homolog A (Chlamydomonas)
  Uniprot ID: Q5TD94
  ENSP ID: ENSP00000229554
MEDSTSPKQEKENQEELGETRRPWEGKTAASPQYSEPESSEPLEAKQGPETGRQSRSSRPWSPQSRAKTPLGGPAGPETSSPAPVSPREPSSSPSPLAPARQDLAAPPQSDRTTSVIPEAGTPYPDPLEQSSDKRESTPHHTSQSEGNTFQQSQQPKPHLCGRRDVSYNNAKQKELRFDVFQEEDSNSDYDLQQPAPGGSEVAPSMLEITIQNAKAYLLKTSSNSGFNLYDHLSNMLTKILNERPENAVDIFENISQDVKMAHFSKKFDALQNENELLPTYEIAEKQKALFLQGHLEGVDQELEDEIAENALPNVMESAFYFEQAGVGLGTDETYRIFLALKQLTDTHPIQRCRFWGKILGLEMNYIVAEVEFREGEDEEEVEEEDVAEERDNGESEAHEDEEDELPKSFYKAPQAIPKEESRTGANKYVYFVCNEPGRPWVKLPPVIPAQIVIARKIKKFFTGRLDAPIISYPPFPGNESNYLRAQIARISAGTHVSPLGFYQFGEEEGEEEEEAEGGRNSFEENPDFEGIQVIDLVESLSNWVHHVQHILSQGRCNWFNSIQKNEEEEEEEDEEKDDSDYIEQEVGLPLLTPISEDLEIQNIPPWTTRLSSNLIPQYAIAVLQSNLWPGAYAFSNGKKFENFYIGWGHKYSPDNYTPPVPPPVYQEYPSGPEITEMDDPSVEEEQAFRAAQEAVLLAAENEESEEDEDEEDDYD

SEQ ID NO: 71243 - protein, 469 aa, Homo sapiens
  Payload ID: 14110
  Gene Symbol: RSPH4A
  Gene Name: radial spoke head 4 homolog A (Chlamydomonas)
  Uniprot ID: Q5TD94
  ENSP ID: ENSP00000357569
MEDSTSPKQEKENQEELGETRRPWEGKTAASPQYSEPESSEPLEAKQGPETGRQSRSSRPWSPQSRAKTPLGGPAGPETSSPAPVSPREPSSSPSPLAPARQDLAAPPQSDRTTSVIPEAGTPYPDPLEQSSDKRESTPHHTSQSEGNTFQQSQQPKPHLCGRRDVSYNNAKQKELRFDVFQEEDSNSDYDLQQPAPGGSEVAPSMLEITIQNAKAYLLKTSSNSGFNLYDHLSNMLTKILNERPENAVDIFENISQDVKMAHFSKKFDALQNENELLPTYEIAEKQKALFLQGHLEGVDQELEDEIGRCNWFNSIQKNEEEEEEEDEEKDDSDYIEQEVGLPLLTPISEDLEIQNIPPWTTRLSSNLIPQYAIAVLQSNLWPGAYAFSNGKKFENFYIGWGHKYSPDNYTPPVPPPVYQEYPSGPEITEMDDPSVEEEQAFRAAQEAVLLAAENEESEEDEDEEDDYD

SEQ ID NO: 71244 - protein, 600 aa, Homo sapiens
  Payload ID: 14110
  Gene Symbol: RSPH4A
  Gene Name: radial spoke head 4 homolog A (Chlamydomonas)
  Uniprot ID: Q5TD94
  ENSP ID: ENSP00000357570
MEDSTSPKQEKENQEELGETRRPWEGKTAASPQYSEPESSEPLEAKQGPETGRQSRSSRPWSPQSRAKTPLGGPAGPETSSPAPVSPREPSSSPSPLAPARQDLAAPPQSDRTTSVIPEAGTPYPDPLEQSSDKRESTPHHTSQSEGNTFQQSQQPKPHLCGRRDVSYNNAKQKELRFDVFQEEDSNSDYDLQQPAPGGSEVAPSMLEITIQNAKAYLLKTSSNSGFNLYDHLSNMLTKILNERPENAVDIFENISQDVKMAHFSKKFDALQNENELLPTYEIAEKQKALFLQGHLEGVDQELEDEIAENALPNVMESAFYFEQAGVGLGTDETYRIFLALKQLTDTHPIQRCRFWGKILGLEMNYIVAEVEFREGEDEEEVEEEDVAEERDNGESEAHEDEEDELPKSFYKAPQAIPKEESRTGANKYVYFVCNEPGRPWVKLPPVIPAQIVIARKIKKFFTGRLDAPIISYPPFPGNESNYLRAQIARISAGTHVSPLGFYQFGEEEGEEEEEAEGGRNSFEENPDFEGIQVIDLVESLSNWVHHVQHILSQRFRIYPPGQHGYPQISFHNMLLQSFNPTFGLEHMPSPMAKSLKIST

SEQ ID NO: 71245 - protein, 717 aa, Homo sapiens
  Payload ID: 14111
  Gene Symbol: RSPH6A
  Gene Name: radial spoke head 6 homolog A (Chlamydomonas)
  Uniprot ID: Q9H0K4
  ENSP ID: ENSP00000221538
MGDLPPYPERPAQQPPGRRTSQASQRRHSRDQAQALAADPEERQQIPPDAQRNAPGWSQRGSLSQQENLLMPQVFQAEEARLGGMEYPSVNTGFPSEFQPQPYSDESRMQVAELTTSLMLQRLQQGQSSLFQQLDPTFQEPPVNPLGQFNLYQTDQFSEGAQHGPYIRDDPALQFLPSELGFPHYSAQVPEPEPLELAVQNAKAYLLQTSINCDLSLYEHLVNLLTKILNQRPEDPLSVLESLNRTTQWEWFHPKLDTLRDDPEMQPTYKMAEKQKALFTRSGGGTEGEQEMEEEVGETPVPNIMETAFYFEQAGVGLSSDESFRIFLAMKQLVEQQPIHTCRFWGKILGIKRSYLVAEVEFREGEEEAEEEEVEEMTEGGEVMEAHGEEEGEEDEEKAVDIVPKSVWKPPPVIPKEESRSGANKYLYFVCNEPGLPWTRLPHVTPAQIVNARKIKKFFTGYLDTPVVSYPPFPGNEANYLRAQIARISAATQVSPLGFYQFSEEEGDEEEEGGAGRDSYEENPDFEGIPVLELVDSMANWVHHTQHILPQGRCTWVNPLQKTEEEEDLGEEEEKADEGPEEVEQEVGPPLLTPLSEDAEIMHLAPWTTRLSCSLCPQYSVAVVRSNLWPGAYAYASGKKFENIYIGWGHKYSPESFNPALPAPIQQEYPSGPEIMEMSDPTVEEEQALKAAQEQALGATEEEEEGEEEEEGEETDD

SEQ ID NO: 71246 - protein, 453 aa, Homo sapiens
  Payload ID: 14111
  Gene Symbol: RSPH6A
  Gene Name: radial spoke head 6 homolog A (Chlamydomonas)
  ENSP ID: ENSP00000471559
MQPTYKMAEKQKALFTRSGGGTEGEQEMEEEVGETPVPNIMETAFYFEQAGVGLSSDESFRIFLAMKQLVEQQPIHTCRFWGKILGIKRSYLVAEVEFREGEEEAEEEEVEEMTEGGEVMEAHGEEEGEEDEEKAVDIVPKSVWKPPPVIPKEESRSGANKYLYFVCNEPGLPWTRLPHVTPAQIVNARKIKKFFTGYLDTPVVSYPPFPGNEANYLRAQIARISAATQVSPLGFYQFSEEEGDEEEEGGAGRDSYEENPDFEGIPVLELVDSMANWVHHTQHILPQGRCTWVNPLQKTEEEEDLGEEEEKADEGPEEVEQEVGPPLLTPLSEDAEIMHLAPWTTRLSCSLCPQYSVAVVRSNLWPGAYAYASGKKFENIYIGWGHKYSPESFNPALPAPIQQEYPSGPEIMEMSDPTVEEEQALKAAQEQALGATEEEEEGEEEEEGEETDD

SEQ ID NO: 71247 - protein, 676 aa, Homo sapiens
  Payload ID: 14111
  Gene Symbol: RSPH6A
  Gene Name: radial spoke head 6 homolog A (Chlamydomonas)
  ENSP ID: ENSP00000472630
MGDLPPYPERPAQQPPGRRTSQASQRRHSRDQAQALAADPEERQQIPPDAQRNAPGWSQRGSLSQQENLLMPQVFQAEEARLGGMEYPSVNTGFPSEFQPQPYSDESRMQVAELTTSLMLQRLQQGQSSLFQQLDPTFQEPPVNPLGQFNLYQTDQFSEGAQHGPYIRDDPALQFLPSELGFPHYSAQVPEPEPLELAVQNAKAYLLQTSINCDLSLYEHLVNLLTKILNQRPEDPLSVLESLNRTTQWEWFHPKLDTLRDDPEMQPTYKMAEKQKALFTRSGGGTEGEQEMEEEVGETPVPNIMETAFYFEQAGVGLSSDESFRIFLAMKQLVEQQPIHTCRFWGKILGIKRSYLVAEVEFREGEEEAEEEEVEEMTEGGEVMEAHGEEEGEEDEEKAVDIVPKSVWKPPPVIPKEESRSGANKYLYFVCNEPGLPWTRLPHVTPAQIVNARKIKKFFTGYLDTPVVSYPPFPGNEANYLRAQIARISAATQVSPLGFYQFSEEEGDEEEEGGAGRDSYEENPDFEGIPVLELVDSMANWVHHTQHILPQGRCTWVNPLQKTEEEEDLGEEEEKADEGPEEVEQEVGPPLLTPLSEDAEIMHLAPWTTRLSCSLCPQYSVAVVRSNLWPGAYAYASGNLRTSTSAGVTSTAPRASTRPCQPPFNKSTPVAQRSWR

SEQ ID NO: 71248 - protein, 276 aa, Homo sapiens
  Payload ID: 14112
  Gene Symbol: RSPH9
  Gene Name: radial spoke head 9 homolog (Chlamydomonas)
  Uniprot ID: Q9H1X1
  ENSP ID: ENSP00000361236
MDADSLLLSLELASGSGQGLSPDRRASLLTSLMLVKRDYRYDRVLFWGRILGLVADYYIAQGLSEDQLAPRKTLYSLNCTEWSLLPPATEEMVAQSSVVKGRFMGDPSYEYEHTELQKVNEGEKVFEEEIVVQIKEETRLVSVIDQIDKAVAIIPRGALFKTPFGPTHVNRTFEGLSLSEAKKLSSYFHFREPVELKNKTLLEKADLDPSLDFMDSLEHDIPKGSWSIQMERGNALVVLRSLLWPGLTFYHAPRTKNYGYVYVGTGEKNMDLPFML

SEQ ID NO: 71249 - protein, 306 aa, Homo sapiens
  Payload ID: 14112
  Gene Symbol: RSPH9
  Gene Name: radial spoke head 9 homolog (Chlamydomonas)
  Uniprot ID: Q9H1X1
  ENSP ID: ENSP00000361238
MDADSLLLSLELASGSGQGLSPDRRASLLTSLMLVKRDYRYDRVLFWGRILGLVADYYIAQGLSEDQLAPRKTLYSLNCTEWSLLPPATEEMVAQSSVVKGRFMGDPSYEYEHTELQKVNEGEKVFEEEIVIDKAVAIIPRGALFKTPFGPTHVNRTFEGLSLSEAKKLSSYFHFREPVELKNKTLLEKADLDPSLDFMDSLEHDIPKGSEAVVQGDFTWLLSRCGFGWPCSWDSCSVSMRVLEHPDGEGQCPGGAAQPALAGPHLLPCSPHQELWLRLRGHWREEHGLALHAIEWEPAWMFLNRV

SEQ ID NO: 71250 - protein, 442 aa, Homo sapiens
  Payload ID: 14113
  Gene Symbol: RSAD1
  Gene Name: radical S-adenosyl methionine domain containing 1
  Uniprot ID: Q9HA92
  ENSP ID: ENSP00000258955
MALPGARARGWAAAARAAQRRRRVENAGGSPSPEPAGRRAALYVHWPYCEKRCSYCNFNKYIPRRLEEAAMQKCLVTEAQTLLRLSGVQRVESVFFGGGTPSLASPHTVAAVLEAVAQAAHLPADLEVTLEANPTSAPGSRLAEFGAAGVNRLSIGLQSLDDTELRLLGRTHSACDALRTLAEARRLFPGRVSVDLMLGLPAQQVGPWLGQLQELLHHCDDHLSLYQLSLERGTALFAQVQRGALPAPDPELAAEMYQRGRAVLREAGFHQYEVSNFARNGALSTHNWTYWQCGQYLGVGPGAHGRFMPQGAGGHTREARIQTLEPDNWMKEVMLFGHGTRKRVPLGRLELLEEVLALGLRTDVGITHQHWQQFEPQLTLWDVFGANKEVQELLERGLLQLDHRGLRCSWEGLAVLDSLLLTLLPQLQEAWQQRTPSPVPGG

SEQ ID NO: 71251 - protein, 195 aa, Homo sapiens
  Payload ID: 14113
  Gene Symbol: RSAD1
  Gene Name: radical S-adenosyl methionine domain containing 1
  ENSP ID: ENSP00000422893
DDTELRLLGRTHSACDALRTLAEARRLFPGRVSVDLMLGLPAQQVGPWLGQLQELLHHCDDHLSLYQLSLERGTALFAQVQRGALPAPDPELAAEMYQRGRAVLREAGFHQYEVSNFARNGALSTHNWTYWQCGQYLGVGPGAHGRFMPQGAGGHTREARIQTLEPDNWMKEAGGSFGPGATHRCGDHSPALAAV

SEQ ID NO: 71252 - protein, 195 aa, Homo sapiens
  Payload ID: 14113
  Gene Symbol: RSAD1
  Gene Name: radical S-adenosyl methionine domain containing 1
  Uniprot ID: Q9HA92
  ENSP ID: ENSP00000424558
MALPGARARGWAAAARAAQRRRRVENAGGSPSPEPAGRRAALYVHSLDDTELRLLGRTHSACDALRTLAEARRLFPGRVSVDLMLGLPAQQVGPWLGQLQELLHHCDDHLSLYQLSLERGTALFAQVQRGALPAPDPELAAEMYQRGRAVLREAGFHQYEVSNFARNGPMDDLCPRGLEATPGRLGSRHWSLTTG

SEQ ID NO: 71253 - protein, 85 aa, Homo sapiens
  Payload ID: 14113
  Gene Symbol: RSAD1
  Gene Name: radical S-adenosyl methionine domain containing 1
  ENSP ID: ENSP00000425372
RARGWAAAARAAQRRRRVENAGGSPSPEPAGRRAALYVHWPYCEKRCSYCNFNKYIPRRLEEAAMQKCLVTEAQTLLRLSGVQRP

SEQ ID NO: 71254 - protein, 32 aa, Homo sapiens
  Payload ID: 14113
  Gene Symbol: RSAD1
  Gene Name: radical S-adenosyl methionine domain containing 1
  ENSP ID: ENSP00000465567
MQKCLVTEAQTLLRLSGVQRVESVFFGGGTPS

SEQ ID NO: 71255 - protein, 361 aa, Homo sapiens
  Payload ID: 14114
  Gene Symbol: RSAD2
  Gene Name: radical S-adenosyl methionine domain containing 2
  Uniprot ID: Q8WXG1
  ENSP ID: ENSP00000371471
MWVLTPAAFAGKLLSVFRQPLSSLWRSLVPLFCWLRATFWLLATKRRKQQLVLRGPDETKEEEEDPPLPTTPTSVNYHFTRQCNYKCGFCFHTAKTSFVLPLEEAKRGLLLLKEAGMEKINFSGGEPFLQDRGEYLGKLVRFCKVELRLPSVSIVSNGSLIRERWFQNYGEYLDILAISCDSFDEEVNVLIGRGQGKKNHVENLQKLRRWCRDYRVAFKINSVINRFNVEEDMTEQIKALNPVRWKVFQCLLIEGENCGEDALREAERFVIGDEEFERFLERHKEVSCLVPESNQKMKDSYLILDEYMRFLNCRKGRKDPSKSILDVGVEEAIKFSGFDEKMFLKRGGKYIWSKADLKLDW

SEQ ID NO: 71256 - protein, 141 aa, Homo sapiens
  Payload ID: 14114
  Gene Symbol: RSAD2
  Gene Name: radical S-adenosyl methionine domain containing 2
  ENSP ID: ENSP00000406427
MCAINGRRSGADAWPRGPRCAAPRACAVPRRRLPGLTPNEAPRRRPQGMEKINFSGGEPFLQDRGEYLGKLVRFCKVELRLPSVSIVSNGSLIRERWFQNYGEYLDILAISCDSFDEEVNVLIGRGQGKKNHVENLQKLRR

SEQ ID NO: 71257 - protein, 583 aa, Homo sapiens
  Payload ID: 14115
  Gene Symbol: RDX
  Gene Name: radixin
  Uniprot ID: P35241
  ENSP ID: ENSP00000342830
MPKPINVRVTTMDAELEFAIQPNTTGKQLFDQVVKTVGLREVWFFGLQYVDSKGYSTWLKLNKKVTQQDVKKENPLQFKFRAKFFPEDVSEELIQEITQRLFFLQVKEAILNDEIYCPPETAVLLASYAVQAKYGDYNKEIHKPGYLANDRLLPQRVLEQHKLTKEQWEERIQNWHEEHRGMLREDSMMEYLKIAQDLEMYGVNYFEIKNKKGTELWLGVDALGLNIYEHDDKLTPKIGFPWSEIRNISFNDKKFVIKPIDKKAPDFVFYAPRLRINKRILALCMGNHELYMRRRKPDTIEVQQMKAQAREEKHQKQLERAQLENEKKKREIAEKEKERIEREKEELMERLKQIEEQTIKAQKELEEQTRKALELDQERKRAKEEAERLEKERRAAEEAKSAIAKQAADQMKNQEQLAAELAEFTAKIALLEEAKKKKEEEATEWQHKAFAAQEDLEKTKEELKTVMSAPPPPPPPPVIPPTENEHDEHDENNAEASAELSNEGVMNHRSEEERVTETQKNERVKKQLQALSSELAQARDETKKTQNDVLHAENVKAGRDKYKTLRQIRQGNTKQRIDEFEAM

SEQ ID NO: 71258 - protein, 604 aa, Homo sapiens
  Payload ID: 14115
  Gene Symbol: RDX
  Gene Name: radixin
  Uniprot ID: P35241
  ENSP ID: ENSP00000384136
MPKPINVRVTTMDAELEFAIQPNTTGKQLFDQVVKTVGLREVWFFGLQYVDSKGYSTWLKLNKKVTQQDVKKENPLQFKFRAKFFPEDVSEELIQEITQRLFFLQVKEAILNDEIYCPPETAVLLASYAVQAKYGDYNKEIHKPGYLANDRLLPQRVLEQHKLTKEQWEERIQNWHEEHRGMLREDSMMEYLKIAQDLEMYGVNYFEIKNKKGTELWLGVDALGLNIYEHDDKLTPKIGFPWSEIRNISFNDKKFVIKPIDKKAPDFVFYAPRLRINKRILALCMGNHELYMRRRKPDTIEVQQMKAQAREEKHQKQLERAQLENEKKKREIAEKEKERIEREKEELMERLKQIEEQTIKAQKELEEQTRKALELDQERKRAKEEAERLEKERRAAEEAKSAIAKQAADQMKNQEQLAAELAEFTAKIALLEEAKKKKEEEATEWQHKAFAAQEDLEKTKEELKTVMSAPPPPPPPPVIPPTENEHDEHDENNAEASAELSNEGVMNHRSEEERVTETQKNERVKKQLQALSSELAQARDETKKTQNDVLHAENVKAGRDKYKTLRQIRQGNTKQRIDEFEAMWGPKLYALFQMRSCQSSIKQM

SEQ ID NO: 71259 - protein, 51 aa, Homo sapiens
  Payload ID: 14115
  Gene Symbol: RDX
  Gene Name: radixin
  ENSP ID: ENSP00000431560
MLREDSMMEYLKIAQDLEMYGVNYFEIKNKKGTELWLGVDALGLNIYEHDD

SEQ ID NO: 71260 - protein, 604 aa, Homo sapiens; identical to SEQ ID NO: 71258
  Payload ID: 14115
  Gene Symbol: RDX
  Gene Name: radixin
  Uniprot ID: P35241
  ENSP ID: ENSP00000432112

SEQ ID NO: 71261 - protein, 116 aa, Homo sapiens
  Payload ID: 14115
  Gene Symbol: RDX
  Gene Name: radixin
  ENSP ID: ENSP00000432572
MDAELEFAIQPNTTGKQLFDQVVKTVGLREVWFFGLQYVDSKGYSTWLKLNKKVTQQDVKKENPLQFKFRAKFFPEDVSEELIQEITQRLFFLQVKEAILNDEIYCPPETAVLLAS

SEQ ID NO: 71262 - protein, 52 aa, Homo sapiens
  Payload ID: 14115
  Gene Symbol: RDX
  Gene Name: radixin
  ENSP ID: ENSP00000432829
MPKPINVRVTTMDAELEFAIQPNTTGKQLFDQCIGTTQTNKRTVGRKNTELA

SEQ ID NO: 71263 - protein, 257 aa, Homo sapiens
  Payload ID: 14115
  Gene Symbol: RDX
  Gene Name: radixin
  Uniprot ID: P35241
  ENSP ID: ENSP00000433580
MERLKQIEEQTIKAQKELEEQTRKALELDQERKRAKEEAERLEKERRAAEEAKSAIAKQAADQMKNQEQLAAELAEFTAKIALLEEAKKKKEEEATEWQHKAFAAQEDLEKTKEELKTVMSAPPPPPPPPVIPPTENEHDEHDENNAEASAELSNEGVMNHRSEEERVTETQKNERVKKQLQALSSELAQARDETKKTQNDVLHAENVKAGRDKYKTLRQIRQGNTKQRIDEFEAMWGPKLYALFQMRSCQSSIKQM

SEQ ID NO: 71264 - protein, 50 aa, Homo sapiens
  Payload ID: 14115
  Gene Symbol: RDX
  Gene Name: radixin
  ENSP ID: ENSP00000434881
MPKPSCCVPQAGLKLLTSRDPPTLAFQSAGTKDVRHHVQLLLCLLISTCP

SEQ ID NO: 71265 - protein, 44 aa, Homo sapiens
  Payload ID: 14115
  Gene Symbol: RDX
  Gene Name: radixin
  ENSP ID: ENSP00000435930
MPKPAGLKLLTSRDPPTLAFQSAGTKDVRHHVQLLLCLLISTCP

SEQ ID NO: 71266 - protein, 200 aa, Homo sapiens
  Payload ID: 14115
  Gene Symbol: RDX
  Gene Name: radixin
  Uniprot ID: P35241
  ENSP ID: ENSP00000436277
MPKPINVRVTTMDAELEFAIQPNTTGKQLFDQVTQQDVKKENPLQFKFRAKFFPEDVSEELIQEITQRLFFLQVKEAILNDEIYCPPETAVLLASYAVQAKYGDYNKEIHKPGYLANDRLLPQRVLEQHKLTKEQDETKKTQNDVLHAENVKAGRDKYKTLRQIRQGNTKQRIDEFEAMWGPKLYALFQMRSCQSSIKQM

SEQ ID NO: 71267 - protein, 148 aa, Homo sapiens
  Payload ID: 14115
  Gene Symbol: RDX
  Gene Name: radixin
  ENSP ID: ENSP00000437140
MDAELEFAIQPNTTGKQLFDQVVKTVGLREVWFFGLQYVDSKGYSTWLKLNKKVTQQDVKKENPLQFKFRAKFFPEDVSEELIQEITQRLFFLQVKEAILNDEIYCPPETAVLLASYAVQAKYGDYNKEIHKPGYLANDRLLPQRVLE

SEQ ID NO: 71268 - protein, 604 aa, Homo sapiens; identical to SEQ ID NO: 71258
  Payload ID: 14115
  Gene Symbol: RDX
  Gene Name: radixin
  Uniprot ID: P35241
  ENSP ID: ENSP00000437301

SEQ ID NO: 71269 - protein, 447 aa, Homo sapiens
  Payload ID: 14115
  Gene Symbol: RDX
  Gene Name: radixin
  Uniprot ID: P35241
  ENSP ID: ENSP00000445826
MLSWNLPFSPIQLANNFLTSVLEQHKLTKEQWEERIQNWHEEHRGMLREDSMMEYLKIAQDLEMYGVNYFEIKNKKGTELWLGVDALGLNIYEHDDKLTPKIGFPWSEIRNISFNDKKFVIKPIDKKAPDFVFYAPRLRINKRILALCMGNHELYMRRRKPDTIEVQQMKAQAREEKHQKQLERAQLENEKKKREIAEKEKERIEREKEELMERLKQIEEQTIKAQKELEEQTRKALELDQERKRAKEEAERLEKERRAAEEAKSAIAKQAADQMKNQEQLAAELAEFTAKIALLEEAKKKKEEEATEWQHKAFAAQEDLEKTKEELKTVMSAPPPPPPPPVIPPTENEHDEHDENNAEASAELSNEGVMNHRSEEERVTETQKNERVKKQLQALSSELAQARDETKKTQNDVLHAENVKAGRDKYKTLRQIRQGNTKQRIDEFEAM

SEQ ID NO: 71270 - protein, 648 aa, Homo sapiens [sequence omitted]

SEQ ID NO: 71271 - protein, 69 aa, Homo sapiens
  Payload ID: 14116
  Gene Symbol: RAF1
  Gene Name: Raf-1 proto-oncogene, serine/threonine kinase
  ENSP ID: ENSP00000391265
MEHIQGAWKTISNGFGFKDAVFDGSSCISPTIVQQFGYQRRASDDGKLTDPSKTSNTIRVFLPNKQRTV

SEQ ID NO: 71272 - protein, 527 aa, Homo sapiens
  Payload ID: 14116
  Gene Symbol: RAF1
  Gene Name: Raf-1 proto-oncogene, serine/threonine kinase
  ENSP ID: ENSP00000398591
RGLQPECCAVFRLLHEHKGKKARLDWNTDAASLIGEELQVDFLDHVPLTTHNFARKTFLKLAFCDICQKFLLNGFRCQTCGYKFHEHCSTKVPTMCVDWSNIRQLFSQHRYSTPHAFTFNTSSPSSEGSLSQRQRSTSTPNVHMVSTTLPVDSRMIEDAIRSHSESASPSALSSSPNNLSPTGWSQPKTPVPAQRERAPVSGTQEKNKIRPRGQRDSSYYWEIEASEVMLSTRIGSGSFGTVYKGKWHGDVAVKILKVVDPTPEQFQAFRNEVAVLRKTRHVNILLFMGYMTKDNLAIVTQWCEGSSLYKHLHVQETKFQMFQLIDIARQTAQGMDYLHAKNIIHRDMKSNNIFLHEGLTVKIGDFGLATVKSRWSGSQQVEQPTGSVLWMAPEVIRMQDNNPFSFQSDVYSYGIVLYELMTGELPYSHINNRDQIIFMVGRGYASPDLSKLYKNCPKAMKRLVADCVKKVKEERPLFPQILSSIELLQHSLPKINRSASEPSLHRAAHTEDINACTLTTSPRLPVF

SEQ ID NO: 71273 - protein, 69 aa, Homo sapiens; identical to SEQ ID NO: 71271
  Payload ID: 14116
  Gene Symbol: RAF1
  Gene Name: Raf-1 proto-oncogene, serine/threonine kinase
  ENSP ID: ENSP00000401088

SEQ ID NO: 71274 - protein, 668 aa, Homo sapiens
  Payload ID: 14116
  Gene Symbol: RAF1
  Gene Name: Raf-1 proto-oncogene, serine/threonine kinase
  Uniprot ID: P04049
  ENSP ID: ENSP00000401888
MEHIQGAWKTISNGFGFKDAVFDGSSCISPTIVQQFGYQRRASDDGKLTDPSKTSNTIRVFLPNKQRTVVNVRNGMSLHDCLMKALKVRGLQPECCAVFRLLHEHKGKKARLDWNTDAASLIGEELQVDFLDHVPLTTHNFARKTFLKLAFCDICQKFLLNGFRCQTCGYKFHEHCSTKVPTMCVDWSNIRQLLLFPNSTIGDSGVPALPSLTMRRMRESVSRMPVSSQHRYSTPHAFTFNTSSPSSEGSLSQRQRSTSTPNVHMVSTTLPVDSRMIENNNLSASPRAWSRRFCLRGRDAIRSHSESASPSALSSSPNNLSPTGWSQPKTPVPAQRERAPVSGTQEKNKIRPRGQRDSSYYWEIEASEVMLSTRIGSGSFGTVYKGKWHGDVAVKILKVVDPTPEQFQAFRNEVAVLRKTRHVNILLFMGYMTKDNLAIVTQWCEGSSLYKHLHVQETKFQMFQLIDIARQTAQGMDYLHAKNIIHRDMKSNNIFLHEGLTVKIGDFGLATVKSRWSGSQQVEQPTGSVLWMAPEVIRMQDNNPFSFQSDVYSYGIVLYELMTGELPYSHINNRDQIIFMVGRGYASPDLSKLYKNCPKAMKRLVADCVKKVKEERPLFPQILSSIELLQHSLPKINRSASEPSLHRAAHTEDINACTLTTSPRLPVF

SEQ ID NO: 71275 - protein, 501 aa, Homo sapiens
  Payload ID: 14117
  Gene Symbol: RFTN2
  Gene Name: raftlin family member 2
  Uniprot ID: Q52LD8
  ENSP ID: ENSP00000295049
MGCGLRKLEDPDDSSPGKIFSTLKRPQVETKTEFAYEYVLLDFTLQASSNPEVIKINSILDIVTKVENYYLKGYIVGAIHPVIQPVGQRKHLPASYLYRVVLLRLKLSPKNSAAPSGQRRPRLVIEECPLTSEAQTNDAAKELIEKINVAAKRGMKFVGFISQHYSPSKFCNGTNHDGDIESMLHVRHGSDENCRSWNEGTLSGQSSESGIEEELHHESGQYQMEQNGSPTSSKSRKGEASDNKLYTVFNAFDDDSTSWAYQEGILSMKVTRKGSVISTLDADWLELTTFYYKQGLSLIDSFVFWETSKGEHLPKSLEGFFIYEEEGSGVPGSSRKGNDAIVVEQWTVIEGCEIKTDYGPLLHTLAEFGWLLTSVLPTPVLRHDSEGNLATKQIVFLQRPVMWNSAAQTPDKKASRHIKGEDKNKATSRSIGLDTTSSQPAESRHLPEECRLSPSRECWTKEGRLAQHNSFSGFSSSDNVLRELDDGQFDQEDGVTQVTCM

SEQ ID NO: 71276 - protein, 193 aa, Homo sapiens
  Payload ID: 14117
  Gene Symbol: RFTN2
  Gene Name: raftlin family member 2
  ENSP ID: ENSP00000387459
GFFIYEEEGSGVPGSSRKGNDAIVVEQWTVIEGCEIKTDYGPLLHTLAEFGWLLTSVLPTPVLRHDSEGNLATKQIVFLQRPVMWNSAAQTPDMWVRQCEKNKKKASRHIKGEDKNKATSRSIGLDTTSSQPAESRHLPEECRLSPSRECWTKEGRLAQHNSFSGFSSSDNVLRELDDGQFDQEDGVTQVTCM

SEQ ID NO: 71277 - protein, 116 aa, Homo sapiens
  Payload ID: 14117
  Gene Symbol: RFTN2
  Gene Name: raftlin family member 2
  ENSP ID: ENSP00000398128
MGCGLRKLEDPDDSSPGKIFSTLKRPQVETKTEFAYEYVLLDFTLQASSNPEVIKINSILDIVTKVENYYLKGYIVGAIHPVIQPVGQRKHLPASYLYRVVLLRLKLSPKNSAAPS

SEQ ID NO: 71278 - protein, 578 aa, Homo sapiens
  Payload ID: 14118
  Gene Symbol: RFTN1
  Gene Name: raftlin, lipid raft linker 1
  Uniprot ID: Q14699
  ENSP ID: ENSP00000334153
MGCGLNKLEKRDEKRPGNIYSTLKRPQVETKIDVSYEYRFLEFTTLSAAELPGSSAVRLASLRDLPAQLLELYQQGFSLAALHPFVQPTHEREKTPLEHIFRAILIKKTDRSQKTDLHNEGYILELDCCSSLDHPTDQKLIPEFIKKIQEAASQGLKFVGVIPQYHSSVNSAGSSAPVSTANSTEDARDAKNARGDHASLENEKPGTGDVCSAPAGRNQSPEPSSGPRGEVPLAKQPSSPSGEGDGGELSPQGVSKTLDGPESNPLEVHEEPLSGKMEIFTLFNKPKSHQKCRQYYPVTIPLHVSKNGQTVSGLDANWLEHMSDHFRKGGMLVNAVFYLGIVNDSLHGLTDGVFIFEAVSTEDSKTIQGYDAIVVEQWTVLEGVEVQTDYVPLLNSLAAYGWQLTCVLPTPVVKTTSEGSVSTKQIVFLQRPCLPQKIKKKESKFQWRFSREEMHNRQMRKSKGKLSARDKQQAEENEKNLEDQSSKAGDMGNCVSGQQQEGGVSEEMKGPVQEDKGEQLSPGGLLCGVGVEGEAVQNGPASHSRALVGICTGHSNPGEDARDGDAEEVRELGTVEEN

SEQ ID NO: 71279 - protein, 149 aa, Homo sapiens
  Payload ID: 14118
  Gene Symbol: RFTN1
  Gene Name: raftlin, lipid raft linker 1
  ENSP ID: ENSP00000388718
MGCGLNKLEKRDEKRPGNIYSTLKRPQVETKIDVSYEYRFLEFTTLSAAELPGSSAVRLASLRDLPAQLLELYQQGFSLAALHPFVQPTHEREKTPLEHIFRAILIKKTDRSQKTDLHNEGYILELDCCSSLDHPTDQKLIPEFIKKIQ

SEQ ID NO: 71280 - protein, 114 aa, Homo sapiens
  Payload ID: 14118
  Gene Symbol: RFTN1
  Gene Name: raftlin, lipid raft linker 1
  ENSP ID: ENSP00000393216
MGCGLNKLEKRDEKRPGNIYSTLKRPQVETKIDVSYEYRFLEFTTLSAAELPGSSAVRLASLRDLPAQLLELYQQGFSLAALHPFVQPTHEREKTPLEHIFRAILIKKTDRSQK

SEQ ID NO: 71281 - protein, 542 aa, Homo sapiens
  Payload ID: 14118
  Gene Symbol: RFTN1
  Gene Name: raftlin, lipid raft linker 1
  ENSP ID: ENSP00000403926
MYCDGAVDLDAAAELPGSSAVRLASLRDLPAQLLELYQQGFSLAALHPFVQPTHEREKTPLEHIFRAILIKKTDRSQKTDLHNEGYILELDCCSSLDHPTDQKLIPEFIKKIQEAASQGLKFVGVIPQYHSSVNSAGSSAPVSTANSTEDARDAKNARGDHASLENEKPGTGDVCSAPAGRNQSPEPSSGPRGEVPLAKQPSSPSGEGDGGELSPQGVSKTLDGPESNPLEVHEEPLSGKMEIFTLFNKPKSHQKCRQYYPVTIPLHVSKNGQTVSGLDANWLEHMSDHFRKGGMLVNAVFYLGIVNDSLHGLTDGVFIFEAVSTEDSKTIQGYDAIVVEQWTVLEGVEVQTDYVPLLNSLAAYGWQLTCVLPTPVVKTTSEGSVSTKQIVFLQRPCLPQKIKKKESKFQWRFSREEMHNRQMRKSKGKLSARDKQQAEENEKNLEDQSSKAGDMGNCVSGQQQEGGVSEEMKGPVQEDKGEQLSPGGLLCGVGVEGEAVQNGPASHSRALVGICTGHSNPGEDARDGDAEEVRELGTVEEN

SEQ ID NO: 71282 - protein, 275 aa, Homo sapiens
  Payload ID: 14118
  Gene Symbol: RFTN1
  Gene Name: raftlin, lipid raft linker 1
  ENSP ID: ENSP00000403997
MGCGLNKLEKRDEKRPGNIYSTLKRPQVETKIDVSYEYRFLEFTTLSAAELPGSSAVRLASLRDLPAQLLELYQQGFSLAALHPFVQPTHEREKTPLEHIFRAILIKKTDRSQKTDLHNEGYILELDCCSSLDHPTDQKLIPEFIKKIQEAASQGLKFVGVIPQYHSSVNSAGSSAPVSTANSTEDARDAKNARGDHASLENEKPGTGDVCSAPAGRNQSPEPSSGPRGEVPLAKQPSSPSGEGDGGELSPQGVSKTLDGPESNPLEVHEEPLSG

SEQ ID NO: 71283 - protein, 149 aa, Homo sapiens; identical to SEQ ID NO: 71279
  Payload ID: 14118
  Gene Symbol: RFTN1
  Gene Name: raftlin, lipid raft linker 1
  ENSP ID: ENSP00000409427

SEQ ID NO: 71284 - protein, 117 aa, Homo sapiens
  Payload ID: 14118
  Gene Symbol: RFTN1
  Gene Name: raftlin, lipid raft linker 1
  ENSP ID: ENSP00000410493
MGCGLNKLEKRDEKRPGNIYSTLKRPQVETKIDVSYEYRFLEFTTLSAAELPGSSAVRLASLRDLPAQLLELYQQGFSLAALHPFVQPTHEREKTPLEHIFRAILIKKTDRKSHLCQ

SEQ ID NO: 71285 - protein, 88 aa, Homo sapiens
  Payload ID: 14118
  Gene Symbol: RFTN1
  Gene Name: raftlin, lipid raft linker 1
  ENSP ID: ENSP00000475367
VQTDYVPLLNSLAAYGWQLTCVLPTPVVKTTSEGSVSTKQIVFLQRPCLPQKIKKKESKFQWRFSREEMHNRQMRKSKVTYGNKSSMS

SEQ ID NO: 71286 - protein, 557 aa, Homo sapiens
  Payload ID: 14119
  Gene Symbol: RALGPS1
  Gene Name: Ral GEF with PH domain and SH3 binding motif 1
  Uniprot ID: Q5JS13
  ENSP ID: ENSP00000259351
MYKRNGLMASVLVTSATPQGSSSSDSLEGQSCDYASKSYDAVVFDVLKVTPEEFASQITLMDIPVFKAIQPEELASCGWSKKEKHSLAPNVVAFTRRFNQVSFWVVREILTAQTLKIRAEILSHFVKIAKKLLELNNLHSLMSVVSALQSAPIFRLTKTWALLNRKDKTTFEKLDYLMSKEDNYKRTREYIRSLKMVPSIPYLGIYLLDLIYIDSAYPASGSIMENEQRSNQMNNILRIIADLQVSCSYDHLTTLPHVQKYLKSVRYIEELQKFVEDDNYKLSLRIEPGSSSPRLVSSKEDLAGPSAGSGSARFSRRPTCPDTSVAGSLPTPPVPRHRKSHSLGNNMMCQLSVVESKSATFPSEKARHLLDDSVLESRSPRRGLALTSSSAVTNGLSLGSSESSEFSEEMSSGLESPTGPCICSLGNSAAVPTMEGPLRRKTLLKEGRKPALSSWTRYWVILSGSTLLYYGAKSLRGTDRKHYKSTPGKKVSIVGWMVQLPDDPEHPDIFQLNNPDKGNVYKFQTGSRFHAILWHKHLDDACKSNRPQVPANLMSFE

SEQ ID NO: 71287 - protein, 173 aa, Homo sapiens
  Payload ID: 14119
  Gene Symbol: RALGPS1
  Gene Name: Ral GEF with PH domain and SH3 binding motif 1
  ENSP ID: ENSP00000317149
MYKRNGLMASVLVTSATPQGSSSSDSLEGQSCDYASKSYDAVVFDVLKVTPEEFASQITLMDIPVFKAIQPEELASCGWSKKEKHSLAPNVVAFTRRFNQKLLELNNLHSLMSVVSALQSAPIFRLTKTWALLNRKDKTTFEKLDYLMSKEDNYKRTREYIRSLKMVPSIPYL

SEQ ID NO: 71288 - protein, 529 aa, Homo sapiens
  Payload ID: 14119
  Gene Symbol: RALGPS1
  Gene Name: Ral GEF with PH domain and SH3 binding motif 1
  Uniprot ID: Q5JS13
  ENSP ID: ENSP00000362533
MYKRNGLMASVLVTSATPQGSSSSDSLEGQSCDYASKSYDAVVFDVLKVTPEEFASQITLMDIPVFKAIQPEELASCGWSKKEKHSLAPNVVAFTRRFNQVSFWVVREILTAQTLKIRAEILSHFVKIAKKLLELNNLHSLMSVVSALQSAPIFRLTKTWALLNRKDKTTFEKLDYLMSKEDNYKRTREYIRSLKMVPSIPYLGIYLLDLIYIDSAYPASGSIMENEQRSNQMNNILRIIADLQVSCSYDHLTTLPHVQKYLKSVRYIEELQKFVEDDNYKLSLRIEPGSSSPRLVSSKEDLAGPSAGSGSARFSRRPTCPDTSVAGSLPTPPVPRHRKSHSLGNNRGRLYATLGPNWRVPVRNSPRTRSCVYSPTGPCICSLGNSAAVPTMEGPLRRKTLLKEGRKPALSSWTRYWVILSGSTLLYYGAKSLRGTDRKHVSIVGWMVQLPDDPEHPDIFQLNNPDKGNVYKFQTGSRFHAILWHKHLDDACKSNRPQEAGAAPGPTGTDSHEVDHLEGGAGKEAGPCA

SEQ ID NO: 71289 - protein, 305 aa, Homo sapiens
  Payload ID: 14119
  Gene Symbol: RALGPS1
  Gene Name: Ral GEF with PH domain and SH3 binding motif 1
  Uniprot ID: Q5JS13
  ENSP ID: ENSP00000362535
MYKRNGLMASVLVTSATPQGSSSSDSLEGQSCDYASKSYDAVVFDVLKVTPEEFASQITLMDIPVFKAIQPEELASCGWSKKEKHSLAPNVVAFTRRFNQVSFWVVREILTAQTLKIRAEILSHFVKIAKKLLELNNLHSLMSVVSALQSAPIFRLTKTWALLNRKDKTTFEKLDYLMSKEDNYKRTREYIRSLKMVPSIPYLGIYLLDLIYIDSAYPASGSIMENEQRSNQMNNILRIIADLQVSCSYDHLTTLPHVQKYLKSVRYIEELQKFVEDDNYKLSLRIEPGSSSPRLVSSKEDLAAM

SEQ ID NO: 71290 - protein, 108 aa, Homo sapiens
  Payload ID: 14119
  Gene Symbol: RALGPS1
  Gene Name: Ral GEF with PH domain and SH3 binding motif 1
  Uniprot ID: Q5JS13
  ENSP ID: ENSP00000377579
MYKRNGLMASVLVTSATPQGSSSSDSLEGQSCDYASKSYDAVVFDVLKVTPEEFASQITLMDIPVFKAIQPEKGWPARMEDSLQKSTVSSRPHDTLQFRKTLPVGPGT

SEQ ID NO: 71291 - protein, 384 aa, Homo sapiens
  Payload ID: 14119
  Gene Symbol: RALGPS1
  Gene Name: Ral GEF with PH domain and SH3 binding motif 1
  Uniprot ID: Q5JS13
  ENSP ID: ENSP00000377590
MYKRNGLMASVLVTSATPQGSSSSDSLEGQSCDYASKSYDAVVFDVLKVTPEEFASQITLMDIPVFKAIQPEELASCGWSKKEKHSLAPNVVAFTRRFNQVSFWVVREILTAQTLKIRAEILSHFVKIAKKLLELNNLHSLMSVVSALQSAPIFRLTKTWALLNRKDKTTFEKLDYLMSKEDNYKRTREYIRSLKMVPSIPYLGIYLLDLIYIDSAYPASGSIMENEQRSNQMNNILRIIADLQVSCSYDHLTTLPHVQKYLKSVRYIEELQKFVEDDNYKLSLRIEPGSSSPRLVSSKEDLAVSHLSSLSHQGQAEEARLKPTSGQHPAWMWPSSSRVPAAPPASAAPRSPWPRNLRNDQGQPGAVALTCNPSTLGSRSRRIT

SEQ ID NO: 71292 - protein, 153 aa, Homo sapiens
  Payload ID: 14119
  Gene Symbol: RALGPS1
  Gene Name: Ral GEF with PH domain and SH3 binding motif 1
  ENSP ID: ENSP00000404021
  MOD_RES (1)..(1): Any amino acid
XNSPRTRSCVYSPTGPCICSLGNSAAVPTMEGPLRRKTLLKEGRKPALSSWTRYWVILSGSTLLYYGAKSLRGTDRKHYKSTPGKKVSIVGWMVQLPDDPEHPDIFQLNNPDKGNVYKFQTGSRFHAILWHKHLDDACKSNRPQVPANLMSFE

SEQ ID NO: 71293 - protein, 537 aa, Homo sapiens
  Payload ID: 14119
  Gene Symbol: RALGPS1
  Gene Name: Ral GEF with PH domain and SH3 binding motif 1
  Uniprot ID: Q5JS13
  ENSP ID: ENSP00000415630
MYKRNGLMASVLVTSATPQGSSSSDSLEGQSCDYASKSYDAVVFDVLKVTPEEFASQITLMDIPVFKAIQPEELASCGWSKKEKHSLAPNVVAFTRRFNQVSFWVVREILTAQTLKIRAEILSHFVKIAKKLLELNNLHSLMSVVSALQSAPIFRLTKTWALLNRKDKTTFEKLDYLMSKEDNYKRTREYIRSLKMVPSIPYLGIYLLDLIYIDSAYPASGSIMENEQRSNQMNNILRIIADLQVSCSYDHLTTLPHVQKYLKSVRYIEELQKFVEDDNYKLSLRIEPGSSSPRLVSSKEDLAGPSAGSGSARFSRRPTCPDTSVAGSLPTPPVPRHRKSHSLGNNRGRLYATLGPNWRVPVRNSPRTRSCVYSPTGPCICSLGNSAAVPTMEGPLRRKTLLKEGRKPALSSWTRYWVILSGSTLLYYGAKSLRGTDRKHYKSTPGKKVSIVGWMVQLPDDPEHPDIFQLNNPDKGNVYKFQTGSRFHAILWHKHLDDACKSNRPQEAGAAPGPTGTDSHEVDHLEGGAGKEAGPCA

SEQ ID NO: 71294 - protein, 266 aa, Homo sapiens
  Payload ID: 14120
  Gene Symbol: RALGPS2
  Gene Name: Ral GEF with PH domain and SH3 binding motif 2
  ENSP ID: ENSP00000313613
MDLMNGQASSVNIAATASEGQITLMDVPVFKAIQPDELSSCGWNKKEKYSSAPNAVAFTRRFNHVSFWVVREILHAQTLKIRAEVLSHYIKTAKKLYELNNLHALMAVVSGLQSAPIFRLTKTWALLSRKDKTTFEKLEYVMSKEDNYKRLRDYISSLKMTPCIPYLGIYLSDLTYIDSAYPSTGSILENEQRSNLMNNILRIISDLQQSCEYDIPMLPHVQKYLNSVQYIEELQKFVEDDNYKLSLKIEPGTSTPRSAASREDLV

SEQ ID NO: 71295 - protein, 146 aa, Homo sapiens
  Payload ID: 14120
  Gene Symbol: RALGPS2
  Gene Name: Ral GEF with PH domain and SH3 binding motif 2
  ENSP ID: ENSP00000356604
  MOD_RES (1)..(1): Any amino acid
XQAESSTLSSGISIGSSDGSELSEETSWPAFESSAESEDLAVHLYPGAVTIQGVLRRKTLLKEGKKPTVASWTKYWAALCGTQLFYYAAKSLKATERKHFKSTSNKNVSVIGWMVMMADDPEHPDLFLLTDSEKGNSYKFQAGNRM

SEQ ID NO: 71296 - protein, 557 aa, Homo sapiens
  Payload ID: 14120
  Gene Symbol: RALGPS2
  Gene Name: Ral GEF with PH domain and SH3 binding motif 2
  Uniprot ID: Q86X27
  ENSP ID: ENSP00000356606
MDLMNGQASSVNIAATASEKSSSSESLSDKGSELKKSFDAVVFDVLKVTPEEYAGQITLMDVPVFKAIQPDELSSCGWNKKEKYSSAPNAVAFTRRFNHVSFWVVREILHAQTLKIRAEVLSHYIKTAKKLYELNNLHALMAVVSGLQSAPIFRLTKTWALLSRKDKTTFEKLEYVMSKEDNYKRLRDYISSLKMTPCIPYLGIYLSDLTYIDSAYPSTGSILENEQRSNLMNNILRIISDLQQSCEYDIPMLPHVQKYLNSVQYIEELQKFVEDDNYKLSLKIEPGTSTPRSAASREDLVGPEVGASPQSGRKSVAAEGALLPQTPPSPRNLIPHGHRKCHSLGYNFIHKMNTAEFKSATFPNAGPRHLLDDSVMEPHAPSRGQAESSTLSSGISIGSSDGSELSEETSWPAFESSAESEDLAVHLYPGAVTIQGVLRRKTLLKEGKKPTVASWTKYWAALCGTQLFYYAAKSLKATERKHFKSTSNKNVSVIGWMVMMADDPEHPDLFLLTDSEKGNSYKFQAGNRMNAMLWFKHLSAACQSNKQQVPTNLMTFE

SEQ ID NO: 71297 - protein, 583 aa, Homo sapiens
  Payload ID: 14120
  Gene Symbol: RALGPS2
  Gene Name: Ral GEF with PH domain and SH3 binding motif 2
  Uniprot ID: Q86X27
  ENSP ID: ENSP00000356607
MDLMNGQASSVNIAATASEKSSSSESLSDKGSELKKSFDAVVFDVLKVTPEEYAGQITLMDVPVFKAIQPDELSSCGWNKKEKYSSAPNAVAFTRRFNHVSFWVVREILHAQTLKIRAEVLSHYIKTAKKLYELNNLHALMAVVSGLQSAPIFRLTKTWALLSRKDKTTFEKLEYVMSKEDNYKRLRDYISSLKMTPCIPYLGIYLSDLTYIDSAYPSTGSILENEQRSNLMNNILRIISDLQQSCEYDIPMLPHVQKYLNSVQYIEELQKFVEDDNYKLSLKIEPGTSTPRSAASREDLVGPEVGASPQSGRKSVAAEGALLPQTPPSPRNLIPHGHRKCHSLGYNFIHKMNTAEFKSATFPNAGPRHLLDDSVMEPHAPSRGQAESSTLSSGISIGSSDGSELSEETSWPAFERNRLYHSLGPVTRVARNGYRSHMKASSSAESEDLAVHLYPGAVTIQGVLRRKTLLKEGKKPTVASWTKYWAALCGTQLFYYAAKSLKATERKHFKSTSNKNVSVIGWMVMMADDPEHPDLFLLTDSEKGNSYKFQAGNRMNAMLWFKHLSAACQSNKQQVPTNLMTFE

SEQ ID NO: 71298 - protein, 99 aa, Homo sapiens
  Payload ID: 14120
  Gene Symbol: RALGPS2
  Gene Name: Ral GEF with PH domain and SH3 binding motif 2
  ENSP ID: ENSP00000405903
  MOD_RES (1)..(1): Any amino acid
XQYIEELQKFVEDDNYKLSLKIEPGTSTPRSAASREDLVGPEVGASPQSGRKSVAAEGALLPQTPPSPRNLIPHGHRKCHSLGYKSAFLILSFKFLSLL

SEQ ID NO: 71299 - protein, 2083 aa, Homo sapiens
  Payload ID: 14121
  Gene Symbol: RALGAPA1
  Gene Name: Ral GTPase activating protein, alpha subunit 1 (catalytic)
  Uniprot ID: Q6GYQ0
  ENSP ID: ENSP00000302647
MFSKKPHGDVKKSTQKVLDTKKDALTRLKHLRIVIENAESIDLKQFFDQHFSHIYYVFFENFVTIEASLKQKGHKSQREELDAILFIFEKILQLLPERIHQRWQFHSIGLILKKLLHTGNSLKIRREGVRLFLLWLQALQNNCSKEQLWMFSCLIPGFSAPQSEHGPRTLDNLINPPLNLQETQVTIEEITPLVPPQSGDKGQEDLTSYFLEALLKYIVIQVKSLEWKNKENQERGFSFLFSHFKKYYLPYIFPNICKENSLYHPILDIPQMRPKPHYVVIKKDAETNEAIYCTKEPFIKARVIVIRWLVSFWLEPKPHTGPHIPGMEGEVLPKNIQRAAASLVSREESKNDNADKTDRTTEPEQSHSNTSTLTEREPSSSSLCSIDEEHLTDIEIVRRVFSSKRSNVNFVTEIFRQAFLLPICEAAAMRKVVKVYQEWIQQEEKPLFMQEPEEIVITSSDLPCIENVTDHDISMEEGEKREEENGTNTADHVRNSSWAKNGSYQGALHNASEEATEQNIRAGTQAVLQVFIINSSNIFLLEPANEIKNLLDEHTDMCKRILNIYRYMVVQVSMDKKTWEQMLLVLLRVTESVLKMPSQAFLQFQGKKNMTLAGRLAGPLFQTLIVAWIKANLNVYISRELWDDLLSVLSSLTYWEELATEWSLTMETLTKVLARNLYSLDLSDLPLDKLSEQKQKKHKGKGVGHEFQKVSVDKSFSRGWSRDQPGQAPMRQRSATTTGSPGTEKARSIVRQKTVDIDDAQILPRSTRVRHFSQSEETGNEVFGALNEEQPLPRSSSTSDILEPFTVERAKVNKEDMSQKLPPLNSDIGGSSANVPDLMDEFIAERLRSGNASTMTRRGSSPGSLEIPKDLPDILNKQNQMRPIDDPGVPSEWTSPASAGSSDLISSDSHSDSFSAFQYDGRKFDNFGFGTDTGVTSSADVDSGSGHHQSAEEQEVASLTTLHIDSETSSLNQQAFSAEVATITGSESASPVHSPLGSRSQTPSPSTLNIDHMEQKDLQLDEKLHHSVLQTPDDLEISEFPSECCSVMAGGTLTGWHADVATVMWRRMLGILGDVNSIMDPEIHAQVFDYLCELWQNLAKIRDNLGISTDNLTSPSPPVLIPPLRILTPWLFKATMLTDKYKQGKLHAYKLICNTMKRRQDVSPNRDFLTHFYNIMHCGLLHIDQDIVNTIIKHCSPQFFSLGLPGATMLIMDFIVAAGRVASSAFLNAPRVEAQVLLGSLVCFPNLYCELPSLHPNIPDVAVSQFTDVKELIIKTVLSSARDEPSGPARCVALCSLGIWICEELVHESHHPQIKEALNVICVSLKFTNKTVAHVACNMLHMLVHYVPRLQIYQPDSPLKIIQILIATITHLLPSTEASSYEMDKRLVVSLLLCLLDWIMALPLKTLLQPFHATGAESDKTEKSVLNCIYKVLHGCVYGAQCFSNPRYFPMSLSDLASVDYDPFMHLESLKEPEPLHSPDSERSSKLQPVTEVKTQMQHGLISIAARTVITHLVNHLGHYPMSGGPAMLTSQVCENHDNHYSESTELSPELFESPNIQFFVLNNTTLVSCIQIRSEENMPGGGLSAGLASANSNVRIIVRDLSGKYSWDSAILYGPPPVSGLSEPTSFMLSLSHQEKPEEPPTSNECLEDITVKDGLSLQFKRFRETVPTWDTIRDEEDVLDELLQYLGVTSPECLQRTGISLNIPAPQPVCISEKQENDVINAILKQHTEEKEFVEKHFNDLNMKAVEQDEPIPQKPQSAFYYCRLLLSILGMNSWDKRRSFHLLKKNEKLLRELRNLDSRQCRETHKIAVFYVAEGQEDKHSILTNTGGSQAYEDFVAGLGWEVNLTNHCGFMGGLQKNKSTGLTTPYFATSTVEVIFHVSTRMPSDSDDSLTKKLRHLGNDEVHIVWSEHTRDYRRGIIPTEFGDVLIVIYPMKNHMFSIQIMKKPEVPFFGPLFDGAIVNGKVLPIMVRATAINASRALKSLIPLYQNFYEERARYLQTIVQHHLEPTTFEDFAAQVFSPAPYHHLPSDAGSYPEILPSETPTATQVDGADLASPMSPRTSKSRMSMKLRRSSGSANKS

SEQ ID NO: 71300 - protein, 2049 aa, Homo sapiens
  Payload ID: 14121
  Gene Symbol: RALGAPA1
  Gene Name: Ral GTPase activating protein, alpha subunit 1 (catalytic)
  Uniprot ID: Q6GYQ0
  ENSP ID: ENSP00000371803
MFSKKPHGDVKKSTQKVLDTKKDALTRLKHLRIVIENAESIDLKQFFDQHFSHIYYVFFENFVTIEASLKQKGHKSQREELDAILFIFEKILQLLPERIHQRWQFHSIGLILKKLLHTGNSLKIRREGVRLFLLWLQALQNNCSKEQLWMFSCLIPGFSAPQSEHGPRTLDNLINPPLNLQETQVTIEEITPLVPPQSGDKGQEDLTSYFLEALLKYIVIQVKSLEWKNKENQERGFSFLFSHFKKYYLPYIFPNICKENSLYHPILDIPQMRPKPHYVVIKKDAETNEAIYCTKEPFIKARVIVIRWLVSFWLEPKPHTGPHIPGMEGEVLPKNIQRAAASLVSREESKNDNADKTDRTTEPEQSHSNTSTLTEREPSSSSLCSIDEEHLTDIEIVRRVFSSKRSNVNFVTEIFRQAFLLPICEAAAMRKVVKVYQEWIQQEEKPLFMQEPEEIVITSSDLPCIENVTDHDISMEEGEKREEENGTNTADHVRNSSWAKNGSYQGALHNASEEATEQNIRAGTQAVLQVFIINSSNIFLLEPANEIKNLLDEHTDMCKRILNIYRYMVVQVSMDKKTWEQMLLVLLRVTESVLKMPSQAFLQFQGKKNMTLAGRLAGPLFQTLIVAWIKANLNVYISRELWDDLLSVLSSLTYWEELATEWSLTMETLTKVLARNLYSLDLSDLPLDKLSEQKQKKHKGKGVGHEFQKVSVDKSFSRGWSRDQPGQAPMRQRSATTTGSPGTEKARSIVRQKTVDIDDAQILPRSTRVRHFSQSEETGNEVFGALNEEQPLPRSSSTSDILEPFTVERAKEAEQNATRGSTEGSVQSCNGLFWKESCSDIGGSSANVPDLMDEFIAERLRSGNASTMTRRGSSPGSLEIPKDLPDILNKQNQMRPIDDPGVPSEWTSPASAGSSDLISSDSHSDSFSAFQYDGRKFDNFGFGTDTGVTSSADVDSGSGHHQSAEEQEVASLTTLHIDSETSSLNQQAFSAEVATITGSESASPVHSPLGSRSQTPSPSTLNIDHMEQKDLQLDEKLHHSVLQTPDDLEISEFPSECCSVMAGGTLTGWHADVATVMWRRMLGILGDVNSIMDPEIHAQVFDYLCELWQNLAKIRDNLGISTDNLTSPSPPVLIPPLRILTPWLFKATMLTDKYKQGKLHAYKLICNTMKRRQDVSPNRDFLTHFYNIMHCGLLHIDQDIVNTIIKHCSPQFFSLGLPGATMLIMDFIVAAGRVASSAFLNAPRVEAQVLLGSLVCFPNLYCELPSLHPNIPDVAVSQFTDVKELIIKTVLSSARDEPSGPARCVALCSLGIWICEELVHESHHPQIKEALNVICVSLKFTNKTVAHVACNMLHMLVHYVPRLQIYQPDSPLKIIQILIATITHLLPSTEASSYEMDKRLVVSLLLCLLDWIMALPLKTLLQPFHATGAESDKTEKSVLNCIYKVLHGCVYGAQCFSNPRYFPMSLSDLASVDYDPFMHLESLKEPEPLHSPDSERSSKLQPVTEVKTQMQHGLISIAARTVITHLVNHLGHYPMSGGPAMLTSQVCENHDNHYSESTELSPELFESPNIQFFVLNNTTLVSCIQIRSEENMPGGGLSAGLASANSNVRIIVRDLSGKYSWDSAILYGPPPVSGLSEPTSFMLSLSHQEKPEEPPTSNECLEDITVKDGLSLQFKRFRETVPTWDTIRDEEDVLDELLQYLGVTSPECLQRTGISLNIPAPQPVCISEKQENDVINAILKQHTEEKEFVEKHFNDLNMKAVEQDEPIPQKPQSAFYYCRLLLSILGMNSWDKRRSFHLLKKNEKLLRELRNLDSRQCRETHKIAVFYVAEGQEDKHSILTNTGGSQAYEDFVAGLGWEVNLTNHCGFMGGLQKNKSTGLTTPYFATSTVEVIFHVSTRMPSDSDDSLTKKLRHLGNDEVHIVWSEHTRDYRRGIIPTEFGDVLIVIYPMKNHMFSIQIMKKPEVPFFGPLFDGAIVNGKVLPIMVRATAINASRALKSLIPLYQNFYEERARYLQTIVQHHLEPTTFEDFAAQVFSPAPYHHLPSDADH

SEQ ID NO: 71301 - protein, 2036 aa, Homo sapiens
  Payload ID: 14121
  Gene Symbol: RALGAPA1
  Gene Name: Ral GTPase activating protein, alpha subunit 1 (catalytic)
  Uniprot ID: Q6GYQ0
  ENSP ID: ENSP00000374348
MFSKKPHGDVKKSTQKVLDTKKDALTRLKHLRIVIENAESIDLKQFFDQHFSHIYYVFFENFVTIEASLKQKGHKSQREELDAILFIFEKILQLLPERIHQRWQFHSIGLILKKLLHTGNSLKIRREGVRLFLLWLQALQNNCSKEQLWMFSCLIPGFSAPQSEHGPRTLDNLINPPLNLQETQVTIEEITPLVPPQSGDKGQEDLTSYFLEALLKYIVIQVKSLEWKNKENQERGFSFLFSHFKKYYLPYIFPNICKENSLYHPILDIPQMRPKPHYVVIKKDAETNEAIYCTKEPFIKARVIVIRWLVSFWLEPKPHTGPHIPGMEGEVLPKNIQRAAASLVSREESKNDNADKTDRTTEPEQSHSNTSTLTEREPSSSSLCSIDEEHLTDIEIVRRVFSSKRSNVNFVTEIFRQAFLLPICEAAAMRKVVKVYQEWIQQEEKPLFMQEPEEIVITSSDLPCIENVTDHDISMEEGEKREEENGTNTADHVRNSSWAKNGSYQGALHNASEEATEQNIRAGTQAVLQVFIINSSNIFLLEPANEIKNLLDEHTDMCKRILNIYRYMVVQVSMDKKTWEQMLLVLLRVTESVLKMPSQAFLQFQGKKNMTLAGRLAGPLFQTLIVAWIKANLNVYISRELWDDLLSVLSSLTYWEELATEWSLTMETLTKVLARNLYSLDLSDLPLDKLSEQKQKKHKGKGVGHEFQKVSVDKSFSRGWSRDQPGQAPMRQRSATTTGSPGTEKARSIVRQKTVDIDDAQILPRSTRVRHFSQSEETGNEVFGALNEEQPLPRSSSTSDILEPFTVERAKVNKEDMSQKLPPLNSDIGGSSANVPDLMDEFIAERLRSGNASTMTRRGSSPGSLEIPKDLPDILNKQNQMRPIDDPGVPSEWTSPASAGSSDLISSDSHSDSFSAFQYDGRKFDNFGFGTDTGVTSSADVDSGSGHHQSAEEQEVASLTTLHIDSETSSLNQQAFSAEVATITGSESASPVHSPLGSRSQTPSPSTLNIDHMEQKDLQLDEKLHHSVLQTPDDLEISEFPSECCSVMAGGTLTGWHADVATVMWRRMLGILGDVNSIMDPEIHAQVFDYLCELWQNLAKIRDNLGISTDNLTSPSPPVLIPPLRILTPWLFKATMLTDKYKQGKLHAYKLICNTMKRRQDVSPNRDFLTHFYNIMHCGLLHIDQDIVNTIIKHCSPQFFSLGLPGATMLIMDFIVAAGRVASSAFLNAPRVEAQVLLGSLVCFPNLYCELPSLHPNIPDVAVSQFTDVKELIIKTVLSSARDEPSGPARCVALCSLGIWICEELVHESHHPQIKEALNVICVSLKFTNKTVAHVACNMLHMLVHYVPRLQIYQPDSPLKIIQILIATITHLLPSTEASSYEMDKRLVVSLLLCLLDWIMALPLKTLLQPFHATGAESDKTEKSVLNCIYKVLHGCVYGAQCFSNPRYFPMSLSDLASVDYDPFMHLESLKEPEPLHSPDSERSSKLQPVTEVKTQMQHGLISIAARTVITHLVNHLGHYPMSGGPAMLTSQVCENHDNHYSESTELSPELFESPNIQFFVLNNTTLVSCIQIRSEENMPGGGLSAGLASANSNVRIIVRDLSGKYSWDSAILYGPPPVSGLSEPTSFMLSLSHQEKPEEPPTSNECLEDITVKDGLSLQFKRFRETVPTWDTIRDEEDVLDELLQYLGVTSPECLQRTGISLNIPAPQPVCISEKQENDVINAILKQHTEEKEFVEKHFNDLNMKAVEQDEPIPQKPQSAFYYCRLLLSILGMNSWDKRRSFHLLKKNEKLLRELRNLDSRQCRETHKIAVFYVAEGQEDKHSILTNTGGSQAYEDFVAGLGWEVNLTNHCGFMGGLQKNKSTGLTTPYFATSTVEVIFHVSTRMPSDSDDSLTKKLRHLGNDEVHIVWSEHTRDYRRGIIPTEFGDVLIVIYPMKNHMFSIQIMKKPEVPFFGPLFDGAIVNGKVLPIMVRATAINASRALKSLIPLYQNFYEERARYLQTIVQHHLEPTTFEDFAAQVFSPAPYHHLPSDADH

SEQ ID NO: 71302 - protein, 356 aa, Homo sapiens
  Payload ID: 14121
  Gene Symbol: RALGAPA1
  Gene Name: Ral GTPase activating protein, alpha subunit 1 (catalytic)
  ENSP ID: ENSP00000450574
  MOD_RES (1)..(1): Any amino acid
XNDVINAILKQHTEEKEFVEKHFNDLNMKAVEQDEPIPQKPQSAFYYCRLLLSILGMNSWDKRRSFHLLKKNEKLLRELRNLDSRQCRETHKIAVFYVAEGQEDKHSILTNTGGSQAYEDFVAGLGWEVNLTNHCGFMGGLQKNKSTGLTTPYFATSTVEVIFHVSTRMPSDSDDSLTKKLRHLGNDEVHIVWSEHTRDYRRGIIPTEFGDVLIVIYPMKNHMFSIQIMKKPEVPFFGPLFDGAIVNGKVLPIMVRATAINASRALKSLIPLYQNFYEERARYLQTIVQHHLEPTTFEDFAAQVFSPAPYHHLPSDAVERNAVIVLFLPKPPLENIGHLKAPTQRFYPVKLPQQRR

SEQ ID NO: 71303 - protein, 722 aa, Homo sapiens
  Payload ID: 14121
  Gene Symbol: RALGAPA1
  Gene Name: Ral GTPase activating protein, alpha subunit 1 (catalytic)
  ENSP ID: ENSP00000451133
QILIATITHLLPSTEASSYEMDKRLVVSLLLCLLDWIMALPLKTLLQPFHATGAESDKTEKSVLNCIYKVLHGCVYGAQCFSNPRYFPMSLSDLASVDYDPFMHLESLKEPEPLHSPDSERSSKLQPVTEVKTQMQHGLISIAARTVITHLVNHLGHYPMSGGPAMLTSQVCENHDNHYSESTELSPELFESPNIQFFVLNNTTLVSCIQIRSEENMPGGGLSAGLASANSNVRIIVRDLSGKYSWDSAILYGPPPVSGLSEPTSFMLSLSHQEKPEEPPTSNECLEDITVKDGLSLQFKRFRETVPTWDTIRDEEDVLDELLQYLGVTSPECLQRTGISLNIPAPQPVCISEKQENDVINAILKQHTEEKEFVEKHFNDLNMKAVEQDEPIPQKPQSAFYYCRLLLSILGMNSWDKRRSFHLLKKNEKLLRELRNLDSRQCRETHKIAVFYVAEGQEDKHSILTNTGGSQAYEDFVAGLGWEVNLTNHCGFMGGLQKNKSTGLTTPYFATSTVEVIFHVSTRMPSDSDDSLTKKLRHLGNDEVHIVWSEHTRDYRRGIIPTEFGDVLIVIYPMKNHMFSIQIMKKPEVPFFGPLFDGAIVNGKVLPIMVRATAINASRALKSLIPLYQNFYEERARYLQTIVQHHLEPTTFEDFAAQVFSPAPYHHLPSDAVGSYPEILPSETPTATQVDGADLASPMSPRTSKSRMSMKLRRSSGSANKS

SEQ ID NO: 71304 - protein, 2083 aa, Homo sapiens
  Payload ID: 14121
  Gene Symbol: RALGAPA1
  Gene Name: Ral GTPase activating protein, alpha subunit 1 (catalytic)
  Uniprot ID: Q6GYQ0
  ENSP ID: ENSP00000451877
MFSKKPHGDVKKSTQKVLDTKKDALTRLKHLRIVIENAESIDLKQFFDQHFSHIYYVFFENFVTIEASLKQKGHKSQREELDAILFIFEKILQLLPERIHQRWQFHSIGLILKKLLHTGNSLKIRREGVRLFLLWLQALQNNCSKEQLWMFSCLIPGFSAPQSEHGPRTLDNLINPPLNLQETQVTIEEITPLVPPQSGDKGQEDLTSYFLEALLKYIVIQVKSLEWKNKENQERGFSFLFSHFKKYYLPYIFPNICKENSLYHPILDIPQMRPKPHYVVIKKDAETNEAIYCTKEPFIKARVIVIRWLVSFWLEPKPHTGPHIPGMEGEVLPKNIQRAAASLVSREESKNDNADKTDRTTEPEQSHSNTSTLTEREPSSSSLCSIDEEHLTDIEIVRRVFSSKRSNVNFVTEIFRQAFLLPICEAAAMRKVVKVYQEWIQQEEKPLFMQEPEEIVITSSDLPCIENVTDHDISMEEGEKREEENGTNTADHVRNSSWAKNGSYQGALHNASEEATEQNIRAGTQAVLQVFIINSSNIFLLEPANEIKNLLDEHTDMCKRILNIYRYMVVQVSMDKKTWEQMLLVLLRVTESVLKMPSQAFLQFQGKKNMTLAGRLAGPLFQTLIVAWIKANLNVYISRELWDDLLSVLSSLTYWEELATEWSLTMETLTKVLARNLYSLDLSDLPLDKLSEQKQKKHKGKGVGHEFQKVSVDKSFSRGWSRDQPGQAPMRQRSATTTGSPGTEKARSIVRQKTVAMRSRSIGECALPSAYIRSAKSAPVLIHTSKPFLPDIVLTPLSDELSDIDDAQILPRSTRVRHFSQSEETGNEVFGALNEEQPLPRSSSTSDILEPFTVERAKVNKEDMSQKLPPLNSDIGGSSANVPDLMDEFIAERLRSGNASTMTRRGSSPGSLEIPKDLPDILNKQNQMRPIDDPGVPSEWTSPASAGSSDLISSDSHSDSFSAFQYDGRKFDNFGFGTDTGVTSSADVDSGSGHHQSAEEQEVASLTTLHIDSETSSLNQQAFSAEVATITGSESASPVHSPLGSRSQTPSPSTLNIDHMEQKDLQLDEKLHHSVLQTPDDLEISEFPSECCSVMAGGTLTGWHADVATVMWRRMLGILGDVNSIMDPEIHAQVFDYLCELWQNLAKIRDNLGISTDNLTSPSPPVLIPPLRILTPWLFKATMLTDKYKQGKLHAYKLICNTMKRRQDVSPNRDFLTHFYNIMHCGLLHIDQDIVNTIIKHCSPQFFSLGLPGATMLIMDFIVAAGRVASSAFLNAPRVEAQVLLGSLVCFPNLYCELPSLHPNIPDVAVSQFTDVKELIIKTVLSSARDEPSGPARCVALCSLGIWICEELVHESHHPQIKEALNVICVSLKFTNKTVAHVACNMLHMLVHYVPRLQIYQPDSPLKIIQILIATITHLLPSTEASSYEMDKRLVVSLLLCLLDWIMALPLKTLLQPFHATGAESDKTEKSVLNCIYKVLHGCVYGAQCFSNPRYFPMSLSDLASVDYDPFMHLESLKEPEPLHSPDSERSSKLQPVTEVKTQMQHGLISIAARTVITHLVNHLGHYPMSGGPAMLTSQVCENHDNHYSESTELSPELFESPNIQFFVLNNTTLVSCIQIRSEENMPGGGLSAGLASANSNVRIIVRDLSGKYSWDSAILYGPPPVSGLSEPTSFMLSLSHQEKPEEPPTSNECLEDITVKDGLSLQFKRFRETVPTWDTIRDEEDVLDELLQYLGVTSPECLQRTGISLNIPAPQPVCISEKQENDVINAILKQHTEEKEFVEKHFNDLNMKAVEQDEPIPQKPQSAFYYCRLLLSILGMNSWDKRRSFHLLKKNEKLLRELRNLDSRQCRETHKIAVFYVAEGQEDKHSILTNTGGSQAYEDFVAGLGWEVNLTNHCGFMGGLQKNKSTGLTTPYFATSTVEVIFHVSTRMPSDSDDSLTKKLRHLGNDEVHIVWSEHTRDYRRGIIPTEFGDVLIVIYPMKNHMFSIQIMKKPEVPFFGPLFDGAIVNGKVLPIMVRATAINASRALKSLIPLYQNFYEERARYLQTIVQHHLEPTTFEDFAAQVFSPAPYHHLPSDADH

SEQ ID NO: 71305 - protein, 1873 aa, Homo sapiens
  Payload ID: 14122
  Gene Symbol: RALGAPA2
  Gene Name: Ral GTPase activating protein, alpha subunit 2 (catalytic)
  Uniprot ID: Q2PPJ7
  ENSP ID: ENSP00000202677
MFSRRSHGDVKKSTQKVLDPKKDVLTRLKHLRALLDNVDANDLKQFFETNYSQIYFIFYENFIALENSLKLKGNNKSQREELDSILFLFEKILQFLPERIFFRWHYQSIGSTLKKLLHTGNSIKIRCEGIRLFLLWLQALQTNCAEEQVLIFACLVPGFPAVMSSRGPCTLETLINPSPSVADVKIYPEEITPLLPAISGEKIAEDQTCFFLQILLKYMVIQAASLEWKNKENQDTGFKFLFTLFRKYYLPHLFPSFTKLTNIYKPVLDIPHLRPKPVYITTTRDNENIYSTKIPYMAARVVFIKWIVTFFLEKKYLTATQNTKNGVDVLPKIIQTVGGGAVQERAPELDGGGPTEQDKSHSNSSTLSDRRLSNSSLCSIEEEHRMVYEMVQRILLSTRGYVNFVNEVFHQAFLLPSCEIAVTRKVVQVYRKWILQDKPVFMEEPDRKDVAQEDAEKLGFSETDSKEASSESSGHKRSSSWGRTYSFTSAMSRGCVTEEENTNVKAGVQALLQVFLTNSANIFLLEPCAEVPVLLKEQVDACKAVLIIFRRMIMELTMNKKTWEQMLQILLRITEAVMQKPKDKQIKDLFAQSLAGLLFRTLMVAWIRANLCVYISRELWDDFLGVLSSLTEWEELINEWANIMDSLTAVLARTVYGVEMTNLPLDKLSEQKEKKQRGKGCVLDPQKGTTVGRSFSLSWRSHPDVTEPMRFRSATTSGAPGVEKARNIVRQKATEVEECQQSENAPAAGSGHLTVGQQQQVLRSSSTSDIPEPLCSDSSQGQKAENTQNSSSSEPQPIQENKGHVKREHEGITILVRRSSSPAELDLKDDLQQTQGKCRERQKSESTNSDTTLGCTNEAELSMGPWQTCEEDPELNTPTDVVADADARHWLQLSPTDASNLTDSSECLTDDCSIIAGGSLTGWHPDSAAVLWRRVLGILGDVNNIQSPKIHARVFCYLYELWYKLAKIRDNLAISLDNQSSPSPPVLIPPLRMFASWLFKAATLPNEYKEGKLQAYRLICAMMTRRQDVLPNSDFLVHFYLVMHLGLTSEDQDILNTIIRHCPPRFFSLGFPGFSMLVGDFITAAARVLSTDILTAPRSEAVTVLGSLVCFPNTYQEIPLLQSVPEVNEAITGTEDVKHYLINILLKNATEEPNEYARCIAVCSLGVWICEELAQCTSHPQVKEAINVIGVTLKFPNKIVAQVACDVLQLLVSYWEKLQMFETSLPRKMAEILVATVAFLLPSAEYSSVETDKKFIVSLLLCLLDWCMALPVSVLLHPVSTAVLEEQHSARAPLLDYIYRVLHCCVCGSSTYTQQSHYILTLADLSSTDYDPFLPLANVKSSEPVQYHSSAELGNLLTVEEEKKRRSLELIPLTARMVMAHLVNHLGHYPLSGGPAILHSLVSENHDNAHVEGSELSFEVFRSPNLQLFVFNDSTLISYLQTPTEGPVGGSPVGSLSDVRVIVRDISGKYSWDGKVLYGPLEGCLAPNGRNPSFLISSWHRDTFGPQKDSSQVEEGDDVLDKLLENIGHTSPECLLPSQLNLNEPSLTPCGMNYDQEKEIIEVILRQNAQEDEYIQSHNFDSAMKVTSQGQPSPVEPRGPFYFCRLLLDDLGMNSWDRRKNFHLLKKNSKLLRELKNLDSRQCRETHKIAVFYIAEGQEDKCSILSNERGSQAYEDFVAGLGWEVDLSTHCGFMGGLQRNGSTGQTAPYYATSTVEVIFHVSTRMPSDSDDSLTKKLRHLGNDEVHIVWSEHSRDYRRGIIPTAFGDVSIIIYPMKNHMFFIAITKKPEVPFFGPLFDGAIVSGKLLPSLVCATCINASRAVKCLIPLYQSFYEERALYLEAIIQNHREVMTFEDFAAQVFSPSPSYSLSGTD

SEQ ID NO: 71306 - protein, 250 aa, Homo sapiens
  Payload ID: 14122
  Gene Symbol: RALGAPA2
  Gene Name: Ral GTPase activating protein, alpha subunit 2 (catalytic)
  ENSP ID: ENSP00000388695
  MOD_RES (1)..(1): Any amino acid
XQPSPVEPRGPFYFCRLLLDDLGMNSWDRRKNFHLLKKNSKLLRELKNLDSRQCRETHKIAVFYIAEGQEDKCSILSNERGSQAYEDFVAGLGWEVDLSTHCGFMGGLQRNGSTGQTAPYYATSTVEVIFHVSTRMPSDSDDSLTKKLRHLGNDEVHIVWSEHSRDYRRGIIPTAFGDVSIIIYPMKNHMFFIAITKKPEVPFFGPLFDGAIVSGKLLPSLVCATCINASRAVKCLIPLYQSLYLFALNV

SEQ ID NO: 71307 - protein, 1740 aa, Homo sapiens
  Payload ID: 14122
  Gene Symbol: RALGAPA2
  Gene Name: Ral GTPase activating protein, alpha subunit 2 (catalytic)
  ENSP ID: ENSP00000400085
  MOD_RES (1)..(1): Any amino acid
XKIYPEEITPLLPAISGEKIAEDQTCFFLQILLKYMVIQAASLEWKNKENQDTGFKFLFTLFRKYYLPHLFPSFTKLTNIYKPVLDIPHLRPKPVYITTTRDNENIYSTKIPYMAARVVFIKWIVTFFLEKKYLTATQNTKNGVDVLPKIIQTVGGGAVQERAPELDGGGPTEQDKSHSNSSTLSDRRLSNSSLCSIEEEHRMVYEMVQRILLSTRGYVNFVNEVFHQAFLLPSCEIAVTRKVVQVYRKWILQDKPVFMEEPDRKDVAQEDAEKLGFSETDSKEASSESSGHKRSSSWGRTYSFTSAMSRGCVTEEENTNVKAGVQALLQVFLTNSANIFLLEPCAEVPVLLKEQVDACKAVLIIFRRMIMELTMNKKTWEQMLQILLRITEAVMQKPKDKQIKDLFAQSLAGLLFRTLMVAWIRANLCVYISRELWDDFLGVLSSLTEWEELINEWANIMDSLTAVLARTVYGVEMTNLPLDKLSEQKEKKQRGKGCVLDPQKGTTVGRSFSLSWRSHPDVTEPMRFRSATTSGAPGVEKARNIVRQKATEVEECQQSENAPAAGSGHLTVGQQQQVLRSSSTSDIPEPLCSDSSQGQKAENTQNSSSSEPQPIQENKGHVKREHEGITILVRRSSSPAELDLKDDLQQTQGKCRERQKSESTNSDTTLGCTNEAELSMGPWQTCEEDPELNTPTDVVADADARHWLQLSPTDASNLTDSSECLTDDCSIIAGGSLTGWHPDSAAVLWRRVLGILGDVNNIQSPKIHARVFCYLYELWYKLAKIRDNLAISLDNQSSPSPPVLIPPLRMFASWLFKAATLPNEYKEGKLQAYRLICAMMTRRQDVLPNSDFLVHFYLVMHLGLTSEDQDILNTIIRHCPPRFFSLGFPGFSMLVGDFITAAARVLSTDILTAPRSEAVTVLGSLVCFPNTYQEIPLLQSVPEVNEAITGTEDVKHYLINILLKNATEEPNEYARCIAVCSLGVWICEELAQCTSHPQVKEAINVIGVTLKFPNKIVAQVACDVLQLLVSYWEKLQMFETSLPRKMAEILVATVAFLLPSAEYSSVETDKKFIVSLLLCLLDWCMALPVSVLLHPVSTAVLEEQHSARAPLLDYIYRVLHCCVCGSSTYTQQSHYILTLADLSSTDYDPFLPLANVKSSEPVQYHSSAELGNLLTVEEEKKRRSLELIPLTARMVMAHLVNHLGHYPLSGGPAILHSLVSENHDNAHVEGSELSFEVFRSPNLQLFVFNDSTLISYLQTPTEGPVGGSPVGSLSDVRVIVRDISGKYSWDGKVLYGPLEGCLAPNGRNPSFLISSWHRDTFGPQKDSSQVEEGDDVLDKLLENIGHTSPECLLPSQLNLNEPSLTPCGMNYDQEKEIIEVILRQNAQEDEYIQSHNFDSAMKVTSQGQPSPVEPRGPFYFCRLLLDDLGMNSWDRRKNFHLLKKNSKLLRELKNLDSRQCRETHKIAVFYIAEGQEDKCSILSNERGSQAYEDFVAGLGWEVDLSTHCGFMGGLQRNGSTGQTAPYYATSTVEVIFHVSTRMPSDSDDSLTKKLRHLGNDEVHIVWSEHSRDYRRGIIPTAFGDVSIIIYPMKNHMFFIAITKKPEVPFFGPLFDGAIVSGKLLPSLVCATCINASRAVKCLIPLYQSFYEERALYLEAIIQNHREVMTFEDFAAQVFSPSPSYSLSGTGALASSLSADLEEPLSEEETEHPLLPLPRATKPRISRKFRCCTSALSRSSH

SEQ ID NO: 71308 - protein, 237 aa, Homo sapiens
  Payload ID: 14122
  Gene Symbol: RALGAPA2
  Gene Name: Ral GTPase activating protein, alpha subunit 2 (catalytic)
  ENSP ID: ENSP00000481660
MNSWDRRKNFHLLKKNSKLLRELKNLDSRQCRETHKIAVFYIAEGQEDKCSILSNERGSQAYEDFVAGLGWEVDLSTHCGFMGGLQRNGSTGQTAPYYATSTVEVIFHVSTRMPSDSDDSLTKKLRHLGNDEVHIVWSEHSRDYRRGIIPTAFGDVSIIIYPMKNHMFFIAITKKPEVPFFGPLFDGAIVSGKLLPSLVCATCINASRAVKCLIPLYQSFYEERALYLEAIFRTTAK

SEQ ID NO: 71309 - protein, 1494 aa, Homo sapiens
  Payload ID: 14123
  Gene Symbol: RALGAPB
  Gene Name: Ral GTPase activating protein, beta subunit (non-catalytic)
  Uniprot ID: Q86X10
  ENSP ID: ENSP00000262879
MYSEWRSLHLVIQNDQGHTSVLHSYPESVGREVANAVVRPLGQVLGTPSVAGSENLLKTDKEVKWTMEVICYGLTLPLDGETVKYCVDVYTDWIMALVLPKDSIPLPVIKEPNQYVQTILKHLQNLFVPRQEQGSSQIRLCLQVLRAIQKLARESSLMARETWEVLLLFLLQINDILLAPPTVQGGIAENLAEKLIGVLFEVWLLACTRCFPTPPYWKTAKEMVANWRHHPAVVEQWSKVICALTSRLLRFTYGPSFPAFKVPDEDASLIPPEMDNECVAQTWFRFLHMLSNPVDLSNPAIISSTPKFQEQFLNVSGMPQELNQYPCLKHLPQIFFRAMRGISCLVDAFLGISRPRSDSAPPTPVNRLSMPQSAAVSTTPPHNRRHRAVTVNKATMKTSTVSTAHASKVQHQTSSTSPLSSPNQTSSEPRPLPAPRRPKVNSILNLFGSWLFDAAFVHCKLHNGINRDSSMTAITTQASMEFRRKGSQMSTDTMVSNPMFDASEFPDNYEAGRAEACGTLCRIFCSKKTGEEILPAYLSRFYMLLIQGLQINDYVCHPVLASVILNSPPLFCCDLKGIDVVVPYFISALETILPDRELSKFKSYVNPTELRRSSINILLSLLPLPHHFGTVKSEVVLEGKFSNDDSSSYDKPITFLSLKLRLVNILIGALQTETDPNNTQMILGAMLNIVQDSALLEAIGCQMEMGGGENNLKSHSRTNSGISSASGGSTEPTTPDSERPAQALLRDYALNTDSAAGLLIRSIHLVTQRLNSQWRQDMSISLAALELLSGLAKVKVMVDSGDRKRAISSVCTYIVYQCSRPAPLHSRDLHSMIVAAFQCLCVWLTEHPDMLDEKDCLKEVLEIVELGISGSKSKNNEQEVKYKGDKEPNPASMRVKDAAEATLTCIMQLLGAFPSPSGPASPCSLVNETTLIKYSRLPTINKHSFRYFVLDNSVILAMLEQPLGNEQNDFFPSVTVLVRGMSGRLAWAQQLCLLPRGAKANQKLFVPEPRPVPKNDVGFKYSVKHRPFPEEVDKIPFVKADLSIPDLHEIVTEELEERHEKLRSGMAQQIAYEIHLEQQSEEELQKRSFPDPVTDCKPPPPAQEFQTARLFLSHFGFLSLEALKEPANSRLPPHLIALDSTIPGFFDDIGYLDLLPCRPFDTVFIFYMKPGQKTNQEILKNVESSRTVQPHFLEFLLSLGWSVDVGRHPGWTGHVSTSWSINCCDDGEGSQQEVISSEDIGASIFNGQKKVLYYADALTEIAFVVPSPVESLTDSLESNISDQDSDSNMDLMPGILKQPSLTLELFPNHTDNLNSSQRLSPSSRMRKLPQGRPVPPLGPETRVSVVWVERYDDIENFPLSELMTEISTGVETTANSSTSLRSTTLEKEVPVIFIHPLNTGLFRIKIQGATGKFNMVIPLVDGMIVSRRALGFLVRQTVINICRRKRLESDSYSPPHVRRKQKITDIVNKYRNKQLEPEFYTSLFQEVGLKNCSS

SEQ ID NO: 71310 - protein, 1494 aa, Homo sapiens; identical to SEQ ID NO: 71309
  Payload ID: 14123
  Gene Symbol: RALGAPB
  Gene Name: Ral GTPase activating protein, beta subunit (non-catalytic)
  Uniprot ID: Q86X10
  ENSP ID: ENSP00000380233

SEQ ID NO: 71311 - protein, 1491 aa, Homo sapiens
  Payload ID: 14123
  Gene Symbol: RALGAPB
  Gene Name: Ral GTPase activating protein, beta subunit (non-catalytic)
  Uniprot ID: Q86X10
  ENSP ID: ENSP00000380235
MYSEWRSLHLVIQNDQGHTSVLHSYPESVGREVANAVVRPLGQVLGTPSVAGSENLLKTDKEVKWTMEVICYGLTLPLDGETVKYCVDVYTDWIMALVLPKDSIPLPVIKEPNQYVQTILKHLQNLFVPRQEQGSSQIRLCLQVLRAIQKLARESSLMARETWEVLLLFLLQINDILLAPPTVQGGIAENLAEKLIGVLFEVWLLACTRCFPTPPYWKTAKEMVANWRHHPAVVEQWSKVICALTSRLLRFTYGPSFPAFKVPDEDASLIPPEMDNECVAQTWFRFLHMLSNPVDLSNPAIISSTPKFQEQFLNVSGMPQELNQYPCLKHLPQIFFRAMRGISCLVDAFLGISRPRSDSAPPTPVNRLSMPQSAAVSTTPPHNRRHRAVTVNKATMKTSTVSTAHASKVQHQTSSTSPLSSPNQTSSEPRPLPAPRRPKVNSILNLFGSWLFDAAFVHCKLHNGINRDSSMTAITTQASMEFRRKGSQMSTDTMVSNPMFDASEFPDNYEAGRAEACGTLCRIFCSKKTGEEILPAYLSRFYMLLIQGLQINDYVCHPVLASVILNSPPLFCCDLKGIDVVVPYFISALETILPDRELSKFKSYVNPTELRRSSINILLSLLPLPHHFGTVKSEVVLEGKFSNDDSSSYDKPITFLSLKLRLVNILIGALQTETDPNNTQMILGAMLNIVQDSALLEAIGCQMEMGGGENNLKSHSRTNSGISSASGGSTEPTTPDSERPAQALLRDYDSAAGLLIRSIHLVTQRLNSQWRQDMSISLAALELLSGLAKVKVMVDSGDRKRAISSVCTYIVYQCSRPAPLHSRDLHSMIVAAFQCLCVWLTEHPDMLDEKDCLKEVLEIVELGISGSKSKNNEQEVKYKGDKEPNPASMRVKDAAEATLTCIMQLLGAFPSPSGPASPCSLVNETTLIKYSRLPTINKHSFRYFVLDNSVILAMLEQPLGNEQNDFFPSVTVLVRGMSGRLAWAQQLCLLPRGAKANQKLFVPEPRPVPKNDVGFKYSVKHRPFPEEVDKIPFVKADLSIPDLHEIVTEELEERHEKLRSGMAQQIAYEIHLEQQSEEELQKRSFPDPVTDCKPPPPAQEFQTARLFLSHFGFLSLEALKEPANSRLPPHLIALDSTIPGFFDDIGYLDLLPCRPFDTVFIFYMKPGQKTNQEILKNVESSRTVQPHFLEFLLSLGWSVDVGRHPGWTGHVSTSWSINCCDDGEGSQQEEVISSEDIGASIFNGQKKVLYYADALTEIAFVVPSPVESLTDSLESNISDQDSDSNMDLMPGILKQPSLTLELFPNHTDNLNSSQRLSPSSRMRKLPQGRPVPPLGPETRVSVVWVERYDDIENFPLSELMTEISTGVETTANSSTSLRSTTLEKEVPVIFIHPLNTGLFRIKIQGATGKFNMVIPLVDGMIVSRRALGFLVRQTVINICRRKRLESDSYSPPHVRRKQKITDIVNKYRNKQLEPEFYTSLFQEVGLKNCSS

SEQ ID NO: 71312 - protein, 1323 aa, Homo sapiens
  Payload ID: 14123
  Gene Symbol: RALGAPB
  Gene Name: Ral GTPase activating protein, beta subunit (non-catalytic)
  ENSP ID: ENSP00000416646
INDILLAPPTVQGGIAENLAEKLIGVLFEVWLLACTRCFPTPPYWKTAKEMVANWRHHPAVVEQWSKVICALTSRLLRFTYGPSFPAFKVPDEDASLIPPEMDNECVAQTWFRFLHMLSNPVDLSNPAIISSTPKFQEQFLNVSGMPQELNQYPCLKHLPQIFFRAMRGISCLVDAFLGISRPRSDSAPPTPVNRLSMPQSAAVSTTPPHNRRHRAVTVNKATMKTSTVSTAHASKVQHQTSSTSPLSSPNQTSSEPRPLPAPRRPKVNSILNLFGSWLFDAAFVHCKLHNGINRDSSMTAITTQASMEFRRKGSQMSTDTMVSNPMFDASEFPDNYEAGRAEACGTLCRIFCSKKTGEEILPAYLSRFYMLLIQGLQINDYVCHPVLASVILNSPPLFCCDLKGIDVVVPYFISALETILPDRELSKFKSYVNPTELRRSSINILLSLLPLPHHFGTVKSEVVLEGKFSNDDSSSYDKPITFLSLKLRLVNILIGALQTETDPNNTQMILGAMLNIVQDSALLEAIGCQMEMGGGENNLKSHSRTNSGISSASGGSTEPTTPDSERPAQALLRDYALNTDSAAGLLIRSIHLVTQRLNSQWRQDMSISLAALELLSGLAKVKVMVDSGDRKRAISSVCTYIVYQCSRPAPLHSRDLHSMIVAAFQCLCVWLTEHPDMLDEKDCLKEVLEIVELGISGSKSKNNEQEVKYKGDKEPNPASMRVKDAAEATLTCIMQLLGAFPSPSGPASPCSLVNETTLIKYSRLPTINKHSFRYFVLDNSVILAMLEQPLGNEQNDFFPSVTVLVRGMSGRLAWAQQLCLLPRGAKANQKLFVPEPRPVPKNDVGFKYSVKHRPFPEEVDKIPFVKADLSIPDLHEIVTEELEERHEKLRSGMAQQIAYEIHLEQQSEEELQKRSFPDPVTDCKPPPPAQEFQTARLFLSHFGFLSLEALKEPANSRLPPHLIALDSTIPGFFDDIGYLDLLPCRPFDTVFIFYMKPGQKTNQEILKNVESSRTVQPHFLEFLLSLGWSVDVGRHPGWTGHVSTSWSINCCDDGEGSQQEEVISSEDIGASIFNGQKKVLYYADALTEIAFVVPSPVESLTDSLESNISDQDSDSNMDLMPGILKQPSLTLELFPNHTDNLNSSQRLSPSSRMRKLPQGRPVPPLGPETRVSVVWVERYDDIENFPLSELMTEISTGVETTANSSTSLRSTTLEKEVPVIFIHPLNTGLFRIKIQGATGKFNMVIPLVDGMIVSRRALGFLVRQTVINICRRKRLESDSYSPPHVRRKQKITDIVNKYRNKQLEPEFYTSLFQEVGLKNCSS

SEQ ID NO: 71313 - protein, 866 aa, Homo sapiens
  Payload ID: 14123
  Gene Symbol: RALGAPB
  Gene Name: Ral GTPase activating protein, beta subunit (non-catalytic)
  ENSP ID: ENSP00000487816
  MOD_RES (1)..(1): Any amino acid
XEVVLEGKFSNDDSSSYDKPITFLSLKLRLVNILIGALQTETDPNNTQMILGAMLNIVQDSALLEAIGCQMEMGGGENNLKSHSRTNSGISSASGGSTEPTTPDSERPAQALLRDYGSTALNTDSAAGLLIRSIHLVTQRLNSQWRQDMSISLAALELLSGLAKVKVMVDSGDRKRAISSVCTYIVYQCSRPAPLHSRDLHSMIVAAFQCLCVWLTEHPDMLDEKDCLKEVLEIVELGISGSKSKNNEQEVKYKGDKEPNPASMRVKDAAEATLTCIMQLLGAFPSPSGPASPCSLVNETTLIKYSRLPTINKHSFRYFVLDNSVILAMLEQPLGNEQNDFFPSVTVLVRGMSGRLAWAQQLCLLPRGAKANQKLFVPEPRPVPKNDVGFKYSVKHRPFPEEVDKIPFVKADLSIPDLHEIVTEELEERHEKLRSGMAQQIAYEIHLEQQSEEELQKRSFPDPVTDCKPPPPAQEFQTARLFLSHFGFLSLEALKEPANSRLPPHLIALDSTIPGFFDDIGYLDLLPCRPFDTVFIFYMKPGQKTNQEILKNVESSRTVQPHFLEFLLSLGWSVDVGRHPGWTGHVSTSWSINCCDDGEGSQQEEVISSEDIGASIFNGQKKVLYYADALTEIAFVVPSPVESLTDSLESNISDQDSDSNMDLMPGILKQPSLTLELFPNHTDNLNSSQRLSPSSRMRKLPQGRPVPPLGPETRVSVVWVERYDDIENFPLSELMTEISTGVETTANSSTSLRSTTLEKEVPVIFIHPLNTGLFRIKIQGATGKFNMVIPLVDGMIVSRRALGFLVRQTVINICRRKRLESDSYSPPHVRRKQKITDIVNKYRNKQLEPEFYTSLFQEVGLKNCSS

SEQ ID NO: 71314 - protein, 902 aa, Homo sapiens
  Payload ID: 14124
  Gene Symbol: RALGDS
  Gene Name: ral guanine nucleotide dissociation stimulator
  Uniprot ID: Q12967
  ENSP ID: ENSP00000361117
MVQRMWAEAAGPAGGAEPLFPGSRRSRSVWDAVRLEVGVPDSCPVVLHSFTQLDPDLPRPESSTQEIGEELINGVIYSISLRKVQLHHGGNKGQRWLGYENESALNLYETCKVRTVKAGTLEKLVEHLVPAFQGSDLSYVTIFLCTYRAFTTTQQVLDLLFKRYGCILPYSDEDGGPQDQLKNAISSILGTWLDQYSEDFCQPPDFPCLKQLVAYVQLNMPGSDLERRAHLLLAQLEHSEPIEAEPEALSPVPALKPTPELELALTPARAPSPVPAPAPEPEPAPTPAPGSELEVAPAPAPELQQAPEPAVGLESAPAPALELEPAPEQDPAPSQTLELEPAPAPVPSLQPSWPSPVVAENGLSEEKPHLLVFPPDLVAEQFTLMDAELFKKVVPYHCLGSIWSQRDKKGKEHLAPTIRATVTQFNSVANCVITTCLGNRSTKAPDRARVVEHWIEVARECRILKNFSSLYAILSALQSNSIHRLKKTWEDVSRDSFRIFQKLSEIFSDENNYSLSRELLIKEGTSKFATLEMNPKRAQKRPKETGIIQGTVPYLGTFLTDLVMLDTAMKDYLYGRLINFEKRRKEFEVIAQIKLLQSACNNYSIAPDEQFGAWFRAVERLSETESYNLSCELEPPSESASNTLRTKKNTAIVKRWSDRQAPSTELSTSGSSHSKSCDQLRCGPYLSSGDIADALSVHSAGSSSSDVEEINISFVPESPDGQEKKFWESASQSSPETSGISSASSSTSSSSASTTPVAATRTHKRSVSGLCNSSSALPLYNQQVGDCCIIRVSLDVDNGNMYKSILVTSQDKAPAVIRKAMDKHNLEEEEPEDYELLQILSDDRKLKIPENANVFYAMNSTANYDFVLKKRTFTKGVKVKHGASSTLPRMKQKGLKIAKGIF

SEQ ID NO: 71315 - protein, 914 aa, Homo sapiens
  Payload ID: 14124
  Gene Symbol: RALGDS
  Gene Name: ral guanine nucleotide dissociation stimulator
  Uniprot ID: Q12967
  ENSP ID: ENSP00000361120
MVQRMWAEAAGPAGGAEPLFPGSRRSRSVWDAVRLEVGVPDSCPVVLHSFTQLDPDLPRPESSTQEIGEELINGVIYSISLRKVQLHHGGNKGQRWLGYENESALNLYETCKVRTVKAGTLEKLVEHLVPAFQGSDLSYVTIFLCTYRAFTTTQQVLDLLFKRYGRCDALTASSRYGCILPYSDEDGGPQDQLKNAISSILGTWLDQYSEDFCQPPDFPCLKQLVAYVQLNMPGSDLERRAHLLLAQLEHSEPIEAEPEALSPVPALKPTPELELALTPARAPSPVPAPAPEPEPAPTPAPGSELEVAPAPAPELQQAPEPAVGLESAPAPALELEPAPEQDPAPSQTLELEPAPAPVPSLQPSWPSPVVAENGLSEEKPHLLVFPPDLVAEQFTLMDAELFKKVVPYHCLGSIWSQRDKKGKEHLAPTIRATVTQFNSVANCVITTCLGNRSTKAPDRARVVEHWIEVARECRILKNFSSLYAILSALQSNSIHRLKKTWEDVSRDSFRIFQKLSEIFSDENNYSLSRELLIKEGTSKFATLEMNPKRAQKRPKETGIIQGTVPYLGTFLTDLVMLDTAMKDYLYGRLINFEKRRKEFEVIAQIKLLQSACNNYSIAPDEQFGAWFRAVERLSETESYNLSCELEPPSESASNTLRTKKNTAIVKRWSDRQAPSTELSTSGSSHSKSCDQLRCGPYLSSGDIADALSVHSAGSSSSDVEEINISFVPESPDGQEKKFWESASQSSPETSGISSASSSTSSSSASTTPVAATRTHKRSVSGLCNSSSALPLYNQQVGDCCIIRVSLDVDNGNMYKSILVTSQDKAPAVIRKAMDKHNLEEEEPEDYELLQILSDDRKLKIPENANVFYAMNSTANYDFVLKKRTFTKGVKVKHGASSTLPRMKQKGLKIAKGIF

SEQ ID NO: 71316 - protein, 885 aa, Homo sapiens
  Payload ID: 14124
  Gene Symbol: RALGDS
  Gene Name: ral guanine nucleotide dissociation stimulator
  Uniprot ID: Q12967
  ENSP ID: ENSP00000361132
MCLWGHSTAPAHTLSSPPLLFCSLPCALHLQPGTGHPPGQVPRKSSTQEIGEELINGVIYSISLRKVQLHHGGNKGQRWLGYENESALNLYETCKVRTVKAGTLEKLVEHLVPAFQGSDLSYVTIFLCTYRAFTTTQQVLDLLFKRYGCILPYSDEDGGPQDQLKNAISSILGTWLDQYSEDFCQPPDFPCLKQLVAYVQLNMPGSDLERRAHLLLAQLEHSEPIEAEPEALSPVPALKPTPELELALTPARAPSPVPAPAPEPEPAPTPAPGSELEVAPAPAPELQQAPEPAVGLESAPAPALELEPAPEQDPAPSQTLELEPAPAPVPSLQPSWPSPVVAENGLSEEKPHLLVFPPDLVAEQFTLMDAELFKKVVPYHCLGSIWSQRDKKGKEHLAPTIRATVTQFNSVANCVITTCLGNRSTKAPDRARVVEHWIEVARECRILKNFSSLYAILSALQSNSIHRLKKTWEDVSRDSFRIFQKLSEIFSDENNYSLSRELLIKEGTSKFATLEMNPKRAQKRPKETGIIQGTVPYLGTFLTDLVMLDTAMKDYLYGRLINFEKRRKEFEVIAQIKLLQSACNNYSIAPDEQFGAWFRAVERLSETESYNLSCELEPPSESASNTLRTKKNTAIVKRWSDRQAPSTELSTSGSSHSKSCDQLRCGPYLSSGDIADALSVHSAGSSSSDVEEINISFVPESPDGQEKKFWESASQSSPETSGISSASSSTSSSSASTTPVAATRTHKRSVSGLCNSSSALPLYNQQVGDCCIIRVSLDVDNGNMYKSILVTSQDKAPAVIRKAMDKHNLEEEEPEDYELLQILSDDRKLKIPENANVFYAMNSTANYDFVLKKRTFTKGVKVKHGASSTLPRMKQKGLKIAKGIF

SEQ ID NO: 71317 - protein, 913 aa, Homo sapiens
  Payload ID: 14124
  Gene Symbol: RALGDS
  Gene Name: ral guanine nucleotide dissociation stimulator
  Uniprot ID: Q12967
  ENSP ID: ENSP00000376864
MAREAGQVCARPAVPRGRKGSVFFACVSVVTARRRAVARRAALQSPTPWLAPLPAPATTESSTQEIGEELINGVIYSISLRKVQLHHGGNKGQRWLGYENESALNLYETCKVRTVKAGTLEKLVEHLVPAFQGSDLSYVTIFLCTYRAFTTTQQVLDLLFKRYGRCDALTASSRYGCILPYSDEDGGPQDQLKNAISSILGTWLDQYSEDFCQPPDFPCLKQLVAYVQLNMPGSDLERRAHLLLAQLEHSEPIEAEPEALSPVPALKPTPELELALTPARAPSPVPAPAPEPEPAPTPAPGSELEVAPAPAPELQQAPEPAVGLESAPAPALELEPAPEQDPAPSQTLELEPAPAPVPSLQPSWPSPVVAENGLSEEKPHLLVFPPDLVAEQFTLMDAELFKKVVPYHCLGSIWSQRDKKGKEHLAPTIRATVTQFNSVANCVITTCLGNRSTKAPDRARVVEHWIEVARECRILKNFSSLYAILSALQSNSIHRLKKTWEDVSRDSFRIFQKLSEIFSDENNYSLSRELLIKEGTSKFATLEMNPKRAQKRPKETGIIQGTVPYLGTFLTDLVMLDTAMKDYLYGRLINFEKRRKEFEVIAQIKLLQSACNNYSIAPDEQFGAWFRAVERLSETESYNLSCELEPPSESASNTLRTKKNTAIVKRWSDRQAPSTELSTSGSSHSKSCDQLRCGPYLSSGDIADALSVHSAGSSSSDVEEINISFVPESPDGQEKKFWESASQSSPETSGISSASSSTSSSSASTTPVAATRTHKRSVSGLCNSSSALPLYNQQVGDCCIIRVSLDVDNGNMYKSILVTSQDKAPAVIRKAMDKHNLEEEEPEDYELLQILSDDRKLKIPENANVFYAMNSTANYDFVLKKRTFTKGVKVKHGASSTLPRMKQKGLKIAKGIF

SEQ ID NO: 71318 - protein, 859 aa, Homo sapiens
  Payload ID: 14124
  Gene Symbol: RALGDS
  Gene Name: ral guanine nucleotide dissociation stimulator
  Uniprot ID: Q12967
  ENSP ID: ENSP00000376867
MMVDCQSSTQEIGEELINGVIYSISLRKVQLHHGGNKGQRWLGYENESALNLYETCKVRTVKAGTLEKLVEHLVPAFQGSDLSYVTIFLCTYRAFTTTQQVLDLLFKRYGRCDALTASSRYGCILPYSDEDGGPQDQLKNAISSILGTWLDQYSEDFCQPPDFPCLKQLVAYVQLNMPGSDLERRAHLLLAQLEHSEPIEAEPEALSPVPALKPTPELELALTPARAPSPVPAPAPEPEPAPTPAPGSELEVAPAPAPELQQAPEPAVGLESAPAPALELEPAPEQDPAPSQTLELEPAPAPVPSLQPSWPSPVVAENGLSEEKPHLLVFPPDLVAEQFTLMDAELFKKVVPYHCLGSIWSQRDKKGKEHLAPTIRATVTQFNSVANCVITTCLGNRSTKAPDRARVVEHWIEVARECRILKNFSSLYAILSALQSNSIHRLKKTWEDVSRDSFRIFQKLSEIFSDENNYSLSRELLIKEGTSKFATLEMNPKRAQKRPKETGIIQGTVPYLGTFLTDLVMLDTAMKDYLYGRLINFEKRRKEFEVIAQIKLLQSACNNYSIAPDEQFGAWFRAVERLSETESYNLSCELEPPSESASNTLRTKKNTAIVKRWSDRQAPSTELSTSGSSHSKSCDQLRCGPYLSSGDIADALSVHSAGSSSSDVEEINISFVPESPDGQEKKFWESASQSSPETSGISSASSSTSSSSASTTPVAATRTHKRSVSGLCNSSSALPLYNQQVGDCCIIRVSLDVDNGNMYKSILVTSQDKAPAVIRKAMDKHNLEEEEPEDYELLQILSDDRKLKIPENANVFYAMNSTANYDFVLKKRTFTKGVKVKHGASSTLPRMKQKGLKIAKGIF

SEQ ID NO: 71319 - protein, 308 aa, Homo sapiens
  Payload ID: 14124
  Gene Symbol: RALGDS
  Gene Name: ral guanine nucleotide dissociation stimulator
  ENSP ID: ENSP00000391814
VVAENGLSEEKPHLLVFPPDLVAEQFTLMDAECRILKNFSSLYAILSALQSNSIHRLKKTWEDVSRDSFRIFQKLSEIFSDENNYSLSRELLIKEGTSKFATLEMNPKRAQKRPKETGIIQGTVPYLGTFLTDLVMLDTAMKDYLYGRLINFEKRRKEFEVIAQIKLLQSACNNYSIAPDEQFGAWFRAVERLSETESYNLSCELEPPSESASNTLRTKKNTAIVKRWSDRQAPSTELSTSGSSHSKSCDQLRCGPYLSSGDIADALSVHSAGSSSSDVEEINISFVPESPDGQEKKFWESASQSSPE

SEQ ID NO: 71320 - protein, 824 aa, Homo sapiens
  Payload ID: 14124
  Gene Symbol: RALGDS
  Gene Name: ral guanine nucleotide dissociation stimulator
  ENSP ID: ENSP00000488067
MVQRMWAEAAGPAGGAEPLFPGSRRSRSVWDAVRLEVGVPDSCPVVLHSFTQLDPDLPRPESSTQEIGEELINGVIYSISLRKVQLHHGGNKGQRWLGYENESALNLYETCKVRTVKAGTLEKLVEHLVPAFQGSDLSYVTIFLCTYRAFTTTQQVLDLLFKRYGCILPYSDEDGGPQDQLKNAISSILGTWLDQYSEDFCQPPDFPCLKQLVAYVQLNMPGSDLERRAHLLLAQLEHSEPIEAEPEALSPVPALKPTPELELALTPARAPSPVPAPAPEPEPAPTPAPGSELEVAPAPAPELQQAPEPAVGLESAPAPALELEPAPEQDPAPSQTLELEPAPAPVPSLQPSWPSPVVAENGLSEEKPHLLVFPPDLVAEQFTLMDAELFKKVVPYHCLGSIWSQRDKKGKEHLAPTIRATVTQFNSVANCVITTCLGNRSTKAPDRARVVEHWIEVARECRILKNFSSLYAILSALQSNSIHRLKKTWEDVSRDSFRIFQKLSEIFSDENNYSLSRELLIKEGTSKFATLEMNPKRAQKRPKETGIIQGTVPYLGTFLTDLVMLDTAMKDYLYGRLINFEKRRKEFEVIAQIKLLQSACNNYSIAPDEQFGAWFRAVERLSETESYNLSCELEPPSESASNTLRTKKNTAIVKRWSDRQAPSTELSTSGSSHSKSCDQLRCGPYLSSGDIADALSVHSAGSSSSDVEEINISFVPESPDGQEKKFWESASQSSPETSGISSASSSTSSSSASTTPVAATRTHKRSVSGLCNSSSALPLYNQQVGDCCIIRVSLDVDNGNMYKSILVSRRGWPGCLPPLAANAP

SEQ ID NO: 71321 - protein, 803 aa, Homo sapiens
  Payload ID: 14125
  Gene Symbol: RGL1
  Gene Name: ral guanine nucleotide dissociation stimulator-like 1
  Uniprot ID: Q9NZL6
  ENSP ID: ENSP00000303192
MEVKPVGEPTQEVSKFKLSTKVESTGHWLVEDHVRIWEVLKTEESSIQDWGEEVEEGAVYHVTLKRVQIQQAANKGARWLGVEGDQLPPGHTVSQYETCKIRTIKAGTLEKLVENLLTAFGDNDFTYISIFLSTYRGFASTKEVLELLLDRYGNLTSPNCEEDGSQSSSESKMVIRNAIASILRAWLDQCAEDFREPPHFPCLQKLLDYLTRMMPGSDPERRAQNLLEQFQKQEVETDNGLPNTISFSLEEEEELEGGESAEFTCFSEDLVAEQLTYMDAQLFKKVVPHHCLGCIWSRRDKKENKHLAPTIRATISQFNTLTKCVVSTILGGKELKTQQRAKIIEKWINIAHECRLLKNFSSLRAIVSALQSNSIYRLKKTWAAVPRDRMLMFEELSDIFSDHNNHLTSRELLMKEGTSKFANLDSSVKENQKRTQRRLQLQKDMGVMQGTVPYLGTFLTDLTMLDTALQDYIEGGLINFEKRRREFEVIAQIKLLQSACNSYCMTPDQKFIQWFQRQQLLTEEESYALSCEIEAAADASTTSPKPRKSMVKRLSLLFLGSDMITSPTPTKEQPKSTASGSSGESMDSVSVSSCESNHSEAEEGSITPMDTPDEPQKKLSESSSSCSSIHSMDTNSSGMSSLINPLSSPPSCNNNPKIHKRSVSVTSITSTVLPPVYNQQNEDTCIIRISVEDNNGNMYKSIMLTSQDKTPAVIQRAMLKHNLDSDPAEEYELVQVISEDKELVIPDSANVFYAMNSQVNFDFILRKKNSMEEQVKLRSRTSLTLPRTAKRGCWSNRHSKITL

SEQ ID NO: 71322 - protein, 768 aa, Homo sapiens
  Payload ID: 14125
  Gene Symbol: RGL1
  Gene Name: ral guanine nucleotide dissociation stimulator-like 1
  Uniprot ID: Q9NZL6
  ENSP ID: ENSP00000354097
MKLLWQAKMSSIQDWGEEVEEGAVYHVTLKRVQIQQAANKGARWLGVEGDQLPPGHTVSQYETCKIRTIKAGTLEKLVENLLTAFGDNDFTYISIFLSTYRGFASTKEVLELLLDRYGNLTSPNCEEDGSQSSSESKMVIRNAIASILRAWLDQCAEDFREPPHFPCLQKLLDYLTRMMPGSDPERRAQNLLEQFQKQEVETDNGLPNTISFSLEEEEELEGGESAEFTCFSEDLVAEQLTYMDAQLFKKVVPHHCLGCIWSRRDKKENKHLAPTIRATISQFNTLTKCVVSTILGGKELKTQQRAKIIEKWINIAHECRLLKNFSSLRAIVSALQSNSIYRLKKTWAAVPRDRMLMFEELSDIFSDHNNHLTSRELLMKEGTSKFANLDSSVKENQKRTQRRLQLQKDMGVMQGTVPYLGTFLTDLTMLDTALQDYIEGGLINFEKRRREFEVIAQIKLLQSACNSYCMTPDQKFIQWFQRQQLLTEEESYALSCEIEAAADASTTSPKPRKSMVKRLSLLFLGSDMITSPTPTKEQPKSTASGSSGESMDSVSVSSCESNHSEAEEGSITPMDTPDEPQKKLSESSSSCSSIHSMDTNSSGMSSLINPLSSPPSCNNNPKIHKRSVSVTSITSTVLPPVYNQQNEDTCIIRISVEDNNGNMYKSIMLTSQDKTPAVIQRAMLKHNLDSDPAEEYELVQVISEDKELVIPDSANVFYAMNSQVNFDFILRKKNSMEEQVKLRSRTSLTLPRTAKRGCWSNRHSKITL

SEQ ID NO: 71323 - protein, 777 aa, Homo sapiens
  Payload ID: 14126
  Gene Symbol: RGL2
  Gene Name: ral guanine nucleotide dissociation stimulator-like 2
  Uniprot ID: O15211
  ENSP ID: ENSP00000372691
MLPRPLRLLLDTSPPGGVVLSSFRSRDPEEGGGPGGLVVGGGQEEEEEEEEEAPVSVWDEEEDGAVFTVTSRQYRPLDPLVPMPPPRSSRRLRAGTLEALVRHLLDTRTSGTDVSFMSAFLATHRAFTSTPALLGLMADRLEALESHPTDELERTTEVAISVLSTWLASHPEDFGSEAKGQLDRLESFLLQTGYAAGKGVGGGSADLIRNLRSRVDPQAPDLPKPLALPGDPPADPTDVLVFLADHLAEQLTLLDAELFLNLIPSQCLGGLWGHRDRPGHSHLCPSVRATVTQFNKVAGAVVSSVLGATSTGEGPGEVTIRPLRPPQRARLLEKWIRVAEECRLLRNFSSVYAVVSALQSSPIHRLRAAWGEATRDSLRVFSSLCQIFSEEDNYSQSRELLVQEVKLQSPLEPHSKKAPRSGSRGGGVVPYLGTFLKDLVMLDAASKDELENGYINFDKRRKEFAVLSELRRLQNECRGYNLQPDHDIQRWLQGLRPLTEAQSHRVSCEVEPPGSSDPPAPRVLRPTLVISQWTEVLGSVGVPTPLVSCDRPSTGGDEAPTTPAPLLTRLAQHMKWPSVSSLDSALESSPSLHSPADPSHLSPPASSPRPSRGHRRSASCGSPLSGGAEEASGGTGYGGEGSGPGASDCRIIRVQMELGEDGSVYKSILVTSQDKAPSVISRVLKKNNRDSAVASEYELVQLLPGERELTIPASANVFYAMDGASHDFLLRQRRRSSTATPGVTSGPSASGTPPSEGGGGSFPRIKATGRKIARALF

SEQ ID NO: 71324 - protein, 146 aa, Homo sapiens
  Payload ID: 14126
  Gene Symbol: RGL2
  Gene Name: ral guanine nucleotide dissociation stimulator-like 2
  ENSP ID: ENSP00000387453
MLPRPLRLLLDTSPPGGVVLSSFRSRDPEEGGGPGGLVVGGGQEEEEEEEEEAPVSVWDEEEDGAVFTVTSRQYRPLDPLVPMPPPRSSRRLRAGTLEALVRHLLDTRTSGTDVSFMSAFLATHRAFTSTPALLGLMADRLEALES

SEQ ID NO: 71325 - protein, 777 aa, Homo sapiens; identical to SEQ ID NO: 71323
  Payload ID: 14126
  Gene Symbol: RGL2
  Gene Name: ral guanine nucleotide dissociation stimulator-like 2
  Uniprot ID: O15211
  ENSP ID: ENSP00000390098

SEQ ID NO: 71326 - protein, 146 aa, Homo sapiens; identical to SEQ ID NO: 71324
  Payload ID: 14126
  Gene Symbol: RGL2
  Gene Name: ral guanine nucleotide dissociation stimulator-like 2
  ENSP ID: ENSP00000392918

SEQ ID NO: 71327 - protein, 146 aa, Homo sapiens; identical to SEQ ID NO: 71324
  Payload ID: 14126
  Gene Symbol: RGL2
  Gene Name: ral guanine nucleotide dissociation stimulator-like 2
  ENSP ID: ENSP00000397558

SEQ ID NO: 71328 - protein, 146 aa, Homo sapiens; identical to SEQ ID NO: 71324
  Payload ID: 14126
  Gene Symbol: RGL2
  Gene Name: ral guanine nucleotide dissociation stimulator-like 2
  ENSP ID: ENSP00000398125

SEQ ID NO: 71329 - protein, 777 aa, Homo sapiens; identical to SEQ ID NO: 71323
  Payload ID: 14126
  Gene Symbol: RGL2
  Gene Name: ral guanine nucleotide dissociation stimulator-like 2
  Uniprot ID: O15211
  ENSP ID: ENSP00000407088

SEQ ID NO: 71330 - protein, 777 aa, Homo sapiens; identical to SEQ ID NO: 71323
  Payload ID: 14126
  Gene Symbol: RGL2
  Gene Name: ral guanine nucleotide dissociation stimulator-like 2
  Uniprot ID: O15211
  ENSP ID: ENSP00000412152

SEQ ID NO: 71331 - protein, 146 aa, Homo sapiens; identical to SEQ ID NO: 71324
  Payload ID: 14126
  Gene Symbol: RGL2
  Gene Name: ral guanine nucleotide dissociation stimulator-like 2
  ENSP ID: ENSP00000412625

SEQ ID NO: 71332 - protein, 777 aa, Homo sapiens; identical to SEQ ID NO: 71323
  Payload ID: 14126
  Gene Symbol: RGL2
  Gene Name: ral guanine nucleotide dissociation stimulator-like 2
  Uniprot ID: O15211
  ENSP ID: ENSP00000420211

SEQ ID NO: 71333 - protein, 710 aa, Homo sapiens
  Payload ID: 14127
  Gene Symbol: RGL3
  Gene Name: ral guanine nucleotide dissociation stimulator-like 3
  ENSP ID: ENSP00000369823
MERTAGKELALAPLQDWGEETEDGAVYSVSLRRQRSQRRSPAEGPGGSQAPSPIANTFLHYRTSKVRVLRAARLERLVGELVFGDREQDPSFMPAFLATYRTFVPTACLLGFLLPPMPPPPPPGVEIKKTAVQDLSFNKNLRAVVSVLGSWLQDHPQDFRDHPAHSDLGSVRTFLGWAAPGSAEAQKAEKLLEDFLEEAEREQEEEPPQVWTGPPRVAQTSDPDSSEACAEEEEGLMPQGPQLLDFSVDEVAEQLTLIDLELFSKVRLYECLGSVWSQRDRPGAAGASPTVRATVAQFNTVTGCVLGSVLGAPGLAAPQRAQRLEKWIRIAQRCRELRNFSSLRAILSALQSNPIYRLKRSWGAVSREPLSTFRKLSQIFSDENNHLSSREILFQEEATEGSQEEDNTPGSLPSKPPPGPVPYLGTFLTDLVMLDTALPDMLEGDLINFEKRRKEWEILARIQQLQRRCQSYTLSPHPPILAALHAQNQLTEEQSYRLSRVIEPPAASCPSSPRIRRRISLTKRLSAKLAREKSSSPSGSPGDPSSPTSSVSPGSPPSSPRSRDAPAGSPPASPGPQGPSTKLPLSLDLPSPRPFALPLGSPRIPLPAQQSSEARVIRVSIDNDHGNLYRSILLTSQDKAPSVVRRALQKHNVPQPWACDYQLFQVLPGDRVLLIPDNANVFYAMSPVAPRDFMLRRKEGTRNTLSVSPS

SEQ ID NO: 71334 - protein, 716 aa, Homo sapiens
  Payload ID: 14127
  Gene Symbol: RGL3
  Gene Name: ral guanine nucleotide dissociation stimulator-like 3
  Uniprot ID: Q3MIN7
  ENSP ID: ENSP00000377075
MERTAGKELALAPLQDWGEETEDGAVYSVSLRRQRSQRRSPAEGPGGSQAPSPIANTFLHYRTSKVRVLRAARLERLVGELVFGDREQDPSFMPAFLATYRTFVPTACLLGFLLPPMPPPPPPGVEIKKTAVQDLSFNKNLRAVVSVLGSWLQDHPQDFRDHPAHSDLGSVRTFLGWAAPGSAEAQKAEKLLEDFLEEAEREQEEEPPQVWTGPPRVAQTSDPDSSEACAEEEEGLMPQGPQLLDFSVDEVAEQLTLIDLELFSKVRLYECLGSVWSQRDRPGAAGASPTVRATVAQFNTVTGCVLGSVLGAPGLAAPQRAQRLEKWIRIAQRCRELRNFSSLRAILSALQSNPIYRLKRSWGAVSREPLSTFRKLSQIFSDENNHLSSREILFQEEATEGSQEEDNTPGSLPSKPPPGPVPYLGTFLTDLVMLDTALPDMLEGDLINFEKRRKEWEILARIQQLQRRCQSYTLSPHPPILAALHAQNQLTEEQSYRLSRVIEPPAASCPSSPRIRRRISLTKRLSAKLAREKSSSPSGSPGDPSSPTSSLCISPSVSPGSPPSSPRSRDAPAGSPPASPGPQGPSTKLPLSLDLPSPRPFALPLGSPRIPLPAQQSSEARVIRVSIDNDHGNLYRSILLTSQDKAPSVVRRALQKHNVPQPWACDYQLFQVLPGDRVLLIPDNANVFYAMSPVAPRDFMLRRKEGTRNTLSVSPS

SEQ ID NO: 71335 - protein, 250 aa, Homo sapiens
  Payload ID: 14127
  Gene Symbol: RGL3
  Gene Name: ral guanine nucleotide dissociation stimulator-like 3
  ENSP ID: ENSP00000454678
  MOD_RES (1)..(1): Any amino acid
XRTAGKELALAPLQDWGEETEDGAVYSVSLRRQRSQRRSPAEGPGGSQAPSPIANTFLHYRTSKVRVLRAARLERLVGELVFGDREQDPSFMPAFLATYRTFVPTACLLGFLLPPMPPPPPPGVEIKKTAVQDLSFNKNLRAVVSVLGSWLQDHPQDFRDHPAHSDLGSVRTFLGWAAPGSAEAQKAEKLLEDFLEEAEREQEEEPPQDLPELPKLLTQTLQRPARRKRKGSCLKVPSSWTSAWTRWPSS

SEQ ID NO: 71336 - protein, 181 aa, Homo sapiens
  Payload ID: 14127
  Gene Symbol: RGL3
  Gene Name: ral guanine nucleotide dissociation stimulator-like 3
  ENSP ID: ENSP00000455922
MERTAGKELALAPLQDWGEETEDGAVYSVSLRRQRSQRRSPAEGPGGSQAPSPIANTFLHYRTSKVRVLRAARLERLVGELVFGDREQDPSFMPAFLATYRTFVPTACLLGFLLPPMPPPPPPGDQEDSGTRSELQQEPEGCGVSAGLLAAGPPSGFPRPPCPFGPGQCPNLSGLGGPREC

SEQ ID NO: 71337 - protein, 167 aa, Homo sapiens
  Payload ID: 14127
  Gene Symbol: RGL3
  Gene Name: ral guanine nucleotide dissociation stimulator-like 3
  ENSP ID: ENSP00000456429
MERTAGKELALAPLQDWGEETEDGAVYSVSLRRQRSQRRSPAEGPGGSQAPSPIANTFLHYRTSKVRVLRAARLERLVGELVFGDREQDPSFMPAFLATYRTFVPTACLLGFLLPPMPPPPPPGVEIKKTAVQDLSFNKNLRTTLRISETTLPIRTWAVSEPFWAGR

SEQ ID NO: 71338 - protein, 176 aa, Homo sapiens
  Payload ID: 14127
  Gene Symbol: RGL3
  Gene Name: ral guanine nucleotide dissociation stimulator-like 3
  ENSP ID: ENSP00000464876
MRRPGRKGTGGGQAPSPIANTFLHYRTSKVRVLRAARLERLVGELVFGDREQDPSFMPAFLATYRTFVPTACLLGFLLPPMPPPPPPGVEIKKTAVQDLSFNKNLRAVVSVLGSWLQDHPQDFRDHPAHSDLGSVRTFLGWAAPGSAEAQKAEKLLEDFLEEAEREQEEEPPQVWT

SEQ ID NO: 71339 - protein, 77 aa, Homo sapiens
  Payload ID: 14127
  Gene Symbol: RGL3
  Gene Name: ral guanine nucleotide dissociation stimulator-like 3
  ENSP ID: ENSP00000466669
  MOD_RES (1)..(1): Any amino acid
XLGSVWSQRDRPGAAGASPTVRATVAQFNTVTGCVLGSVLGAPGLAAPQRAQRLEKWIRIAQGTAIYFQETFADFLR

SEQ ID NO: 71340 - protein, 473 aa, Homo sapiens
  Payload ID: 14128
  Gene Symbol: RGL4
  Gene Name: ral guanine nucleotide dissociation stimulator-like 4
  Uniprot ID: Q8IZJ4
  ENSP ID: ENSP00000290691
MRKLLTNLPAAAVLSAQVYSAVLQGLWEENVCGTPGRTRVCTALLYGQVCPFQDSTDGLRTITSILFNWPPENTSVYYQPPQRSSFRIKLAFRNLSWPGLGLEDHQEIVLGQLVLPEPNEAKPDDPAPRPGQHALTMPALEPAPPLLADLGPALEPESPAALGPPGYLHSAPGPAPAPGEGPPPGTVLEPQSAPESSCPCRGSVKNQPSEELPDMTTFPPRLLAEQLTLMDAELFKKVVLHECLGCIWGQGHLKGNEHMAPTVRATIAHFNRLTNCITTSCLGDHSMRARDRARVVEHWIKVARECLSLNNFSSVHVIVSALCSNPIGQLHKTWAGVSSKSMKELKELCKKDTAVKRDLLIKAGSFKVATQERNPQRVQMRLRRQKKGVVPFLGDFLTELQRLDSAIPDDLDGNTNKRSKEVRVLQEMQLLQVAAMNYRLRPLEKFVTYFTRMEQLSDKESYKLSCQLEPENP

SEQ ID NO: 71341 - protein, 337 aa, Homo sapiens
  Payload ID: 14128
  Gene Symbol: RGL4
  Gene Name: ral guanine nucleotide dissociation stimulator-like 4
  ENSP ID: ENSP00000383951
MPALEPAPPLLADLGPALEPESPAALGPPGYLHSAPGPAPAPGEGPPPGTVLEPQSAPESSCPCRGSVKNQPSEELPDMTTFPPRLLAEQLTLMDAELFKKVVLHECLGCIWGQGHLKGNEHMAPTVRATIAHFNRLTNCITTSCLGDHSMRARDRARVVEHWIKVARECLSLNNFSSVHVIVSALCSNPIGQLHKTWAGVSSKSMKELKELCKKDTAVKRDLLIKAGSFKVATQERNPQRVQMRLRRQKKGVVPFLGDFLTELQRLDSAIPDDLDGNTNKRSKEVRVLQEMQLLQVAAMNYRLRPLEKFVTYFTRMEQLSDKESYKLSCQLEPENP

SEQ ID NO: 71342 - protein, 155 aa, Homo sapiens
  Payload ID: 14128
  Gene Symbol: RGL4
  Gene Name: ral guanine nucleotide dissociation stimulator-like 4
  ENSP ID: ENSP00000393115
  MOD_RES (1)..(1): Any amino acid
XWASGMSTVPGGSRHSLGIQVRGGWGVTGGEEESLTVPVADTWQAGSFKVATQERNPQRVQMRLRRQKKGVVPFLGDFLTELQRLDSAIPDDLDGNTNKRSKEVRVLQEMQLLQVAAMNYRLRPLEKFVTYFTRMEQLSDKESYKLSCQLEPENP

SEQ ID NO: 71343 - protein, 435 aa, Homo sapiens
  Payload ID: 14128
  Gene Symbol: RGL4
  Gene Name: ral guanine nucleotide dissociation stimulator-like 4
  ENSP ID: ENSP00000396252
MRKLLTNLPAAAVLSAQVYSAVLQGLWEENVCGTPGRTRVCTALLYGQVCPFQDSTDGLRTITSILFNWPPENTSVYYQPPQRSSFRIKLAFRNLSWPGLGLEDHQEIVLGQLVLPEPNEAKPDDPAPRPGQHALTMPALEPAPPLLADLGPALEPESPAALGPPGYLHSAPGPAPAPGEGPPPGTVLEPQSAPESSCPCRGSVKNQPSEELPDMTTFPPRLLAEQLTLMDAELFKKVVLHECLGCIWGQGHLKGNEHMAPTVRATIAHFNRLTNCITTSCLGDHSMRARDRARVVEHWIKVARECLSLNNFSSVHVIVSALCSNPIGQLHKTWAGVSSKSMKELKELCKKDTAVKRDLLIKRDDGENNGNSYRKLSPQRPCEVAVVCITLYRRGNSLREARLQDWVTHTGSVDLGQWRGALRWPPRRGTPRESR

SEQ ID NO: 71344 - protein, 536 aa, Homo sapiens
  Payload ID: 14128
  Gene Symbol: RGL4
  Gene Name: ral guanine nucleotide dissociation stimulator-like 4
  ENSP ID: ENSP00000402142
MRKLLTNLPAAAVLSAQVYSAVLQGLWEENVCGTPGRTRVCTALLYGQVCPFQDSTDGLRTITSILFNWPPENTSVYYQPPQRSSFRIKLAFRNLSWPGLGLEDHQEIVLGQLVLPEPNEAKPDDPAPRPGQHALTMPALEPAPPLLADLGPALEPESPAALGPPGYLHSAPGPAPAPGEGPPPGTVLEPQSAPESSCPCRGSVKNQPSEELPDMTTFPPRLLAEQLTLMDAELFKKVVLHECLGCIWGQGHLKGNEHMAPTVRATIAHFNRLTNCITTSCLGDHSMRARDRARVVEHWIKVARECLSLNNFSSVHVIVSALCSNPIGQLHKTWAGVSSKSMKELKELCKKDTAVKRDLLIKAGSFKVATQERNPQRVQMRLRRQKKGVVPFLGDFLTELQRLDSAIPDDLDGNTNKRSKEVRVLQEMQLLQVAAMNYRLRPLEKFVTYFTRMEQLSDKERWGFTMMSRIVSNSWPQAIHPPQPPKVLTLQLQAVLPAGARKPVGWQHPAVAGNPPGCWPEHRLCTIPHPDRRHQG

SEQ ID NO: 71345 - protein, 410 aa, Homo sapiens
  Payload ID: 14128
  Gene Symbol: RGL4
  Gene Name: ral guanine nucleotide dissociation stimulator-like 4
  ENSP ID: ENSP00000480308
MPALEPAPPLLADLGPALEPESPAALGPPGYLHSAPGPAPAPGEGPPPGTVLEPQSAPESSCPCRGSVKNQPSEELPDMTTFPPRLLAEQLTLMDAELFKKVVLHECLGCIWGQGHLKGNEHMAPTVRATIAHFNRLTNCITTSCLGDHSMRARDRARVVEHWIKVARECLSLNNFSSVHVIVSALCSNPIGQLHKTWAGVSSKSMKELKELCKKDTAVKRDLLIKAGSFKVATQERNPQRVQMRLRRQKKGVVPFLGDFLTELQRLDSAIPDDLDGNTNKRSKEVRVLQEMQLLQVAAMNYRLRPLEKFVTYFTRMEQLSDKERLHCSVTISVHCNVCLLGSSPSSASQAAGTTAVHHHVRLFCCCCSATSCPASWSPKTRRLATSCSGWEPTGMLARTPALHHPSPRP

SEQ ID NO: 71346 - protein, 356 aa, Homo sapiens
  Payload ID: 14128
  Gene Symbol: RGL4
  Gene Name: ral guanine nucleotide dissociation stimulator-like 4
  ENSP ID: ENSP00000484573
MPALEPAPPLLADLGPALEPESPAALGPPGYLHSAPGPAPAPGEGPPPGTVLEPQSAPESSCPCRGSVKNQPSEELPDMTTFPPRLLAEQLTLMDAELFKKVVLHECLGCIWGQGHLKGNEHMAPTVRATIAHFNRLTNCITTSCLGDHSMRARDRARVVEHWIKVARECLSLNNFSSVHVIVSALCSNPIGQLHKTWAGVSSKSMKELKELCKKDTAVKRDLLIKAGSFKVATQERNPQRVQMRLRRQKKGVVPFLGDFLTELQRLDSAIPDDLDGNTNKRSKEVRVLQEMQLLQVAAMNYRLRPLEKFVTYFTRMEQLSDKERWGFTMMSRIVSNSWPQAIHPPQPPKVLTLQV

SEQ ID NO: 71347 - protein, 655 aa, Homo sapiens
  Payload ID: 14129
  Gene Symbol: RALBP1
  Gene Name: ralA binding protein 1
  Uniprot ID: Q15311
  ENSP ID: ENSP00000019317
MTECFLPPTSSPSEHRRVEHGSGLTRTPSSEEISPTKFPGLYRTGEPSPPHDILHEPPDVVSDDEKDHGKKKGKFKKKEKRTEGYAAFQEDSSGDEAESPSKMKRSKGIHVFKKPSFSKKKEKDFKIKEKPKEEKHKEEKHKEEKHKEKKSKDLTAADVVKQWKEKKKKKKPIQEPEVPQIDVPNLKPIFGIPLADAVERTMMYDGIRLPAVFRECIDYVEKYGMKCEGIYRVSGIKSKVDELKAAYDREESTNLEDYEPNTVASLLKQYLRDLPENLLTKELMPRFEEACGRTTETEKVQEFQRLLKELPECNYLLISWLIVHMDHVIAKELETKMNIQNISIVLSPTVQISNRVLYVFFTHVQELFGNVVLKQVMKPLRWSNMATMPTLPETQAGIKEEIRRQEFLLNCLHRDLQGGIKDLSKEERLWEVQRILTALKRKLREAKRQECETKIAQEIASLSKEDVSKEEMNENEEVINILLAQENEILTEQEELLAMEQFLRRQIASEKEEIERLRAEIAEIQSRQQHGRSETEEYSSESESESEDEEELQIILEDLQRQNEELEIKNNHLNQAIHEEREAIIELRVQLRLLQMQRAKAEQQAQEDEEPEWRGGAVQPPRDGVLEPKAAKEQPKAGKEPAKPSPSRDRKETSI

SEQ ID NO: 71348 - protein, 655 aa, Homo sapiens; identical to SEQ ID NO: 71347
  Payload ID: 14129
  Gene Symbol: RALBP1
  Gene Name: ralA binding protein 1
  Uniprot ID: Q15311
  ENSP ID: ENSP00000372924

SEQ ID NO: 71349 - protein, 207 aa, Homo sapiens
  Payload ID: 14129
  Gene Symbol: RALBP1
  Gene Name: ralA binding protein 1
  ENSP ID: ENSP00000411556
MTECFLPPTSSPSEHRRVEHGSGLTRTPSSEEISPTKFPGLYRTGEPSPPHDILHEPPDVVSDDEKDHGKKKGKFKKKEKRTEGYAAFQEDSSGDEAESPSKMKRSKGIHVFKKPSFSKKKEKDFKIKEKPKEEKHKEEKHKEEKHKEKKSKDLTAADVVKQWKEKKKKKKPIQEPEVPQIDVPNLKPIFGIPLADAVERTMMYDGI

SEQ ID NO: 71350 - protein, 3 aa, Homo sapiens
  Payload ID: 14129
  Gene Symbol: RALBP1
  Gene Name: ralA binding protein 1
  ENSP ID: ENSP00000462549
MTE

SEQ ID NO: 71351 - protein, 186 aa, Homo sapiens
  Payload ID: 14129
  Gene Symbol: RALBP1
  Gene Name: ralA binding protein 1
  ENSP ID: ENSP00000463693
MTECFLPPTSSPSEHRRVEHGSGLTRTPSSEEISPTKFPGLYRTGEPSPPHDILHEPPDVVSDDEKDHGKKKGKFKKKEKRTEGYAAFQEDSSGDEAESPSKMKRSKGIHVFKKPSFSKKKEKDFKIKEKPKEEKHKEEKHKEEKHKEKKSKDLTAADVVKQWKEKKKKKKPIQEPEVPQIDVPNL

SEQ ID NO: 71352 - protein, 795 aa, Homo sapiens
  Payload ID: 14130
  Gene Symbol: REPS1
  Gene Name: RALBP1 associated Eps domain containing 1
  Uniprot ID: Q96D71
  ENSP ID: ENSP00000258062
MEGLTLSDAEQKYYSDLFSYCDIESTKKVVVNGRVLELFRAAQLPNDVVLQIMELCGATRLGYFGRSQFYIALKLVAVAQSGFPLRVESINTVKDLPLPRFVASKNEQESRHAASYSSDSENQGSYSGVIPPPPGRGQVKKGSVSHDTVQPRTSADAQEPASPVVSPQQSPPTSPHTWRKHSRHPSGGNSERPLAGPGPFWSPFGEAQSGSSAGDAVWSGHSPPPPQENWVSFADTPPTSTLLTMHPASVQDQTTVRTVASATTAIEIRRQSSSYDDPWKITDEQRQYYVNQFKTIQPDLNGFIPGSAAKEFFTKSKLPILELSHIWELSDFDKDGALTLDEFCAAFHLVVARKNGYDLPEKLPESLMPKLIDLEDSADVGDQPGEVGYSGSPAEAPPSKSPSMPSLNQTWPELNQSSEQWETFSERSSSSQTLTQFDSNIAPADPDTAIVHPVPIRMTPSKIHMQEMELKRTGSDHTNPTSPLLVKPSDLLEENKINSSVKFASGNTVDGYSSSDSFTSDPEQIGSNVTRQRSHSGTSPDNTAPPPPPPRPQPSHSRSSSLDMNRTFTVTTGQQQAGVVAHPPAVPPRPQPSQAPGPAVHRPVDADGLITHTSTSPQQIPEQPNFADFSQFEVFAASNVNDEQDDEAEKHPEVLPAEKASDPASSLRVAKTDSKTEEKTAASAPANVSKGTTPLAPPPKPVRRRLKSEDELRPEVDEHTQKTGVLAAVLASQPSIPRSVGKDKKAIQASIRRNKETNTVLARLNSELQQQLKDVLEERISLEVQLEQLRPFSHL

SEQ ID NO: 71353 - protein, 769 aa, Homo sapiens
  Payload ID: 14130
  Gene Symbol: REPS1
  Gene Name: RALBP1 associated Eps domain containing 1
  Uniprot ID: Q96D71
  ENSP ID: ENSP00000356635
MEGLTLSDAEQKYYSDLFSYCDIESTKKVVVNGRVLELFRAAQLPNDVVLQIMELCGATRLGYFGRSQFYIALKLVAVAQSGFPLRVESINTVKDLPLPRFVASKNEQESRHAASYSSDSENQGSYSGVIPPPPGRGQVKKGSVSHDTVQPRTSADAQEPASPVVSPQQSPPTSPHTWRKHSRHPSGGNSERPLAGPGPFWSPFGEAQSGSSAGDAVWSGHSPPPPQENWVSFADTPPTSTLLTMHPASVQDQTTVRTVASATTAIEIRRQSSSYDDPWKITDEQRQYYVNQFKTIQPDLNGFIPGSAAKEFFTKSKLPILELSHIWELSDFDKDGALTLDEFCAAFHLVVARKNGYDLPEKLPESLMPKLIDLEDSADVGDQPGEVGYSGSPAEAPPSKSPSMPSLNQTWPELNQSSEDTAIVHPVPIRMTPSKIHMQEMELKRTGSDHTNPTSPLLVKPSDLLEENKINSSVKFASGNTVADGYSSSDSFTSDPEQIGSNVTRQRSHSGTSPDNTAPPPPPPRPQPSHSRSSSLDMNRTFTVTTGQQQAGVVAHPPAVPPRPQPSQAPGPAVHRPVDADGLITHTSTSPQQIPEQPNFADFSQFEVFAASNVNDEQDDEAEKHPEVLPAEKASDPASSLRVAKTDSKTEEKTAASAPANVSKGTTPLAPPPKPVRRRLKSEDELRPEVDEHTQKTGVLAAVLASQPSIPRSVGKDKKAIQASIRRNKETNTVLARLNSELQQQLKDVLEERISLEVQLEQLRPFSHL

SEQ ID NO: 71354 - protein, 705 aa, Homo sapiens
  Payload ID: 14130
  Gene Symbol: REPS1
  Gene Name: RALBP1 associated Eps domain containing 1
  Uniprot ID: Q96D71
  ENSP ID: ENSP00000386699
MEGLTLSDAEQKYYSDLFSYCDIESTKKVVVNGRVLELFRAAQLPNDVVLQIMELCGATRLGYFGRSQFYIALKLVAVAQSGFPLRVESINTVKDLPLPRFVASKNEQESRHAASYSSDSENQGSYSGVIPPPPGRGQVKKGSVSHDTVQPRTSADAQEPASPVVSPQQSPPTSPHTWRKHSRHPSGGNSERPLAGPGPFWSPFGEAQSGSSAGDAVWSGHSPPPPQENWVSFADTPPTSTLLTMHPASVQDQTTVRTVASATTAIEIRRQSSSYDDPWKITDEQRQYYVNQFKTIQPDLNGFIPGSAAKEFFTKSKLPILELSHIWELSDFDKDGALTLDEFCAAFHLVVARKNGYDLPEKLPESLMPKLIDLEDSADVGDQPGEVGYSGSPAEAPPSKSPSMPSLNQTWPELNQSSEDTAIVHPVPIRMTPSKIHMQEMELKRTGSDHTNPTSPLLVKPSDLLEENKINSSVKFASGNTVGQQQAGVVAHPPAVPPRPQPSQAPGPAVHRPVDADGLITHTSTSPQQIPEQPNFADFSQFEVFAASNVNDEQDDEAEKHPEVLPAEKASDPASSLRVAKTDSKTEEKTAASAPANVSKGTTPLAPPPKPVRRRLKSEDELRPEVDEHTQKTGVLAAVLASQPSIPRSVGKDKKAIQASIRRNKETNTVLARLNSELQQQLKDVLEERISLEVQLEQLRPFSHL

SEQ ID NO: 71355 - protein, 796 aa, Homo sapiens
  Payload ID: 14130
  Gene Symbol: REPS1
  Gene Name: RALBP1 associated Eps domain containing 1
  Uniprot ID: Q96D71
  ENSP ID: ENSP00000392065
MEGLTLSDAEQKYYSDLFSYCDIESTKKVVVNGRVLELFRAAQLPNDVVLQIMELCGATRLGYFGRSQFYIALKLVAVAQSGFPLRVESINTVKDLPLPRFVASKNEQESRHAASYSSDSENQGSYSGVIPPPPGRGQVKKGSVSHDTVQPRTSADAQEPASPVVSPQQSPPTSPHTWRKHSRHPSGGNSERPLAGPGPFWSPFGEAQSGSSAGDAVWSGHSPPPPQENWVSFADTPPTSTLLTMHPASVQDQTTVRTVASATTAIEIRRQSSSYDDPWKITDEQRQYYVNQFKTIQPDLNGFIPGSAAKEFFTKSKLPILELSHIWELSDFDKDGALTLDEFCAAFHLVVARKNGYDLPEKLPESLMPKLIDLEDSADVGDQPGEVGYSGSPAEAPPSKSPSMPSLNQTWPELNQSSEQWETFSERSSSSQTLTQFDSNIAPADPDTAIVHPVPIRMTPSKIHMQEMELKRTGSDHTNPTSPLLVKPSDLLEENKINSSVKFASGNTVADGYSSSDSFTSDPEQIGSNVTRQRSHSGTSPDNTAPPPPPPRPQPSHSRSSSLDMNRTFTVTTGQQQAGVVAHPPAVPPRPQPSQAPGPAVHRPVDADGLITHTSTSPQQIPEQPNFADFSQFEVFAASNVNDEQDDEAEKHPEVLPAEKASDPASSLRVAKTDSKTEEKTAASAPANVSKGTTPLAPPPKPVRRRLKSEDELRPEVDEHTQKTGVLAAVLASQPSIPRSVGKDKKAIQASIRRNKETNTVLARLNSELQQQLKDVLEERISLEVQLEQLRPFSHL

SEQ ID NO: 71356 - protein, 737 aa, Homo sapiens
  Payload ID: 14130
  Gene Symbol: REPS1
  Gene Name: RALBP1 associated Eps domain containing 1
  ENSP ID: ENSP00000397941
MEGLTLSDAEQKYYSDLFSYCDIESTKKVVVNGRVLELFRAAQLPNDVVLQIMELCGATRLGYFGRSQFYIALKLVAVAQSGFPLRVESINTVKDLPLPRFVASKNEQESRHAASYSSDSENQGSYSGVIPPPPGRGQVKKGSVSHDTVQPRTSADAQEPASPVVSPQQSPPTSPHTWRKHSRHPSGGNSERPLAGPGPFWSPFGEAQSGSSAGDAVWSGHSPPPPQENWVSFADTPPTSTLLTMHPASVQDQTTVRTVASATTAIEIRRQSSSYDDPWKITDEQRQYYVNQFKTIQPDLNGFIPGSAAKEFFTKSKLPILELSHIWELSDFDKDGALTLDEFCAAFHLVVARKNGYDLPEKLPESLMPKLIDLEDSADVGDQPGEVGYSGSPAEAPPSKSPSMPSLNQTWPELNQSSEDTAIVHPVPIRMTPSKIHMQEMELKRTGSDHTNPTSPLLVKPSDLLEENKINSSVKFASGNTVADGYSSSDSFTSDPEQIGSNVTRQRSHSGTSPDNTAPPPPPPRPQPSHSRSSSLDMNRTFTVTTGQQQAGVVAHPPAVPPRPQPSQAPGPAVHRPVDADGLITHTSTSPQQIPEQPNFADFSQFEVFAASNVNDEQDDEAEKHPEVLPSKGTTPLAPPPKPVRRRLKSEDELRPEVDEHTQKTGVLAAVLASQPSIPRSVGKDKKAIQASIRRNKETNTVLARLNSELQQQLKDVLEERISLEVQLEQLRPFSHL

SEQ ID NO: 71357 - protein, 220 aa, Homo sapiens
  Payload ID: 14130
  Gene Symbol: REPS1
  Gene Name: RALBP1 associated Eps domain containing 1
  ENSP ID: ENSP00000401729
MEGLTLSDAEQKYYSDLFSYCDIESTKKVVVNGRVLELFRAAQLPNDVVLQIMELCGATRLGYFGRSQFYIALKLVAVAQSGFPLRVESINTVKDLPLPRFVASKNEQESRHAASYSSDSENQGSYSGVIPPPPGRGQVKKGSVSHDTVQPRTSADAQEPASPVVSPQQSPPTSPHTWRKHSRHPSGGNSERPLAGPGPFWSPFGEAQSGNSQTLIKMVH

SEQ ID NO: 71358 - protein, 147 aa, Homo sapiens
  Payload ID: 14130
  Gene Symbol: REPS1
  Gene Name: RALBP1 associated Eps domain containing 1
  ENSP ID: ENSP00000402609
TPPTSTLLTMHPASVQDQTTVRTVASATTAIEIRRQSSSYDDPWKITDEQRQYYVNQFKTIQPDLNGFIPGSAAKEFFTKSKLPILELSHIWELSDFDKDGALTLDEFCAAFHLVVARKNGYDLPEKLPESLMPKLIDLEDSAALML

SEQ ID NO: 71359 - protein, 102 aa, Homo sapiens
  Payload ID: 14130
  Gene Symbol: REPS1
  Gene Name: RALBP1 associated Eps domain containing 1
  ENSP ID: ENSP00000403740
  MOD_RES (1)..(1): Any amino acid
XTDEQRQYYVNQFKTIQPDLNGFIPGSAAKEFFTKSKLPILELSHIWELSDFDKDGALTLDEFCAAFHLVVARKNGYDLPEKLPESLMPKLIDLEDSAALML

SEQ ID NO: 71360 - protein, 121 aa, Homo sapiens
  Payload ID: 14130
  Gene Symbol: REPS1
  Gene Name: RALBP1 associated Eps domain containing 1
  ENSP ID: ENSP00000431474
  MOD_RES (1)..(1): Any amino acid
XPGPFWSPFGEAQSGSSAGDAVWSGHSPPPPQENWVSFADTPPTSTLLTMHPASVQDQTTVRTVASATTAIEIRRQSSSYDDPWKITDEQRQYYVNQFKTIQPDLNGFIPGNSQTLIKMVH

SEQ ID NO: 71361 - protein, 152 aa, Homo sapiens
  Payload ID: 14130
  Gene Symbol: REPS1
  Gene Name: RALBP1 associated Eps domain containing 1
  ENSP ID: ENSP00000432157
  MOD_RES (1)..(1): Any amino acid
XEQPNFADFSQFEVFAASNVNDEQDDEAEKHPEVLPAEKASDPASSLRVAKTDSKTEEKTAASAPANVSKGTTPLAPPPKPVRRRLKSEDELRPEVDEHTQKTGVLAAVLASQPSIPRMFLRREFPWKFNWNNFDHSLTYKPIAVNCEHTCF

SEQ ID NO: 71362 - protein, 754 aa, Homo sapiens
  Payload ID: 14130
  Gene Symbol: REPS1
  Gene Name: RALBP1 associated Eps domain containing 1
  ENSP ID: ENSP00000434251
SDLFSYCDIESTKKVVVNGRVLELFRAAQLPNDVVLQIMELCGATRLGYFGRSQFYIALKLVAVAQSGFPLRVESINTVKDLPLPRFVASKNEQESRHAASYSSDSENQGSYSGVIPPPPGRGQVKKGSVSHDTVQPRTSADAQEPASPVVSPQQSPPTSPHTWRKHSRHPSGGNSERPLAGPGPFWSPFGEAQSGSSAGDAVWSGHSPPPPQENWVSFADTPPTSTLLTMHPASVQDQTTVRTVASATTAIEIRRQSSSYDDPWKITDEQRQYYVNQFKTIQPDLNGFIPGSAAKEFFTKSKLPILELSHIWELSDFDKDGALTLDEFCAAFHLVVARKNGYDLPEKLPESLMPKLIDLEDSADVGDQPGEVGYSGSPAEAPPSKSPSMPSLNQTWPELNQSSEDTAIVHPVPIRMTPSKIHMQEMELKRTGSDHTNPTSPLLVKPSDLLEENKINSSVKFASGNTVDGYSSSDSFTSDPEQIGSNVTRQRSHSGTSPDNTAPPPPPPRPQPSHSRSSSLDMNRTFTVTTGQQQAGVVAHPPAVPPRPQPSQAPGPAVHRPVDADGLITHTSTSPQQIPEQPNFADFSQFEVFAASNVNDEQDDEAEKHPEVLPAEKASDPASSLRVAKTDSKTEEKTAASAPANVSKGTTPLAPPPKPVRRRLKSEDELRPEVDEHTQKTGVLAAVLASQPSIPRSVGKDKKAIQASIRRNKETNTVLARLNSELQQQLKDVLEERISLEVQLEQLRPFSHL

SEQ ID NO: 71363 - protein, 146 aa, Homo sapiens
  Payload ID: 14130
  Gene Symbol: REPS1
  Gene Name: RALBP1 associated Eps domain containing 1
  ENSP ID: ENSP00000435131
ELNQSSEWETFSERSSSSQTLTQFDSNIAPADPDTAIVHPVPIRMTPSKIHMQEMELKRTGSDHTNPTSPLLVKPSDLLEENKINSSVKFASGNTVGQQQAGVVAHPPAVPPRPQPSQAPGPAVHRPVDADGLITHTSTSPQQIPE

SEQ ID NO: 71364 - protein, 61 aa, Homo sapiens
  Payload ID: 14130
  Gene Symbol: REPS1
  Gene Name: RALBP1 associated Eps domain containing 1
  ENSP ID: ENSP00000435236
  MOD_RES (1)..(1): Any amino acid
XVDEHTQKTGVLAAVLASQPSIPRSVGKDKKAIQASIRRNKETNTVLARLNSELQQQLKVI

SEQ ID NO: 71365 - protein, 220 aa, Homo sapiens; identical to SEQ ID NO: 71357
  Payload ID: 14130
  Gene Symbol: REPS1
  Gene Name: RALBP1 associated Eps domain containing 1
  ENSP ID: ENSP00000435392

SEQ ID NO: 71366 - protein, 220 aa, Homo sapiens; identical to SEQ ID NO: 71357
  Payload ID: 14130
  Gene Symbol: REPS1
  Gene Name: RALBP1 associated Eps domain containing 1
  ENSP ID: ENSP00000487438

SEQ ID NO: 71367 - protein, 659 aa, Homo sapiens
  Payload ID: 14131
  Gene Symbol: REPS2
  Gene Name: RALBP1 associated Eps domain containing 2
  Uniprot ID: Q8NFH8
  ENSP ID: ENSP00000306033
MEAAAAAAAAAAAAAAAGGGCGSGPPPLLLSEGEQQCYSELFARCAGAAGGGPGSGPPEAARVAPGTATAAAGPVADLFRASQLPAETLHQITELCGAKRVGYFGPTQFYIALKLIAAAQSGLPVRIESIKCELPLPRFMMSKNDGEIRFGNPAELHGTKVQIPYLTTEKNSFKRMDDEDKQETQSPTMSPLASPPSSPPHYQRVPLSHGYSKLRSSAEQMHPAPYEARQPLVQPEGSSSGGPGTKPLRHQASLIRSFSVERELQDNSSYPDEPWRITEEQREYYVNQFRSLQPDPSSFISGSVAKNFFTKSKLSIPELSYIWELSDADCDGALTLPEFCAAFHLIVARKNGYPLPEGLPPTLQPEYLQAAFPKPKWDCQLFDSYSESLPANQQPRDLNRMEKTSVKDMADLPVPNQDVTSDDKQALKSTINEALPKDVSEDPATPKDSNSLKARPRSRSYSSTSIEEAMKRGEDPPTPPPRPQKTHSRASSLDLNKVFQPSVPATKSGLLPPPPALPPRPCPSQSEQVSEAELLPQLSRAPSQAAESSPAKKDVLYSQPPSKPIRRKFRPENQATENQEPSTAASGPASAATMKPHPTVQKQSSKQKKAIQTAIRKNKEANAVLARLNSELQQQLKEVHQERIALENQLEQLRPVTVL

SEQ ID NO: 71368 - protein, 660 aa, Homo sapiens
  Payload ID: 14131
  Gene Symbol: REPS2
  Gene Name: RALBP1 associated Eps domain containing 2
  Uniprot ID: Q8NFH8
  ENSP ID: ENSP00000349824
MEAAAAAAAAAAAAAAAGGGCGSGPPPLLLSEGEQQCYSELFARCAGAAGGGPGSGPPEAARVAPGTATAAAGPVADLFRASQLPAETLHQITELCGAKRVGYFGPTQFYIALKLIAAAQSGLPVRIESIKCELPLPRFMMSKNDGEIRFGNPAELHGTKVQIPYLTTEKNSFKRMDDEDKQQETQSPTMSPLASPPSSPPHYQRVPLSHGYSKLRSSAEQMHPAPYEARQPLVQPEGSSSGGPGTKPLRHQASLIRSFSVERELQDNSSYPDEPWRITEEQREYYVNQFRSLQPDPSSFISGSVAKNFFTKSKLSIPELSYIWELSDADCDGALTLPEFCAAFHLIVARKNGYPLPEGLPPTLQPEYLQAAFPKPKWDCQLFDSYSESLPANQQPRDLNRMEKTSVKDMADLPVPNQDVTSDDKQALKSTINEALPKDVSEDPATPKDSNSLKARPRSRSYSSTSIEEAMKRGEDPPTPPPRPQKTHSRASSLDLNKVFQPSVPATKSGLLPPPPALPPRPCPSQSEQVSEAELLPQLSRAPSQAAESSPAKKDVLYSQPPSKPIRRKFRPENQATENQEPSTAASGPASAATMKPHPTVQKQSSKQKKAIQTAIRKNKEANAVLARLNSELQQQLKEVHQERIALENQLEQLRPVTVL

SEQ ID NO: 71369 - protein, 306 aa, Homo sapiens
  Payload ID: 14132
  Gene Symbol: RALY
  Gene Name: RALY heterogeneous nuclear ribonucleoprotein
  Uniprot ID: Q9UKM9
  ENSP ID: ENSP00000246194
MSLKLQASNVTNKNDPKSINSRVFIGNLNTALVKKSDVETIFSKYGRVAGCSVHKGYAFVQYSNERHARAAVLGENGRVLAGQTLDINMAGEPKPDRPKGLKRAASAIYSGYIFDYDYYRDDFYDRLFDYRGRLSPVPVPRAVPVKRPRVTVPLVRRVKTNVPVKLFARSTAVTTSSAKIKLKSSELQAIKTELTQIKSNIDALLSRLEQIAAEQKANPDGKKKGDGGGAGGGGGGGGSGGGGSGGGGGGGSSRPPAPQENTTSEAGLPQGEARTRDDGDEEGLLTHSEEELEHSQDTDADDGALQ

SEQ ID NO: 71370 - protein, 171 aa, Homo sapiens
  Payload ID: 14132
  Gene Symbol: RALY
  Gene Name: RALY heterogeneous nuclear ribonucleoprotein
  ENSP ID: ENSP00000327522
MSLKLQASNVTNKNDPKSINSRVFIGNLNTALVKKSDVETIFSNGYIFDYDYYRDDFYDRLFDYRGRLSPVPVPRAVPVKRPRVTVPLVRRVKTNVPVKLFARSTAVTTSSAKIKLKSSELQAIKTELTQIKSNIDALLSRLEQIAAEQKANPDGKKKGDGGGAGGGGGGG

SEQ ID NO: 71371 - protein, 290 aa, Homo sapiens
  Payload ID: 14132
  Gene Symbol: RALY
  Gene Name: RALY heterogeneous nuclear ribonucleoprotein
  Uniprot ID: Q9UKM9
  ENSP ID: ENSP00000364255
MSLKLQASNVTNKNDPKSINSRVFIGNLNTALVKKSDVETIFSKYGRVAGCSVHKGYAFVQYSNERHARAAVLGENGRVLAGQTLDINMAGEPKPDRPKGLKRAASAIYRLFDYRGRLSPVPVPRAVPVKRPRVTVPLVRRVKTNVPVKLFARSTAVTTSSAKIKLKSSELQAIKTELTQIKSNIDALLSRLEQIAAEQKANPDGKKKGDGGGAGGGGGGGGSGGGGSGGGGGGGSSRPPAPQENTTSEAGLPQGEARTRDDGDEEGLLTHSEEELEHSQDTDADDGALQ

SEQ ID NO: 71372 - protein, 89 aa, Homo sapiens
  Payload ID: 14132
  Gene Symbol: RALY
  Gene Name: RALY heterogeneous nuclear ribonucleoprotein
  ENSP ID: ENSP00000403744
MSLKLQASNVTNKNDPKSINSRVFIGNLNTALVKKSDVETIFSKYGRVAGCSVHKGYAFVQYSNERHARAAVLGENGRVLAGQTLDINM

SEQ ID NO: 71373 - protein, 181 aa, Homo sapiens
  Payload ID: 14132
  Gene Symbol: RALY
  Gene Name: RALY heterogeneous nuclear ribonucleoprotein
  ENSP ID: ENSP00000413638
MSLKLQASNVTNKNDPKSINSRVFIGNLNTALVKKSDVETIFSKYGRVAGCSVHKGYAFVQYSNERHARAAVLGENGRVLAGQTLDINMAGEPKPDRPKGLKRAASAIYSGYIFDYDYYRDDFYDRLFDYRGRLSPVPVPRAVPVKRPRVTVPLVRRVKTNVPVKLFARSTAVTTSSAKIK

SEQ ID NO: 71374 - protein, 237 aa, Homo sapiens
  Payload ID: 14132
  Gene Symbol: RALY
  Gene Name: RALY heterogeneous nuclear ribonucleoprotein
  ENSP ID: ENSP00000415973
MSLKLQASNVTNKNDPKSINSRVFIGNLNTALVKKSDVETIFSKYGRVAGCSVHKGYAFVQYSNERHARAAVLGENGRVLAGQTLDINMAGEPKPDRPKGLKRAASAIYRLFDYRGRLSPVPVPRAVPVKRPRVTVPLVRRVKTNVPVKLFARSTAVTTSSAKIKLKSSELQAIKTELTQIKSNIDALLSRLEQIAAEQKANPDGKKKGDGGGAGGGGGGGGSGGGGSGGGGGGGSS

SEQ ID NO: 71375 - protein, 85 aa, Homo sapiens
  Payload ID: 14133
  Gene Symbol: RALYL
  Gene Name: RALY RNA binding protein-like
  ENSP ID: ENSP00000427787
MTGKTQTSNVTNKNDPKSINSRVFIGNLNTAIVKKVDIEAIFSKYGKIVGCSVHKGYAFVQYMSERHARAAVAGENARVIAGQPL

SEQ ID NO: 71376 - protein, 146 aa, Homo sapiens
  Payload ID: 14133
  Gene Symbol: RALYL
  Gene Name: RALY RNA binding protein-like
  ENSP ID: ENSP00000428310
MTMYKSKRRHQRYINMAGEPKPYRPKPGNKRPLSALYRLESKEPFLSVGLFDYHGRVPPPPRAVIPLKRPRVAVTTTRRGKGVFSMKGGSRSTASGSTGSKLKSDELQTIKKELTQIKTKIDSLLGRLEKIEKQQKAEAVSTDKVI

SEQ ID NO: 71377 - protein, 291 aa, Homo sapiens
  Payload ID: 14133
  Gene Symbol: RALYL
  Gene Name: RALY RNA binding protein-like
  Uniprot ID: Q86SE5
  ENSP ID: ENSP00000428667
MTGKTQTSNVTNKNDPKSINSRVFIGNLNTAIVKKVDIEAIFSKYGKIVGCSVHKGYAFVQYMSERHARAAVAGENARVIAGQPLDINMAGEPKPYRPKPGNKRPLSALYRLESKEPFLSVGGYVFDYDYYRDDFYNRLFDYHGRVPPPPRAVIPLKRPRVAVTTTRRGKGVFSMKGGSRSTASGSTGSKLKSDELQTIKKELTQIKTKIDSLLGRLEKIEKQQKAEAEAQKKQLEESLVLIQEECVSEIADHSTEEPAEGGPDADGEEMTDGIEEDFDEDGGHELFLQIK

SEQ ID NO: 71378 - protein, 85 aa, Homo sapiens; identical to SEQ ID NO: 71375
  Payload ID: 14133
  Gene Symbol: RALYL
  Gene Name: RALY RNA binding protein-like
  ENSP ID: ENSP00000428711

SEQ ID NO: 71379 - protein, 218 aa, Homo sapiens
  Payload ID: 14133
  Gene Symbol: RALYL
  Gene Name: RALY RNA binding protein-like
  Uniprot ID: Q86SE5
  ENSP ID: ENSP00000428807
MTMYKSKRRHQRYINMAGEPKPYRPKPGNKRPLSALYRLESKEPFLSVGGYVFDYDYYRDDFYNRLFDYHGRVPPPPRAVIPLKRPRVAVTTTRRGKGVFSMKGGSRSTASGSTGSKLKSDELQTIKKELTQIKTKIDSLLGRLEKIEKQQKAEAEAQKKQLEESLVLIQEECVSEIADHSTEEPAEGGPDADGEEMTDGIEEDFDEDGGHELFLQIK

SEQ ID NO: 71380 - protein, 47 aa, Homo sapiens
  Payload ID: 14133
  Gene Symbol: RALYL
  Gene Name: RALY RNA binding protein-like
  ENSP ID: ENSP00000429284
MTGKTQTSNVTNKNDPKSINSRVFIGNLNTAIVKKVDIEAIFSKYGK

SEQ ID NO: 71381 - protein, 280 aa, Homo sapiens
  Payload ID: 14133
  Gene Symbol: RALYL
  Gene Name: RALY RNA binding protein-like
  ENSP ID: ENSP00000430065
MTGKTQTSNVTNKNDPKSINSRVFIGNLNTAIVKKVDIEAIFSKYGKIVGCSVHKGYAFVQYMSERHARAAVAGENARVIAGQPLDINMAGEPKPYRPKPGNKRPLSALYSGYVFDYDYYRDDFYNRLFDYHGRVPPPPRAVIPLKRPRVAVTTTRRGKGVFSMKGGSRSTASGSTGSKLKSDELQTIKKELTQIKTKIDSLLGRLEKIEKQQKAEAEAQKKQLEESLVLIQEECVSEIADHSTEEPAEGGPDADGEEMTDGIEEDFDEDGGHELFLQIK

SEQ ID NO: 71382 - protein, 304 aa, Homo sapiens
  Payload ID: 14133
  Gene Symbol: RALYL
  Gene Name: RALY RNA binding protein-like
  Uniprot ID: Q86SE5
  ENSP ID: ENSP00000430128
MSKRRRLKQGEPIMTGKTQTSNVTNKNDPKSINSRVFIGNLNTAIVKKVDIEAIFSKYGKIVGCSVHKGYAFVQYMSERHARAAVAGENARVIAGQPLDINMAGEPKPYRPKPGNKRPLSALYRLESKEPFLSVGGYVFDYDYYRDDFYNRLFDYHGRVPPPPRAVIPLKRPRVAVTTTRRGKGVFSMKGGSRSTASGSTGSKLKSDELQTIKKELTQIKTKIDSLLGRLEKIEKQQKAEAEAQKKQLEESLVLIQEECVSEIADHSTEEPAEGGPDADGEEMTDGIEEDFDEDGGHELFLQIK

SEQ ID NO: 71383 - protein, 291 aa, Homo sapiens; identical to SEQ ID NO: 71377
  Payload ID: 14133
  Gene Symbol: RALYL
  Gene Name: RALY RNA binding protein-like
  Uniprot ID: Q86SE5
  ENSP ID: ENSP00000430367

SEQ ID NO: 71384 - protein, 291 aa, Homo sapiens; identical to SEQ ID NO: 71377
  Payload ID: 14133
  Gene Symbol: RALYL
  Gene Name: RALY RNA binding protein-like
  Uniprot ID: Q86SE5
  ENSP ID: ENSP00000430394

SEQ ID NO: 71385 - protein, 201 aa, Homo sapiens
  Payload ID: 14134
  Gene Symbol: RANBP1
  Gene Name: RAN binding protein 1
  Uniprot ID: P43487
  ENSP ID: ENSP00000327583
MAAAKDTHEDHDTSTENTDESNHDPQFEPIVSLPEQEIKTLEEDEEELFKMRAKLFRFASENDLPEWKERGTGDVKLLKHKEKGAIRLLMRRDKTLKICANHYITPMMELKPNAGSDRAWVWNTHADFADECPKPELLAIRFLNAENAQKFKTKFEECRKEIEEREKKAGSGKNDHAEKVAEKLEALSVKEETKEDAEEKQ

SEQ ID NO: 71386 - protein, 200 aa, Homo sapiens
  Payload ID: 14134
  Gene Symbol: RANBP1
  Gene Name: RAN binding protein 1
  Uniprot ID: P43487
  ENSP ID: ENSP00000384925
MAAAKDTHEDHDTSTENTDESNHDPQFEPIVSLPEQEIKTLEEDEEELFKMRAKLFRFASENDLPEWKERGTGDVKLLKHKEKGAIRLLMRRDKTLKICANHYITPMMELKPNAGSDRAWVWNTHADFADECPKPELLAIRFLNAENAQKFKTKFEECRKEIEEREKKGSGKNDHAEKVAEKLEALSVKEETKEDAEEKQ

SEQ ID NO: 71387 - protein, 73 aa, Homo sapiens
  Payload ID: 14134
  Gene Symbol: RANBP1
  Gene Name: RAN binding protein 1
  ENSP ID: ENSP00000390139
MGSALGRARRTLSGRPFQRAPCKTRRALSLSAALRNVTKAQGGCPKSLVLWGCRPKRPRKRRTSLKLAWRGHS

SEQ ID NO: 71388 - protein, 163 aa, Homo sapiens
  Payload ID: 14134
  Gene Symbol: RANBP1
  Gene Name: RAN binding protein 1
  ENSP ID: ENSP00000395472
MAAAKDTHEDHDTSTENTDESNHDPQFEPIVSLPEQEIKTLEEDEEELFKMRAKLFRFASENDLPEWKERGTGDVKLLKHKEKGAIRLLMRRDKTLKICANHYITPMMELKPNAGSDRAWVWNTHADFADECPKPELLAIRFLNAESEPRALGTCLTWGSPAW

SEQ ID NO: 71389 - protein, 53 aa, Homo sapiens
  Payload ID: 14134
  Gene Symbol: RANBP1
  Gene Name: RAN binding protein 1
  ENSP ID: ENSP00000400940
MRAKLFRFASENDLPEWKERGTGDVKLLKHKEKGAIRLLMRRDKTLKICANHY

SEQ ID NO: 71390 - protein, 278 aa, Homo sapiens
  Payload ID: 14134
  Gene Symbol: RANBP1
  Gene Name: RAN binding protein 1
  ENSP ID: ENSP00000401564
MGSALGRARRTLSGRPFQRAPCKTRRALSLSAALRNVTKAQGGCPKSLVLWGCRPKRPRKRRTSLKLAWRGTFCSSSLKISEDTHEDHDTSTENTDESNHDPQFEPIVSLPEQEIKTLEEDEEELFKMRAKLFRFASENDLPEWKERGTGDVKLLKHKEKGAIRLLMRRDKTLKICANHYITPMMELKPNAGSDRAWVWNTHADFADECPKPELLAIRFLNAENAQKFKTKFEECRKEIEEREKKAGSGKNDHAEKVAEKLEALSVKEETKEDAEEKQ

SEQ ID NO: 71391 - protein, 53 aa, Homo sapiens; identical to SEQ ID NO: 71389
  Payload ID: 14134
  Gene Symbol: RANBP1
  Gene Name: RAN binding protein 1
  ENSP ID: ENSP00000404126

SEQ ID NO: 71392 - protein, 204 aa, Homo sapiens
  Payload ID: 14134
  Gene Symbol: RANBP1
  Gene Name: RAN binding protein 1
  ENSP ID: ENSP00000404298
MRAKLFRFASENDLPEWKERGTGDVKLLKHKEKGAIRLLMRRDKTLKICANHYITPMMELKPNAGSDRAWVWNTHADFADECPKPELLAIRFLNAENAQKFKTKFEECRKEIEEREKKGDVVPWVGGLLCRLTLHLTILPGGCFFCLPDKHSRVLWPPHVSRVMQLPGDTGASWGALSTCQCCWPQSNWAGIGVRALPGAHQKV

SEQ ID NO: 71393 - protein, 165 aa, Homo sapiens
  Payload ID: 14134
  Gene Symbol: RANBP1
  Gene Name: RAN binding protein 1
  ENSP ID: ENSP00000404724
MGSALGRARRTLSGRPFQRAPCKTRRALSLSAALRNVTKAQGGCPKSLVLWGCRPKRPRKRRTSLKLAWRGTFCSSSLKISEDTHEDHDTSTENTDESNHDPQFEPIVSLPEQEIKTLEEDEEELFKMRAKLFRFASENDLPEWKERGTGDVKLLKHKEKGAIRL

SEQ ID NO: 71394 - protein, 145 aa, Homo sapiens
  Payload ID: 14134
  Gene Symbol: RANBP1
  Gene Name: RAN binding protein 1
  ENSP ID: ENSP00000413502
MRAKLFRFASENDLPEWKERGTGDVKLLKHKEKGAIRLLMRRDKTLKICANHYITPMMELKPNAGSDRAWVWNTHADFADECPKPELLAIRFLNAENAQKFKTKFEECRKEIEEREKKGSGKNDHAEKVAEKLEALSVKEETKED

SEQ ID NO: 71395 - protein, 620 aa, Homo sapiens
  Payload ID: 14135
  Gene Symbol: RANBP10
  Gene Name: RAN binding protein 10
  Uniprot ID: Q6VN20
  ENSP ID: ENSP00000316589
MAAATADPGAGNPQPGDSSGGGAGGGLPSPGEQELSRRLQRLYPAVNQQETPLPRSWSPKDKYNYIGLSQGNLRVHYKGHGKNHKDAASVRATHPIPAACGIYYFEVKIVSKGRDGYMGIGLSAQGVNMNRLPGWDKHSYGYHGDDGHSFCSSGTGQPYGPTFTTGDVIGCCVNLINGTCFYTKNGHSLGIAFTDLPANLYPTVGLQTPGEIVDANFGQQPFLFDIEDYMREWRAKVQGTVHCFPISARLGEWQAVLQNMVSSYLVHHGYCATATAFARMTETPIQEEQASIKNRQKIQKLVLEGRVGEAIETTQRFYPGLLEHNPNLLFMLKCRQFVEMVNGTDSEVRSLSSRSPKSQDSYPGSPSLSPRHGPSSSHMHNTGADSPSCSNGVASTKSKQNHSKYPAPSSSSSSSSSSSSSSPSSVNYSESNSTDSTKSQHHSSTSNQETSDSEMEMEAEHYPNGVLGSMSTRIVNGAYKHEDLQTDESSMDDRHPRRQLCGGNQAATERIILFGRELQALSEQLGREYGKNLAHTEMLQDAFSLLAYSDPWSCPVGQQLDPIQREPVCAALNSAILESQNLPKQPPLMLALGQASECLRLMARAGLGSCSFARVDDYLH

SEQ ID NO: 71396 - protein, 594 aa, Homo sapiens
  Payload ID: 14135
  Gene Symbol: RANBP10
  Gene Name: RAN binding protein 10
  Uniprot ID: Q6VN20
  ENSP ID: ENSP00000392808
MAAATADPGAGNPQPGDSSGGGAGGGLPSPGEQELSRRLQRLYPAVNQQETPLPRSWSPKDKYNYIGLSQGNLRVHYKGHGKNHKDAASVRATHPIPAACGIYYFEVKIVSKGRDGYMGIGLSAQGVNMNRLPGIAFTDLPANLYPTVGLQTPGEIVDANFGQQPFLFDIEDYMREWRAKVQGTVHCFPISARLGEWQAVLQNMVSSYLVHHGYCATATAFARMTETPIQEEQASIKNRQKIQKLVLEGRVGEAIETTQRFYPGLLEHNPNLLFMLKCRQFVEMVNGTDSEVRSLSSRSPKSQDSYPGSPSLSPRHGPSSSHMHNTGADSPSCSNGVASTKSKQNHSKYPAPSSSSSSSSSSSSSSPSSVNYSESNSTDSTKSQHHSSTSNQETSNPWLQLERRPNQAAPTTPPGPTPTSTPPHSDSEMEMEAEHYPNGVLGSMSTRIVNGAYKHEDLQTDESSMDDRHPRRQLCGGNQAATERIILFGRELQALSEQLGREYGKNLAHTEMLQDAFSLLAYSDPWSCPVGQQLDPIQREPVCAALNSAILESQNLPKQPPLMLALGQASECLRLMARAGLGSCSFARVDDYLH

SEQ ID NO: 71397 - protein, 82 aa, Homo sapiens
  Payload ID: 14135
  Gene Symbol: RANBP10
  Gene Name: RAN binding protein 10
  ENSP ID: ENSP00000473395
MAAATADPGAGNPQPGDSSGGGAGGGLPSPGEQELSRRLQRLYPAVNQQETPLPRSWSPKDKYNYIGLSQGNLRVHYKVTWE

SEQ ID NO: 71398 - protein, 650 aa, Homo sapiens
  Payload ID: 14135
  Gene Symbol: RANBP10
  Gene Name: RAN binding protein 10
  ENSP ID: ENSP00000473396
MAAATADPGAGNPQPGDSSGGGAGGGLPSPGEQELSRRLQRLYPAVNQQETPLPRSWSPKDKYNYIGLSQGNLRVHYKGHGKNHKDAASVRATHPIPAACGIYYFEVKIVSKGRDGYMGIGLSAQGVNMNRLPGWDKHSYGYHGDDGHSFCSSGTGQPYGPTFTTGDVIGCCVNLINGTCFYTKNGHSLGIAFTDLPANLYPTVGLQTPGEIVDANFGQQPFLFDIEDYMREWRAKVQGTVHCFPISARLGEWQAVLQNMVSSYLVHHGYCATATAFARMTETPIQEEQASIKNRQKIQKLVLEGRVGEAIETTQRFYPGLLEHNPNLLFMLKCRQFVEMVNGTDSEVRSLSSRSPKSQDSYPGSPSLSPRHGPSSSHMHNTGADSPSCSNGVASTKSKQNHSKYPAPSSSSSSSSSSSSSSPSSVNYSESNSTDSTKSQHHSSTSNQETSNPWLQLERRPNQAAPTTPPGPTPTSTPPHSDSEMEMEAEHYPNGVLGSMSTRIVNGAYKHEDLQTDESSMDDRHPRRQLCGGNQAATERIILFGRELQALSEQLGREYGKNLAHTEMLQDAFSLLAYSDPWSCPVGQQLDPIQREPVCAALNSAILESQNLPKQPPLMLALGQASECLRLMARAGLGSCSFARVDDYLH

SEQ ID NO: 71399 - protein, 149 aa, Homo sapiens
  Payload ID: 14135
  Gene Symbol: RANBP10
  Gene Name: RAN binding protein 10
  ENSP ID: ENSP00000473538
MAAATADPGAGNPQPGDSSGGGAGGGLPSPGEQELSRRLQRLYPAVNQQETPLPRSWSPKDKYNYIGLSQGNLRVHYKGHGKNHKDAASVRATHPIPAACGIYYFEVKIVSKGRDGYMGIGLSAQGVNMNRLPDPTSRNLSSLLQVQQR

SEQ ID NO: 71400 - protein, 126 aa, Homo sapiens
  Payload ID: 14135
  Gene Symbol: RANBP10
  Gene Name: RAN binding protein 10
  ENSP ID: ENSP00000473554
MAAATADPGAGNPQPGDSSGGGAGGGLPSPGEQELSRRLQRLYPAVNQQETPLPRSWSPKDKYNYIGLSQGNLRVHYKGHGKNHKDAASVRATHPIPAACGIYYFEVKIVSKGRDGLGQTFLWLPW

SEQ ID NO: 71401 - protein, 620 aa, Homo sapiens [sequence omitted]

SEQ ID NO: 71402 - protein, 576 aa, Homo sapiens
  Payload ID: 14136
  Gene Symbol: RANBP17
  Gene Name: RAN binding protein 17
  Uniprot ID: Q9H2T7
  ENSP ID: ENSP00000373770
MALHFQSLAELEVLCTHLYIGTDLTQRIEAEKALLELIDSPECLSKCQLLLEQGTTSYAQLLAATCLSKLVSRVSPLPVEQRMDIRNYILNYVASQPKLAPFVIQALIQVIAKITKLGWFEVQKDQFVFREIIADVKKFLQGTVEHCIIGVIILSELTQEMNLVDYSRPSAKHRKIATSFRDTSLKDVLVLACSLLKEVFAKPLNLQDQCQQNLVMQVLKLVLNCLNFDFIGSSADESADDLCTVQIPTTWRTIFLEPETLDLFFNLYHSLPPLLSQLALSCLVQFASTRRSLFNSPERAKYLGNLIKGVKRILENPQGLSDPGNYHEFCRFLARLKTNYQLGELVMVKEYPEVIRLIANFTITSLQHWEFAPNSVHYLLTLWQRMVASVPFVKSTEPHLLDTYAPEITKAFITSRLDSVAIVVRDHLDDPLDDTATVFQQLEQLCTVSRCEYEKTCALLVQLFDQNAQNYQKLLHPYSGVTVDITIQEGRLAWLVYLVGTVVGGRLTYTSTDEHDAMDGELSCRVFQLISLMDTGLPRCCNEKIELAILWFLDQFRKTYVGDQLQRTSKKTDIFL

SEQ ID NO: 71403 - protein, 1088 aa, Homo sapiens
  Payload ID: 14136
  Gene Symbol: RANBP17
  Gene Name: RAN binding protein 17
  Uniprot ID: Q9H2T7
  ENSP ID: ENSP00000427975
MALHFQSLAELEVLCTHLYIGTDLTQRIEAEKALLELIDSPECLSKCQLLLEQGTTSYAQLLAATCLSKLVSRVSPLPVEQRMDIRNYILNYVASQPKLAPFVIQALIQVIAKITKLGWFEVQKDQFVFREIIADVKKFLQGTVEHCIIGVIILSELTQEMNLVDYSRPSAKHRKIATSFRDTSLKDVLVLACSLLKEVFAKPLNLQDQCQQNLVMQVLKLVLNCLNFDFIGSSADESADDLCTVQIPTTWRTIFLEPETLDLFFNLYHSLPPLLSQLALSCLVQFASTRRSLFNSPERAKYLGNLIKGVKRILENPQGLSDPGNYHEFCRFLARLKTNYQLGELVMVKEYPEVIRLIANFTITSLQHWEFAPNSVHYLLTLWQRMVASVPFVKSTEPHLLDTYAPEITKAFITSRLDSVAIVVRDHLDDPLDDTATVFQQLEQLCTVSRCEYEKTCALLVQLFDQNAQNYQKLLHPYSGVTVDITIQEGRLAWLVYLVGTVVGGRLTYTSTDEHDAMDGELSCRVFQLISLMDTGLPRCCNEKIELAILWFLDQFRKTYVGDQLQRTSKVYARMSEVLGITDDNHVLETFMTKIVTNLKYWGRYEPVISRTLQFLNDLSVGYILLKKLVKIDAVKFMLKNHTSEHFPFLGISDNHSLSDFRCRTTFYTALTRLLMVDLGEDEDEFENFMLPLTVAFETVLQIFNNNFKQEDVKRMLIGLARDLRGIAFALNTKTSYTMLFDWMYPTYLPLLQNAVERWYGEPTCTTPILKLMAELMQNRSQRLNFDVSSPNGILLFREASKMVCTYGNQILSLGSLSKDQIYPMKLKGISICYSALKSALCGNYVSFGVFKLYGDNHFDNVLQAFVKMLLSVSHSDLLQYRKLSQSYYPLLECLTQDHMSFIINLEPPVLMYVLTSISEGLTTLDTVVSSSCCTSLDYIVTYLFKHIAKEGKKPLRCREATQAGQRLLHFMQQNPDVLQQMMSVLMNTIVFEDCRNQWSVSRPLLGLILLNEKYFSELRASLINSQPLPKQEVLAQCFRNLMEGVEQNLSVKNRDRFTQNLSVFRRDVAEALRSDGNTEPCSLDMMS

SEQ ID NO: 71404 - protein, 47 aa, Homo sapiens
  Payload ID: 14136
  Gene Symbol: RANBP17
  Gene Name: RAN binding protein 17
  ENSP ID: ENSP00000427980
  MOD_RES (1)..(1): Any amino acid
XSLMDTGLPRCCNEKIELAILWFLDQFRKTYVGDQLQRTSKKTDIFL

SEQ ID NO: 71405 - protein, 576 aa, Homo sapiens; identical to SEQ ID NO: 71402
  Payload ID: 14136
  Gene Symbol: RANBP17
  Gene Name: RAN binding protein 17
  Uniprot ID: Q9H2T7
  ENSP ID: ENSP00000429298

SEQ ID NO: 71406 - protein, 38 aa, Homo sapiens
  Payload ID: 14136
  Gene Symbol: RANBP17
  Gene Name: RAN binding protein 17
  ENSP ID: ENSP00000429609
MDIRNYILNYVASQPKLAPFVIQALIQVIAKITKLGWF

SEQ ID NO: 71407 - protein, 554 aa, Homo sapiens
  Payload ID: 14136
  Gene Symbol: RANBP17
  Gene Name: RAN binding protein 17
  ENSP ID: ENSP00000429845
  MOD_RES (1)..(1): Any amino acid
XALHFQSLAELEVLCTHLYIGTDLTQRIEAEKALLELIDSPECLSKCQLLLEQGTTSYAQLLAATCLSKLVSRVSPLPVEQRMDIRNYILNYVASQPKLAPFVIQALIQVIAKITKLGWFEVQKDQFVFREIIADVKKFLQVDYSRPSAKHRKIATSFRDTSLKDVLVLACSLLKEVFAKPLNLQDQCQQNLVMQVLKLVLNCLNFDFIGSSADESADDLCTVQIPTTWRTIFLEPETLDLFFNLYHSLPPLLSQLALSCLVQFASTRRSLFNSPERAKYLGNLIKGVKRILENPQGLSDPGNYHEFCRFLARLKTNYQLGELVMVKEYPEVIRLIANFTITSLQHWEFAPNSVHYLLTLWQRMVASVPFVKSTEPHLLDTYAPEITKAFITSRLDSVAIVVRDHLDDPLDDTATVFQQLEQLCTVSRCEYEKTCALLVQLFDQNAQNYQKLLHPYSGVTVDITIQEGRLAWLVYLVGTVVGGRLTYTSTDEHDAMDGELSCRVFQLISLMDTGLPRCCNEKIELAILWFLDQFRKTYVGDQLQRTSKKTDIFL

SEQ ID NO: 71408 - protein, 576 aa, Homo sapiens; identical to SEQ ID NO: 71402
  Payload ID: 14136
  Gene Symbol: RANBP17
  Gene Name: RAN binding protein 17
  Uniprot ID: Q9H2T7
  ENSP ID: ENSP00000430444

SEQ ID NO: 71409 - protein, 175 aa, Homo sapiens
  Payload ID: 14136
  Gene Symbol: RANBP17
  Gene Name: RAN binding protein 17
  ENSP ID: ENSP00000430577
  MOD_RES (1)..(1): Any amino acid
XLKLVLNCLNFDFIGSSADESADDLCTVQIPTTWRTIFLEPETLDLFFNLYHSLPPLLSQLALSCLVQFASTRRSLFNSPERAKYLGNLIKGVKRILENPQHWEFAPNSVHYLLTLWQRMVASVPFVKSTEPHLLDTYAPEITKAFITSRLDSVAIVVRDHLDDPLDDTATVFQQ

SEQ ID NO: 71410 - protein, 576 aa, Homo sapiens; identical to SEQ ID NO: 71402
  Payload ID: 14136
  Gene Symbol: RANBP17
  Gene Name: RAN binding protein 17
  Uniprot ID: Q9H2T7
  ENSP ID: ENSP00000430599

SEQ ID NO: 71411 - protein, 580 aa, Homo sapiens
  Payload ID: 14136
  Gene Symbol: RANBP17
  Gene Name: RAN binding protein 17
  ENSP ID: ENSP00000430958
MALHFQSLAELEVLCTHLYIGTDLTQRIEAEKALLELIDSPECLSKCQLLLEQGTTSYAQLLAATCLSKLVSRVSPLPVEQRMDIRNYILNYVASQPKLAPFVIQALIQVIAKITKLGWFEVQKDQFVFREIIADVKKFLQGTVEHCIIGVIILSELTQEMNLVDYSRPSAKHRKIATSFRDTSLKDVLVLACSLLKEVFAKPLNLQDQCQQNLVMQVLKLVLNCLNFDFIGSSADESADDLCTVQIPTTWRTIFLEPETLDLFFNLYHSLPPLLSQLALSCLVQFASTRRSLFNSPERAKYLGNLIKGVKRILENPQGLSDPGNYHEFCRFLARLKTNYQLGELVMVKEYPEVIRLIANFTITSLQHWEFAPNSVHYLLTLWQRMVASVPFVKSTEPHLLDTYAPEITKAFITSRLDSVAIVVRDHLDDPLDDTATVFQQLEQLCTVSRCEYEKTCALLVQLFDQNAQNYQKLLHPYSGVTVDITIQEGRLAWLVYLVGTVVGGRLTYTSTDEHDAMDGELSCRVFQLISLMDTGLPRCCNEKIELAILWFLDQFRKTYVGDQLQRTSKEVAGDCILLN

SEQ ID NO: 71412 - protein, 518 aa, Homo sapiens
  Payload ID: 14136
  Gene Symbol: RANBP17
  Gene Name: RAN binding protein 17
  ENSP ID: ENSP00000478243
VYARMSEVLGITDDNHVLETFMTKIVTNLKYWGRYEPVISRTLQFLNDLSVGYPFHSRCVQIDAVKFMLKNHTSEHFPFLGISDNHSLSDFRCRTTFYTALTRLLMVDLGEDEDEFENFMLPLTVAFETVLQIFNNNFKQEDVKRMLIGLARDLRGIAFALNTKTSYTMLFDWMYPTYLPLLQNAVERWYGEPTCTTPILKLMAELMQNRSQRLNFDVSSPNGILLFREASKMVCTYGNQILSLGSLSKDQIYPMKLKGISICYSALKSALCGNYVSFGVFKLYGDNHFDNVLQAFVKMLLSVSHSDLLQYRKLSQSYYPLLECLTQDHMSFIINLEPPVLMYVLTSISEGLTTLDTVVSSSCCTSLDYIVTYLFKHIAKEGKKPLRCREATQAGQRLLHFMQQNPDVLQQMMSVLMNTIVFEDCRNQWSVSRPLLGLILLNEKYFSELRASLINSQPLPKQEVLAQCFRNLMEGVEQNLSVKNRDRFTQNLSVFRRDVAEALRSDGNTEPCSLDMMS

SEQ ID NO: 71413 - protein, 3224 aa, Homo sapiens
  Payload ID: 14137
  Gene Symbol: RANBP2
  Gene Name: RAN binding protein 2
  Uniprot ID: P49792
  ENSP ID: ENSP00000283195
MRRSKADVERYIASVQGSTPSPRQKSMKGFYFAKLYYEAKEYDLAKKYICTYINVQERDPKAHRFLGLLYELEENTDKAVECYRRSVELNPTQKDLVLKIAELLCKNDVTDGRAKYWLERAAKLFPGSPAIYKLKEQLLDCEGEDGWNKLFDLIQSELYVRPDDVHVNIRLVEVYRSTKRLKDAVAHCHEAERNIALRSSLEWNSCVVQTLKEYLESLQCLESDKSDWRATNTDLLLAYANLMLLTLSTRDVQESRELLQSFDSALQSVKSLGGNDELSATFLEMKGHFYMHAGSLLLKMGQHSSNVQWRALSELAALCYLIAFQVPRPKIKLIKGEAGQNLLEMMACDRLSQSGHMLLNLSRGKQDFLKEIVETFANKSGQSALYDALFSSQSPKDTSFLGSDDIGNIDVREPELEDLTRYDVGAIRAHNGSLQHLTWLGLQWNSLPALPGIRKWLKQLFHHLPHETSRLETNAPESICILDLEVFLLGVVYTSHLQLKEKCNSHHSSYQPLCLPLPVCKQLCTERQKSWWDAVCTLIHRKAVPGNVAKLRLLVQHEINTLRAQEKHGLQPALLVHWAECLQKTGSGLNSFYDQREYIGRSVHYWKKVLPLLKIIKKKNSIPEPIDPLFKHFHSVDIQASEIVEYEEDAHITFAILDAVNGNIEDAVTAFESIKSVVSYWNLALIFHRKAEDIENDALSPEEQEECKNYLRKTRDYLIKIIDDSDSNLSVVKKLPVPLESVKEMLNSVMQELEDYSEGGPLYKNGSLRNADSEIKHSTPSPTRYSLSPSKSYKYSPKTPPRWAEDQNSLLKMICQQVEAIKKEMQELKLNSSNSASPHRWPTENYGPDSVPDGYQGSQTFHGAPLTVATTGPSVYYSQSPAYNSQYLLRPAANVTPTKGPVYGMNRLPPQQHIYAYPQQMHTPPVQSSSACMFSQEMYGPPALRFESPATGILSPRGDDYFNYNVQQTSTNPPLPEPGYFTKPPIAAHASRSAESKTIEFGKTNFVQPMPGEGLRPSLPTQAHTTQPTPFKFNSNFKSNDGDFTFSSPQVVTQPPPAAYSNSESLLGLLTSDKPLQGDGYSGAKPIPGGQTIGPRNTFNFGSKNVSGISFTENMGSSQQKNSGFRRSDDMFTFHGPGKSVFGTPTLETANKNHETDGGSAHGDDDDDGPHFEPVVPLPDKIEVKTGEEDEEEFFCNRAKLFRFDVESKEWKERGIGNVKILRHKTSGKIRLLMRREQVLKICANHYISPDMKLTPNAGSDRSFVWHALDYADELPKPEQLAIRFKTPEEAALFKCKFEEAQSILKAPGTNVAMASNQAVRIVKEPTSHDNKDICKSDAGNLNFEFQVAKKEGSWWHCNSCSLKNASTAKKCVSCQNLNPSNKELVGPPLAETVFTPKTSPENVQDRFALVTPKKEGHWDCSICLVRNEPTVSRCIACQNTKSANKSGSSFVHQASFKFGQGDLPKPINSDFRSVFSTKEGQWDCSACLVQNEGSSTKCAACQNPRKQSLPATSIPTPASFKFGTSETSKTLKSGFEDMFAKKEGQWDCSSCLVRNEANATRCVACQNPDKPSPSTSVPAPASFKFGTSETSKAPKSGFEGMFTKKEGQWDCSVCLVRNEASATKCIACQNPGKQNQTTSAVSTPASSETSKAPKSGFEGMFTKKEGQWDCSVCLVRNEASATKCIACQNPGKQNQTTSAVSTPASSETSKAPKSGFEGMFTKKEGQWDCSVCLVRNEASATKCIACQCPSKQNQTTAISTPASSEISKAPKSGFEGMFIRKGQWDCSVCCVQNESSSLKCVACDASKPTHKPIAEAPSAFTLGSEMKLHDSSGSQVGTGFKSNFSEKASKFGNTEQGFKFGHVDQENSPSFMFQGSSNTEFKSTKEGFSIPVSADGFKFGISEPGNQEKKSEKPLENGTGFQAQDISGQKNGRGVIFGQTSSTFTFADLAKSTSGEGFQFGKKDPNFKGFSGAGEKLFSSQYGKMANKANTSGDFEKDDDAYKTEDSDDIHFEPVVQMPEKVELVTGEEDEKVLYSQRVKLFRFDAEVSQWKERGLGNLKILKNEVNGKLRMLMRREQVLKVCANHWITTTMNLKPLSGSDRAWMWLASDFSDGDAKLEQLAAKFKTPELAEEFKQKFEECQRLLLDIPLQTPHKLVDTGRAAKLIQRAEEMKSGLKDFKTFLTNDQTKVTEEENKGSGTGAAGASDTTIKPNPENTGPTLEWDNYDLREDALDDSVSSSSVHASPLASSPVRKNLFRFGESTTGFNFSFKSALSPSKSPAKLNQSGTSVGTDEESDVTQEEERDGQYFEPVVPLPDLVEVSSGEENEQVVFSHRAKLYRYDKDVGQWKERGIGDIKILQNYDNKQVRIVMRRDQVLKLCANHRITPDMTLQNMKGTERVWLWTACDFADGERKVEHLAVRFKLQDVADSFKKIFDEAKTAQEKDSLITPHVSRSSTPRESPCGKIAVAVLEETTRERTDVIQGDDVADATSEVEVSSTSETTPKAVVSPPKFVFGSESVKSIFSSEKSKPFAFGNSSATGSLFGFSFNAPLKSNNSETSSVAQSGSESKVEPKKCELSKNSDIEQSSDSKVKNLFASFPTEESSINYTFKTPEKAKEKKKPEDSPSDDDVLIVYELTPTAEQKALATKLKLPPTFFCYKNRPDYVSEEEEDDEDFETAVKKLNGKLYLDGSEKCRPLEENTADNEKECIIVWEKKPTVEEKAKADTLKLPPTFFCGVCSDTDEDNGNGEDFQSELQKVQEAQKSQTEEITSTTDSVYTGGTEVMVPSFCKSEEPDSITKSISSPSVSSETMDKPVDLSTRKEIDTDSTSQGESKIVSFGFGSSTGLSFADLASSNSGDFAFGSKDKNFQWANTGAAVFGTQSVGTQSAGKVGEDEDGSDEEVVHNEDIHFEPIVSLPEVEVKSGEEDEEILFKERAKLYRWDRDVSQWKERGVGDIKILWHTMKNYYRILMRRDQVFKVCANHVITKTMELKPLNVSNNALVWTASDYADGEAKVEQLAVRFKTKEVADCFKKTFEECQQNLMKLQKGHVSLAAELSKETNPVVFFDVCADGEPLGRITMELFSNIVPRTAENFRALCTGEKGFGFKNSIFHRVIPDFVCQGGDITKHDGTGGQSIYGDKFEDENFDVKHTGPGLLSMANQGQNTNNSQFVITLKKAEHLDFKHVVFGFVKDGMDTVKKIESFGSPKGSVCRRITITECGQI

SEQ ID NO: 71414 - protein, 51 aa, Homo sapiens
  Payload ID: 14137
  Gene Symbol: RANBP2
  Gene Name: RAN binding protein 2
  ENSP ID: ENSP00000398970
MRRSKADVERYIASVQGSTPSPRQKSMKGFYFAKLYYEAKEYDLAKNVQWN

SEQ ID NO: 71415 - protein, 51 aa, Homo sapiens; identical to SEQ ID NO: 71414
  Payload ID: 14137
  Gene Symbol: RANBP2
  Gene Name: RAN binding protein 2
  ENSP ID: ENSP00000485979

SEQ ID NO: 71416 - protein, 499 aa, Homo sapiens
  Payload ID: 14138
  Gene Symbol: RANBP3
  Gene Name: RAN binding protein 3
  Uniprot ID: Q9H6Z4
  ENSP ID: ENSP00000034275
MADLANEEKPAIAPPVFVFQKDKGQKRSAGGSSPEGGEDSDREDGNYCPPVKRERTSSLTQFPPSQSEERSSGFRLKPPTLIHGQAPSAGLPSQKPKEQQRSVLRPAVLQAPQPKALSQTVPSSGTNGVSLPADCTGAVPAASPDTAAWRSPSEAADEVCALEEKEPQKNESSNASEEEACEKKDPATQQAFVFGQNLRDRVKLINESVDEADMENAGHPSADTPTATNYFLQYISSSLENSTNSADASSNKFVFGQNMSERVLSPPKLNEVSSDANRENAAAESGSESSSQEATPEKESLAESAAAYTKATARKCLLEKVEVITGEEAESNVLQMQCKLFVFDKTSQSWVERGRGLLRLNDMASTDDGTLQSRLVMRTQGSLRLILNTKLWAQMQIDKASEKSIRITAMDTEDQGVKVFLISASSKDTGQLYAALHHRILALRSRVEQEQEAKMPAPEPGAAPSNEEDDSDDDDVLAPSGATAAGAGDEGDGQTTGST

SEQ ID NO: 71417 - protein, 567 aa, Homo sapiens
  Payload ID: 14138
  Gene Symbol: RANBP3
  Gene Name: RAN binding protein 3
  Uniprot ID: Q9H6Z4
  ENSP ID: ENSP00000341483
MADLANEEKPAIAPPVFVFQKDKGQKSPAEQKNLSDSGEEPRGEAEAPHHGTGHPESAGEHALEPPAPAGASASTPPPPAPEAQLPPFPRELAGRSAGGSSPEGGEDSDREDGNYCPPVKRERTSSLTQFPPSQSEERSSGFRLKPPTLIHGQAPSAGLPSQKPKEQQRSVLRPAVLQAPQPKALSQTVPSSGTNGVSLPADCTGAVPAASPDTAAWRSPSEAADEVCALEEKEPQKNESSNASEEEACEKKDPATQQAFVFGQNLRDRVKLINESVDEADMENAGHPSADTPTATNYFLQYISSSLENSTNSADASSNKFVFGQNMSERVLSPPKLNEVSSDANRENAAAESGSESSSQEATPEKESLAESAAAYTKATARKCLLEKVEVITGEEAESNVLQMQCKLFVFDKTSQSWVERGRGLLRLNDMASTDDGTLQSRLVMRTQGSLRLILNTKLWAQMQIDKASEKSIRITAMDTEDQGVKVFLISASSKDTGQLYAALHHRILALRSRVEQEQEAKMPAPEPGAAPSNEEDDSDDDDVLAPSGATAAGAGDEGDGQTTGST

SEQ ID NO: 71418 - protein, 562 aa, Homo sapiens
  Payload ID: 14138
  Gene Symbol: RANBP3
  Gene Name: RAN binding protein 3
  Uniprot ID: Q9H6Z4
  ENSP ID: ENSP00000404837
MADLANEEKPAIAPPVFVFQKDKGQKSPAEQKNLSDSGEEPRGEAEAPHHGTGHPESAGEHALEPPAPAGASASTPPPPAPEAQLPPFPRELAGRSAGGSSPEGGEDSDREDGNYCPPVKRERTSSLTQFPPSQSEERSSGFRLKPPTLIHGQAPSAGLPSQKPKEQQRSVLRPAVLQAPQPKALSQTVPSSGTNGVSLPADCTGAVPAASPDTAAWRSPSEAADEEKEPQKNESSNASEEEACEKKDPATQQAFVFGQNLRDRVKLINESVDEADMENAGHPSADTPTATNYFLQYISSSLENSTNSADASSNKFVFGQNMSERVLSPPKLNEVSSDANRENAAAESGSESSSQEATPEKESLAESAAAYTKATARKCLLEKVEVITGEEAESNVLQMQCKLFVFDKTSQSWVERGRGLLRLNDMASTDDGTLQSRLVMRTQGSLRLILNTKLWAQMQIDKASEKSIRITAMDTEDQGVKVFLISASSKDTGQLYAALHHRILALRSRVEQEQEAKMPAPEPGAAPSNEEDDSDDDDVLAPSGATAAGAGDEGDGQTTGST

SEQ ID NO: 71419 - protein, 73 aa, Homo sapiens
  Payload ID: 14138
  Gene Symbol: RANBP3
  Gene Name: RAN binding protein 3
  ENSP ID: ENSP00000464705
MADLANEEKPAIAPPVFVFQKDKGQKRSAGGSSPEGGEDSDREDGNYCPPVKRERTSSLTQFPPSQSGAFQAC

SEQ ID NO: 71420 - protein, 155 aa, Homo sapiens
  Payload ID: 14138
  Gene Symbol: RANBP3
  Gene Name: RAN binding protein 3
  ENSP ID: ENSP00000464774
MQCKLFVFDKTSQSWVERGRGLLRLNDMASTDDGTLQSRLVMRTQGSLRLILNTKLWAQMQIDKASEKSIRITAMDTEDQGVKVFLISASSKDTGQLYAALHHRILALRSRVEQEQEAKMPAPEPGAAPSNEEDDSDDDDVLAPSGATAAGAGDE

SEQ ID NO: 71421 - protein, 81 aa, Homo sapiens
  Payload ID: 14138
  Gene Symbol: RANBP3
  Gene Name: RAN binding protein 3
  ENSP ID: ENSP00000464986
MLHCRLTSGFEGRVLSLAKVKKTGKRKSLPLLRPSLCFRRIKDKSPLQSKKTCRIRERSLGGRLRPPTMARVTPSQLASMP

SEQ ID NO: 71422 - protein, 494 aa, Homo sapiens
  Payload ID: 14138
  Gene Symbol: RANBP3
  Gene Name: RAN binding protein 3
  ENSP ID: ENSP00000465085
MADLANEEKPAIAPPVFVFQKDKGQKRSAGGSSPEGGEDSDREDGNYCPPVKRERTSSLTQFPPSQSEERSSGFRLKPPTLIHGQAPSAGLPSQKPKEQQRSVLRPAVLQAPQPKALSQTVPSSGTNGVSLPADCTGAVPAASPDTAAWRSPSEAADEEKEPQKNESSNASEEEACEKKDPATQQAFVFGQNLRDRVKLINESVDEADMENAGHPSADTPTATNYFLQYISSSLENSTNSADASSNKFVFGQNMSERVLSPPKLNEVSSDANRENAAAESGSESSSQEATPEKESLAESAAAYTKATARKCLLEKVEVITGEEAESNVLQMQCKLFVFDKTSQSWVERGRGLLRLNDMASTDDGTLQSRLVMRTQGSLRLILNTKLWAQMQIDKASEKSIRITAMDTEDQGVKVFLISASSKDTGQLYAALHHRILALRSRVEQEQEAKMPAPEPGAAPSNEEDDSDDDDVLAPSGATAAGAGDEGDGQTTGST

SEQ ID NO: 71423 - protein, 51 aa, Homo sapiens
  Payload ID: 14138
  Gene Symbol: RANBP3
  Gene Name: RAN binding protein 3
  ENSP ID: ENSP00000466510
MENAGHPSADTPTATNYFLQYISSSLENSTNSADASSNKFVFGQNMSERVL

SEQ ID NO: 71424 - protein, 139 aa, Homo sapiens
  Payload ID: 14138
  Gene Symbol: RANBP3
  Gene Name: RAN binding protein 3
  ENSP ID: ENSP00000466638
MKPSRVWETPFVDAFAVHIMAETKISLREKPAIAPPVFVFQKDKGQKSPAEQKNLSDSGEEPRGEAEAPHHGTGHPESAGEHALEPPAPAGASASTPPPPAPEAQLPPFPRELAGRSAGGSSPEGGEDSDREDGNYCPP

SEQ ID NO: 71425 - protein, 171 aa, Homo sapiens
  Payload ID: 14138
  Gene Symbol: RANBP3
  Gene Name: RAN binding protein 3
  ENSP ID: ENSP00000466761
MADLANEEERSSGFRLKPPTLIHGQAPSAGLPSQKPKEQQRSVLRPAVLQAPQPKALSQTVPSSGTNGVSLPADCTGAVPAASPDTAAWRSPSEAADEVCALEEKEPQKNESSNASEEEACEKKDPATQQAFVFGQNLRDRVKLINESVDEADMENAGHPSADTPTATNYF

SEQ ID NO: 71426 - protein, 74 aa, Homo sapiens
  Payload ID: 14138
  Gene Symbol: RANBP3
  Gene Name: RAN binding protein 3
  ENSP ID: ENSP00000466879
MADLANEEKPAIAPPVFVFQKDKGQKRSAGGSSPEGGEDSDREDGNYCPPVKRERTSSLTQFPPSQSEENFWKE

SEQ ID NO: 71427 - protein, 62 aa, Homo sapiens
  Payload ID: 14138
  Gene Symbol: RANBP3
  Gene Name: RAN binding protein 3
  ENSP ID: ENSP00000466970
MADLANEEKPAIAPPVFVFQKDKGQKVRGRGQLAAPVLKAEKILTEKMEITALLSSEKEHPL

SEQ ID NO: 71428 - protein, 108 aa, Homo sapiens
  Payload ID: 14138
  Gene Symbol: RANBP3
  Gene Name: RAN binding protein 3
  ENSP ID: ENSP00000467560
MADLANEEKPAIAPPVFVFQKDKGQKSPAEQKNLSDSGEEPRGEAEAPHHGTGHPESAGEHALEPPAPAGASASTPPPPAPEAQLPPFPRELAGEEEKTLPLNPEGIP

SEQ ID NO: 71429 - protein, 38 aa, Homo sapiens
  Payload ID: 14138
  Gene Symbol: RANBP3
  Gene Name: RAN binding protein 3
  ENSP ID: ENSP00000467760
MADLANEDGVSPCWPGWSPSPDLVICPPRPPKVLGLQA

SEQ ID NO: 71430 - protein, 77 aa, Homo sapiens
  Payload ID: 14138
  Gene Symbol: RANBP3
  Gene Name: RAN binding protein 3
  ENSP ID: ENSP00000468211
MLHCRLTSGFEGRVLSLAKVKKTGKRKSLPLLRPSLCFRRIKDKRGQLAAPVLKAEKILTEKMEITALLSSEKEHPL

SEQ ID NO: 71431 - protein, 122 aa, Homo sapiens
  Payload ID: 14138
  Gene Symbol: RANBP3
  Gene Name: RAN binding protein 3
  ENSP ID: ENSP00000468815
MENAGHPSADTPTATNYFLQYISSSLENSTNSADASSNKFVFGQNMSERVLSPPKLNEVSSDANRENAAAESGSESSSQEATPEKESLAESAAAYTKATARKCLLEKVEVITGEEAESNVLQ

SEQ ID NO: 71432 - protein, 465 aa, Homo sapiens
  Payload ID: 14139
  Gene Symbol: RANBP3L
  Gene Name: RAN binding protein 3-like
  Uniprot ID: Q86VV4
  ENSP ID: ENSP00000296604
MTTIPRKGSSHLPGSLHTCKLKLQEDRRQQEKSVIAQPIFVFEKGEQTFKRPAEDTLYEAAEPECNGFPTKRVRSSSFTFHITDSQSQGVRKNNVFMTSALVQSSVDIKSAEQGPVKHSKHVIRPAILQLPQARSCAKVRKTFGHKALESCKTKEKTNNKISEGNSYLLSENLSRARISVQLSTNQDFLGATSVGCQPNEDKCSFKSCSSNFVFGENMVERVLGTQKLTQPQLENDSYAKEKPFKSIPKFPVNFLSSRTDSIKNTSLIESAAAFSSQPSRKCLLEKIDVITGEETEHNVLKINCKLFIFNKTTQSWIERGRGTLRLNDTASTDCGTLQSRLIMRNQGSLRLILNSKLWAQMKIQRANHKNVRITATDLEDYSIKIFLIQASAQDTAYLYAAIHHRLVALQSFNKQRDVNQAESLSETAQQLNCESCDENEDDFIQVTKNGSDPSSWTHRQSVACS

SEQ ID NO: 71433 - protein, 321 aa, Homo sapiens
  Payload ID: 14139
  Gene Symbol: RANBP3L
  Gene Name: RAN binding protein 3-like
  Uniprot ID: Q86VV4
  ENSP ID: ENSP00000421149
MTTIPRKGSSHLPGSLHTCKLKLQEDRRQQEKSVIAQPIFVFEKGEQTFKRPAEDTLYEAAEPECNGFPTKRVRSSSFTFHITDSQSQGVRKNNVFMTSALVQSSVDIKSAEQGPVKHSKHVIRPAILQLPQARSCAKVRKTFGHKALESCKTKEKTNNKISEGNSYLLSENLSRARISVQLSTNQDFLGATSVGCQPNEDKCSFKSCSSNFVFGENMVERVLGTQKLTQPQLENDSYAKEKPFKSIPKFPVNFLSSRTDSIKNTSLIESAAAFSSQPSRKCLLEKIDVITGEETEHNVLKVCISCFTLSGSIYILGIKLT

SEQ ID NO: 71434 - protein, 490 aa, Homo sapiens
  Payload ID: 14139
  Gene Symbol: RANBP3L
  Gene Name: RAN binding protein 3-like
  Uniprot ID: Q86VV4
  ENSP ID: ENSP00000421853
MTTIPRKGSSHLPGSLHTCKLKLQEDRRQQEKSVIAQPIFVFEKGEQTFKRPAEDTLYEAAEPECNGFPTKRVRSSSFTFHITDSQSQGVSTLSQKQMRCSSVTNLPTFPHSGPVRKNNVFMTSALVQSSVDIKSAEQGPVKHSKHVIRPAILQLPQARSCAKVRKTFGHKALESCKTKEKTNNKISEGNSYLLSENLSRARISVQLSTNQDFLGATSVGCQPNEDKCSFKSCSSNFVFGENMVERVLGTQKLTQPQLENDSYAKEKPFKSIPKFPVNFLSSRTDSIKNTSLIESAAAFSSQPSRKCLLEKIDVITGEETEHNVLKINCKLFIFNKTTQSWIERGRGTLRLNDTASTDCGTLQSRLIMRNQGSLRLILNSKLWAQMKIQRANHKNVRITATDLEDYSIKIFLIQASAQDTAYLYAAIHHRLVALQSFNKQRDVNQAESLSETAQQLNCESCDENEDDFIQVTKNGSDPSSWTHRQSVACS

SEQ ID NO: 71435 - protein, 108 aa, Homo sapiens
  Payload ID: 14139
  Gene Symbol: RANBP3L
  Gene Name: RAN binding protein 3-like
  ENSP ID: ENSP00000427147
MTTIPRKGSSHLPGSLHTCKLKLQEDRRQQEKSVIAQPIFVFEKGEQTFKRPAEDTLYEAAEPECNGFPTKRVRSSSFTFHITDSQSQGVRKNNVFMTSALVQSSVDI

SEQ ID NO: 71436 - protein, 1105 aa, Homo sapiens
  Payload ID: 14140
  Gene Symbol: RANBP6
  Gene Name: RAN binding protein 6
  Uniprot ID: O60518
  ENSP ID: ENSP00000259569
MAATASAGVPATVSEKQEFYQLLKNLINPSCMVRRQAEEIYENIPGLCKTTFLLDAVRNRRAGYEVRQMAAALLRRLLSSGFEEVYPNLPADVQRDVKIELILAVKLETHASMRKKLCDIFAVLARNLIDEDGTNHWPEGLKFLIDSIYSKNVVLWEVALHVFWHFPGIFGTQERHDLDIIKRLLDQCIQDQEHPAIRTLSARAAAAFVLANENNIALFKDFADLLPGILQAVNDSCYQDDDSVLESLVEIADTVPKYLGPYLEDTLQLSLKLCGDSRLSNLQRQLALEVIVTLSETATPMLKKHTNIIAQAVPHILAMMVDLQDDEDWVNADEMEEDDFDSNAVAAESALDRLACGLGGKVVLPMTKEHIMQMLQSPDWKYRHAGLMALSAIGEGCHQQMESILDETVNSVLLFLQDPHPRVRAAACTTLGQMATDFAPNFQKKFHETVIAALLRTMENQGNQRVQSHAASALIIFIEDCPKSLLVLYVDSMVKNLHSVLVIKLQELIRNGTKLALEQLVTTIASVADTIEEKFVPYYDIFMPSLKHIVELAVQKELKLLRGKTIECISHIGLAVGKEKFMQDASNVMQLLLKTQSDLNNMEDDDPQTSYMVSAWARMCKILGKDFQQYLPLVIEPLIKTASAKPDVALLDTQDVENMSDDDGWQFVNLGDQQSFGIKTSGLEAKATACQMLVYYAKELREGFVEYTEQVVKLMVPLLKFYFHDNVRVAAAESMPFLLECARIRGPEYLAQMWQFICDPLIKAIGTEPDTDVLSEIMNSFAKSIEVMGDGCLNDEHLEELGGILKAKLEGHFKNQELRQVKRQEENYDQQVEMSLQDEDECDVYILTKVSDILHSLFSTYKEKILPWFEQLLPLIVNLICSSRPWPDRQWGLCIFDDIIEHCSPTSFKYVEYFRWPMLLNMRDNNPEVRQAAAYGLGVMAQFGGDDYRSLCSEAVPLLVKVIKCANSKTKKNVIATENCISAIGKILKFKPNCVNVDEVLPHWLSWLPLHEDKEEAIQTLSFLCDLIESNHPVVIGPNNSNLPKIISIIAEGKINETINYEDPCAKRLANVVRQVQTSEDLWLECVSQLDDEQQEALQELLNFA

SEQ ID NO: 71437 - protein, 68 aa, Homo sapiens
  Payload ID: 14140
  Gene Symbol: RANBP6
  Gene Name: RAN binding protein 6
  ENSP ID: ENSP00000485188
MAATASAGVPATVSEKQEFYQLLKNLINPSCMVRRQAEEIYENIPGSSSKGEGCSLYYTWTDGYRFCT

SEQ ID NO: 71438 - protein, 228 aa, Homo sapiens
  Payload ID: 14140
  Gene Symbol: RANBP6
  Gene Name: RAN binding protein 6
  ENSP ID: ENSP00000485482
MAATASAGVPATVSEKQEFYQLLKNLINPSCMVRRQAEEIYENIPGLCKTTFLLDAVRNRRAGYEDPHPRVRAAACTTLGQMATDFAPNFQKKFHETVIAALLRTMENQGNQRVQSHAASALIIFIEDCPKSLLVLYVDSMVKNLHSVLVIKLQELIRNGTKLALEQLVTTIASVADTIEEKFVPYYDIFMPSLKHIVELAVQKELKLLRGKTIECISHIGLAVGKEK

SEQ ID NO: 71439 - protein, 729 aa, Homo sapiens
  Payload ID: 14141
  Gene Symbol: RANBP9
  Gene Name: RAN binding protein 9
  Uniprot ID: Q96S59
  ENSP ID: ENSP00000011619
MSGQPPPPPPQQQQQQQQLSPPPPAALAPVSGVVLPAPPAVSAGSSPAGSPGGGAGGEGLGAAAAALLLHPPPPPPPATAAPPPPPPPPPPPASAAAPASGPPAPPGLAAGPGPAGGAPTPALVAGSSAAAPFPHGDSALNEQEKELQRRLKRLYPAVDEQETPLPRSWSPKDKFSYIGLSQNNLRVHYKGHGKTPKDAASVRATHPIPAACGIYYFEVKIVSKGRDGYMGIGLSAQGVNMNRLPGWDKHSYGYHGDDGHSFCSSGTGQPYGPTFTTGDVIGCCVNLINNTCFYTKNGHSLGIAFTDLPPNLYPTVGLQTPGEVVDANFGQHPFVFDIEDYMREWRTKIQAQIDRFPIGDREGEWQTMIQKMVSSYLVHHGYCATAEAFARSTDQTVLEELASIKNRQRIQKLVLAGRMGEAIETTQQLYPSLLERNPNLLFTLKVRQFIEMVNGTDSEVRCLGGRSPKSQDSYPVSPRPFSSPSMSPSHGMNIHNLASGKGSTAHFSGFESCSNGVISNKAHQSYCHSNKHQSSNLNVPELNSINMSRSQQVNNFTSNDVDMETDHYSNGVGETSSNGFLNGSSKHDHEMEDCDTEMEVDSSQLRRQLCGGSQAAIERMIHFGRELQAMSEQLRRDCGKNTANKKMLKDAFSLLAYSDPWNSPVGNQLDPIQREPVCSALNSAILETHNLPKQPPLALAMGQATQCLGLMARSGIGSCAFATVEDYLH

SEQ ID NO: 71440 - protein, 587 aa, Homo sapiens
  Payload ID: 14142
  Gene Symbol: RANGAP1
  Gene Name: Ran GTPase activating protein 1
  Uniprot ID: P46060
  ENSP ID: ENSP00000348577
MASEDIAKLAETLAKTQVAGGQLSFKGKSLKLNTAEDAKDVIKEIEDFDSLEALRLEGNTVGVEAARVIAKALEKKSELKRCHWSDMFTGRLRTEIPPALISLGEGLITAGAQLVELDLSDNAFGPDGVQGFEALLKSSACFTLQELKLNNCGMGIGGGKILAAALTECHRKSSAQGKPLALKVFVAGRNRLENDGATALAEAFRVIGTLEEVHMPQNGINHPGITALAQAFAVNPLLRVINLNDNTFTEKGAVAMAETLKTLRQVEVINFGDCLVRSKGAVAIADAIRGGLPKLKELNLSFCEIKRDAALAVAEAMADKAELEKLDLNGNTLGEEGCEQLQEVLEGFNMAKVLASLSDDEDEEEEEEGEEEEEEAEEEEEEDEEEEEEEEEEEEEEPQQRGQGEKSATPSRKILDPNTGEPAPVLSSPPPADVSTFLAFPSPEKLLRLGPKSSVLIAQQTDTSDPEKVVSAFLKVSSVFKDEATVRMAVQDAVDALMQKAFNSSSFNSNTFLTRLLVHMGLLKSEDKVKAIANLYGPLMALNHMVQQDYFPKALAPLLLAFVTKPNSALESCSFARHSLLQTLYKV

SEQ ID NO: 71441 - protein, 587 aa, Homo sapiens; identical to SEQ ID NO: 71440
  Payload ID: 14142
  Gene Symbol: RANGAP1
  Gene Name: Ran GTPase activating protein 1
  Uniprot ID: P46060
  ENSP ID: ENSP00000385866

SEQ ID NO: 71442 - protein, 253 aa, Homo sapiens
  Payload ID: 14142
  Gene Symbol: RANGAP1
  Gene Name: Ran GTPase activating protein 1
  ENSP ID: ENSP00000393407
  MOD_RES (1)..(1): Any amino acid
XVGVEAARVIAKALEKKSELKRCHWSDMFTGRLRTEIPPALISLGEGLITAGAQLVELDLSDNAFGPDGVQGFEALLKSSACFTLQELKLNNCGMGIGGGKVIGTLEEVHMPQNGINHPGITALAQAFAVNPLLRVINLNDNTFTEKGAVAMAETLKTLRQVEVINFGDCLVRSKGAVAIADAIRGGLPKLKELNLSFCEIKRDAALAVAEAMADKAELEKLDLNGNTLGEEGCEQLQEVLEGFNMAKVLASL

SEQ ID NO: 71443 - protein, 133 aa, Homo sapiens
  Payload ID: 14142
  Gene Symbol: RANGAP1
  Gene Name: Ran GTPase activating protein 1
  ENSP ID: ENSP00000394787
MASEDIAKLAETLAKTQVAGGQLSFKGKSLKLNTAEDAKDVIKEIEDFDSLEALRLEGNTVGVEAARVIAKALEKKSELKRCHWSDMFTGRLRTEIPPALISLGEGLITAGAQLVELDLSDNAFGPDGVQGFE

SEQ ID NO: 71444 - protein, 587 aa, Homo sapiens; identical to SEQ ID NO: 71440
  Payload ID: 14142
  Gene Symbol: RANGAP1
  Gene Name: Ran GTPase activating protein 1
  Uniprot ID: P46060
  ENSP ID: ENSP00000401470

SEQ ID NO: 71445 - protein, 37 aa, Homo sapiens
  Payload ID: 14142
  Gene Symbol: RANGAP1
  Gene Name: Ran GTPase activating protein 1
  ENSP ID: ENSP00000404842
MASEDIAKLAETLAKTQVAGGQLSFKGKSLKLNTAED

SEQ ID NO: 71446 - protein, 100 aa, Homo sapiens
  Payload ID: 14142
  Gene Symbol: RANGAP1
  Gene Name: Ran GTPase activating protein 1
  ENSP ID: ENSP00000408743
MASEDIAKLAETLAKTQVAGGQLSFKGKSLKLNTAEDAKDVIKEIEDFDSLEALRLEGNTVGVEAARVIAKALEKKSELKRCHWSDMFTGRLRTEIPPAL

SEQ ID NO: 71447 - protein, 186 aa, Homo sapiens [sequence omitted]

SEQ ID NO: 71448 - protein, 146 aa, Homo sapiens
  Payload ID: 14143
  Gene Symbol: RANGRF
  Gene Name: RAN guanine nucleotide release factor
  Uniprot ID: Q9HD47
  ENSP ID: ENSP00000383940
MEPTRDCPLFGGAFSAILPMGAIDVSDLRPVPDNQEVFCHPVTDQSLIVELLELQAHVRGEAAARYHFEDVGGVQGARAVHVESVQPLSLENLALRGRCQEAWVLSGKQQIAKENQQVAKDVTLHQALLRLPQYQTDLLLTFNQPP

SEQ ID NO: 71449 - protein, 165 aa, Homo sapiens
  Payload ID: 14143
  Gene Symbol: RANGRF
  Gene Name: RAN guanine nucleotide release factor
  Uniprot ID: Q9HD47
  ENSP ID: ENSP00000413190
MEPTRDCPLFGGAFSAILPMGAIDVSDLRPVPDNQEVFCHPVTDQSLIVELLELQAHVRGEAAARYHFEDVGGVQGARAVHVESVQPLSLENLALRGRCQEAWVLSGKQQIAKENQQVRARECVMSWKGGSGDAEIQVSILTLIPLGSKGRDTSSGLAEAAPVPD

SEQ ID NO: 71450 - protein, 118 aa, Homo sapiens
  Payload ID: 14143
  Gene Symbol: RANGRF
  Gene Name: RAN guanine nucleotide release factor
  Uniprot ID: Q9HD47
  ENSP ID: ENSP00000462310
MEPTRDCPLFGGAFSAILPMGAIDVSDLRPVPDNQEVFCHPVTDQSLIVELLELQAHVRGEAAARYHFEDVGGVQGARAVHVESVQPLSLENLALRGRCQEAWVLSGKQQIAKENQQP

SEQ ID NO: 71451 - protein, 233 aa, Homo sapiens
  Payload ID: 14144
  Gene Symbol: RAN
  Gene Name: RAN, member RAS oncogene family
  ENSP ID: ENSP00000376174
MAAQGEPQVQFKLVLVGDGGTGKTTFVKRHLTGEFEKKYVATLGVEVHPLVFHTNRGPIKFNVWDTAGQEKFGGLRDGYYIQEMGIHHVAHAGLELMSSAQCAIIMFDVTSRVTYKNVPNWHRDLVRVCENIPIVLCGNKVDIKDRKVKAKSIVFHRKKNLQYYDISAKSNYNFEKPFLWLARKLIGDPNLEFVAMPALAPPEVVMDPALAAQYEHDLEVAQTTALPDEDDDL

SEQ ID NO: 71452 - protein, 216 aa, Homo sapiens
  Payload ID: 14144
  Gene Symbol: RAN
  Gene Name: RAN, member RAS oncogene family
  Uniprot ID: P62826
  ENSP ID: ENSP00000376176
MAAQGEPQVQFKLVLVGDGGTGKTTFVKRHLTGEFEKKYVATLGVEVHPLVFHTNRGPIKFNVWDTAGQEKFGGLRDGYYIQAQCAIIMFDVTSRVTYKNVPNWHRDLVRVCENIPIVLCGNKVDIKDRKVKAKSIVFHRKKNLQYYDISAKSNYNFEKPFLWLARKLIGDPNLEFVAMPALAPPEVVMDPALAAQYEHDLEVAQTTALPDEDDDL

SEQ ID NO: 71453 - protein, 234 aa, Homo sapiens
  Payload ID: 14144
  Gene Symbol: RAN
  Gene Name: RAN, member RAS oncogene family
  ENSP ID: ENSP00000396127
RRRRLRLRRLNCASAIFPASVGRARRRFWKLVLVGDGGTGKTTFVKRHLTGEFEKKYVATLGVEVHPLVFHTNRGPIKFNVWDTAGQEKFGGLRDGYYIQAQCAIIMFDVTSRVTYKNVPNWHRDLVRVCENIPIVLCGNKVDIKDRKVKAKSIVFHRKKNLQYYDISAKSNYNFEKPFLWLARKLIGDPNLEFVAMPALAPPEVVMDPALAAQYEHDLEVAQTTALPDEDDDL

SEQ ID NO: 71454 - protein, 103 aa, Homo sapiens
  Payload ID: 14144
  Gene Symbol: RAN
  Gene Name: RAN, member RAS oncogene family
  ENSP ID: ENSP00000437950
  MOD_RES (1)..(1): Any amino acid
XLRLRRLNCASAIFPASVGRARRRFWKLVLVGDGGTGKTTFVKRHLTGEFEKKYVATLGVEVHPLVFHTNRGPIKFNVWDTAGQEKFGGLRDGYYIQVCHHNV

SEQ ID NO: 71455 - protein, 128 aa, Homo sapiens
  Payload ID: 14144
  Gene Symbol: RAN
  Gene Name: RAN, member RAS oncogene family
  ENSP ID: ENSP00000441210
MFDVTSRVTYKNVPNWHRDLVRVCENIPIVLCGNKVDIKDRKVKAKSIVFHRKKNLQYYDISAKSNYNFEKPFLWLARKLIGDPNLEFVAMPALAPPEVVMDPALAAQYEHDLEVAQTTALPDEDDDL

SEQ ID NO: 71456 - protein, 198 aa, Homo sapiens
  Payload ID: 14144
  Gene Symbol: RAN
  Gene Name: RAN, member RAS oncogene family
  ENSP ID: ENSP00000444042
MAAQGEPQLVLVGDGGTGKTTFVKRHLTGEFEKKYVATLGVEVHPLVFHTNRGPIKFNVWDTAGQEKFGGLRDGYYIQAQCAIIMFDVTSRVTYKNVPNWHRDLVRVCENIPIVLCGNKVDIKDRKVKAKSIVFHRKKNLQYYDISAKSNYNFEKPFLWLARKLIGDPNLEFVAMPALAPPEVVMDPALAAQYEHDLE

SEQ ID NO: 71457 - protein, 216 aa, Homo sapiens; identical to SEQ ID NO: 71452
  Payload ID: 14144
  Gene Symbol: RAN
  Gene Name: RAN, member RAS oncogene family
  Uniprot ID: P62826
  ENSP ID: ENSP00000446215

SEQ ID NO: 71458 - protein, 53 aa, Homo sapiens
  Payload ID: 14144
  Gene Symbol: RAN
  Gene Name: RAN, member RAS oncogene family
  ENSP ID: ENSP00000483687
MAAQGEPQVQFKPSSGLLGSSLETLTWNLLPCLLSPHQKLSWTQLWQHSMSTT

SEQ ID NO: 71459 - protein, 1756 aa, Homo sapiens
  Payload ID: 14145
  Gene Symbol: RGPD1
  Gene Name: RANBP2-like and GRIP domain containing 1
  ENSP ID: ENSP00000381253
MRRSKAYGERYLASVQGSAPSPGKKLRGFYFAKLYYEAKEYDLAKKYVCTYLSVQERDPRAHRFLGLLYELEENTEKAVECYRRSLELNPPQKDLVLKIAELLCKNDVTDGRAKYWVERAAKLFPGSPAIYKLKEHLLDCEGEDGWNKLFDWIQSELYVRPDDVHMNIRLVELYRSNKRLKDAVARCHEAERNIALRSSLEWNSCVVQTLKEYLESLQCLESDKSDWRATNTDLLLAYANLMLLTLSTRDVQESRELLESFDSALQSAKSSLGGNDELSATFLEMKGHFYMHAGSLLLKMGQHGNNVQWQALSELAALCYVIAFQVPRPKIKLIKGEAGQNLLEMMACDRLSQSGHMLLNLSRGKQDFLKEVVETFANKSGQSVLYNALFSSQSSKDTSFLGSDDIGNIDVQEPELEDLARYDVGAIQAHNGSLQHLTWLGLQWNSLPALPGIRKWLKQLFHHLPQETSRLETNAPESICILDLEVFLLGVVYTSHLQLKEKCNSHHSSYQPLCLPLPVCKRLCTERQKSWWDAVCTLIHRKAVPGNSAELRLVVQHEINTLRAQEKHGLQPALLVHWAKCLQKMGRGLNSSYDQQEYIGRSVHYWKKVLPLLKIIKKNSIPEPIDPLFKHFHSVDIQASEIVEYEEDAHITFAILDAVHGNIEDAVTAFESIKSVVSYWNLALIFHRKAEDIENDAVFPEEQEECKNYLRKTRDYLIKIIDDSDSNLSVVKKLPVPLESVKEMLKSVMQELEDYSEGGPLYKNGSLRNADSEIKHSTPSPTKYSLSPSKSYKYSPKTPPRWAEDQNSLRKMICQEVKAITKLNSSKSASRHRWPTENYGPDSVPDGYQGSQTFHGAPLTVATTGPSVYYSQSPAYNSQYLLRPAANVTPTKGSSNTEFKSTKEGFSIAVSADGFKFGISEPGNQEKKSEKPLENDTGFQAQDISGQKNGRGVIFGQTSSTFTFADVAKSTSGEGFQFGKKDPNFKGFSGAGEKLFSSQCGKMANKANTSGDFEKDDDACKTEDSDDIHFEPVVQMPEKVELVTGEEGEKVLYSQGVKLFRFDAEISQWKERGLGNLKILKNEVNGKPRMLMRRDQVLKVCANHWITTTMNLKPLSGSDRAWMWLASDFSDGDAKLERLAAQFKTPELAEEFKQKFEECQRLLLDIPLQTPHKLVDTGRAAKLIQRAEEMKSGLKDFKTFLTNDQTKVTEEENKGSGTGAAGASDTTIKPNPENTGPTLEWDNYDLREDALDDNVSSSSVHDSPLASSPVRKNIFRFDESTTGFNFSFKSALSLSKSPAKLNQSGTSVGTDEESDVTQEEERDGQYFEPVVPLPDLVEVSSGEENEQVVFSHRAELYRYDKDVGQWKERGIGDIKILQNYDNKQVRIVMRRDQVLKLCANHRITPDMSLQNMKGTERVWVWTACDFADGERKVEHLAVRFKLQDVADSFKKIFDEAKTAQEKDSLITPHVSRSSTPRESPCGKIAVAVLEETTRERTDVIQGDDVADAASEVEVSSTSETTTKAVVSPPKFVFGSESVKRIFSSEKSNPFAFGNSSATGSLFGFSFNAPLKSNDSETSSVAQSGSESKVEPKKCELSKNSDIEQSSDSKVKNLSASFPMEESSINYTFKTPEKEPPLWHAEFTKEELVQKLSSTTKSADQLNGLLRETEATSAVLMEQIKLLKSEIRRLERNQEESAANVEHLKNVLLQFIFLKPGSERESLLPVINTMLQLSPEEKGKLAAVAQGLQETSIPKKK

SEQ ID NO: 71460 - protein, 1748 aa, Homo sapiens
  Payload ID: 14145
  Gene Symbol: RGPD1
  Gene Name: RANBP2-like and GRIP domain containing 1
  Uniprot ID: P0DJD0
  ENSP ID: ENSP00000386808
MNVMGFNTDRLAWTRNKLRGFYFAKLYYEAKEYDLAKKYVCTYLSVQERDPRAHRFLGLLYELEENTEKAVECYRRSLELNPPQKDLVLKIAELLCKNDVTDGRAKYWVERAAKLFPGSPAIYKLKEHLLDCEGEDGWNKLFDWIQSELYVRPDDVHMNIRLVELYRSNKRLKDAVARCHEAERNIALRSSLEWNSCVVQTLKEYLESLQCLESDKSDWRATNTDLLLAYANLMLLTLSTRDVQESRELLESFDSALQSAKSSLGGNDELSATFLEMKGHFYMHAGSLLLKMGQHGNNVQWQALSELAALCYVIAFQVPRPKIKLIKGEAGQNLLEMMACDRLSQSGHMLLNLSRGKQDFLKEVVETFANKSGQSVLYNALFSSQSSKDTSFLGSDDIGNIDVQEPELEDLARYDVGAIQAHNGSLQHLTWLGLQWNSLPALPGIRKWLKQLFHHLPQETSRLETNAPESICILDLEVFLLGVVYTSHLQLKEKCNSHHSSYQPLCLPLPVCKRLCTERQKSWWDAVCTLIHRKAVPGNSAELRLVVQHEINTLRAQEKHGLQPALLVHWAKCLQKMGRGLNSSYDQQEYIGRSVHYWKKVLPLLKIIKKNSIPEPIDPLFKHFHSVDIQASEIVEYEEDAHITFAILDAVHGNIEDAVTAFESIKSVVSYWNLALIFHRKAEDIENDAVFPEEQEECKNYLRKTRDYLIKIIDDSDSNLSVVKKLPVPLESVKEMLKSVMQELEDYSEGGPLYKNGSLRNADSEIKHSTPSPTKYSLSPSKSYKYSPKTPPRWAEDQNSLRKMICQEVKAITKLNSSKSASRHRWPTENYGPDSVPDGYQGSQTFHGAPLTVATTGPSVYYSQSPAYNSQYLLRPAANVTPTKGSSNTEFKSTKEGFSIAVSADGFKFGISEPGNQEKKSEKPLENDTGFQAQDISGQKNGRGVIFGQTSSTFTFADVAKSTSGEGFQFGKKDPNFKGFSGAGEKLFSSQCGKMANKANTSGDFEKDDDACKTEDSDDIHFEPVVQMPEKVELVTGEEGEKVLYSQGVKLFRFDAEISQWKERGLGNLKILKNEVNGKPRMLMRRDQVLKVCANHWITTTMNLKPLSGSDRAWMWLASDFSDGDAKLERLAAQFKTPELAEEFKQKFEECQRLLLDIPLQTPHKLVDTGRAAKLIQRAEEMKSGLKDFKTFLTNDQTKVTEEENKGSGTGAAGASDTTIKPNPENTGPTLEWDNYDLREDALDDNVSSSSVHDSPLASSPVRKNIFRFDESTTGFNFSFKSALSLSKSPAKLNQSGTSVGTDEESDVTQEEERDGQYFEPVVPLPDLVEVSSGEENEQVVFSHRAELYRYDKDVGQWKERGIGDIKILQNYDNKQVRIVMRRDQVLKLCANHRITPDMSLQNMKGTERVWVWTACDFADGERKVEHLAVRFKLQDVADSFKKIFDEAKTAQEKDSLITPHVSRSSTPRESPCGKIAVAVLEETTRERTDVIQGDDVADAASEVEVSSTSETTTKAVVSPPKFVFGSESVKRIFSSEKSNPFAFGNSSATGSLFGFSFNAPLKSNDSETSSVAQSGSESKVEPKKCELSKNSDIEQSSDSKVKNLSASFPMEESSINYTFKTPEKEPPLWHAEFTKEELVQKLSSTTKSADQLNGLLRETEATSAVLMEQIKLLKSEIRRLERNQEESAANVEHLKNVLLQFIFLKPGSERESLLPVINTMLQLSPEEKGKLAAVAQGLQETSIPKKK

SEQ ID NO: 71461 - protein, 31 aa, Homo sapiens
  Payload ID: 14145
  Gene Symbol: RGPD1
  Gene Name: RANBP2-like and GRIP domain containing 1
  ENSP ID: ENSP00000402729
  MOD_RES (1)..(1): Any amino acid
XHGNIEDAVTAFESIKSVVSYWNLALESRRH

SEQ ID NO: 71462 - protein, 1748 aa, Homo sapiens; identical to SEQ ID NO: 71460
  Payload ID: 14145
  Gene Symbol: RGPD1
  Gene Name: RANBP2-like and GRIP domain containing 1
  Uniprot ID: P0DJD0
  ENSP ID: ENSP00000453170

SEQ ID NO: 71463 - protein, 1756 aa, Homo sapiens
  Payload ID: 14146
  Gene Symbol: RGPD2
  Gene Name: RANBP2-like and GRIP domain containing 2
  Uniprot ID: P0DJD1
  ENSP ID: ENSP00000381214
MRRSKAYGERYLASVQGSAPSPGKKLRGFYFAKLYYEAKEYDLAKKYVCTYLSVQERDPRAHRFLGLLYELEENTEKAVECYRRSLELNPPQKDLVLKIAELLCKNDVTDGRAKYWVERAAKLFPGSPAIYKLKEHLLDCEGEDGWNKLFDWIQSELYVRPDDVHMNIRLVELYRSNKRLKDAVARCHEAERNIALRSSLEWNSCVVQTLKEYLESLQCLESDKSDWRATNTDLLLAYANLMLLTLSTRDVQESRELLESFDSALQSAKSSLGGNDELSATFLEMKGHFYMHAGSLLLKMGQHGNNVQWQALSELAALCYVIAFQVPRPKIKLIKGEAGQNLLEMMACDRLSQSGHMLLNLSRGKQDFLKEVVETFANKSGQSVLYNALFSSQSSKDTSFLGSDDIGNIDVQEPELEDLARYDVGAIQAHNGSLQHLTWLGLQWNSLPALPGIRKWLKQLFHHLPQETSRLETNAPESICILDLEVFLLGVVYTSHLQLKEKCNSHHSSYQPLCLPLPVCKRLCTERQKSWWDAVCTLIHRKAVPGNSAELRLVVQHEINTLRAQEKHGLQPALLVHWAKCLQKMGRGLNSSYDQQEYIGRSVHYWKKVLPLLKIIKKNSIPEPIDPLFKHFHSVDIQASEIVEYEEDAHITFAILDAVHGNIEDAVTAFESIKSVVSYWNLALIFHRKAEDIENDAVFPEEQEECKNYLRKTRDYLIKIIDDSDSNLSVVKKLPVPLESVKEMLKSVMQELEDYSEGGPLYKNGSLRNADSEIKHSTPSPTKYSLSPSKSYKYSPKTPPRWAEDQNSLRKMICQEVKAITKLNSSKSASRHRWPTENYGPDSVPDGYQGSQTFHGAPLTVATTGPSVYYSQSPAYNSQYLLRPAANVTPTKGSSNTEFKSTKEGFSIAVSADGFKFGISEPGNQEKKSEKPLENDTGFQAQDISGQKNGRGVIFGQTSSTFTFADVAKSTSGEGFQFGKKDPNFKGFSGAGEKLFSSQCGKMANKANTSGDFEKDDDACKTEDSDDIHFEPVVQMPEKVELVTGEEGEKVLYSQGVKLFRFDAEISQWKERGLGNLKILKNEVNGKPRMLMRRDQVLKVCANHWITTTMNLKPLSGSDRAWMWLASDFSDGDAKLERLAAQFKTPELAEEFKQKFEECQRLLLDIPLQTPHKLVDTGRAAKLIQRAEEMKSGLKDFKTFLTNDQTKVTEEENKGSGTGAAGASDTTIKPNPENTGPTLEWDNYDLREDALDDNVSSSSVHDSPLASSPVRKNIFRFDESTTGFNFSFKSALSLSKSPAKLNQSGTSVGTDEESDVTQEEERDGQYFEPVVPLPDLVEVSSGEENEQVVFSHMAELYRYDKDVGQWKERGIGDIKILQNYDNKQVRIVMRRDQVLKLCANHRITPDMSLQNMKGTERVWVWTACDFADGERKVEHLAVRFKLQDVADSFKKIFDEAKTAQEKDSLITPHVSRSSTPRESPCGKIAVAVLEETTRERTDVIQGDDVADAASEVEVSSTSETTTKAVVSPPKFVFGSESVKRIFSSEKSNPFAFGNSSATGSLFGFSFNAPLKSNDSETSSVAQSGSESKVEPKKCELSKNSDIEQSSDSKVKNLSASFPMEESSINYTFKTPEKEPPLWHAEFTKEELVQKLSSTTKSADQLNGLLRETEATSAVLMEQIKLLKSEIRRLERNQEESAANVEHLKNVLLQFIFLKPGSERESLLPVINTMLQLSPEEKGKLAAVAQGLQETSIPKKK

SEQ ID NO: 71464 - protein, 1760 aa, Homo sapiens
  Payload ID: 14147
  Gene Symbol: RGPD3
  Gene Name: RANBP2-like and GRIP domain containing 3
  ENSP ID: ENSP00000303659
MSCSKAYGERYVASVQGSAPSPRKKSTRGFYFAKLYYEAKEYDLAKKYICTYINVREMDPRAHRFLGLLYELEENTEKAVECYRRSVELNPTQKDLVLKIAELLCKNDVTDGRAEYWVERAAKLFPGSPAIYKLKEQLLDCEGEDGWNKLFDLIQSELYVRPDDVHVNIRLVELYRSTKRLKDAVARCHEAERNIALRSSLEWNSCVVQTLKEYLESLQCLESDKSDWRATNTDLLLAYANLMLLTLSTRDVQESRELLESFDSALQSAKSSLGGNDELSATFLEMKGHFYMHAGSLLLKMGQHGNNVQWRALSELAALCYLIAFQVPRPKIKLIKGEAGQNLLEMMACDRLSQSGHMLLNLSRGKQDFLKVVVETFANKSGQSALYDALFSSQSPKDTSFLGSDDIGNIDVQEPELEDLARYDVGAIRAHNGSLQHLTWLGLQWNSLPALPGIRKWLKQLFHHLPQETSRLETNAPESICILDLEVFLLGVVYTSHLQLKEKCNSHHSSYQPLCLPLPVCKQLCTERQKSWWDAVCTLIHRKAVPGNSAKLRLLVQHEINTLRAQEKHGLQPALLVHWAKCLQKMGSGLNSFYDQREYIGRSVHYWKKVLPLLKIIKKKNSIPEPIDPLFKHFHSVDIQASEIVEYEEDAHVTFAILDAVNGNIEDAMTAFESIKSVVSYWNLALIFHRKAEDIANDALSPEEQEECKNYLRKTRGYLIKILDDSDSNLSVVKKLPVPLESVKEMLKSVMQELENYSEGGPLYKNGSLRNADSEIKHSTPSPTKYSLSPSKSYKYSPKTPPRWAEDQNSLLKMIRQEVKAIKKLNSSKSASHHRWPTENYGPDSVPDGYQGSQTFHGAPLTVATTGPSVYYSQSPAYNSQYLLRPAANVTPTKGSSNTEFKSTKEGFSIPVSADGFKFGISEPGNQEKKSEKPLENDTGLQAQDISGRKKGRGVIFGQTSSTFTFADVAKSTSGEGFQFGKKDLNFKGFSGAGEKLFSSQYGKMANKANTSGDFEKDDDAYKTEDSDDIHFEPVVQMPEKVELVTGEEGEKVLYSQGVKLFRFDAEVSQWKERGLGNLKILKNEVNGKVRMLMQREQVLKVCANHWITTTMNLKPLSGSDRAWMWSASDFSDGDAKLERLAAKFKTPELAEEFKQKFEECQRLLLDIPLQTPHKLVDTGRAAKLIQRAEEMKSGLKDFKTFLTNDQTKVAEEENKGSGTGAAGASDTTIKPNAENTGPTLEWDNYDLREDALDDSVSSSSVHASPLASSPVRKNLFHFDESTTGSNFSFKSALSLSKSPAKLNQSGTSVGTDEESDVTQEEERDGQYFEPVVPLPDLVEVSSGEENEQVVFSHRAEFYRYDKDVGQWKERGIGDIKILQNYDNKHVRILMRRDQVLKLCANHRITPDMSLQNMKGTERVWVWTACDFADGERKVEHLAVRFKLQDVADSFKKIFDEAKTAQEKDSLITPHVSRSSTPRESPCGKIAVAVLEETTRERTDVIQGDDVADAASEVEVSSTSETTTKAVVSPPKFVFGSESVKRIFSSEKSKPFAFGNSSATGSLFGFSFNAPLKSNNSETSSVAQSGSESKVEPKKCELSKNSDIEQSSDSKVKNLSASFPTEESSINYTFKTPEKEPPLWYAEFTKEELVQKLSSTTKSADHLNGLLREIEATNAVLMEQIKLLKSEIRRLERNQEQEVSAANVEHLKNVLLQFIFLKPGSERERLLPVINTMLQLSLEEKGKLAAVAQGLQETSIPKKK

SEQ ID NO: 71465 - protein, 1758 aa, Homo sapiens
  Payload ID: 14147
  Gene Symbol: RGPD3
  Gene Name: RANBP2-like and GRIP domain containing 3
  Uniprot ID: A6NKT7
  ENSP ID: ENSP00000386588
MSCSKAYGERYVASVQGSAPSPRKKSTRGFYFAKLYYEAKEYDLAKKYICTYINVREMDPRAHRFLGLLYELEENTEKAVECYRRSVELNPTQKDLVLKIAELLCKNDVTDGRAEYWVERAAKLFPGSPAIYKLKEQLLDCEGEDGWNKLFDLIQSELYVRPDDVHVNIRLVELYRSTKRLKDAVARCHEAERNIALRSSLEWNSCVVQTLKEYLESLQCLESDKSDWRATNTDLLLAYANLMLLTLSTRDVQESRELLESFDSALQSAKSSLGGNDELSATFLEMKGHFYMHAGSLLLKMGQHGNNVQWRALSELAALCYLIAFQVPRPKIKLIKGEAGQNLLEMMACDRLSQSGHMLLNLSRGKQDFLKVVVETFANKSGQSALYDALFSSQSPKDTSFLGSDDIGNIDVQEPELEDLARYDVGAIRAHNGSLQHLTWLGLQWNSLPALPGIRKWLKQLFHHLPQETSRLETNAPESICILDLEVFLLGVVYTSHLQLKEKCNSHHSSYQPLCLPLPVCKQLCTERQKSWWDAVCTLIHRKAVPGNSAKLRLLVQHEINTLRAQEKHGLQPALLVHWAKCLQKMGSGLNSFYDQREYIGRSVHYWKKVLPLLKIIKKKNSIPEPIDPLFKHFHSVDIQASEIVEYEEDAHVTFAILDAVNGNIEDAMTAFESIKSVVSYWNLALIFHRKAEDIANDALSPEEQEECKNYLRKTRGYLIKILDDSDSNLSVVKKLPVPLESVKEMLKSVMQELENYSEGGPLYKNGSLRNADSEIKHSTPSPTKYSLSPSKSYKYSPKTPPRWAEDQNSLLKMIRQEVKAIKEEMQELKLNSSKSASHHRWPTENYGPDSVPDGYQGSQTFHGAPLTVATTGPSVYYSQSPAYNSQYLLRPAANVTPTKGSSNTEFKSTKEGFSIPVSADGFKFGISEPGNQEKKSEKPLENDTGLQAQDISGRKKGRGVIFGQTSSTFTFADVAKSTSGEGFQFGKKDLNFKGFSGAGEKLFSSQYGKMANKANTSGDFEKDDDAYKTEDSDDIHFEPVVQMPEKVELVTGEEGEKVLYSQGVKLFRFDAEVSQWKERGLGNLKILKNEVNGKVRMLMQREQVLKVCANHWITTTMNLKPLSGSDRAWMWSASDFSDGDAKLERLAAKFKTPELAEEFKQKFEECQRLLLDIPLQTPHKLVDTGRAAKLIQRAEEMKSGLKDFKTFLTNDQTKVAEEENKGSGTGAAGASDTTIKPNAENTGPTLEWDNYDLREDALDDSVSSSSVHASPLASSPVRKNLFHFDESTTGSNFSFKSALSLSKSPAKLNQSGTSVGTDEESDVTQEEERDGQYFEPVVPLPDLVEVSSGEENEQVVFSHRAEFYRYDKDVGQWKERGIGDIKILQNYDNKHVRILMRRDQVLKLCANHRITPDMSLQNMKGTERVWVWTACDFADGERKVEHLAVRFKLQDVADSFKKIFDEAKTAQEKDSLITPHVSRSSTPRESPCGKIAVAVLEETTRERTDVIQGDDVADAASEVEVSSTSETTTKAVVSPPKFVFGSESVKRIFSSEKSKPFAFGNSSATGSLFGFSFNAPLKSNNSETSSVAQSGSESKVEPKKCELSKNSDIEQSSDSKVKNLSASFPTEESSINYTFKTPEKEPPLWYAEFTKEELVQKLSSTTKSADHLNGLLREIEATNAVLMEQIKLLKSEIRRLERNQEQEVSAANVEHLKNVLLQFIFLKPGSERERLLPVINTMLQLSLEEKGKLAAVAQGEE

SEQ ID NO: 71466 - protein, 1758 aa, Homo sapiens
  Payload ID: 14148
  Gene Symbol: RGPD4
  Gene Name: RANBP2-like and GRIP domain containing 4
  Uniprot ID: Q7Z3J3
  ENSP ID: ENSP00000386810
MSCSKAYGERYVASVQGSAPSPRKKSTRGFYFAKLYYEAKEYDLAKKYICTYINVREMDPRAHRFLGLLYELEENTEKAVECYRRSVELNPTQKDLVLKIAELLCKNDVTDGRAKYWVERAAKLFPGSPAIYKLKEQLLDCEGEDGWNKLFDLIQSELYVRPDDVHVNIRLVELYRSTKRLKDAVARCHEAERNIALRSSLEWNSCVVQTLKEYLESLQCLESDKSDWRATNTDLLLAYANLMLLTLSTRDVQESRELLESFDSALQSAKSSLGGNDELSATFLEMKGHFYMHAGSLLLKMGQHGNNVQWRALSELAALCYLIAFQVPRPKIKLIKGEAGQNLLEMMACDRLSQSGHMLLNLSRGKQDFLKVVVETFANKSGQSALYDALFSSQSPKDTSFLGSDDIGNIDVQEPELEDLARYDVGAIRAHNGSLQHLTWLGLQWNSLPALPGIRKWLKQLFHHLPQETSRLETNAPESICILDLEVFLLGVVYTSHLQLKEKCNSHHSSYQPLCLPLPVCKQLCTERQKSWWDAVCTLIHRKAVPGNSAKLRLLVQHEINTLRAQEKHGLQPALLVHWAKCLQKMGSGLNSFYDQREYIGRSVHYWKKVLPLLKIIKKKNSIPEPIDPLFKHFHSVDIQASEIVEYEEDAHVTFAILDAVNGNIEDAMTAFESIKSVVSYWNLALIFHRKAEDIANDALSPEEQEECKNYLRKTRGYLIKILDDSDSNLSVVKKLPVPLESVKEMLKSVMQELENYSEGDPLYKNGSLRNADSEIKHSTPSPTKYSLSPSKSYKYSPKTPPRWAEDQNSLLKMIRQEVKAIKEEMQELKLNSSKSASHHRWPTENYGPDSVPDGYQGSQTFHGAPLTVATTGPSVYYSQSPAYNSQYLLRPAANVTPTKGSSNTEFKSTKEGFSIPVSADGFKFGISEPGNQEKESEKPLENDTGFQAQDISGQKNGRGVIFGQTSSTFTFADVAKSTSGEGFQFGKKDPNFKGFSGAGEKLFSSQCGKMANKANTSGDFEKDDDAYKTEDSDDIHFEPVVQMPEKVELVIGEEGEKVLYSQGVKLFRFDAEVRQWKERGLGNLKILKNEVNGKPRMLMRREQVLKVCANHWITTTMNLKPLSGSDRAWMWSASDFSDGDAKLERLAAKFKTPELAEEFKQKFEECQQLLLDIPLQTPHKLVDTGRAAKLIQRAEEMKSGLKDFKTFLTNDQTKVTEEENKGSGTGAAGASDTTIKPNPENTGPTLEWDNCDLREDALDDSVSSSSVHASPLASSPVRKNLFHFGESTTGSNFSFKSALSPSKSPAKLNQSGTSVGTDEESDVTQEEERDGQYFEPVVPLPDLVEVSSGEENEKVVFSHRAELYRYDKDVGQWKERGIGDIKILQNYDNKQVRIVMRRDQVLKLCANHTITPDMSLQNMKGTERVWVWTACDFADGERKVEHLAVRFKLQDVADSFKKIFDEAKTAQEKDSLITPHVSRSSTPRESPCGKIAVAVLEETTRERTDVIQGDDVADAASEVEVSSTSETTTKAVVSPPKFVFGSESVKRIFSSEKSKPFAFGNSSATGSLFGFSFNASLKSNNSETSSVAQSGSESKVEPKKCELSKNSDIEQSSDSKVKNLSASFPMEESSINYTFKTPEKEPPLWHAEFTKEELVQKLSSTTKSADHLNGLLREAEATSAVLMEQIKLLKSEIRRLERNQEQEESAANVEHLKNVLLQFIFLKPGSERERLLPVINTMLQLSPEEKGKLAAVAQGEE

SEQ ID NO: 71467 - protein, 1765 aa, Homo sapiens
  Payload ID: 14149
  Gene Symbol: RGPD5
  Gene Name: RANBP2-like and GRIP domain containing 5
  Uniprot ID: Q99666
  ENSP ID: ENSP00000016946
MRRSKADVERYVASVLGLTPSPRQKSMKGFYFAKLYYEAKEYDLAKKYICTYINVQERDPKAHRFLGLLYELEENTEKAVECYRRSVELNPTQKDLVLKIAELLCKNDVTDGRAKYWVERAAKLFPGSPAIYKLKEQLLDCEGEDGWNKLFDLIQSELYVRPDDVHVNIRLVELYRSTKRLKDAVAHCHEAERNIALRSSLEWNSCVVQTLKEYLESLQCLESDKSDWQATNTDLLLAYANLMLLTLSTRDVQENRELLESFDSALQSAKSSLGGNDELSATFLEMKGHFYMYAGSLLLKMGQHGNNVQWRALSELAALCYLIAFQVPRPKIKLREGKAGQNLLEMMACDRLSQSGHMLLSLSRGKQDFLKEVVETFANKIGQSALYDALFSSQSPKDTSFLGSDDIGKIDVQEPELEDLARYDVGAIRAHNGSLQHLTWLGLQWNSLPALPGIRKWLKQLFHRLPHETSRLETNAPESICILDLEVFLLGVVYTSHLQLKEKCNSHHSSYQPLCLPFPVCKQLCTERQKSWWDAVCTLIHRKAVPGNLAKLRLLVQHEINTLRAQEKHGLQPALLVHWAKYLQKTGSGLNSFYGQLEYIGRSVHYWKKVLPLLKIIKKNSIPEPIDPLFKHFHSVDIQASEIVEYEEDAHITFAMLDAVNGNIEDAVTAFESIKSVVSYWNLALIFHRKAEDIENDALSPEEQEECRNYLTKTRDYLIKIIDDGDSNLSVVKKLPVPLESVKQMLNSVMQELEDYSEGGPLYKNGSLRNADSEIKHSTPSPTKYSLSPSKSYKYSPETPPRWTEDRNSLLNMICQQVEAIKKEMQELKLNSSKSASRHRWPTENYGPDSVPDGYQGSQTFHGAPLTVATTGPSVYYSQSPAYNSQYLLRPAANVTPTKGSSNTEFKSTKEGFSIPVSADGFKFGISEPGNQEKKREKPLENDTGFQAQDISGRKKGRGVIFGQTSSTFTFADVAKSTSGEGFQFGKKDLNFKGFSGAGEKLFSSRYGKMANKANTSGDFEKDDDAYKTEDSDDIHFEPVVQMPEKVELVTGEEGEKVLYSQGVKLFRFDAEVRQWKERGLGNLKILKNEVNGKLRMLMRREQVLKVCANHWITTTMNLKPLSGSDRAWMWSASDFSDGDAKLERLAAKFKTPELAEEFKQKFEECQRLLLDIPLQTPHKLVDTGRAAKLIQRAEEMKSGLKDFKTFLTNDQTKVTEEENKGSGTGAAGASDTTIKPNAENTGPTLEWDNYDLREDALDDSVSSSSVHASPLASSPVRKNLFRFDESTTGSNFSFKSALSLSKSPAKLNQSGTSVGTDEESVVTQEEERDGQYFEPVVPLPDLVEVSSGEENEQVVFSHRAEIYRYDKDVGQWKERGIGDIKILQNYDNKQVRIVMRRDQVLKLCANHRITPDMSLQNMKGTERVWVWTACDFADGERKVEHLAVRFKLQDVADSFKKIFDEAKTAQEKDSLITPHVSRSSTPRESPCGKIAVAILEETTRERTDVIQGDDVADAASEVEVSSTSETTTKAVVSPPKFVFVSESVKRIFSSEKSKPFVFGNSSATGSLFGFSFNAPLKSNNSETSSVAQSGSESKVEPKKCELSKNSDIEQSSDSKVKNLSASFPTEESSINYTFKTPEKEPPLWHAEFTKEELVQKLRSTTKSADHLNGLLREIEATNAVLMEQIKLLKSEIRRLERNQEREKSAANLEYLKNVLLQFIFLKPGSERERLLPVINTMLQLSPEEKGKLAAVAQDEEENASRSSG

SEQ ID NO: 71468 - protein, 904 aa, Homo sapiens
  Payload ID: 14149
  Gene Symbol: RGPD5
  Gene Name: RANBP2-like and GRIP domain containing 5
  Uniprot ID: Q99666
  ENSP ID: ENSP00000272454
MRRSKADVERYVASVLGLTPSPRQKSMKGFYFAKLYYEAKEYDLAKKYICTYINVQERDPKAHRFLGLLYELEENTEKAVECYRRSVELNPTQKDLVLKIAELLCKNDVTDGRAKYWVERAAKLFPGSPAIYKLKEQLLDCEGEDGWNKLFDLIQSELYVRPDDVHVNIRLVELYRSTKRLKDAVAHCHEAERNIALRSSLEWNSCVVQTLKEYLESLQCLESDKSDWQATNTDLLLAYANLMLLTLSTRDVQENRELLESFDSALQSAKSSLGGNDELSATFLEMKGHFYMYAGSLLLKMGQHGNNVQWRALSELAALCYLIAFQVPRPKIKLREGKAGQNLLEMMACDRLSQSGHMLLSLSRGKQDFLKEVVETFANKIGQSALYDALFSSQSPKDTSFLGSDDIGKIDVQEPELEDLARYDVGAIRAHNGSLQHLTWLGLQWNSLPALPGIRKWLKQLFHRLPHETSRLETNAPESICILDLEVFLLGVVYTSHLQLKEKCNSHHSSYQPLCLPFPVCKQLCTERQKSWWDAVCTLIHRKAVPGNLAKLRLLVQHEINTLRAQEKHGLQPALLVHWAKYLQKTGSGLNSFYGQLEYIGRSVHYWKKVLPLLKIIKKNSIPEPIDPLFKHFHSVDIQASEIVEYEEDAHITFAMLDAVNGNIEDAVTAFESIKSVVSYWNLALIFHRKAEDIENDALSPEEQEECRNYLTKTRDYLIKIIDDGDSNLSVVKKLPVPLESVKQMLNSVMQELEDYSEGGPLYKNGSLRNADSEIKHSTPSPTKYSLSPSKSYKYSPETPPRWTEDRNSLLNMICQQVEAIKKEMQELKLNSSKSASRHRWPTENYGPDSVPDGYQGSQTFHGAPLTEAAHRHFTIEKHGDSKWIIYRFTKQLCGTERARAKIS

SEQ ID NO: 71469 - protein, 904 aa, Homo sapiens; identical to SEQ ID NO: 71468
  Payload ID: 14149
  Gene Symbol: RGPD5
  Gene Name: RANBP2-like and GRIP domain containing 5
  Uniprot ID: Q99666
  ENSP ID: ENSP00000376962

SEQ ID NO: 71470 - protein, 134 aa, Homo sapiens
  Payload ID: 14149
  Gene Symbol: RGPD5
  Gene Name: RANBP2-like and GRIP domain containing 5
  ENSP ID: ENSP00000392556
MRRSKADVERYVASVLGLTPSPRQSMKGFYFAKLYYEAKEYDLAKKYICTYINVQERDPKAHRFLGLLYELEENTEKAVECYRRSVELNPTQKDLVLKIAELLCKNDVTDGRAKYWVERAAKLFPGSPAIYKLK

SEQ ID NO: 71471 - protein, 56 aa, Homo sapiens
  Payload ID: 14149
  Gene Symbol: RGPD5
  Gene Name: RANBP2-like and GRIP domain containing 5
  ENSP ID: ENSP00000400797
MKGFYFAKLYYEAKEYDLAKKYICTYINVQERDPKAHRFLGLLYELEENTEKAVEC

SEQ ID NO: 71472 - protein, 98 aa, Homo sapiens
  Payload ID: 14149
  Gene Symbol: RGPD5
  Gene Name: RANBP2-like and GRIP domain containing 5
  ENSP ID: ENSP00000409406
YWVERAAKLFPGSPAIYKLKEQLLDCEGEDGWNKLFDLIQSELYVRPDDVHVNIRLVELYRSTKRLKDAVAHCHEAERNIALRSSLEWNSCVVQTLKF

SEQ ID NO: 71473 - protein, 152 aa, Homo sapiens
  Payload ID: 14149
  Gene Symbol: RGPD5
  Gene Name: RANBP2-like and GRIP domain containing 5
  ENSP ID: ENSP00000411548
MWSGTSPRCWVSPRRLDRYICTYINVQERDPKAHRFLGLLYELEENTEKAVECYRRSVELNPTQKDLVLKIAELLCKNDVTDGRAKYWVERAAKLFPGSPAIYKLKEQLLDCEGEDGWNKLFDLIQSELYVRPDDVHVNIRLVELYRSTKRL

SEQ ID NO: 71474 - protein, 904 aa, Homo sapiens; identical to SEQ ID NO: 71468
  Payload ID: 14150
  Gene Symbol: RGPD6
  Gene Name: RANBP2-like and GRIP domain containing 6
  Uniprot ID: Q99666
  ENSP ID: ENSP00000330023

SEQ ID NO: 71475 - protein, 1765 aa, Homo sapiens; identical to SEQ ID NO: 71467
  Payload ID: 14150
  Gene Symbol: RGPD6
  Gene Name: RANBP2-like and GRIP domain containing 6
  Uniprot ID: Q99666
  ENSP ID: ENSP00000330842

SEQ ID NO: 71476 - protein, 202 aa, Homo sapiens
  Payload ID: 14150
  Gene Symbol: RGPD6
  Gene Name: RANBP2-like and GRIP domain containing 6
  ENSP ID: ENSP00000387779
  MOD_RES (1)..(1): Any amino acid
XFDEAKTAQEKDSLITPHVSRSSTPRESPCGKIAVAILEETTRERTDVIQGDDVADAASEVEVSSTSETTTKAVVSPPKFVFVSESVKRIFSSEKSKPFVFGNSSATGSLFGFSFNAPLKSNNSETSSVAQSGSESKVEPKKCELSKNSDIEQSSDSKVKNLSASFPTEESSINYTFKTPEKGFNFSLFKSNPMAFWTSTPS

SEQ ID NO: 71477 - protein, 56 aa, Homo sapiens; identical to SEQ ID NO: 71471
  Payload ID: 14150
  Gene Symbol: RGPD6
  Gene Name: RANBP2-like and GRIP domain containing 6
  ENSP ID: ENSP00000409424

SEQ ID NO: 71478 - protein, 135 aa, Homo sapiens
  Payload ID: 14150
  Gene Symbol: RGPD6
  Gene Name: RANBP2-like and GRIP domain containing 6
  ENSP ID: ENSP00000410084
MRRSKADVERYVASVLGLTPSPRQSMKGFYFAKLYYEAKEYDLAKKYICTYINVQERDPKAHRFLGLLYELEENTEKAVECYRRSVELNPTQKDLVLKIAELLCKNDVTDGRAKYWVERAAKLFPGSPAIYKLKE

SEQ ID NO: 71479 - protein, 98 aa, Homo sapiens; identical to SEQ ID NO: 71472
  Payload ID: 14150
  Gene Symbol: RGPD6
  Gene Name: RANBP2-like and GRIP domain containing 6
  ENSP ID: ENSP00000418549

SEQ ID NO: 71480 - protein, 1765 aa, Homo sapiens
  Payload ID: 14151
  Gene Symbol: RGPD8
  Gene Name: RANBP2-like and GRIP domain containing 8
  Uniprot ID: O14715
  ENSP ID: ENSP00000306637
MRRSKADVERYVASVLGLTPSPRQKSMKGFYFAKLYYEAKEYDLAKKYICTYINVQERDPKAHRFLGLLYELEENTEKAVECYRRSVELNPTQKDLVLKIAELLCKNDVTDGRAKYWVERAAKLFPGSPAIYKLKEQLLDCEGEDGWNKLFDLIQSELYVRPDDVHVNIRLVELYRSTKRLKDAVAHCHEAERNIALRSSLEWNSCVVQTLKEYLESLQCLESDKSDWRATNTDLLLAYANLMLLTLSTRDVQENRELLESFDSALQSAKSSLGGNDELSATFLEMKGHFYMYAGSLLLKMGQHGNNVQWRALSELAALCYLIAFQVPRPKIKLREGKAGQNLLEMMACDRLSQSGHMLLSLSRGKQDFLKEVVETFANKIGQSALYDALFSSQSPKDTSFLGSDDIGKIDVQEPELEDLARYDVGAIRAHNGSLQHLTWLGLQWNSLPALPGIRKWLKQLFHRLPHETSRLETNAPESICILDLEVFLLGVVYTSHLQLKEKCNSHHSSYQPLCLPFPVCKQLCTERQKSWWDAVCTLIHRKAVPGNLAKLRLLVQHEINTLRAQEKHGLQPALLVHWAKYLQKTGSGLNSFYGQLEYIGRSVHYWKKVLPLLKIIKKNSIPEPIDPLFKHFHSVDIQASEIVEYEEDAHITFAILDAVNGNIEDAVTAFESIKSVVSYWNLALIFHRKAEDIENDALSPEEQEECRNYLTKTRDYLIKIIDDGDSNLSVVKKLPVPLESVKQMLNSVMQELEDYSEGGPLYKNGSLRNADSEIKHSTPSPTKYSLSPSKSYKYSPETPPRWTEDRNSLLNMICQQVEAIKKEMQELKLNSSKSASRHRWPTENYGPDSVPDGYQGSQTFHGAPLTVATTGPSVYYSQSPAYNSQYLLRPAANVTPTKGSSNTEFKSTKEGFSIPVSADGFKFGISEPGNQEKKREKPLENDTGLQAQDIRGRKKGRGVIFGQTSSTFTFADVAKSTSGEGFQFGKKDLNFKGFSGAGEKLFSSRYGKMANKANTSGDFEKDDDAYKTEDSDDIHFEPVVQMPEKVELVTGEEGEKVLYSQGVKLFRFDAEVRQWKERGLGNLKILKNEVNGKLRMLMRREQVLKVCANHWITTTMNLKPLSGSDRAWMWSASDFSDGDAKLERLAAKFKTPELAEEFKQKFEECQRLLLDIPLQTPHKLVDTGRAAKLIQRAEEMKSGLKDFKTFLTNDQTKVTEEENKGSGTGVAGASDTTIKPNAENTGPTLEWDNYDLREDALDDSVSSSSVHASPLASSPVRKNLFRFDESTTGSNFSFKSALSLSKSPAKLNQSGTSVGTDEESVVTQEEERDGQYFEPVVPLPDLVEVSSGEENEQVVFSHRAEIYRYDKDVGQWKERGIGDIKILQNYDNKQVRIVMRRDQVLKLCANHRITPDMSLQNMKGTERVWVWTACDFADGERKVEHLAVRFKLQDVADSFKKIFDEAKTAQEKDSLITPHVSRSSTPRESPCGKIAVAVLEEITRERTDVIQGDDVADAASEVEVSSTSETTTKAVVSPPKFVFVSESVKRIFSSEKSKPFAFGNSSATGSLFGFSFNAPLKSNNSETSSVAQSGSESKVEPKKCELSKNSDIEQSSDSKVKNLSASFPTEESSINYTFKTPEKEPPLWHAEFTKEELVQKLRSTTKSADHLNGLLREIEATNAVLMEQIKLLKSEIRRLERNQEREKSAANLEYLKNVLLQFIFLKPGSERERLLPVINTMLQLSPEEKGKLAAVAQDEEENPSRSSG

SEQ ID NO: 71481 - protein, 904 aa, Homo sapiens
  Payload ID: 14151
  Gene Symbol: RGPD8
  Gene Name: RANBP2-like and GRIP domain containing 8
  ENSP ID: ENSP00000327486
MRRSKADVERYVASVLGLTPSPRQKSMKGFYFAKLYYEAKEYDLAKKYICTYINVQERDPKAHRFLGLLYELEENTEKAVECYRRSVELNPTQKDLVLKIAELLCKNDVTDGRAKYWVERAAKLFPGSPAIYKLKEQLLDCEGEDGWNKLFDLIQSELYVRPDDVHVNIRLVELYRSTKRLKDAVAHCHEAERNIALRSSLEWNSCVVQTLKEYLESLQCLESDKSDWRATNTDLLLAYANLMLLTLSTRDVQENRELLESFDSALQSAKSSLGGNDELSATFLEMKGHFYMYAGSLLLKMGQHGNNVQWRALSELAALCYLIAFQVPRPKIKLREGKAGQNLLEMMACDRLSQSGHMLLSLSRGKQDFLKEVVETFANKIGQSALYDALFSSQSPKDTSFLGSDDIGKIDVQEPELEDLARYDVGAIRAHNGSLQHLTWLGLQWNSLPALPGIRKWLKQLFHRLPHETSRLETNAPESICILDLEVFLLGVVYTSHLQLKEKCNSHHSSYQPLCLPFPVCKQLCTERQKSWWDAVCTLIHRKAVPGNLAKLRLLVQHEINTLRAQEKHGLQPALLVHWAKYLQKTGSGLNSFYGQLEYIGRSVHYWKKVLPLLKIIKKNSIPEPIDPLFKHFHSVDIQASEIVEYEEDAHITFAILDAVNGNIEDAVTAFESIKSVVSYWNLALIFHRKAEDIENDALSPEEQEECRNYLTKTRDYLIKIIDDGDSNLSVVKKLPVPLESVKQMLNSVMQELEDYSEGGPLYKNGSLRNADSEIKHSTPSPTKYSLSPSKSYKYSPETPPRWTEDRNSLLNMICQQVEAIKKEMQELKLNSSKSASRHRWPTENYGPDSVPDGYQGSQTFHGAPLTEAAHRHFTIEKHGDSKWIIYRFTKQLCGTERARAKIS

SEQ ID NO: 71482 - protein, 1625 aa, Homo sapiens
  Payload ID: 14151
  Gene Symbol: RGPD8
  Gene Name: RANBP2-like and GRIP domain containing 8
  ENSP ID: ENSP00000386511
MKGFYFAKLYYEAKEYDLAKKYICTYINVQERDPKAHRFLGLLYELEENTEKAVECYRRSVELNPTQKDLVLKIAELLCKNDVTDGRAKYWVERAAKLFPGSPAIYKLKEQLLDCEGEDGWNKLFDLIQSELYVRPDDVHVNIRLVELYRSTKRLKDAVAHCHEAERNIALRSSLEWNSCVVQTLKVPRPKIKLREGKAGQNLLEMMACDRLSQSGHMLLSLSRGKQDFLKEVVETFANKIGQSALYDALFSSQSPKDTSFLGSDDIGKIDVQEPELEDLARYDVGAIRAHNGSLQHLTWLGLQWNSLPALPGIRKWLKQLFHRLPHETSRLETNAPESICILDLEVFLLGVVYTSHLQLKEKCNSHHSSYQPLCLPFPVCKQLCTERQKSWWDAVCTLIHRKAVPGNLAKLRLLVQHEINTLRAQEKHGLQPALLVHWAKYLQKTGSGLNSFYGQLEYIGRSVHYWKKVLPLLKIIKKNSIPEPIDPLFKHFHSVDIQASEIVEYEEDAHITFAILDAVNGNIEDAVTAFESIKSVVSYWNLALIFHRKAEDIENDALSPEEQEECRNYLTKTRDYLIKIIDDGDSNLSVVKKLPVPLESVKQMLNSVMQELEDYSEGGPLYKNGSLRNADSEIKHSTPSPTKYSLSPSKSYKYSPETPPRWTEDRNSLLNMICQQVEAIKKEMQELKLNSSKSASRHRWPTENYGPDSVPDGYQGSQTFHGAPLTVATTGPSVYYSQSPAYNSQYLLRPAANVTPTKGSSNTEFKSTKEGFSIPVSADGFKFGISEPGNQEKKREKPLENDTGLQAQDIRGRKKGRGVIFGQTSSTFTFADVAKSTSGEGFQFGKKDLNFKGFSGAGEKLFSSRYGKMANKANTSGDFEKDDDAYKTEDSDDIHFEPVVQMPEKVELVTGEEGEKVLYSQGVKLFRFDAEVRQWKERGLGNLKILKNEVNGKLRMLMRREQVLKVCANHWITTTMNLKPLSGSDRAWMWSASDFSDGDAKLERLAAKFKTPELAEEFKQKFEECQRLLLDIPLQTPHKLVDTGRAAKLIQRAEEMKSGLKDFKTFLTNDQTKVTEEENKGSGTGVAGASDTTIKPNAENTGPTLEWDNYDLREDALDDSVSSSSVHASPLASSPVRKNLFRFDESTTGSNFSFKSALSLSKSPAKLNQSGTSVGTDEESVVTQEEERDGQYFEPVVPLPDLVEVSSGEENEQVVFSHRAEIYRYDKDVGQWKERGIGDIKILQNYDNKQVRIVMRRDQVLKLCANHRITPDMSLQNMKGTERVWVWTACDFADGERKVEHLAVRFKLQDVADSFKKIFDEAKTAQEKDSLITPHVSRSSTPRESPCGKIAVAVLEEITRERTDVIQGDDVADAASEVEVSSTSETTTKAVVSPPKFVFVSESVKRIFSSEKSKPFAFGNSSATGSLFGFSFNAPLKSNNSETSSVAQSGSESKVEPKKCELSKNSDIEQSSDSKVKNLSASFPTEESSINYTFKTPEKEPPLWHAEFTKEELVQKLRSTTKSADHLNGLLREIEATNAVLMEQIKLLKSEIRRLERNQEREKSAANLEYLKNVLLQFIFLKPGSERERLLPVINTMLQLSPEEKGKLAAVAQDEEENPSRSSG

SEQ ID NO: 71483 - protein, 98 aa, Homo sapiens; identical to SEQ ID NO: 71472
  Payload ID: 14151
  Gene Symbol: RGPD8
  Gene Name: RANBP2-like and GRIP domain containing 8
  ENSP ID: ENSP00000429923

SEQ ID NO: 71484 - protein, 152 aa, Homo sapiens; identical to SEQ ID NO: 71473
  Payload ID: 14151
  Gene Symbol: RGPD8
  Gene Name: RANBP2-like and GRIP domain containing 8
  ENSP ID: ENSP00000430052

SEQ ID NO: 71485 - protein, 468 aa, Homo sapiens
  Payload ID: 14152
  Gene Symbol: RBCK1
  Gene Name: RanBP-type and C3HC4-type zinc finger containing 1
  Uniprot ID: Q9BYM8
  ENSP ID: ENSP00000254960
MGTATPDGREDQERLWVSVEDAQMHTVTIWLTVRPDMTVASLKDMVFLDYGFPPVLQQWVIGQRLARDQETLHSHGVRQNGDSAYLYLLSARNTSLNPQELQRERQLRMLEDLGFKDLTLQPRGPLEPGPPKPGVPQEPGRGQPDAVPEPPPVGWQCPGCTFINKPTRPGCEMCCRARPEAYQVPASYQPDEEERARLAGEEEALRQYQQRKQQQQEGNYLQHVQLDQRSLVLNTEPAECPVCYSVLAPGEAVVLRECLHTFCRECLQGTIRNSQEAEVSCPFIDNTYSCSGKLLEREIKALLTPEDYQRFLDLGISIAENRSAFSYHCKTPDCKGWCFFEDDVNEFTCPVCFHVNCLLCKAIHEQMNCKEYQEDLALRAQNDVAARQTTEMLKVMLQQGEAMRCPQCQIVVQKKDGCDWIRCTVCHTEICWVTKGPRWGPGGPGDTSGGCRCRVNGIPCHPSCQNCH

SEQ ID NO: 71486 - protein, 510 aa, Homo sapiens
  Payload ID: 14152
  Gene Symbol: RBCK1
  Gene Name: RanBP-type and C3HC4-type zinc finger containing 1
  Uniprot ID: Q9BYM8
  ENSP ID: ENSP00000348632
MDEKTKKAEEMALSLTRAVAGGDEQVAMKCAIWLAEQRVPLSVQLKPEVSPTQDIRLWVSVEDAQMHTVTIWLTVRPDMTVASLKDMVFLDYGFPPVLQQWVIGQRLARDQETLHSHGVRQNGDSAYLYLLSARNTSLNPQELQRERQLRMLEDLGFKDLTLQPRGPLEPGPPKPGVPQEPGRGQPDAVPEPPPVGWQCPGCTFINKPTRPGCEMCCRARPEAYQVPASYQPDEEERARLAGEEEALRQYQQRKQQQQEGNYLQHVQLDQRSLVLNTEPAECPVCYSVLAPGEAVVLRECLHTFCRECLQGTIRNSQEAEVSCPFIDNTYSCSGKLLEREIKALLTPEDYQRFLDLGISIAENRSAFSYHCKTPDCKGWCFFEDDVNEFTCPVCFHVNCLLCKAIHEQMNCKEYQEDLALRAQNDVAARQTTEMLKVMLQQGEAMRCPQCQIVVQKKDGCDWIRCTVCHTEICWVTKGPRWGPGGPGDTSGGCRCRVNGIPCHPSCQNCH

SEQ ID NO: 71487 - protein, 340 aa, Homo sapiens
  Payload ID: 14152
  Gene Symbol: RBCK1
  Gene Name: RanBP-type and C3HC4-type zinc finger containing 1
  ENSP ID: ENSP00000371616
MGCGRMGTVPTSICCQPATPPSTLRSCSGSGSCGCWKIWASRTSRCSRGALWSQAPQSPGSPRNPDGGSQMQCLSPHRWAGSAPGAPSSTSPRGLAVRCAAGRAPRPTRSPPHTSPTRRSERAWRARRRRCVSTSRECLQGTIRNSQEAEVSCPFIDNTYSCSGKLLEREIKALLTPEDYQRFLDLGISIAENRSAFSYHCKTPDCKGWCFFEDDVNEFTCPVCFHVNCLLCKAIHEQMNCKEYQEDLALRAQNDVAARQTTEMLKVMLQQGEAMRCPQCQIVVQKKDGCDWIRCTVCHTEICWVTKGPRWGPGGPGDTSGGCRCRVNGIPCHPSCQNCH

SEQ ID NO: 71488 - protein, 336 aa, Homo sapiens
  Payload ID: 14152
  Gene Symbol: RBCK1
  Gene Name: RanBP-type and C3HC4-type zinc finger containing 1
  ENSP ID: ENSP00000371649
MDEKTKKAEEMALSLTRAVAGGDEQVAMKCAIWLAEQRVPLSVQLKPEVSPTQDIRLWVSVEDAQMHTVTIWLTVRPDMTVASLKDMVFLDYGFPPVLQQWVIGQRLARDQETLHSHGVRQNGDSAYLYLLSARNTSLNPQELQRERQLRMLEDLGFKDLTLQPRGPLEPGPPKPGVPQEPGRGQPDAVPEPPPVGWQCPGCTFINKPTRPGCEMCCRARPEAYQVPASYQPDEEERARLAGEEEALRQYQQRKQQQQEGNYLQHVQLDQRSLVLNTEPAECPVCYSVLAPGEAVVLRSACRAPSATARRRRSPAPSLTTPTRARASCWRGRSRRS

SEQ ID NO: 71489 - protein, 63 aa, Homo sapiens
  Payload ID: 14152
  Gene Symbol: RBCK1
  Gene Name: RanBP-type and C3HC4-type zinc finger containing 1
  ENSP ID: ENSP00000383106
MGTATPDGREDQERFLMVQNGHSSSIQPSHHRRKGRKTPLHTLLKSIAQKLYTLLPLIPVDQN

SEQ ID NO: 71490 - protein, 116 aa, Homo sapiens
  Payload ID: 14152
  Gene Symbol: RBCK1
  Gene Name: RanBP-type and C3HC4-type zinc finger containing 1
  ENSP ID: ENSP00000387799
MDEKTKKEEMALSLTRAVAGGDEQVAMKCAIWLAEQRVPLSVQLKPEVSPTQDIRLWVSVEDAQMHTVTIWLTVRPDMTVASLKDMVFLDYGFPPVLQQWVIGQRLARDQETLHSH

SEQ ID NO: 71491 - protein, 255 aa, Homo sapiens
  Payload ID: 14152
  Gene Symbol: RBCK1
  Gene Name: RanBP-type and C3HC4-type zinc finger containing 1
  ENSP ID: ENSP00000393841
  MOD_RES (1)..(1): Any amino acid
XEMALSLTRAVAGGDEQVAMKCAIWLAEQRVPLSVQLKPEVSPTQDIRSRGEKTEEVGEVREVPDHGGPRVLPRVDSKSSVEPLEGPNWLWVSVEDAQMHTVTIWLTVRPDMTVASLKDMVFLDYGFPPVLQQWVIGQRLARDQETLHSHGVRQNGDSAYLYLLSARNTSLNPQELQRERQLRMLEDLGFKDLTLQPRGPLEPGPPKPGVPQEPGRGQPDAVPEPPPVGWQCPGCTFINKPTRPGCEMCCRARPE

SEQ ID NO: 71492 - protein, 272 aa, Homo sapiens
  Payload ID: 14152
  Gene Symbol: RBCK1
  Gene Name: RanBP-type and C3HC4-type zinc finger containing 1
  ENSP ID: ENSP00000405288
MDEKTKKAEEMALSLTRAVAGGDEQVAMKCAIWLAEQRVPLSVQLKPEVSPTQDIRLWVSVEDAQMHTVTIWLTVRPDMTVASLKDMVFLDYGFPPVLQQWVIGQRLARDQETLHSHGVRQNGDSAYLYLLSARNTSLNPQELQRERQLRMLEDLGFKDLTLQPRGPLEPGPPKPGVPQEPGRGQPDAVPEPPPVGWQCPGCTFINKPTRPGCEMCCRARPEAYQVPASYQPDEEERARLAGEEEALRQYQQGVPAGHHPQQPGGGGLLPLH

SEQ ID NO: 71493 - protein, 117 aa, Homo sapiens
  Payload ID: 14152
  Gene Symbol: RBCK1
  Gene Name: RanBP-type and C3HC4-type zinc finger containing 1
  ENSP ID: ENSP00000415080
MDEKTKKAEEMALSLTRAVAGGDEQVAMKCAIWLAEQRVPLSVQLKPEVSPTQDIRLWVSVEDAQMHTVTIWLTVRPDMTVASLKDMVFLDYGFPPVLQQWVIGQRLARDQETLHSH

SEQ ID NO: 71494 - protein, 105 aa, Homo sapiens
  Payload ID: 14152
  Gene Symbol: RBCK1
  Gene Name: RanBP-type and C3HC4-type zinc finger containing 1
  ENSP ID: ENSP00000417173
MDEKTKKAEEMALSLTRAVAGGDEQVAMKCAIWLAEQRVPLSVQLKPEVSPTQDIRFLMVQNGHSSSIQPSHHRRKGRKTPLHTLLKSIAQKLYTLLPLIPVDQN

SEQ ID NO: 71495 - protein, 1077 aa, Homo sapiens
  Payload ID: 14153
  Gene Symbol: RAPGEF1
  Gene Name: Rap guanine nucleotide exchange factor (GEF) 1
  Uniprot ID: Q13905
  ENSP ID: ENSP00000361263
MDTDSQRSHLSSFTMKLMDKFHSPKIKRTPSKKGKPAEVSVKIPEKPVNKEATDRFLPEGYPLPLDLEQQAVEFMSTSAVASRSQRQKNLSWLEEKEKEVVSALRYFKTIVDKMAIDKKVLEMLPGSASKVLEAILPLVQNDPRIQHSSALSSCYSRVYQSLANLIRWSDQVMLEGVNSEDKEMVTTVKGVIKAVLDGVKELVRLTIEKQGRPSPTSPVKPSSPASKPDGPAELPLTDREVEILNKTTGMSQSTELLPDATDEEVAPPKPPLPGIRVVDNSPPPALPPKKRQSAPSPTRVAVVAPMSRATSGSSLPVGINRQDFDVDCYAQRRLSGGSHSYGGESPRLSPCSSIGKLSKSDEQLSSLDRDSGQCSRNTSCETLDHYDPDYEFLQQDLSNADQIPQQTAWNLSPLPESLGESGSPFLGPPFQLPLGGHPQPDGPLAPGQQTDTPPALPEKKRRSAASQTADGSGCRVSYERHPSQYDNISGEDLQSTAPIPSVPYAPFAAILPFQHGGSSAPVEFVGDFTAPESTGDPEKPPPLPEKKNKHMLAYMQLLEDYSEPQPSMFYQTPQNEHIYQQKNKLLMEVYGFSDSFSGVDSVQELAPPPALPPKQRQLEPPAGKDGHPRDPSAVSGVPGKDSRDGSERAPKSPDALESAQSEEEVDELSLIDHNEIMSRLTLKQEGDDGPDVRGGSGDILLVHATETDRKDLVLYCEAFLTTYRTFISPEELIKKLQYRYEKFSPFADTFKKRVSKNTFFVLVRVVDELCLVELTEEILKLLMELVFRLVCNGELSLARVLRKNILDKVDQKKLLRCATSSQPLAARGVAARPGTLHDFHSHEIAEQLTLLDAELFYKIEIPEVLLWAKEQNEEKSPNLTQFTEHFNNMSYWVRSIIMLQEKAQDRERLLLKFIKIMKHLRKLNNFNSYLAILSALDSAPIRRLEWQKQTSEGLAEYCTLIDSSSSFRAYRAALSEVEPPCIPYLGLILQDLTFVHLGNPDYIDGKVNFSKRWQQFNILDSMRCFQQAHYDMRRNDDIINFFNDFSDHLAEEALWELSLKIKPRNITRRKTDREEKT

SEQ ID NO: 71496 - protein, 1095 aa, Homo sapiens
  Payload ID: 14153
  Gene Symbol: RAPGEF1
  Gene Name: Rap guanine nucleotide exchange factor (GEF) 1
  Uniprot ID: Q13905
  ENSP ID: ENSP00000361264
MGNAIEKQKPLKRSHLYPWKQDSQRSHLSSFTMKLMDKFHSPKIKRTPSKKGKPAEVSVKIPEKPVNKEATDRFLPEGYPLPLDLEQQAVEFMSTSAVASRSQRQKNLSWLEEKEKEVVSALRYFKTIVDKMAIDKKVLEMLPGSASKVLEAILPLVQNDPRIQHSSALSSCYSRVYQSLANLIRWSDQVMLEGVNSEDKEMVTTVKGVIKAVLDGVKELVRLTIEKQGRPSPTSPVKPSSPASKPDGPAELPLTDREVEILNKTTGMSQSTELLPDATDEEVAPPKPPLPGIRVVDNSPPPALPPKKRQSAPSPTRVAVVAPMSRATSGSSLPVGINRQDFDVDCYAQRRLSGGSHSYGGESPRLSPCSSIGKLSKSDEQLSSLDRDSGQCSRNTSCETLDHYDPDYEFLQQDLSNADQIPQQTAWNLSPLPESLGESGSPFLGPPFQLPLGGHPQPDGPLAPGQQTDTPPALPEKKRRSAASQTADGSGCRVSYERHPSQYDNISGEDLQSTAPIPSVPYAPFAAILPFQHGGSSAPVEFVGDFTAPESTGDPEKPPPLPEKKNKHMLAYMQLLEDYSEPQPSMFYQTPQNEHIYQQKNKLLMEVYGFSDSFSGVDSVQELAPPPALPPKQRQLEPPAGKDGHPRDPSAVSGVPGKDSRDGSERAPKSPDALESAQSEEEVDELSLIDHNEIMSRLTLKQEGDDGPDVRGGSGDILLVHATETDRKDLVLYCEAFLTTYRTFISPEELIKKLQYRYEKFSPFADTFKKRVSKNTFFVLVRVVDELCLVELTEEILKLLMELVFRLVCNGELSLARVLRKNILDKVDQKKLLRCATSSQPLAARGVAARPGTLHDFHSHEIAEQLTLLDAELFYKIEIPEVLLWAKEQNEEKSPNLTQFTEHFNNMSYWVRSIIMLQEKAQDRERLLLKFIKIMKHLRKLNNFNSYLAILSALDSAPIRRLEWQKQTSEGLAEYCTLIDSSSSFRAYRAALSEVEPPCIPYLGLILQDLTFVHLGNPDYIDGKVNFSKRWQQFNILDSMRCFQQAHYDMRRNDDIINFFNDFSDHLAEEALWELSLKIKPRNITRRKTDREEKT

SEQ ID NO: 71497 - protein, 1094 aa, Homo sapiens
  Payload ID: 14153
  Gene Symbol: RAPGEF1
  Gene Name: Rap guanine nucleotide exchange factor (GEF) 1
  Uniprot ID: Q13905
  ENSP ID: ENSP00000361269
MSGGLGLRRSPEMSGKIEKADSQRSHLSSFTMKLMDKFHSPKIKRTPSKKGKPAEVSVKIPEKPVNKEATDRFLPEGYPLPLDLEQQAVEFMSTSAVASRSQRQKNLSWLEEKEKEVVSALRYFKTIVDKMAIDKKVLEMLPGSASKVLEAILPLVQNDPRIQHSSALSSCYSRVYQSLANLIRWSDQVMLEGVNSEDKEMVTTVKGVIKAVLDGVKELVRLTIEKQGRPSPTSPVKPSSPASKPDGPAELPLTDREVEILNKTTGMSQSTELLPDATDEEVAPPKPPLPGIRVVDNSPPPALPPKKRQSAPSPTRVAVVAPMSRATSGSSLPVGINRQDFDVDCYAQRRLSGGSHSYGGESPRLSPCSSIGKLSKSDEQLSSLDRDSGQCSRNTSCETLDHYDPDYEFLQQDLSNADQIPQQTAWNLSPLPESLGESGSPFLGPPFQLPLGGHPQPDGPLAPGQQTDTPPALPEKKRRSAASQTADGSGCRVSYERHPSQYDNISGEDLQSTAPIPSVPYAPFAAILPFQHGGSSAPVEFVGDFTAPESTGDPEKPPPLPEKKNKHMLAYMQLLEDYSEPQPSMFYQTPQNEHIYQQKNKLLMEVYGFSDSFSGVDSVQELAPPPALPPKQRQLEPPAGKDGHPRDPSAVSGVPGKDSRDGSERAPKSPDALESAQSEEEVDELSLIDHNEIMSRLTLKQEGDDGPDVRGGSGDILLVHATETDRKDLVLYCEAFLTTYRTFISPEELIKKLQYRYEKFSPFADTFKKRVSKNTFFVLVRVVDELCLVELTEEILKLLMELVFRLVCNGELSLARVLRKNILDKVDQKKLLRCATSSQPLAARGVAARPGTLHDFHSHEIAEQLTLLDAELFYKIEIPEVLLWAKEQNEEKSPNLTQFTEHFNNMSYWVRSIIMLQEKAQDRERLLLKFIKIMKHLRKLNNFNSYLAILSALDSAPIRRLEWQKQTSEGLAEYCTLIDSSSSFRAYRAALSEVEPPCIPYLGLILQDLTFVHLGNPDYIDGKVNFSKRWQQFNILDSMRCFQQAHYDMRRNDDIINFFNDFSDHLAEEALWELSLKIKPRNITRRKTDREEKT

SEQ ID NO: 71498 - protein, 228 aa, Homo sapiens
  Payload ID: 14153
  Gene Symbol: RAPGEF1
  Gene Name: Rap guanine nucleotide exchange factor (GEF) 1
  ENSP ID: ENSP00000394296
  MOD_RES (1)..(1): Any amino acid
XLPEKKNKHMLAYMQLLEDYSEPQPSMFYQTPQNEHIYQQKNKLLMEVYGFSDSFSGVDSVQELAPPPALPPKQRQLQASCAASSFSSVSHCVQQTKVAFTPEDGSAAQGLSVSVSNSFLSRHGSLPVPSYKSVFRSYSQDFVPHHQASVPPFLPPTSSSSPHFPPAHQSQSSDLAVPTMAGPPPSTVDGPLSASQESSFHGNTVCLPSETSFTDSEPPAGKDGHPRD

SEQ ID NO: 71499 - protein, 319 aa, Homo sapiens
  Payload ID: 14153
  Gene Symbol: RAPGEF1
  Gene Name: Rap guanine nucleotide exchange factor (GEF) 1
  ENSP ID: ENSP00000407210
  MOD_RES (1)..(1): Any amino acid
XLAPPPALPPKQRQLSENASEEAGEGEYVNLYSSGQSSEELAPSRGEPPAGKDGHPRDPSAVSGVPGKDSRDGSERAPKSPDALESAQSEEEVDELSLIDHNEIMSRLTLKQEGDDGPDVRGGSGDILLVHATETDRKDLVLYCEAFLTTYRTFISPEELIKKLQYRYEKFSPFADTFKKRVSKNTFFVLVRVVDELCLVELTEEILKLLMELVFRLVCNGELSLARVLRKNILDKVDQKKLLRCATSSQPLAARGVAARPGTLHDFHSHEIAEQLTLLDAELFYKIEIPEVLLWAKEQNEEKSPNLTQFTEHFNNMSY

SEQ ID NO: 71500 - protein, 158 aa, Homo sapiens
  Payload ID: 14153
  Gene Symbol: RAPGEF1
  Gene Name: Rap guanine nucleotide exchange factor (GEF) 1
  ENSP ID: ENSP00000410640
MSGGLGLRRSPEMSGKIEKADSQRSHLSSFTMKLMDKFHSPKIKRTPSKKGKPAEVSVKIPEKPVNKNLSWLEEKEKEVVSALRYFKTIVDKMAIDKKVLEMLPGSASKVLEAILPLVQNDPRIQHSSALSSCYSRVYQSLANLIRWSDQVMLEGVNS

SEQ ID NO: 71501 - protein, 1499 aa, Homo sapiens
  Payload ID: 14154
  Gene Symbol: RAPGEF2
  Gene Name: Rap guanine nucleotide exchange factor (GEF) 2
  Uniprot ID: Q9Y4G8
  ENSP ID: ENSP00000264431
MKPLAIPANHGVMGQQEKHSLPADFTKLHLTDSLHPQVTHVSSSHSGCSITSDSGSSSLSDIYQATESEAGDMDLSGLPETAVDSEDDDDEEDIERASDPLMSRDIVRDCLEKDPIDRTDDDIEQLLEFMHQLPAFANMTMSVRRELCAVMVFAVVERAGTIVLNDGEELDSWSVILNGSVEVTYPDGKAEILCMGNSFGVSPTMDKEYMKGVMRTKVDDCQFVCIAQQDYCRILNQVEKNMQKVEEEGEIVMVKEHRELDRTGTRKGHIVIKGTSERLTMHLVEEHSVVDPTFIEDFLLTYRTFLSSPMEVGKKLLEWFNDPSLRDKVTRVVLLWVNNHFNDFEGDPAMTRFLEEFENNLEREKMGGHLRLLNIACAAKAKRRLMTLTKPSREAPLPFILLGGSEKGFGIFVDSVDSGSKATEAGLKRGDQILEVNGQNFENIQLSKAMEILRNNTHLSITVKTNLFVFKELLTRLSEEKRNGAPHLPKIGDIKKASRYSIPDLAVDVEQVIGLEKVNKKSKANTVGGRNKLKKILDKTRISILPQKPYNDIGIGQSQDDSIVGLRQTKHIPTALPVSGTLSSSNPDLLQSHHRILDFSATPDLPDQVLRVFKADQQSRYIMISKDTTAKEVVIQAIREFAVTATPDQYSLCEVSVTPEGVIKQRRLPDQLSKLADRIQLSGRYYLKNNMETETLCSDEDAQELLRESQISLLQLSTVEVATQLSMRNFELFRNIEPTEYIDDLFKLRSKTSCANLKRFEEVINQETFWVASEILRETNQLKRMKIIKHFIKIALHCRECKNFNSMFAIISGLNLAPVARLRTTWEKLPNKYEKLFQDLQDLFDPSRNMAKYRNVLNSQNLQPPIIPLFPVIKKDLTFLHEGNDSKVDGLVNFEKLRMIAKEIRHVGRMASVNMDPALMFRTRKKKWRSLGSLSQGSTNATVLDVAQTGGHKKRVRRSSFLNAKKLYEDAQMARKVKQYLSNLELEMDEESLQTLSLQCEPATNTLPKNPGDKKPVKSETSPVAPRAGSQQKAQSLPQPQQQPPPAHKINQGLQVPAVSLYPSRKKVPVKDLPPFGINSPQALKKILSLSEEGSLERHKKQAEDTISNASSQLSSPPTSPQSSPRKGYTLAPSGTVDNFSDSGHSEISSRSSIVSNSSFDSVPVSLHDERRQRHSVSIVETNLGMGRMERRTMIEPDQYSLGSYAPMSEGRGLYATATVISSPSTEELSQDQGDRASLDAADSGRGSWTSCSSGSHDNIQTIQHQRSWETLPFGHTHFDYSGDPAGLWASSSHMDQIMFSDHSTKYNRQNQSRESLEQAQSRASWASSTGYWGEDSEGDTGTIKRRGGKDVSIEAESSSLTSVTTEETKPVPMPAHIAVASSTTKGLIARKEGRYREPPPTPPGYIGIPITDFPEGHSHPARKPPDYNVALQRSRMVARSSDTAGPSSVQQPHGHPTSSRPVNKPQWHKPNESDPRLAPYQSQGFSTEEDEDEQVSAV

SEQ ID NO: 71502 - protein, 265 aa, Homo sapiens
  Payload ID: 14154
  Gene Symbol: RAPGEF2
  Gene Name: Rap guanine nucleotide exchange factor (GEF) 2
  ENSP ID: ENSP00000421083
  MOD_RES (1)..(1): Any amino acid
XDAQMARKVKQYLSNLELEMDEESLQTLSLQCEPATNTLPKNPGDKKPVKSETSPVAPRAGSQQKAQSLPQPQQQPPPAHKINQGLQVPAVSLYPSRKKVPVKDLPPFGINSPQALKKILSLSEEGSLERHKKQAEDTISNASSQLSSPPTSPQSSPRKGGSGNQLRSFGSGQLDLTSSSSSLGSYTLAPSGTVDNFSDSGHSEISSRSSIVSNSSFDSVPVSLHDERRQRHSVSIVETNLGMGRMERRTMIEPDQYSLGSYAPM

SEQ ID NO: 71503 - protein, 116 aa, Homo sapiens
  Payload ID: 14154
  Gene Symbol: RAPGEF2
  Gene Name: Rap guanine nucleotide exchange factor (GEF) 2
  ENSP ID: ENSP00000421602
MDLSGLPETAVDSEDDDDEEDIERASDPLMSRDIVRDCLEKDPIDRTDDDIEQLLEFMHQLPAFANMTMSVRRELCAVMVFAVVERAGTIVLNDGEELDSWSVILNGSVEVTYPDG

SEQ ID NO: 71504 - protein, 189 aa, Homo sapiens
  Payload ID: 14154
  Gene Symbol: RAPGEF2
  Gene Name: Rap guanine nucleotide exchange factor (GEF) 2
  ENSP ID: ENSP00000421624
  MOD_RES (1)..(1): Any amino acid
XKKMGGHLRLLNIACAAKAKRRLMTLTKPSREAPLPFILLGGSEKGFGIFVDSVDSGSKATEAGLKRGDQILEVNGQNFENIQLSKAMEILRNNTHLSITVKTNLFVFKELLTRLSEEKRNGAPHLPKIGDIKKASRYSIPDLAVDVEQVIGLEKVNKKSKANTVGGRNKLKKILDKTRISILPQKPYK

SEQ ID NO: 71505 - protein, 155 aa, Homo sapiens
  Payload ID: 14154
  Gene Symbol: RAPGEF2
  Gene Name: Rap guanine nucleotide exchange factor (GEF) 2
  ENSP ID: ENSP00000421740
MAFLVRCYANCLQPWSSKLPADFTKLHLTDSLHPQVTHVSSSHSGCSITSDSGSSSLSDIYQATESEAGDMDLSGLPETAVDSEDDDDEEDIERASDPLMSRDIVRDCLEKDPIDRTDDDIEQLLEFMHQLPAFANMTMSVRRELCAVMVFAVVE

SEQ ID NO: 71506 - protein, 182 aa, Homo sapiens
  Payload ID: 14154
  Gene Symbol: RAPGEF2
  Gene Name: Rap guanine nucleotide exchange factor (GEF) 2
  ENSP ID: ENSP00000422098
  MOD_RES (1)..(1): Any amino acid
XVDGLVNFEKLRMIAKEIRHVGRMASVNMDPALMFRTRSLSQGSTNATVLDVAQTGGHKKRVRRSSFLNAKKLYEDAQMARKVKQYLSNLELEMDEESLQTLSLQCEPATNTLPKNPGDKKPVKSETSPVAPRAGSQQKAQSLPQPQQQPPPAHKINQGLQVPAVSLYPSRKKVPVKDLPPF

SEQ ID NO: 71507 - protein, 154 aa, Homo sapiens
  Payload ID: 14154
  Gene Symbol: RAPGEF2
  Gene Name: Rap guanine nucleotide exchange factor (GEF) 2
  ENSP ID: ENSP00000422361
MLPADFTKLHLTDSLHPQVTHVSSSHSGCSITSDSGSSSLSDIYQATESEAGDMDLSGLPETAVDSEDDDDEEDIERASDPLMSRDIVRDCLEKDPIDRTDDDIEQLLEFMHQLPAFANMTMSVRRELCAVMVFAVVERAGTIVLNDGEELDSW

SEQ ID NO: 71508 - protein, 279 aa, Homo sapiens
  Payload ID: 14154
  Gene Symbol: RAPGEF2
  Gene Name: Rap guanine nucleotide exchange factor (GEF) 2
  ENSP ID: ENSP00000422707
DNSFRQAVMKNPPERTPQDLEIVYSYLHGMEALSNLREHQLRLMCETVRYERHEANEVLYYPDDIGTCWYILLSGSVFIKESMFLPRSSFGKRSAGSFRRGCECIVLEPSEMIVVDYMDENEEYFQRQASHRQSRRRFRKINQKGERQTIIDTVDPYPMGKPPLPRGYHTECTKSQLPADFTKLHLTDSLHPQVTHVSSSHSGCSITSDSGSSSLSDIYQATESEAGDMDLSGLPETAVDSEDDDDEEDIERASDPLMSRDIVRDCLEKDPIDRTDDDI

SEQ ID NO: 71509 - protein, 324 aa, Homo sapiens
  Payload ID: 14154
  Gene Symbol: RAPGEF2
  Gene Name: Rap guanine nucleotide exchange factor (GEF) 2
  ENSP ID: ENSP00000427334
  MOD_RES (1)..(1): Any amino acid
XSNASSQLSSPPTSPQSSPRKGGSGNQLRSFGSGQLDLTSSSSSLGSENSNKNNNAPRTYGIGYTLAPSGTVDNFSDSGHSEISSRSSIVSNSSFDSVPVSLHDERRQRHSVSIVETNLGMGRMERRTMIEPDQYSLGSYAPMSEGRGLYATATVISSPSTEELSQDQGDRASLDAADSGRGSWTSCSSGSHDNIQTIQHQRSWETLPFGHTHFDYSGDPAGLWASSSHMDQIMFSDHSTKYNRQNQSRESLEQAQSRASWASSTGYWGEDSEGDTGTIKRRGGKDVSIEAESSSLTSVTTEETKPVPMPAHIAVASSTTKGLI

SEQ ID NO: 71510 - protein, 923 aa, Homo sapiens
  Payload ID: 14155
  Gene Symbol: RAPGEF3
  Gene Name: Rap guanine nucleotide exchange factor (GEF) 3
  Uniprot ID: O95398
  ENSP ID: ENSP00000373864
MKVGWPGESCWQVGLAVEDSPALGAPRVGALPDVVPEGTLLNMVLRRMHRPRSCSYQLLLEHQRPSCIQGLRWTPLTNSEESLDFSESLEQASTERVLRAGRQLHRHLLATCPNLIRDRKYHLRLYRQCCSGRELVDGILALGLGVHSRSQVVGICQVLLDEGALCHVKHDWAFQDRDAQFYRFPGPEPEPVRTHEMEEELAEAVALLSQRGPDALLTVALRKPPGQRTDEELDLIFEELLHIKAVAHLSNSVKRELAAVLLFEPHSKAGTVLFSQGDKGTSWYIIWKGSVNVVTHGKGLVTTLHEGDDFGQLALVNDAPRAATIILREDNCHFLRVDKQDFNRIIKDVEAKTMRLEEHGKVVLVLERASQGAGPSRPPTPGRNRYTVMSGTPEKILELLLEAMGPDSSAHDPTETFLSDFLLTHRVFMPSAQLCAALLHHFHVEPAGGSEQERSTYVCNKRQQILRLVSQWVALYGSMLHTDPVATSFLQKLSDLVGRDTRLSNLLREQWPERRRCHRLENGCGNASPQMKARNLPVWLPNQDEPLPGSSCAIQVGDKVPYDICRPDHSVLTLQLPVTASVREVMAALAQEDGWTKGQVLVKVNSAGDAIGLQPDARGVATSLGLNERLFVVNPQEVHELIPHPDQLGPTVGSAEGLDLVSAKDLAGQLTDHDWSLFNSIHQVELIHYVLGPQHLRDVTTANLERFMRRFNELQYWVATELCLCPVPGPRAQLLRKFIKLAAHLKEQKNLNSFFAVMFGLSNSAISRLAHTWERLPHKVRKLYSALERLLDPSWNHRVYRLALAKLSPPVIPFMPLLLKDMTFIHEGNHTLVENLINFEKMRMMARAARMLHHCRSHNPVPLSPLRSRVSHLHEDSQVARISTCSEQSLSTRSPASTWAYVQQLKVIDNQRELSRLSRELEP

SEQ ID NO: 71511 - protein, 598 aa, Homo sapiens
  Payload ID: 14155
  Gene Symbol: RAPGEF3
  Gene Name: Rap guanine nucleotide exchange factor (GEF) 3
  Uniprot ID: O95398
  ENSP ID: ENSP00000378764
MKVGWPGESCWQVGLAVEDSPALGAPRVGALPDVVPEGTLLNMVLRRMHRPRSCSYQLLLEHQRPSCIQGLRWTPLTNSEESLDFSESLEQASTERVLRAGRQLHRHLLATCPNLIRDRKYHLRLYRQCCSGRELVDGILALGLGVHSRSQVVGICQVLLDEGALCHVKHDWAFQDRDAQFYRFPGPEPEPVRTHEMEEELAEAVALLSQRGPDALLTVALRKPPGQRTDEELDLIFEELLHIKAVAHLSNSVKRELAAVLLFEPHSKAGTVLFSQGDKGTSWYIIWKGSVNVVTHGKGLVTTLHEGDDFGQLALVNDAPRAATIILREDNCHFLRVDKQDFNRIIKDVEAKTMRLEEHGKVVLVLERASQGAGPSRPPTPGRNRYTVMSGTPEKILELLLEAMGPDSSAHDPTETFLSDFLLTHRVFMPSAQLCAALLHHFHVEPAGGSEQERSTYVCNKRQQILRLVSQWVALYGSMLHTDPVATSFLQKLSDLVGRDTRLSNLLREQWPERRRCHRLENGCGNASPQMKVSAWPQFLSSAPPGLQAPPSPPDPEGLCGRGKLSSHRHTLGSLIGVHGALAACGALGQAVPGGAEA

SEQ ID NO: 71512 - protein, 881 aa, Homo sapiens
  Payload ID: 14155
  Gene Symbol: RAPGEF3
  Gene Name: Rap guanine nucleotide exchange factor (GEF) 3
  Uniprot ID: O95398
  ENSP ID: ENSP00000384521
MVLRRMHRPRSCSYQLLLEHQRPSCIQGLRWTPLTNSEESLDFSESLEQASTERVLRAGRQLHRHLLATCPNLIRDRKYHLRLYRQCCSGRELVDGILALGLGVHSRSQVVGICQVLLDEGALCHVKHDWAFQDRDAQFYRFPGPEPEPVRTHEMEEELAEAVALLSQRGPDALLTVALRKPPGQRTDEELDLIFEELLHIKAVAHLSNSVKRELAAVLLFEPHSKAGTVLFSQGDKGTSWYIIWKGSVNVVTHGKGLVTTLHEGDDFGQLALVNDAPRAATIILREDNCHFLRVDKQDFNRIIKDVEAKTMRLEEHGKVVLVLERASQGAGPSRPPTPGRNRYTVMSGTPEKILELLLEAMGPDSSAHDPTETFLSDFLLTHRVFMPSAQLCAALLHHFHVEPAGGSEQERSTYVCNKRQQILRLVSQWVALYGSMLHTDPVATSFLQKLSDLVGRDTRLSNLLREQWPERRRCHRLENGCGNASPQMKARNLPVWLPNQDEPLPGSSCAIQVGDKVPYDICRPDHSVLTLQLPVTASVREVMAALAQEDGWTKGQVLVKVNSAGDAIGLQPDARGVATSLGLNERLFVVNPQEVHELIPHPDQLGPTVGSAEGLDLVSAKDLAGQLTDHDWSLFNSIHQVELIHYVLGPQHLRDVTTANLERFMRRFNELQYWVATELCLCPVPGPRAQLLRKFIKLAAHLKEQKNLNSFFAVMFGLSNSAISRLAHTWERLPHKVRKLYSALERLLDPSWNHRVYRLALAKLSPPVIPFMPLLLKDMTFIHEGNHTLVENLINFEKMRMMARAARMLHHCRSHNPVPLSPLRSRVSHLHEDSQVARISTCSEQSLSTRSPASTWAYVQQLKVIDNQRELSRLSRELEP

SEQ ID NO: 71513 - protein, 923 aa, Homo sapiens; identical to SEQ ID NO: 71510
  Payload ID: 14155
  Gene Symbol: RAPGEF3
  Gene Name: Rap guanine nucleotide exchange factor (GEF) 3
  Uniprot ID: O95398
  ENSP ID: ENSP00000395708

SEQ ID NO: 71514 - protein, 222 aa, Homo sapiens
  Payload ID: 14155
  Gene Symbol: RAPGEF3
  Gene Name: Rap guanine nucleotide exchange factor (GEF) 3
  ENSP ID: ENSP00000446731
MVLRRMHRPRSCSYQLLLEHQRPSCIQGLRWTPLTNSEESLDFSESLEQASTERVLRAGRQLHRHLLATCPNLIRDRKYHLRLYRQCCSGRELVDGILALGLGVHSRSQVVGICQVLLDEGALCHVKHDWAFQDRDAQFYRFPGPEPEPVRTHEMEEELAEAVALLSQRGPDALLTVALRKPPGQRTDEELDLIFEELLHIKAVAHLSNSVKRELAAVLLFE

SEQ ID NO: 71515 - protein, 184 aa, Homo sapiens
  Payload ID: 14155
  Gene Symbol: RAPGEF3
  Gene Name: Rap guanine nucleotide exchange factor (GEF) 3
  ENSP ID: ENSP00000447691
  MOD_RES (1)..(1): Any amino acid
XAIGLQPDARGVATSLGLNERLFVVNPQEVHELIPHPDQLGPTVGSAEGLDLVSAKDLAGQLTDHDWSLFNSIHQVELIHYVLGPQHLRDVTTANLERFMRRFNELQYWVATELCLCPVPGPRAQLLRKFIKLAAHLKEQKNLNSFFAVMFGLSNSAISRLAHTWERLPHKVRKLYSALERLLC

SEQ ID NO: 71516 - protein, 814 aa, Homo sapiens
  Payload ID: 14155
  Gene Symbol: RAPGEF3
  Gene Name: Rap guanine nucleotide exchange factor (GEF) 3
  ENSP ID: ENSP00000448480
MVLRRMHRPRSCSYQLLLEHQRPSCIQGLRWTPLTNSEESLDFSESLEQASTERVLRAGRQLHRHLLATCPNLIRDRKYHLRLYRQCCSGRELVDGILALGLGVHSRSQVVGICQVLLDEGALCHVKHDWAFQDRDAQFYRFPGPEPEPVRTHEMEEELAEAVALLSQRGPDALLTVALRKPPGQRTDEELDLIFEELLHIKAVAHLSNSVKRELAAVLLFEPHSKAGTVLFSQGDKGTSWYIIWKGSVNVVTHGKGLVTTLHEGDDFGQLALVNDAPRAATIILREDNCHFLRVDKQDFNRIIKDVEAKTMRLEEHGKVVLVLERASQGAGPSRPPTPGRNRYTVMSGTPEKILELLLEAMGPDSSAHDPTETFLSDFLLTHRVFMPSAQLCAALLHHFHVEPAGGSEQERSTYVCNKRQQILRLVSQWVALYGSMLHTDPVATSFLQKLSDLVGRDTRLSNLLREQWPERRRCHRLENGCGNASPQMKARNLPVWLPNQDEPLPGSSCAIQVGDKDAIGLQPDARGVATSLGLNERLFVVNPQEVHELIPHPDQLGPTVGSAEGLDLVSAKDLAGQLTDHDWSLFNSIHQVELIHYVLGPQHLRDVTTANLERFMRRFNELQYWVATELCLCPVPGPRAQLLRKFIKLAAHNSAISRLAHTWERLPHKVRKLYSALERLLDPSWNHRVYRLALAKLSPPVIPFMPLLLKDMTFIHEGNHTLVENLINFEKMRMMARAARMLHHCRSHNPVPLSPLRSRVSHLHEDSQVARISTCSEQSLSTRSPASTWAYVQQLKVIDNQRELSRLSRELEP

SEQ ID NO: 71517 - protein, 881 aa, Homo sapiens; identical to SEQ ID NO: 71512
  Payload ID: 14155
  Gene Symbol: RAPGEF3
  Gene Name: Rap guanine nucleotide exchange factor (GEF) 3
  Uniprot ID: O95398
  ENSP ID: ENSP00000448619

SEQ ID NO: 71518 - protein, 141 aa, Homo sapiens
  Payload ID: 14155
  Gene Symbol: RAPGEF3
  Gene Name: Rap guanine nucleotide exchange factor (GEF) 3
  ENSP ID: ENSP00000448804
MVLRRMHRPRSCSYQLLLEHQRPSCIQGLRWTPLTNSEESLDFSESLEQASTERVLRAGRQLHRHLLATCPNLIRDRKYHLRLYRQCCSGRELVDGILALGLGVHSRSQVVGICQVLLDEGALCHVKHDWAFQDRDAQFYR

SEQ ID NO: 71519 - protein, 108 aa, Homo sapiens
  Payload ID: 14155
  Gene Symbol: RAPGEF3
  Gene Name: Rap guanine nucleotide exchange factor (GEF) 3
  ENSP ID: ENSP00000449818
FPGPEPEPVRTHEMEEELAEAVALLSQRGPDALLTVALRKPPGQRTDEELDLIFEELLHIKAVAHLSNSVKRELAAVLLFEPHSKAGTVSRGTRALRGTLSGRDLSTW

SEQ ID NO: 71520 - protein, 79 aa, Homo sapiens
  Payload ID: 14155
  Gene Symbol: RAPGEF3
  Gene Name: Rap guanine nucleotide exchange factor (GEF) 3
  ENSP ID: ENSP00000449905
MKVGWPGESCWQVGLAVEDSPALGAPRVGALPDVVPEGTLLNMVLRRMHRPRSCSYQLLLEHQRPSCIQGLRWPRSAHG

SEQ ID NO: 71521 - protein, 1011 aa, Homo sapiens
  Payload ID: 14156
  Gene Symbol: RAPGEF4
  Gene Name: Rap guanine nucleotide exchange factor (GEF) 4
  Uniprot ID: Q8WZA2
  ENSP ID: ENSP00000380271
MVAAHAAHSSSSAEWIACLDKRPLERSSEDVDIIFTRLKEVKAFEKFHPNLLHQICLCGYYENLEKGITLFRQGDIGTNWYAVLAGSLDVKVSETSSHQDAVTICTLGIGTAFGESILDNTPRHATIVTRESSELLRIEQKDFKALWEKYRQYMAGLLAPPYGVMETGSNNDRIPDKENTPLIEPHVPLRPANTITKVPSEKILRAGKILRNAILSRAPHMIRDRKYHLKTYRQCCVGTELVDWMMQQTPCVHSRTQAVGMWQVLLEDGVLNHVDQEHHFQDKYLFYRFLDDEHEDAPLPTEEEKKECDEELQDTMLLLSQMGPDAHMRMILRKPPGQRTVDDLEIIYEELLHIKALSHLSTTVKRELAGVLIFESHAKGGTVLFNQGEEGTSWYIILKGSVNVVIYGKGVVCTLHEGDDFGKLALVNDAPRAASIVLREDNCHFLRVDKEDFNRILRDVEANTVRLKEHDQDVLVLEKVPAGNRASNQGNSQPQQKYTVMSGTPEKILEHFLETIRLEATLNEATDSVLNDFIMMHCVFMPNTQLCPALVAHYHAQPSQGTEQEKMDYALNNKRRVIRLVLQWAAMYGDLLQEDDVSMAFLEEFYVSVSDDARMIAALKEQLPELEKIVKQISEDAKAPQKKHKVLLQQFNTGDERAQKRQPIRGSDEVLFKVYCMDHTYTTIRVPVATSVKEVISAVADKLGSGEGLIIVKMSSGGEKVVLKPNDVSVFTTLTINGRLFACPREQFDSLTPLPEQEGPTVGTVGTFELMSSKDLAYQMTIYDWELFNCVHELELIYHTFGRHNFKKTTANLDLFLRRFNEIQFWVVTEICLCSQLSKRVQLLKKFIKIAAHCKEYKNLNSFFAIVMGLSNVAVSRLALTWEKLPSKFKKFYAEFESLMDPSRNHRAYRLTVAKLEPPLIPFMPLLIKDMTFTHEGNKTFIDNLVNFEKMRMIANTARTVRYYRSQPFNPDAAQANKNHQDVRSYVRQLNVIDNQRTLSQMSHRLEPRRP

SEQ ID NO: 71522 - protein, 187 aa, Homo sapiens
  Payload ID: 14156
  Gene Symbol: RAPGEF4
  Gene Name: Rap guanine nucleotide exchange factor (GEF) 4
  ENSP ID: ENSP00000380274
LMSSKDLAYQMTIYDWELFNCVHELELIYHTFGRHNFKKTTANLDLFLRRFNEIQFWVVTEICLCSQLSKRVQLLKKFIKIAAHCKEYKNLNSFFAIVMGLSNVAVSRLALTWEKLPSKFKKFYAEFESLMDPSRNHRAYRLTVAKLEPPLIPFMPLLIKDMTFTHEGNKTFIDNLVNFEKMVCAVL

SEQ ID NO: 71523 - protein, 867 aa, Homo sapiens
  Payload ID: 14156
  Gene Symbol: RAPGEF4
  Gene Name: Rap guanine nucleotide exchange factor (GEF) 4
  Uniprot ID: Q8WZA2
  ENSP ID: ENSP00000380276
MLYKKYRQYMAGLLAPPYGVMETGSNNDRIPDKENTPLIEPHVPLRPANTITKVPSEKILRAGKILRNAILSRAPHMIRDRKYHLKTYRQCCVGTELVDWMMQQTPCVHSRTQAVGMWQVLLEDGVLNHVDQEHHFQDKYLFYRFLDDEHEDAPLPTEEEKKECDEELQDTMLLLSQMGPDAHMRMILRKPPGQRTVDDLEIIYEELLHIKALSHLSTTVKRELAGVLIFESHAKGGTVLFNQGEEGTSWYIILKGSVNVVIYGKGVVCTLHEGDDFGKLALVNDAPRAASIVLREDNCHFLRVDKEDFNRILRDVEANTVRLKEHDQDVLVLEKVPAGNRASNQGNSQPQQKYTVMSGTPEKILEHFLETIRLEATLNEATDSVLNDFIMMHCVFMPNTQLCPALVAHYHAQPSQGTEQEKMDYALNNKRRVIRLVLQWAAMYGDLLQEDDVSMAFLEEFYVSVSDDARMIAALKEQLPELEKIVKQISEDAKAPQKKHKVLLQQFNTGDERAQKRQPIRGSDEVLFKVYCMDHTYTTIRVPVATSVKEVISAVADKLGSGEGLIIVKMSSGGEKVVLKPNDVSVFTTLTINGRLFACPREQFDSLTPLPEQEGPTVGTVGTFELMSSKDLAYQMTIYDWELFNCVHELELIYHTFGRHNFKKTTANLDLFLRRFNEIQFWVVTEICLCSQLSKRVQLLKKFIKIAAHCKEYKNLNSFFAIVMGLSNVAVSRLALTWEKLPSKFKKFYAEFESLMDPSRNHRAYRLTVAKLEPPLIPFMPLLIKDMTFTHEGNKTFIDNLVNFEKMRMIANTARTVRYYRSQPFNPDAAQANKNHQDVRSYVRQLNVIDNQRTLSQMSHRLEPRRP

SEQ ID NO: 71524 - protein, 943 aa, Homo sapiens
  Payload ID: 14156
  Gene Symbol: RAPGEF4
  Gene Name: Rap guanine nucleotide exchange factor (GEF) 4
  ENSP ID: ENSP00000387104
MVAAHAAHSSSSAEWIACLDKRPLERSSEDVDIIFTRLKEVKAFEKFHPNLLHQICLCGYYENLEKGITLFRQGDIGTNWYAVLAGSLDVKVSETSSHQDAVTICTLGIGTAFGESILDNTPRHATIVTRESSELLRIEQKDFKALWEKYRQYMAGLLAPPYGVMETGSNNDRIPDKENTPLIEPHVPLRPANTITKVPSEKILRAGKILRNAILSRAPHMIRDRKYHLKTYRQCCVGTELVDWMMQQTPCVHSRTQAVGMWQVLLEDGVLNHVDQEHHFQDKYLFYRFLDDEHEDAPLPTEEEKKECDEELQDTMLLLSQMGPDAHMRMILRKPPGQRTVDDLEIIYEELLHIKALSHLSTTVKRELAGVLIFESHAKGGTVLFNQGEEGTSWYIILKGSVNVVIYGKGVVCTLHEGDDFGKLALVNDAPRAASIVLREDNCHFLRVDKEDFNRILRDVEANTVRLKEHDQDVLVLEKVPAGNRASNQGNSQPQQKYTVMSGTPEKILEHFLETIRLEATLNEATDSVLNDFIMMHCVFMPNTQLCPALVAHYHAQPSQGTEQEKMDYALNNKRRVIRLVLQWAAMYGDLLQEDDVSMAFLEEFYVSVSDDARMIAALKEQLPELEKIVKQISEDAKAPQKKHKVLLQQFNTGDERAQKRQPIRGSDEVLFKVYCMDHTYTTIRVPVATSVKEVISAVADKLGSGEGLIIVKMSSGGEKVVLKPNDVSVFTTLTINGRLFACPREQFDSLTPLPEQEGPTVGTVGTFELMSSKDLAYQMTIYDWELFNCVHELELIYHTFGRHNFKKTTANLDLFLRRFNEIQFWVVTEICLCSQLSKRVQLLKKFIKIAAHCKEYKNLNSFFAIVMGLSNVAVSRLALTWERMIANTARTVRYYRSQPFNPDAAQANKNHQDVRSYVRQLNVIDNQRTLSQMSHRLEPRRP

SEQ ID NO: 71525 - protein, 791 aa, Homo sapiens
  Payload ID: 14156
  Gene Symbol: RAPGEF4
  Gene Name: Rap guanine nucleotide exchange factor (GEF) 4
  ENSP ID: ENSP00000438011
MIRDRKYHLKTYRQCCVGTELVDWMMQQTPCVHSRTQAVGMWQVLLEDGVLNHVDQEHHFQDKYLFYRFLDDEHEDAPLPTEEEKKECDEELQDTMLLLSQMGPDAHMRMILRKPPGQRTVDDLEIIYEELLHIKALSHLSTTVKRELAGVLIFESHAKGGTVLFNQGEEGTSWYIILKGSVNVVIYGKGVVCTLHEGDDFGKLALVNDAPRAASIVLREDNCHFLRVDKEDFNRILRDVEANTVRLKEHDQDVLVLEKVPAGNRASNQGNSQPQQKYTVMSGTPEKILEHFLETIRLEATLNEATDSVLNDFIMMHCVFMPNTQLCPALVAHYHAQPSQGTEQEKMDYALNNKRRVIRLVLQWAAMYGDLLQEDDVSMAFLEEFYVSVSDDARMIAALKEQLPELEKIVKQISEDAKAPQKKHKVLLQQFNTGDERAQKRQPIRGSDEVLFKVYCMDHTYTTIRVPVATSVKEVISAVADKLGSGEGLIIVKMSSGGEKVVLKPNDVSVFTTLTINGRLFACPREQFDSLTPLPEQEGPTVGTVGTFELMSSKDLAYQMTIYDWELFNCVHELELIYHTFGRHNFKKTTANLDLFLRRFNEIQFWVVTEICLCSQLSKRVQLLKKFIKIAAHCKEYKNLNSFFAIVMGLSNVAVSRLALTWEKLPSKFKKFYAEFESLMDPSRNHRAYRLTVAKLEPPLIPFMPLLIKDMTFTHEGNKTFIDNLVNFEKMRMIANTARTVRYYRSQPFNPDAAQANKNHQDVRSYVRQLNVIDNQRTLSQMSHRLEPRRP

SEQ ID NO: 71526 - protein, 840 aa, Homo sapiens
  Payload ID: 14156
  Gene Symbol: RAPGEF4
  Gene Name: Rap guanine nucleotide exchange factor (GEF) 4
  Uniprot ID: Q8WZA2
  ENSP ID: ENSP00000440135
MAGLLAPPYGVMETGSNNDRIPDKENVPSEKILRAGKILRNAILSRAPHMIRDRKYHLKTYRQCCVGTELVDWMMQQTPCVHSRTQAVGMWQVLLEDGVLNHVDQEHHFQDKYLFYRFLDDEHEDAPLPTEEEKKECDEELQDTMLLLSQMGPDAHMRMILRKPPGQRTVDDLEIIYEELLHIKALSHLSTTVKRELAGVLIFESHAKGGTVLFNQGEEGTSWYIILKGSVNVVIYGKGVVCTLHEGDDFGKLALVNDAPRAASIVLREDNCHFLRVDKEDFNRILRDVEANTVRLKEHDQDVLVLEKVPAGNRASNQGNSQPQQKYTVMSGTPEKILEHFLETIRLEATLNEATDSVLNDFIMMHCVFMPNTQLCPALVAHYHAQPSQGTEQEKMDYALNNKRRVIRLVLQWAAMYGDLLQEDDVSMAFLEEFYVSVSDDARMIAALKEQLPELEKIVKQISEDAKAPQKKHKVLLQQFNTGDERAQKRQPIRGSDEVLFKVYCMDHTYTTIRVPVATSVKEVISAVADKLGSGEGLIIVKMSSGGEKVVLKPNDVSVFTTLTINGRLFACPREQFDSLTPLPEQEGPTVGTVGTFELMSSKDLAYQMTIYDWELFNCVHELELIYHTFGRHNFKKTTANLDLFLRRFNEIQFWVVTEICLCSQLSKRVQLLKKFIKIAAHCKEYKNLNSFFAIVMGLSNVAVSRLALTWEKLPSKFKKFYAEFESLMDPSRNHRAYRLTVAKLEPPLIPFMPLLIKDMTFTHEGNKTFIDNLVNFEKMRMIANTARTVRYYRSQPFNPDAAQANKNHQDVRSYVRQLNVIDNQRTLSQMSHRLEPRRP

SEQ ID NO: 71527 - protein, 858 aa, Homo sapiens
  Payload ID: 14156
  Gene Symbol: RAPGEF4
  Gene Name: Rap guanine nucleotide exchange factor (GEF) 4
  Uniprot ID: Q8WZA2
  ENSP ID: ENSP00000440250
MAGLLAPPYGVMETGSNNDRIPDKENTPLIEPHVPLRPANTITKVPSEKILRAGKILRNAILSRAPHMIRDRKYHLKTYRQCCVGTELVDWMMQQTPCVHSRTQAVGMWQVLLEDGVLNHVDQEHHFQDKYLFYRFLDDEHEDAPLPTEEEKKECDEELQDTMLLLSQMGPDAHMRMILRKPPGQRTVDDLEIIYEELLHIKALSHLSTTVKRELAGVLIFESHAKGGTVLFNQGEEGTSWYIILKGSVNVVIYGKGVVCTLHEGDDFGKLALVNDAPRAASIVLREDNCHFLRVDKEDFNRILRDVEANTVRLKEHDQDVLVLEKVPAGNRASNQGNSQPQQKYTVMSGTPEKILEHFLETIRLEATLNEATDSVLNDFIMMHCVFMPNTQLCPALVAHYHAQPSQGTEQEKMDYALNNKRRVIRLVLQWAAMYGDLLQEDDVSMAFLEEFYVSVSDDARMIAALKEQLPELEKIVKQISEDAKAPQKKHKVLLQQFNTGDERAQKRQPIRGSDEVLFKVYCMDHTYTTIRVPVATSVKEVISAVADKLGSGEGLIIVKMSSGGEKVVLKPNDVSVFTTLTINGRLFACPREQFDSLTPLPEQEGPTVGTVGTFELMSSKDLAYQMTIYDWELFNCVHELELIYHTFGRHNFKKTTANLDLFLRRFNEIQFWVVTEICLCSQLSKRVQLLKKFIKIAAHCKEYKNLNSFFAIVMGLSNVAVSRLALTWEKLPSKFKKFYAEFESLMDPSRNHRAYRLTVAKLEPPLIPFMPLLIKDMTFTHEGNKTFIDNLVNFEKMRMIANTARTVRYYRSQPFNPDAAQANKNHQDVRSYVRQLNVIDNQRTLSQMSHRLEPRRP

SEQ ID NO: 71528 - protein, 730 aa, Homo sapiens
  Payload ID: 14157
  Gene Symbol: RAPGEF5
  Gene Name: Rap guanine nucleotide exchange factor (GEF) 5
  ENSP ID: ENSP00000343656
MAIGVWQLLLDMGIMLSVDQHLYFQDTYVFYQFSSDECSYLYCEFEREEEWQNGVKLLLQLVPLIPARGGICELSHQKIEDSEESSDEILVRLTSAVQRELAAVIALKARKSAIEQDEENNDKHVAVTEAESVPDSQAGVMCKLQERDEIGRIELVQKLAKENYQFLQTDKKEQEKSEHQDDEVTTVQVKEQDQSVLVLKKVQCCGPAPTAGSAESHWRYVVVSGTPEKILEHLLNDLHLEEVQDKETETLLDDFLLTYTVFMTTDDLCQALLRHYSAKKYQGKEENSDVPRRKRKVLHLVSQWIALYKDWLPEDEHSKMFLKTIYRNVLDDVYEYPILEKELKEFQKILGMHRRHTVDEYSPQKKNKALFHQFSLKENWLQHRGTVTETEEIFCHVYITEHSYVSVKAKVSSIAQEILKVVAEKIQYAEEDLALVAITFSGEKHELQPNDLVISKSLEASGRIYVYRKDLADTLNPFAENEESQQRSMRILGMNTWDLALELMNFDWSLFNSIHEQELIYFTFSRQGSGEHTANLSLLLQRCNEVQLWVATEILLCSQLGKRVQLVKKFIKIAAHCKAQRNLNSFFAIVMGLNTASVSRLSQTWEKIPGKFKKLFSELESLTDPSLNHKAYRDAFKKMKPPKIPFMPLLLKDVTFIHEGNKTFLDNLVNFEKLHMIADTVRTLRHCRTNQFGDLSPKEHQELKSYVNHLYVIDSQQALFELSHRIEPRV

SEQ ID NO: 71529 - protein, 580 aa, Homo sapiens
  Payload ID: 14157
  Gene Symbol: RAPGEF5
  Gene Name: Rap guanine nucleotide exchange factor (GEF) 5
  Uniprot ID: Q92565
  ENSP ID: ENSP00000384044
MGSSRLRVFDPHLERKDSAAALSDRELPLPTFDVPYFKYIDEEDEDDEWSSRSQSSTEDDSVDSLLSDRYVVVSGTPEKILEHLLNDLHLEEVQDKETETLLDDFLLTYTVFMTTDDLCQALLRHYSAKKYQGKEENSDVPRRKRKVLHLVSQWIALYKDWLPEDEHSKMFLKTIYRNVLDDVYEYPILEKELKEFQKILGMHRRHTVDEYSPQKKNKALFHQFSLKENWLQHRGTVTETEEIFCHVYITEHSYVSVKAKVSSIAQEILKVVAEKIQYAEEDLALVAITFSGEKHELQPNDLVISKSLEASGRIYVYRKDLADTLNPFAENEESQQRSMRILGMNTWDLALELMNFDWSLFNSIHEQELIYFTFSRQGSGEHTANLSLLLQRCNEVQLWVATEILLCSQLGKRVQLVKKFIKIAAHCKAQRNLNSFFAIVMGLNTASVSRLSQTWEKIPGKFKKLFSELESLTDPSLNHKAYRDAFKKMKPPKIPFMPLLLKDVTFIHEGNKTFLDNLVNFEKLHMIADTVRTLRHCRTNQFGDLSPKEHQELKSYVNHLYVIDSQQALFELSHRIEPRV

SEQ ID NO: 71530 - protein, 400 aa, Homo sapiens
  Payload ID: 14157
  Gene Symbol: RAPGEF5
  Gene Name: Rap guanine nucleotide exchange factor (GEF) 5
  ENSP ID: ENSP00000384870
MRMAVGSVKMQPPCESPALAAAAAVVAADGPLRRSPSAREPEREQPPASLRPRLRDLPALLRSGLTLRRKRSAAGGRTLSRRISNPYLEHTPSQIYGENSSCAGRALRNIIIVQAADLIKDRVNLKGFYRRSCVGSELVDWLLEHCPFVQCRSMAIGVWQLLLDMGIMLSVDQHLYFQDTYVFYQFSSDECSYLYCEFEREEEWQNGVKLLLQLVPLIPARGGICELSHQKIEDSEESSDEILVRLTSAVQRELAAVIALKARKSAIEQDEENNDKHVAVTEAESVPDSQAGVMCKLQERDEIGRIELVQKLAKENYQFLQTDKKEQEKSEHQDDEVTTVQVKEQDQSVLVLKKVQCCGPAPTAGSAESHWSVLADCRALSSQMDSVPSERTGMARSFSI

SEQ ID NO: 71531 - protein, 155 aa, Homo sapiens
  Payload ID: 14157
  Gene Symbol: RAPGEF5
  Gene Name: Rap guanine nucleotide exchange factor (GEF) 5
  ENSP ID: ENSP00000395729
MSWDCGFKYIFAFSPTLKAGVMCKLQERDEIGRIELVQKLAKENYQFLQTDKKEQEKSEHQDDEVTTVQVKEQDQSVLVLKKVQCCGPAPTAGSAESHWRYVVVSGTPEKILEHLLNDLHLEEVQDKETETLLDDFLLTYTVFMTTDDLCQALLR

SEQ ID NO: 71532 - protein, 124 aa, Homo sapiens
  Payload ID: 14157
  Gene Symbol: RAPGEF5
  Gene Name: Rap guanine nucleotide exchange factor (GEF) 5
  ENSP ID: ENSP00000403956
MGSSRLRVFDPHLERKDSAAALSDRELPLPTFDVPYFKYIDEEDEDDEWSSRSQSSTEDDSVDSLLSDRYVVVSGTPEKILEHLLNDLHLEEVQDKETVIPTPGITCVTSAMCSQSQADQDFMA

SEQ ID NO: 71533 - protein, 142 aa, Homo sapiens
  Payload ID: 14157
  Gene Symbol: RAPGEF5
  Gene Name: Rap guanine nucleotide exchange factor (GEF) 5
  ENSP ID: ENSP00000415664
MTTDDLCQALLRHYSAKKYQGKEENSDVPRRKRKVLHLVSQWIALYKDWLPEDEHSKMFLKTIYRNVLDDVYEYPILEKELKEFQKILGMHRRHTVDEYSPQKKNKALFHQFSLKENWLQHRGTVTETEEIFCHVYITEHSY

SEQ ID NO: 71534 - protein, 444 aa, Homo sapiens
  Payload ID: 14157
  Gene Symbol: RAPGEF5
  Gene Name: Rap guanine nucleotide exchange factor (GEF) 5
  Uniprot ID: Q92565
  ENSP ID: ENSP00000479340
MGSSRLRVFDPHLERKDSAAALSDRELPLPTFDVPYFKYIDEEDEDDEWSSRSQSSTEDDSVDSLLSDRYVVVSGTPEKILEHLLNDLHLEEVQDKETETLLDDFLLTYTVFMTTDDLCQALLRHYSAKKYQGKEENSDVPRRKRKVLHLVSQWIALYKDWLPEDEHSKMFLKTIYRNVLDDVYEYPILEKELKEFQKILGMHRRHTVDEYSPQKKNKALFHQFSLKENWLQHRGTVTETEEIFCHVYITEHSYVSVKAKVSSIAQEILLCSQLGKRVQLVKKFIKIAAHCKAQRNLNSFFAIVMGLNTASVSRLSQTWEKIPGKFKKLFSELESLTDPSLNHKAYRDAFKKMKPPKIPFMPLLLKDVTFIHEGNKTFLDNLVNFEKLHMIADTVRTLRHCRTNQFGDLSPKEHQELKSYVNHLYVIDSQQALFELSHRIEPRV

SEQ ID NO: 71535 - protein, 1609 aa, Homo sapiens
  Payload ID: 14158
  Gene Symbol: RAPGEF6
  Gene Name: Rap guanine nucleotide exchange factor (GEF) 6
  Uniprot ID: Q8TEU7
  ENSP ID: ENSP00000296859
MNSPVDPGARQALRKKPPERTPEDLNTIYSYLHGMEILSNLREHQLRLMSARARYERYSGNQVLFCSETIARCWYILLSGSVLVKGSMVLPPCSFGKQFGGKRGCDCLVLEPSEMIVVENAKDNEDSILQREIPARQSRRRFRKINYKGERQTITDDVEVNSYLSLPADLTKMHLTENPHPQVTHVSSSQSGCSIASDSGSSSLSDIYQATESEVGDVDLTRLPEGPVDSEDDEEEDEEIDRTDPLQGRDLVRECLEKEPADKTDDDIEQLLEFMHQLPAFANMTMSVRRELCSVMIFEVVEQAGAIILEDGQELDSWYVILNGTVEISHPDGKVENLFMGNSFGITPTLDKQYMHGIVRTKVDDCQFVCIAQQDYWRILNHVEKNTHKVEEEGEIVMVHEHRELDRSGTRKGHIVIKATPERLIMHLIEEHSIVDPTYIEDFLLTYRTFLESPLDVGIKLLEWFKIDSLRDKVTRIVLLWVNNHFNDFEGDPAMTRFLEEFEKNLEDTKMNGHLRLLNIACAAKAKWRQVVLQKASRESPLQFSLNGGSEKGFGIFVEGVEPGSKAADSGLKRGDQIMEVNGQNFENITFMKAVEILRNNTHLALTVKTNIFVFKELLFRTEQEKSGVPHIPKIAEKKSNRHSIQHVPGDIEQTSQEKGSKKVKANTVSGGRNKIRKILDKTRFSILPPKLFSDGGLSQSQDDSIVGTRHCRHSLAIMPIPGTLSSSSPDLLQPTTSMLDFSNPSDIPDQVIRVFKVDQQSCYIIISKDTTAKEVVFHAVHEFGLTGASDTYSLCEVSVTPEGVIKQRRLPDQFSKLADRIQLNGRYYLKNNMETETLCSDEDAQELVKESQLSMLQLSTIEVATQLSMRDFDLFRNIEPTEYIDDLFKLNSKTGNTHLKRFEDIVNQETFWVASEILTEANQLKRMKIIKHFIKIALHCRECKNFNSMFAIISGLNLASVARLRGTWEKLPSKYEKHLQDLQDIFDPSRNMAKYRNILSSQSMQPPIIPLFPVVKKDMTFLHEGNDSKVDGLVNFEKLRMISKEIRQVVRMTSANMDPAMMFRQRKKRWRSLGSLSQGSTNSNMLDVQGGAHKKRARRSSLLNAKKLYEDAQMARKVKQYLSSLDVETDEEKFQMMSLQWEPAYGTLTKNLSEKRSAKSSEMSPVPMRSAGQTTKAHLHQPHRVSQVLQVPAVNLHPIRKKGQTKDPALNTSLPQKVLGTTEEISGKKHTEDTISVASSLHSSPPASPQGSPHKGYTLIPSAKSDNLSDSSHSEISSRSSIVSNCSVDSMSAALQDERCSSQALAVPESTGALEKTEHASGIGDHSQHGPGWTLLKPSLIKCLAVSSSVSNEEISQEHIIIEAADSGRGSWTSCSSSSHDNFQSLPNPKSWDFLNSYRHTHLDDPIAEVEPTDSEPYSCSKSCSRTCGQCKGSLERKSWTSSSSLSDTYEPNYGTVKQRVLESTPAESSEGLDPKDATDPVYKTVTSSTEKGLIVYCVTSPKKDDRYREPPPTPPGYLGISLADLKEGPHTHLKPPDYSVAVQRSKMMHNSLSRLPPASLSSNLVACVPSKIVTQPQRHNLQPFHPKLGDVTDADSEADENEQVSAV

SEQ ID NO: 71536 - protein, 1391 aa, Homo sapiens
  Payload ID: 14158
  Gene Symbol: RAPGEF6
  Gene Name: Rap guanine nucleotide exchange factor (GEF) 6
  Uniprot ID: Q8TEU7
  ENSP ID: ENSP00000311419
MNSPVDPGARQALRKKPPERTPEDLNTIYSYLHGMEILSNLREHQLRLMSARARYERYSGNQVLFCSETIARCWYILLSGSVLVKGSMVLPPCSFGKQFGGKRGCDCLVLEPSEMIVVENAKDNEDSILQREIPARQSRRRFRKINYKGERQTITDDVEVNSYLSLPADLTKMHLTENPHPQVTHVSSSQSGCSIASDSGSSSLSDIYQATESEVGDVDLTRLPEGPVDSEDDEEEDEEIDRTDPLQGRDLVRECLEKEPADKTDDDIEQLLEFMHQLPAFANMTMSVRRELCSVMIFEVVEQAGAIILEDGQELDSWYVILNGTVEISHPDGKVENLFMGNSFGITPTLDKQYMHGIVRTKVDDCQFVCIAQQDYWRILNHVEKNTHKVEEEGEIVMVHEHRELDRSGTRKGHIVIKATPERLIMHLIEEHSIVDPTYIEDFLLTYRTFLESPLDVGIKLLEWFKIDSLRDKVTRIVLLWVNNHFNDFEGDPAMTRFLEEFEKNLEDTKMNGHLRLLNIACAAKAKWRQVVLQKASRESPLQFSLNGGSEKGFGIFVEGVEPGSKAADSGLKRGDQIMEVNGQNFENITFMKAVEILRNNTHLALTVKTNIFVFKELLFRTEQEKSGVPHIPKIAEKKSNRHSIQHVPGDIEQTSQEKGSKKVKANTVSGGRNKIRKILDKTRFSILPPKLFSDGGLSQSQDDSIVGTRHCRHSLAIMPIPGTLSSSSPDLLQPTTSMLDFSNPSDIPDQVIRVFKVDQQSCYIIISKDTTAKEVVFHAVHEFGLTGASDTYSLCEVSVTPEGVIKQRRLPDQFSKLADRIQLNGRYYLKNNMETETLCSDEDAQELVKESQLSMLQLSTIEVATQLSMRDFDLFRNIEPTEYIDDLFKLNSKTGNTHLKRFEDIVNQETFWVASEILTEANQLKRMKIIKHFIKIALHCRECKNFNSMFAIISGLNLASVARLRGTWEKLPSKYEKHLQDLQDIFDPSRNMAKYRNILSSQSMQPPIIPLFPVVKKDMTFLHEGNDSKVDGLVNFEKLRMISKEIRQVVRMTSANMDPAMMFRQRSLSQGSTNSNMLDVQGGAHKKRARRSSLLNAKKLYEDAQMARKVKQYLSSLDVETDEEKFQMMSLQWEPAYGTLTKNLSEKRSAKSSEMSPVPMRSAGQTTKAHLHQPHRVSQVLQVPAVNLHPIRKKGQTKDPALNTSLPQKVLGTTEEISGKKHTEDTISVASSLHSSPPASPQGSPHKVGSIISDHSSKISGQSCPGIGGAYLQKKILQITRSTAKRTDSTEKATEENRDRTSCENTTRKRMTSPFRRLRERMLSRERLVNSQKEDTDHNQATESCEKVKDVGSNIKDEKGSAIFNSNSQGNSNTLNCFYTRFKSKRRKTL

SEQ ID NO: 71537 - protein, 1601 aa, Homo sapiens
  Payload ID: 14158
  Gene Symbol: RAPGEF6
  Gene Name: Rap guanine nucleotide exchange factor (GEF) 6
  Uniprot ID: Q8TEU7
  ENSP ID: ENSP00000421684
MNSPVDPGARQALRKKPPERTPEDLNTIYSYLHGMEILSNLREHQLRLMSARARYERYSGNQVLFCSETIARCWYILLSGSVLVKGSMVLPPCSFGKQFGGKRGCDCLVLEPSEMIVVENAKDNEDSILQREIPARQSRRRFRKINYKGERQTITDDVEVNSYLSLPADLTKMHLTENPHPQVTHVSSSQSGCSIASDSGSSSLSDIYQATESEVGDVDLTRLPEGPVDSEDDEEEDEEIDRTDPLQGRDLVRECLEKEPADKTDDDIEQLLEFMHQLPAFANMTMSVRRELCSVMIFEVVEQAGAIILEDGQELDSWYVILNGTVEISHPDGKVENLFMGNSFGITPTLDKQYMHGIVRTKVDDCQFVCIAQQDYWRILNHVEKNTHKVEEEGEIVMVHEHRELDRSGTRKGHIVIKATPERLIMHLIEEHSIVDPTYIEDFLLTYRTFLESPLDVGIKLLEWFKIDSLRDKVTRIVLLWVNNHFNDFEGDPAMTRFLEEFEKNLEDTKMNGHLRLLNIACAAKAKWRQVVLQKASRESPLQFSLNGGSEKGFGIFVEGVEPGSKAADSGLKRGDQIMEVNGQNFENITFMKAVEILRNNTHLALTVKTNIFVFKELLFRTEQEKSGVPHIPKIAEKKSNRHSIQHVPGDIEQTSQEKGSKKVKANTVSGGRNKIRKILDKTRFSILPPKLFSDGGLSQSQDDSIVGTRHCRHSLAIMPIPGTLSSSSPDLLQPTTSMLDFSNPSDIPDQVIRVFKVDQQSCYIIISKDTTAKEVVFHAVHEFGLTGASDTYSLCEVSVTPEGVIKQRRLPDQFSKLADRIQLNGRYYLKNNMETETLCSDEDAQELVKESQLSMLQLSTIEVATQLSMRDFDLFRNIEPTEYIDDLFKLNSKTGNTHLKRFEDIVNQETFWVASEILTEANQLKRMKIIKHFIKIALHCRECKNFNSMFAIISGLNLASVARLRGTWEKLPSKYEKHLQDLQDIFDPSRNMAKYRNILSSQSMQPPIIPLFPVVKKDMTFLHEGNDSKVDGLVNFEKLRMISKEIRQVVRMTSANMDPAMMFRQRSLSQGSTNSNMLDVQGGAHKKRARRSSLLNAKKLYEDAQMARKVKQYLSSLDVETDEEKFQMMSLQWEPAYGTLTKNLSEKRSAKSSEMSPVPMRSAGQTTKAHLHQPHRVSQVLQVPAVNLHPIRKKGQTKDPALNTSLPQKVLGTTEEISGKKHTEDTISVASSLHSSPPASPQGSPHKGYTLIPSAKSDNLSDSSHSEISSRSSIVSNCSVDSMSAALQDERCSSQALAVPESTGALEKTEHASGIGDHSQHGPGWTLLKPSLIKCLAVSSSVSNEEISQEHIIIEAADSGRGSWTSCSSSSHDNFQSLPNPKSWDFLNSYRHTHLDDPIAEVEPTDSEPYSCSKSCSRTCGQCKGSLERKSWTSSSSLSDTYEPNYGTVKQRVLESTPAESSEGLDPKDATDPVYKTVTSSTEKGLIVYCVTSPKKDDRYREPPPTPPGYLGISLADLKEGPHTHLKPPDYSVAVQRSKMMHNSLSRLPPASLSSNLVACVPSKIVTQPQRHNLQPFHPKLGDVTDADSEADENEQVSAV

SEQ ID NO: 71538 - protein, 155 aa, Homo sapiens
  Payload ID: 14158
  Gene Symbol: RAPGEF6
  Gene Name: Rap guanine nucleotide exchange factor (GEF) 6
  ENSP ID: ENSP00000424574
MHLTENPHPQVTHVSSSQSGCSIASDSGSSSLSDIYQATESEVGDVDLTRLPEGPVDSEDDEEEDEEIDRTDPLQGRDLVRECLEKEPADKTDDDIEQLLEFMHQLPAFANMTMSVRRELCSVMIFEVVEQAGAIILEDGQELDSWYVILNGTVE

SEQ ID NO: 71539 - protein, 827 aa, Homo sapiens
  Payload ID: 14158
  Gene Symbol: RAPGEF6
  Gene Name: Rap guanine nucleotide exchange factor (GEF) 6
  Uniprot ID: Q8TEU7
  ENSP ID: ENSP00000425389
MNSPVDPGARQALRKKPPERTPEDLNTIYSYLHGMEILSNLREHQLRLMSARARYERYSGNQVLFCSETIARCWYILLSGSVLVKGSMVLPPCSFGKQFGGKRGCDCLVLEPSEMIVVENAKDNEDSILQREIPARQSRRRFRKINYKGERQTITDDVEVNSYLSLPADLTKMHLTENPHPQVTHVSSSQSGCSIASDSGSSSLSDIYQATESEVGDVDLTRLPEGPVDSEDDEEEDEEIDRTDPLQGRDLVRECLEKEPADKTDDDIEQLLEFMHQLPAFANMTMSVRRELCSVMIFEVVEQAGAIILEDGQELDSWYVILNGTVEISHPDGKVENLFMGNSFGITPTLDKQYMHGIVRTKVDDCQFVCIAQQDYWRILNHVEKNTHKVEEEGEIVMVHEHRELDRSGTRKGHIVIKATPERLIMHLIEEHSIVDPTYIEDFLLTYRTFLESPLDVGIKLLEWFKIDSLRDKVTRIVLLWVNNHFNDFEGDPAMTRFLEEFEKNLEDTKMNGHLRLLNIACAAKAKWRQVVLQKASRESPLQFSLNGGSEKGFGIFVEGVEPGSKAADSGLKRGDQIMEVNGQNFENITFMKAVEILRNNTHLALTVKTNIFVFKELLFRTEQEKSGVPHIPKIAEKKSNRHSIQHVPGDIEQTSQEKGSKKVKANTVSGGRNKIRKILDKTRFSILPPKLFSDGGLSQSQDDSIVGTRHCRHSLAIMPIPGTLSSSSPDLLQPTTSMLDFSNPSDIPDQVIRVFKVDQQSCYIIISKDTTAKEVVFHAVHEFGLTGASDTYSLCEVSVTPEGVIKQRRLPDQFSKLADRIQLNGR

SEQ ID NO: 71540 - protein, 1204 aa, Homo sapiens
  Payload ID: 14158
  Gene Symbol: RAPGEF6
  Gene Name: Rap guanine nucleotide exchange factor (GEF) 6
  ENSP ID: ENSP00000425772
MNSPVDPGARQALRKKPPERTPEDLNTIYSYLHGMEILSNLREHQLRLMSARARYERYSGNQVLFCSETIARCWYILLSGSVLVKGSMVLPPCSFGKQFGGKRGCDCLVLEPSEMIVVENAKDNEDSILQREIPARQSRRRFRKINYKGERQTITDDVEVNSYLSLPADLTKMHLTENPHPQVTHVSSSQSGCSIASDSGSSSLSDIYQATESEVGDVDLTRLPEGPVDSEDDEEEDEEIDRTDPLQGRDLVRECLEKEPADKTDDDIEQLLEFMHQLPAFANMTMSVRRELCSVMIFEVVEQAGAIILEDGQELDSWYVILNGTVEISHPDGKVENLFMGNSFGITPTLDKQYMHGIVRTKVDDCQFVCIAQQDYWRILNHVEKNTHKVEEEGEIVMVHEHRELDRSGTRKGHIVIKATPERLIMHLIEEHSIVDPTYIEDFLLTYRTFLESPLDVGIKLLEWFKIDSLRDKVTRIVLLWVNNHFNDFEGDPAMTRFLEEFEKNLEDTKMNGHLRLLNIACAAKAKWRQVVLQKASRESPLQFSLNGGSEKGFGIFVEGVEPGSKAADSGLKRGDQIMEVNGQNFENITFMKAVEILRNNTHLALTVKTNIFVFKELLFRTEQEKSGVPHIPKIAEKKSNRHSIQHVPGDIEQTSQEKGSKKVKANTVSGGRNKIRKILDKTRFSILPPKLFSDGGLSQSQDDSIVGTRHCRHSLAIMPIPGTLSSSSPDLLQPTTSMLDFSNPSDIPDQVIRVFKVDQQSCYIIISKDTTAKEVVFHAVHEFGLTGASDTYSLCEVSVTPEGVIKQRRLPDQFSKLADRIQLNGRYYLKNNMETETLCSDEDAQELVKESQLSMLQLSTIEVATQLSMRDFDLFRNIEPTEYIDDLFKLNSKTGNTHLKRFEDIVNQETFWVASEILTEANQLKRMKIIKHFIKIALHCRECKNFNSMFAIISGLNLASVARLRGTWEKLPSKYEKHLQDLQDIFDPSRNMAKYRNILSSQSMQPPIIPLFPVVKKDMTFLHEGNDSKVDGLVNFEKLRMISKEIRQVVRMTSANMDPAMMFRQRSLSQGSTNSNMLDVQGGAHKKRARRSSLLNAKKLYEDAQMARKVKQYLSSLDVETDEEKFQMMSLQWEPAYGTLTKNLSEKRSAKSSEMSPVPMRSAGQTTKAHLHQPHRVSQVLQVPAVNLHPIRKKGQTKDPALM

SEQ ID NO: 71541 - protein, 155 aa, Homo sapiens
  Payload ID: 14158
  Gene Symbol: RAPGEF6
  Gene Name: Rap guanine nucleotide exchange factor (GEF) 6
  ENSP ID: ENSP00000425891
MAFLVRCYANCLQPWASKLPADLTKMHLTENPHPQVTHVSSSQSGCSIASDSGSSSLSDIYQATESEVGDVDLTRLPEGPVDSEDDEEEDEEIDRTDPLQGRDLVRECLEKEPADKTDDDIEQLLEFMHQLPAFANMTMSVRRELCSVMIFEVVE

SEQ ID NO: 71542 - protein, 1509 aa, Homo sapiens
  Payload ID: 14158
  Gene Symbol: RAPGEF6
  Gene Name: Rap guanine nucleotide exchange factor (GEF) 6
  Uniprot ID: Q8TEU7
  ENSP ID: ENSP00000426081
MNSPVDPGARQALRKKPPERTPEDLNTIYSYLHGMEILSNLREHQLRLMSARARYERYSGNQVLFCSETIARCWYILLSGSVLVKGSMVLPPCSFGKQFGGKRGCDCLVLEPSEMIVVENAKDNEDSILQREIPARQSRRRFRKINYKGERQTITDDVEVNSYLSLPADLTKMHLTENPHPQVTHVSSSQSGCSIASDSGSSSLSDIYQATESEVGDVDLTRLPEGPVDSEDDEEEDEEIDRTDPLQGRDLVRECLEKEPADKTDDDIEQLLEFMHQLPAFANMTMSVRRELCSVMIFEVVEQAGAIILEDGQELDSWYVILNGTVEISHPDGKVENLFMGNSFGITPTLDKQYMHGIVRTKVDDCQFVCIAQQDYWRILNHVEKNTHKVEEEGEIVMVHEHRELDRSGTRKGHIVIKATPERLIMHLIEEHSIVDPTYIEDFLLTYRTFLESPLDVGIKLLEWFKIDSLRDKVTRIVLLWVNNHFNDFEGDPAMTRFLEEFEKNLEDTKMNGHLRLLNIACAAKAKWRQVVLQKASRESPLQFSLNGGSEKGFGIFVEGVEPGSKAADSGLKRGDQIMEVNGQNFENITFMKAVEILRNNTHLALTVKTNIFVFKELLFRTEQEKSGVPHIPKIAEKKSNRHSIQHVPGDIEQTSQEKGSKKVKANTVSGGRNKIRKILDKTRFSILPPKLFSDGGLSQSQDDSIVGTRHCRHSLAIMPIPGTLSSSSPDLLQPTTSMLDFSNPSAVGFYYIPDQVIRVFKVDQQSCYIIISKDTTAKEVVFHAVHEFGLTGASDTYSLCEVSVTPEGVIKQRRLPDQFSKLADRIQLNGRYYLKNNMETETLCSDEDAQELVKESQLSMLQLSTIEVATQLSMRDFDLFRNIEPTEYIDDLFKLNSKTGNTHLKRFEDIVNQETFWVASEILTEANQLKRMKIIKHFIKIALHCRECKNFNSMFAIISGLNLASVARLRGTWEKLPSKYEKHLQDLQDIFDPSRNMAKYRNILSSQSMQPPIIPLFPVVKKDMTFLHEGNDSKVDGLVNFEKLRMISKEIRQVVRMTSANMDPAMMFRQRKKRWRSLGSLSQGSTNSNMLDVQGGAHKKRARRSSLLNAKKLYEDAQMARKVKQYLSSLDVETDEEKFQMMSLQWEPAYGTLTKNLSEKRSAKSSEMSPVPMRSAGQTTKAHLHQPHRVSQVLQVPAVNLHPIRKKGQTKDPALNTSLPQKVLGTTEEISGKKHTEDTISVASSLHSSPPASPQGSPHKGYTLIPSAKSDNLSDSSHSEISSRSSIVSNCSVDSMSAALQDERCSSQALAVPESTGALEKTEHASGIGDHSQHGPGWTLLKPSLIKCLAVSSSVSNEEISQEHIIIEAADSGRGSWTSCSSSSHDNFQSLPNPKSWDFLNSYRHTHLDDPIAEVEPTDSEPYSCSKSCSRTCGQCKGSLERKSWTSSSSLSDTYEPNYGTVKQRVLESTPAESSEGLDPKDATDPVYKTVTSSTEKGLIENEQVSAV

SEQ ID NO: 71543 - protein, 1114 aa, Homo sapiens
  Payload ID: 14158
  Gene Symbol: RAPGEF6
  Gene Name: Rap guanine nucleotide exchange factor (GEF) 6
  ENSP ID: ENSP00000426910
MSVRRELCSVMIFEVVEQAGAIILEDGQELDSWYVILNGTVEISHPDGKVENLFMGNSFGITPTLDKQYMHGIVRTKVDDCQFVCIAQQDYWRILNHVEKNTHKVEEEGEIVMVHEHRELDRSGTRKGHIVIKATPERLIMHLIEEHSIVDPTYIEDFLLTYRTFLESPLDVGIKLLEWFKIDSLRDKVTRIVLLWVNNHFNDFEGDPAMTRFLEEFEKNLEDTKMNGHLRLLNIACAAKAKWRQVVLQKASRESPLQFSLNGGSEKGFGIFVEGVEPGSKAADSGLKRGDQIMEVNGQNFENITFMKAVEILRNNTHLALTVKTNIFVFKELLFRTEQEKSGVPHIPKIAEKKSNRHSIQHVPGDIEQTSQEKGSKKVKANTVSGGRNKIRKILDKTRFSILPPKLFSDGGLSQSQDDSIVGTRHCRHSLAIMPIPGTLSSSSPDLLQPTTSMLDFSNPSDIPDQVIRVFKVDQQSCYIIISKDTTAKEVVFHAVHEFGLTGASDTYSLCEVSVTPEGVIKQRRLPDQFSKLADRIQLNGRYYLKNNMETETLCSDEDAQELVKESQLSMLQLSTIEVATQLSMRDFDLFRNIEPTEYIDDLFKLNSKTGNTHLKRFEDIVNQETFWVASEILTEANQLKRMKIIKHFIKIALHCRECKNFNSMFAIISGLNLASVARLRGTWEKLPSKYEKHLQDLQDIFDPSRNMAKYRNILSSQSMQPPIIPLFPVVKKDMTFLHEGNDSKVDGLVNFEKLRMISKEIRQVVRMTSANMDPAMMFRQRKKRWRSLGSLSQGSTNSNMLDVQGGAHKKRARRSSLLNAKKLYEDAQMARKVKQYLSSLDVETDEEKFQMMSLQWEPAYGTLTKNLSEKRSAKSSEMSPVPMRSAGQTTKAHLHQPHRVSQVLQVPAVNLHPIRKKGQTKDPALNTSLPQKVLGTTEEISGKKHTEDTISVASSLHSSPPASPQGSPHKVGSIISDHSSKISGQSCPGIGGAYLQKKILQITRSTAKRTDSTEKATEENRDRTSCENTTRKRMTSPFRRLRERMLSRERLVNSQKEDTDHNQATESCEKVKDVGSNIKDEKGSAIFNSNSQGNSNTLNCFYTRFKSKRRKTL

SEQ ID NO: 71544 - protein, 149 aa, Homo sapiens
  Payload ID: 14158
  Gene Symbol: RAPGEF6
  Gene Name: Rap guanine nucleotide exchange factor (GEF) 6
  ENSP ID: ENSP00000427102
MAFLVRCYANCLQPWASKLPADLTKMHLTENPHPQVTHVSSSQSGCSIASDSGSSSLSDIYQATESEVGDVDLTRLPEGPVDSEDDEEEDEEIDRTDPLQGRDLVRECLEKEPADKTDDDIEQLLEFMHQLPAFANMTMSVRRELCSVM

SEQ ID NO: 71545 - protein, 1504 aa, Homo sapiens
  Payload ID: 14158
  Gene Symbol: RAPGEF6
  Gene Name: Rap guanine nucleotide exchange factor (GEF) 6
  Uniprot ID: Q8TEU7
  ENSP ID: ENSP00000487439
MNSPVDPGARQALRKKPPERTPEDLNTIYSYLHGMEILSNLREHQLRLMSARARYERYSGNQVLFCSETIARCWYILLSGSVLVKGSMVLPPCSFGKQFGGKRGCDCLVLEPSEMIVVENAKDNEDSILQREIPARQSRRRFRKINYKGERQTITDDVEVNSYLSLPADLTKMHLTENPHPQVTHVSSSQSGCSIASDSGSSSLSDIYQATESEVGDVDLTRLPEGPVDSEDDEEEDEEIDRTDPLQGRDLVRECLEKEPADKTDDDIEQLLEFMHQLPAFANMTMSVRRELCSVMIFEVVEQAGAIILEDGQELDSWYVILNGTVEISHPDGKVENLFMGNSFGITPTLDKQYMHGIVRTKVDDCQFVCIAQQDYWRILNHVEKNTHKVEEEGEIVMVHEHRELDRSGTRKGHIVIKATPERLIMHLIEEHSIVDPTYIEDFLLTYRTFLESPLDVGIKLLEWFKIDSLRDKVTRIVLLWVNNHFNDFEGDPAMTRFLEEFEKNLEDTKMNGHLRLLNIACAAKAKWRQVVLQKASRESPLQFSLNGGSEKGFGIFVEGVEPGSKAADSGLKRGDQIMEVNGQNFENITFMKAVEILRNNTHLALTVKTNIFVFKELLFRTEQEKSGVPHIPKIAEKKSNRHSIQHVPGDIEQTSQEKGSKKVKANTVSGGRNKIRKILDKTRFSILPPKLFSDGGLSQSQDDSIVGTRHCRHSLAIMPIPGTLSSSSPDLLQPTTSMLDFSNPSDIPDQVIRVFKVDQQSCYIIISKDTTAKEVVFHAVHEFGLTGASDTYSLCEVSVTPEGVIKQRRLPDQFSKLADRIQLNGRYYLKNNMETETLCSDEDAQELVKESQLSMLQLSTIEVATQLSMRDFDLFRNIEPTEYIDDLFKLNSKTGNTHLKRFEDIVNQETFWVASEILTEANQLKRMKIIKHFIKIALHCRECKNFNSMFAIISGLNLASVARLRGTWEKLPSKYEKHLQDLQDIFDPSRNMAKYRNILSSQSMQPPIIPLFPVVKKDMTFLHEGNDSKVDGLVNFEKLRMISKEIRQVVRMTSANMDPAMMFRQRKKRWRSLGSLSQGSTNSNMLDVQGGAHKKRARRSSLLNAKKLYEDAQMARKVKQYLSSLDVETDEEKFQMMSLQWEPAYGTLTKNLSEKRSAKSSEMSPVPMRSAGQTTKAHLHQPHRVSQVLQVPAVNLHPIRKKGQTKDPALNTSLPQKVLGTTEEISGKKHTEDTISVASSLHSSPPASPQGSPHKGYTLIPSAKSDNLSDSSHSEISSRSSIVSNCSVDSMSAALQDERCSSQALAVPESTGALEKTEHASGIGDHSQHGPGWTLLKPSLIKCLAVSSSVSNEEISQEHIIIEAADSGRGSWTSCSSSSHDNFQSLPNPKSWDFLNSYRHTHLDDPIAEVEPTDSEPYSCSKSCSRTCGQCKGSLERKSWTSSSSLSDTYEPNYGTVKQRVLESTPAESSEGLDPKDATDPVYKTVTSSTEKGLIENEQVSAV

SEQ ID NO: 71546 - protein, 456 aa, Homo sapiens
  Payload ID: 14159
  Gene Symbol: RAPGEFL1
  Gene Name: Rap guanine nucleotide exchange factor (GEF)-like 1
  Uniprot ID: Q9UHV5
  ENSP ID: ENSP00000264644
MEGPEGLGRKQACLAMLLHFLDTYQGLLQEEEGAGHIIKDLYLLIMKDESLYQGLREDTLRLHQLVETVELKIPEENQPPSKQVKPLFRHFRRIDSCLQTRVAFRGSDEIFCRVYMPDHSYVTIRSRLSASVQDILGSVTEKLQYSEEPAGREDSLILVAVSSSGEKVLLQPTEDCVFTALGINSHLFACTRDSYEALVPLPEEIQVSPGDTEIHRVEPEDVANHLTAFHWELFRCVHELEFVDYVFHGERGRRETANLELLLQRCSEVTHWVATEVLLCEAPGKRAQLLKKFIKIAALCKQNQDLLSFYAVVMGLDNAAVSRLRLTWEKLPGKFKNLFRKFENLTDPCRNHKSYREVISKMKPPVIPFVPLILKDLTFLHEGSKTLVDGLVNIEKLHSVAEKVRTIRKYRSRPLCLDMEASPNHLQTKAYVRQFQVIDNQNLLFELSYKLEANSQ

SEQ ID NO: 71547 - protein, 511 aa, Homo sapiens
  Payload ID: 14159
  Gene Symbol: RAPGEFL1
  Gene Name: Rap guanine nucleotide exchange factor (GEF)-like 1
  Uniprot ID: Q9UHV5
  ENSP ID: ENSP00000394530
MLIHPRGLPSSSHRRKINSTYFYILLDDIVLTHSLFLPTEKFLQELHQYFVRAGGMEGPEGLGRKQACLAMLLHFLDTYQGLLQEEEGAGHIIKDLYLLIMKDESLYQGLREDTLRLHQLVETVELKIPEENQPPSKQVKPLFRHFRRIDSCLQTRVAFRGSDEIFCRVYMPDHSYVTIRSRLSASVQDILGSVTEKLQYSEEPAGREDSLILVAVSSSGEKVLLQPTEDCVFTALGINSHLFACTRDSYEALVPLPEEIQVSPGDTEIHRVEPEDVANHLTAFHWELFRCVHELEFVDYVFHGERGRRETANLELLLQRCSEVTHWVATEVLLCEAPGKRAQLLKKFIKIAALCKQNQDLLSFYAVVMGLDNAAVSRLRLTWEKLPGKFKNLFRKFENLTDPCRNHKSYREVISKMKPPVIPFVPLILKDLTFLHEGSKTLVDGLVNIEKLHSVAEKVRTIRKYRSRPLCLDMEASPNHLQTKAYVRQFQVIDNQNLLFELSYKLEANSQ

SEQ ID NO: 71548 - protein, 505 aa, Homo sapiens
  Payload ID: 14159
  Gene Symbol: RAPGEFL1
  Gene Name: Rap guanine nucleotide exchange factor (GEF)-like 1
  ENSP ID: ENSP00000438631
MMLRPGYPLSQESFPIDILLDDIVLTHSLFLPTEKFLQELHQYFVRAGGMEGPEGLGRKQACLAMLLHFLDTYQGLLQEEEGAGHIIKDLYLLIMKDESLYQGLREDTLRLHQLVETVELKIPEENQPPSKQVKPLFRHFRRIDSCLQTRVAFRGSDEIFCRVYMPDHSYVTIRSRLSASVQDILGSVTEKLQYSEEPAGREDSLILVAVSSSGEKVLLQPTEDCVFTALGINSHLFACTRDSYEALVPLPEEIQVSPGDTEIHRVEPEDVANHLTAFHWELFRCVHELEFVDYVFHGERGRRETANLELLLQRCSEVTHWVATEVLLCEAPGKRAQLLKKFIKIAALCKQNQDLLSFYAVVMGLDNAAVSRLRLTWEKLPGKFKNLFRKFENLTDPCRNHKSYREVISKMKPPVIPFVPLILKDLTFLHEGSKTLVDGLVNIEKLHSVAEKVRTIRKYRSRPLCLDMEASPNHLQTKAYVRQFQVIDNQNLLFELSYKLEANSQ

SEQ ID NO: 71549 - protein, 20 aa, Homo sapiens
  Payload ID: 14159
  Gene Symbol: RAPGEFL1
  Gene Name: Rap guanine nucleotide exchange factor (GEF)-like 1
  ENSP ID: ENSP00000440006
MEGPEGLGRKQACLAMLLHF

SEQ ID NO: 71550 - protein, 149 aa, Homo sapiens
  Payload ID: 14159
  Gene Symbol: RAPGEFL1
  Gene Name: Rap guanine nucleotide exchange factor (GEF)-like 1
  ENSP ID: ENSP00000440226
MEGPEGLGRKQACLAMLLHFLDTYQGLLQEEEGAGHIIKDLYLLIMKDESLYQGLREDTLRLHQLVETVELKIPEENQPPSKQVKPLFRHFRRIDSCLQTRVAFRGSDEIFCRVYMPDHSYVTIRSRLSASVQDILGSVTEKLQYSEEP

SEQ ID NO: 71551 - protein, 101 aa, Homo sapiens
  Payload ID: 14159
  Gene Symbol: RAPGEFL1
  Gene Name: Rap guanine nucleotide exchange factor (GEF)-like 1
  ENSP ID: ENSP00000441059
MEGPEGLGRKQACLAMLLHFLDTYQGLLQEEEGAGHIIKDLYLLIMKDESLYQGLREDTLRLHQLVETVELKIPEENQPPSKQVKPLFRHFRRIDSCLQTR

SEQ ID NO: 71552 - protein, 62 aa, Homo sapiens
  Payload ID: 14159
  Gene Symbol: RAPGEFL1
  Gene Name: Rap guanine nucleotide exchange factor (GEF)-like 1
  ENSP ID: ENSP00000444646
MAIKDILLDDIVLTHSLFLPTEKFLQELHQYFVRAGGMEGPEGLGRKQACLAMLLHFLDTYQ

SEQ ID NO: 71553 - protein, 662 aa, Homo sapiens
  Payload ID: 14159
  Gene Symbol: RAPGEFL1
  Gene Name: Rap guanine nucleotide exchange factor (GEF)-like 1
  ENSP ID: ENSP00000479735
MKPLEKFLKKQTSQLAGRTVAGGPGGGLGSCGGPGGGGGPGGGGGPAGGQRSLQRRQSVSRLLLPAFLREPPAEPGLEPPPEEEGGEPAGVAEEPGSGGPCWLQLEEVPGPGPLGGGGPLRSPSSYSSDELSPGEPLTSPPWAPLGAPERPEHLLNRVLERLAGGATRDSAASDILLDDIVLTHSLFLPTEKFLQELHQYFVRAGGMEGPEGLGRKQACLAMLLHFLDTYQGLLQEEEGAGHIIKDLYLLIMKDESLYQGLREDTLRLHQLVETVELKIPEENQPPSKQVKPLFRHFRRIDSCLQTRVAFRGSDEIFCRVYMPDHSYVTIRSRLSASVQDILGSVTEKLQYSEEPAGREDSLILVAVSSSGEKVLLQPTEDCVFTALGINSHLFACTRDSYEALVPLPEEIQVSPGDTEIHRVEPEDVANHLTAFHWELFRCVHELEFVDYVFHGERGRRETANLELLLQRCSEVTHWVATEVLLCEAPGKRAQLLKKFIKIAALCKQNQDLLSFYAVVMGLDNAAVSRLRLTWEKLPGKFKNLFRKFENLTDPCRNHKSYREVISKMKPPVIPFVPLILKDLTFLHEGSKTLVDGLVNIEKLHSVAEKVRTIRKYRSRPLCLDMEASPNHLQTKAYVRQFQVIDNQNLLFELSYKLEANSQ

SEQ ID NO: 71554 - protein, 459 aa, Homo sapiens
  Payload ID: 14159
  Gene Symbol: RAPGEFL1
  Gene Name: Rap guanine nucleotide exchange factor (GEF)-like 1
  ENSP ID: ENSP00000484772
MKPLEKFLKKQTSQLAGRTVAGGPGGGLGSCGGPGGGGGPGGGGGPAGGQRSLQRRQSVSRLLLPAFLREPPAEPGLEPPPEEEGGEPAGVAEEPGSGGPCWLQLEEVPGPGPLGGGGPLRSPSSYSSDELSPGEPLTSPPWAPLGAPERPEHLLNRVLERLAGGATRDSAASDILLDDIVLTHSLFLPTEKFLQELHQYFVRAGGMEGPEGLGRKQACLAMLLHFLDTYQGLLQEEEGAGHIIKDLYLLIMKDESLYQGLREDTLRLHQLVETVELKIPEENQPPSKQVKPLFRHFRRIDSCLQTRVAFRGSDEIFCRVYMPDHSYVTIRSRLSASVQDILGSVTEKLQYSEEPAGREDSLILVAVSSSGEKVLLQPTEDCVFTALGINSHLFACTRDSYEALVPLPEEIQVSPGDTEIHRVEPEDVANHLTAFHWELFRCVHELEFVDYVFHGERGR

SEQ ID NO: 71555 - protein, 692 aa, Homo sapiens
  Payload ID: 14160
  Gene Symbol: RAP1GAP
  Gene Name: RAP1 GTPase activating protein
  ENSP ID: ENSP00000290101
MIEKMQGSRMDEQRCSFPPPLKTEEDYIPYPSVHEVLGREGPFPLILLPQFGGYWIEGTNHEITSIPETEPLQSPTTKVKLECNPTARIYRKHFLGKEHFNYYSLDAALGHLVFSLKYDVIGDQEHLRLLLRTKCRTYHDVIPISCLTEFPNVVQMAKLVCEDVNVDRFYPVLYPKASRLIVTFDEHVISNNFKFGVIYQKLGQTSEEELFSTNEESPAFVEFLEFLGQKVKLQDFKGFRGGLDVTHGQTGTESVYCNFRNKEIMFHVSTKLPYTEGDAQQLQRKRHIGNDIVAVVFQDENTPFVPDMIASNFLHAYVVVQAEGGGPDGPLYKVSVTARDDVPFFGPPLPDPAVFRKGPEFQEFLLTKLINAEYACYKAEKFAKLEERTRAALLETLYEELHIHSQSMMGLGGDEDKMENGSGGGGFFESFKRVIRSRSQSMDAMGLSNKKPNTVSTSHSGSFAPNNPDLAKAAGISLLIPGKSASRFGRRGSAIGIGTVEEVVVRGAAGSGGCLHALFSARSQDGGHIGDVAPLPPGQAPGRAGWSGGSSDGTQHLLWGLSLIVPGKSPTRKKSGPFGSRRSSAIGIENIQEVQEKRESPPAGQKTPDSGHVSQEPKSENSSTQSSPEMPTTKNRAETAAQRAEALKLPLLVQCQQLRQRGGGDGGCGRRGHRPGERVILRNTPQAGLLHL

SEQ ID NO: 71556 - protein, 96 aa, Homo sapiens
  Payload ID: 14160
  Gene Symbol: RAP1GAP
  Gene Name: RAP1 GTPase activating protein
  ENSP ID: ENSP00000315420
MIEKMQGSRMDEQRCSFPPPLKTEEDYIPYPSVHEVLGREGPFPLILLPQFGGYWIEGTNHEITSIPETEPLQSPTTKVKLECNPTARIYRKHFLG

SEQ ID NO: 71557 - protein, 694 aa, Homo sapiens
  Payload ID: 14160
  Gene Symbol: RAP1GAP
  Gene Name: RAP1 GTPase activating protein
  ENSP ID: ENSP00000363893
MAQLRPAVPPGRPRRGSLPAGASWQNTDLFEMIEKMQGSRMDEQRCSFPPPLKTEEDYIPYPSVHEVLGREGPFPLILLPQFGGYWIEGTNHEITSIPETEPLQSPTTKVKLECNPTARIYRKHFLGKEHFNYYSLDAALGHLVFSLKYDVIGDQEHLRLLLRTKCRTYHDVIPISCLTEFPNVVQMAKLVCEDVNVDRFYPVLYPKASRLIVTFDEHVISNNFKFGVIYQKLGQTSEEELFSTNEESPAFVEFLEFLGQKVKLQDFKGFRGGLDVTHGQTGTESVYCNFRNKEIMFHVSTKLPYTEGDAQQLQRKRHIGNDIVAVVFQDENTPFVPDMIASNFLHAYVVVQAEGGGPDGPLYKVSVTARDDVPFFGPPLPDPAVFRKGPEFQEFLLTKLINAEYACYKAEKFAKLEERTRAALLETLYEELHIHSQSMMGLGGDEDKMENGSGGGGFFESFKRVIRSRSQSMDAMGLSNKKPNTVSTSHSGSFAPNNPDLAKAAGISLIVPGKSPTRKKSGPFGSRRSSAIGIENIQEVQEKRESPPAGQKTPDSGHVSQEPKSENSSTQSSPEMPTTKNRAETAAQRAEALKDFSRSSSSASSFASVVEETEGVDGEDTGLESVSSSGTPHKRDSFIYSTWLEDSVSTTSGGSSPGPSRSPHPDAGKLGDPACPEIKIQLEASEQHMPQLGC

SEQ ID NO: 71558 - protein, 748 aa, Homo sapiens
  Payload ID: 14160
  Gene Symbol: RAP1GAP
  Gene Name: RAP1 GTPase activating protein
  ENSP ID: ENSP00000363895
MIEKMQGSRMDEQRCSFPPPLKTEEDYIPYPSVHEVLGREGPFPLILLPQFGGYWIEGTNHEITSIPETEPLQSPTTKVKLECNPTARIYRKHFLGKEHFNYYSLDAALGHLVFSLKYDVIGDQEHLRLLLRTKCRTYHDVIPISCLTEFPNVVQMAKLVCEDVNVDRFYPVLYPKASRLIVTFDEHVISNNFKFGVIYQKLGQTSEEELFSTNEESPAFVEFLEFLGQKVKLQDFKGFRGGLDVTHGQTGTESVYCNFRNKEIMFHVSTKLPYTEGDAQQLQRKRHIGNDIVAVVFQDENTPFVPDMIASNFLHAYVVVQAEGGGPDGPLYKVSVTARDDVPFFGPPLPDPAVFRKGPEFQEFLLTKLINAEYACYKAEKFAKLEERTRAALLETLYEELHIHSQSMMGLGGDEDKMENGSGGGGFFESFKRVIRSRSQSMDAMGLSNKKPNTVSTSHSGSFAPNNPDLAKAAGISLLIPGKSASRFGRRGSAIGIGTVEEVVVRGAAGSGGCLHALFSARSQDGGHIGDVAPLPPGQAPGRAGWSGGSSDGTQHLLWGLSLIVPGKSPTRKKSGPFGSRRSSAIGIENIQEVQEKRESPPAGQKTPDSGHVSQEPKSENSSTQSSPEMPTTKNRAETAAQRAEALKDFSRSSSSASSFASVVEETEGVDGEDTGLESVSSSGTPHKRDSFIYSTWLEDSVSTTSGGSSPGPSRSPHPDAGKLGDPACPEIKIQLEASEQHMPQLGC

SEQ ID NO: 71559 - protein, 663 aa, Homo sapiens
  Payload ID: 14160
  Gene Symbol: RAP1GAP
  Gene Name: RAP1 GTPase activating protein
  Uniprot ID: P47736
  ENSP ID: ENSP00000363897
MIEKMQGSRMDEQRCSFPPPLKTEEDYIPYPSVHEVLGREGPFPLILLPQFGGYWIEGTNHEITSIPETEPLQSPTTKVKLECNPTARIYRKHFLGKEHFNYYSLDAALGHLVFSLKYDVIGDQEHLRLLLRTKCRTYHDVIPISCLTEFPNVVQMAKLVCEDVNVDRFYPVLYPKASRLIVTFDEHVISNNFKFGVIYQKLGQTSEEELFSTNEESPAFVEFLEFLGQKVKLQDFKGFRGGLDVTHGQTGTESVYCNFRNKEIMFHVSTKLPYTEGDAQQLQRKRHIGNDIVAVVFQDENTPFVPDMIASNFLHAYVVVQAEGGGPDGPLYKVSVTARDDVPFFGPPLPDPAVFRKGPEFQEFLLTKLINAEYACYKAEKFAKLEERTRAALLETLYEELHIHSQSMMGLGGDEDKMENGSGGGGFFESFKRVIRSRSQSMDAMGLSNKKPNTVSTSHSGSFAPNNPDLAKAAGISLIVPGKSPTRKKSGPFGSRRSSAIGIENIQEVQEKRESPPAGQKTPDSGHVSQEPKSENSSTQSSPEMPTTKNRAETAAQRAEALKDFSRSSSSASSFASVVEETEGVDGEDTGLESVSSSGTPHKRDSFIYSTWLEDSVSTTSGGSSPGPSRSPHPDAGKLGDPACPEIKIQLEASEQHMPQLGC

SEQ ID NO: 71560 - protein, 35 aa, Homo sapiens
  Payload ID: 14160
  Gene Symbol: RAP1GAP
  Gene Name: RAP1 GTPase activating protein
  ENSP ID: ENSP00000392717
MIEKMQGSRMDEQRCSFPPPLKTEEDYIPYPSVHE

SEQ ID NO: 71561 - protein, 602 aa, Homo sapiens
  Payload ID: 14160
  Gene Symbol: RAP1GAP
  Gene Name: RAP1 GTPase activating protein
  ENSP ID: ENSP00000431364
MIEKMQGSRMDEQRCSFPPPLKTEEDYIPYPSVHEVLGREGPFPLILLPQFGGYWIEGTNHEITSIPETEPLQSPTTKVKLECNPTARIYRKHFLGKEHFNYYSLDAALGHLVFSLKYDVIGDQEHLRLLLRTKCRTYHDVIPISCLTEFPNVVQMAKLVCEDVNVDRFYPVLYPKASRLIVTFDEHVISNNFKFGVIYQKLGQTSEEELFSTNEESPAFVEFLEFLGQKVKLQDFKGFRGGLDVTHGQTGTESVYCNFRNKEIMFHVSTKLPYTEGDAQQLQRKRHIGNDIVAVVFQDENTPFVPDMIASNFLHAYVVVQAEGGGPDGPLYKVSVTARDDVPFFGPPLPDPAVFRKGPEFQEFLLTKLINAEYACYKAEKFAKLEERTRAALLETLYEELHIHSQSMMGLGGDEDKMENGSGGGGFFESFKRVIRSRSQSMDAMGLSNKKPNTVSTSHSGSFAPNNPDLAKAAGISLIVPGKSPTRKKSGPFGSRRSSAIGIENIQEVQEKRESPPAGQKTPDSGHVSQEPKSENSSTQSSPEMPTTKNRAETAAQRAEALKDFSRSSSSASSFASVVEETEGVDGEDTGLHVAGGQCQHH

SEQ ID NO: 71562 - protein, 727 aa, Homo sapiens
  Payload ID: 14160
  Gene Symbol: RAP1GAP
  Gene Name: RAP1 GTPase activating protein
  Uniprot ID: P47736
  ENSP ID: ENSP00000434033
MSGRKRSFTFGAYGGVDKSFTSRRSVWRSDGQNQHFPQALDLSRVNLVPSYTPSLYPKNTDLFEMIEKMQGSRMDEQRCSFPPPLKTEEDYIPYPSVHEVLGREGPFPLILLPQFGGYWIEGTNHEITSIPETEPLQSPTTKVKLECNPTARIYRKHFLGKEHFNYYSLDAALGHLVFSLKYDVIGDQEHLRLLLRTKCRTYHDVIPISCLTEFPNVVQMAKLVCEDVNVDRFYPVLYPKASRLIVTFDEHVISNNFKFGVIYQKLGQTSEEELFSTNEESPAFVEFLEFLGQKVKLQDFKGFRGGLDVTHGQTGTESVYCNFRNKEIMFHVSTKLPYTEGDAQQLQRKRHIGNDIVAVVFQDENTPFVPDMIASNFLHAYVVVQAEGGGPDGPLYKVSVTARDDVPFFGPPLPDPAVFRKGPEFQEFLLTKLINAEYACYKAEKFAKLEERTRAALLETLYEELHIHSQSMMGLGGDEDKMENGSGGGGFFESFKRVIRSRSQSMDAMGLSNKKPNTVSTSHSGSFAPNNPDLAKAAGISLIVPGKSPTRKKSGPFGSRRSSAIGIENIQEVQEKRESPPAGQKTPDSGHVSQEPKSENSSTQSSPEMPTTKNRAETAAQRAEALKDFSRSSSSASSFASVVEETEGVDGEDTGLESVSSSGTPHKRDSFIYSTWLEDSVSTTSGGSSPGPSRSPHPDAGKLGDPACPEIKIQLEASEQHMPQLGC

SEQ ID NO: 71563 - protein, 681 aa, Homo sapiens
  Payload ID: 14160
  Gene Symbol: RAP1GAP
  Gene Name: RAP1 GTPase activating protein
  Uniprot ID: P47736
  ENSP ID: ENSP00000441661
MIEKMQGSRMDEQRCSFPPPLKTEEDYIPYPSVHEVLGREGPFPLILLPQFGGYWIEGTNHEITSIPETEPLQSPTTKVKLECNPTARIYRKHFLGKEHFNYYSLDAALGHLVFSLKYDVIGDQEHLRLLLRTKCRTYHDVIPISCLTEFPNVVQMAKLVCEDVNVDRFYPVLYPKASRLIVTFDEHVISNNFKFGVIYQKLGQTSEEELFSTNEESPAFVEFLEFLGQKVKLQDFKGFRGGLDVTHGQTGTESVYCNFRNKEIMFHVSTKLPYTEGDAQQLQRKRHIGNDIVAVVFQDENTPFVPDMIASNFLHAYVVVQAEGGGPDGPLYKVSVTARDDVPFFGPPLPDPAVFRKGPEFQEFLLTKLINAEYACYKAEKFAKLEERTRAALLETLYEELHIHSQSMMGLGGDEDKMENGSGGGGFFESFKRVIRSRSQSMDAMGLSNKKPNTVSTSHSGSFAPNNPDLAKAAGISLLIPGKSASRFGRRGSAIGIGTVEESLIVPGKSPTRKKSGPFGSRRSSAIGIENIQEVQEKRESPPAGQKTPDSGHVSQEPKSENSSTQSSPEMPTTKNRAETAAQRAEALKDFSRSSSSASSFASVVEETEGVDGEDTGLESVSSSGTPHKRDSFIYSTWLEDSVSTTSGGSSPDAGKLGDPACPEIKIQLEASEQHMPQLGC

SEQ ID NO: 71564 - protein, 730 aa, Homo sapiens
  Payload ID: 14161
  Gene Symbol: RAP1GAP2
  Gene Name: RAP1 GTPase activating protein 2
  Uniprot ID: Q684P5
  ENSP ID: ENSP00000254695
MFGRKRSVSFGGFGWIDKTMLASLKVKKQELANSSDATLPDRPLSPPLTAPPTMKSSEFFEMLEKMQGIKLEEQKPGPQKNKDDYIPYPSIDEVVEKGGPYPQVILPQFGGYWIEDPENVGTPTSLGSSICEEEEEDNLSPNTFGYKLECKGEARAYRRHFLGKDHLNFYCTGSSLGNLILSVKCEEAEGIEYLRVILRSKLKTVHERIPLAGLSKLPSVPQIAKAFCDDAVGLRFNPVLYPKASQMIVSYDEHEVNNTFKFGVIYQKARQTLEEELFGNNEESPAFKEFLDLLGDTITLQDFKGFRGGLDVTHGQTGVESVYTTFRDREIMFHVSTKLPFTDGDAQQLQRKRHIGNDIVAIIFQEENTPFVPDMIASNFLHAYIVVQVETPGTETPSYKVSVTAREDVPTFGPPLPSPPVFQKGPEFREFLLTKLTNAENACCKSDKFAKLEDRTRAALLDNLHDELHAHTQAMLGLGPEEDKFENGGHGGFLESFKRAIRVRSHSMETMVGGQKKSHSGGIPGSLSGGISHNSMEVTKTTFSPPVVAATVKNQSRSPIKRRSGLFPRLHTGSEGQGDSRARCDSTSSTPKTPDGGHSSQEIKSETSSNPSSPEICPNKEKPFMKLKENGRAISRSSSSTSSVSSTAGEGEAMEEGDSGGSQPSTTSPFKQEVFVYSPSPSSESPSLGAAATPIIMSRSPTDAKSRNSPRSNLKFRFDKLSHASSGAGH

SEQ ID NO: 71565 - protein, 715 aa, Homo sapiens
  Payload ID: 14161
  Gene Symbol: RAP1GAP2
  Gene Name: RAP1 GTPase activating protein 2
  Uniprot ID: Q684P5
  ENSP ID: ENSP00000389824
MFGRKRSVSFGGFGWIDKTMLASLKVKKQELANSSDATLPDRPLSPPLTAPPTMKSSEFFEMLEKMQDDYIPYPSIDEVVEKGGPYPQVILPQFGGYWIEDPENVGTPTSLGSSICEEEEEDNLSPNTFGYKLECKGEARAYRRHFLGKDHLNFYCTGSSLGNLILSVKCEEAEGIEYLRVILRSKLKTVHERIPLAGLSKLPSVPQIAKAFCDDAVGLRFNPVLYPKASQMIVSYDEHEVNNTFKFGVIYQKARQTLEEELFGNNEESPAFKEFLDLLGDTITLQDFKGFRGGLDVTHGQTGVESVYTTFRDREIMFHVSTKLPFTDGDAQQLQRKRHIGNDIVAIIFQEENTPFVPDMIASNFLHAYIVVQVETPGTETPSYKVSVTAREDVPTFGPPLPSPPVFQKGPEFREFLLTKLTNAENACCKSDKFAKLEDRTRAALLDNLHDELHAHTQAMLGLGPEEDKFENGGHGGFLESFKRAIRVRSHSMETMVGGQKKSHSGGIPGSLSGGISHNSMEVTKTTFSPPVVAATVKNQSRSPIKRRSGLFPRLHTGSEGQGDSRARCDSTSSTPKTPDGGHSSQEIKSETSSNPSSPEICPNKEKPFMKLKENGRAISRSSSSTSSVSSTAGEGEAMEEGDSGGSQPSTTSPFKQEVFVYSPSPSSESPSLGAAATPIIMSRSPTDAKSRNSPRSNLKFRFDKLSHASSGAGH

SEQ ID NO: 71566 - protein, 711 aa, Homo sapiens
  Payload ID: 14161
  Gene Symbol: RAP1GAP2
  Gene Name: RAP1 GTPase activating protein 2
  Uniprot ID: Q684P5
  ENSP ID: ENSP00000439688
MLASLKVKKQELANSSDATLPDRPLSPPLTAPPTMKSSEFFEMLEKMQGIKLEEQKPGPQKNKDDYIPYPSIDEVVEKGGPYPQVILPQFGGYWIEDPENVGTPTSLGSSICEEEEEDNLSPNTFGYKLECKGEARAYRRHFLGKDHLNFYCTGSSLGNLILSVKCEEAEGIEYLRVILRSKLKTVHERIPLAGLSKLPSVPQIAKAFCDDAVGLRFNPVLYPKASQMIVSYDEHEVNNTFKFGVIYQKARQTLEEELFGNNEESPAFKEFLDLLGDTITLQDFKGFRGGLDVTHGQTGVESVYTTFRDREIMFHVSTKLPFTDGDAQQLQRKRHIGNDIVAIIFQEENTPFVPDMIASNFLHAYIVVQVETPGTETPSYKVSVTAREDVPTFGPPLPSPPVFQKGPEFREFLLTKLTNAENACCKSDKFAKLEDRTRAALLDNLHDELHAHTQAMLGLGPEEDKFENGGHGGFLESFKRAIRVRSHSMETMVGGQKKSHSGGIPGSLSGGISHNSMEVTKTTFSPPVVAATVKNQSRSPIKRRSGLFPRLHTGSEGQGDSRARCDSTSSTPKTPDGGHSSQEIKSETSSNPSSPEICPNKEKPFMKLKENGRAISRSSSSTSSVSSTAGEGEAMEEGDSGGSQPSTTSPFKQEVFVYSPSPSSESPSLGAAATPIIMSRSPTDAKSRNSPRSNLKFRFDKLSHASSGAGH

SEQ ID NO: 71567 - protein, 730 aa, Homo sapiens; identical to SEQ ID NO: 71564
  Payload ID: 14161
  Gene Symbol: RAP1GAP2
  Gene Name: RAP1 GTPase activating protein 2
  Uniprot ID: Q684P5
  ENSP ID: ENSP00000444890

SEQ ID NO: 71568 - protein, 516 aa, Homo sapiens
  Payload ID: 14162
  Gene Symbol: RAP1GDS1
  Gene Name: RAP1, GTP-GDP dissociation stimulator 1
  Uniprot ID: P52306
  ENSP ID: ENSP00000264572
MADNLSDTLKKLKITAVDKTEDSLEGCLDCLLQALAQNNTETSEKIQASGILQLFASLLTPQSSCKAKVANIIAEVAKNEFMRIPCVDAGLISPLVQLLNSKDQEVLLQTGRALGNICYDSQSSKEQFASTNIAEELVKLFKKQIEHDKREMIFEVLAPLAENDAIKLQLVEAGLVECLLEIVQQKVDSDKEDDITELKTGSDLMVLLLLGDESMQKLFEGGKGSVFQRVLSWIPSNNHQLQLAGALAIANFARNDANCIHMVDNGIVEKLMDLLDRHVEDGNVTVQHAALSALRNLAIPVINKAKMLSAGVTEAVLKFLKSEMPPVQFKLLGTLRMLIDAQAEAAEQLGKNVKLVERLVEWCEAKDHAGVMGESNRLLSALIRHSKSKDVIKTIVQSGGIKHLVTMATSEHVIMQNEALVALALIAALELGTAEKDLESAKLVQILHRLLADERSAPEIKYNSMVLICALMGSECLHKEVQDLAFLDVVSKLRSHENKSVAQQASLTEQRLTVES

SEQ ID NO: 71569 - protein, 608 aa, Homo sapiens
  Payload ID: 14162
  Gene Symbol: RAP1GDS1
  Gene Name: RAP1, GTP-GDP dissociation stimulator 1
  Uniprot ID: P52306
  ENSP ID: ENSP00000340454
MADNLSDTLKKLKITAVDKTEDSLEGCLDCLLQALAQNNTETSEKIQASGILQLFASLLTPQSSCKAKVANIIAEVAKNEFMRIPCVDAGLISPLVQLLNSKDQEVLLQTGRALGNICYDSHEGRSAVDQAGGAQIVIDHLRSLCSITDPANEKLLTVFCGMLMNYSNENDSLQAQLINMGVIPTLVKLLGIHCQNAALTEMCLVAFGNLAELESSKEQFASTNIAEELVKLFKKQIEHDKREMIFEVLAPLAENDAIKLQLVEAGLVECLLEIVQQKVDSDKEDDITELKTGSDLMVLLLLGDESMQKLFEGGKGSVFQRVLSWIPSNNHQLQLAGALAIANFARNDANCIHMVDNGIVEKLMDLLDRHVEDGNVTVQHAALSALRNLAIPVINKAKMLSAGVTEAVLKFLKSEMPPVQFKLLGTLRMLIDAQAEAAEQLGKNVKLVERLVEWCEAKDHAGVMGESNRLLSALIRHSKSKDVIKTIVQSGGIKHLVTMATSEHVIMQNEALVALALIAALELGTAEKDLESAKLVQILHRLLADERSAPEIKYNSMVLICALMGSECLHKEVQDLAFLDVVSKLRSHENKSVAQQASLTEQRLTVES

SEQ ID NO: 71570 - protein, 559 aa, Homo sapiens
  Payload ID: 14162
  Gene Symbol: RAP1GDS1
  Gene Name: RAP1, GTP-GDP dissociation stimulator 1
  Uniprot ID: P52306
  ENSP ID: ENSP00000369503
MADNLSDTLKKLKITAVDKTEDSLEGCLDCLLQALAQNNTETSEKIQASGILQLFASLLTPQSSCKAKVANIIAEVAKNEFMRIPCVDAGLISPLVQLLNSKDQEVLLQTGRALGNICYDSHSLQAQLINMGVIPTLVKLLGIHCQNAALTEMCLVAFGNLAELESSKEQFASTNIAEELVKLFKKQIEHDKREMIFEVLAPLAENDAIKLQLVEAGLVECLLEIVQQKVDSDKEDDITELKTGSDLMVLLLLGDESMQKLFEGGKGSVFQRVLSWIPSNNHQLQLAGALAIANFARNDANCIHMVDNGIVEKLMDLLDRHVEDGNVTVQHAALSALRNLAIPVINKAKMLSAGVTEAVLKFLKSEMPPVQFKLLGTLRMLIDAQAEAAEQLGKNVKLVERLVEWCEAKDHAGVMGESNRLLSALIRHSKSKDVIKTIVQSGGIKHLVTMATSEHVIMQNEALVALALIAALELGTAEKDLESAKLVQILHRLLADERSAPEIKYNSMVLICALMGSECLHKEVQDLAFLDVVSKLRSHENKSVAQQASLTEQRLTVES

SEQ ID NO: 71571 - protein, 607 aa, Homo sapiens
  Payload ID: 14162
  Gene Symbol: RAP1GDS1
  Gene Name: RAP1, GTP-GDP dissociation stimulator 1
  Uniprot ID: P52306
  ENSP ID: ENSP00000386153
MDNLSDTLKKLKITAVDKTEDSLEGCLDCLLQALAQNNTETSEKIQASGILQLFASLLTPQSSCKAKVANIIAEVAKNEFMRIPCVDAGLISPLVQLLNSKDQEVLLQTGRALGNICYDSHEGRSAVDQAGGAQIVIDHLRSLCSITDPANEKLLTVFCGMLMNYSNENDSLQAQLINMGVIPTLVKLLGIHCQNAALTEMCLVAFGNLAELESSKEQFASTNIAEELVKLFKKQIEHDKREMIFEVLAPLAENDAIKLQLVEAGLVECLLEIVQQKVDSDKEDDITELKTGSDLMVLLLLGDESMQKLFEGGKGSVFQRVLSWIPSNNHQLQLAGALAIANFARNDANCIHMVDNGIVEKLMDLLDRHVEDGNVTVQHAALSALRNLAIPVINKAKMLSAGVTEAVLKFLKSEMPPVQFKLLGTLRMLIDAQAEAAEQLGKNVKLVERLVEWCEAKDHAGVMGESNRLLSALIRHSKSKDVIKTIVQSGGIKHLVTMATSEHVIMQNEALVALALIAALELGTAEKDLESAKLVQILHRLLADERSAPEIKYNSMVLICALMGSECLHKEVQDLAFLDVVSKLRSHENKSVAQQASLTEQRLTVES

SEQ ID NO: 71572 - protein, 558 aa, Homo sapiens
  Payload ID: 14162
  Gene Symbol: RAP1GDS1
  Gene Name: RAP1, GTP-GDP dissociation stimulator 1
  Uniprot ID: P52306
  ENSP ID: ENSP00000386223
MDNLSDTLKKLKITAVDKTEDSLEGCLDCLLQALAQNNTETSEKIQASGILQLFASLLTPQSSCKAKVANIIAEVAKNEFMRIPCVDAGLISPLVQLLNSKDQEVLLQTGRALGNICYDSHSLQAQLINMGVIPTLVKLLGIHCQNAALTEMCLVAFGNLAELESSKEQFASTNIAEELVKLFKKQIEHDKREMIFEVLAPLAENDAIKLQLVEAGLVECLLEIVQQKVDSDKEDDITELKTGSDLMVLLLLGDESMQKLFEGGKGSVFQRVLSWIPSNNHQLQLAGALAIANFARNDANCIHMVDNGIVEKLMDLLDRHVEDGNVTVQHAALSALRNLAIPVINKAKMLSAGVTEAVLKFLKSEMPPVQFKLLGTLRMLIDAQAEAAEQLGKNVKLVERLVEWCEAKDHAGVMGESNRLLSALIRHSKSKDVIKTIVQSGGIKHLVTMATSEHVIMQNEALVALALIAALELGTAEKDLESAKLVQILHRLLADERSAPEIKYNSMVLICALMGSECLHKEVQDLAFLDVVSKLRSHENKSVAQQASLTEQRLTVES

SEQ ID NO: 71573 - protein, 607 aa, Homo sapiens
  Payload ID: 14162
  Gene Symbol: RAP1GDS1
  Gene Name: RAP1, GTP-GDP dissociation stimulator 1
  Uniprot ID: P52306
  ENSP ID: ENSP00000407157
MADNLSDTLKKLKITAVDKTEDSLEGCLDCLLQALAQNNTETSEKIQASGILQLFASLLTPQSSCKAKVANIIAEVAKNEFMRIPCVDAGLISPLVQLLNSKDQEVLLQTGRALGNICYDSHEGRSAVDQAGGAQIVIDHLRSLCSITDPANEKLLTVFCGMLMNYSNENDSLQAQLINMGVIPTLVKLLGIHCQNAALTEMCLVAFGNLAELESSKEQFASTNIAEELVKLFKKQIEHDKREMIFEVLAPLAENDAIKLQLVEAGLVECLLEIVQQKVDSDKEDDITELKTGSDLMVLLLLGDESMQKLFEGGKGSVFQRVLSWIPSNNHQLQLAGALAIANFARNDANCIHMVDNGIVEKLMDLLDRHVEDGNVTVQHAALSALRNLAIPVINKAKMLSAGVTEAVLKFLKSEMPPVQFKLLGTLRMLIDAQEAAEQLGKNVKLVERLVEWCEAKDHAGVMGESNRLLSALIRHSKSKDVIKTIVQSGGIKHLVTMATSEHVIMQNEALVALALIAALELGTAEKDLESAKLVQILHRLLADERSAPEIKYNSMVLICALMGSECLHKEVQDLAFLDVVSKLRSHENKSVAQQASLTEQRLTVES

SEQ ID NO: 71574 - protein, 253 aa, Homo sapiens
  Payload ID: 14162
  Gene Symbol: RAP1GDS1
  Gene Name: RAP1, GTP-GDP dissociation stimulator 1
  ENSP ID: ENSP00000421482
  MOD_RES (1)..(1): Any amino acid
XANEKLLTVFCGMLMNYSNENDSLQAQLINMGVIPTLVKLLGIHCQNAALTEMCLVAFGNLAELDAIKLQLVEAGLVECLLEIVQQKVDSDKEDDITELKTGSDLMVLLLLGDESMQKLFEGGKGSVFQRVLSWIPSNNHQLQLAGALAIANFARNDANCIHMVDNGIVEKLMDLLDRHVEDGNVTVQHAALSALRNLAIPVINKAKMLSAGVTEAVLKFLKSEMPPVQFKLLGTLRMLIDAQAEAAEQLGKN

SEQ ID NO: 71575 - protein, 158 aa, Homo sapiens
  Payload ID: 14162
  Gene Symbol: RAP1GDS1
  Gene Name: RAP1, GTP-GDP dissociation stimulator 1
  ENSP ID: ENSP00000421599
MADNLSDTLKKLKITAVDKTEDSLEGCLDCLLQALAQNNTETSEKIQASGILQLFASLLTPQSSCKAKVANIIAEVAKNDEGRSAVDQAGGAQIVIDHLRSLCSITDPANEKLLTVFCGMLMNYSNENDSLQAQLINMGVIPTLVKLLGIHCQNAALT

SEQ ID NO: 71576 - protein, 39 aa, Homo sapiens
  Payload ID: 14162
  Gene Symbol: RAP1GDS1
  Gene Name: RAP1, GTP-GDP dissociation stimulator 1
  ENSP ID: ENSP00000422348
MADNLSDTLKKLKITAVDKTEDSLEGCLDCLLQALAQNR

SEQ ID NO: 71577 - protein, 38 aa, Homo sapiens
  Payload ID: 14162
  Gene Symbol: RAP1GDS1
  Gene Name: RAP1, GTP-GDP dissociation stimulator 1
  ENSP ID: ENSP00000422426
MDNLSDTLKKLKITAVDKTEDSLEGCLDCLLQALAQNR

SEQ ID NO: 71578 - protein, 118 aa, Homo sapiens
  Payload ID: 14162
  Gene Symbol: RAP1GDS1
  Gene Name: RAP1, GTP-GDP dissociation stimulator 1
  ENSP ID: ENSP00000424250
MDNLSDTLKKLKITAVDKTEDSLEGCLDCLLQALAQNNTETSEKIQASGILQLFASLLTPQSSCKAKVANIIAEVAKNGEVYLKNFSAGNVFSFTSYLVYANSMCGCWIDFTTGAAAK

SEQ ID NO: 71579 - protein, 158 aa, Homo sapiens
  Payload ID: 14162
  Gene Symbol: RAP1GDS1
  Gene Name: RAP1, GTP-GDP dissociation stimulator 1
  ENSP ID: ENSP00000424324
MDNLSDTLKKLKITAVDKTEDSLEGCLDCLLQALAQNNTETSEKIQASGILQLFASLLTPQSSCKAKVANIIAEVAKNDSLQAQLINMGVIPTLVKLLGIHCQNAALTEMCLVAFGNLAELESSKEQFASTNIAEELVKLFKKQIEHDKREMIFEVLA

SEQ ID NO: 71580 - protein, 122 aa, Homo sapiens
  Payload ID: 14162
  Gene Symbol: RAP1GDS1
  Gene Name: RAP1, GTP-GDP dissociation stimulator 1
  ENSP ID: ENSP00000425992
MDNLSDTLKKLKITAVDKTEDSLEGCLDCLLQALAQNKFMRIPCVDAGLISPLVQLLNSKDQEVLLQTGRALGNICYDSHSLQAQLINMGVIPTLVKLLGIHCQNAALTEMCLVAFGNLAEL

SEQ ID NO: 71581 - protein, 147 aa, Homo sapiens
  Payload ID: 14162
  Gene Symbol: RAP1GDS1
  Gene Name: RAP1, GTP-GDP dissociation stimulator 1
  ENSP ID: ENSP00000426096
MDNLSDTLKKLKITAVDKTEDSLEGCLDCLLQALAQNKFMRIPCVDAGLISPLVQLLNSKDQEVLLQTGRALGNICYDSHEGRSAVDQAGGAQIVIDHLRSLCSITDPANEKLLTVFCGMLMNYSNENDSLQAQLINMGVIPTLVKL

SEQ ID NO: 71582 - protein, 101 aa, Homo sapiens
  Payload ID: 14162
  Gene Symbol: RAP1GDS1
  Gene Name: RAP1, GTP-GDP dissociation stimulator 1
  ENSP ID: ENSP00000475933
  MOD_RES (1)..(1): Any amino acid
XNDSLQAQLINMGVIPTLVKLLGIHCQNAALTEMCLVAFGNLAELGCTGSVVPASASGEGLRKLTIMAEGEEGAGVSHGETGSERERQRGSHRLLTRSHMN

SEQ ID NO: 71583 - protein, 184 aa, Homo sapiens
  Payload ID: 14163
  Gene Symbol: RAP1A
  Gene Name: RAP1A, member of RAS oncogene family
  Uniprot ID: P62834
  ENSP ID: ENSP00000348786
MREYKLVVLGSGGVGKSALTVQFVQGIFVEKYDPTIEDSYRKQVEVDCQQCMLEILDTAGTEQFTAMRDLYMKNGQGFALVYSITAQSTFNDLQDLREQILRVKDTEDVPMILVGNKCDLEDERVVGKEQGQNLARQWCNCAFLESSAKSKINVNEIFYDLVRQINRKTPVEKKKPKKKSCLLL

SEQ ID NO: 71584 - protein, 184 aa, Homo sapiens; identical to SEQ ID NO: 71583
  Payload ID: 14163
  Gene Symbol: RAP1A
  Gene Name: RAP1A, member of RAS oncogene family
  Uniprot ID: P62834
  ENSP ID: ENSP00000358723

SEQ ID NO: 71585 - protein, 129 aa, Homo sapiens
  Payload ID: 14163
  Gene Symbol: RAP1A
  Gene Name: RAP1A, member of RAS oncogene family
  ENSP ID: ENSP00000396741
MREYKLVVLGSGGVGKSALTVQFVQGIFVEKYDPTIEDSYRKQVEVDCQQCMLEILDTAGTEQFTAMRDLYMKNGQGFALVYSITAQSTFNDLQDLREQILRVKDTEDVPMILVGNKCDLEDERVVGKE

SEQ ID NO: 71586 - protein, 184 aa, Homo sapiens
  Payload ID: 14164
  Gene Symbol: RAP1B
  Gene Name: RAP1B, member of RAS oncogene family
  Uniprot ID: P61224
  ENSP ID: ENSP00000250559
MREYKLVVLGSGGVGKSALTVQFVQGIFVEKYDPTIEDSYRKQVEVDAQQCMLEILDTAGTEQFTAMRDLYMKNGQGFALVYSITAQSTFNDLQDLREQILRVKDTDDVPMILVGNKCDLEDERVVGKEQGQNLARQWNNCAFLESSAKSKINVNEIFYDLVRQINRKTPVPGKARKKSSCQLL

SEQ ID NO: 71587 - protein, 118 aa, Homo sapiens
  Payload ID: 14164
  Gene Symbol: RAP1B
  Gene Name: RAP1B, member of RAS oncogene family
  ENSP ID: ENSP00000368270
MRDLYMKNGQGFALVYSITAQSTFNDLQDLREQILRVKDTDDVPMILVGNKCDLEDERVVGKEQGQNLARQWNNCAFLESSAKSKINVNEIFYDLVRQINRKTPVPGKARKKSSCQLL

SEQ ID NO: 71588 - protein, 184 aa, Homo sapiens; identical to SEQ ID NO: 71586
  Payload ID: 14164
  Gene Symbol: RAP1B
  Gene Name: RAP1B, member of RAS oncogene family
  Uniprot ID: P61224
  ENSP ID: ENSP00000377085

SEQ ID NO: 71589 - protein, 32 aa, Homo sapiens
  Payload ID: 14164
  Gene Symbol: RAP1B
  Gene Name: RAP1B, member of RAS oncogene family
  ENSP ID: ENSP00000390972
MREYKLVVLGSGGVGKSALTVQFVQGIFVEKY

SEQ ID NO: 71590 - protein, 142 aa, Homo sapiens
  Payload ID: 14164
  Gene Symbol: RAP1B
  Gene Name: RAP1B, member of RAS oncogene family
  Uniprot ID: P61224
  ENSP ID: ENSP00000399986
MREYKLVVLGSGGVGKSALEQFTAMRDLYMKNGQGFALVYSITAQSTFNDLQDLREQILRVKDTDDVPMILVGNKCDLEDERVVGKEQGQNLARQWNNCAFLESSAKSKINVNEIFYDLVRQINRKTPVPGKARKKSSCQLL

SEQ ID NO: 71591 - protein, 157 aa, Homo sapiens
  Payload ID: 14164
  Gene Symbol: RAP1B
  Gene Name: RAP1B, member of RAS oncogene family
  ENSP ID: ENSP00000401095
MREYKLVVLGSGGVGKSALTVQFVQGIFVEKYDPTIEDSYRKQVEVDAQQCMLEILDTAGTEQFTAMRDLYMKNGQGFALVYSITAQSTFNDLQDLREQILRVKDTDDVPMILVGNKCDLEDERVVGKEQGQNLARQWNNCAFLESSAKSKINVNEV

SEQ ID NO: 71592 - protein, 122 aa, Homo sapiens
  Payload ID: 14164
  Gene Symbol: RAP1B
  Gene Name: RAP1B, member of RAS oncogene family
  ENSP ID: ENSP00000437415
MREYKLVVLGSGGVGKSALTVQFVQGIFVEKYDPTIEDSYRKQVEVDAQQCMLEILDTAGTEQFTAMRDLYMKNGQGFALVYSITAQSTFNDLQDLREQILRVKDTDDVPMILVGNKCDLED

SEQ ID NO: 71593 - protein, 98 aa, Homo sapiens
  Payload ID: 14164
  Gene Symbol: RAP1B
  Gene Name: RAP1B, member of RAS oncogene family
  ENSP ID: ENSP00000438088
MREYKLVVLGSGGVGKSALTVQFVQGIFVEKYDPTIEDSYRKQVEVDAQQCMLEILDTAGTEQFTAMRDLYMKNGQGFALVYSITAQSTFNDLQDLRE

SEQ ID NO: 71594 - protein, 84 aa, Homo sapiens
  Payload ID: 14164
  Gene Symbol: RAP1B
  Gene Name: RAP1B, member of RAS oncogene family
  ENSP ID: ENSP00000438311
MREYKLVVLGSGGVGKSALTVQFVQGIFVEKYDPTIEDSYRKQVEVDAQQCMLEILDTAGTEQFTAMRDLYMKNGQGFALVYSI

SEQ ID NO: 71595 - protein, 184 aa, Homo sapiens; identical to SEQ ID NO: 71586
  Payload ID: 14164
  Gene Symbol: RAP1B
  Gene Name: RAP1B, member of RAS oncogene family
  Uniprot ID: P61224
  ENSP ID: ENSP00000439966

SEQ ID NO: 71596 - protein, 137 aa, Homo sapiens
  Payload ID: 14164
  Gene Symbol: RAP1B
  Gene Name: RAP1B, member of RAS oncogene family
  Uniprot ID: P61224
  ENSP ID: ENSP00000440014
MREYKLVVLGSGGVGKSALTVQFVQGIFVEKYDPTIEDSYRKQVEVDAQQCMLEILDTAGTVPMILVGNKCDLEDERVVGKEQGQNLARQWNNCAFLESSAKSKINVNEIFYDLVRQINRKTPVPGKARKKSSCQLL

SEQ ID NO: 71597 - protein, 139 aa, Homo sapiens
  Payload ID: 14164
  Gene Symbol: RAP1B
  Gene Name: RAP1B, member of RAS oncogene family
  ENSP ID: ENSP00000440466
MREYKLVVLGSGGVGKSALTVQFVQGIFVEKYDPTIEDSYRKQVEVDAQQCMLEILDTAGTEQFTAMRDLYMKNGQGFALVYSITAQSTFNDLQDLREQILRVKDTDDVPMILVGNKCDLEDERVVGKEQGQNLARQWN

SEQ ID NO: 71598 - protein, 53 aa, Homo sapiens
  Payload ID: 14164
  Gene Symbol: RAP1B
  Gene Name: RAP1B, member of RAS oncogene family
  ENSP ID: ENSP00000440635
MREYKLVVLGSGGVGKSALTVQFVQGIFVEKYDPTIEDSYRKQVEVDAQQCML

SEQ ID NO: 71599 - protein, 136 aa, Homo sapiens
  Payload ID: 14164
  Gene Symbol: RAP1B
  Gene Name: RAP1B, member of RAS oncogene family
  ENSP ID: ENSP00000440708
MREYKLVVLGSGGVGKSALTVQFVQGIFVEKYDPTIEDSYRKQVEVDAQQCMLEILDTAGTEQFTAMRDLYMKNGQGFALVYSITAQSTFNDLQDLREQILRVKDTDDIFYDLVRQINRKTPVPGKARKKSSCQLL

SEQ ID NO: 71600 - protein, 184 aa, Homo sapiens; identical to SEQ ID NO: 71586
  Payload ID: 14164
  Gene Symbol: RAP1B
  Gene Name: RAP1B, member of RAS oncogene family
  Uniprot ID: P61224
  ENSP ID: ENSP00000441275

SEQ ID NO: 71601 - protein, 87 aa, Homo sapiens
  Payload ID: 14164
  Gene Symbol: RAP1B
  Gene Name: RAP1B, member of RAS oncogene family
  ENSP ID: ENSP00000441952
MREYKLVVLGSGGVGKSALTVQFVQGIFVEKYDPTIEDSYRKQVEVDAQQCMLEILDTAGTEQFTAMRDLYMKNGQGFALVYSITAQ

SEQ ID NO: 71602 - protein, 103 aa, Homo sapiens
  Payload ID: 14164
  Gene Symbol: RAP1B
  Gene Name: RAP1B, member of RAS oncogene family
  ENSP ID: ENSP00000443775
MRDLYMKNGQGFALVYSITAQSTFNDLQDLREQILRVKDTDDVPMILVGNKCDLEDERVVGKEQGQNLARQWNNCAFLESSAKSKINVNEIFYDLVRQINRKT

SEQ ID NO: 71603 - protein, 179 aa, Homo sapiens
  Payload ID: 14164
  Gene Symbol: RAP1B
  Gene Name: RAP1B, member of RAS oncogene family
  ENSP ID: ENSP00000443851
MREYKLVVLGSGGVGKSALTVQFVQGIFVEKYDPTIEDSYRKQVEVDAQQCMLEILDTAGTEQFTAMRDLYMKNGQGFALVYSITAQSTFNDLQDLREQILRVKDTDDVPMILVGNKCDLEDERVVGKEQGQNLARQWNNCAFLESSAKSKINVNEVWSNILKMGLHLKYNIEDEWKMS

SEQ ID NO: 71604 - protein, 127 aa, Homo sapiens
  Payload ID: 14164
  Gene Symbol: RAP1B
  Gene Name: RAP1B, member of RAS oncogene family
  ENSP ID: ENSP00000444060
MREYKLVVLGSGGVGKSALTVQFVQGIFVEKYDPTIEDSYRKQVEVDAQQCMLEILDTAGTEQFTAMRDLYMKNGQGFALVYSITAQSTFNDLQDLREQILRVKDTDDVPMILVGNKCDLEDERVVG

SEQ ID NO: 71605 - protein, 121 aa, Homo sapiens
  Payload ID: 14164
  Gene Symbol: RAP1B
  Gene Name: RAP1B, member of RAS oncogene family
  ENSP ID: ENSP00000444467
MLEILDTAGTEQFTAMRDLYMKNGQGFALVYSITAQSTFNDLQDLREQILRVKDTDDVPMILVGNKCDLEDERVVGKEQGQNLARQWNNCAFLESSAKSKINVNEIFYDLVRQINRKTPVP

SEQ ID NO: 71606 - protein, 101 aa, Homo sapiens
  Payload ID: 14164
  Gene Symbol: RAP1B
  Gene Name: RAP1B, member of RAS oncogene family
  ENSP ID: ENSP00000444786
MREYKLVVLGSGGVGKSALTVQFVQGIFVEKYDPTIEDSYRKQVEVDAQQCMLEILDTAGTEQFTAMRDLYMKNGQGFALVYSITAQSTFNDLQDLREQIL

SEQ ID NO: 71607 - protein, 142 aa, Homo sapiens; identical to SEQ ID NO: 71590
  Payload ID: 14164
  Gene Symbol: RAP1B
  Gene Name: RAP1B, member of RAS oncogene family
  Uniprot ID: P61224
  ENSP ID: ENSP00000444830

SEQ ID NO: 71608 - protein, 48 aa, Homo sapiens
  Payload ID: 14164
  Gene Symbol: RAP1B
  Gene Name: RAP1B, member of RAS oncogene family
  ENSP ID: ENSP00000444924
MREYKLVVLGSGGVGKSALTVQFVQGIFVEKYDPTIEDSYRKQVEVDA

SEQ ID NO: 71609 - protein, 118 aa, Homo sapiens; identical to SEQ ID NO: 71587
  Payload ID: 14164
  Gene Symbol: RAP1B
  Gene Name: RAP1B, member of RAS oncogene family
  ENSP ID: ENSP00000445090

SEQ ID NO: 71610 - protein, 93 aa, Homo sapiens
  Payload ID: 14164
  Gene Symbol: RAP1B
  Gene Name: RAP1B, member of RAS oncogene family
  ENSP ID: ENSP00000445138
MREYKLVVLGSGGVGKSALTVQFVQGIFVEKYDPTIEDSYRKQVEVDAQQCMLEILDTAGTEQFTAMRDLYMKNGQGFALVYSITAQSTFNDL

SEQ ID NO: 71611 - protein, 11 aa, Homo sapiens
  Payload ID: 14164
  Gene Symbol: RAP1B
  Gene Name: RAP1B, member of RAS oncogene family
  ENSP ID: ENSP00000445977
MREYKLVVLGS

SEQ ID NO: 71612 - protein, 11 aa, Homo sapiens
  Payload ID: 14164
  Gene Symbol: RAP1B
  Gene Name: RAP1B, member of RAS oncogene family
  ENSP ID: ENSP00000446027
MREYKLVVLGS

SEQ ID NO: 71613 - protein, 165 aa, Homo sapiens
  Payload ID: 14164
  Gene Symbol: RAP1B
  Gene Name: RAP1B, member of RAS oncogene family
  Uniprot ID: P61224
  ENSP ID: ENSP00000446318
MREYKLVVLGSGGVGKSALTVQFVQGIFVEKYDPTIEDSYRKEQFTAMRDLYMKNGQGFALVYSITAQSTFNDLQDLREQILRVKDTDDVPMILVGNKCDLEDERVVGKEQGQNLARQWNNCAFLESSAKSKINVNEIFYDLVRQINRKTPVPGKARKKSSCQLL

SEQ ID NO: 71614 - protein, 183 aa, Homo sapiens
  Payload ID: 14165
  Gene Symbol: RAP2A
  Gene Name: RAP2A, member of RAS oncogene family
  Uniprot ID: P10114
  ENSP ID: ENSP00000245304
MREYKVVVLGSGGVGKSALTVQFVTGTFIEKYDPTIEDFYRKEIEVDSSPSVLEILDTAGTEQFASMRDLYIKNGQGFILVYSLVNQQSFQDIKPMRDQIIRVKRYEKVPVILVGNKVDLESEREVSSSEGRALAEEWGCPFMETSAKSKTMVDELFAEIVRQMNYAAQPDKDDPCCSACNIQ

SEQ ID NO: 71615 - protein, 108 aa, Homo sapiens
  Payload ID: 14165
  Gene Symbol: RAP2A
  Gene Name: RAP2A, member of RAS oncogene family
  ENSP ID: ENSP00000436462
MREYKVVVLGSGGVGKSALTVQFVTGTFIEKYDPTIEDFYRKEIEVDSSPSVLEILDTAGTEQFASMRDLYIKNGQGFILVYSLVNQQSFQDIKPMRDQIIRVKRPML

SEQ ID NO: 71616 - protein, 183 aa, Homo sapiens
  Payload ID: 14166
  Gene Symbol: RAP2B
  Gene Name: RAP2B, member of RAS oncogene family
  Uniprot ID: P61225
  ENSP ID: ENSP00000319096
MREYKVVVLGSGGVGKSALTVQFVTGSFIEKYDPTIEDFYRKEIEVDSSPSVLEILDTAGTEQFASMRDLYIKNGQGFILVYSLVNQQSFQDIKPMRDQIIRVKRYERVPMILVGNKVDLEGEREVSYGEGKALAEEWSCPFMETSAKNKASVDELFAEIVRQMNYAAQPNGDEGCCSACVIL

SEQ ID NO: 71617 - protein, 183 aa, Homo sapiens
  Payload ID: 14167
  Gene Symbol: RAP2C
  Gene Name: RAP2C, member of RAS oncogene family
  Uniprot ID: Q9Y3L5
  ENSP ID: ENSP00000340274
MREYKVVVLGSGGVGKSALTVQFVTGTFIEKYDPTIEDFYRKEIEVDSSPSVLEILDTAGTEQFASMRDLYIKNGQGFILVYSLVNQQSFQDIKPMRDQIVRVKRYEKVPLILVGNKVDLEPEREVMSSEGRALAQEWGCPFMETSAKSKSMVDELFAEIVRQMNYSSLPEKQDQCCTTCVVQ

SEQ ID NO: 71618 - protein, 183 aa, Homo sapiens; identical to SEQ ID NO: 71617
  Payload ID: 14167
  Gene Symbol: RAP2C
  Gene Name: RAP2C, member of RAS oncogene family
  Uniprot ID: Q9Y3L5
  ENSP ID: ENSP00000359911

SEQ ID NO: 71619 - protein, 117 aa, Homo sapiens
  Payload ID: 14167
  Gene Symbol: RAP2C
  Gene Name: RAP2C, member of RAS oncogene family
  ENSP ID: ENSP00000484870
MRDLYIKNGQGFILVYSLVNQQSFQDIKPMRDQIVRVKRYEKVPLILVGNKVDLEPEREVMSSEGRALAQEWGCPFMETSAKSKSMVDELFAEIVRQMNYSSLPEKQDQCCTTCVVQ

SEQ ID NO: 71620 - protein, 556 aa, Homo sapiens
  Payload ID: 14168
  Gene Symbol: RORA
  Gene Name: RAR-related orphan receptor A
  Uniprot ID: P35398
  ENSP ID: ENSP00000261523
MNEGAPGDSDLETEARVPWSIMGHCLRTGQARMSATPTPAGEGARRDELFGILQILHQCILSSGDAFVLTGVCCSWRQNGKPPYSQKEDKEVQTGYMNAQIEIIPCKICGDKSSGIHYGVITCEGCKGFFRRSQQSNATYSCPRQKNCLIDRTSRNRCQHCRLQKCLAVGMSRDAVKFGRMSKKQRDSLYAEVQKHRMQQQQRDHQQQPGEAEPLTPTYNISANGLTELHDDLSNYIDGHTPEGSKADSAVSSFYLDIQPSPDQSGLDINGIKPEPICDYTPASGFFPYCSFTNGETSPTVSMAELEHLAQNISKSHLETCQYLREELQQITWQTFLQEEIENYQNKQREVMWQLCAIKITEAIQYVVEFAKRIDGFMELCQNDQIVLLKAGSLEVVFIRMCRAFDSQNNTVYFDGKYASPDVFKSLGCEDFISFVFEFGKSLCSMHLTEDEIALFSAFVLMSADRSWLQEKVKIEKLQQKIQLALQHVLQKNHREDGILTKLICKVSTLRALCGRHTEKLMAFKAIYPDIVRLHFPPLYKELFTSEFEPAMQIDG

SEQ ID NO: 71621 - protein, 548 aa, Homo sapiens
  Payload ID: 14168
  Gene Symbol: RORA
  Gene Name: RAR-related orphan receptor A
  ENSP ID: ENSP00000309753
MNEGAPGDSDLETEARVPWSIMGHCLRTGQARMSATPTPAGEGARSSSTCSSLSRLFWSQLEHINWDGATAKNFINLREFFSFLLPALRKAQIEIIPCKICGDKSSGIHYGVITCEGCKGFFRRSQQSNATYSCPRQKNCLIDRTSRNRCQHCRLQKCLAVGMSRDAVKFGRMSKKQRDSLYAEVQKHRMQQQQRDHQQQPGEAEPLTPTYNISANGLTELHDDLSNYIDGHTPEGSKADSAVSSFYLDIQPSPDQSGLDINGIKPEPICDYTPASGFFPYCSFTNGETSPTVSMAELEHLAQNISKSHLETCQYLREELQQITWQTFLQEEIENYQNKQREVMWQLCAIKITEAIQYVVEFAKRIDGFMELCQNDQIVLLKAGSLEVVFIRMCRAFDSQNNTVYFDGKYASPDVFKSLGCEDFISFVFEFGKSLCSMHLTEDEIALFSAFVLMSADRSWLQEKVKIEKLQQKIQLALQHVLQKNHREDGILTKLICKVSTLRALCGRHTEKLMAFKAIYPDIVRLHFPPLYKELFTSEFEPAMQIDG

SEQ ID NO: 71622 - protein, 523 aa, Homo sapiens
  Payload ID: 14168
  Gene Symbol: RORA
  Gene Name: RAR-related orphan receptor A
  Uniprot ID: P35398
  ENSP ID: ENSP00000335087
MESAPAAPDPAASEPGSSGADAAAGSRETPLNQESARKSEPPAPVRRQSYSSTSRGISVTKKTHTSQIEIIPCKICGDKSSGIHYGVITCEGCKGFFRRSQQSNATYSCPRQKNCLIDRTSRNRCQHCRLQKCLAVGMSRDAVKFGRMSKKQRDSLYAEVQKHRMQQQQRDHQQQPGEAEPLTPTYNISANGLTELHDDLSNYIDGHTPEGSKADSAVSSFYLDIQPSPDQSGLDINGIKPEPICDYTPASGFFPYCSFTNGETSPTVSMAELEHLAQNISKSHLETCQYLREELQQITWQTFLQEEIENYQNKQREVMWQLCAIKITEAIQYVVEFAKRIDGFMELCQNDQIVLLKAGSLEVVFIRMCRAFDSQNNTVYFDGKYASPDVFKSLGCEDFISFVFEFGKSLCSMHLTEDEIALFSAFVLMSADRSWLQEKVKIEKLQQKIQLALQHVLQKNHREDGILTKLICKVSTLRALCGRHTEKLMAFKAIYPDIVRLHFPPLYKELFTSEFEPAMQIDG

SEQ ID NO: 71623 - protein, 468 aa, Homo sapiens
  Payload ID: 14168
  Gene Symbol: RORA
  Gene Name: RAR-related orphan receptor A
  ENSP ID: ENSP00000402971
MMYFVIAAMKAQIEIIPCKICGDKSSGIHYGVITCEGCKGFFRRSQQSNATYSCPRQKNCLIDRTSRNRCQHCRLQKCLAVGMSRDAVKFGRMSKKQRDSLYAEVQKHRMQQQQRDHQQQPGEAEPLTPTYNISANGLTELHDDLSNYIDGHTPEGSKADSAVSSFYLDIQPSPDQSGLDINGIKPEPICDYTPASGFFPYCSFTNGETSPTVSMAELEHLAQNISKSHLETCQYLREELQQITWQTFLQEEIENYQNKQREVMWQLCAIKITEAIQYVVEFAKRIDGFMELCQNDQIVLLKAGSLEVVFIRMCRAFDSQNNTVYFDGKYASPDVFKSLGCEDFISFVFEFGKSLCSMHLTEDEIALFSAFVLMSADRSWLQEKVKIEKLQQKIQLALQHVLQKNHREDGILTKLICKVSTLRALCGRHTEKLMAFKAIYPDIVRLHFPPLYKELFTSEFEPAMQIDG

SEQ ID NO: 71624 - protein, 62 aa, Homo sapiens
  Payload ID: 14168
  Gene Symbol: RORA
  Gene Name: RAR-related orphan receptor A
  ENSP ID: ENSP00000449482
  MOD_RES (1)..(1): Any amino acid
XPLNQESARKSEPPAPVRRQSYSSTSRGISVTKKTHTWQAWYRALPCTALPMSSSLARRDPL

SEQ ID NO: 71625 - protein, 153 aa, Homo sapiens
  Payload ID: 14168
  Gene Symbol: RORA
  Gene Name: RAR-related orphan receptor A
  ENSP ID: ENSP00000453322
MRVTVAPQTKPVFSTNELAHLSPPSAPASQRESGVGLRASCPTEWGQKVVRGAFRGALRAEKRPAATAQIEIIPCKICGDKSSGIHYGVITCEGCKGFFRRSQQSNATYSCPRQKNCLIDRTSRNRCQHCRLQKCLAVGMSRDAVKFGRMSKK

SEQ ID NO: 71626 - protein, 38 aa, Homo sapiens
  Payload ID: 14168
  Gene Symbol: RORA
  Gene Name: RAR-related orphan receptor A
  ENSP ID: ENSP00000484955
AAAGSRETPLNQESARKSEPPAPVRRQSYSSTSRDWHA

SEQ ID NO: 71627 - protein, 459 aa, Homo sapiens
  Payload ID: 14169
  Gene Symbol: RORB
  Gene Name: RAR-related orphan receptor B
  Uniprot ID: Q92753
  ENSP ID: ENSP00000366093
MRAQIEVIPCKICGDKSSGIHYGVITCEGCKGFFRRSQQNNASYSCPRQRNCLIDRTNRNRCQHCRLQKCLALGMSRDAVKFGRMSKKQRDSLYAEVQKHQQRLQEQRQQQSGEAEALARVYSSSISNGLSNLNNETSGTYANGHVIDLPKSEGYYNVDSGQPSPDQSGLDMTGIKQIKQEPIYDLTSVPNLFTYSSFNNGQLAPGITMTEIDRIAQNIIKSHLETCQYTMEELHQLAWQTHTYEEIKAYQSKSREALWQQCAIQITHAIQYVVEFAKRITGFMELCQNDQILLLKSGCLEVVLVRMCRAFNPLNNTVLFEGKYGGMQMFKALGSDDLVNEAFDFAKNLCSLQLTEEEIALFSSAVLISPDRAWLIEPRKVQKLQEKIYFALQHVIQKNHLDDETLAKLIAKIPTITAVCNLHGEKLQVFKQSHPEIVNTLFPPLYKELFNPDCATGCK

SEQ ID NO: 71628 - protein, 470 aa, Homo sapiens
  Payload ID: 14169
  Gene Symbol: RORB
  Gene Name: RAR-related orphan receptor B
  Uniprot ID: Q92753
  ENSP ID: ENSP00000379507
MCENQLKTKADATAQIEVIPCKICGDKSSGIHYGVITCEGCKGFFRRSQQNNASYSCPRQRNCLIDRTNRNRCQHCRLQKCLALGMSRDAVKFGRMSKKQRDSLYAEVQKHQQRLQEQRQQQSGEAEALARVYSSSISNGLSNLNNETSGTYANGHVIDLPKSEGYYNVDSGQPSPDQSGLDMTGIKQIKQEPIYDLTSVPNLFTYSSFNNGQLAPGITMTEIDRIAQNIIKSHLETCQYTMEELHQLAWQTHTYEEIKAYQSKSREALWQQCAIQITHAIQYVVEFAKRITGFMELCQNDQILLLKSGCLEVVLVRMCRAFNPLNNTVLFEGKYGGMQMFKALGSDDLVNEAFDFAKNLCSLQLTEEEIALFSSAVLISPDRAWLIEPRKVQKLQEKIYFALQHVIQKNHLDDETLAKLIAKIPTITAVCNLHGEKLQVFKQSHPEIVNTLFPPLYKELFNPDCATGCK

SEQ ID NO: 71629 - protein, 518 aa, Homo sapiens
  Payload ID: 14170
  Gene Symbol: RORC
  Gene Name: RAR-related orphan receptor C
  Uniprot ID: P51449
  ENSP ID: ENSP00000327025
MDRAPQRQHRASRELLAAKKTHTSQIEVIPCKICGDKSSGIHYGVITCEGCKGFFRRSQRCNAAYSCTRQQNCPIDRTSRNRCQHCRLQKCLALGMSRDAVKFGRMSKKQRDSLHAEVQKQLQQRQQQQQEPVVKTPPAGAQGADTLTYTLGLPDGQLPLGSSPDLPEASACPPGLLKASGSGPSYSNNLAKAGLNGASCHLEYSPERGKAEGRESFYSTGSQLTPDRCGLRFEEHRHPGLGELGQGPDSYGSPSFRSTPEAPYASLTEIEHLVQSVCKSYRETCQLRLEDLLRQRSNIFSREEVTGYQRKSMWEMWERCAHHLTEAIQYVVEFAKRLSGFMELCQNDQIVLLKAGAMEVVLVRMCRAYNADNRTVFFEGKYGGMELFRALGCSELISSIFDFSHSLSALHFSEDEIALYTALVLINAHRPGLQEKRKVEQLQYNLELAFHHHLCKTHRQSILAKLPPKGKLRSLCSQHVERLQIFQHLHPIVVQAAFPPLYKELFSTETESPVGLSK

SEQ ID NO: 71630 - protein, 497 aa, Homo sapiens
  Payload ID: 14170
  Gene Symbol: RORC
  Gene Name: RAR-related orphan receptor C
  Uniprot ID: P51449
  ENSP ID: ENSP00000349164
MRTQIEVIPCKICGDKSSGIHYGVITCEGCKGFFRRSQRCNAAYSCTRQQNCPIDRTSRNRCQHCRLQKCLALGMSRDAVKFGRMSKKQRDSLHAEVQKQLQQRQQQQQEPVVKTPPAGAQGADTLTYTLGLPDGQLPLGSSPDLPEASACPPGLLKASGSGPSYSNNLAKAGLNGASCHLEYSPERGKAEGRESFYSTGSQLTPDRCGLRFEEHRHPGLGELGQGPDSYGSPSFRSTPEAPYASLTEIEHLVQSVCKSYRETCQLRLEDLLRQRSNIFSREEVTGYQRKSMWEMWERCAHHLTEAIQYVVEFAKRLSGFMELCQNDQIVLLKAGAMEVVLVRMCRAYNADNRTVFFEGKYGGMELFRALGCSELISSIFDFSHSLSALHFSEDEIALYTALVLINAHRPGLQEKRKVEQLQYNLELAFHHHLCKTHRQSILAKLPPKGKLRSLCSQHVERLQIFQHLHPIVVQAAFPPLYKELFSTETESPVGLSK

SEQ ID NO: 71631 - protein, 340 aa, Homo sapiens
  Payload ID: 14171
  Gene Symbol: REM2
  Gene Name: RAS (RAD and GEM)-like GTP binding 2
  Uniprot ID: Q8IYK8
  ENSP ID: ENSP00000267396
MHTDLDTDMDMDTETTALCPSGSRRASPPGTPTPEADATLLKKSEKLLAELDRSGLPSAPGAPRRRGSMPVPYKHQLRRAQAVDELDWPPQASSSGSSDSLGSGEAAPAQKDGIFKVMLVGESGVGKSTLAGTFGGLQGDSAHEPENPEDTYERRIMVDKEEVTLVVYDIWEQGDAGGWLRDHCLQTGDAFLIVFSVTDRRSFSKVPETLLRLRAGRPHHDLPVILVGNKSDLARSREVSLEEGRHLAGTLSCKHIETSAALHHNTRELFEGAVRQIRLRRGRNHAGGQRPDPGSPEGPAPPARRESLTKKAKRFLANLVPRNAKFFKQRSRSCHDLSVL

SEQ ID NO: 71632 - protein, 221 aa, Homo sapiens
  Payload ID: 14171
  Gene Symbol: REM2
  Gene Name: RAS (RAD and GEM)-like GTP binding 2
  Uniprot ID: Q8IYK8
  ENSP ID: ENSP00000442774
MHTDLDTDMDMDTETTALCPSGSRRASPPGTPTPEADATLLKKSEKLLAELDRSGLPSAPGAPRRRGSMPVPYKHQLRRAQAVDELDWPPQASSSGSSDSLGSGEAAPAQKDGIFKVMLVGESGVGKSTLAGTFGGLQGDSAHEPENPGGCRRVAAGPLPSDRGRLSHRLLSHRPTEFLQSSRDPTSAPGWEAAPRPTRYPRWKQERLGPLPGGITGGCVS

SEQ ID NO: 71633 - protein, 298 aa, Homo sapiens
  Payload ID: 14172
  Gene Symbol: REM1
  Gene Name: RAS (RAD and GEM)-like GTP-binding 1
  Uniprot ID: O75628
  ENSP ID: ENSP00000201979
MTLNTEQEAKTPLHRRASTPLPLSPRGHQPGRLSTVPSTQSQHPRLGQSASLNPPTQKPSPAPDDWSSESSDSEGSWEALYRVVLLGDPGVGKTSLASLFAGKQERDLHEQLGEDVYERTLTVDGEDTTLVVVDTWEAEKLDKSWSQESCLQGGSAYVIVYSIADRGSFESASELRIQLRRTHQADHVPIILVGNKADLARCREVSVEEGRACAVVFDCKFIETSATLQHNVAELFEGVVRQLRLRRRDSAAKEPPAPRRPASLAQRARRFLARLTARSARRRALKARSKSCHNLAVL

SEQ ID NO: 71634 - protein, 189 aa, Homo sapiens
  Payload ID: 14173
  Gene Symbol: RASEF
  Gene Name: RAS and EF-hand domain containing
  Uniprot ID: Q8IZ41
  ENSP ID: ENSP00000345651
MEADGDGEELARLRSVFAACDANRSGRLEREEFRALCTELRVRPADAEAVFQRLDADRDGAITFQEFARGFLGSLRGGRRRDWGPLDPAPAVSEAGPETHDSEEDEGDEDAAAALATSCGPASPGRAWQDFQARLGDEAKFIPRFGYTISKPAFVFVRHLITLCALSWAKKEGRETLWTIEEGGAKMAE

SEQ ID NO: 71635 - protein, 740 aa, Homo sapiens
  Payload ID: 14173
  Gene Symbol: RASEF
  Gene Name: RAS and EF-hand domain containing
  Uniprot ID: Q8IZ41
  ENSP ID: ENSP00000365630
MEADGDGEELARLRSVFAACDANRSGRLEREEFRALCTELRVRPADAEAVFQRLDADRDGAITFQEFARGFLGSLRGGRRRDWGPLDPAPAVSEAGPETHDSEEDEGDEDAAAALATSCGPASPGRAWQDFQARLGDEAKFIPREEQVSTLYQNINLVEPRLIQPYEHVIKNFIREIRLQSTEMENLAIAVKRAQDKAAMQLSELEEEMDQRIQAAEHKTRKDEKRKAEEALSDLRRQYETEVGDLQVTIKKLRKLEEQSKRVSQKEDVAALKKQIYDLSMENQKVKKDLLEAQTNIAFLQSELDALKSDYADQSLNTERDLEIIRAYTEDRNSLERQIEILQTANRKLHDSNDGLRSALENSYSKFNRSLHINNISPGNTISRSSPKFIGHSPQPLGYDRSSRSSYVDEDCDSLALCDPLQRTNCEVDSLPESCFDSGLSTLRDPNEYDSEVEYKHQRGFQRSHGVQESFGGDASDTDVPDIRDEETFGLEDVASVLDWKPQGSVSEGSIVSSSRKPISALSPQTDLVDDNAKSFSSQKAYKIVLAGDAAVGKSSFLMRLCKNEFRENISATLGVDFQMKTLIVDGERTVLQLWDTAGQERFRSIAKSYFRKADGVLLLYDVTCEKSFLNIREWVDMIEDAAHETVPIMLVGNKADIRDTAATEGQKCVPGHFGEKLAMTYGALFCETSAKDGSNIVEAVLHLAREVKKRTDKDDSRSITNLTGTNSKKSPQMKNCCNG

SEQ ID NO: 71636 - protein, 783 aa, Homo sapiens
  Payload ID: 14174
  Gene Symbol: RIN1
  Gene Name: Ras and Rab interactor 1
  Uniprot ID: Q13671
  ENSP ID: ENSP00000310406
MESPGESGAGSPGAPSPSSFTTGHLAREKPAQDPLYDVPNASGGQAGGPQRPGRVVSLRERLLLTRPVWLQLQANAAAALHMLRTEPPGTFLVRKSNTRQCQALCMRLPEASGPSFVSSHYILESPGGVSLEGSELMFPDLVQLICAYCHTRDILLLPLQLPRAIHHAATHKELEAISHLGIEFWSSSLNIKAQRGPAGGPVLPQLKARSPQELDQGTGAALCFFNPLFPGDLGPTKREKFKRSFKVRVSTETSSPLSPPAVPPPPVPVLPGAVPSQTERLPPCQLLRRESSVGYRVPAGSGPSLPPMPSLQEVDCGSPSSSEEEGVPGSRGSPATSPHLGRRRPLLRSMSAAFCSLLAPERQVGRAAAALMQDRHTAAGQLVQDLLTQVRAGPEPQELQGIRQALSRARAMLSAELGPEKLLSPKRLEHVLEKSLHCSVLKPLRPILAARLRRRLAADGSLGRLAEGLRLARAQGPGAFGSHLSLPSPVELEQVRQKLLQLLRTYSPSAQVKRLLQACKLLYMALRTQEGEGAGADEFLPLLSLVLAHCDLPELLLEAEYMSELLEPSLLTGEGGYYLTSLSASLALLSGLGQAHTLPLSPVQELRRSLSLWEQRRLPATHCFQHLLRVAYQDPSSGCTSKTLAVPPEASIATLNQLCATKFRVTQPNTFGLFLYKEQGYHRLPPGALAHRLPTTGYLVYRRAEWPETQGAVTEEEGSGQSEARSRGEEQGCQGDGDAGVKASPRDIREQSETTAEGGQGQAQEGPAQPGEPEAEGSRAAEE

SEQ ID NO: 71637 - protein, 80 aa, Homo sapiens
  Payload ID: 14174
  Gene Symbol: RIN1
  Gene Name: Ras and Rab interactor 1
  ENSP ID: ENSP00000431185
MESPGESGAGSPGAPSPSSFTTGHLAREKRSSCGNLTPASARPCACGCLKPVAPPSSPATTSWRALAASPWRARSSCSQT

SEQ ID NO: 71638 - protein, 73 aa, Homo sapiens
  Payload ID: 14174
  Gene Symbol: RIN1
  Gene Name: Ras and Rab interactor 1
  ENSP ID: ENSP00000431550
  MOD_RES (1)..(1): Any amino acid
XLSGVSLEGSELMFPDLVQLICAYCHTRSPEPSTTQPLTKSWRPSPIWALSSGAPPSTSRLSGARLEAQCCPS

SEQ ID NO: 71639 - protein, 617 aa, Homo sapiens
  Payload ID: 14174
  Gene Symbol: RIN1
  Gene Name: Ras and Rab interactor 1
  ENSP ID: ENSP00000432798
MRLPEASGPSFVSSHYILESPGGVSLEGSELMFPDLVQLICAYCHTRDILLLPLQLPRAIHHAATHKELEAISHLGIEFWSSSLNIKAQRGPAGGPVLPQLKARSPQELDQGTGAALCFFNPLFPGDLGPTKREKFKRSFKVRVSTETSSPLSPPAVPPPPVPVLPGAVPSQTERLPPCQLLRRESSVGYRVPAGSGPSLPPMPSLQEVDCGSPSSSEEEGVPGSRGSPATSPHLGRRRPLLRSMSAAFCSLLAPERQVGRAAAALMQDRHTAAGQLVQDLLTQVRAGPEPQELQGIRQALSRARAMLSAELGPEKLLSPKRLVELEQVRQKLLQLLRTYSPSAQVKRLLQACKLLYMALRTQEGEGAGADEFLPLLSLVLAHCDLPELLLEAEYMSELLEPSLLTGEGGYYLTSLSASLALLSGLGQAHTLPLSPVQELRRSLSLWEQRRLPATHCFQHLLRVAYQDPSSGCTSKTLAVPPEASIATLNQLCATKFRVTQPNTFGLFLYKEQGYHRLPPGALAHRLPTTGYLVYRRAEWPETQGAVTEEEGSGQSEARSRGEEQGCQGDGDAGVKASPRDIREQSETTAEGGQGQAQEGPAQPGEPEAEGSRAAEE

SEQ ID NO: 71640 - protein, 80 aa, Homo sapiens; identical to SEQ ID NO: 71637
  Payload ID: 14174
  Gene Symbol: RIN1
  Gene Name: Ras and Rab interactor 1
  ENSP ID: ENSP00000485911

SEQ ID NO: 71641 - protein, 944 aa, Homo sapiens
  Payload ID: 14175
  Gene Symbol: RIN2
  Gene Name: Ras and Rab interactor 2
  Uniprot ID: Q8WYP3
  ENSP ID: ENSP00000255006
MLDSFSQESTLPFREARKRTSFQPVQVWRNFTASQTTESPACSGASLGEMTAWTMGARGLDKRGSFFKLIDTIASEIGELKQEMVRTDVNLENGLEPAETHSMVRHKDGGYSEEEDVKTCARDSGYDSLSNRLSILDRLLHTHPIWLQLSLSEEEAAEVLQAQPPGIFLVHKSTKMQKKVLSLRLPCEFGAPLKEFAIKESTYTFSLEGSGISFADLFRLIAFYCISRDVLPFTLKLPYAISTAKSEAQLEELAQMGLNFWSSPADSKPPNLPPPHRPLSSDGVCPASLRQLCLINGVHSIKTRTPSELECSQTNGALCFINPLFLKVHSQDLSGGLKRPSTRTPNANGTERTRSPPPRPPPPAINSLHTSPRLARTETQTSMPETVNHNKHGNVALPGTKPTPIPPPRLKKQASFLEAEGGAKTLSGGRPGAGPELELGTAGSPGGAPPEAAPGDCTRAPPPSSESRPPCHGGRQRLSDMSISTSSSDSLEFDRSMPLFGYEADTNSSLEDYEGESDQETMAPPIKSKKKRSSSFVLPKLVKSQLQKVSGVFSSFMTPEKRMVRRIAELSRDKCTYFGCLVQDYVSFLQENKECHVSSTDMLQTIRQFMTQVKNYLSQSSELDPPIESLIPEDQIDVVLEKAMHKCILKPLKGHVEAMLKDFHMADGSWKQLKENLQLVRQRNPQELGVFAPTPDFVDVEKIKVKFMTMQKMYSPEKKVMLLLRVCKLIYTVMENNSGRMYGADDFLPVLTYVIAQCDMLELDTEIEYMMELLDPSLLHGEGGYYLTSAYGALSLIKNFQEEQAARLLSSETRDTLRQWHKRRTTNRTIPSVDDFQNYLRVAFQEVNSGCTGKTLLVRPYITTEDVCQICAEKFKVGDPEEYSLFLFVDETWQQLAEDTYPQKIKAELHSRPQPHIFHFVYKRIKNDPYGIIFQNGEEDLTTS

SEQ ID NO: 71642 - protein, 462 aa, Homo sapiens
  Payload ID: 14175
  Gene Symbol: RIN2
  Gene Name: Ras and Rab interactor 2
  ENSP ID: ENSP00000391239
MTAWTMGARGLDKRGSFFKLIDTIASEIGELKQEMVRTDVNLENGLEPAETHSMVRHKDGGYSEEEDVKTCARDSGYDSLSNRLSILDRLLHTHPIWLQLSLSEEEAAEVLQAQPPGIFLVHKSTKMQKKVLSLRLPCEFGAPLKEFAIKESTYNVVLEKAMHKCILKPLKGHVEAMLKDFHMADGSWKQLKENLQLVRQRNPQELGVFAPTPDFVDVEKIKVKFMTMQKMYSPEKKVMLLLRVCKLIYTVMENNSGRMYGADDFLPVLTYVIAQCDMLELDTEIEYMMELLDPSLLHGEGGYYLTSAYGALSLIKNFQEEQAARLLSSETRDTLRQWHKRRTTNRTIPSVDDFQNYLRVAFQEVNSGCTGKTLLVRPYITTEDVCQICAEKFKVGDPEEYSLFLFVDETWQQLAEDTYPQKIKAELHSRPQPHIFHFVYKRIKNDPYGIIFQNGEEDLTTS

SEQ ID NO: 71643 - protein, 985 aa, Homo sapiens
  Payload ID: 14176
  Gene Symbol: RIN3
  Gene Name: Ras and Rab interactor 3
  Uniprot ID: Q8TB24
  ENSP ID: ENSP00000216487
MIRHAGAPARGDPTGPVPVVGKGEEEEEEDGMRLCLPANPKNCLPHRRGISILEKLIKTCPVWLQLSLGQAEVARILHRVVAGMFLVRRDSSSKQLVLCVHFPSLNESSAEVLEYTIKEEKSILYLEGSALVFEDIFRLIAFYCVSRDLLPFTLRLPQAILEASSFTDLETIANLGLGFWDSSLNPPQERGKPAEPPRDRAPGFPLVSSLRPTAHDANCACEIELSVGNDRLWFVNPIFIEDCSSALPTDQPPLGNCPARPLPPTSDATSPTSRWAPRRPPPPPPVLPLQPCSPAQPPVLPALAPAPACPLPTSPPVPAPHVTPHAPGPPDHPNQPPMMTCERLPCPTAGLGPLREEAMKPGAASSPLQQVPAPPLPAKKNLPTAPPRRRVSERVSLEDQSPGMAAEGDQLSLPPQGTSDGPEDTPRESTEQGQDTEVKASDPHSMPELPRTAKQPPVPPPRKKRISRQLASTLPAPLENAELCTQAMALETPTPGPPREGQSPASQAGTQHPPAQATAHSQSSPEFKGSLASLSDSLGVSVMATDQDSYSTSSTEEELEQFSSPSVKKKPSMILGKARHRLSFASFSSMFHAFLSNNRKLYKKVVELAQDKGSYFGSLVQDYKVYSLEMMARQTSSTEMLQEIRTMMTQLKSYLLQSTELKALVDPALHSEEELEAIVESALYKCVLKPLKEAINSCLHQIHSKDGSLQQLKENQLVILATTTTDLGVTTSVPEVPMMEKILQKFTSMHKAYSPEKKISILLKTCKLIYDSMALGNPGKPYGADDFLPVLMYVLARSNLTEMLLNVEYMMELMDPALQLGEGSYYLTTTYGALEHIKSYDKITVTRQLSVEVQDSIHRWERRRTLNKARASRSSVQDFICVSYLEPEQQARTLASRADTQAQALCAQCAEKFAVERPQAHRLFVLVDGRCFQLADDALPHCIKGYLLRSEPKRDFHFVYRPLDGGGGGGGGSPPCLVVREPNFL

SEQ ID NO: 71644 - protein, 159 aa, Homo sapiens
  Payload ID: 14176
  Gene Symbol: RIN3
  Gene Name: Ras and Rab interactor 3
  ENSP ID: ENSP00000450682
MIRHAGAPARGDPTGPVPVVGKGEEEEEEDGMRLCLPANPKNCLPHRRGISILEKLIKTCPVWLQLSLGQAEVARILHRVVAGMFLVRRDSSSKQLVLCVHFPSLNESSAEVLEYTIKEEKSKTYCPSHCGYPRPSLRPAASRTLRPSPTWVWVSGTPR

SEQ ID NO: 71645 - protein, 420 aa, Homo sapiens
  Payload ID: 14176
  Gene Symbol: RIN3
  Gene Name: Ras and Rab interactor 3
  ENSP ID: ENSP00000450986
  MOD_RES (1)..(1): Any amino acid
XTQAMALETPTPGPPREGQSPASQAGTQHPPAQATAHSQSSPEFKGSLASLSDSLGVSVMATDQDSYSTSSTEEELEQFSSPSVKKKPSMILGKARHRLSFASFSSMFHAFLSNNRKLYKKVVELAQDKGSYFGSLVQDYKVYSLEMMARQTSSTEMLQEIRTMMTQLKSYLLQSTELKALVDPALHSEEELEAIVESALYKCVLKPLKEAINSCLHQIHSKDGSLQQLKENQLVILATTTTDLGVTTSVPEVPMMEKILQKFTSMHKAYSPEKKISILLKTCKLIYDSMALGNPGKPYGADDFLPVLMYVLARSNLTEMLLNVEYMMELMDPALQLGEGSYYLTTTYGALEHIKSYDKITVTRQLSVEVQDSIHRWERRRTLNKARASRSSVQVRPESGRGPVGPCPRHHPCCLLAKEP

SEQ ID NO: 71646 - protein, 78 aa, Homo sapiens
  Payload ID: 14176
  Gene Symbol: RIN3
  Gene Name: Ras and Rab interactor 3
  ENSP ID: ENSP00000452155
MIRHAGAPARGDPTGPEILDAGFFLSKATSAKTNTIRWEELGIRWGRAPQPSHPLASICHTQDGRVKPERSFSGRKGR

SEQ ID NO: 71647 - protein, 913 aa, Homo sapiens
  Payload ID: 14176
  Gene Symbol: RIN3
  Gene Name: Ras and Rab interactor 3
  ENSP ID: ENSP00000480603
MIRHAGAPARGDPTGPVPVVGKGEEEEEEDGMRLCLPANPKNCLPHRRGISILEKLIKTCPVWLQLSLGQAEVARILHRVVAGMFLVRRDSSSKQLVLCVHFPSLNESSAEVLEYTIKEEKSILYLEGSALVFEDIFRLIAFYCVSRDLLPFTLRLPQAILEASSFTDLETIANLGLGFWDSSLNPPQERGKPAEPPRDRAPGFPLVSSLRPTAHDANCACEIELSVGNDRLWFVNPIFIEDCSSALPTDQPPLGNCPARPLPPTSDATSPTSRWAPRRPPPPPPVLPLQPCSPAQPPVPAPPLPAKKNLPTAPPRRRVSERVSLEDQSPGMAAEGDQLSLPPQGTSDGPEDTPRESTEQGQDTEVKASDPHSMPELPRTAKQPPVPPPRKKRISRQLASTLPAPLENAELCTQAMALETPTPGPPREGQSPASQAGTQHPPAQATAHSQSSPEFKGSLASLSDSLGVSVMATDQDSYSTSSTEEELEQFSSPSVKKKPSMILGKARHRLSFASFSSMFHAFLSNNRKLYKKVVELAQDKGSYFGSLVQDYKVYSLEMMARQTSSTEMLQEIRTMMTQLKSYLLQSTELKALVDPALHSEEELEAIVESALYKCVLKPLKEAINSCLHQIHSKDGSLQQLKENQLVILATTTTDLGVTTSVPEVPMMEKILQKFTSMHKAYSPEKKISILLKTCKLIYDSMALGNPGKPYGADDFLPVLMYVLARSNLTEMLLNVEYMMELMDPALQLGEGSYYLTTTYGALEHIKSYDKITVTRQLSVEVQDSIHRWERRRTLNKARASRSSVQDFICVSYLEPEQQARTLASRADTQAQALCAQCAEKFAVERPQAHRLFVLVDGRCFQLADDALPHCIKGYLLRSEPKRDFHFVYRPLDGGGGGGGGSPPCLVVREPNFL

SEQ ID NO: 71648 - protein, 452 aa, Homo sapiens
  Payload ID: 14177
  Gene Symbol: RINL
  Gene Name: Ras and Rab interactor like
  ENSP ID: ENSP00000488992
MPDLPHLLAFLSASRDVLPRTLLLPPPTLGPRDEHTDPVQIGRVQQDTPGKVLSIVNQLYLETHRGWGREQTPQETEPEAAQRHDPAPRNPAPHGVSWVKGPLSPEVDHPGPALASLLEEEEEDLEGKEEGREDDPEEEGPEDVLTIHVQSLVRARSSYVARQYRSLRVRIASDSGGPHGSGDPATELLQDVRHLLTDLQDHLAKDSYIRAVFGSRGPGLPKKDEDPGPALETAVCQAVLAPLKPALWTRLRTLRAPELRRLRRRQTALRAGAGPPGAQGPGPEGQSPAPALRSRIHERLAHLHAACAPRRKVALLLEVCRDVYAGLARGENQDPLGADAFLPALTEELIWSPDIGDTQLDVEFLMELLDPDELRGEAGYYLTTWFGALHHIAHYQPETDRAPRGLSSEARASLHQWHRRRTLHRKDHPRAQANLPFKEPWAEETVTGTSDN

SEQ ID NO: 71649 - protein, 566 aa, Homo sapiens
  Payload ID: 14177
  Gene Symbol: RINL
  Gene Name: Ras and Rab interactor like
  ENSP ID: ENSP00000489071
MAQPEDKAPEVPTEGVRLVPPQVNKADRTPLGVLSTLEPLTRLQRTWGVWHVPELDTQDAEALVGLWPLGSFLVTGRDPSQALVLRSGPLPGEVNTYQIQKIPRGVSLESSNLCMPDLPHLLAFLSASRDVLPRTLLLPPPTLGPRDEHTDPVQIGRVQQDTPGKVLSIVNQLYLETHRGWGREQTPQETEPEAAQRHDPAPRNPAPHGVSWVKGPLSPEVDHPGPALASLLEEEEEDLEGKEEGREDDPEEEGPEDVLTIHVQSLVRARSSYVARQYRSLRVRIASDSGGPHGSGDPATELLQDVRHLLTDLQDHLAKDSYIRAVFGSRGPGLPKKDEDPGPALETAVCQAVLAPLKPALWTRLRTLRAPELRRLRRRQTALRAGAGPPGAQGPGPEGQSPAPALRSRIHERLAHLHAACAPRRKVALLLEVCRDVYAGLARGENQDPLGADAFLPALTEELIWSPDIGDTQLDVEFLMELLDPDELRGEAGYYLTTWFGALHHIAHYQPETDRAPRGLSSEARASLHQWHRRRTLHRKDHPRAQANLPFKEPWAEETVTGTSDN

SEQ ID NO: 71650 - protein, 54 aa, Homo sapiens
  Payload ID: 14177
  Gene Symbol: RINL
  Gene Name: Ras and Rab interactor like
  ENSP ID: ENSP00000489104
MELLDPDELRGEAGYYLTTWFGALHHIAHYQPETDRAPRGLSSEARASLHQWHR

SEQ ID NO: 71651 - protein, 173 aa, Homo sapiens
  Payload ID: 14177
  Gene Symbol: RINL
  Gene Name: Ras and Rab interactor like
  ENSP ID: ENSP00000489338
  MOD_RES (1)..(1): Any amino acid
XAHLHAACAPRRKVALLLEVCRDVYAGLARGENQDPLGADAFLPALTEELIWSPDIGDTQLDVEFLMELLDPDELRGEAGYYLTTWFGALHHIAHYQPETDRAPRGLSSEARASLHQWHRRRTLHRKDHPRAQVTAHLAASRREGETWCPSDPAPTSPHRPTCPLRSHGQKRL

SEQ ID NO: 71652 - protein, 566 aa, Homo sapiens; identical to SEQ ID NO: 71649
  Payload ID: 14178
  Gene Symbol: RINL
  Gene Name: Ras and Rab interactor-like
  Uniprot ID: Q6ZS11
  ENSP ID: ENSP00000467107

SEQ ID NO: 71653 - protein, 173 aa, Homo sapiens; identical to SEQ ID NO: 71651
  Payload ID: 14178
  Gene Symbol: RINL
  Gene Name: Ras and Rab interactor-like
  ENSP ID: ENSP00000469510
  MOD_RES (1)..(1): Any amino acid

SEQ ID NO: 71654 - protein, 452 aa, Homo sapiens; identical to SEQ ID NO: 71648
  Payload ID: 14178
  Gene Symbol: RINL
  Gene Name: Ras and Rab interactor-like
  Uniprot ID: Q6ZS11
  ENSP ID: ENSP00000469568

SEQ ID NO: 71655 - protein, 54 aa, Homo sapiens; identical to SEQ ID NO: 71650
  Payload ID: 14178
  Gene Symbol: RINL
  Gene Name: Ras and Rab interactor-like
  ENSP ID: ENSP00000470224

SEQ ID NO: 71656 - protein, 644 aa, Homo sapiens
  Payload ID: 14179
  Gene Symbol: RAPH1
  Gene Name: Ras association (RalGDS/AF-6) and pleckstrin homology domains 1
  Uniprot ID: Q70E73
  ENSP ID: ENSP00000311293
MEQLSDEEIDHGAEEDSDKEDQDLDKMFGAWLGELDKLTQSLDSDKPMEPVKRSPLRQETNMANFSYRFSIYNLNEALNQGETVDLDALMADLCSIEQELSSIGSGNSKRQITETKATQKLPVSRHTLKHGTLKGLSSSSNRIAKPSHASYSLDDVTAQLEQASLSMDEAAQQSVLEDTKPLVTNQHRRTASAGTVSDAEVHSISNSSHSSITSAASSMDSLDIDKVTRPQELDLTHQGQPITEHAISLRCSSKQAKRHIDFTEEQAELTPHSYLDRETSLLLRNIAGKPSHLLTKEEQAAKLKAEKIRVALEKIKEAQVKKLVIRVHMSDDSSKTMMVDERQTVRQVLDNLMDKSHCGYSLDWSLVETVSELQMERIFEDHENLVENLLNWTRDSQNKLIFMERIEKYALFKNPQNYLLGKKETAEMADRNKEVLLEECFCGSSVTVPEIEGVLWLKDDGKKSWKKRYFLLRASGIYYVPKGKAKVSRDLVCFLQLDHVNVYYGQDYRNKYKAPTDYCLVLKHPQIQKKSQYIKYLCCDDVRTLHQWVNGIRIAKYGKQLYMNYQEALKRTESAYDWTSLSSSSIKSGSSSSSIPESQSNHSNQSDSGVSDTQPAGHVRSQSIVSSVFSEAWKRGTQLEESSK

SEQ ID NO: 71657 - protein, 1250 aa, Homo sapiens
  Payload ID: 14179
  Gene Symbol: RAPH1
  Gene Name: Ras association (RalGDS/AF-6) and pleckstrin homology domains 1
  Uniprot ID: Q70E73
  ENSP ID: ENSP00000316543
MEQLSDEEIDHGAEEDSDKEDQDLDKMFGAWLGELDKLTQSLDSDKPMEPVKRSPLRQETNMANFSYRFSIYNLNEALNQGETVDLDALMADLCSIEQELSSIGSGNSKRQITETKATQKLPVSRHTLKHGTLKGLSSSSNRIAKPSHASYSLDDVTAQLEQASLSMDEAAQQSVLEDTKPLVTNQHRRTASAGTVSDAEVHSISNSSHSSITSAASSMDSLDIDKVTRPQELDLTHQGQPITEEEQAAKLKAEKIRVALEKIKEAQVKKLVIRVHMSDDSSKTMMVDERQTVRQVLDNLMDKSHCGYSLDWSLVETVSELQMERIFEDHENLVENLLNWTRDSQNKLIFMERIEKYALFKNPQNYLLGKKETAEMADRNKEVLLEECFCGSSVTVPEIEGVLWLKDDGKKSWKKRYFLLRASGIYYVPKGKAKVSRDLVCFLQLDHVNVYYGQDYRNKYKAPTDYCLVLKHPQIQKKSQYIKYLCCDDVRTLHQWVNGIRIAKYGKQLYMNYQEALKRTESAYDWTSLSSSSIKSGSSSSSIPESQSNHSNQSDSGVSDTQPAGHVRSQSIVSSVFSEAWKRGTQLEESSKARMESMNRPYTSLVPPLSPQPKIVTPYTASQPSPPLPPPPPPPPPPPPPPPPPPPPLPSQSAPSAGSAAPMFVKYSTITRLQNASQHSGALFKPPTPPVMQSQSVKPQILVPPNGVVPPPPPPPPPPTPGSAMAQLKPAPCAPSLPQFSAPPPPLKIHQVQHITQVAPPTPPPPPPIPAPLPPQAPPKPLVTIPAPTSTKTVAPVVTQAAPPTPTPPVPPAKKQPAFPASYIPPSPPTPPVPVPPPTLPKQQSFCAKPPPSPLSPVPSVVKQIASQFPPPPTPPAMESQPLKPVPANVAPQSPPAVKAKPKWQPSSIPVPSPDFPPPPPESSLVFPPPPPSPVPAPPPPPPPTASPTPDKSGSPGKKTSKTSSPGGKKPPPTPQRNSSIKSSSGAEHPEPKRPSVDSLVSKFTPPAESGSPSKETLPPPAAPPKPGKLNLSGVNLPGVLQQGCVSAKAPVLSGRGKDSVVEFPSPPSDSDFPPPPPETELPLPPIEIPAVFSGNTSPKVAVVNPQPQQWSKMSVKKAPPPTRPKRNDSTRLTQAEISEQPTMATVVPQVPTSPKSSLSVQPGFLADLNRTLQRKSITRHGSLSSRMSRAEPTATMDDMALPPPPPELLSDQQKAGYGGSHISGYATLRRGPPPAPPKRDQNTKLSRDW

SEQ ID NO: 71658 - protein, 1302 aa, Homo sapiens
  Payload ID: 14179
  Gene Symbol: RAPH1
  Gene Name: Ras association (RalGDS/AF-6) and pleckstrin homology domains 1
  ENSP ID: ENSP00000363617
MEQLSDEEIDHGAEEDSDKEDQDLDKMFGAWLGELDKLTQSLDSDKPMEPVKRSPLRQETNMANFSYRFSIYNLNEALNQGETVDLDALMADLCSIEQELSSIGSGNSKRQITETKATQKLPVSRHTLKHGTLKGLSSSSNRIAKPSHASYSLDDVTAQLEQASLSMDEAAQQSVLEDTKPLVTNQHRRTASAGTVSDAEVHSISNSSHSSITSAASSMDSLDIDKVTRPQELDLTHQGQPITEHAISLRCSSKQAKRHIDFTEEQAELTPHSYLDRETSLLLRNIAGKPSHLLTKEEQAAKLKAEKIRVALEKIKEAQVKKLVIRVHMSDDSSKTMMVDERQTVRQVLDNLMDKSHCGYSLDWSLVETVSELQMERIFEDHENLVENLLNWTRDSQNKLIFMERIEKYALFKNPQNYLLGKKETAEMADRNKEVLLEECFCGSSVTVPEIEGVLWLKDDGKKSWKKRYFLLRASGIYYVPKGKAKVSRDLVCFLQLDHVNVYYGQDYRNKYKAPTDYCLVLKHPQIQKKSQYIKYLCCDDVRTLHQWVNGIRIAKYGKQLYMNYQEALKRTESAYDWTSLSSSSIKSGSSSSSIPESQSNHSNQSDSGVSDTQPAGHVRSQSIVSSVFSEAWKRGTQLEESSKARMESMNRPYTSLVPPLSPQPKIVTPYTASQPSPPLPPPPPPPPPPPPPPPPPPPPLPSQSAPSAGSAAPMFVKYSTITRLQNASQHSGALFKPPTPPVMQSQSVKPQILVPPNGVVPPPPPPPPPPTPGSAMAQLKPAPCAPSLPQFSAPPPPLKIHQVQHITQVAPPTPPPPPPIPAPLPPQAPPKPLVTIPAPTSTKTVAPVVTQAAPPTPTPPVPPAKKQPAFPASYIPPSPPTPPVPVPPPTLPKQQSFCAKPPPSPLSPVPSVVKQIASQFPPPPTPPAMESQPLKPVPANVAPQSPPAVKAKPKWQPSSIPVPSPDFPPPPPESSLVFPPPPPSPVPAPPPPPPPTASPTPDKSGSPGKKTSKTSSPGGKKPPPTPQRNSSIKSSSGAEHPEPKRPSVDSLVSKFTPPAESGSPSKETLPPPAAPPKPGKLNLSGVNLPGVLQQGCVSAKAPVLSGRGKDSVVEFPSPPSDSDFPPPPPETELPLPPIEIPAVFSGNTSPKVAVVNPQPQQWSKMSVKKAPPPTRPKRNDSTRLTQAEISEQPTMATVVPQVPTSPKSSLSVQPGFLADLNRTLQRKSITRHGSLSSRMSRAEPTATMDDMALPPPPPELLSDQQKAGYGGSHISGYATLRRGPPPAPPKRDQNTKLSRDW

SEQ ID NO: 71659 - protein, 592 aa, Homo sapiens
  Payload ID: 14179
  Gene Symbol: RAPH1
  Gene Name: Ras association (RalGDS/AF-6) and pleckstrin homology domains 1
  Uniprot ID: Q70E73
  ENSP ID: ENSP00000390578
MEQLSDEEIDHGAEEDSDKEDQDLDKMFGAWLGELDKLTQSLDSDKPMEPVKRSPLRQETNMANFSYRFSIYNLNEALNQGETVDLDALMADLCSIEQELSSIGSGNSKRQITETKATQKLPVSRHTLKHGTLKGLSSSSNRIAKPSHASYSLDDVTAQLEQASLSMDEAAQQSVLEDTKPLVTNQHRRTASAGTVSDAEVHSISNSSHSSITSAASSMDSLDIDKVTRPQELDLTHQGQPITEEEQAAKLKAEKIRVALEKIKEAQVKKLVIRVHMSDDSSKTMMVDERQTVRQVLDNLMDKSHCGYSLDWSLVETVSELQMERIFEDHENLVENLLNWTRDSQNKLIFMERIEKYALFKNPQNYLLGKKETAEMADRNKEVLLEECFCGSSVTVPEIEGVLWLKDDGKKSWKKRYFLLRASGIYYVPKGKAKVSRDLVCFLQLDHVNVYYGQDYRNKYKAPTDYCLVLKHPQIQKKSQYIKYLCCDDVRTLHQWVNGIRIAKYGKQLYMNYQEALKRTESAYDWTSLSSSSIKSGSSSSSIPESQSNHSNQSDSGVSDTQPAGHVRSQSIVSSVFSEAWKRGTQLEESSK

SEQ ID NO: 71660 - protein, 594 aa, Homo sapiens
  Payload ID: 14179
  Gene Symbol: RAPH1
  Gene Name: Ras association (RalGDS/AF-6) and pleckstrin homology domains 1
  ENSP ID: ENSP00000392854
MEQLSDEEIDHGAEEDSDKEDQDLDKMFGAWLGELDKLTQSLDSDKPMEPVKRSPLRQETNMANFSYRFSIYNLNEALNQGETVDLDALMADLCSIEQELSSIGSGNSKRQITETKATQKLPVSRHTLKHGTLKGLSSSSNRIAKPSHASYSLDDVTAQLEQASLSMDEAAQQSVLEDTKPLVTNQHRRTASAGTVSDAEVHSISNSSHSSITSAASSMDSLDIDKVTRPQELDLTHQGQPITEEEQAAKLKAEKIRVALEKIKEAQVKKLVIRVHMSDDSSKTMMVDERQTVRQVLDNLMDKSHCGYSLDWSLVETVSELQMERIFEDHENLVENLLNWTRDSQNKLIFMERIEKYALFKNPQNYLLGKKETAEMADRNKEVLLEECFCGSSVTVPEIEGVLWLKDDGKKSWKKRYFLLRASGIYYVPKGKAKVSRDLVCFLQLDHVNVYYGQDYRNKYKAPTDYCLVLKHPQIQKKSQYIKYLCCDDVRTLHQWVNGIRIAKYGKQLYMNYQEALKRTESAYDWTSLSSSSIKSGSSSSSIPESQSNHSNQSDSGVSDTQPAGHVRSQSIVSSVFSEAWKRGTQLEESSKIN

SEQ ID NO: 71661 - protein, 597 aa, Homo sapiens
  Payload ID: 14179
  Gene Symbol: RAPH1
  Gene Name: Ras association (RalGDS/AF-6) and pleckstrin homology domains 1
  Uniprot ID: Q70E73
  ENSP ID: ENSP00000396711
MEQLSDEEIDHGAEEDSDKEDQDLDKMFGAWLGELDKLTQSLDSDKPMEPVKRSPLRQETNMANFSYRFSIYNLNEALNQGETVDLDALMADLCSIEQELSSIGSGNSKRQITETKATQKLPVSRHTLKHGTLKGLSSSSNRIAKPSHASYSLDDVTAQLEQASLSMDEAAQQSVLEDTKPLVTNQHRRTASAGTVSDAEVHSISNSSHSSITSAASSMDSLDIDKVTRPQELDLTHQGQPITEEEQAAKLKAEKIRVALEKIKEAQVKKLVIRVHMSDDSSKTMMVDERQTVRQVLDNLMDKSHCGYSLDWSLVETVSELQMERIFEDHENLVENLLNWTRDSQNKLIFMERIEKYALFKNPQNYLLGKKETAEMADRNKEVLLEECFCGSSVTVPEIEGVLWLKDDGKKSWKKRYFLLRASGIYYVPKGKAKVSRDLVCFLQLDHVNVYYGQDYRNKYKAPTDYCLVLKHPQIQKKSQYIKYLCCDDVRTLHQWVNGIRIAKYGKQLYMNYQEALKRTESAYDWTSLSSSSIKSGSSSSSIPESQSNHSNQSDSGVSDTQPAGHVRSQSIVSSVFSEAWKRGTQLEESSKVTASF

SEQ ID NO: 71662 - protein, 619 aa, Homo sapiens
  Payload ID: 14179
  Gene Symbol: RAPH1
  Gene Name: Ras association (RalGDS/AF-6) and pleckstrin homology domains 1
  Uniprot ID: Q70E73
  ENSP ID: ENSP00000397751
MEQLSDEEIDHGAEEDSDKEDQDLDKMFGAWLGELDKLTQSLDSDKPMEPVKRSPLRQETNMANFSYRFSIYNLNEALNQGETVDLDALMADLCSIEQELSSIGSGNSKRQITETKATQKLPVSRHTLKHGTLKGLSSSSNRIAKPSHASYSLDDVTAQLEQASLSMDEAAQQSVLEDTKPLVTNQHRRTASAGTVSDAEVHSISNSSHSSITSAASSMDSLDIDKVTRPQELDLTHQGQPITEHAISLRCSSKQAKRHIDFTEEQAELTPEEQAAKLKAEKIRVALEKIKEAQVKKLVIRVHMSDDSSKTMMVDERQTVRQVLDNLMDKSHCGYSLDWSLVETVSELQMERIFEDHENLVENLLNWTRDSQNKLIFMERIEKYALFKNPQNYLLGKKETAEMADRNKEVLLEECFCGSSVTVPEIEGVLWLKDDGKKSWKKRYFLLRASGIYYVPKGKAKVSRDLVCFLQLDHVNVYYGQDYRNKYKAPTDYCLVLKHPQIQKKSQYIKYLCCDDVRTLHQWVNGIRIAKYGKQLYMNYQEALKRTESAYDWTSLSSSSIKSGSSSSSIPESQSNHSNQSDSGVSDTQPAGHVRSQSIVSSVFSEAWKRGTQLEESSK

SEQ ID NO: 71663 - protein, 649 aa, Homo sapiens
  Payload ID: 14179
  Gene Symbol: RAPH1
  Gene Name: Ras association (RalGDS/AF-6) and pleckstrin homology domains 1
  Uniprot ID: Q70E73
  ENSP ID: ENSP00000406662
MEQLSDEEIDHGAEEDSDKEDQDLDKMFGAWLGELDKLTQSLDSDKPMEPVKRSPLRQETNMANFSYRFSIYNLNEALNQGETVDLDALMADLCSIEQELSSIGSGNSKRQITETKATQKLPVSRHTLKHGTLKGLSSSSNRIAKPSHASYSLDDVTAQLEQASLSMDEAAQQSVLEDTKPLVTNQHRRTASAGTVSDAEVHSISNSSHSSITSAASSMDSLDIDKVTRPQELDLTHQGQPITEHAISLRCSSKQAKRHIDFTEEQAELTPHSYLDRETSLLLRNIAGKPSHLLTKEEQAAKLKAEKIRVALEKIKEAQVKKLVIRVHMSDDSSKTMMVDERQTVRQVLDNLMDKSHCGYSLDWSLVETVSELQMERIFEDHENLVENLLNWTRDSQNKLIFMERIEKYALFKNPQNYLLGKKETAEMADRNKEVLLEECFCGSSVTVPEIEGVLWLKDDGKKSWKKRYFLLRASGIYYVPKGKAKVSRDLVCFLQLDHVNVYYGQDYRNKYKAPTDYCLVLKHPQIQKKSQYIKYLCCDDVRTLHQWVNGIRIAKYGKQLYMNYQEALKRTESAYDWTSLSSSSIKSGSSSSSIPESQSNHSNQSDSGVSDTQPAGHVRSQSIVSSVFSEAWKRGTQLEESSKVTASF

SEQ ID NO: 71664 - protein, 617 aa, Homo sapiens
  Payload ID: 14179
  Gene Symbol: RAPH1
  Gene Name: Ras association (RalGDS/AF-6) and pleckstrin homology domains 1
  Uniprot ID: Q70E73
  ENSP ID: ENSP00000411138
MEQLSDEEIDHGAEEDSDKEDQDLDKMFGAWLGELDKLTQSLDSDKPMEPVKRSPLRQETNMANFSYRFSIYNLNEALNQGETVDLDALMADLCSIEQELSSIGSGNSKRQITETKATQKLPVSRHTLKHGTLKGLSSSSNRIAKPSHASYSLDDVTAQLEQASLSMDEAAQQSVLEDTKPLVTNQHRRTASAGTVSDAEVHSISNSSHSSITSAASSMDSLDIDKVTRPQELDLTHQGQPITEHSYLDRETSLLLRNIAGKPSHLLTKEEQAAKLKAEKIRVALEKIKEAQVKKLVIRVHMSDDSSKTMMVDERQTVRQVLDNLMDKSHCGYSLDWSLVETVSELQMERIFEDHENLVENLLNWTRDSQNKLIFMERIEKYALFKNPQNYLLGKKETAEMADRNKEVLLEECFCGSSVTVPEIEGVLWLKDDGKKSWKKRYFLLRASGIYYVPKGKAKVSRDLVCFLQLDHVNVYYGQDYRNKYKAPTDYCLVLKHPQIQKKSQYIKYLCCDDVRTLHQWVNGIRIAKYGKQLYMNYQEALKRTESAYDWTSLSSSSIKSGSSSSSIPESQSNHSNQSDSGVSDTQPAGHVRSQSIVSSVFSEAWKRGTQLEESSK

SEQ ID NO: 71665 - protein, 89 aa, Homo sapiens
  Payload ID: 14179
  Gene Symbol: RAPH1
  Gene Name: Ras association (RalGDS/AF-6) and pleckstrin homology domains 1
  ENSP ID: ENSP00000412241
MEQLSDEEIDHGAEEDSDKEDQDLDKMFGAWLGELDKLTQSLDSDKPMEPVKRSPLRQETNMANFSYRFSIYNLNALNQGETVDLDALM

SEQ ID NO: 71666 - protein, 172 aa, Homo sapiens
  Payload ID: 14179
  Gene Symbol: RAPH1
  Gene Name: Ras association (RalGDS/AF-6) and pleckstrin homology domains 1
  ENSP ID: ENSP00000414430
MEQLSDEEIDHGAEEDSDKEDQDLDKMFGAWLGELDKLTQSLDSDKPMEPVKRSPLRQETNMANFSYRFSIYNLNEALNQGETVDLDALMADLCSIEQELSSIGSGNSKRQITETKATQKLPVSRHTLKHGTLKGLSSSSNRIAKPSHASYSLDDVTAQLEQASLSMDEAAQ

SEQ ID NO: 71667 - protein, 1302 aa, Homo sapiens; identical to SEQ ID NO: 71658
  Payload ID: 14179
  Gene Symbol: RAPH1
  Gene Name: Ras association (RalGDS/AF-6) and pleckstrin homology domains 1
  ENSP ID: ENSP00000486548

SEQ ID NO: 71668 - protein, 507 aa, Homo sapiens
  Payload ID: 14180
  Gene Symbol: RASSF10
  Gene Name: Ras association (RalGDS/AF-6) domain family (N-terminal) member 10
  Uniprot ID: A6NK89
  ENSP ID: ENSP00000485526
MDPSEKKISVWICQEEKLVSGLSRRTTCSDVVRVLLEDGCRRRRRQRRSRRLGSAGDPHGPGELPEPPNEDDEDDDEALPQGMLCGPPQCYCIVEKWRGFERILPNKTRILRLWAAWGEEQENVRFVLVRSEASLPNAGPRSAEARVVLSRERPCPARGAPARPSLAMTQEKQRRVVRKAFRKLAKLNRRRQQQTPSSCSSTSSSTASSCSSSPRTHESASVERMETLVHLVLSQDHTIRQQVQRLHELDREIDHYEAKVHLDRMRRHGVNYVQDTYLVGAGIELDGSRPGEEPEEVAAEAEEAAAAPPLAGEAQAAALEELARRCDDLLRLQEQRVQQEELLERLSAEIQEELNQRWMRRRQEELAAREEPLEPDGGPDGELLLEQERVRTQLSTSLYIGLRLNTDLEAVKSDLDYSQQQWDSKKRELQGLLQTLHTLELTVAPDGAPGSGSPSREPGPQACADMWVDQARGLAKSGPGNDEDSDTGLSSMHSQDSDSLPMCESLV

SEQ ID NO: 71669 - protein, 337 aa, Homo sapiens
  Payload ID: 14181
  Gene Symbol: RASSF7
  Gene Name: Ras association (RalGDS/AF-6) domain family (N-terminal) member 7
  Uniprot ID: Q02833
  ENSP ID: ENSP00000380712
MLLGLAAMELKVWVDGIQRVVCGVSEQTTCQEVVIALAQAIGQTGRFVLVQRLREKERQLLPQECPVGAQATCGQFASDVQFVLRRTGPSLAGRPSSDSCPPPERCLIRASLPVKPRAALGCEPRKTLTPEPAPSLSRPGPAAPVTPTPGCCTDLRGLELRVQRNAEELGHEAFWEQELRREQAREREGQARLQALSAATAEHAARLQALDAQARALEAELQLAAEAPGPPSPMASATERLHQDLAVQERQSAEVQGSLALVSRALEAAERALQAQAQELEELNRELRQCNLQQFIQQTGAALPPPPRPDRGPPGTQVGVVLGGGWEVRTWPSPTPS

SEQ ID NO: 71670 - protein, 373 aa, Homo sapiens
  Payload ID: 14181
  Gene Symbol: RASSF7
  Gene Name: Ras association (RalGDS/AF-6) domain family (N-terminal) member 7
  Uniprot ID: Q02833
  ENSP ID: ENSP00000380713
MLLGLAAMELKVWVDGIQRVVCGVSEQTTCQEVVIALAQAIGQTGRFVLVQRLREKERQLLPQECPVGAQATCGQFASDVQFVLRRTGPSLAGRPSSDSCPPPERCLIRASLPVKPRAALGCEPRKTLTPEPAPSLSRPGPAAPVTPTPGCCTDLRGLELRVQRNAEELGHEAFWEQELRREQAREREGQARLQALSAATAEHAARLQALDAQARALEAELQLAAEAPGPPSPMASATERLHQDLAVQERQSAEVQGSLALVSRALEAAERALQAQAQELEELNRELRQCNLQQFIQQTGAALPPPPRPDRGPPGTQGPLPPAREESLLGAPSESHAGAQPRPRGGPHDAELLEVAAAPAPEWCPLAAQPQAL

SEQ ID NO: 71671 - protein, 337 aa, Homo sapiens; identical to SEQ ID NO: 71669
  Payload ID: 14181
  Gene Symbol: RASSF7
  Gene Name: Ras association (RalGDS/AF-6) domain family (N-terminal) member 7
  Uniprot ID: Q02833
  ENSP ID: ENSP00000403068

SEQ ID NO: 71672 - protein, 320 aa, Homo sapiens
  Payload ID: 14181
  Gene Symbol: RASSF7
  Gene Name: Ras association (RalGDS/AF-6) domain family (N-terminal) member 7
  Uniprot ID: Q02833
  ENSP ID: ENSP00000405606
MLLGLAAMELKVWVDGIQRVVCGVSEQTTCQEVVIALAQAIGQTGRFVLVQRLREKERQLLPQECPVGAQATCGQFASDVQFVLRRTGPSLAGRPSSDSCPPPERCLIRASLPVKPRAALGCEPRKTLTPEPAPSLSRPGPAAPVTPTPGCCTDLRGLELRVQRNAEELGHEAFWEQELRREQAREREGQARLQALSAATAEHAARLQALDAQARALEAELQLAAEAPGPPSPMASATERLHQDLAVQERQSAEVQGSLALVSRALEAAERALQAQAQELEELNRELRQCNLQQFIQQTGAALPPPPRPDRGPPGTQWPP

SEQ ID NO: 71673 - protein, 120 aa, Homo sapiens
  Payload ID: 14181
  Gene Symbol: RASSF7
  Gene Name: Ras association (RalGDS/AF-6) domain family (N-terminal) member 7
  ENSP ID: ENSP00000413484
MLLGLAAMELKVWVDGIQRVVCGVSEQTTCQEVVIALAQAIDWPLCACAAASGEGAAVAATRVSSGRPGHLRTVCQRCPVCPEAHRAQPSWEALLRQLSTPGTLPNSCQPPCKATGCAGL

SEQ ID NO: 71674 - protein, 83 aa, Homo sapiens
  Payload ID: 14181
  Gene Symbol: RASSF7
  Gene Name: Ras association (RalGDS/AF-6) domain family (N-terminal) member 7
  ENSP ID: ENSP00000433165
MLLGLAAMELKVWVDGIQRVVCGVSEQTTCQEVVIALAQAIGQTGRFVLVQRLREKERQLLPQECPVGAQATCGQFASDVQFV

SEQ ID NO: 71675 - protein, 194 aa, Homo sapiens
  Payload ID: 14181
  Gene Symbol: RASSF7
  Gene Name: Ras association (RalGDS/AF-6) domain family (N-terminal) member 7
  ENSP ID: ENSP00000435885
  MOD_RES (1)..(1): Any amino acid
XVTPTPGCCTDLRGLELRVQRNAEELGHEAFWEQELRREQAREREGQARLQALSAATAEHAARLQALDAQARALEAELQLAAEAPGPPSPMASATERLHQDLAVQERQSAEVQGSLALVSRALEAAERALQAQAQELEELNRELRQCNLQQFIQQTGAALPPPPRPDRGPPGTQVGVVLGGGWEVRTWPSPTPS

SEQ ID NO: 71676 - protein, 337 aa, Homo sapiens
  Payload ID: 14181
  Gene Symbol: RASSF7
  Gene Name: Ras association (RalGDS/AF-6) domain family (N-terminal) member 7
  ENSP ID: ENSP00000477800
MLLGLAAMELKVWVDGIQRVVCGVSEQTTCQEVVIALAQAIGQTGRFVLVQRLREKERQLLPQECPVGAQATCGQFASDVQFVLRRTGASLAGRPSSDSCPPPERCLIRASLPVKPRAALGCEPRKTLTPEPAPSLSRPGPAAPVTPTPGCCTDLRGLELRVQRNAEELGHEAFWEQELRREQAREREGQARLQALSAATAEHAARLQALDAQARALEAELQLAAEAPGPPSPMASATERLHQDLAVQERQSAEVQGSLALVSRALEAAERALQAQAQELEELNRELRQCNLQQFIQQTGAALPPPPRPDRGPPGTQVGVVLGGGWEVRTWPSPTPS

SEQ ID NO: 71677 - protein, 320 aa, Homo sapiens [sequence omitted]

SEQ ID NO: 71678 - protein, 373 aa, Homo sapiens
  Payload ID: 14181
  Gene Symbol: RASSF7
  Gene Name: Ras association (RalGDS/AF-6) domain family (N-terminal) member 7
  ENSP ID: ENSP00000480155
MLLGLAAMELKVWVDGIQRVVCGVSEQTTCQEVVIALAQAIGQTGRFVLVQRLREKERQLLPQECPVGAQATCGQFASDVQFVLRRTGASLAGRPSSDSCPPPERCLIRASLPVKPRAALGCEPRKTLTPEPAPSLSRPGPAAPVTPTPGCCTDLRGLELRVQRNAEELGHEAFWEQELRREQAREREGQARLQALSAATAEHAARLQALDAQARALEAELQLAAEAPGPPSPMASATERLHQDLAVQERQSAEVQGSLALVSRALEAAERALQAQAQELEELNRELRQCNLQQFIQQTGAALPPPPRPDRGPPGTQGPLPPAREESLLGAPSESHAGAQPRPRGGPHDAELLEVAAAPAPEWCPLAAQPQAL

SEQ ID NO: 71679 - protein, 337 aa, Homo sapiens; identical to SEQ ID NO: 71676
  Payload ID: 14181
  Gene Symbol: RASSF7
  Gene Name: Ras association (RalGDS/AF-6) domain family (N-terminal) member 7
  ENSP ID: ENSP00000487623

SEQ ID NO: 71680 - protein, 83 aa, Homo sapiens; identical to SEQ ID NO: 71674
  Payload ID: 14181
  Gene Symbol: RASSF7
  Gene Name: Ras association (RalGDS/AF-6) domain family (N-terminal) member 7
  ENSP ID: ENSP00000487959

SEQ ID NO: 71681 - protein, 194 aa, Homo sapiens; identical to SEQ ID NO: 71675
  Payload ID: 14181
  Gene Symbol: RASSF7
  Gene Name: Ras association (RalGDS/AF-6) domain family (N-terminal) member 7
  ENSP ID: ENSP00000488088
  MOD_RES (1)..(1): Any amino acid

SEQ ID NO: 71682 - protein, 120 aa, Homo sapiens
  Payload ID: 14181
  Gene Symbol: RASSF7
  Gene Name: Ras association (RalGDS/AF-6) domain family (N-terminal) member 7
  ENSP ID: ENSP00000488812
MLLGLAAMELKVWVDGIQRVVCGVSEQTTCQEVVIALAQAIDWPLCACAAASGEGAAVAATRVSSGRPGHLRTVCQRCPVCPEAHRGQPSWEALLRQLSTPGTLPNSCQPPCKATGCAGL

SEQ ID NO: 71683 - protein, 419 aa, Homo sapiens
  Payload ID: 14182
  Gene Symbol: RASSF8
  Gene Name: Ras association (RalGDS/AF-6) domain family (N-terminal) member 8
  Uniprot ID: Q8NHQ8
  ENSP ID: ENSP00000282884
MELKVWVDGVQRIVCGVTEVTTCQEVVIALAQAIGRTGRYTLIEKWRDTERHLAPHENPIISLNKWGQYASDVQLILRRTGPSLSERPTSDSVARIPERTLYRQSLPPLAKLRPQIDKSIKRREPKRKSLTFTGGAKGLMDIFGKGKETEFKQKVLNNCKTTADELKKLIRLQTEKLQSIEKQLESNEIEIRFWEQKYNSNLEEEIVRLEQKIKRNDVEIEEEEFWENELQIEQENEKQLKDQLQEIRQKITECENKLKDYLAQIRTMESGLEAEKLQREVQEAQVNEEEVKGKIGKVKGEIDIQGQQSLRLENGIKAVERSLGQATKRLQDKEQELEQLTKELRQVNLQQFIQQTGTKVTVLPAEPIEIEASHADIEREAPFQSGSLKRPGSSRQLPSNLRILQNPISSGFNPEGIYV

SEQ ID NO: 71684 - protein, 392 aa, Homo sapiens
  Payload ID: 14182
  Gene Symbol: RASSF8
  Gene Name: Ras association (RalGDS/AF-6) domain family (N-terminal) member 8
  Uniprot ID: Q8NHQ8
  ENSP ID: ENSP00000370756
MELKVWVDGVQRIVCGVTEVTTCQEVVIALAQAIGRTGRYTLIEKWRDTERHLAPHENPIISLNKWGQYASDVQLILRRTGPSLSERPTSDSVARIPERTLYRQSLPPLAKLRPQIDKSIKRREPKRKSLTFTGGAKGLMDIFGKGKETEFKQKVLNNCKTTADELKKLIRLQTEKLQSIEKQLESNEIEIRFWEQKYNSNLEEEIVRLEQKIKRNDVEIEEEEFWENELQIEQENEKQLKDQLQEIRQKITECENKLKDYLAQIRTMESGLEAEKLQREVQEAQVNEEEVKGKIGKVKGEIDIQGQQSLRLENGIKAVERSLGQATKRLQDKEQELEQLTKELRQVNLQQFIQQTGTKVTVLPAEPIEIEASHADIERGIIILSDKQECKD

SEQ ID NO: 71685 - protein, 419 aa, Homo sapiens; identical to SEQ ID NO: 71683
  Payload ID: 14182
  Gene Symbol: RASSF8
  Gene Name: Ras association (RalGDS/AF-6) domain family (N-terminal) member 8
  Uniprot ID: Q8NHQ8
  ENSP ID: ENSP00000384491

SEQ ID NO: 71686 - protein, 419 aa, Homo sapiens; identical to SEQ ID NO: 71683
  Payload ID: 14182
  Gene Symbol: RASSF8
  Gene Name: Ras association (RalGDS/AF-6) domain family (N-terminal) member 8
  Uniprot ID: Q8NHQ8
  ENSP ID: ENSP00000439839

SEQ ID NO: 71687 - protein, 122 aa, Homo sapiens
  Payload ID: 14182
  Gene Symbol: RASSF8
  Gene Name: Ras association (RalGDS/AF-6) domain family (N-terminal) member 8
  ENSP ID: ENSP00000441294
MELKVWVDGVQRIVCGVTEVTTCQEVVIALAQAIGRTGRYTLIEKWRDTERHLAPHENPIISLNKWGQYASDVQLILRRTGPSLSERPTSDSVARIPERTLYRQSLPPLAKLRPQIDKSIKR

SEQ ID NO: 71688 - protein, 91 aa, Homo sapiens
  Payload ID: 14182
  Gene Symbol: RASSF8
  Gene Name: Ras association (RalGDS/AF-6) domain family (N-terminal) member 8
  ENSP ID: ENSP00000442036
MELKVWVDGVQRIVCGVTEVTTCQEVVIALAQAIGRTGRYTLIEKWRDTERHLAPHENPIISLNKWGQYASDVQLILRRTGPSLSERPTSD

SEQ ID NO: 71689 - protein, 208 aa, Homo sapiens
  Payload ID: 14182
  Gene Symbol: RASSF8
  Gene Name: Ras association (RalGDS/AF-6) domain family (N-terminal) member 8
  ENSP ID: ENSP00000442191
KIKRNDVEIEEEEFWENELQIEQENEKQLKDQLQEIRQKITECENKLKDYLAQIRTMESGLEAEKLQREVQEAQVNEEEVKGKIGKVKGEIDIQGQQSLRLENGIKAVERSLGQATKRLQDKEQELEQLTKELRQVNLQQFIQQTGTKVTVLPAEPIEIEASHADIEREAPFQSGSLKRPGSSRQLPSNLRILQNPISSGFNPEGIYV

SEQ ID NO: 71690 - protein, 219 aa, Homo sapiens
  Payload ID: 14182
  Gene Symbol: RASSF8
  Gene Name: Ras association (RalGDS/AF-6) domain family (N-terminal) member 8
  ENSP ID: ENSP00000442485
MELKVWVDGVQRIVCGVTEVTTCQEVVIALAQAIGRTGRYTLIEKWRDTERHLAPHENPIISLNKWGQYASDVQLILRRTGPSLSERPTSDSVARIPERTLYRQSLPPLAKLRPQIDKSIKRREPKRKSLTFTGGAKGLMDIFGKGKETEFKQKVLNNCKTTADELKKLIRLQTEKLQSIEKQLESNEIEIRFWEQKYNSNLEEEIVRLEQKIKRNDVE

SEQ ID NO: 71691 - protein, 419 aa, Homo sapiens; identical to SEQ ID NO: 71683
  Payload ID: 14182
  Gene Symbol: RASSF8
  Gene Name: Ras association (RalGDS/AF-6) domain family (N-terminal) member 8
  Uniprot ID: Q8NHQ8
  ENSP ID: ENSP00000443096

SEQ ID NO: 71692 - protein, 159 aa, Homo sapiens
  Payload ID: 14182
  Gene Symbol: RASSF8
  Gene Name: Ras association (RalGDS/AF-6) domain family (N-terminal) member 8
  ENSP ID: ENSP00000443696
MELKVWVDGVQRIVCGVTEVTTCQEVVIALAQAIGRTGRYTLIEKWRDTERHLAPHENPIISLNKWGQYASDVQLILRRTGPSLSERPTSDSVARIPERTLYRQSLPPLAKLRPQIDKSIKRREPKRKSLTFTGGAKGLMDIFGKGKETEFKQKVLNNC

SEQ ID NO: 71693 - protein, 29 aa, Homo sapiens
  Payload ID: 14182
  Gene Symbol: RASSF8
  Gene Name: Ras association (RalGDS/AF-6) domain family (N-terminal) member 8
  ENSP ID: ENSP00000445434
MELKVWVDGVQRIVCGVTEVTTCQEVVIA

SEQ ID NO: 71694 - protein, 208 aa, Homo sapiens
  Payload ID: 14182
  Gene Symbol: RASSF8
  Gene Name: Ras association (RalGDS/AF-6) domain family (N-terminal) member 8
  ENSP ID: ENSP00000445970
MELKVWVDGVQRIVCGVTEVTTCQEVVIALAQAIGRTGRYTLIEKWRDTERHLAPHENPIISLNKWGQYASDVQLILRRTGPSLSERPTSDSVARIPERTLYRQSLPPLAKLRPQIDKSIKRREPKRKSLTFTGGAKGLMDIFGKGKETEFKQKVLNNCKTTADELKKLIRLQTEKLQSIEKQLESNEIEIRFWEQKYNSNLEEEIVR

SEQ ID NO: 71695 - protein, 109 aa, Homo sapiens
  Payload ID: 14182
  Gene Symbol: RASSF8
  Gene Name: Ras association (RalGDS/AF-6) domain family (N-terminal) member 8
  ENSP ID: ENSP00000478107
MELKVWVDGVQRIVCGVTEVTTCQEVVIALAQAIGRTGRYTLIEKWRDTERHLAPHENPIISLNKWGQYASDVQLILRRTGPSLSERPTSDSVARIPERTLYRQSLPLS

SEQ ID NO: 71696 - protein, 392 aa, Homo sapiens; identical to SEQ ID NO: 71684
  Payload ID: 14182
  Gene Symbol: RASSF8
  Gene Name: Ras association (RalGDS/AF-6) domain family (N-terminal) member 8
  Uniprot ID: Q8NHQ8
  ENSP ID: ENSP00000481417

SEQ ID NO: 71697 - protein, 435 aa, Homo sapiens
  Payload ID: 14183
  Gene Symbol: RASSF9
  Gene Name: Ras association (RalGDS/AF-6) domain family (N-terminal) member 9
  Uniprot ID: O75901
  ENSP ID: ENSP00000354884
MAPFGRNLLKTRHKNRSPTKDMDSEEKEIVVWVCQEEKLVCGLTKRTTSADVIQALLEEHEATFGEKRFLLGKPSDYCIIEKWRGSERVLPPLTRILKLWKAWGDEQPNMQFVLVKADAFLPVPLWRTAEAKLVQNTEKLWELSPANYMKTLPPDKQKRIVRKTFRKLAKIKQDTVSHDRDNMETLVHLIISQDHTIHQQVKRMKELDLEIEKCEAKFHLDRVENDGENYVQDAYLMPSFSEVEQNLDLQYEENQTLEDLSESDGIEQLEERLKYYRILIDKLSAEIEKEVKSVCIDINEDAEGEAASELESSNLESVKCDLEKSMKAGLKIHSHLSGIQKEIKYSDSLLQMKAKEYELLAKEFNSLHISNKDGCQLKENRAKESEVPSSNGEIPPFTQRVFSNYTNDTDSDTGISSNHSQDSETTVGDVVLLST

SEQ ID NO: 71698 - protein, 270 aa, Homo sapiens
  Payload ID: 14184
  Gene Symbol: RASSF1
  Gene Name: Ras association (RalGDS/AF-6) domain family member 1
  Uniprot ID: Q9NS23
  ENSP ID: ENSP00000333327
MGEAEAPSFEMTWSSTTSSGYCSQEDSDSELEQYFTARTSLARRPRRDQDEPVEWETPDLSQAEIEQKIKEYNAQINSNLFMSLNKDGSYTGFIKVQLKLVRPVSVPSSKKPPSLQDARRGPGRGTSVRRRTSFYLPKDAVKHLHVLSRTRAREVIEALLRKFLVVDDPRKFALFERAERHGQVYLRKLLDDEQPLRLRLLAGPSDKALSFVLKENDSGEVNWDAFSMPELHNFLRILQREEEEHLRQILQKYSYCRQKIQEALHACPLG

SEQ ID NO: 71699 - protein, 344 aa, Homo sapiens
  Payload ID: 14184
  Gene Symbol: RASSF1
  Gene Name: Ras association (RalGDS/AF-6) domain family member 1
  Uniprot ID: Q9NS23
  ENSP ID: ENSP00000349547
MSGEPELIELRELAPAGRAGKGRTRLERANALRIARGTACNPTRQLVPGRGHRFQPAGPATHTWCDLCGDFIWGVVRKGLQCARLSADCKFTCHYRCRALVCLDCCGPRDLGWEPAVERDTNVDEPVEWETPDLSQAEIEQKIKEYNAQINSNLFMSLNKDGSYTGFIKVQLKLVRPVSVPSSKKPPSLQDARRGPGRGTSVRRRTSFYLPKDAVKHLHVLSRTRAREVIEALLRKFLVVDDPRKFALFERAERHGQVYLRKLLDDEQPLRLRLLAGPSDKALSFVLKENDSGEVNWDAFSMPELHNFLRILQREEEEHLRQILQKYSYCRQKIQEALHACPLG

SEQ ID NO: 71700 - protein, 340 aa, Homo sapiens
  Payload ID: 14184
  Gene Symbol: RASSF1
  Gene Name: Ras association (RalGDS/AF-6) domain family member 1
  Uniprot ID: Q9NS23
  ENSP ID: ENSP00000352323
MSGEPELIELRELAPAGRAGKGRTRLERANALRIARGTACNPTRQLVPGRGHRFQPAGPATHTWCDLCGDFIWGVVRKGLQCAHCKFTCHYRCRALVCLDCCGPRDLGWEPAVERDTNVDEPVEWETPDLSQAEIEQKIKEYNAQINSNLFMSLNKDGSYTGFIKVQLKLVRPVSVPSSKKPPSLQDARRGPGRGTSVRRRTSFYLPKDAVKHLHVLSRTRAREVIEALLRKFLVVDDPRKFALFERAERHGQVYLRKLLDDEQPLRLRLLAGPSDKALSFVLKENDSGEVNWDAFSMPELHNFLRILQREEEEHLRQILQKYSYCRQKIQEALHACPLG

SEQ ID NO: 71701 - protein, 92 aa, Homo sapiens
  Payload ID: 14184
  Gene Symbol: RASSF1
  Gene Name: Ras association (RalGDS/AF-6) domain family member 1
  Uniprot ID: Q9NS23
  ENSP ID: ENSP00000378549
MSGEPELIELRELAPAGRAGKGRTRLERANALRIARGTACNPTRQLVPGRGHRFQPAGPATHTWCDLCGDFIWGVVRKGLQCARRACGVGDT

SEQ ID NO: 71702 - protein, 189 aa, Homo sapiens
  Payload ID: 14184
  Gene Symbol: RASSF1
  Gene Name: Ras association (RalGDS/AF-6) domain family member 1
  Uniprot ID: Q9NS23
  ENSP ID: ENSP00000378558
MSLNKDGSYTGFIKVQLKLVRPVSVPSSKKPPSLQDARRGPGRGTSVRRRTSFYLPKDAVKHLHVLSRTRAREVIEALLRKFLVVDDPRKFALFERAERHGQVYLRKLLDDEQPLRLRLLAGPSDKALSFVLKENDSGEVNWDAFSMPELHNFLRILQREEEEHLRQILQKYSYCRQKIQEALHACPLG

SEQ ID NO: 71703 - protein, 152 aa, Homo sapiens
  Payload ID: 14184
  Gene Symbol: RASSF1
  Gene Name: Ras association (RalGDS/AF-6) domain family member 1
  Uniprot ID: Q9NS23
  ENSP ID: ENSP00000433000
MSGEPELIELRELAPAGRAGKGRTRLERANALRIARGTACNPTRQLVPGRGHRFQPAGPATHTWCDLCGDFIWGVVRKGLQCAQQGRFLHRLHQGSAEAGAPCLCALQQEATLLAGCPAGPRTGHKCQAPHFLLPAQGCCQAPACAVTHKGT

SEQ ID NO: 71704 - protein, 189 aa, Homo sapiens; identical to SEQ ID NO: 71702
  Payload ID: 14184
  Gene Symbol: RASSF1
  Gene Name: Ras association (RalGDS/AF-6) domain family member 1
  Uniprot ID: Q9NS23
  ENSP ID: ENSP00000482696

SEQ ID NO: 71705 - protein, 326 aa, Homo sapiens
  Payload ID: 14185
  Gene Symbol: RASSF2
  Gene Name: Ras association (RalGDS/AF-6) domain family member 2
  Uniprot ID: P50749
  ENSP ID: ENSP00000368684
MDYSHQTSLVPCGQDKYISKNELLLHLKTYNLYYEGQNLQLRHREEEDEFIVEGLLNISWGLRRPIRLQMQDDNERIRPPPSSSSWHSGCNLGAQGTTLKPLTVPKVQISEVDAPPEGDQMPSSTDSRGLKPLQEDTPQLMRTRSDVGVRRRGNVRTPSDQRRIRRHRFSINGHFYNHKTSVFTPAYGSVTNVRINSTMTTPQVLKLLLNKFKIENSAEEFALYVVHTSGEKQKLKATDYPLIARILQGPCEQISKVFLMEKDQVEEVTYDVAQYIKFEMPVLKSFIQKLQEEEDREVKKLMRKYTVLRLMIRQRLEEIAETPATI

SEQ ID NO: 71706 - protein, 326 aa, Homo sapiens; identical to SEQ ID NO: 71705
  Payload ID: 14185
  Gene Symbol: RASSF2
  Gene Name: Ras association (RalGDS/AF-6) domain family member 2
  Uniprot ID: P50749
  ENSP ID: ENSP00000368710

SEQ ID NO: 71707 - protein, 90 aa, Homo sapiens
  Payload ID: 14186
  Gene Symbol: RASSF3
  Gene Name: Ras association (RalGDS/AF-6) domain family member 3
  Uniprot ID: Q86WH2
  ENSP ID: ENSP00000283172
MSSGYSSLEEDAEDFFFTARTSFFRRAPQGKPRSGQQDVEKEKETHSYLSKEEIKEKVHKYNLAVTDKLKMTLSTPASSQTGNIHSTCVW

SEQ ID NO: 71708 - protein, 238 aa, Homo sapiens
  Payload ID: 14186
  Gene Symbol: RASSF3
  Gene Name: Ras association (RalGDS/AF-6) domain family member 3
  Uniprot ID: Q86WH2
  ENSP ID: ENSP00000336616
MSSGYSSLEEDAEDFFFTARTSFFRRAPQGKPRSGQQDVEKEKETHSYLSKEEIKEKVHKYNLAVTDKLKMTLNSNGIYTGFIKVQMELCKPPQTSPNSGKLSPSSNGCMNTLHISSTNTVGEVIEALLKKFLVTESPAKFALYKRCHREDQVYACKLSDREHPLYLRLVAGPRTDTLSFVLREHEIGEWEAFSLPELQNFLRILDKEEDEQLQNLKRRYTAYRQKLEEALREVWKPD

SEQ ID NO: 71709 - protein, 238 aa, Homo sapiens; identical to SEQ ID NO: 71708
  Payload ID: 14186
  Gene Symbol: RASSF3
  Gene Name: Ras association (RalGDS/AF-6) domain family member 3
  Uniprot ID: Q86WH2
  ENSP ID: ENSP00000443021

SEQ ID NO: 71710 - protein, 321 aa, Homo sapiens
  Payload ID: 14187
  Gene Symbol: RASSF4
  Gene Name: Ras association (RalGDS/AF-6) domain family member 4
  Uniprot ID: Q9H2L5
  ENSP ID: ENSP00000339692
MKEDCLPSSHVPISDSKSIQKSELLGLLKTYNCYHEGKSFQLRHREEEGTLIIEGLLNIAWGLRRPIRLQMQDDREQVHLPSTSWMPRRPSCPLKEPSPQNGNITAQGPSIQPVHKAESSTDSSGPLEEAEEAPQLMRTKSDASCMSQRRPKCRAPGEAQRIRRHRFSINGHFYNHKTSVFTPAYGSVTNVRVNSTMTTLQVLTLLLNKFRVEDGPSEFALYIVHESGERTKLKDCEYPLISRILHGPCEKIARIFLMEADLGVEVPHEVAQYIKFEMPVLDSFVEKLKEEEEREIIKLTMKFQALRLTMLQRLEQLVEAK

SEQ ID NO: 71711 - protein, 151 aa, Homo sapiens
  Payload ID: 14187
  Gene Symbol: RASSF4
  Gene Name: Ras association (RalGDS/AF-6) domain family member 4
  ENSP ID: ENSP00000409767
MKEDCLPSSHVPISDSKSIQKSELLGLLKTYNCYHEGKSFQLRHREEEGTLIIEGLLNIAWGLRRPIRLQMQDDREQVHLPSTSWMPRRPSCPLGCWSLLLGLSSLSLPAAISALQLSVFRKEPSPQNGNITAQGPSIQPVHKAESSTDSS

SEQ ID NO: 71712 - protein, 123 aa, Homo sapiens
  Payload ID: 14187
  Gene Symbol: RASSF4
  Gene Name: Ras association (RalGDS/AF-6) domain family member 4
  ENSP ID: ENSP00000413468
SSHVPISDSKSIQKSELLGLLKTYNCYHEGKSFQLRHREEEGTLIIEGLLNIAWGLRRPIRLQMQDDREQVHLPSTSWMPRRPSCPLHLAGKKGRLQPGGLPTPMQAEHVSPSLVLSLKFTRI

SEQ ID NO: 71713 - protein, 49 aa, Homo sapiens
  Payload ID: 14187
  Gene Symbol: RASSF4
  Gene Name: Ras association (RalGDS/AF-6) domain family member 4
  ENSP ID: ENSP00000473555
MKEDCLPSSHVPISDSKSIQKSELLGLLKTYNCYHEGKSFQLRHREEAQ

SEQ ID NO: 71714 - protein, 84 aa, Homo sapiens
  Payload ID: 14187
  Gene Symbol: RASSF4
  Gene Name: Ras association (RalGDS/AF-6) domain family member 4
  ENSP ID: ENSP00000476848
  MOD_RES (1)..(1): Any amino acid
XTTLQVLTLLLNKFRVEDGPSEFALYIVHESGERTKLKDCEYPLISRILHGPCEKIARIFLMEADLGVEVPHEVSGGQGWGGLL

SEQ ID NO: 71715 - protein, 418 aa, Homo sapiens
  Payload ID: 14188
  Gene Symbol: RASSF5
  Gene Name: Ras association (RalGDS/AF-6) domain family member 5
  Uniprot ID: Q8WWW0
  ENSP ID: ENSP00000462099
MAMASPAIGQRPYPLLLDPEPPRYLQSLSGPELPPPPPDRSSRLCVPAPLSTAPGAREGRSARRAARGNLEPPPRASRPARPLRPGLQQRLRRRPGAPRPRDVRSIFEQPQDPRVPAERGEGHCFAELVLPGGPGWCDLCGREVLRQALRCTNCKFTCHPECRSLIQLDCSQQEGLSRDRPSPESTLTVTFSQNVCKPVEETQRPPTLQEIKQKIDSYNTREKNCLGMKLSEDGTYTGFIKVHLKLRRPVTVPAGIRPQSIYDAIKEVNLAATTDKRTSFYLPLDAIKQLHISSTTTVSEVIQGLLKKFMVVDNPQKFALFKRIHKDGQVLFQKLSIADRPLYLRLLAGPDTEVLSFVLKENETGEVEWDAFSIPELQNFLTILEKEEQDKIQQVQKKYDKFRQKLEEALRESQGKPG

SEQ ID NO: 71716 - protein, 336 aa, Homo sapiens
  Payload ID: 14188
  Gene Symbol: RASSF5
  Gene Name: Ras association (RalGDS/AF-6) domain family member 5
  Uniprot ID: Q8WWW0
  ENSP ID: ENSP00000462544
MAMASPAIGQRPYPLLLDPEPPRYLQSLSGPELPPPPPDRSSRLCVPAPLSTAPGAREGRSARRAARGNLEPPPRASRPARPLRPGLQQRLRRRPGAPRPRDVRSIFEQPQDPRVPAERGEGHCFAELVLPGGPGWCDLCGREVLRQALRCTNCKFTCHPECRSLIQLDCSQQEGLSRDRPSPESTLTVTFSQNVCKPVEETQRPPTLQEIKQKIDSYNTREKNCLGMKLSEDGTYTGFIKVHLKLRRPVTVPAGIRPQSIYDAIKEVNLAATTDKRTSFYLPLDAIKQLHISSTTTVSEVIQGLLKKFMVVDNPQKFALFKRIHKDGQVGCLLHP

SEQ ID NO: 71717 - protein, 265 aa, Homo sapiens
  Payload ID: 14188
  Gene Symbol: RASSF5
  Gene Name: Ras association (RalGDS/AF-6) domain family member 5
  Uniprot ID: Q8WWW0
  ENSP ID: ENSP00000462576
MTVDSSMSSGYCSLDEELEDCFFTAKTTFFRNAQSKHLSKNVCKPVEETQRPPTLQEIKQKIDSYNTREKNCLGMKLSEDGTYTGFIKVHLKLRRPVTVPAGIRPQSIYDAIKEVNLAATTDKRTSFYLPLDAIKQLHISSTTTVSEVIQGLLKKFMVVDNPQKFALFKRIHKDGQVLFQKLSIADRPLYLRLLAGPDTEVLSFVLKENETGEVEWDAFSIPELQNFLTILEKEEQDKIQQVQKKYDKFRQKLEEALRESQGKPG

SEQ ID NO: 71718 - protein, 350 aa, Homo sapiens
  Payload ID: 14188
  Gene Symbol: RASSF5
  Gene Name: Ras association (RalGDS/AF-6) domain family member 5
  ENSP ID: ENSP00000464039
MAMASPAIGQRPYPLLLDPEPPRYLQSLSGPELPPPPPDRSSRLCVPAPLSTAPGAREGRSARRAARGNLEPPPRASRPARPLRPGLQQRLRRRPGAPRPRDVRSIFEQPQDPRVPAERGEGHCFAELVLPGGPGWCDLCGREVLRQALRCTNCKFTCHPECRSLIQLDCSQQEGLSRDRPSPESTLTVTFSQNVCKPVEETQRPPTLQEIKQKIDSYNTREKNCLGMKLSEDGTYTGFIKVHLKLRRPVTVPAGIRPQSIYDAIKEVNLAATTDKRTSFYLPLDAIKQLHISSTTTVSEVIQGLLKKFMVVDNPQKFALFKRIHKDGQGRRKSEPNQTVPFLPVSKPTH

SEQ ID NO: 71719 - protein, 185 aa, Homo sapiens
  Payload ID: 14188
  Gene Symbol: RASSF5
  Gene Name: Ras association (RalGDS/AF-6) domain family member 5
  ENSP ID: ENSP00000474142
VCKPVEETQRPPTLQEIKQKIDSYNTREKNCLGMKLSEDGTYTGFIKVHLKLRRPVTVPAGIRPQSIYDAIKEVNLAATTDKRTSFYLPLDAIKQLHISSTTTVSEVIQGLLKKFMVVDNPQKFALFKRIHKDGQVLFQKLSIADRPLYLRLLAGPDTEVLSFVLKENETGEVEVGLDPLCKPRP

SEQ ID NO: 71720 - protein, 337 aa, Homo sapiens
  Payload ID: 14189
  Gene Symbol: RASSF6
  Gene Name: Ras association (RalGDS/AF-6) domain family member 6
  Uniprot ID: Q6ZTQ3
  ENSP ID: ENSP00000303877
MTMMAHQYPSWIFINEKTFITREQLNSLLKTYNIFYENQKNLHILYGETEDGKLIVEGMLDIFWGVKRPIQLKIQDEKPFSSFTSMKSSDVFSSKGMTRWGEFDDLYRISELDRTQIPMSEKRNSQEDYLSYHSNTLKPHAKDEPDSPVLYRTMSEAALVRKRMKPLMMDRKERQKNRASINGHFYNHETSIFIPAFESETKVRVNSNMRTEEVIKQLLQKFKIENSPQDFALHIIFATGEQRRLKKTDIPLLQRLLQGPSEKNARIFLMDKDAEEISSDVAQYINFHFSLLESILQRLNEEEKREIQRIVTKFNKEKAIILKCLQNKLVIKTETTV

SEQ ID NO: 71721 - protein, 325 aa, Homo sapiens
  Payload ID: 14189
  Gene Symbol: RASSF6
  Gene Name: Ras association (RalGDS/AF-6) domain family member 6
  Uniprot ID: Q6ZTQ3
  ENSP ID: ENSP00000335582
MLWEETGAAPAPARASDLPYRIHFLSSGLILVTRQLTEDGKLIVEGMLDIFWGVKRPIQLKIQDEKPFSSFTSMKSSDVFSSKGMTRWGEFDDLYRISELDRTQIPMSEKRNSQEDYLSYHSNTLKPHAKDEPDSPVLYRTMSEAALVRKRMKPLMMDRKERQKNRASINGHFYNHETSIFIPAFESETKVRVNSNMRTEEVIKQLLQKFKIENSPQDFALHIIFATGEQRRLKKTDIPLLQRLLQGPSEKNARIFLMDKDAEEISSDVAQYINFHFSLLESILQRLNEEEKREIQRIVTKFNKEKAIILKCLQNKLVIKTETTV

SEQ ID NO: 71722 - protein, 369 aa, Homo sapiens
  Payload ID: 14189
  Gene Symbol: RASSF6
  Gene Name: Ras association (RalGDS/AF-6) domain family member 6
  Uniprot ID: Q6ZTQ3
  ENSP ID: ENSP00000340578
MLWEETGAAPAPARASDLPYRISSDHLKKEEKMTMMAHQYPSWIFINEKTFITREQLNSLLKTYNIFYENQKNLHILYGETEDGKLIVEGMLDIFWGVKRPIQLKIQDEKPFSSFTSMKSSDVFSSKGMTRWGEFDDLYRISELDRTQIPMSEKRNSQEDYLSYHSNTLKPHAKDEPDSPVLYRTMSEAALVRKRMKPLMMDRKERQKNRASINGHFYNHETSIFIPAFESETKVRVNSNMRTEEVIKQLLQKFKIENSPQDFALHIIFATGEQRRLKKTDIPLLQRLLQGPSEKNARIFLMDKDAEEISSDVAQYINFHFSLLESILQRLNEEEKREIQRIVTKFNKEKAIILKCLQNKLVIKTETTV

SEQ ID NO: 71723 - protein, 303 aa, Homo sapiens
  Payload ID: 14189
  Gene Symbol: RASSF6
  Gene Name: Ras association (RalGDS/AF-6) domain family member 6
  Uniprot ID: Q6ZTQ3
  ENSP ID: ENSP00000379123
MTMMAHQYPSWIFINEKTFITREQLNSLLKTYNIFYENQKNLHILYGETEDGKLIVEGMLDIFWGVKRPIQLKIQDEKPFSSFTSMKSSDVFSSKGMTRWGEFDDLYRISELDRTQIPMSEKRNSQEDYLSYHSNTLKPHAKDEPDSPVLYRTMSEAALVRKRMKPLMMDRKERQKNRASINGHFYNHEIENSPQDFALHIIFATGEQRRLKKTDIPLLQRLLQGPSEKNARIFLMDKDAEEISSDVAQYINFHFSLLESILQRLNEEEKREIQRIVTKFNKEKAIILKCLQNKLVIKTETTV

SEQ ID NO: 71724 - protein, 1075 aa, Homo sapiens
  Payload ID: 14190
  Gene Symbol: RADIL
  Gene Name: Ras association and DIL domains
  Uniprot ID: Q96JH8
  ENSP ID: ENSP00000382492
MFYGTHFIMSPPTKSKLKRQSQLLSSMLSRTLSYKYRDLDSTFSSLGASDDPAELSTQLSAPGVLKVFGDSVCTGTHYKSVLATGTSSARELVKEALERYALDPRQAGQYVLCDVVGQAGDAGQRWQARCFRVFGDSEKPLLIQELWKPREGLSRRFELRKRSDVEELAAKEVDTITAGINAQARRLQRSRAKGTPTPALGDARSSPPPRLRRTVSETSLSPVNALPAAAQGPEEPGPDAMRYSLYQSPHLLLLQGYSQQHDSLVYVLNRDRHTVGQRTPSSKPSISLSAPDILPLHCTIRRQPLPDSGQAAGRLVLEPIPGAHISVNFSEVGHRTVVLHHGDLLSLGLYYLLLFKDPAQAQPLPARALARLRAVPQSCRLCGAALGARGAASPTQAALPRRQQLLLEFEPHLEDTLLQRIMTLIEPGGDDHKLTPAFLLCLCIQHSATHFQPGTFGQLLLKIARLIRETVWEKTKELAEKQAQLQEPISLASCAMADLVPDLQPILFWMSNSIELLYFIQQKCPLYMQSMEEQLDITGSKESLFSCTLTASEEAMAVLEEVVLYAFQQCVYYVSKSLYICLPALLECPPFQTERRESWSSAPELPEELRRVVSVYQAALDLLRQLQVHPEVASQMLAYLFFFSGTLLLNQLLDRGPSLSCFHWPRGVQACARLQQLLEWMRSAGFGAAGEHFFQKLSCTLNLLATPRAQLIQMSWTALRAAFPALSPAQLHRLLTHYQLASAMGPMSTWEPGAQDSPEAFRSEDVLESYENPPPIVLPSDGFQVDLEANCLDDSIYQHLLYVRHFLWGLRSRASPGSPGRPGSGASQPVCPEGMHHVVLDGHLEAPSCPLAPRDPGPAAREVAPERTLPLRGAPWAQAPPGRQPSRGGSQAGPPHTDSSCLLTPPSTPLGPEPGDPDWPESGGPCGKALPERQRNGLSGLRGAAPEGDSAALAEESPPAPSSRSSSTEDFCYVFTVELERGPSGLGMGLIDGMHTHLGAPGLYIQTLLPGSPAAADGRLSLGDRILEVNGSSLLGLGYLRAVDLIRHGGKKMRFLVAKSDVETAKKIHFRTPPL

SEQ ID NO: 71725 - protein, 134 aa, Homo sapiens
  Payload ID: 14190
  Gene Symbol: RADIL
  Gene Name: Ras association and DIL domains
  ENSP ID: ENSP00000398057
MFYGTHFIMSPPTKSKLKRQSQLLSSMLSRTLSYKYRDLDSTFSSLGASDDPAELSTQLSAPGVLKVFGDSVCTGTHYKSVLATGTSSARELVKEALERYALDPRQAGQYVLCDVVGQAGDAGQRWQARCFRVF

SEQ ID NO: 71726 - protein, 407 aa, Homo sapiens
  Payload ID: 14190
  Gene Symbol: RADIL
  Gene Name: Ras association and DIL domains
  ENSP ID: ENSP00000413403
MFYGTHFIMSPPTKSKLKRQSQLLSSMLSRTLSYKYRDLDSTFSSLGASDDPAELSTQLSAPGVLKVFGDSVCTGTHYKSVLATGTSSARELVKEALERYALDPRQAGQYVLCDVVGQAGDAGQRWQARCFRVFGDSEKPLLIQELWKPREGLSRRFELRKRSDVEELAAKEVDTITAGINAQARRLQRSRAKGTPTPALGDARSSPPPRLRRTVSETSLSPVNALPAAAQGPEEPGPDAMRYSLYQSPHLLLLQGYSQQHPGVCAQPGPAHGGPADPLQQAQHQPLSPRHPASTLHHPPATAPGQRPGRGEAGPGAHPRGAHLRQLLRGGAQDRGAAPRGPALPGALLPAAIQGPRAGPAPARPGLGAPPGCAAELPAVRGRARGPGSRLPYSGRPAPAPAAAPGV

SEQ ID NO: 71727 - protein, 329 aa, Homo sapiens
  Payload ID: 14191
  Gene Symbol: RCE1
  Gene Name: Ras converting CAAX endopeptidase 1
  Uniprot ID: Q9Y256
  ENSP ID: ENSP00000309163
MAALGGDGLRLLSVSRPERPPESAALGGLGPGLCCWVSVFSCLSLACSYVGSLYVWKSELPRDHPAVIKRRFTSVLVVSSLSPLCVLLWRELTGIQPGTSLLTLMGFRLEGIFPAALLPLLLTMILFLGPLMQLSMDCPCDLADGLKVVLAPRSWARCLTDMRWLRNQVIAPLTEELVFRACMLPMLAPCMGLGPAVFTCPLFFGVAHFHHIIEQLRFRQSSVGNIFLSAAFQFSYTAVFGAYTAFLFIRTGHLIGPVLCHSFCNYMGFPAVCAALEHPQRRPLLAGYALGVGLFLLLLQPLTDPKLYGSLPLCVLLERAGDSEAPLCS

SEQ ID NO: 71728 - protein, 206 aa, Homo sapiens
  Payload ID: 14191
  Gene Symbol: RCE1
  Gene Name: Ras converting CAAX endopeptidase 1
  ENSP ID: ENSP00000435409
MILFLGPLMQLSMDCPCDLADGLKVVLAPRSWARCLTDMRWLRNQVIAPLTEELVFRACMLPMLAPCMGLGPAVFTCPLFFGVAHFHHIIEQLRFRQSSVGNIFLSAAFQFSYTAVFGAYTAFLFIRTGHLIGPVLCHSFCNYMGFPAVCAALEHPQRRPLLAGYALGVGLFLLLLQPLTDPKLYGSLPLCVLLERAGDSEAPLCS

SEQ ID NO: 71729 - protein, 102 aa, Homo sapiens
  Payload ID: 14191
  Gene Symbol: RCE1
  Gene Name: Ras converting CAAX endopeptidase 1
  ENSP ID: ENSP00000436300
MAALGGDGLRLLSVSRPERPPESAALGGLGPGLCCWVSVFSCLSLACSYVGSLYVWKSELPRDHPAVIKRRFTSVLVVSSLSPLCVLLWRELTGIQAHPCSP

SEQ ID NO: 71730 - protein, 308 aa, Homo sapiens
  Payload ID: 14191
  Gene Symbol: RCE1
  Gene Name: Ras converting CAAX endopeptidase 1
  ENSP ID: ENSP00000436600
MAALGGDGLRLLSVSRPERPPESAALGGLGPGLCCWVSVFSCLSLACSYVGSLYVWKSELPRDHPAVIKRRFTSVLVVSSLSPLCVLLWRELTGIQPGTSLLTLMGFRLEGIFPAALLPLLLTMILFLGPLMQLSMDCPCDLADGLKVVLAPRSWARCLTDMRWLRNQVIAPLTEELVFRACMLPMLAPCMGLGPAVFTCPLFFGVAHFHHIIEQLRFRQSSVGNIFLSAGHLIGPVLCHSFCNYMGFPAVCAALEHPQRRPLLAGYALGVGLFLLLLQPLTDPKLYGSLPLCVLLERAGDSEAPLCS

SEQ ID NO: 71731 - protein, 797 aa, Homo sapiens
  Payload ID: 14192
  Gene Symbol: RASGRP1
  Gene Name: RAS guanyl releasing protein 1 (calcium and DAG-regulated)
  Uniprot ID: O95267
  ENSP ID: ENSP00000310244
MGTLGKAREAPRKPSHGCRAASKARLEAKPANSPFPSHPSLAHITQFRMMVSLGHLAKGASLDDLIDSCIQSFDADGNLCRSNQLLQVMLTMHRIVISSAELLQKVITLYKDALAKNSPGLCLKICYFVRYWITEFWVMFKMDASLTDTMEEFQELVKAKGEELHCRLIDTTQINARDWSRKLTQRIKSNTSKKRKVSLLFDHLEPEELSEHLTYLEFKSFRRISFSDYQNYLVNSCVKENPTMERSIALCNGISQWVQLMVLSRPTPQLRAEVFIKFIQVAQKLHQLQNFNTLMAVIGGLCHSSISRLKETSSHVPHEINKVLGEMTELLSSSRNYDNYRRAYGECTDFKIPILGVHLKDLISLYEAMPDYLEDGKVNVHKLLALYNHISELVQLQEVAPPLEANKDLVHLLTLSLDLYYTEDEIYELSYAREPRNHRAPPLTPSKPPVVVDWASGVSPKPDPKTISKHVQRMVDSVFKNYDHDQDGYISQEEFEKIAASFPFSFCVMDKDREGLISRDEITAYFMRASSIYSKLGLGFPHNFQETTYLKPTFCDNCAGFLWGVIKQGYRCKDCGMNCHKQCKDLVVFECKKRAKNPVAPTENNTSVGPVSNLCSLGAKDLLHAPEEGPFTFPNGEAVEHGEESKDRTIMLMGVSSQKISLRLKRAVAHKATQTESQPWIGSEGPSGPFVLSSPRKTAQDTLYVLPSPTSPCPSPVLVRKRAFVKWENKDSLIKSKEELRHLRLPTYQELEQEINTLKADNDALKIQLKYAQKKIESLQLEKSNHVLAQMEQGDCS

SEQ ID NO: 71732 - protein, 762 aa, Homo sapiens
  Payload ID: 14192
  Gene Symbol: RASGRP1
  Gene Name: RAS guanyl releasing protein 1 (calcium and DAG-regulated)
  Uniprot ID: O95267
  ENSP ID: ENSP00000388540
MGTLGKAREAPRKPSHGCRAASKARLEAKPANSPFPSHPSLAHITQFRMMVSLGHLAKGASLDDLIDSCIQSFDADGNLCRSNQLLQVMLTMHRIVISSAELLQKVITLYKDALAKNSPGLCLKICYFVRYWITEFWVMFKMDASLTDTMEEFQELVKAKGEELHCRLIDTTQINARDWSRKLTQRIKSNTSKKRKVSLLFDHLEPEELSEHLTYLEFKSFRRISFSDYQNYLVNSCVKENPTMERSIALCNGISQWVQLMVLSRPTPQLRAEVFIKFIQVAQKLHQLQNFNTLMAVIGGLCHSSISRLKETSSHVPHEINKVLGEMTELLSSSRNYDNYRRAYGECTDFKIPILGVHLKDLISLYEAMPDYLEDGKVNVHKLLALYNHISELVQLQEVAPPLEANKDLVHLLTLSLDLYYTEDEIYELSYAREPRNHRAPSVFKNYDHDQDGYISQEEFEKIAASFPFSFCVMDKDREGLISRDEITAYFMRASSIYSKLGLGFPHNFQETTYLKPTFCDNCAGFLWGVIKQGYRCKDCGMNCHKQCKDLVVFECKKRAKNPVAPTENNTSVGPVSNLCSLGAKDLLHAPEEGPFTFPNGEAVEHGEESKDRTIMLMGVSSQKISLRLKRAVAHKATQTESQPWIGSEGPSGPFVLSSPRKTAQDTLYVLPSPTSPCPSPVLVRKRAFVKWENKDSLIKSKEELRHLRLPTYQELEQEINTLKADNDALKIQLKYAQKKIESLQLEKSNHVLAQMEQGDCS

SEQ ID NO: 71733 - protein, 481 aa, Homo sapiens
  Payload ID: 14192
  Gene Symbol: RASGRP1
  Gene Name: RAS guanyl releasing protein 1 (calcium and DAG-regulated)
  Uniprot ID: O95267
  ENSP ID: ENSP00000413105
MGTLGKAREAPRKPSHGCRAASKARLEAKPANSPFPSHPSLAHITQFRMMVSLGHLAKGASLDDLIDSCIQSFDADGNLCRSNQLLQVMLTMHRIVISSAELLQKVITLYKDALAKNSPGLCLKICYFVRYWITEFWVMFKMDASLTDTMEEFQELVKAKGEELHCRLIDTTQINARDWSRKLTQRIKSNTSKKRKVSLLFDHLEPEELSEHLTYLEFKSFRRISFSDYQNYLVNSCVKENPTMERSIALCNGISQWVQLMVLSRPTPQLRAEVFIKFIQVAQKLHQLQNFNTLMAVIGGLCHSSISRLKETSSHVPHEINKVLGEMTELLSSSRNYDNYRRAYGECTDFKIPILGVHLKDLISLYEAMPDYLEDGKVNVHKLLALYNHISELVQLQEVAPPLEANKDLVHLLTLSLDLYYTEDEIYELSYAREPRNHRAPSVFKNYDHDQDGYISQEEFEKIAASFPFSFCVMDKDSSGE

SEQ ID NO: 71734 - protein, 797 aa, Homo sapiens [sequence omitted]

SEQ ID NO: 71735 - protein, 597 aa, Homo sapiens
  Payload ID: 14192
  Gene Symbol: RASGRP1
  Gene Name: RAS guanyl releasing protein 1 (calcium and DAG-regulated)
  Uniprot ID: O95267
  ENSP ID: ENSP00000452721
MGTLGKAREAPRKPSHGCRAASKARLEAKPANSPFPSHPSLAHITQFRMMVSLGHLAKGASLDDLIDSCIQSFDADGNLCRSNQLLQVMLTMHRIVISSAELLQKVITLYKDALAKNSPGLCLKICYFVRYWITEFWVMFKMDASLTDTMEEFQELVKAKGEELHCRLIDTTQINARDWSRKLTQRIKSNTSKKRKVSLLFDHLEPEELSEHLTYLEFKSFRRISFSDYQNYLVNSCVKENPTMERSIALCNGISQWVQLMVLSRPTPQLRAEVFIKFIQVAQKLHQLQNFNTLMAVIGGLCHSSISRLKETSSHVPHEINKVLGEMTELLSSSRNYDNYRRAYGECTDFKIPILGVHLKDLISLYEAMPDYLEDGKVNVHKLLALYNHISELVQLQEVAPPLEANKDLVHLLTLSLDLYYTEDEIYELSYAREPRNHRAPSVFKNYDHDQDGYISQEEFEKIAASFPFSFCVMDKDREGLISRDEITAYFMRASSIYSKLGLGFPHNFQETTYLKPTFCDNCAGFLWGVIKQGYRCKDCGMNCHKQCKDLVVFECKKRAKNPVAPTENNTSVGPVSNLCSLGAKDLLHGNKYSESR

SEQ ID NO: 71736 - protein, 848 aa, Homo sapiens
  Payload ID: 14192
  Gene Symbol: RASGRP1
  Gene Name: RAS guanyl releasing protein 1 (calcium and DAG-regulated)
  ENSP ID: ENSP00000452859
MKVVPTSPTPTDARRPRLGQIWITPVERTSTQAALVQGAGRRAQGTCLRPSPADGYLETPGHRKPSHGCRAASKARLEAKPANSPFPSHPSLAHITQFRMMVSLGHLAKGASLDDLIDSCIQSFDADGNLCRSNQLLQVMLTMHRIVISSAELLQKVITLYKDALAKNSPGLCLKICYFVRYWITEFWVMFKMDASLTDTMEEFQELVKAKGEELHCRLIDTTQINARDWSRKLTQRIKSNTSKKRKVSLLFDHLEPEELSEHLTYLEFKSFRRISFSDYQNYLVNSCVKENPTMERSIALCNGISQWVQLMVLSRPTPQLRAEVFIKFIQVAQKLHQLQNFNTLMAVIGGLCHSSISRLKETSSHVPHEINKVLGEMTELLSSSRNYDNYRRAYGECTDFKIPILGVHLKDLISLYEAMPDYLEDGKVNVHKLLALYNHISELVQLQEVAPPLEANKDLVHLLTLSLDLYYTEDEIYELSYAREPRNHRAPPLTPSKPPVVVDWASGVSPKPDPKTISKHVQRMVDSVFKNYDHDQDGYISQEEFEKIAASFPFSFCVMDKDREGLISRDEITAYFMRASSIYSKLGLGFPHNFQETTYLKPTFCDNCAGFLWGVIKQGYRCKDCGMNCHKQCKDLVVFECKKRAKNPVAPTENNTSVGPVSNLCSLGAKDLLHAPEEGPFTFPNGEAVEHGEESKDRTIMLMGVSSQKISLRLKRAVAHKATQTESQPWIGSEGPSGPFVLSSPRKTAQDTLYVLPSPTSPCPSPVLVRKRAFVKWENKDSLIKSKEELRHLRLPTYQELEQEINTLKADNDALKIQLKYAQKKIESLQLEKSNHVLAQMEQGDCS

SEQ ID NO: 71737 - protein, 32 aa, Homo sapiens
  Payload ID: 14192
  Gene Symbol: RASGRP1
  Gene Name: RAS guanyl releasing protein 1 (calcium and DAG-regulated)
  ENSP ID: ENSP00000452892
MMVSLGHLAKGASLDDLIDSCIQSFDADGNLC

SEQ ID NO: 71738 - protein, 811 aa, Homo sapiens
  Payload ID: 14192
  Gene Symbol: RASGRP1
  Gene Name: RAS guanyl releasing protein 1 (calcium and DAG-regulated)
  ENSP ID: ENSP00000453583
IPFLSNLPSERGAARLSPHCLLSFPRKPSHGCRAASKARLEAKPANSPFPSHPSLAHITQFRMMVSLGHLAKGASLDDLIDSCIQSFDADGNLCRSNQLLQVMLTMHRIVISSAELLQKVITLYKDALAKNSPGLCLKICYFVRYWITEFWVMFKMDASLTDTMEEFQELVKAKGEELHCRLIDTTQINARDWSRKLTQRIKSNTSKKRKVSLLFDHLEPEELSEHLTYLEFKSFRRISFSDYQNYLVNSCVKENPTMERSIALCNGISQWVQLMVLSRPTPQLRAEVFIKFIQVAQKLHQLQNFNTLMAVIGGLCHSSISRLKETSSHVPHEINKVLGEMTELLSSSRNYDNYRRAYGECTDFKIPILGVHLKDLISLYEAMPDYLEDGKVNVHKLLALYNHISELVQLQEVAPPLEANKDLVHLLTLSLDLYYTEDEIYELSYAREPRNHRAPPLTPSKPPVVVDWASGVSPKPDPKTISKHVQRMVDSVFKNYDHDQDGYISQEEFEKIAASFPFSFCVMDKDREGLISRDEITAYFMRASSIYSKLGLGFPHNFQETTYLKPTFCDNCAGFLWGVIKQGYRCKDCGMNCHKQCKDLVVFECKKRAKNPVAPTENNTSVGPVSNLCSLGAKDLLHAPEEGPFTFPNGEAVEHGEESKDRTIMLMGVSSQKISLRLKRAVAHKATQTESQPWIGSEGPSGPFVLSSPRKTAQDTLYVLPSPTSPCPSPVLVRKRAFVKWENKDSLIKSKEELRHLRLPTYQELEQEINTLKADNDALKIQLKYAQKKIESLQLEKSNHVLAQMEQGDCS

SEQ ID NO: 71739 - protein, 123 aa, Homo sapiens
  Payload ID: 14192
  Gene Symbol: RASGRP1
  Gene Name: RAS guanyl releasing protein 1 (calcium and DAG-regulated)
  ENSP ID: ENSP00000453729
ETTYLKPTFCDNCAGFLWGVIKQGYRCKDIRILLLMLRFTDKGYIKSVSSGLHQVRRMLASLGMLSVLAPEDRTDMCDKKALHEFGCETHWGREKSERLLDPGCLVHRLRDELSQTMQRSGCV

SEQ ID NO: 71740 - protein, 96 aa, Homo sapiens
  Payload ID: 14192
  Gene Symbol: RASGRP1
  Gene Name: RAS guanyl releasing protein 1 (calcium and DAG-regulated)
  ENSP ID: ENSP00000453905
MMVSLGHLAKGASLDDLIDSCIQSFDADGNLCRSNQLLQVMLTMHRIVISSAELLQKVITLYKDALAKNSPGLCLKICYFVRYWITEFWVMFKMDA

SEQ ID NO: 71741 - protein, 57 aa, Homo sapiens
  Payload ID: 14192
  Gene Symbol: RASGRP1
  Gene Name: RAS guanyl releasing protein 1 (calcium and DAG-regulated)
  ENSP ID: ENSP00000454005
MMVSLGHLAKGASLDDLIDSCIQSFDADGNLCRSNQLLQVMLTMHRIVISSAELLQK

SEQ ID NO: 71742 - protein, 217 aa, Homo sapiens
  Payload ID: 14192
  Gene Symbol: RASGRP1
  Gene Name: RAS guanyl releasing protein 1 (calcium and DAG-regulated)
  ENSP ID: ENSP00000454053
QNFNTLMAVIGGLCHSSISRLKETSSHVPHEINKVLGEMTELLSSSRNYDNYRRAYGECTDFKIPILGVHLKDLISLYEAMPDYLEDGKVNVHKLLALYNHISELVQLQEVAPPLEANKDLVHLLTLSLDLYYTEDEIYELSYAREPRNHRAPSVFKNYDHDQDGYISQEEFEKIAASFPFSFCVMDKDRAHGSNHEVAHTILPLRIKRKGRPHQQG

SEQ ID NO: 71743 - protein, 546 aa, Homo sapiens
  Payload ID: 14192
  Gene Symbol: RASGRP1
  Gene Name: RAS guanyl releasing protein 1 (calcium and DAG-regulated)
  Uniprot ID: O95267
  ENSP ID: ENSP00000454164
MGTLGKAREAPRKPSHGCRAASKARLEAKPANSPFPSHPSLAHITQFRMMVSLGHLAKGASLDDLIDSCIQSFDADGNLCRSNQLLQVMLTMHRIVISSAELLQKVITLYKDALAKNSPGLCLKICYFVRYWITEFWVMFKMDASLTDTMEEFQELVKAKGEELHCRLIDTTQINARDWSRKLTQRIKSNTSKKRKVSLLFDHLEPEELSEHLTYLEFKSFRRISFSDYQNYLVNSCVKENPTMERSIALCNGISQWVQLMVLSRPTPQLRAEVFIKFIQVAQKLHQLQNFNTLMAVIGGLCHSSISRLKETSSHVPHEINKVLGEMTELLSSSRNYDNYRRAYGECTDFKIPILGVHLKDLISLYEAMPDYLEDGKVNVHKLLALYNHISELVQLQEVAPPLEANKDLVHLLTLSLDLYYTEDEIYELSYAREPRNHRAPSVFKNYDHDQDGYISQEEFEKIAASFPFSFCVMDKDREGLISRDEITAYFMRASSIYSKLGLGFPHNFQETTYLKPTFCDNCAGFLWGVIKQGYRCKGNKYSESR

SEQ ID NO: 71744 - protein, 609 aa, Homo sapiens
  Payload ID: 14193
  Gene Symbol: RASGRP2
  Gene Name: RAS guanyl releasing protein 2 (calcium and DAG-regulated)
  Uniprot ID: Q7LDG7
  ENSP ID: ENSP00000338864
MAGTLDLDKGCTVEELLRGCIEAFDDSGKVRDPQLVRMFLMMHPWYIPSSQLAAKLLHIYQQSRKDNSNSLQVKTCHLVRYWISAFPAEFDLNPELAEQIKELKALLDQEGNRRHSSLIDIDSVPTYKWKRQVTQRNPVGQKKRKMSLLFDHLEPMELAEHLTYLEYRSFCKILFQDYHSFVTHGCTVDNPVLERFISLFNSVSQWVQLMILSKPTAPQRALVITHFVHVAEKLLQLQNFNTLMAVVGGLSHSSISRLKETHSHVSPETIKLWEGLTELVTATGNYGNYRRRLAACVGFRFPILGVHLKDLVALQLALPDWLDPARTRLNGAKMKQLFSILEELAMVTSLRPPVQANPDLLSLLTVSLDQYQTEDELYQLSLQREPRSKSSPTSPTSCTPPPRPPVLEEWTSAAKPKLDQALVVEHIEKMVESVFRNFDVDGDGHISQEEFQIIRGNFPYLSAFGDLDQNQDGCISREEMVSYFLRSSSVLGGRMGFVHNFQESNSLRPVACRHCKALILGIYKQGLKCRACGVNCHKQCKDRLSVECRRRAQSVSLEGSAPSPSPMHSHHHRAFSFSLPRPGRRGSRPPEIREEEVQTVEDGVFDIHL

SEQ ID NO: 71745 - protein, 97 aa, Homo sapiens
  Payload ID: 14193
  Gene Symbol: RASGRP2
  Gene Name: RAS guanyl releasing protein 2 (calcium and DAG-regulated)
  ENSP ID: ENSP00000366705
MAGTLDLDKGCTVEELLRGCIEAFDDSGKVRDPQLVRMFLMMHPWYIPSSQLAAKLLHIYQQSRKDNSNSLQVKTCHLVRYWISAFPAEFDLNPELA

SEQ ID NO: 71746 - protein, 148 aa, Homo sapiens
  Payload ID: 14193
  Gene Symbol: RASGRP2
  Gene Name: RAS guanyl releasing protein 2 (calcium and DAG-regulated)
  ENSP ID: ENSP00000366706
MAGTLDLDKGCTVEELLRGCIEAFDDSGKVRDPQLVRMFLMMHPWYIPSSQLAAKLLHIYQQSRKDNSNSLQVKTCHLVRYWISAFPAEFDLNPELAEQIKELKALLDQEGNRRHSSLIDIDSVCVGGAQRAGGALSILYHLCLINVC

SEQ ID NO: 71747 - protein, 148 aa, Homo sapiens; identical to SEQ ID NO: 71746
  Payload ID: 14193
  Gene Symbol: RASGRP2
  Gene Name: RAS guanyl releasing protein 2 (calcium and DAG-regulated)
  ENSP ID: ENSP00000366707

SEQ ID NO: 71748 - protein, 148 aa, Homo sapiens; identical to SEQ ID NO: 71746
  Payload ID: 14193
  Gene Symbol: RASGRP2
  Gene Name: RAS guanyl releasing protein 2 (calcium and DAG-regulated)
  ENSP ID: ENSP00000366709

SEQ ID NO: 71749 - protein, 610 aa, Homo sapiens
  Payload ID: 14193
  Gene Symbol: RASGRP2
  Gene Name: RAS guanyl releasing protein 2 (calcium and DAG-regulated)
  Uniprot ID: Q7LDG7
  ENSP ID: ENSP00000366714
MAGTLDLDKGCTVEELLRGCIEAFDDSGKVRDPQLVRMFLMMHPWYIPSSQLAAKLLHIYQQSRKDNSNSLQVKTCHLVRYWISAFPAEFDLNPELAEQIKELKALLDQEGNRRHSSLIDIDSVPTYKWKRQVTQRNPVGQKKRKMSLLFDHLEPMELAEHLTYLEYRSFCKILFQDYHSFVTHGCTVDNPVLERFISLFNSVSQWVQLMILSKPTAPQRALVITHFVHVAEKLLQLQNFNTLMAVVGGLSHSSISRLKETHSHVSPETIKLWEGLTELVTATGNYGNYRRRLAACVGFRFPILGVHLKDLVALQLALPDWLDPARTRLNGAKMKQLFSILEELAMVTSLRPPVQANPDLLSLLTVSLDQYQTEDELYQLSLQREPRSKSSPTSPTSCTPPPRPPVLEEWTSAAKPKLDQALVVEHIEKMVESVFRNFDVDGDGHISQEEFQIIRGNFPYLSAFGDLDQNQDGCISREEMVSYFLRSSSVLGGRMGFVHNFQESNSLRPVACRHCKALILGIYKQGLKCRACGVNCHKQCKDRLSVECRRRAQSVSLEGSAPSPSPMHSHHHRAFSFSLPRPGRRGSRPPAEIREEEVQTVEDGVFDIHL

SEQ ID NO: 71750 - protein, 609 aa, Homo sapiens; identical to SEQ ID NO: 71744
  Payload ID: 14193
  Gene Symbol: RASGRP2
  Gene Name: RAS guanyl releasing protein 2 (calcium and DAG-regulated)
  Uniprot ID: Q7LDG7
  ENSP ID: ENSP00000366717

SEQ ID NO: 71751 - protein, 63 aa, Homo sapiens
  Payload ID: 14193
  Gene Symbol: RASGRP2
  Gene Name: RAS guanyl releasing protein 2 (calcium and DAG-regulated)
  ENSP ID: ENSP00000377949
MAGTLDLDKGCTVEELLRGCIEAFAGGQAAPHLPTIPEGQLQFPAGENVPPGQVLDLRLPSGV

SEQ ID NO: 71752 - protein, 66 aa, Homo sapiens
  Payload ID: 14193
  Gene Symbol: RASGRP2
  Gene Name: RAS guanyl releasing protein 2 (calcium and DAG-regulated)
  ENSP ID: ENSP00000377950
MAGTLDLDKGCTVEELLRGCIEAFELSGLLNPLLHLPTIPEGQLQFPAGENVPPGQVLDLRLPSGV

SEQ ID NO: 71753 - protein, 148 aa, Homo sapiens; identical to SEQ ID NO: 71746
  Payload ID: 14193
  Gene Symbol: RASGRP2
  Gene Name: RAS guanyl releasing protein 2 (calcium and DAG-regulated)
  ENSP ID: ENSP00000377951

SEQ ID NO: 71754 - protein, 609 aa, Homo sapiens; identical to SEQ ID NO: 71744
  Payload ID: 14193
  Gene Symbol: RASGRP2
  Gene Name: RAS guanyl releasing protein 2 (calcium and DAG-regulated)
  Uniprot ID: Q7LDG7
  ENSP ID: ENSP00000377953

SEQ ID NO: 71755 - protein, 13 aa, Homo sapiens
  Payload ID: 14193
  Gene Symbol: RASGRP2
  Gene Name: RAS guanyl releasing protein 2 (calcium and DAG-regulated)
  ENSP ID: ENSP00000389068
MAGTLDLDKGCTV

SEQ ID NO: 71756 - protein, 126 aa, Homo sapiens
  Payload ID: 14193
  Gene Symbol: RASGRP2
  Gene Name: RAS guanyl releasing protein 2 (calcium and DAG-regulated)
  ENSP ID: ENSP00000396029
MAGTLDLDKGCTVEELLRGCIEAFDDSGKVRDPQLVRMFLMMHPWYIPSSQLAAKLLHIYQQSRKDNSNSLQVKTCHLVRYWISAFPAEFDLNPELAEQIKELKALLDQEGNRRHSSLIDIDSVRL

SEQ ID NO: 71757 - protein, 125 aa, Homo sapiens
  Payload ID: 14193
  Gene Symbol: RASGRP2
  Gene Name: RAS guanyl releasing protein 2 (calcium and DAG-regulated)
  ENSP ID: ENSP00000399028
MAGTLDLDKGCTVEELLRGCIEAFDDSGKVRDPQLVRMFLMMHPWYIPSSQLAAKLLHIYQQSRKDNSNSLQVKTCHLVRYWISAFPAEFDLNPELAEQIKELKALLDQEGNRRHSSLIDIDSVL

SEQ ID NO: 71758 - protein, 232 aa, Homo sapiens
  Payload ID: 14193
  Gene Symbol: RASGRP2
  Gene Name: RAS guanyl releasing protein 2 (calcium and DAG-regulated)
  ENSP ID: ENSP00000399114
MAGTLDLDKGCTVEELLRGCIEAFDDSGKVRDPQLVRMFLMMHPWYIPSSQLAAKLLHIYQQSRKDNSNSLQVKTCHLVRYWISAFPAEFDLNPELAEQIKELKALLDQEGNRRHSSLIDIDSVPTYKWKRQVTQRNPVGQKKRKMSLLFDHLEPMELAEHLTYLEYRSFCKILFQDYHSFVTHGCTVDNPVLERFISLFNSVSQWVQLMILSKPTAPQRALVITHFVHVAE

SEQ ID NO: 71759 - protein, 83 aa, Homo sapiens
  Payload ID: 14193
  Gene Symbol: RASGRP2
  Gene Name: RAS guanyl releasing protein 2 (calcium and DAG-regulated)
  ENSP ID: ENSP00000401314
MAGTLDLDKGCTVEELLRGCIEAFDDSGKVRDPQLVRMFLMMHPWYIPSSQLAAKLLHIYQQSRKDNSNSLQVKTCHLVRYWI

SEQ ID NO: 71760 - protein, 63 aa, Homo sapiens; identical to SEQ ID NO: 71751
  Payload ID: 14193
  Gene Symbol: RASGRP2
  Gene Name: RAS guanyl releasing protein 2 (calcium and DAG-regulated)
  ENSP ID: ENSP00000401510

SEQ ID NO: 71761 - protein, 689 aa, Homo sapiens
  Payload ID: 14194
  Gene Symbol: RASGRP3
  Gene Name: RAS guanyl releasing protein 3 (calcium and DAG-regulated)
  Uniprot ID: Q8IV61
  ENSP ID: ENSP00000383917
MGSSGLGKAATLDELLCTCIEMFDDNGELDNSYLPRIVLLMHRWYLSSTELAEKLLCMYRNATGESCNEFRLKICYFMRYWILKFPAEFNLDLGLIRMTEEFREVASQLGYEKHVSLIDISSIPSYDWMRRVTQRKKVSKKGKACLLFDHLEPIELAEHLTFLEHKSFRRISFTDYQSYVIHGCLENNPTLERSIALFNGISKWVQLMVLSKPTPQQRAEVITKFINVAKKLLQLKNFNTLMAVVGGLSHSSISRLKETHSHLSSEVTKNWNEMTELVSSNGNYCNYRKAFADCDGFKIPILGVHLKDLIAVHVIFPDWTEENKVNIVKMHQLSVTLSELVSLQNASHHLEPNMDLINLLTLSLDLYHTEDDIYKLSLVLEPRNSKSPTSPTTPNKPVVPLEWALGVMPKPDPTVINKHIRKLVESVFRNYDHDHDGYISQEDFESIAANFPFLDSFCVLDKDQDGLISKDEMMAYFLRAKSQLHCKMGPGFIHNFQEMTYLKPTFCEHCAGFLWGIIKQGYKCKDCGANCHKQCKDLLVLACRRFARAPSLSSGHGSLPGSPSLPPAQDEVFEFPGVTAGHRDLDSRAITLVTGSSRKISVRLQRATTSQATQTEPVWSEAGWGDSGSHTFPKMKSKFHDKAAKDKGFAKWENEKPRVHAGVDVVDRGTEFELDQDEGEETRQDGEDG

SEQ ID NO: 71762 - protein, 690 aa, Homo sapiens
  Payload ID: 14194
  Gene Symbol: RASGRP3
  Gene Name: RAS guanyl releasing protein 3 (calcium and DAG-regulated)
  Uniprot ID: Q8IV61
  ENSP ID: ENSP00000384192
MGSSGLGKAATLDELLCTCIEMFDDNGELDNSYLPRIVLLMHRWYLSSTELAEKLLCMYRNATGESCNEFRLKICYFMRYWILKFPAEFNLDLGLIRMTEEFREVASQLGYEKHVSLIDISSIPSYDWMRRVTQRKKVSKKGKACLLFDHLEPIELAEHLTFLEHKSFRRISFTDYQSYVIHGCLENNPTLERSIALFNGISKWVQLMVLSKPTPQQRAEVITKFINVAKKLLQLKNFNTLMAVVGGLSHSSISRLKETHSHLSSEVTKNWNEMTELVSSNGNYCNYRKAFADCDGFKIPILGVHLKDLIAVHVIFPDWTEENKVNIVKMHQLSVTLSELVSLQNASHHLEPNMDLINLLTLSLDLYHTEDDIYKLSLVLEPRNSKSQPTSPTTPNKPVVPLEWALGVMPKPDPTVINKHIRKLVESVFRNYDHDHDGYISQEDFESIAANFPFLDSFCVLDKDQDGLISKDEMMAYFLRAKSQLHCKMGPGFIHNFQEMTYLKPTFCEHCAGFLWGIIKQGYKCKDCGANCHKQCKDLLVLACRRFARAPSLSSGHGSLPGSPSLPPAQDEVFEFPGVTAGHRDLDSRAITLVTGSSRKISVRLQRATTSQATQTEPVWSEAGWGDSGSHTFPKMKSKFHDKAAKDKGFAKWENEKPRVHAGVDVVDRGTEFELDQDEGEETRQDGEDG

SEQ ID NO: 71763 - protein, 690 aa, Homo sapiens; identical to SEQ ID NO: 71762
  Payload ID: 14194
  Gene Symbol: RASGRP3
  Gene Name: RAS guanyl releasing protein 3 (calcium and DAG-regulated)
  Uniprot ID: Q8IV61
  ENSP ID: ENSP00000385886

SEQ ID NO: 71764 - protein, 113 aa, Homo sapiens
  Payload ID: 14194
  Gene Symbol: RASGRP3
  Gene Name: RAS guanyl releasing protein 3 (calcium and DAG-regulated)
  ENSP ID: ENSP00000388139
MGSSGLGKAATLDELLCTCIEMFDDNGELDNSYLPRIVLLMHRWYLSSTELAEKLLCMYRNATGESCNEFRLKICYFMRYWILKFPAEFNLDLGLIRMTEEFREVASQLGYEK

SEQ ID NO: 71765 - protein, 172 aa, Homo sapiens
  Payload ID: 14194
  Gene Symbol: RASGRP3
  Gene Name: RAS guanyl releasing protein 3 (calcium and DAG-regulated)
  ENSP ID: ENSP00000393866
MGSSGLGKAATLDELLCTCIEMFDDNGELDNSYLPRIVLLMHRWYLSSTELAEKLLCMYRNATGESCNEFRLKICYFMRYWILKFPAEFNLDLGLIRMTEEFREVASQLGYEKHVSLIDISSIPSYDWMRRVTQRKKVSKKGKACLLFDHLEPIELAEHLTFLEHKSFRRIS

SEQ ID NO: 71766 - protein, 112 aa, Homo sapiens
  Payload ID: 14194
  Gene Symbol: RASGRP3
  Gene Name: RAS guanyl releasing protein 3 (calcium and DAG-regulated)
  ENSP ID: ENSP00000400602
MGSSGLGKAATLDELLCTCIEMFDDNGELDNSYLPRIVLLMHRWYLSSTELAEKLLCMYRNATGESCNEFRLKICYFMRYWILKFPAEFNLDLGLIRMTEEFREVASQLGYE

SEQ ID NO: 71767 - protein, 34 aa, Homo sapiens
  Payload ID: 14194
  Gene Symbol: RASGRP3
  Gene Name: RAS guanyl releasing protein 3 (calcium and DAG-regulated)
  ENSP ID: ENSP00000401974
MGSSGLGKAATLDELLCTCIEMFDDNGELDNSYL

SEQ ID NO: 71768 - protein, 77 aa, Homo sapiens
  Payload ID: 14194
  Gene Symbol: RASGRP3
  Gene Name: RAS guanyl releasing protein 3 (calcium and DAG-regulated)
  ENSP ID: ENSP00000405648
MGSSGLGKAATLDELLCTCIEMFDDNGELDNSYLPRIVLLMHRWYLSSTELAEKLLCMYRNATGESCNEFRLKICYF

SEQ ID NO: 71769 - protein, 138 aa, Homo sapiens
  Payload ID: 14194
  Gene Symbol: RASGRP3
  Gene Name: RAS guanyl releasing protein 3 (calcium and DAG-regulated)
  ENSP ID: ENSP00000409593
ADCDGFKIPILGVHLKDLIAVHVIFPDWTEENKVNIVKMHQLSVTLSELVSLQNASHHLEPNMDLINLLTLSLDLYHTEDDIYKLSLVLEPRNSKSQPTSPTTPNKPVVPLEWALGVMPKPDPTVINKHIRKLVEVSG

SEQ ID NO: 71770 - protein, 576 aa, Homo sapiens
  Payload ID: 14195
  Gene Symbol: RASGRP4
  Gene Name: RAS guanyl releasing protein 4
  Uniprot ID: Q8TDF6
  ENSP ID: ENSP00000293062
MNRKDSKRKSHQECTGKIGGRGRPRQVRRHKTCPSPREISKVMASMNLGLLSEGGCSEDELLEKCIQSFDSAGSLCHEDHMLNMVLAMHSWVLPSADLAARLLTSYQKATGDTQELRRLQICHLVRYWLMRHPEVMHQDPQLEEVIGRFWATVAREGNSAQRRLGDSSDLLSPGGPGPPLPMSSPGLGKKRKVSLLFDHLETGELAQHLTYLEFRSFQAITALLELTELLASHNNYARYRRTWAGCAGFRLPVLGVHLKDLVSLHEAQPDRLPDGRLHLPKLNNLYLRLQELVALQGQHPPCSANEDLLHLLTLSLDLFYTEDEIYELSYAREPRCPKSLPPSPFNAPLVVEWAPGVTPKPDRVTLGRHVEQLVESVFKNYDPEGRGTISQEDFERLSGNFPFACHGLHPPPRQGRGSFSREELTGYLLRASAICSKLGLAFLHTFHEVTFRKPTFCDSCSGFLWGVTKQGYRCRECGLCCHKHCRDQVKVECKKRPGAKGDAGPPGAPVPSTPAPHASCGSEENHSYTLSLEPETGCQLRHAWTQTESPHPSWETDTVPCPVMDPPSTASSKLDS

SEQ ID NO: 71771 - protein, 581 aa, Homo sapiens
  Payload ID: 14195
  Gene Symbol: RASGRP4
  Gene Name: RAS guanyl releasing protein 4
  Uniprot ID: Q8TDF6
  ENSP ID: ENSP00000411878
MNRKDSKRKSHQECTGKIGGRGRPRQVRRHKTCPSPREISKVMASMNLGLLSEGGCSEDELLEKCIQSFDSAGSLCHEDHMLNMVLAMHSWVLPSADLAARLLTSYQKATGDTQELRRLQICHLVRYWLMRHPEVMHQDPQLEEVIGRFWATVAREGNSAQRRLGDSSDLLSPGGPGPPLPMSSPGLGKKRKVSLLFDHLETGELAQHLTYLEFRSFQAITPQDLRSYVLQGSVRGCPALEGSVGLSNSVSRWVQVMVLSRPGPLQRAQVLDKFIHVAQRLHQLQNFNTLMAVTGGLCHSAISRLKDSHAHLSPDSTKLSLDLFYTEDEIYELSYAREPRCPKSLPPSPFNAPLVVEWAPGVTPKPDRVTLGRHVEQLVESVFKNYDPEGRGTISQEDFERLSGNFPFACHGLHPPPRQGRGSFSREELTGYLLRASAICSKLGLAFLHTFHEVTFRKPTFCDSCSGFLWGVTKQGYRCRECGLCCHKHCRDQVKVECKKRPGAKGDAGPPGAPVPSTPAPHASCGSEENHSYTLSLEPETGCQLRHAWTQTESPHPSWETDTVPCPVMDPPSTASSKLDS

SEQ ID NO: 71772 - protein, 639 aa, Homo sapiens
  Payload ID: 14195
  Gene Symbol: RASGRP4
  Gene Name: RAS guanyl releasing protein 4
  Uniprot ID: Q8TDF6
  ENSP ID: ENSP00000416463
MNRKDSKRKSHQECTGKIGGRGRPRQVRRHKTCPSPREISKVMASMNLGLLSEGGCSEDELLEKCIQSFDSAGSLCHEDHMLNMVLAMHSWVLPSADLAARLLTSYQKATGDTQELRRLQICHLVRYWLMRHPEVMHQDPQLEEVIGRFWATVAREGNSAQRRLGDSSDLLSPGGPGPPLPMSSPGLGKKRKVSLLFDHLETGELAQHLTYLEFRSFQAITVMVLSRPGPLQRAQVLDKFIHVAQRLHQLQNFNTLMAVTGGLCHSAISRLKDSHAHLSPDSTKALLELTELLASHNNYARYRRTWAGCAGFRLPVLGVHLKDLVSLHEAQPDRLPDGRLHLPKLNNLYLRLQELVALQGQHPPCSANEDLLHLLTLSLDLFYTEDEIYELSYAREPRCPKSLPPSPFNAPLVVEWAPGVTPKPDRVTLGRHVEQLVESVFKNYDPEGRGTISQEDFERLSGNFPFACHGLHPPPRQGRGSFSREELTGYLLRASAICSKLGLAFLHTFHEVTFRKPTFCDSCSGFLWGVTKQGYRCRECGLCCHKHCRDQVKVECKKRPGAKGDAGPPGAPVPSTPAPHASCGSEENHSYTLSLEPETGCQLRHAWTQTESPHPSWETDTVPCPVMDPPSTASSKLDS

SEQ ID NO: 71773 - protein, 484 aa, Homo sapiens
  Payload ID: 14195
  Gene Symbol: RASGRP4
  Gene Name: RAS guanyl releasing protein 4
  Uniprot ID: Q8TDF6
  ENSP ID: ENSP00000445966
MNRKDSKRKSHQECTGKIGGRGRPRQVRRHKTCPSPREISKVMASMNLGLLSEGGCSEDELLEKCIQSFDSAGSLCHEDHMLNMVLAMHSWVLPSADLAARLLTSYQKATGDTQELRRLQICHLVRYWLMRHPEVMHQDPQLEEVIGRFWATVAREGNSAQRRLGDSSDLLSPGGPGPPLPMSSPGLGKKRKVSLLFDHLETGELAQHLTYLEFRSFQAITLSLDLFYTEDEIYELSYAREPRCPKSLPPSPFNAPLVVEWAPGVTPKPDRVTLGRHVEQLVESVFKNYDPEGRGTISQEDFERLSGNFPFACHGLHPPPRQGRGSFSREELTGYLLRASAICSKLGLAFLHTFHEVTFRKPTFCDSCSGFLWGVTKQGYRCRECGLCCHKHCRDQVKVECKKRPGAKGDAGPPGAPVPSTPAPHASCGSEENHSYTLSLEPETGCQLRHAWTQTESPHPSWETDTVPCPVMDPPSTASSKLDS

SEQ ID NO: 71774 - protein, 673 aa, Homo sapiens
  Payload ID: 14195
  Gene Symbol: RASGRP4
  Gene Name: RAS guanyl releasing protein 4
  Uniprot ID: Q8TDF6
  ENSP ID: ENSP00000465742
MNRKDSKRKSHQECTGKIGGRGRPRQVRRHKTCPSPREISKVMASMNLGLLSEGGCSEDELLEKCIQSFDSAGSLCHEDHMLNMVLAMHSWVLPSADLAARLLTSYQKATGDTQELRRLQICHLVRYWLMRHPEVMHQDPQLEEVIGRFWATVAREGNSAQRRLGDSSDLLSPGGPGPPLPMSSPGLGKKRKVSLLFDHLETGELAQHLTYLEFRSFQAITPQDLRSYVLQGSVRGCPALEGSVGLSNSVSRWVQVMVLSRPGPLQRAQVLDKFIHVAQRLHQLQNFNTLMAVTGGLCHSAISRLKDSHAHLSPDSTKALLELTELLASHNNYARYRRTWAGCAGFRLPVLGVHLKDLVSLHEAQPDRLPDGRLHLPKLNNLYLRLQELVALQGQHPPCSANEDLLHLLTLSLDLFYTEDEIYELSYAREPRCPKSLPPSPFNAPLVVEWAPGVTPKPDRVTLGRHVEQLVESVFKNYDPEGRGTISQEDFERLSGNFPFACHGLHPPPRQGRGSFSREELTGYLLRASAICSKLGLAFLHTFHEVTFRKPTFCDSCSGFLWGVTKQGYRCRECGLCCHKHCRDQVKVECKKRPGAKGDAGPPGAPVPSTPAPHASCGSEENHSYTLSLEPETGCQLRHAWTQTESPHPSWETDTVPCPVMDPPSTASSKLDS

SEQ ID NO: 71775 - protein, 673 aa, Homo sapiens; identical to SEQ ID NO: 71774
  Payload ID: 14195
  Gene Symbol: RASGRP4
  Gene Name: RAS guanyl releasing protein 4
  Uniprot ID: Q8TDF6
  ENSP ID: ENSP00000465772

SEQ ID NO: 71776 - protein, 659 aa, Homo sapiens
  Payload ID: 14195
  Gene Symbol: RASGRP4
  Gene Name: RAS guanyl releasing protein 4
  Uniprot ID: Q8TDF6
  ENSP ID: ENSP00000466928
MNRKDSKRKSHQECTGKIGGRGRPRQVRRHKTCPSPREISKVMASMNLGLLSEGGCSEDELLEKCIQSFDSAGSLCHEDHMLNMVLAMHSWVLPSADLAARLLTSYQKATGDTQELRRLQICHLVRYWLMRHPEVMHQDPQLEEVIGRFWATVAREGNSAQRRLGDSSDLPGLGKKRKVSLLFDHLETGELAQHLTYLEFRSFQAITPQDLRSYVLQGSVRGCPALEGSVGLSNSVSRWVQVMVLSRPGPLQRAQVLDKFIHVAQRLHQLQNFNTLMAVTGGLCHSAISRLKDSHAHLSPDSTKALLELTELLASHNNYARYRRTWAGCAGFRLPVLGVHLKDLVSLHEAQPDRLPDGRLHLPKLNNLYLRLQELVALQGQHPPCSANEDLLHLLTLSLDLFYTEDEIYELSYAREPRCPKSLPPSPFNAPLVVEWAPGVTPKPDRVTLGRHVEQLVESVFKNYDPEGRGTISQEDFERLSGNFPFACHGLHPPPRQGRGSFSREELTGYLLRASAICSKLGLAFLHTFHEVTFRKPTFCDSCSGFLWGVTKQGYRCRECGLCCHKHCRDQVKVECKKRPGAKGDAGPPGAPVPSTPAPHASCGSEENHSYTLSLEPETGCQLRHAWTQTESPHPSWETDTVPCPVMDPPSTASSKLDS

SEQ ID NO: 71777 - protein, 659 aa, Homo sapiens; identical to SEQ ID NO: 71776
  Payload ID: 14195
  Gene Symbol: RASGRP4
  Gene Name: RAS guanyl releasing protein 4
  Uniprot ID: Q8TDF6
  ENSP ID: ENSP00000467604

SEQ ID NO: 71778 - protein, 604 aa, Homo sapiens
  Payload ID: 14195
  Gene Symbol: RASGRP4
  Gene Name: RAS guanyl releasing protein 4
  Uniprot ID: Q8TDF6
  ENSP ID: ENSP00000468483
MNRKDSKRKSHQECTGKIGGRGRPRQVRRHKTCPSPREISKVMASMNLGLLSEGGCSEDELLEKCIQSFDSAGSLCHEDHMLNMVLAMHSWVLPSADLAARLLTSYQKATGDTQELRRLQICHLVRYWLMRHPEVMHQDPQLEEVIGRFWATVAREGNSAQRRLGDSSDLLSPGGPGPPLPMSSPGLGKKRKVSLLFDHLETGELAQHLTYLEFRSFQAITPQDLRSYVLQGSVRGCPALEGSVGLSNSVSRWVQVMVLSRPGPLQRAQVLDKFIHVAQRLHQLQNFNTLMAVTGGLCHSAISRLKDSHAHLSPDSTKELVALQGQHPPCSANEDLLHLLTLSLDLFYTEDEIYELSYAREPRCPKSLPPSPFNAPLVVEWAPGVTPKPDRVTLGRHVEQLVESVFKNYDPEGRGTISQEDFERLSGNFPFACHGLHPPPRQGRGSFSREELTGYLLRASAICSKLGLAFLHTFHEVTFRKPTFCDSCSGFLWGVTKQGYRCRECGLCCHKHCRDQVKVECKKRPGAKGDAGPPGAPVPSTPAPHASCGSEENHSYTLSLEPETGCQLRHAWTQTESPHPSWETDTVPCPVMDPPSTASSKLDS

SEQ ID NO: 71779 - protein, 581 aa, Homo sapiens; identical to SEQ ID NO: 71771
  Payload ID: 14195
  Gene Symbol: RASGRP4
  Gene Name: RAS guanyl releasing protein 4
  Uniprot ID: Q8TDF6
  ENSP ID: ENSP00000479078

SEQ ID NO: 71780 - protein, 673 aa, Homo sapiens; identical to SEQ ID NO: 71774
  Payload ID: 14195
  Gene Symbol: RASGRP4
  Gene Name: RAS guanyl releasing protein 4
  Uniprot ID: Q8TDF6
  ENSP ID: ENSP00000479844

SEQ ID NO: 71781 - protein, 576 aa, Homo sapiens; identical to SEQ ID NO: 71770
  Payload ID: 14195
  Gene Symbol: RASGRP4
  Gene Name: RAS guanyl releasing protein 4
  Uniprot ID: Q8TDF6
  ENSP ID: ENSP00000479888

SEQ ID NO: 71782 - protein, 617 aa, Homo sapiens
  Payload ID: 14195
  Gene Symbol: RASGRP4
  Gene Name: RAS guanyl releasing protein 4
  ENSP ID: ENSP00000481053
MNRKDSKRKSHQECTGKIGGRGRPRQVRRHKTCPSPREISKVMASMNLGLLSEGGCSEDELLEKCIQSFDSAGSLCHEDHMLNMVLAMHSWVLPSADLAARLLTSYQKATGDTQELRRLQICHLVRYWLMRHPEVMHQDPQLEEVIGRFWATVAREGNSAQRRLGDSSDLLSPGGPGPPLPMSSPGLGKKRKVSLLFDHLETGELAQHLTYLEFRSFQAITPQDLRSYVLQGSVRGCPALEGSVGLSNSVSRWVQVMVLSRPGPLQRAQVLDKFIHVAQRLHQLQNFNTLMAVTGGLCHSAISRLKDSHAHLSPDSTKALLELTELLASHNNYARYRRTWAGCAGFRLPVLGVHLKDLVSLHEAQPDRLPDGRLHLPKLNNLYLRLQELVALQGQHPPCSANEDLLHLLTLSLDLFYTEDEIYELSYAREPRCPKSLPPSPFNAPLVVEWAPGVTPKPDRVTLGRHVEQLVESVFKNYDPEGRGTISQEDFERLSGNFPFACHGLHPPPRQGRGSFSREELTGYLLRASAICSKLGLAFLHTFHEVTFRKPTFCDSCSGFLWGVTKQGYRCRGEWGVSEWEGSLGPQAGRMDDTDRTPAAAFPQSAGCVATNTAETR

SEQ ID NO: 71783 - protein, 484 aa, Homo sapiens; identical to SEQ ID NO: 71773
  Payload ID: 14195
  Gene Symbol: RASGRP4
  Gene Name: RAS guanyl releasing protein 4
  Uniprot ID: Q8TDF6
  ENSP ID: ENSP00000484345

SEQ ID NO: 71784 - protein, 184 aa, Homo sapiens
  Payload ID: 14196
  Gene Symbol: RHEB
  Gene Name: Ras homolog enriched in brain
  Uniprot ID: Q15382
  ENSP ID: ENSP00000262187
MPQSKSRKIAILGYRSVGKSSLTIQFVEGQFVDSYDPTIENTFTKLITVNGQEYHLQLVDTAGQDEYSIFPQTYSIDINGYILVYSVTSIKSFEVIKVIHGKLLDMVGKVQIPIMLVGNKKDLHMERVISYEEGKALAESWNAAFLESSAKENQTAVDVFRRIILEAEKMDGAASQGKSSCSVM

SEQ ID NO: 71785 - protein, 19 aa, Homo sapiens
  Payload ID: 14196
  Gene Symbol: RHEB
  Gene Name: Ras homolog enriched in brain
  ENSP ID: ENSP00000417212
MVGKVQIPIMLVGNKKDLH

SEQ ID NO: 71786 - protein, 47 aa, Homo sapiens
  Payload ID: 14196
  Gene Symbol: RHEB
  Gene Name: Ras homolog enriched in brain
  ENSP ID: ENSP00000417802
MPQSKSRKIAILGYRSVGSSSQDLRTCCEWCYSSAGRTGASPWAHLI

SEQ ID NO: 71787 - protein, 79 aa, Homo sapiens
  Payload ID: 14196
  Gene Symbol: RHEB
  Gene Name: Ras homolog enriched in brain
  ENSP ID: ENSP00000418161
MVGKVQIPIMLVGNKKDLHMERVISYEEGKALAESWNAAFLESSAKENQTAVDVFRRIILEAEKMDGAASQGKSSCSVM

SEQ ID NO: 71788 - protein, 79 aa, Homo sapiens; identical to SEQ ID NO: 71787
  Payload ID: 14196
  Gene Symbol: RHEB
  Gene Name: Ras homolog enriched in brain
  ENSP ID: ENSP00000420726

SEQ ID NO: 71789 - protein, 183 aa, Homo sapiens
  Payload ID: 14197
  Gene Symbol: RHEBL1
  Gene Name: Ras homolog enriched in brain like 1
  Uniprot ID: Q8TAI7
  ENSP ID: ENSP00000301068
MPLVRYRKVVILGYRCVGKTSLAHQFVEGEFSEGYDPTVENTYSKIVTLGKDEFHLHLVDTAGQDEYSILPYSFIIGVHGYVLVYSVTSLHSFQVIESLYQKLHEGHGKTRVPVVLVGNKADLSPEREVQAVEGKKLAESWGATFMESSARENQLTQGIFTKVIQEIARVENSYGQERRCHLM

SEQ ID NO: 71790 - protein, 42 aa, Homo sapiens
  Payload ID: 14197
  Gene Symbol: RHEBL1
  Gene Name: Ras homolog enriched in brain like 1
  ENSP ID: ENSP00000409818
MPLVRYRKVVILGYRCVGKTSLAHQFVEGEFSEGYDPTVENR

SEQ ID NO: 71791 - protein, 68 aa, Homo sapiens
  Payload ID: 14197
  Gene Symbol: RHEBL1
  Gene Name: Ras homolog enriched in brain like 1
  Uniprot ID: Q8TAI7
  ENSP ID: ENSP00000446726
MPLVRYRKVVILGYRCVVRKDRGCECGWMIWIQLSHCSPQGRHLWHINLWKASSRKATILQWRILTAR

SEQ ID NO: 71792 - protein, 109 aa, Homo sapiens
  Payload ID: 14197
  Gene Symbol: RHEBL1
  Gene Name: Ras homolog enriched in brain like 1
  ENSP ID: ENSP00000447428
MPLVRYRKVVILGYRCVGKTSLAHQFVEGEFSEGYDPTVENTYSKIVTLGKDEFHLHLVDTAGQVPVGDEYSILPYSFIIGVHGYVLVYSVTSLHSFQVIESLYQKLHE

SEQ ID NO: 71793 - protein, 90 aa, Homo sapiens
  Payload ID: 14198
  Gene Symbol: RHOA
  Gene Name: ras homolog family member A
  ENSP ID: ENSP00000394483
MAAIRKKLVIVGDGACGKTCLLIVFSKDQFPEVYVPTVFENYVADIEVDGKQKTSQKSGPQKSSISVPTCPSSWLGIRRIFGMMSTQGGS

SEQ ID NO: 71794 - protein, 193 aa, Homo sapiens
  Payload ID: 14198
  Gene Symbol: RHOA
  Gene Name: ras homolog family member A
  Uniprot ID: P61586
  ENSP ID: ENSP00000400175
MAAIRKKLVIVGDGACGKTCLLIVFSKDQFPEVYVPTVFENYVADIEVDGKQVELALWDTAGQEDYDRLRPLSYPDTDVILMCFSIDSPDSLENIPEKWTPEVKHFCPNVPIILVGNKKDLRNDEHTRRELAKMKQEPVKPEEGRDMANRIGAFGYMECSAKTKDGVREVFEMATRAALQARRGKKKSGCLVL

SEQ ID NO: 71795 - protein, 129 aa, Homo sapiens
  Payload ID: 14198
  Gene Symbol: RHOA
  Gene Name: ras homolog family member A
  ENSP ID: ENSP00000408402
MAAIRKKLVIVGDGACGKTCLLIVFSKDQFPEVYVPTVFENYVADIEVDGKQVELALWDTAGQEDYDRLRPLSYPDTDVILMCFSIDSPDSLENIPEKWTPEVKHFCPNVPIILVGNKKDLRNDEHTRR

SEQ ID NO: 71796 - protein, 187 aa, Homo sapiens
  Payload ID: 14198
  Gene Symbol: RHOA
  Gene Name: ras homolog family member A
  ENSP ID: ENSP00000413587
MAAIRKKLVIVGDGACGKTCLLIVFSKDQFPEVYVPTVFENYVADIEVDGKQVELALWDTAGQEDYDRLRPLSYPDTDVILMCFSIDSPDSLENIPEKWTPEVKHFCPNVPIILVGNKKDLRNDEHTRRELAKMKQEPHCVARLECCGTILAQLQPPPPRFKRFPCLSLLSSWGYRRPLPHPGAGET

SEQ ID NO: 71797 - protein, 196 aa, Homo sapiens
  Payload ID: 14199
  Gene Symbol: RHOB
  Gene Name: ras homolog family member B
  Uniprot ID: P62745
  ENSP ID: ENSP00000272233
MAAIRKKLVVVGDGACGKTCLLIVFSKDEFPEVYVPTVFENYVADIEVDGKQVELALWDTAGQEDYDRLRPLSYPDTDVILMCFSVDSPDSLENIPEKWVPEVKHFCPNVPIILVANKKDLRSDEHVRTELARMKQEPVRTDDGRAMAVRIQAYDYLECSAKTKEGVREVFETATRAALQKRYGSQNGCINCCKVL

SEQ ID NO: 71798 - protein, 193 aa, Homo sapiens
  Payload ID: 14200
  Gene Symbol: RHOC
  Gene Name: ras homolog family member C
  Uniprot ID: P08134
  ENSP ID: ENSP00000285735
MAAIRKKLVIVGDGACGKTCLLIVFSKDQFPEVYVPTVFENYIADIEVDGKQVELALWDTAGQEDYDRLRPLSYPDTDVILMCFSIDSPDSLENIPEKWTPEVKHFCPNVPIILVGNKKDLRQDEHTRRELAKMKQEPVRSEEGRDMANRISAFGYLECSAKTKEGVREVFEMATRAGLQVRKNKRRRGCPIL

SEQ ID NO: 71799 - protein, 193 aa, Homo sapiens; identical to SEQ ID NO: 71798
  Payload ID: 14200
  Gene Symbol: RHOC
  Gene Name: ras homolog family member C
  Uniprot ID: P08134
  ENSP ID: ENSP00000345236

SEQ ID NO: 71800 - protein, 193 aa, Homo sapiens; identical to SEQ ID NO: 71798
  Payload ID: 14200
  Gene Symbol: RHOC
  Gene Name: ras homolog family member C
  Uniprot ID: P08134
  ENSP ID: ENSP00000358646

SEQ ID NO: 71801 - protein, 193 aa, Homo sapiens; identical to SEQ ID NO: 71798
  Payload ID: 14200
  Gene Symbol: RHOC
  Gene Name: ras homolog family member C
  Uniprot ID: P08134
  ENSP ID: ENSP00000358647

SEQ ID NO: 71802 - protein, 199 aa, Homo sapiens
  Payload ID: 14200
  Gene Symbol: RHOC
  Gene Name: ras homolog family member C
  ENSP ID: ENSP00000358650
MAAIRKKLVIVGDGACGKTCLLIVFSKDQFPEVYVPTVFENYIADIEVDGKQVELALWDTAGQEDYDRLRPLSYPDTDVILMCFSIDSPDSLENIPEKWTPEVKHFCPNVPIILVGNKKDLRKAGTWRTGSVPLATLSAQPRPRRECGRCLRWPLGLASRSARTSVGGAVPFSEIPKAFPTCPLPSQGYRNYPPTTPAS

SEQ ID NO: 71803 - protein, 193 aa, Homo sapiens; identical to SEQ ID NO: 71798
  Payload ID: 14200
  Gene Symbol: RHOC
  Gene Name: ras homolog family member C
  Uniprot ID: P08134
  ENSP ID: ENSP00000358651

SEQ ID NO: 71804 - protein, 193 aa, Homo sapiens; identical to SEQ ID NO: 71798
  Payload ID: 14200
  Gene Symbol: RHOC
  Gene Name: ras homolog family member C
  Uniprot ID: P08134
  ENSP ID: ENSP00000358652

SEQ ID NO: 71805 - protein, 193 aa, Homo sapiens; identical to SEQ ID NO: 71798
  Payload ID: 14200
  Gene Symbol: RHOC
  Gene Name: ras homolog family member C
  Uniprot ID: P08134
  ENSP ID: ENSP00000358656

SEQ ID NO: 71806 - protein, 188 aa, Homo sapiens
  Payload ID: 14200
  Gene Symbol: RHOC
  Gene Name: ras homolog family member C
  ENSP ID: ENSP00000390823
MAAIRKKLVIVGDGACGKTCLLIVFSKDQFPEVYVPTVFENYIADIEVDGKQVELALWDTAGQEDYDRLRPLSYPDTDVILMCFSIDSPDSLENIPEKWTPEVKHFCPNVPIILVGNKKDLRQDEHTRRELAKMKQEPVRSEEGRDMANRISAFGYLECSAKTKEGVREVFEMATRAGLQVRKNKRRR

SEQ ID NO: 71807 - protein, 91 aa, Homo sapiens
  Payload ID: 14200
  Gene Symbol: RHOC
  Gene Name: ras homolog family member C
  ENSP ID: ENSP00000395791
MAAIRKKLVIVGDGACGKTCLLIVFSKDQFPEVYVPTVFENYIADIEVDGKQVELALWDTAGQEDYDRLRPLSYPDTDVILMCFSIDSPDS

SEQ ID NO: 71808 - protein, 127 aa, Homo sapiens
  Payload ID: 14200
  Gene Symbol: RHOC
  Gene Name: ras homolog family member C
  ENSP ID: ENSP00000399424
MAAIRKKLVIVGDGACGKTCLLIVFSKDQFPEVYVPTVFENYIADIEVDGKQVELALWDTAGQEDYDRLRPLSYPDTDVILMCFSIDSPDSLENIPEKWTPEVKHFCPNVPIILVGNKKDLRQDEHT

SEQ ID NO: 71809 - protein, 66 aa, Homo sapiens
  Payload ID: 14200
  Gene Symbol: RHOC
  Gene Name: ras homolog family member C
  ENSP ID: ENSP00000431392
MAAIRKKLVIVGDGACGKTCLLIVFSKDQFPEVYVPTVFENYIADIEVDGKQTGSVTWAESLCLWV

SEQ ID NO: 71810 - protein, 66 aa, Homo sapiens; identical to SEQ ID NO: 71809
  Payload ID: 14200
  Gene Symbol: RHOC
  Gene Name: ras homolog family member C
  ENSP ID: ENSP00000432209

SEQ ID NO: 71811 - protein, 66 aa, Homo sapiens; identical to SEQ ID NO: 71809
  Payload ID: 14200
  Gene Symbol: RHOC
  Gene Name: ras homolog family member C
  ENSP ID: ENSP00000434310

SEQ ID NO: 71812 - protein, 129 aa, Homo sapiens
  Payload ID: 14200
  Gene Symbol: RHOC
  Gene Name: ras homolog family member C
  ENSP ID: ENSP00000434877
MVSISGGDLPTGLDFISAPEPALSSCSLGTSAGWSPTMAAIRKKLVIVGDGACGKTCLLIVFSKDQFPEVYVPTVFENYIADIEVDGKQVELALWDTAGQEDYDRLRPLSYPDTDVILMCFSIDSPDSL

SEQ ID NO: 71813 - protein, 169 aa, Homo sapiens
  Payload ID: 14200
  Gene Symbol: RHOC
  Gene Name: ras homolog family member C
  ENSP ID: ENSP00000436240
MAAIRKKLVIVGDGACGKTCLLIVFSKDQFPEVYVPTVFENYIADIEVDGKQVELALWDTAGQEDYDRLRPLSYPDTDVILMCFSIDSPDSLENIPEKWTPEVKHFCPNVPIILVGNKKDLRQDEHTRRELAKMKQEPVRSEEGRDMANRISAFGYLECSAKTKEGVRE

SEQ ID NO: 71814 - protein, 210 aa, Homo sapiens
  Payload ID: 14201
  Gene Symbol: RHOD
  Gene Name: ras homolog family member D
  Uniprot ID: O00212
  ENSP ID: ENSP00000308576
MTAAQAAGEEAPPGVRSVKVVLVGDGGCGKTSLLMVFADGAFPESYTPTVFERYMVNLQVKGKPVHLHIWDTAGQDDYDRLRPLFYPDASVLLLCFDVTSPNSFDNIFNRWYPEVNHFCKKVPIIVVGCKTDLRKDKSLVNKLRRNGLEPVTYHRGQEMARSVGAVAYLECSARLHDNVHAVFQEAAEVALSSRGRNFWRRITQGFCVVT

SEQ ID NO: 71815 - protein, 144 aa, Homo sapiens
  Payload ID: 14201
  Gene Symbol: RHOD
  Gene Name: ras homolog family member D
  ENSP ID: ENSP00000432003
MTAAQAAGEEAPPGVRSVKVVLVGDGGCGKTSLLMVFADGAFPEWYPEVNHFCKKVPIIVVGCKTDLRKDKSLVNKLRRNGLEPVTYHRGQEMARSVGAVAYLECSARLHDNVHAVFQEAAEVALSSRGRNFWRRITQGFCVVT

SEQ ID NO: 71816 - protein, 211 aa, Homo sapiens
  Payload ID: 14202
  Gene Symbol: RHOF
  Gene Name: ras homolog family member F (in filopodia)
  Uniprot ID: Q9HBH0
  ENSP ID: ENSP00000267205
MDAPGALAQTAAPGPGRKELKIVIVGDGGCGKTSLLMVYSQGSFPEHYAPSVFEKYTASVTVGSKEVTLNLYDTAGQEDYDRLRPLSYQNTHLVLICYDVMNPTSYDNVLIKWFPEVTHFCRGIPMVLIGCKTDLRKDKEQLRKLRAAQLEPITYMQGLSACEQIRAALYLECSAKFRENVEDVFREAAKVALSALKKAQRQKKRRLCLLL

SEQ ID NO: 71817 - protein, 113 aa, Homo sapiens
  Payload ID: 14202
  Gene Symbol: RHOF
  Gene Name: ras homolog family member F (in filopodia)
  ENSP ID: ENSP00000440397
MDAPGALAQTAAPGPGRKELKIVIVGDGGCGKTSLLMVYSQGSFPEHYAPSVFEKYTASVTVGSKEVTLNLYDTAGQEDYDRLRPLSYQNTHLVLICYDVMNPTSYDNVLIKV

SEQ ID NO: 71818 - protein, 111 aa, Homo sapiens
  Payload ID: 14202
  Gene Symbol: RHOF
  Gene Name: ras homolog family member F (in filopodia)
  ENSP ID: ENSP00000476444
MNPTSYDNVLIKWFPEVTHFCRGIPMVLIGCKTDLRKDKEQLRKLRAAQLEPITYMQGLSACEQIRAALYLECSAKFRENVEDVFREAAKVALSALKKAQRQKKRRLCLLL

SEQ ID NO: 71819 - protein, 30 aa, Homo sapiens
  Payload ID: 14202
  Gene Symbol: RHOF
  Gene Name: ras homolog family member F (in filopodia)
  ENSP ID: ENSP00000476574
MNPTSYDNVLIKWFPEVTHFCRGIPMVLIG

SEQ ID NO: 71820 - protein, 75 aa, Homo sapiens
  Payload ID: 14202
  Gene Symbol: RHOF
  Gene Name: ras homolog family member F (in filopodia)
  ENSP ID: ENSP00000476987
MNPTSYDNVLIKWFPEVTHFCRGIPMVLIGCKTDLRKDKEQLRKLRAAQLEPITYMQGLSACEQIRAALYLECSA

SEQ ID NO: 71821 - protein, 170 aa, Homo sapiens
  Payload ID: 14202
  Gene Symbol: RHOF
  Gene Name: ras homolog family member F (in filopodia)
  Uniprot ID: Q9HBH0
  ENSP ID: ENSP00000477391
MDAPGALAQTAAPGPGRKELKIVIVGDGGCGKTSLLMVYSQGSFPEHYAPSVFEKYTASVTVGSKEVTLNLYDTAGQEDYDRLRPLSYQNTHLVLICYDVMNPTSYDNVLIKWFPEVTHFCRGIPMVLIGCKTDLRKDKEQLRKLRAAQLEPITYMQVGRGQDPGAQPWL

SEQ ID NO: 71822 - protein, 191 aa, Homo sapiens
  Payload ID: 14203
  Gene Symbol: RHOG
  Gene Name: ras homolog family member G
  Uniprot ID: P84095
  ENSP ID: ENSP00000339467
MQSIKCVVVGDGAVGKTCLLICYTTNAFPKEYIPTVFDNYSAQSAVDGRTVNLNLWDTAGQEEYDRLRTLSYPQTNVFVICFSIASPPSYENVRHKWHPEVCHHCPDVPILLVGTKKDLRAQPDTLRRLKEQGQAPITPQQGQALAKQIHAVRYLECSALQQDGVKEVFAEAVRAVLNPTPIKRGRSCILL

SEQ ID NO: 71823 - protein, 191 aa, Homo sapiens; identical to SEQ ID NO: 71822
  Payload ID: 14203
  Gene Symbol: RHOG
  Gene Name: ras homolog family member G
  Uniprot ID: P84095
  ENSP ID: ENSP00000380175

SEQ ID NO: 71824 - protein, 191 aa, Homo sapiens; identical to SEQ ID NO: 71822
  Payload ID: 14203
  Gene Symbol: RHOG
  Gene Name: ras homolog family member G
  Uniprot ID: P84095
  ENSP ID: ENSP00000380176

SEQ ID NO: 71825 - protein, 191 aa, Homo sapiens; identical to SEQ ID NO: 71822
  Payload ID: 14203
  Gene Symbol: RHOG
  Gene Name: ras homolog family member G
  Uniprot ID: P84095
  ENSP ID: ENSP00000436932

SEQ ID NO: 71826 - protein, 191 aa, Homo sapiens
  Payload ID: 14204
  Gene Symbol: RHOH
  Gene Name: ras homolog family member H
  Uniprot ID: Q15669
  ENSP ID: ENSP00000371219
MLSSIKCVLVGDSAVGKTSLLVRFTSETFPEAYKPTVYENTGVDVFMDGIQISLGLWDTAGNDAFRSIRPLSYQQADVVLMCYSVANHNSFLNLKNKWIGEIRSNLPCTPVLVVATQTDQREMGPHRASCVNAMEGKKLAQDVRAKGYLECSALSNRGVQQVFECAVRTAVNQARRRNRRRLFSINECKIF

SEQ ID NO: 71827 - protein, 6 aa, Homo sapiens
  Payload ID: 14204
  Gene Symbol: RHOH
  Gene Name: ras homolog family member H
  ENSP ID: ENSP00000420866
MLSSIK

SEQ ID NO: 71828 - protein, 16 aa, Homo sapiens
  Payload ID: 14204
  Gene Symbol: RHOH
  Gene Name: ras homolog family member H
  ENSP ID: ENSP00000422241
MLSSIKCVLVGDSAVG

SEQ ID NO: 71829 - protein, 109 aa, Homo sapiens
  Payload ID: 14204
  Gene Symbol: RHOH
  Gene Name: ras homolog family member H
  ENSP ID: ENSP00000423384
MLSSIKCVLVGDSAVGKTSLLVRFTSETFPEAYKPTVYENTGVDVFMDGIQISLGLWDTAGNDAFRSIRPLSYQQADVVLMCYSVANHNSFLNLKNKWIGEIRSNLPCT

SEQ ID NO: 71830 - protein, 191 aa, Homo sapiens; identical to SEQ ID NO: 71826
  Payload ID: 14204
  Gene Symbol: RHOH
  Gene Name: ras homolog family member H
  Uniprot ID: Q15669
  ENSP ID: ENSP00000425010

SEQ ID NO: 71831 - protein, 103 aa, Homo sapiens
  Payload ID: 14204
  Gene Symbol: RHOH
  Gene Name: ras homolog family member H
  ENSP ID: ENSP00000426439
MLSSIKCVLVGDSAVGKTSLLVRFTSETFPEAYKPTVYENTGVDVFMDGIQISLGLWDTAGNDAFRSIRPLSYQQADVVLMCYSVANHNSFLNLKNKWIGEIR

SEQ ID NO: 71832 - protein, 191 aa, Homo sapiens; identical to SEQ ID NO: 71826
  Payload ID: 14204
  Gene Symbol: RHOH
  Gene Name: ras homolog family member H
  Uniprot ID: Q15669
  ENSP ID: ENSP00000478248

SEQ ID NO: 71833 - protein, 191 aa, Homo sapiens; identical to SEQ ID NO: 71826
  Payload ID: 14204
  Gene Symbol: RHOH
  Gene Name: ras homolog family member H
  Uniprot ID: Q15669
  ENSP ID: ENSP00000480192

SEQ ID NO: 71834 - protein, 191 aa, Homo sapiens; identical to SEQ ID NO: 71826
  Payload ID: 14204
  Gene Symbol: RHOH
  Gene Name: ras homolog family member H
  Uniprot ID: Q15669
  ENSP ID: ENSP00000480379

SEQ ID NO: 71835 - protein, 191 aa, Homo sapiens; identical to SEQ ID NO: 71826
  Payload ID: 14204
  Gene Symbol: RHOH
  Gene Name: ras homolog family member H
  Uniprot ID: Q15669
  ENSP ID: ENSP00000480772

SEQ ID NO: 71836 - protein, 191 aa, Homo sapiens; identical to SEQ ID NO: 71826
  Payload ID: 14204
  Gene Symbol: RHOH
  Gene Name: ras homolog family member H
  Uniprot ID: Q15669
  ENSP ID: ENSP00000481566

SEQ ID NO: 71837 - protein, 191 aa, Homo sapiens; identical to SEQ ID NO: 71826
  Payload ID: 14204
  Gene Symbol: RHOH
  Gene Name: ras homolog family member H
  Uniprot ID: Q15669
  ENSP ID: ENSP00000481746

SEQ ID NO: 71838 - protein, 191 aa, Homo sapiens; identical to SEQ ID NO: 71826
  Payload ID: 14204
  Gene Symbol: RHOH
  Gene Name: ras homolog family member H
  Uniprot ID: Q15669
  ENSP ID: ENSP00000481836

SEQ ID NO: 71839 - protein, 191 aa, Homo sapiens; identical to SEQ ID NO: 71826
  Payload ID: 14204
  Gene Symbol: RHOH
  Gene Name: ras homolog family member H
  Uniprot ID: Q15669
  ENSP ID: ENSP00000482947

SEQ ID NO: 71840 - protein, 214 aa, Homo sapiens
  Payload ID: 14205
  Gene Symbol: RHOJ
  Gene Name: ras homolog family member J
  Uniprot ID: Q9H4E5
  ENSP ID: ENSP00000316729
MNCKEGTDSSCGCRGNDEKKMLKCVVVGDGAVGKTCLLMSYANDAFPEEYVPTVFDHYAVTVTVGGKQHLLGLYDTAGQEDYNQLRPLSYPNTDVFLICFSVVNPASYHNVQEEWVPELKDCMPHVPYVLIGTQIDLRDDPKTLARLLYMKEKPLTYEHGVKLAKAIGAQCYLECSALTQKGLKAVFDEAILTIFHPKKKKKRCSEGHSCCSII

SEQ ID NO: 71841 - protein, 178 aa, Homo sapiens
  Payload ID: 14205
  Gene Symbol: RHOJ
  Gene Name: ras homolog family member J
  ENSP ID: ENSP00000451643
MNCKEGTDSSCGCRGNDEKKMLKCVVVGDGAVGKTCLLMSYANDAFPEEYVPTVFDHYAVTVTVGGKQHLLGLYDTAGQEDYNQLRPLSYPNTDVFLICFSVVNPASYHNVQEEWVPELKDCMPHVPYVLIGTQIDLRDDPKTLARLLYMKEKPLTYEHGVKLAKAVQSDLNFILNVC

SEQ ID NO: 71842 - protein, 153 aa, Homo sapiens
  Payload ID: 14205
  Gene Symbol: RHOJ
  Gene Name: ras homolog family member J
  ENSP ID: ENSP00000451796
MNCKEGTDSSCGCRGNDEKKMLKCVVVGDGAVGKTCLLMSYANDAFPEEYVPTVFDHYAVTVTVGGKQHLLGLYDTAGQEDYNQLRPLSYPNTDVFLICFSVVWDLPPPHPGMRMAANLCGQAPAKKEGTTRKELPLHGGLPHHPLSPPNTAH

SEQ ID NO: 71843 - protein, 205 aa, Homo sapiens
  Payload ID: 14206
  Gene Symbol: RHOQ
  Gene Name: ras homolog family member Q
  Uniprot ID: P17081
  ENSP ID: ENSP00000238738
MAHGPGALMLKCVVVGDGAVGKTCLLMSYANDAFPEEYVPTVFDHYAVSVTVGGKQYLLGLYDTAGQEDYDRLRPLSYPMTDVFLICFSVVNPASFQNVKEEWVPELKEYAPNVPFLLIGTQIDLRDDPKTLARLNDMKEKPICVEQGQKLAKEIGACCYVECSALTQKGLKTVFDEAIIAILTPKKHTVKKRIGSRCINCCLIT

SEQ ID NO: 71844 - protein, 50 aa, Homo sapiens
  Payload ID: 14206
  Gene Symbol: RHOQ
  Gene Name: ras homolog family member Q
  ENSP ID: ENSP00000393140
MAHGPGALMLKCVVVGDGAVGKTCLLMSYANDAFPEEYVPTVFDHYAGRL

SEQ ID NO: 71845 - protein, 75 aa, Homo sapiens
  Payload ID: 14206
  Gene Symbol: RHOQ
  Gene Name: ras homolog family member Q
  ENSP ID: ENSP00000428006
MTDVFLICFSVVNPASFQNVKEEWVPELKEYAPNVPFLLIGTQIDLRDDPKTLARLNDMKEKPICVEQGQKLAKE

SEQ ID NO: 71846 - protein, 91 aa, Homo sapiens
  Payload ID: 14206
  Gene Symbol: RHOQ
  Gene Name: ras homolog family member Q
  ENSP ID: ENSP00000428624
PEEYVPTVFDHYAVSVTVGGKQYLLGLYDTAGQALQQSELDFWEEISVSSGSWGHVITFSFHTRAWVSSGQDLLCPLAPASAVLLLDRGRL

SEQ ID NO: 71847 - protein, 34 aa, Homo sapiens
  Payload ID: 14206
  Gene Symbol: RHOQ
  Gene Name: ras homolog family member Q
  ENSP ID: ENSP00000429003
  MOD_RES (1)..(1): Any amino acid
XGGKQYLLGLYDTAGQEDTGELAVRSCDFDKSIF

SEQ ID NO: 71848 - protein, 213 aa, Homo sapiens
  Payload ID: 14206
  Gene Symbol: RHOQ
  Gene Name: ras homolog family member Q
  ENSP ID: ENSP00000484856
MPGAGRSSMAHGPGALMLKCVVVGDGAVGKTCLLMSYANDAFPEEYVPTVFDHYAVSVTVGGKQYLLGLYDTAGQEDYDRLRPLSYPMTDVFLICFSVVNPASFQNVKEEWVPELKEYAPNVPFLLIGTQIDLRDDPKTLARLNDMKEKPICVEQGQKLAKEIGACCYVECSALTQKGLKTVFDEAIIAILTPKKHTVKKRIGSRCINCCLIT

SEQ ID NO: 71849 - protein, 618 aa, Homo sapiens
  Payload ID: 14207
  Gene Symbol: RHOT1
  Gene Name: ras homolog family member T1
  Uniprot ID: Q8IXI2
  ENSP ID: ENSP00000334724
MKKDVRILLVGEPRVGKTSLIMSLVSEEFPEEVPPRAEEITIPADVTPERVPTHIVDYSEAEQSDEQLHQEISQANVICIVYAVNNKHSIDKVTSRWIPLINERTDKDSRLPLILVGNKSDLVEYSSMETILPIMNQYTEIETCVECSAKNLKNISELFYYAQKAVLHPTGPLYCPEEKEMKPACIKALTRIFKISDQDNDGTLNDAELNFFQRICFNTPLAPQALEDVKNVVRKHISDGVADSGLTLKGFLFLHTLFIQRGRHETTWTVLRRFGYDDDLDLTPEYLFPLLKIPPDCTTELNHHAYLFLQSTFDKHDLDRDCALSPDELKDLFKVFPYIPWGPDVNNTVCTNERGWITYQGFLSQWTLTTYLDVQRCLEYLGYLGYSILTEQESQASAVTVTRDKKIDLQKKQTQRNVFRCNVIGVKNCGKSGVLQALLGRNLMRQKKIREDHKSYYAINTVYVYGQEKYLLLHDISESEFLTEAEIICDVVCLVYDVSNPKSFEYCARIFKQHFMDSRIPCLIVAAKSDLHEVKQEYSISPTDFCRKHKMPPPQAFTCNTADAPSKDIFVKLTTMAMYPHVTQADLKSSTFWLRASFGATVFAVLGFAMYKALLKQR

SEQ ID NO: 71850 - protein, 597 aa, Homo sapiens
  Payload ID: 14207
  Gene Symbol: RHOT1
  Gene Name: ras homolog family member T1
  ENSP ID: ENSP00000346215
MSLVSEEFPEEVPPRAEEITIPADVTPERVPTHIVDYSEAEQSDEQLHQEISQANVICIVYAVNNKHSIDKVTSRWIPLINERTDKDSRLPLILVGNKSDLVEYSSMETILPIMNQYTEIETCVECSAKNLKNISELFYYAQKAVLHPTGPLYCPEEKEMKPACIKALTRIFKISDQDNDGTLNDAELNFFQRICFNTPLAPQALEDVKNVVRKHISDGVADSGLTLKGFLFLHTLFIQRGRHETTWTVLRRFGYDDDLDLTPEYLFPLLKIPPDCTTELNHHAYLFLQSTFDKHDLDRDCALSPDELKDLFKVFPYIPWGPDVNNTVCTNERGWITYQGFLSQWTLTTYLDVQRCLEYLGYLGYSILTEQESQASAVTVTRDKKIDLQKKQTQRNVFRCNVIGVKNCGKSGVLQALLGRNLMRQKKIREDHKSYYAINTVYVYGQEKYLLLHDISESEFLTEAEIICDVVCLVYDVSNPKSFEYCARIFKQHFMDSRIPCLIVAAKSDLHEVKQEYSISPTDFCRKHKMPPPQAFTCNTADAPSKDIFVKLTTMAMYPHVTQADLKSSTFWLRASFGATVFAVLGFAMYKALLKQR

SEQ ID NO: 71851 - protein, 691 aa, Homo sapiens
  Payload ID: 14207
  Gene Symbol: RHOT1
  Gene Name: ras homolog family member T1
  Uniprot ID: Q8IXI2
  ENSP ID: ENSP00000351132
MKKDVRILLVGEPRVGKTSLIMSLVSEEFPEEVPPRAEEITIPADVTPERVPTHIVDYSEAEQSDEQLHQEISQANVICIVYAVNNKHSIDKVTSRWIPLINERTDKDSRLPLILVGNKSDLVEYSSMETILPIMNQYTEIETCVECSAKNLKNISELFYYAQKAVLHPTGPLYCPEEKEMKPACIKALTRIFKISDQDNDGTLNDAELNFFQRICFNTPLAPQALEDVKNVVRKHISDGVADSGLTLKGFLFLHTLFIQRGRHETTWTVLRRFGYDDDLDLTPEYLFPLLKIPPDCTTELNHHAYLFLQSTFDKHDLDRDCALSPDELKDLFKVFPYIPWGPDVNNTVCTNERGWITYQGFLSQWTLTTYLDVQRCLEYLGYLGYSILTEQESQASAVTVTRDKKIDLQKKQTQRNVFRCNVIGVKNCGKSGVLQALLGRNLMRQKKIREDHKSYYAINTVYVYGQEKYLLLHDISESEFLTEAEIICDVVCLVYDVSNPKSFEYCARIFKQHFMDSRIPCLIVAAKSDLHEVKQEYSISPTDFCRKHKMPPPQAFTCNTADAPSKDIFVKLTTMAMYPEDHYRDRLSRDMGHTDRIENLRKIWVFLKTAFHARLRCMCTCNRCTFCICQNFLNSDLLQSVKNKIFTAVLNRHVTQADLKSSTFWLRASFGATVFAVLGFAMYKALLKQR

SEQ ID NO: 71852 - protein, 650 aa, Homo sapiens
  Payload ID: 14207
  Gene Symbol: RHOT1
  Gene Name: ras homolog family member T1
  Uniprot ID: Q8IXI2
  ENSP ID: ENSP00000378184
MKKDVRILLVGEPRVGKTSLIMSLVSEEFPEEVPPRAEEITIPADVTPERVPTHIVDYSEAEQSDEQLHQEISQANVICIVYAVNNKHSIDKVTSRWIPLINERTDKDSRLPLILVGNKSDLVEYSSMETILPIMNQYTEIETCVECSAKNLKNISELFYYAQKAVLHPTGPLYCPEEKEMKPACIKALTRIFKISDQDNDGTLNDAELNFFQRICFNTPLAPQALEDVKNVVRKHISDGVADSGLTLKGFLFLHTLFIQRGRHETTWTVLRRFGYDDDLDLTPEYLFPLLKIPPDCTTELNHHAYLFLQSTFDKHDLDRDCALSPDELKDLFKVFPYIPWGPDVNNTVCTNERGWITYQGFLSQWTLTTYLDVQRCLEYLGYLGYSILTEQESQASAVTVTRDKKIDLQKKQTQRNVFRCNVIGVKNCGKSGVLQALLGRNLMRQKKIREDHKSYYAINTVYVYGQEKYLLLHDISESEFLTEAEIICDVVCLVYDVSNPKSFEYCARIFKQHFMDSRIPCLIVAAKSDLHEVKQEYSISPTDFCRKHKMPPPQAFTCNTADAPSKDIFVKLTTMAMYPEDHYRDRLSRDMGHTDRIENLRKIWVFLKTALHVTQADLKSSTFWLRASFGATVFAVLGFAMYKALLKQR

SEQ ID NO: 71853 - protein, 659 aa, Homo sapiens
  Payload ID: 14207
  Gene Symbol: RHOT1
  Gene Name: ras homolog family member T1
  Uniprot ID: Q8IXI2
  ENSP ID: ENSP00000439737
MKKDVRILLVGEPRVGKTSLIMSLVSEEFPEEVPPRAEEITIPADVTPERVPTHIVDYSEAEQSDEQLHQEISQANVICIVYAVNNKHSIDKVTSRWIPLINERTDKDSRLPLILVGNKSDLVEYSSMETILPIMNQYTEIETCVECSAKNLKNISELFYYAQKAVLHPTGPLYCPEEKEMKPACIKALTRIFKISDQDNDGTLNDAELNFFQRICFNTPLAPQALEDVKNVVRKHISDGVADSGLTLKGFLFLHTLFIQRGRHETTWTVLRRFGYDDDLDLTPEYLFPLLKIPPDCTTELNHHAYLFLQSTFDKHDLDRDCALSPDELKDLFKVFPYIPWGPDVNNTVCTNERGWITYQGFLSQWTLTTYLDVQRCLEYLGYLGYSILTEQESQASAVTVTRDKKIDLQKKQTQRNVFRCNVIGVKNCGKSGVLQALLGRNLMRQKKIREDHKSYYAINTVYVYGQEKYLLLHDISESEFLTEAEIICDVVCLVYDVSNPKSFEYCARIFKQHFMDSRIPCLIVAAKSDLHEVKQEYSISPTDFCRKHKMPPPQAFTCNTADAPSKDIFVKLTTMAMYPHARLRCMCTCNRCTFCICQNFLNSDLLQSVKNKIFTAVLNRHVTQADLKSSTFWLRASFGATVFAVLGFAMYKALLKQR

SEQ ID NO: 71854 - protein, 57 aa, Homo sapiens
  Payload ID: 14207
  Gene Symbol: RHOT1
  Gene Name: ras homolog family member T1
  ENSP ID: ENSP00000461992
MYPHARLRCMCTCNRCTFCICQNFLNSDLLQSVKNKIFTAVLNRHENSPGSLPWRLH

SEQ ID NO: 71855 - protein, 51 aa, Homo sapiens
  Payload ID: 14207
  Gene Symbol: RHOT1
  Gene Name: ras homolog family member T1
  ENSP ID: ENSP00000462612
MKKDVRILLVGEPRVGKTSLIMSLVSEEFPEEIVVDLNTSSFAEYLQPSTK

SEQ ID NO: 71856 - protein, 580 aa, Homo sapiens
  Payload ID: 14207
  Gene Symbol: RHOT1
  Gene Name: ras homolog family member T1
  Uniprot ID: Q8IXI2
  ENSP ID: ENSP00000462669
MKKDVRILLVGEPRVGKTSLIMSLVSEEFPEEVPPRAEEITIPADVTPERVPTHIVDYSEAEQSDEQLHQEISQANVICIVYAVNNKHSIDKVTSRWIPLINERTDKDSRLPLILVGNKSDLVEYSSMETILPIMNQYTEIETCVECSAKNLKNISELFYYAQKAVLHPTGPLYCPEEKEMKPACIKALTRIFKISDQDNDGTLNDAELNFFQRICFNTPLAPQALEDVKNVVRKHISDGVADSGLTLKGFLFLHTLFIQRGRHETTWTVLRRFGYDDDLDLTPEYLFPLLKIPPDCTTELNHHAYLFLQSTFDKHDLDRDCALSPDELKDLFKVFPYIPWGPDVNNTVCTNERGWITYQGFLSQWTLTTYLDVQRCLEYLGYLGYSILTEQESQASAVTVTRDKKIDLQKKQTQRNVFRCNVIGVKNCGKSGVLQALLGRNLMRQKKIREDHKSYYAINTVYVYGQEKYLLLHDISESEFLTEAEIICDVVCLVYDVSNPKSFEYCARIFKQHFMDSRIPCLIVAAKSDLHEVKQEYSISPTDFCRKHKMPPPQAFTCNTADAPSKDIFVKLTTMAMYP

SEQ ID NO: 71857 - protein, 51 aa, Homo sapiens; identical to SEQ ID NO: 71855
  Payload ID: 14207
  Gene Symbol: RHOT1
  Gene Name: ras homolog family member T1
  ENSP ID: ENSP00000462698

SEQ ID NO: 71858 - protein, 134 aa, Homo sapiens
  Payload ID: 14207
  Gene Symbol: RHOT1
  Gene Name: ras homolog family member T1
  ENSP ID: ENSP00000463532
  MOD_RES (1)..(1): Any amino acid
XTVYVYGQEKYLLLHDISESEFLTEAEIICDVVCLVYDVSNPKSFEYCARIFKQHFMDSRIPCLIVAAKSDLHEVKQEYSISPTDFCRKHKMPPPQAFTCNTADAPSKDIFVKLTTMAMYPHENSPGSLPWRLH

SEQ ID NO: 71859 - protein, 625 aa, Homo sapiens
  Payload ID: 14207
  Gene Symbol: RHOT1
  Gene Name: ras homolog family member T1
  Uniprot ID: Q8IXI2
  ENSP ID: ENSP00000464094
MKKDVRILLVGEPRVGKTSLIMSLVSEEFPEEVPPRAEEITIPADVTPERVPTHIVDYSEAEQSDEQLHQEISQANVICIVYAVNNKHSIDKVTSRWIPLINERTDKDSRLPLILVGNKSDLVEYSSMETILPIMNQYTEIETCVECSAKNLKNISELFYYAQKAVLHPTGPLYCPEEKEMKPACIKALTRIFKISDQDNDGTLNDAELNFFQRICFNTPLAPQALEDVKNVVRKHISDGVADSGLTLKGFLFLHTLFIQRGRHETTWTVLRRFGYDDDLDLTPEYLFPLLKIPPDCTTELNHHAYLFLQSTFDKHDLDRDCALSPDELKDLFKVFPYIPWGPDVNNTVCTNERGWITYQGFLSQWTLTTYLDVQRCLEYLGYLGYSILTEQESQASAVTVTRDKKIDLQKKQTQRNVFRCNVIGVKNCGKSGVLQALLGRNLMRQKKIREDHKSYYAINTVYVYGQEKYLLLHDISESEFLTEAEIICDVVCLVYDVSNPKSFEYCARIFKQHFMDSRIPCLIVAAKSDLHEVKQEYSISPTDFCRKHKMPPPQAFTCNTADAPSKDIFVKLTTMAMYPHARLRCMCTCNRCTFCICQNFLNSDLLQSVKNKIFTAVLNRIISA

SEQ ID NO: 71860 - protein, 40 aa, Homo sapiens
  Payload ID: 14207
  Gene Symbol: RHOT1
  Gene Name: ras homolog family member T1
  ENSP ID: ENSP00000464674
KSFVMLYAWYMMSAIPNPLNTVPGFLRKKLEIIKMANNGR

SEQ ID NO: 71861 - protein, 190 aa, Homo sapiens
  Payload ID: 14207
  Gene Symbol: RHOT1
  Gene Name: ras homolog family member T1
  ENSP ID: ENSP00000464851
  MOD_RES (1)..(1): Any amino acid
XRCNVIGVKNCGKSGVLQALLGRNLMVRRQKKIREDHKSYYAINTVYVYGQEKYLLLHDISESEFLTEAEIICDVVCLVYDVSNPKSFEYCARIFKQHFMDSRIPCLIVAAKSDLHEVKQEYSISPTDFCRKHKMPPPQAFTCNTADAPSKDIFVKLTTMAMYPHARLRCMCTCNRCTFCICQNFLNSDL

SEQ ID NO: 71862 - protein, 156 aa, Homo sapiens
  Payload ID: 14207
  Gene Symbol: RHOT1
  Gene Name: ras homolog family member T1
  ENSP ID: ENSP00000467272
ESEFLTEAEIICDVVCLVYDVSNPKSFEYCARIFKQHFMDSRIPCLIVAAKSDLHEVKQEYSISPTDFCRKHKMPPPQAFTCNTADAPSKDIFVKLTTMAMYPHARLRCMCTCNRCTFCICQNFLNSDLLQSVKNKIFTAVLNRFLTLFTGYQAFC

SEQ ID NO: 71863 - protein, 618 aa, Homo sapiens
  Payload ID: 14208
  Gene Symbol: RHOT2
  Gene Name: ras homolog family member T2
  Uniprot ID: Q8IXI1
  ENSP ID: ENSP00000321971
MRRDVRILLLGEAQVGKTSLILSLVGEEFPEEVPPRAEEITIPADVTPEKVPTHIVDYSEAEQTDEELREEIHKANVVCVVYDVSEEATIEKIRTKWIPLVNGGTTQGPRVPIILVGNKSDLRSGSSMEAVLPIMSQFPEIETCVECSAKNLRNISELFYYAQKAVLHPTAPLYDPEAKQLRPACAQALTRIFRLSDQDLDQALSDEELNAFQKSCFGHPLAPQALEDVKTVVCRNVAGGVREDRLTLDGFLFLNTLFIQRGRHETTWTILRRFGYSDALELTADYLSPLIHVPPGCSTELNHLGYQFVQRVFEKHDQDRDGALSPVELQSLFSVFPAAPWGPELPRTVRTEAGRLPLHGYLCQWTLVTYLDVRSCLGHLGYLGYPTLCEQDQAHAITVTREKRLDQEKGQTQRSVLLCKVVGARGVGKSAFLQAFLGRGLGHQDTREQPPGYAIDTVQVNGQEKYLILCEVGTDGLLATSLDATCDVACLMFDGSDPKSFAHCASVYKHHYMDGQTPCLFVSSKADLPEGVAVSGPSPAEFCRKHRLPAPVPFSCAGPAEPSTTIFTQLATMAAFPHLVHAELHPSSFWLRGLLGVVGAAVAAVLSFSLYRVLVKSQ

SEQ ID NO: 71864 - protein, 135 aa, Homo sapiens
  Payload ID: 14208
  Gene Symbol: RHOT2
  Gene Name: ras homolog family member T2
  ENSP ID: ENSP00000454307
MRRDVRILLLGEAQVGKTSLILSLVGEEFPEEVPPRAEEITIPADVTPEKVPTHIVDYSEAEQTDEELREEIHKANVVCVVYDVSEEATIEKIRTKWIPLVNGGTTQGPSGQQVRPAVGELHGGRAPHHEPVSRD

SEQ ID NO: 71865 - protein, 55 aa, Homo sapiens
  Payload ID: 14208
  Gene Symbol: RHOT2
  Gene Name: ras homolog family member T2
  ENSP ID: ENSP00000454486
MRRDVRILLLGEAQVGKTSLILSLVGEEFPEEKPSRRTRSCGRRSTRFELSGSHW

SEQ ID NO: 71866 - protein, 80 aa, Homo sapiens
  Payload ID: 14208
  Gene Symbol: RHOT2
  Gene Name: ras homolog family member T2
  ENSP ID: ENSP00000455138
MRRDVRILLLGEGGEDVADPVPGGRGVPRGGPSPRGGDHHPRGRHPGEGAHPHRGLLRSRADGRGAAGGDPQGKRGVCGV

SEQ ID NO: 71867 - protein, 208 aa, Homo sapiens
  Payload ID: 14208
  Gene Symbol: RHOT2
  Gene Name: ras homolog family member T2
  ENSP ID: ENSP00000456855
DVRILLLGEAQVGKTSLILSLVGEEFPEEVPPRAEEITIPADVTPEKVPTHIVDYSEAEQTDEELREEIHKIRTKWIPLVNGGTTQGPRVPIILVGNKSDLRSGSSMEAVLPIMSQFPEIETCVECSAKNLRNISELFYYAQKAVLHPTAPLYDPEAKQLRPACAQALTRIFRLSDQDLDQALSDEELNAFQKSCFGHPLAPQALEDV

SEQ ID NO: 71868 - protein, 155 aa, Homo sapiens
  Payload ID: 14208
  Gene Symbol: RHOT2
  Gene Name: ras homolog family member T2
  ENSP ID: ENSP00000457437
  MOD_RES (1)..(1): Any amino acid
XTCDVACLMFDGSDPKSFAHCASVYKHHYMDGQTPCLFVSSKADLPEGVAVSGPSPAEFCRKHRLPAPVPFSCAGPAEPSTTIFTQLATMAAFPHLVHAEPRILRALPPFPGPRWPVGMRRAGRQSFGPKAGVGGSPLKFGAVSVVVAEDRRLGS

SEQ ID NO: 71869 - protein, 135 aa, Homo sapiens; identical to SEQ ID NO: 71864
  Payload ID: 14208
  Gene Symbol: RHOT2
  Gene Name: ras homolog family member T2
  ENSP ID: ENSP00000457852

SEQ ID NO: 71870 - protein, 72 aa, Homo sapiens
  Payload ID: 14208
  Gene Symbol: RHOT2
  Gene Name: ras homolog family member T2
  ENSP ID: ENSP00000458136
MRRDVRILLLGEAQVGKTSLILSLVGEEFPEEPSRRTRSCGRRSTRQTWCVWCMTSLRRPPLRRFELSGSHW

SEQ ID NO: 71871 - protein, 214 aa, Homo sapiens
  Payload ID: 14208
  Gene Symbol: RHOT2
  Gene Name: ras homolog family member T2
  ENSP ID: ENSP00000459564
MRRDVRILLLGEAQVGKTSLILSLVGEEFPEEVPPRAEEITIPADVTPEKVPTHIVDYSEAEQTDEELREEIHKANVVCVVYDVSEEATIEKIRTKWIPLVNGGTTQGPRVPIILVGNKSDLRSGSSMEAVLPIMSQFPEIETCVECSAKNLRNISELFYYAQKAVLHPTAPLYDPEAKQKSCFGHPLAPQALEDVKTVVCRNVAGGVREDRLT

SEQ ID NO: 71872 - protein, 258 aa, Homo sapiens
  Payload ID: 14209
  Gene Symbol: RHOU
  Gene Name: ras homolog family member U
  Uniprot ID: Q7L0Q8
  ENSP ID: ENSP00000355652
MPPQQGDPAFPDRCEAPPVPPRRERGGRGGRGPGEPGGRGRAGGAEGRGVKCVLVGDGAVGKTSLVVSYTTNGYPTEYIPTAFDNFSAVVSVDGRPVRLQLCDTAGQDEFDKLRPLCYTNTDIFLLCFSVVSPSSFQNVSEKWVPEIRCHCPKAPIILVGTQSDLREDVKVLIELDKCKEKPVPEEAAKLCAEEIKAASYIECSALTQKNLKEVFDAAIVAGIQYSDTQQQPKKSKSRTPDKMKNLSKSWWKKYCCFV

SEQ ID NO: 71873 - protein, 236 aa, Homo sapiens
  Payload ID: 14210
  Gene Symbol: RHOV
  Gene Name: ras homolog family member V
  Uniprot ID: Q96L33
  ENSP ID: ENSP00000220507
MPPRELSEAEPPPLRAPTPPPRRRSAPPELGIKCVLVGDGAVGKSSLIVSYTCNGYPARYRPTALDTFSVQVLVDGAPVRIELWDTAGQEDFDRLRSLCYPDTDVFLACFSVVQPSSFQNITEKWLPEIRTHNPQAPVLLVGTQADLRDDVNVLIQLDQGGREGPVPQPQAQGLAEKIRACCYLECSALTQKNLKEVFDSAILSAIEHKARLEKKLNAKGVRTLSRCRWKKFFCFV

SEQ ID NO: 71874 - protein, 963 aa, Homo sapiens
  Payload ID: 14211
  Gene Symbol: RASIP1
  Gene Name: Ras interacting protein 1
  Uniprot ID: Q5U651
  ENSP ID: ENSP00000222145
MLSGERKEGGSPRFGKLHLPVGLWINSPRKQLAKLGRRWPSAASVKSSSSDTGSRSSEPLPPPPPHVELRRVGAVKAAGGASGSRAKRISQLFRGSGTGTTGSSGAGGPGTPGGAQRWASEKKLPELAAGVAPEPPLATRATAPPGVLKIFGAGLASGANYKSVLATARSTARELVAEALERYGLAGSPGGGPGESSCVDAFALCDALGRPAAAGVGSGEWRAEHLRVLGDSERPLLVQELWRARPGWARRFELRGREEARRLEQEAFGAADSEGTGAPSWRPQKNRSRAASGGAALASPGPGTGSGAPAGSGGKERSENLSLRRSVSELSLQGRRRRQQERRQQALSMAPGAADAQIGTADPGDFDQLTQCLIQAPSNRPYFLLLQGYQDAQDFVVYVMTREQHVFGRGGNSSGRGGSPAPYVDTFLNAPDILPRHCTVRAGPEHPAMVRPSRGAPVTHNGCLLLREAELHPGDLLGLGEHFLFMYKDPRTGGSGPARPPWLPARPGATPPGPGWAFSCRLCGRGLQERGEALAAYLDGREPVLRFRPREEEALLGEIVRAAAAGSGDLPPLGPATLLALCVQHSARELELGHLPRLLGRLARLIKEAVWEKIKEIGDRQPENHPEGVPEVPLTPEAVSVELRPLMLWMANTTELLSFVQEKVLEMEKEADQEDPQLCNDLELCDEAMALLDEVIMCTFQQSVYYLTKTLYSTLPALLDSNPFTAGAELPGPGAELGAMPPGLRPTLGVFQAALELTSQCELHPDLVSQTFGYLFFFSNASLLNSLMERGQGRPFYQWSRAVQIRTNLDLVLDWLQGAGLGDIATEFFRKLSMAVNLLCVPRTSLLKASWSSLRTDHPTLTPAQLHHLLSHYQLGPGRGPPAAWDPPPAEREAVDTGDIFESFSSHPPLILPLGSSRLRLTGPVTDDALHRELRRLRRLLWDLEQQELPANYRHGPPVATSP

SEQ ID NO: 71875 - protein, 182 aa, Homo sapiens
  Payload ID: 14211
  Gene Symbol: RASIP1
  Gene Name: Ras interacting protein 1
  ENSP ID: ENSP00000471633
  MOD_RES (1)..(1): Any amino acid
XGREEARRLEQEAFGAADSEGTGAPSWRPQKNRSRAASGGAALASPGPGTGSGAPAGSGGKERSENLSLRRSVSELSLQGRRRRQQERRQQALSMAPGAADAQIGTADPGDFDQLTQCLIQAPSNRPYFLLLQGYQDAQTLYSTLPALLDSNPFTAGAELPGPGAELGAMPPGLRPTLGVFQ

SEQ ID NO: 71876 - protein, 962 aa, Homo sapiens
  Payload ID: 14211
  Gene Symbol: RASIP1
  Gene Name: Ras interacting protein 1
  ENSP ID: ENSP00000479419
MLSGERKEGGSPRFGKLHLPVGLWINSPRKQLAKLGRRWPSAASVKSSSSDTGSRSSEPLPPPPPHVELRRVGAVKAAGGASGSRAKRISQLFRGSGTGTTGSSGAGGPGTPGGAQRWASEKKLPELAAGVAPEPPLATRATAPPGVLKIFGAGLASGANYKSVLATARSTARELVAEALERYGLAGSPGGGPGESSCVDAFALCDALGRPAAAGVGSGEWRAEHLRVLGDSERPLLVQELWRARPGWARRFELRGREEARRLEQEAFGAADSEGTGAPSWRPQKNRSRAASGGAALASPGPGTGSGAPAGSGGKERSENLSLRRSVSELSLQGRRRRQQERRQQALSMAPGAADAQIGTADPGDFDQLTQCLIQAPSNRPYFLLLQGYQDAQDFVVYVMTREQHVFGRGGNSSGRGGSPAPYVDTFLNAPDILPRHCTVRAGPEHPAMVRPSRGAPVTHNGCLLLREAELHPGDLLGLGEHFLFMYKDPRTGGSGPARPPWLPARPGATRQPWLGFSCRLCGRGLQERGEALAAYLDGREPVLRFRPREEEALLGEIVRAAAAGSGDLPPLGPATLLALCVQHSARELELGHLPRLLGRLARLIKEAVWEKIKEIGDRQPENHPEGVPEVPLTPEAVSVELRPLMLWMANTTELLSFVQEKVLEMEKEADQEDPQLCNDLELCDEAMALLDEVIMCTFQQSVYYLTKTLYSTLPALLDSNPFTAGAELPGPGAELGAMPPGLRPTLGVFQAALELTSQCELHPDLVSQTFGYLFFFSNASLLNSLMERGQGRPFYQWSRAVQIRTNLDLVLDWLQGAGLGDIATEFFRKLSMAVNLLCVPRTSLLKASWSSLRTDHPTLTPAQLHHLLSHYQLGPGRGPPAAWDPPPAEREAVDTGDIFESFSSHPPLILPLGSSRLRLTGPVTDDALHRELRRLRRLLWDLEQQELPANYRHGPPVATSP

SEQ ID NO: 71877 - protein, 1047 aa, Homo sapiens
  Payload ID: 14212
  Gene Symbol: RASA1
  Gene Name: RAS p21 protein activator (GTPase activating protein) 1
  Uniprot ID: P20936
  ENSP ID: ENSP00000274376
MMAAEAGSEEGGPVTAGAGGGGAAAGSSAYPAVCRVKIPAALPVAAAPYPGLVETGVAGTLGGGAALGSEFLGAGSVAGALGGAGLTGGGTAAGVAGAAAGVAGAAVAGPSGDMALTKLPTSLLAETLGPGGGFPPLPPPPYLPPLGAGLGTVDEGDSLDGPEYEEEEVAIPLTAPPTNQWYHGKLDRTIAEERLRQAGKSGSYLIRESDRRPGSFVLSFLSQMNVVNHFRIIAMCGDYYIGGRRFSSLSDLIGYYSHVSCLLKGEKLLYPVAPPEPVEDRRRVRAILPYTKVPDTDEISFLKGDMFIVHNELEDGWMWVTNLRTDEQGLIVEDLVEEVGREEDPHEGKIWFHGKISKQEAYNLLMTVGQVCSFLVRPSDNTPGDYSLYFRTNENIQRFKICPTPNNQFMMGGRYYNSIGDIIDHYRKEQIVEGYYLKEPVPMQDQEQVLNDTVDGKEIYNTIRRKTKDAFYKNIVKKGYLLKKGKGKRWKNLYFILEGSDAQLIYFESEKRATKPKGLIDLSVCSVYVVHDSLFGRPNCFQIVVQHFSEEHYIFYFAGETPEQAEDWMKGLQAFCNLRKSSPGTSNKRLRQVSSLVLHIEEAHKLPVKHFTNPYCNIYLNSVQVAKTHAREGQNPVWSEEFVFDDLPPDINRFEITLSNKTKKSKDPDILFMRCQLSRLQKGHATDEWFLLSSHIPLKGIEPGSLRVRARYSMEKIMPEEEYSEFKELILQKELHVVYALSHVCGQDRTLLASILLRIFLHEKLESLLLCTLNDREISMEDEATTLFRATTLASTLMEQYMKATATQFVHHALKDSILKIMESKQSCELSPSKLEKNEDVNTNLTHLLNILSELVEKIFMASEILPPTLRYIYGCLQKSVQHKWPTNTTMRTRVVSGFVFLRLICPAILNPRMFNIISDSPSPIAARTLILVAKSVQNLANLVEFGAKEPYMEGVNPFIKSNKHRMIMFLDELGNVPELPDTTEHSRTDLSRDLAALHEICVAHSDELRTLSNERGAQQHVLKKLLAITELLQQKQNQYTKTNDVR

SEQ ID NO: 71878 - protein, 870 aa, Homo sapiens
  Payload ID: 14212
  Gene Symbol: RASA1
  Gene Name: RAS p21 protein activator (GTPase activating protein) 1
  Uniprot ID: P20936
  ENSP ID: ENSP00000411221
MKGWYHGKLDRTIAEERLRQAGKSGSYLIRESDRRPGSFVLSFLSQMNVVNHFRIIAMCGDYYIGGRRFSSLSDLIGYYSHVSCLLKGEKLLYPVAPPEPVEDRRRVRAILPYTKVPDTDEISFLKGDMFIVHNELEDGWMWVTNLRTDEQGLIVEDLVEEVGREEDPHEGKIWFHGKISKQEAYNLLMTVGQVCSFLVRPSDNTPGDYSLYFRTNENIQRFKICPTPNNQFMMGGRYYNSIGDIIDHYRKEQIVEGYYLKEPVPMQDQEQVLNDTVDGKEIYNTIRRKTKDAFYKNIVKKGYLLKKGKGKRWKNLYFILEGSDAQLIYFESEKRATKPKGLIDLSVCSVYVVHDSLFGRPNCFQIVVQHFSEEHYIFYFAGETPEQAEDWMKGLQAFCNLRKSSPGTSNKRLRQVSSLVLHIEEAHKLPVKHFTNPYCNIYLNSVQVAKTHAREGQNPVWSEEFVFDDLPPDINRFEITLSNKTKKSKDPDILFMRCQLSRLQKGHATDEWFLLSSHIPLKGIEPGSLRVRARYSMEKIMPEEEYSEFKELILQKELHVVYALSHVCGQDRTLLASILLRIFLHEKLESLLLCTLNDREISMEDEATTLFRATTLASTLMEQYMKATATQFVHHALKDSILKIMESKQSCELSPSKLEKNEDVNTNLTHLLNILSELVEKIFMASEILPPTLRYIYGCLQKSVQHKWPTNTTMRTRVVSGFVFLRLICPAILNPRMFNIISDSPSPIAARTLILVAKSVQNLANLVEFGAKEPYMEGVNPFIKSNKHRMIMFLDELGNVPELPDTTEHSRTDLSRDLAALHEICVAHSDELRTLSNERGAQQHVLKKLLAITELLQQKQNQYTKTNDVR

SEQ ID NO: 71879 - protein, 881 aa, Homo sapiens
  Payload ID: 14212
  Gene Symbol: RASA1
  Gene Name: RAS p21 protein activator (GTPase activating protein) 1
  ENSP ID: ENSP00000420905
MCLVKSWFLSIRSRWYHGKLDRTIAEERLRQAGKSGSYLIRESDRRPGSFVLSFLSQMNVVNHFRIIAMCGDYYIGGRRFSSLSDLIGYYSHVSCLLKGEKLLYPVAPPEPVEDRRRVRAILPYTKVPDTDEISFLKGDMFIVHNELEDGWMWVTNLRTDEQGLIVEDLVEEVGREEDPHEGKIWFHGKISKQEAYNLLMTVGQVCSFLVRPSDNTPGDYSLYFRTNENIQRFKICPTPNNQFMMGGRYYNSIGDIIDHYRKEQIVEGYYLKEPVPMQDQEQVLNDTVDGKEIYNTIRRKTKDAFYKNIVKKGYLLKKGKGKRWKNLYFILEGSDAQLIYFESEKRATKPKGLIDLSVCSVYVVHDSLFGRPNCFQIVVQHFSEEHYIFYFAGETPEQAEDWMKGLQAFCNLRKSSPGTSNKRLRQVSSLVLHIEEAHKLPVKHFTNPYCNIYLNSVQVAKTHAREGQNPVWSEEFVFDDLPPDINRFEITLSNKTKKSKDPDILFMRCQLSRLQKGHATDEWFLLSSHIPLKGIEPGSLRVRARYSMEKIMPEEEYSEFKELILQKELHVVYALSHVCGQDRTLLASILLRIFLHEKLESLLLCTLNDREISMEDEATTLFRATTLASTLMEQYMKATATQFVHHALKDSILKIMESKQSCELSPSKLEKNEDVNTNLTHLLNILSELVEKIFMASEILPPTLRYIYGCLQKSVQHKWPTNTTMRTRVVSGFVFLRLICPAILNPRMFNIISDSPSPIAARTLILVAKSVQNLANLVEFGAKEPYMEGVNPFIKSNKHRMIMFLDELGNVPELPDTTEHSRTDLSRDLAALHEICVAHSDELRTLSNERGAQQHVLKKLLAITELLQQKQNQYTKTNDVR

SEQ ID NO: 71880 - protein, 880 aa, Homo sapiens
  Payload ID: 14212
  Gene Symbol: RASA1
  Gene Name: RAS p21 protein activator (GTPase activating protein) 1
  Uniprot ID: P20936
  ENSP ID: ENSP00000422008
MRTGYSSVPSKLRWYHGKLDRTIAEERLRQAGKSGSYLIRESDRRPGSFVLSFLSQMNVVNHFRIIAMCGDYYIGGRRFSSLSDLIGYYSHVSCLLKGEKLLYPVAPPEPVEDRRRVRAILPYTKVPDTDEISFLKGDMFIVHNELEDGWMWVTNLRTDEQGLIVEDLVEEVGREEDPHEGKIWFHGKISKQEAYNLLMTVGQVCSFLVRPSDNTPGDYSLYFRTNENIQRFKICPTPNNQFMMGGRYYNSIGDIIDHYRKEQIVEGYYLKEPVPMQDQEQVLNDTVDGKEIYNTIRRKTKDAFYKNIVKKGYLLKKGKGKRWKNLYFILEGSDAQLIYFESEKRATKPKGLIDLSVCSVYVVHDSLFGRPNCFQIVVQHFSEEHYIFYFAGETPEQAEDWMKGLQAFCNLRKSSPGTSNKRLRQVSSLVLHIEEAHKLPVKHFTNPYCNIYLNSVQVAKTHAREGQNPVWSEEFVFDDLPPDINRFEITLSNKTKKSKDPDILFMRCQLSRLQKGHATDEWFLLSSHIPLKGIEPGSLRVRARYSMEKIMPEEEYSEFKELILQKELHVVYALSHVCGQDRTLLASILLRIFLHEKLESLLLCTLNDREISMEDEATTLFRATTLASTLMEQYMKATATQFVHHALKDSILKIMESKQSCELSPSKLEKNEDVNTNLTHLLNILSELVEKIFMASEILPPTLRYIYGCLQKSVQHKWPTNTTMRTRVVSGFVFLRLICPAILNPRMFNIISDSPSPIAARTLILVAKSVQNLANLVEFGAKEPYMEGVNPFIKSNKHRMIMFLDELGNVPELPDTTEHSRTDLSRDLAALHEICVAHSDELRTLSNERGAQQHVLKKLLAITELLQQKQNQYTKTNDVR

SEQ ID NO: 71881 - protein, 539 aa, Homo sapiens
  Payload ID: 14212
  Gene Symbol: RASA1
  Gene Name: RAS p21 protein activator (GTPase activating protein) 1
  Uniprot ID: P20936
  ENSP ID: ENSP00000423395
MMAAEAGSEEGGPVTAGAGGGGAAAGSSAYPAVCRVKIPAALPVAAAPYPGLVETGVAGTLGGGAALGSEFLGAGSVAGALGGAGLTGGGTAAGVAGAAAGVAGAAVAGPSGDMALTKLPTSLLAETLGPGGGFPPLPPPPYLPPLGAGLGTVDEGDSLDGPEYEEEEVAIPLTAPPTNQWYHGKLDRTIAEERLRQAGKSGSYLIRESDRRPGSFVLSFLSQMNVVNHFRIIAMCGDYYIGGRRFSSLSDLIGYYSHVSCLLKGEKLLYPVAPPEPVEDRRRVRAILPYTKVPDTDEISFLKGDMFIVHNELEDGWMWVTNLRTDEQGLIVEDLVEEVGREEDPHEGKIWFHGKISKQEAYNLLMTVGQVCSFLVRPSDNTPGDYSLYFRTNENIQRFKICPTPNNQFMMGGRYYNSIGDIIDHYRKEQIVEGYYLKEPVPMQDQEQVLNDTVDGKEIYNTIRRKTKDAFYKNIVKKGYLLKKGKGKRWKNLYFILEGSDAQLIYFESEKRATKPKGLIDLSVCSVYVVHDSLFGRCS

SEQ ID NO: 71882 - protein, 849 aa, Homo sapiens
  Payload ID: 14213
  Gene Symbol: RASA2
  Gene Name: RAS p21 protein activator 2
  Uniprot ID: Q15283
  ENSP ID: ENSP00000286364
MAAAAPAAAAASSEAPAASATAEPEAGDQDSREVRVLQSLRGKICEAKNLLPYLGPHKMRDCFCTINLDQEEVYRTQVVEKSLSPFFSEEFYFEIPRTFQYLSFYVYDKNVLQRDLRIGKVAIKKEDLCNHSGKETWFSLQPVDSNSEVQGKVHLELKLNELITENGTVCQQLVVHIKACHGLPLINGQSCDPYATVSLVGPSRNDQKKTKVKKKTSNPQFNEIFYFEVTRSSSYTRKSQFQVEEEDIEKLEIRIDLWNNGNLVQDVFLGEIKVPVNVLRTDSSHQAWYLLQPRDNGNKSSKTDDLGSLRLNICYTEDYVLPSEYYGPLKTLLLKSPDVQPISASAAYILSEICRDKNDAVLPLVRLLLHHDKLVPFATAVAELDLKDTQDANTIFRGNSLATRCLDEMMKIVGGHYLKVTLKPILDEICDSSKSCEIDPIKLKEGDNVENNKENLRYYVDKLFNTIVKSSMSCPTVMCDIFYSLRQMATQRFPNDPHVQYSAVSSFVFLRFFAVAVVSPHTFHLRPHHPDAQTIRTLTLISKTIQTLGSWGSLSKSKSSFKETFMCEFFKMFQEEGYIIAVKKFLDEISSTETKESSGTSEPVHLKEGEMYKRAQGRTRIGKKNFKKRWFCLTSRELTYHKQPGKDAIYTIPVKNILAVEKLEESSFNKKNMFQVIHTEKPLYVQANNCVEANEWIDVLCRVSRCNQNRLSFYHPSVYLNGNWLCCQETGENTLGCKPCTAGVPADIQIDIDEDRETERIYSLFTLSLLKLQKMEEACGTIAVYQGPQKEPDDYSNFVIEDSVTTFKTIQQIKSIIEKLDEPHEKYRKKRSSSAKYGSKENPIVGKAS

SEQ ID NO: 71883 - protein, 853 aa, Homo sapiens [sequence omitted]

SEQ ID NO: 71884 - protein, 47 aa, Homo sapiens
  Payload ID: 14213
  Gene Symbol: RASA2
  Gene Name: RAS p21 protein activator 2
  ENSP ID: ENSP00000424293
MAAAAPAAAAASSEAPAASATAEPEAGDQDSREVKQKIYCHILDPTK

SEQ ID NO: 71885 - protein, 834 aa, Homo sapiens
  Payload ID: 14214
  Gene Symbol: RASA3
  Gene Name: RAS p21 protein activator 3
  Uniprot ID: Q14644
  ENSP ID: ENSP00000335029
MAVEDEGLRVFQSVKIKIGEAKNLPSYPGPSKMRDCYCTVNLDQEEVFRTKIVEKSLCPFYGEDFYCEIPRSFRHLSFYIFDRDVFRRDSIIGKVAIQKEDLQKYHNRDTWFQLQHVDADSEVQGKVHLELRLSEVITDTGVVCHKLATRIVECQGLPIVNGQCDPYATVTLAGPFRSEAKKTKVKRKTNNPQFDEVFYFEVTRPCSYSKKSHFDFEEEDVDKLEIRVDLWNASNLKFGDEFLGELRIPLKVLRQSSSYEAWYFLQPRDNGSKSLKPDDLGSLRLNVVYTEDHVFSSDYYSPLRDLLLKSADVEPVSASAAHILGEVCREKQEAAVPLVRLFLHYGRVVPFISAIASAEVKRTQDPNTIFRGNSLASKCIDETMKLAGMHYLHVTLKPAIEEICQSHKPCEIDPVKLKDGENLENNMENLRQYVDRVFHAITESGVSCPTVMCDIFFSLREAAAKRFQDDPDVRYTAVSSFIFLRFFAPAILSPNLFQLTPHHTDPQTSRTLTLISKTVQTLGSLSKSKSASFKESYMATFYEFFNEQKYADAVKNFLDLISSSGRRDPKSVEQPIVLKEGFMIKRAQGRKRFGMKNFKKRWFRLTNHEFTYHKSKGDQPLYSIPIENILAVEKLEEESFKMKNMFQVIQPERALYIQANNCVEAKDWIDILTKVSQCNQKRLTVYHPSAYLSGHWLCCRAPSDSAPGCSPCTGGLPANIQLDIDGDRETERIYSLFNLYMSKLEKMQEACGSKSVYDGPEQEEYSTFVIDDPQETYKTLKQVIAGVGALEQEHAQYKRDKFKKTKYGSQEHPIGDKSFQNYIRQQSETSTHSI

SEQ ID NO: 71886 - protein, 834 aa, Homo sapiens; identical to SEQ ID NO: 71885
  Payload ID: 14214
  Gene Symbol: RASA3
  Gene Name: RAS p21 protein activator 3
  ENSP ID: ENSP00000486064

SEQ ID NO: 71887 - protein, 803 aa, Homo sapiens
  Payload ID: 14215
  Gene Symbol: RASA4
  Gene Name: RAS p21 protein activator 4
  Uniprot ID: O43374
  ENSP ID: ENSP00000262940
MAKRSSLYIRIVEGKNLPAKDITGSSDPYCIVKVDNEPIIRTATVWKTLCPFWGEEYQVHLPPTFHAVAFYVMDEDALSRDDVIGKVCLTRDTIASHPKGFSGWAHLTEVDPDEEVQGEIHLRLEVWPGARACRLRCSVLEARDLAPKDRNGTSDPFVRVRYKGRTRETSIVKKSCYPRWNETFEFELQEGAMEALCVEAWDWDLVSRNDFLGKVVIDVQRLRVVQQEEGWFRLQPDQSKSRRHDEGNLGSLQLEVRLRDETVLPSSYYQPLVHLLCHEVKLGMQGPGQLIPLIEETTSTECRQDVATNLLKLFLGQGLAKDFLDLLFQLELSRTSETNTLFRSNSLASKSMESFLKVAGMQYLHGVLGPIINKVFEEKKYVELDPSKVEVKDVGCSGLHRPQTEAEVLEQSAQTLRAHLGALLSALSRSVRACPAVVRATFRQLFRRVRERFPGAQHENVPFIAVTSFLCLRFFSPAIMSPKLFHLRERHADARTSRTLLLLAKAVQNVGNMDTPASRAKEAWMEPLQPTVRQGVAQLKDFITKLVDIEEKDELDLQRTLSLQAPPVKEGPLFIHRTKGKGPLMSSSFKKLYFSLTTEALSFAKTPSSKKSALIKLANIRAAEKVEEKSFGGSHVMQVIYTDDAGRPQTAYLQCKCVNELNQWLSALRKVSINNTGLLGSYHPGVFRGDKWSCCHQKEKTGQGCDKTRSRVTLQEWNDPLDHDLEAQLIYRHLLGVEAMLWERHRELSGGAEAGTVPTSPGKVPEDSLARLLRVLQDLREAHSSSPAGSPPSEPNCLLELQT

SEQ ID NO: 71888 - protein, 757 aa, Homo sapiens
  Payload ID: 14215
  Gene Symbol: RASA4
  Gene Name: RAS p21 protein activator 4
  Uniprot ID: O43374
  ENSP ID: ENSP00000412876
MAKRSSLYIRIVEGKNLPAKDITGSSDPYCIVKVDNEPIIRTATVWKTLCPFWGEEYQVHLPPTFHAVAFYVMDEDALSRDDVIGKVCLTRDTIASHPKGFSGWAHLTEVDPDEEVQGEIHLRLEVWPGARACRLRCSVLEARDLAPKDRNGTSDPFVRVRYKGRTRETSIVKKSCYPRWNETFEFELQEGAMEALCVEAWDWDLVSRNDFLGKVVIDVQRLRVVQQEEGWFRLQPDQSKSRRHDEGNLGSLQLEVRLRDETVLPSSYYQPLVHLLCHEVKLGMQGPGQLIPLIEETTSTECRQDVATNLLKLFLGQGLAKDFLDLLFQLELSRTSETNTLFRSNSLASKSMESFLKVAGMQYLHGVLGPIINKVFEEKKYVELDPSKVEVKDVGCSGLHRPQTEAEVLEQSAQTLRAHLGALLSALSRSVRACPAVVRATFRQLFRRVRERFPGAQHENVPFIAVTSFLCLRFFSPAIMSPKLFHLRERHADARTSRTLLLLAKAVQNVGNMDTPASRAKEAWMEPLQPTVRQGVAQLKDFITKLVDIEEKDELDLQRTLSLQAPPVKEGPLFIHRTKGKGPLMSSSFKKLYFSLTTEALSFAKTPSSKCVNELNQWLSALRKVSINNTGLLGSYHPGVFRGDKWSCCHQKEKTGQGCDKTRSRVTLQEWNDPLDHDLEAQLIYRHLLGVEAMLWERHRELSGGAEAGTVPTSPGKVPEDSLARLLRVLQDLREAHSSSPAGSPPSEPNCLLELQT

SEQ ID NO: 71889 - protein, 731 aa, Homo sapiens
  Payload ID: 14215
  Gene Symbol: RASA4
  Gene Name: RAS p21 protein activator 4
  ENSP ID: ENSP00000417395
MDEDALSRDDVIGKVCLTRDTIASHPKGFSGWAHLTEVDPDEEVQGEIHLRLEVWPGARACRLRCSVLEARDLAPKDRNGTSDPFVRVRYKGRTRETSIVKKSCYPRWNETFEFELQEGAMEALCVEAWDWDLVSRNDFLGKVVIDVQRLRVVQQEEGWFRLQPDQSKSRRHDEGNLGSLQLEVRLRDETVLPSSYYQPLVHLLCHEVKLGMQGPGQLIPLIEETTSTECRQDVATNLLKLFLGQGLAKDFLDLLFQLELSRTSETNTLFRSNSLASKSMESFLKVAGMQYLHGVLGPIINKVFEEKKYVELDPSKVEVKDVGCSGLHRPQTEAEVLEQSAQTLRAHLGALLSALSRSVRACPAVVRATFRQLFRRVRERFPGAQHENVPFIAVTSFLCLRFFSPAIMSPKLFHLRERHADARTSRTLLLLAKAVQNVGNMDTPASRAKEAWMEPLQPTVRQGVAQLKDFITKLVDIEEKDELDLQRTLSLQAPPVKEGPLFIHRTKGKGPLMSSSFKKLYFSLTTEALSFAKTPSSKKSALIKLANIRAAEKVEEKSFGGSHVMQVIYTDDAGRPQTAYLQCKCVNELNQWLSALRKVSINNTGLLGSYHPGVFRGDKWSCCHQKEKTGQGCDKTRSRVTLQEWNDPLDHDLEAQLIYRHLLGVEAMLWERHRELSGGAEAGTVPTSPGKVPEDSLARLLRVLQDLREAHSSSPAGSPPSEPNCLLELQT

SEQ ID NO: 71890 - protein, 731 aa, Homo sapiens; identical to SEQ ID NO: 71889
  Payload ID: 14215
  Gene Symbol: RASA4
  Gene Name: RAS p21 protein activator 4
  ENSP ID: ENSP00000420352

SEQ ID NO: 71891 - protein, 54 aa, Homo sapiens
  Payload ID: 14215
  Gene Symbol: RASA4
  Gene Name: RAS p21 protein activator 4
  ENSP ID: ENSP00000428448
MDEDALSRDDVIGKVCLTRDTIASHPKGIWPQRTAMAHLTPSSECATRAGHGRP

SEQ ID NO: 71892 - protein, 273 aa, Homo sapiens
  Payload ID: 14215
  Gene Symbol: RASA4
  Gene Name: RAS p21 protein activator 4
  ENSP ID: ENSP00000428605
  MOD_RES (1)..(1): Any amino acid
XCRQDVATNLLKLFLGQGLAKDFLDLLFQLELSRTSETNTLFRSNSLASKSMESFLKVAGMQYLHGVLGPIINKVFEEKKCSGLHRPQTEAEVLEQSAQTLRAHLGALLSALSRSVRACPAVVRATFRQLFRRVRERFPGAQHENVPFIAVTSFLCLRFFSPAIMSPKLFHLRERHADARTSRTLLLLAKAVQNVGNMDTPASRAKEAWMEPLQPTVRQGVAQLKDFITKLVDIEEKDELDLQRTLSLQAPPVKEGPLFIHRTKGKGPLMSSS

SEQ ID NO: 71893 - protein, 98 aa, Homo sapiens
  Payload ID: 14215
  Gene Symbol: RASA4
  Gene Name: RAS p21 protein activator 4
  ENSP ID: ENSP00000428732
MDEDALSRDDVIGKVCLTRDTIASHPKGFSGWAHLTEVDPDEEVQGEIHLRLEVWPGARACRLRCSVLEARDLAPKDRNGTSDPFVRVRYKGRTRETS

SEQ ID NO: 71894 - protein, 137 aa, Homo sapiens
  Payload ID: 14215
  Gene Symbol: RASA4
  Gene Name: RAS p21 protein activator 4
  ENSP ID: ENSP00000430337
  MOD_RES (1)..(1): Any amino acid
XPKDRNGTSDPFVRVRYKGRTRETSIVKKSCYPRWNETFEFELQEGAMEALCVEAWDWDLVSRNDFLGKVVIDVQRLRVVQQEEGWFRLQPDQSKSRRHDDWRCGCGTRRCCPPATTSHWCTCCATRSSWACRAQGS

SEQ ID NO: 71895 - protein, 306 aa, Homo sapiens
  Payload ID: 14215
  Gene Symbol: RASA4
  Gene Name: RAS p21 protein activator 4
  ENSP ID: ENSP00000430418
MAKRSSLYIRIVEGKNLPAKDMTATVWKTLCPFWGEEYQVHLPPTFHAVAFYVMDEDALSRDDVIGKVCLTRDTIASHPKGFSGWAHLTEVDPDEEVQGEIHLRLEVWPGARACRLRCSVLEARDLAPKDRNGTSDPFVRVRYKGRTRETSIVKKSCYPRWNETFEFELQEGAMEALCVEAWDWDLVSRNDFLGKVVIDVQRLRVVQQEEGWFRLQPDQSKSRRHDEGNLGSLQLEVRLRDETVLPSSYYQPLVHLLCHEVKLGMQGPGQLIPLIEETTSTECRQDVATNLLKLFLGQGLAKDFLD

SEQ ID NO: 71896 - protein, 160 aa, Homo sapiens [sequence omitted]

SEQ ID NO: 71897 - protein, 731 aa, Homo sapiens
  Payload ID: 14216
  Gene Symbol: RASA4B
  Gene Name: RAS p21 protein activator 4B
  ENSP ID: ENSP00000303968
MDEDALSRDDVIGKVCLTRDTIASHPKGFSGWAHLTEVDPDEEVQGEIHLRLEVWPGARACRLRCSVLEARDLAPKDRNGTSDPFVRVRYKGRTRETSIVKKSCYPRWNETFEFELQEGAMEALCVEAWDWDLVSRNDFLGKVVIDVQRLRVVQQEEGWFRLQPDQSKSRRHDEGNLGSLQLEVRLRDETVLPSSYYQPLVHLLCHEVKLGMQGPGQLIPLIEETTSTECRQDVATNLLKLFLGQGLAKDFLDLLFQLELSRTSETNTLFRSNSLASKSVESFLKVAGMQYLHGVLGPIINKVFEEKKYVELDPSKVEVKDVGCSGLHRPQTEAEVLEQSAQTLRAHLGALLSALSRSVRACPAVVRATFRQLFRRVRERFPGAQHENVPFIAVTSFLCLRFFSPAIMSPKLFHLRERHADARTSRTLLLLAKAVQNVGNMDTPASRAKEAWMEPLQPTVHQGVAQLKDFITKLVDIEEKDELDLQRTLSLQAPPVKEGPLFIHRTKGKGPLMSSSFKKLYFSLTTEALSFAKTPSSKKSALIKLANIRAAEKVEEKSFGGSHVMQVIYTDDAGRPQTAYLQCKCVNELNQWLSALRKVSINNTGLLGSYHPGVFRGDKWSCCHQKEKTGQGCDKTRSRVTLQEWNDPLDHDLEAQLIYRHLLGVEAMLWERHRELSGGAEAGTVPTSPGKVPEDSLARLLRVLQDLREAHSSSPAGSPPSEPNCLLELQT

SEQ ID NO: 71898 - protein, 803 aa, Homo sapiens
  Payload ID: 14216
  Gene Symbol: RASA4B
  Gene Name: RAS p21 protein activator 4B
  Uniprot ID: C9J798
  ENSP ID: ENSP00000417895
MAKRSSLYIRIVEGKNLPAKDITGSSDPYCIVKVDNEPIIRTATVWKTLCPFWGEEYQVHLPPTFHAVAFYVMDEDALSRDDVIGKVCLTRDTIASHPKGFSGWAHLTEVDPDEEVQGEIHLRLEVWPGARACRLRCSVLEARDLAPKDRNGTSDPFVRVRYKGRTRETSIVKKSCYPRWNETFEFELQEGAMEALCVEAWDWDLVSRNDFLGKVVIDVQRLRVVQQEEGWFRLQPDQSKSRRHDEGNLGSLQLEVRLRDETVLPSSYYQPLVHLLCHEVKLGMQGPGQLIPLIEETTSTECRQDVATNLLKLFLGQGLAKDFLDLLFQLELSRTSETNTLFRSNSLASKSVESFLKVAGMQYLHGVLGPIINKVFEEKKYVELDPSKVEVKDVGCSGLHRPQTEAEVLEQSAQTLRAHLGALLSALSRSVRACPAVVRATFRQLFRRVRERFPGAQHENVPFIAVTSFLCLRFFSPAIMSPKLFHLRERHADARTSRTLLLLAKAVQNVGNMDTPASRAKEAWMEPLQPTVHQGVAQLKDFITKLVDIEEKDELDLQRTLSLQAPPVKEGPLFIHRTKGKGPLMSSSFKKLYFSLTTEALSFAKTPSSKKSALIKLANIRAAEKVEEKSFGGSHVMQVIYTDDAGRPQTAYLQCKCVNELNQWLSALRKVSINNTGLLGSYHPGVFRGDKWSCCHQKEKTGQGCDKTRSRVTLQEWNDPLDHDLEAQLIYRHLLGVEAMLWERHRELSGGAEAGTVPTSPGKVPEDSLARLLRVLQDLREAHSSSPAGSPPSEPNCLLELQT

SEQ ID NO: 71899 - protein, 757 aa, Homo sapiens
  Payload ID: 14216
  Gene Symbol: RASA4B
  Gene Name: RAS p21 protein activator 4B
  ENSP ID: ENSP00000440982
MAKRSSLYIRIVEGKNLPAKDITGSSDPYCIVKVDNEPIIRTATVWKTLCPFWGEEYQVHLPPTFHAVAFYVMDEDALSRDDVIGKVCLTRDTIASHPKGFSGWAHLTEVDPDEEVQGEIHLRLEVWPGARACRLRCSVLEARDLAPKDRNGTSDPFVRVRYKGRTRETSIVKKSCYPRWNETFEFELQEGAMEALCVEAWDWDLVSRNDFLGKVVIDVQRLRVVQQEEGWFRLQPDQSKSRRHDEGNLGSLQLEVRLRDETVLPSSYYQPLVHLLCHEVKLGMQGPGQLIPLIEETTSTECRQDVATNLLKLFLGQGLAKDFLDLLFQLELSRTSETNTLFRSNSLASKSVESFLKVAGMQYLHGVLGPIINKVFEEKKYVELDPSKVEVKDVGCSGLHRPQTEAEVLEQSAQTLRAHLGALLSALSRSVRACPAVVRATFRQLFRRVRERFPGAQHENVPFIAVTSFLCLRFFSPAIMSPKLFHLRERHADARTSRTLLLLAKAVQNVGNMDTPASRAKEAWMEPLQPTVHQGVAQLKDFITKLVDIEEKDELDLQRTLSLQAPPVKEGPLFIHRTKGKGPLMSSSFKKLYFSLTTEALSFAKTPSSKCVNELNQWLSALRKVSINNTGLLGSYHPGVFRGDKWSCCHQKEKTGQGCDKTRSRVTLQEWNDPLDHDLEAQLIYRHLLGVEAMLWERHRELSGGAEAGTVPTSPGKVPEDSLARLLRVLQDLREAHSSSPAGSPPSEPNCLLELQT

SEQ ID NO: 71900 - protein, 804 aa, Homo sapiens
  Payload ID: 14217
  Gene Symbol: RASAL1
  Gene Name: RAS protein activator like 1 (GAP1 like)
  Uniprot ID: O95294
  ENSP ID: ENSP00000261729
MAKSSSLNVRVVEGRALPAKDVSGSSDPYCLVKVDDEVVARTATVWRSLGPFWGEEYTVHLPLDFHQLAFYVLDEDTVGHDDIIGKISLSREAITADPRGIDSWINLSRVDPDAEVQGEICLSVQMLEDGQGRCLRCHVLQARDLAPRDISGTSDPFARVFWGSQSLETSTIKKTRFPHWDEVLELREMPGAPSPLRVELWDWDMVGKNDFLGMVEFSPKTLQQKPPKGWFRLLPFPRAEEDSGGNLGALRVKVRLIEDRVLPSQCYQPLMELLMESVQGPAEEDTASPLALLEELTLGDCRQDLATKLVKLFLGRGLAGRFLDYLTRREVARTMDPNTLFRSNSLASKSMEQFMKLVGMPYLHEVLKPVISRVFEEKKYMELDPCKMDLGRTRRISFKGALSEEQMRETSLGLLTGYLGPIVDAIVGSVGRCPPAMRLAFKQLHRRVEERFPQAEHQDVKYLAISGFLFLRFFAPAILTPKLFDLRDQHADPQTSRSLLLLAKAVQSIGNLGQQLGQGKELWMAPLHPFLLQCVSRVRDFLDRLVDVDGDEAGVPARALFPPSAIVREGYLLKRKEEPAGLATRFAFKKRYVWLSGETLSFSKSPEWQMCHSIPVSHIRAVERVDEGAFQLPHVMQVVTQDGTGALHTTYLQCKNVNELNQWLSALRKASAPNPNKLAACHPGAFRSARWTCCLQAERSAAGCSRTHSAVTLGDWSDPLDPDAEAQTVYRQLLLGRDQLRLKLLEDSNMDTTLEADTGACPEVLARQRAATARLLEVLADLDRAHEEFQQQERGKAALGPLGP

SEQ ID NO: 71901 - protein, 776 aa, Homo sapiens
  Payload ID: 14217
  Gene Symbol: RASAL1
  Gene Name: RAS protein activator like 1 (GAP1 like)
  Uniprot ID: O95294
  ENSP ID: ENSP00000395920
MAKSSSLNVRVVEGRALPAKDVSGSSDPYCLVKVDDEVVARTATVWRSLGPFWGEEYTVHLPLDFHQLAFYVLDEDTVGHDDIIGKISLSREAITADPRGIDSWINLSRVDPDAEVQGEICLSVQMLEDGQGRCLRCHVLQARDLAPRDISGTSDPFARVFWGSQSLETSTIKKTRFPHWDEVLELREMPGAPSPLRVELWDWDMVGKNDFLGMVEFSPKTLQQKPPKGWFRLLPFPRAEEDSGGNLGALRVKVRLIEDRVLPSQCYQPLMELLMESVQGPAEEDTASPLALLEELTLGDCRQDLATKLVKLFLGRGLAGRFLDYLTRREVARTMDPNTLFRSNSLASKSMEQFMKLVGMPYLHEVLKPVISRVFEEKKYMELDPCKMDLGRTRRISFKGALSEEQMRETSLGLLTGYLGPIVDAIVGSVGRCPPAMRLAFKQLHRRVEERFPQAEHQDVKYLAISGFLFLRFFAPAILTPKLFDLRDQHADPQTSRSLLLLAKAVQSIGNLGQQLGQGKELWMAPLHPFLLQCVSRVRDFLDRLVDVDGDEAGVPARALFPPSAIVREGYLLKRKEEPAGLATRFAFKKRYVWLSGETLSFSKSPEWQVVTQDGTGALHTTYLQCKNVNELNQWLSALRKASAPNPNKLAACHPGAFRSARWTCCLQAERSAAGCSRTHSAVTLGDWSDPLDPDAEAQTVYRQLLLGRDQLRLKLLEDSNMDTTLEADTGACPEVLARQRAATARLLEVLADLDRAHEEFQQQERGKAALGPLGP

SEQ ID NO: 71902 - protein, 805 aa, Homo sapiens
  Payload ID: 14217
  Gene Symbol: RASAL1
  Gene Name: RAS protein activator like 1 (GAP1 like)
  Uniprot ID: O95294
  ENSP ID: ENSP00000448510
MAKSSSLNVRVVEGRALPAKDVSGSSDPYCLVKVDDEVVARTATVWRSLGPFWGEEYTVHLPLDFHQLAFYVLDEDTVGHDDIIGKISLSREAITADPRGIDSWINLSRVDPDAEVQGEICLSVQMLEDGQGRCLRCHVLQARDLAPRDISGTSDPFARVFWGSQSLETSTIKKTRFPHWDEVLELREMPGAPSPLRVELWDWDMVGKNDFLGMVEFSPKTLQQKPPKGWFRLLPFPRAEEDSGGNLGALRVKVRLIEDRVLPSQCYQPLMELLMESVQGPAEEDTASPLALLEELTLGDCRQDLATKLVKLFLGRGLAGRFLDYLTRREVARTMDPNTLFRSNSLASKSMEQFMKLVGMPYLHEVLKPVISRVFEEKKYMELDPCKMDLGRTRRISFKGALSEEQMRETSLGLLTGYLGPIVDAIVGSVGRCPPAMRLAFKQLHRRVEERFPQAEHQDVKYLAISGFLFLRFFAPAILTPKLFDLRDQHADPQTSRSLLLLAKAVQSIGNLGQQLGQGKELWMAPLHPFLLQCVSRVRDFLDRLVDVDGDEEAGVPARALFPPSAIVREGYLLKRKEEPAGLATRFAFKKRYVWLSGETLSFSKSPEWQMCHSIPVSHIRAVERVDEGAFQLPHVMQVVTQDGTGALHTTYLQCKNVNELNQWLSALRKASAPNPNKLAACHPGAFRSARWTCCLQAERSAAGCSRTHSAVTLGDWSDPLDPDAEAQTVYRQLLLGRDQLRLKLLEDSNMDTTLEADTGACPEVLARQRAATARLLEVLADLDRAHEEFQQQERGKAALGPLGP

SEQ ID NO: 71903 - protein, 806 aa, Homo sapiens
  Payload ID: 14217
  Gene Symbol: RASAL1
  Gene Name: RAS protein activator like 1 (GAP1 like)
  Uniprot ID: O95294
  ENSP ID: ENSP00000450244
MAKSSSLNVRVVEGRALPAKDVSGSSDPYCLVKVDDEVVARTATVWRSLGPFWGEEYTVHLPLDFHQLAFYVLDEDTVGHDDIIGKISLSREAITADPRGIDSWINLSRVDPDAEVQGEICLSVQMLEDGQGRCLRCHVLQARDLAPRDISGTSDPFARVFWGSQSLETSTIKKTRFPHWDEVLELREMPGAPSPLRVELWDWDMVGKNDFLGMVEFSPKTLQQKPPKGWFRLLPFPRAEEDSGGNLGALRVKVRLIEDRVLPSQCYQPLMELLMESVQGPAEEDTASPLALLEELTLGDCRQDLATKLVKLFLGRGLAGRFLDYLTRREVARTMDPNTLFRSNSLASKSMEQFMKLVGMPYLHEVLKPVISRVFEEKKYMELDPCKMDLGRTRRISFKGALSEEQMRETSLGLLTGYLGPIVDAIVGSVGRCPPAMRLAFKQLHRRVEERFPQAEHQQDVKYLAISGFLFLRFFAPAILTPKLFDLRDQHADPQTSRSLLLLAKAVQSIGNLGQQLGQGKELWMAPLHPFLLQCVSRVRDFLDRLVDVDGDEEAGVPARALFPPSAIVREGYLLKRKEEPAGLATRFAFKKRYVWLSGETLSFSKSPEWQMCHSIPVSHIRAVERVDEGAFQLPHVMQVVTQDGTGALHTTYLQCKNVNELNQWLSALRKASAPNPNKLAACHPGAFRSARWTCCLQAERSAAGCSRTHSAVTLGDWSDPLDPDAEAQTVYRQLLLGRDQLRLKLLEDSNMDTTLEADTGACPEVLARQRAATARLLEVLADLDRAHEEFQQQERGKAALGPLGP

SEQ ID NO: 71904 - protein, 1280 aa, Homo sapiens
  Payload ID: 14218
  Gene Symbol: RASAL2
  Gene Name: RAS protein activator like 2
  Uniprot ID: Q9UJF2
  ENSP ID: ENSP00000356621
MELSPSSGGAAEALSWPEMFPALESDSPLPPEDLDAVVPVSGAVAGGMLDRILLESVCQQQSWVRVYDVKGPPTHRLSCGQSPYTETTTWERKYCILTDSQLVLLNKEKEIPVEGGQEQQTDSTKGRCLRRTVSVPSEGQFPEYPPEGATKLEVPAERSPRRRSISGTSTSEKPNSMDTANTSPFKVPGFFSKRLKGSIKRTKSQSKLDRNTSFRLPSLRSTDDRSRGLPKLKESRSHESLLSPCSTVECLDLGRGEPVSVKPLHSSILGQDFCFEVTYLSGSKCFSCNSASERDKWMENLRRTVQPNKDNCRRAENVLRLWIIEAKDLAPKKKYFCELCLDDTLFARTTSKTKADNIFWGEHFEFFSLPPLHSITVHIYKDVEKKKKKDKNNYVGLVNIPTASVTGRQFVEKWYPVSTPTPNKGKTGGPSIRIKSRFQTITILPMEQYKEFAEFVTSNYTMLCSVLEPVISVRNKEELACALVHILQSTGRAKDFLTDLVMSEVDRCGEHDVLIFRENTIATKSIEEYLKLVGQQYLHDALGEFIKALYESDENCEVDPSKCSSSELIDHQSNLKMCCELAFCKIINSYCVFPRELKEVFASWKQQCLNRGKQDISERLISASLFLRFLCPAIMSPSLFNLMQEYPDDRTSRTLTLIAKVIQNLANFAKFGNKEEYMAFMNDFLEHEWGGMKRFLLEISNPDTISNTPGFDGYIDLGRELSVLHSLLWEVVSQLDKATVAKLGPLPRVLADITKSLTNPTPIQQQLRRFTEHNSSPNVSGSLSSGLQKIFEDPTDSDLHKLKSPSQDNTDSYFRGKTLLLVQQASSQSMTYSEKDERESSLPNGRSVSLMDLQDTHAAQVEHASVMLDVPIRLTGSQLSITQVASIKQLRETQSTPQSAPQVRRPLHPALNQPGGLQPLSFQNPVYHLNNPIPAMPKASIDSSLENLSTASSRSQSNSEDFKLSGPSNSSMEDFTKRSTQSEDFSRRHTVPDRHIPLALPRQNSTGQAQIRKVDQGGLGARAKAPPSLPHSASLRSTGSMSVVSAALVAEPVQNGSRSRQQSSSSRESPVPKVRAIQRQQTQQVQSPVDSATMSPVERTAAWVLNNGQYEEDVEETEQNLDEAKHAEKYEQEITKLKERLRVSSRRLEEYERRLLVQEQQMQKLLLEYKARLEDSEERLRRQQEEKDSQMKSIISRLMAVEEELKKDHAEMQAVIDAKQKIIDAQEKRIVSLDSANTRLMSALTQVKERYSMQVRNGISPTNPTKLSITENGEFKNSSC

SEQ ID NO: 71905 - protein, 693 aa, Homo sapiens
  Payload ID: 14218
  Gene Symbol: RASAL2
  Gene Name: RAS protein activator like 2
  ENSP ID: ENSP00000402897
  MOD_RES (1)..(1): Any amino acid
XEVFASWKQQCLNRGKQDISERLISASLFLRFLCPAIMSPSLFNLMQEYPDDRTSRTLTLIAKVIQNLANFAKFGNKEEYMAFMNDFLEHEWGGMKRFLLEISNPDTISNTPGFDGYIDLGRELSVLHSLLWEVVSQLDKGENSFLQATVAKLGPLPRVLADITKSLTNPTPIQQQLRRFTEHNSSPNVSGSLSSGLQKIFEDPTDSDLHKLKSPSQDNTDSYFRGKTLLLVQQASSQSMTYSEKDERESSLPNGRSVSLMDLQDTHAAQVEHASVMLDVPIRLTGSQLSITQVASIKQLRETQSTPQSAPQVRRPLHPALNQPGGLQPLSFQNPVYHLNNPIPAMPKASIDSSLENLSTASSRSQSNSEDFKLSGPSNSSMEDFTKRSTQSEDFSRRHTVPDRHIPLALPRQNSTGQAQIRKVDQGGLGARAKAPPSLPHSASLRSTGSMSVVSAALVAEPVQNGSRSRQQSSSSRESPVPKVRAIQRQQTQQVQSPVDSATMSPVERTAAWVLNNGQYEEDVEETEQNLDEAKHAEKYEQEITKLKERLRVSSRRLEEYERRLLVQEQQMQKLLLEYKARLEDSEERLRRQQEEKDSQMKSIISRLMAVEEELKKDHAEMQAVIDAKQKIIDAQVINGDEIIQTGKTDRVPGFSQHQTDERADPSEGAVQHAGPQWHLPHQPHQAFHHGEW

SEQ ID NO: 71906 - protein, 1139 aa, Homo sapiens
  Payload ID: 14218
  Gene Symbol: RASAL2
  Gene Name: RAS protein activator like 2
  Uniprot ID: Q9UJF2
  ENSP ID: ENSP00000420558
MQTPEVPAERSPRRRSISGTSTSEKPNSMDTANTSPFKVPGFFSKRLKGSIKRTKSQSKLDRNTSFRLPSLRSTDDRSRGLPKLKESRSHESLLSPCSTVECLDLGRGEPVSVKPLHSSILGQDFCFEVTYLSGSKCFSCNSASERDKWMENLRRTVQPNKDNCRRAENVLRLWIIEAKDLAPKKKYFCELCLDDTLFARTTSKTKADNIFWGEHFEFFSLPPLHSITVHIYKDVEKKKKKDKNNYVGLVNIPTASVTGRQFVEKWYPVSTPTPNKGKTGGPSIRIKSRFQTITILPMEQYKEFAEFVTSNYTMLCSVLEPVISVRNKEELACALVHILQSTGRAKDFLTDLVMSEVDRCGEHDVLIFRENTIATKSIEEYLKLVGQQYLHDALGEFIKALYESDENCEVDPSKCSSSELIDHQSNLKMCCELAFCKIINSYCVFPRELKEVFASWKQQCLNRGKQDISERLISASLFLRFLCPAIMSPSLFNLMQEYPDDRTSRTLTLIAKVIQNLANFAKFGNKEEYMAFMNDFLEHEWGGMKRFLLEISNPDTISNTPGFDGYIDLGRELSVLHSLLWEVVSQLDKGENSFLQATVAKLGPLPRVLADITKSLTNPTPIQQQLRRFTEHNSSPNVSGSLSSGLQKIFEDPTDSDLHKLKSPSQDNTDSYFRGKTLLLVQQASSQSMTYSEKDERESSLPNGRSVSLMDLQDTHAAQVEHASVMLDVPIRLTGSQLSITQVASIKQLRETQSTPQSAPQVRRPLHPALNQPGGLQPLSFQNPVYHLNNPIPAMPKASIDSSLENLSTASSRSQSNSEDFKLSGPSNSSMEDFTKRSTQSEDFSRRHTVPDRHIPLALPRQNSTGQAQIRKVDQGGLGARAKAPPSLPHSASLRSTGSMSVVSAALVAEPVQNGSRSRQQSSSSRESPVPKVRAIQRQQTQQVQSPVDSATMSPVERTAAWVLNNGQYEEDVEETEQNLDEAKHAEKYEQEITKLKERLRVSSRRLEEYERRLLVQEQQMQKLLLEYKARLEDSEERLRRQQEEKDSQMKSIISRLMAVEEELKKDHAEMQAVIDAKQKIIDAQEKRIVSLDSANTRLMSALTQVKERYSMQVRNGISPTNPTKLSITENGEFKNSSC

SEQ ID NO: 71907 - protein, 1011 aa, Homo sapiens
  Payload ID: 14219
  Gene Symbol: RASAL3
  Gene Name: RAS protein activator like 3
  Uniprot ID: Q86YV0
  ENSP ID: ENSP00000341905
MDPPSPSRTSQTQPTATSPLTSYRWHTGGGGEKAAGGFRWGRFAGWGRALSHQEPMVSTQPAPRSIFRRVLSAPPKESRTSRLRLSKALWGRHKNPPPEPDPEPEQEAPELEPEPELEPPTPQIPEAPTPNVPVWDIGGFTLLDGKLVLLGGEEEGPRRPRVGSASSEGSIHVAMGNFRDPDRMPGKTEPETAGPNQVHNVRGLLKRLKEKKKARLEPRDGPPSALGSRESLATLSELDLGAERDVRIWPLHPSLLGEPHCFQVTWTGGSRCFSCRSAAERDRWIEDLRRQFQPTQDNVEREETWLSVWVHEAKGLPRAAAGAPGVRAELWLDGALLARTAPRAGPGQLFWAERFHFEALPPARRLSLRLRGLGPGSAVLGRVALALEELDAPRAPAAGLERWFPLLGAPAGAALRARIRARRLRVLPSERYKELAEFLTFHYARLCGALEPALPAQAKEELAAAMVRVLRATGRAQALVTDLGTAELARCGGREALLFRENTLATKAIDEYMKLVAQDYLQETLGQVVRRLCASTEDCEVDPSKCPASELPEHQARLRNSCEEVFETIIHSYDWFPAELGIVFSSWREACKERGSEVLGPRLVCASLFLRLLCPAILAPSLFGLAPDHPAPGPARTLTLIAKVIQNLANRAPFGEKEAYMGFMNSFLEEHGPAMQCFLDQVAMVDVDAAPSGYQGSGDLALQLAVLHAQLCTIFAELDQTTRDTLEPLPTILRAIEEGQPVLVSVPMRLPLPPAQVHSSLSAGEKPGFLAPRDLPKHTPLISKSQSLRSVRRSESWARPRPDEERPLRRPRPVQRTQSVPVRRPARRRQSAGPWPRPKGSLSMGPAPRARPWTRDSASLPRKPSVPWQRQMDQPQDRNQALGTHRPVNKLAELQCEVAALREEQKVLSRLVESLSTQIRALTEQQEQLRGQLQDLDSRLRAGSSEFDSEHNLTSNEGHSLKNLEHRLNEMERTQAQLRDAVQSLQLSPRTRGSWSQPQPLKAPCLNGDTT

SEQ ID NO: 71908 - protein, 445 aa, Homo sapiens
  Payload ID: 14219
  Gene Symbol: RASAL3
  Gene Name: RAS protein activator like 3
  ENSP ID: ENSP00000468841
  MOD_RES (1)..(1): Any amino acid
XREALLFRENTLATKAIDEYMKLVAQDYLQETLGQVVRRLCASTEDCEVDPSKCPASELPEHQARLRNSCEEVFETIIHSYDWFPAELGIVFSSWREACKERGSEVLGPRLVCASLFLRLLCPAILAPSLFGLAPDHPAPGPARTLTLIAKVIQNLANRAPFGEKEAYMGFMNSFLEEHGPAMQCFLDQVAMVDVDAAPSGYQGSGDLALQLAVLHAQLCTIFAELDQTTRDTLEPLPTILRAIEEGQPVLVSVPMRLPLPPAQVHSSLSAGEKPGFLAPRDLPKHTPLISKSQSLRSVRRSESWARPRPDEERPLRRPRPVQRTQSVPVRRPARRRQSAGPWPRPKGSLSMGPAPRARPWTRDSASLPRKPSVPWQRQMDQPQDRNQALGTHRPVNKEHRLNEMERTQAQLRDAVQSLQLSPRTRGSWSQPQPLKAPCLNGDTT

SEQ ID NO: 71909 - protein, 228 aa, Homo sapiens
  Payload ID: 14219
  Gene Symbol: RASAL3
  Gene Name: RAS protein activator like 3
  ENSP ID: ENSP00000476634
AELDQTTRDTLEPLPTILRAIEEGQPVLVSVPMRLPLPPAQVHSSLSAGEKPGFLAPRDLPKHTPLISKSQSLRSVRRSESWARPRPDEERPLRRPRPVQRTQSVPVRRPARRRQSAGPWPRPKGSLSMGPAPRARPWTRDSASLPRKPSVPWQRQMDQPQDRNQALGTHRPVNKLAELQCEVAALREEQKVLSRLVESLSTQIRALTEQQEQLRGQLQDLDSRLRAG

SEQ ID NO: 71910 - protein, 489 aa, Homo sapiens
  Payload ID: 14220
  Gene Symbol: RASGRF1
  Gene Name: Ras protein-specific guanine nucleotide-releasing factor 1
  Uniprot ID: Q13972
  ENSP ID: ENSP00000378228
MYSAMSPFSKATLDTSKLYVSSSFTNKIPDEGDTTPEKPEDPSALSKQSSEVSMREESDIDQNQSDDGDTETSPTKSPTTPKSVKNKNSSEFPLFSYNNGVVMTSCRELDNNRSALSAASAFAIATAGANEGTPNKEKYRRMSLASAGFPPDQRNGDKEFVIRRAATNRVLNVLRHWVSKHSQDFETNDELKCKVIGFLEEVMHDPELLTQERKAAANIIRTLTQEDPGDNQITLEEITQMAEGVKAEPFENHSALEIAEQLTLLDHLVFKKIPYEEFFGQGWMKLEKNERTPYIMKTTKHFNDISNLIASEIIRNEDINARVSAIEKWVAVADICRCLHNYNAVLEITSSMNRSAIFRLKKTWLKVSKQTKALIDKLQKLVSSEGRFKNLREALKNCDPPCVPYLGMYLTDLAFIEEGTPNYTEDGLVNFSKMRMISHIIREIRQFQQTAYKIEHQAKVTQYLLDQSFVMDEESLYESSLRIEPKLPT

SEQ ID NO: 71911 - protein, 1273 aa, Homo sapiens
  Payload ID: 14220
  Gene Symbol: RASGRF1
  Gene Name: Ras protein-specific guanine nucleotide-releasing factor 1
  Uniprot ID: Q13972
  ENSP ID: ENSP00000405963
MQKGIRLNDGHVASLGLLARKDGTRKGYLSKRSSDNTKWQTKWFALLQNLLFYFESDSSSRPSGLYLLEGCVCDRAPSPKPALSAKEPLEKQHYFTVNFSHENQKALELRTEDAKDCDEWVAAIAHASYRTLATEHEALMQKYLHLLQIVETEKTVAKQLRQQIEDGEIEIERLKAEITSLLKDNERIQSTQTVAPNDEDSDIKKIKKVQSFLRGWLCRRKWKTIIQDYIRSPHADSMRKRNQVVFSMLEAEAEYVQQLHILVNNFLRPLRMAASSKKPPITHDDVSSIFLNSETIMFLHQIFYQGLKARISSWPTLVLADLFDILLPMLNIYQEFVRNHQYSLQILAHCKQNRDFDKLLKHYEAKPDCEERTLETFLTYPMFQIPRYILTLHELLAHTPHEHVERNSLDYAKSKLEELSRIMHDEVSETENIRKNLAIERMIIEGCEILLDTSQTFVRQGSLIQVPMSEKGKITRGRLGSLSLKKEGERQCFLFSKHLIICTRGSGGKLHLTKNGVISLIDCTLLEEPESTEEEAKGSGQDIDHLDFKIGVEPKDSPPFTVILVASSRQEKAAWTSDISQCVDNIRCNGLMMNAFEENSKVTVPQMIKRTREGTREAEMSRSDASLYCDDVDIRFSKTMNSCKVLQIRYASVERLLERLTDLRFLSIDFLNTFLHSYRVFTTAIVVLDKLITIYKKPISAIPARWLRSLELLFASGQNNKLLYGEPPKSPRATRKFSSPPPLSITKTSSPSRRRKLSLNIPIITGGKALDLAALSCNSNGYTSMYSAMSPFSKATLDTSKLYVSSSFTNKIPDEGDTTPEKPEDPSALSKQSSEVSMREESDIDQNQSDDGDTETSPTKSPTTPKSVKNKNSSEFPLFSYNNGVVMTSCRELDNNRSALSAASAFAIATAGANEGTPNKEKYRRMSLASAGFPPDQRNGDKEFVIRRAATNRVLNVLRHWVSKHSQDFETNDELKCKVIGFLEEVMHDPELLTQERKAAANIIRTLTQEDPGDNQITLEEITQMAEGVKAEPFENHSALEIAEQLTLLDHLVFKKIPYEEFFGQGWMKLEKNERTPYIMKTTKHFNDISNLIASEIIRNEDINARVSAIEKWVAVADICRCLHNYNAVLEITSSMNRSAIFRLKKTWLKVSKQTKALIDKLQKLVSSEGRFKNLREALKNCDPPCVPYLGMYLTDLAFIEEGTPNYTEDGLVNFSKMRMISHIIREIRQFQQTAYKIEHQAKVTQYLLDQSFVMDEESLYESSLRIEPKLPT

SEQ ID NO: 71912 - protein, 1257 aa, Homo sapiens
  Payload ID: 14220
  Gene Symbol: RASGRF1
  Gene Name: Ras protein-specific guanine nucleotide-releasing factor 1
  Uniprot ID: Q13972
  ENSP ID: ENSP00000452781
MQKGIRLNDGHVASLGLLARKDGTRKGYLSKRSSDNTKWQTKWFALLQNLLFYFESDSSSRPSGLYLLEGCVCDRAPSPKPALSAKEPLEKQHYFTVNFSHENQKALELRTEDAKDCDEWVAAIAHASYRTLATEHEALMQKYLHLLQIVETEKTVAKQLRQQIEDGEIEIERLKAEITSLLKDNERIQSTQTVAPNDEDSDIKKIKKVQSFLRGWLCRRKWKTIIQDYIRSPHADSMRKRNQVVFSMLEAEAEYVQQLHILVNNFLRPLRMAASSKKPPITHDDVSSIFLNSETIMFLHQIFYQGLKARISSWPTLVLADLFDILLPMLNIYQEFVRNHQYSLQILAHCKQNRDFDKLLKHYEAKPDCEERTLETFLTYPMFQIPRYILTLHELLAHTPHEHVERNSLDYAKSKLEELSRIMHDEVSETENIRKNLAIERMIIEGCEILLDTSQTFVRQGSLIQVPMSEKGKITRGRLGSLSLKKEGERQCFLFSKHLIICTRGSGGKLHLTKNGVISLIDCTLLEEPESTEEEAKGSGQDIDHLDFKIGVEPKDSPPFTVILVASSRQEKAAWTSDISQCVDNIRCNGLMMNAFEENSKVTVPQMIKSDASLYCDDVDIRFSKTMNSCKVLQIRYASVERLLERLTDLRFLSIDFLNTFLHSYRVFTTAIVVLDKLITIYKKPISAIPARSLELLFASGQNNKLLYGEPPKSPRATRKFSSPPPLSITKTSSPSRRRKLSLNIPIITGGKALDLAALSCNSNGYTSMYSAMSPFSKATLDTSKLYVSSSFTNKIPDEGDTTPEKPEDPSALSKQSSEVSMREESDIDQNQSDDGDTETSPTKSPTTPKSVKNKNSSEFPLFSYNNGVVMTSCRELDNNRSALSAASAFAIATAGANEGTPNKEKYRRMSLASAGFPPDQRNGDKEFVIRRAATNRVLNVLRHWVSKHSQDFETNDELKCKVIGFLEEVMHDPELLTQERKAAANIIRTLTQEDPGDNQITLEEITQMAEGVKAEPFENHSALEIAEQLTLLDHLVFKKIPYEEFFGQGWMKLEKNERTPYIMKTTKHFNDISNLIASEIIRNEDINARVSAIEKWVAVADICRCLHNYNAVLEITSSMNRSAIFRLKKTWLKVSKQTKALIDKLQKLVSSEGRFKNLREALKNCDPPCVPYLGMYLTDLAFIEEGTPNYTEDGLVNFSKMRMISHIIREIRQFQQTAYKIEHQAKVTQYLLDQSFVMDEESLYESSLRIEPKLPT

SEQ ID NO: 71913 - protein, 1237 aa, Homo sapiens
  Payload ID: 14221
  Gene Symbol: RASGRF2
  Gene Name: Ras protein-specific guanine nucleotide-releasing factor 2
  Uniprot ID: O14827
  ENSP ID: ENSP00000265080
MQKSVRYNEGHALYLAFLARKEGTKRGFLSKKTAEASRWHEKWFALYQNVLFYFEGEQSCRPAGMYLLEGCSCERTPAPPRAGAGQGGVRDALDKQYYFTVLFGHEGQKPLELRCEEEQDGKEWMEAIHQASYADILIEREVLMQKYIHLVQIVETEKIAANQLRHQLEDQDTEIERLKSEIIALNKTKERMRPYQSNQEDEDPDIKKIKKVQSFMRGWLCRRKWKTIVQDYICSPHAESMRKRNQIVFTMVEAESEYVHQLYILVNGFLRPLRMAASSKKPPISHDDVSSIFLNSETIMFLHEIFHQGLKARIANWPTLILADLFDILLPMLNIYQEFVRNHQYSLQVLANCKQNRDFDKLLKQYEANPACEGRMLETFLTYPMFQIPRYIITLHELLAHTPHEHVERKSLEFAKSKLEELSRVMHDEVSDTENIRKNLAIERMIVEGCDILLDTSQTFIRQGSLIQVPSVERGKLSKVRLGSLSLKKEGERQCFLFTKHFLICTRSSGGKLHLLKTGGVLSLIDCTLIEEPDASDDDSKGSGQVFGHLDFKIVVEPPDAAAFTVVLLAPSRQEKAAWMSDISQCVDNIRCNGLMTIVFEENSKVTVPHMIKSDARLHKDDTDICFSKTLNSCKVPQIRYASVERLLERLTDLRFLSIDFLNTFLHTYRIFTTAAVVLGKLSDIYKRPFTSIPVRSLELFFATSQNNRGEHLVDGKSPRLCRKFSSPPPLAVSRTSSPVRARKLSLTSPLNSKIGALDLTTSSSPTTTTQSPAASPPPHTGQIPLDLSRGLSSPEQSPGTVEENVDNPRVDLCNKLKRSIQKAVLESAPADRAGVESSPAADTTELSPCRSPSTPRHLRYRQPGGQTADNAHCSVSPASAFAIATAAAGHGSPPGFNNTERTCDKEFIIRRTATNRVLNVLRHWVSKHAQDFELNNELKMNVLNLLEEVLRDPDLLPQERKAAANILRALSQDDQDDIHLKLEDIIQMTDCMKAECFESLSAMELAEQITLLDHVIFRSIPYEEFLGQGWMKLDKNERTPYIMKTSQHFNDMSNLVASQIMNYADVSSRANAIEKWVAVADICRCLHNYNGVLEITSALNRSAIYRLKKTWAKVSKQTKALMDKLQKTVSSEGRFKNLRETLKNCNPPAVPYLGMYLTDLAFIEEGTPNFTEEGLVNFSKMRMISHIIREIRQFQQTSYRIDHQPKVAQYLLDKDLIIDEDTLYELSLKIEPRLPA

SEQ ID NO: 71914 - protein, 1151 aa, Homo sapiens
  Payload ID: 14221
  Gene Symbol: RASGRF2
  Gene Name: Ras protein-specific guanine nucleotide-releasing factor 2
  ENSP ID: ENSP00000421771
MQKSVRYNEGHALYLAFLARKEGTKRGFLSKKTAEASRWHEKWFALYQNVLFYFEGEQSCRPAGMYLLEGCSCERTPAPPRAGAGQGGVRDALDKQYYFTVLFGHEGQKPLELRCEEEQDGKEWMEAIHQASYADILIEREVLMQKYIHLVQIVETEKIAANQLRHQLEDQDTEIERLKSEIIALNKTKERMRPYQSNQEDEDPDIKKIKKVQSFMRGWLCRRKWKTIVQDYICSPHAESMRKRNQIVFTMVEAESEYVHQLYILVNGFLRPLRMAASSKKPPISHDDVSSIFLNSETIMFLHEIFHQGLKARIANWPTLILADLFDILLPMLNIYQEFVRNHQYSLQVLANCKQNRDFDKLLKQYEANPACEGRMLETFLTYPMFQIPRYIITLHELLAHTPHEHVERKSLEFAKSKLEELSRVMHDEVSDTENIRKNLAIERMIVEGCDILLDTSQTFIRQGSLIQVPSVERGKLSKVRLGSLSLKKEGERQCFLFTKHFLICTRSSGGKLHLLKTGGVLSLIDCTLIEEPDASDDDSKGSGQVFGHLDFKIVVEPPDAAAFTVVLLAPSRQEKAAWMSDISQCVDNIRCNGLMTIVFEENSKVTVPHMIKSDARLHKDDTDICFSKTLNSCKVPQIRYASVERLLERLTDLRFLSIDFLNTFLHTYRIFTTAAVVLGKLSDIYKRPFTSIPVRSLELFFATSQNNRGEHLVDGKSPRLCRKFSSPPPLAVSRTSSPVRARKLSLTSPLNSKIGALDLTTSSSPTTTTQSPAASPPPHTGQIPLDLSRGLSSPEQSPGTVEENVDNPRVDLCNKLKRSIQKAVLESAPADRAGVESSPAADTTELSPCRSPSTPRHLRYRQPGGQTADNAHCSVSPASAFAIATAAAGHGSPPGFNNTERTCDKEFIIRRTATNRVLNVLRHWVSKHAQDFELNNELKMNVLNLLEEVLRDPDLLPQERKAAANILRALSQDDQDDIHLKLEDIIQMTDCMKAECFESLSAMELAEQITLLDHVIFRSIPYEEFLGQGWMKLDKNERTPYIMKTSQHFNDMSNLVASQIMNYADVSSRANAIEKWVAVADICRCLHNYNGVLEITSALNRSAIYRLKKTWAKVSKQTKALMDKLQKTVSSEGRFKNLRETLKNSSRLNT

SEQ ID NO: 71915 - protein, 1687 aa, Homo sapiens
  Payload ID: 14222
  Gene Symbol: RREB1
  Gene Name: ras responsive element binding protein 1
  Uniprot ID: Q92766
  ENSP ID: ENSP00000305560
MTSSSPAGLEGSDLSSINTMMSAVMSVGKVTENGGSPQGIKSPSKPPGPNRIGRRNQETKEEKSSYNCPLCEKICTTQHQLTMHIRQHNTDTGGADHSCSICGKSLSSASSLDRHMLVHSGERPYKCTVCGQSFTTNGNMHRHMKIHEKDPNSATATAPPSPLKRRRLSSKRKLSHDAESEREDPAPAKKMVEDGQSGDLEKKADEVFHCPVCFKEFVCKYGLETHMETHSDNPLRCDICCVTFRTHRGLLRHNALVHKQLPRDAMGRPFIQNNPSIPAGFHDLGFTDFSCRKFPRISQAWCETNLRRCISEQHRFVCDTCDKAFPMLCSLALHKQTHVAADQGQEKPQATPLPGDALDQKGFLALLGLQHTKDVRPAPAEEPLPDDNQAIQLQTLKCQLPQDPGCTNLLSLSPFEAASLGGSLTVLPATKDSIKHLSLQPFQKGFIIQPDSSIVVKPISGESAIELADIQQILKMAASAPPQISLPPFSKAPAAPLQAIFKHMPPLKPKPLVTPRTVVATSTPPPLINAQQASPGCISPSLPPPPLKLLKGSVEAASNAHLLQSKSGTQPHAATRLSLQQPRAELPGQPEMKTQLEQDSIIEALLPLSMEAKIKQEITEGELKAFMTAPGGKKTPAMRKVLYPCRFCNQVFAFSGVLRAHVRSHLGISPYQCNICDYIAADKAALIRHLRTHSGERPYICKICHYPFTVKANCERHLRKKHLKATRKDIEKNIEYVSSSAAELVDAFCAPDTVCRLCGEDLKHYRALRIHMRTHCGRGLGGGHKGRKPFECKECSAAFAAKRNCIHHILKQHLHVPEQDIESYVLAADGLGPAEAPAAEASGRGEDSGCAALGDCKPLTAFLEPQNGFLHRGPTQPPPPHVSIKLEPASSFAVDFNEPLDFSQKGLALVQVKQENISFLSPSSLVPYDCSMEPIDLSIPKNFRKGDKDLATPSEAKKPEEEAGSSEQPSPCPAPGPSLPVTLGPSGILESPMAPAPAATPEPPAQPLQGPVQLAVPIYSSALVSSPPLVGSSALLSGTALLRPLRPKPPLLLPKPPVTEELPPLASIAQIISSVSSAPTLLKTKVADPGPASTGSNTTASDSLGGSVPKAATTATPAATTSPKESSEPPAPASSPEAASPTEQGPAGTSKKRGRKRGMRSRPRANSGGVDLDSSGEFASIEKMLATTDTNKFSPFLQTAEDNTQDEVAGAPADHHGPSDEEQGSPPEDKLLRAKRNSYTNCLQKITCPHCPRVFPWASSLQRHMLTHTDSQSDAETAAAAGEVLDLTSRDREQPSEGATELRQVAGDAPVEQATAETASPVHREEHGRGESHEPEEEHGTEESTGDADGAEEDASSNQSLDLDFATKLMDFKLAEGDGEAGAGGAASQEQKLACDTCGKSFKFLGTLSRHRKAHGRQEPKDEKGDGASTAEEGPQPAPEQEEKPPETPAEVVESAPGAGEAPAEKLAEETEGPSDGESAAEKRSSEKSDDDKKPKTDSPKSVASKADKRKKVCSVCNKRFWSLQDLTRHMRSHTGERPYKCQTCERTFTLKHSLVRHQRIHQKARHAKHHGKDSDKEERGEEDSENESTHSGNNAVSENEAELAPNASNHMAVTRSRKEGLASATKDCSHREEKVTAGWPSEPGQGDLNPESPAALGQDLLEPRSKRPAHPILATADGASQLVGME

SEQ ID NO: 71916 - protein, 1476 aa, Homo sapiens
  Payload ID: 14222
  Gene Symbol: RREB1
  Gene Name: ras responsive element binding protein 1
  Uniprot ID: Q92766
  ENSP ID: ENSP00000335574
MTSSSPAGLEGSDLSSINTMMSAVMSVGKVTENGGSPQGIKSPSKPPGPNRIGRRNQETKEEKSSYNCPLCEKICTTQHQLTMHIRQHNTDTGGADHSCSICGKSLSSASSLDRHMLVHSGERPYKCTVCGQSFTTNGNMHRHMKIHEKDPNSATATAPPSPLKRRRLSSKRKLSHDAESEREDPAPAKKMVEDGQSGDLEKKADEVFHCPVCFKEFVCKYGLETHMETHSDNPLRCDICCVTFRTHRGLLRHNALVHKQLPRDAMGRPFIQNNPSIPAGFHDLGFTDFSCRKFPRISQAWCETNLRRCISEQHRFVCDTCDKAFPMLCSLALHKQTHVAADQGQEKPQATPLPGDALDQKGFLALLGLQHTKDVRPAPAEEPLPDDNQAIQLQTLKCQLPQDPGCTNLLSLSPFEAASLGGSLTVLPATKDSIKHLSLQPFQKGFIIQPDSSIVVKPISGESAIELADIQQILKMAASAPPQISLPPFSKAPAAPLQAIFKHMPPLKPKPLVTPRTVVATSTPPPLINAQQASPGCISPSLPPPPLKLLKGSVEAASNAHLLQSKSGTQPHAATRLSLQQPRAELPGQPEMKTQLEQDSIIEALLPLSMEAKIKQEITEGELKAFMTAPGGKKTPAMRKVLYPCRFCNQVFAFSGVLRAHVRSHLGISPYQCNICDYIAADKAALIRHLRTHSGERPYICKICHYPFTVKANCERHLRKKHLKATRKDIEKNIEYVSSSAAELVDAFCAPDTVCRLCGEDLKHYRALRIHMRTHCGRGLGGGHKGRKPFECKECSAAFAAKRNCIHHILKQHLHVPEQDIESYVLAADGLGPAEAPAAEASGRGEDSGCAALGDCKPLTAFLEPQNGFLHRGPTQPPPPHVSIKLEPASSFAVDFNEPLDFSQKGLALVQVKQENISFLSPSSLVPYDCSMEPIDLSIPKNFRKGDKDLATPSEAKKPEEEAGSSEQPSPCPAPGPSLPVTLGPSGILESPMAPAPAATPEPPAQPLQGPVQLAVPIYSSALVSSPPLVGSSALLSGTALLRPLRPKPPLLLPKPPVTEELPPLASIAQIISSVSSAPTLLKTKVADPGPASTGSNTTASDSLGGSVPKAATTATPAATTSPKESSEPPAPASSPEAASPTEQGPAGTSKKRGRKRGMRSRPRANSGGVDLDSSGEFASIEKMLATTDTNKFSPFLQTAEDNTQDEVAGAPADHHGPSDEEQGSPPEDKLLRAKRNSYTNCLQKITCPHCPRVFPWASSLQRHMLTHTGQKPFPCQKCDAFFSTKSNCERHQLRKHGVTTCSLRRNGLIPQSKESDVGSHDSTGERPYKCQTCERTFTLKHSLVRHQRIHQKARHAKHHGKDSDKEERGEEDSENESTHSGNNAVSENEAELAPNASNHMAVTRSRKEGLASATKDCSHREEKVTAGWPSEPGQGDLNPESPAALGQDLLEPRSKRPAHPILATADGASQLVGME

SEQ ID NO: 71917 - protein, 1687 aa, Homo sapiens; identical to SEQ ID NO: 71915
  Payload ID: 14222
  Gene Symbol: RREB1
  Gene Name: ras responsive element binding protein 1
  Uniprot ID: Q92766
  ENSP ID: ENSP00000369265

SEQ ID NO: 71918 - protein, 1742 aa, Homo sapiens
  Payload ID: 14222
  Gene Symbol: RREB1
  Gene Name: ras responsive element binding protein 1
  Uniprot ID: Q92766
  ENSP ID: ENSP00000369270
MTSSSPAGLEGSDLSSINTMMSAVMSVGKVTENGGSPQGIKSPSKPPGPNRIGRRNQETKEEKSSYNCPLCEKICTTQHQLTMHIRQHNTDTGGADHSCSICGKSLSSASSLDRHMLVHSGERPYKCTVCGQSFTTNGNMHRHMKIHEKDPNSATATAPPSPLKRRRLSSKRKLSHDAESEREDPAPAKKMVEDGQSGDLEKKADEVFHCPVCFKEFVCKYGLETHMETHSDNPLRCDICCVTFRTHRGLLRHNALVHKQLPRDAMGRPFIQNNPSIPAGFHDLGFTDFSCRKFPRISQAWCETNLRRCISEQHRFVCDTCDKAFPMLCSLALHKQTHVAADQGQEKPQATPLPGDALDQKGFLALLGLQHTKDVRPAPAEEPLPDDNQAIQLQTLKCQLPQDPGCTNLLSLSPFEAASLGGSLTVLPATKDSIKHLSLQPFQKGFIIQPDSSIVVKPISGESAIELADIQQILKMAASAPPQISLPPFSKAPAAPLQAIFKHMPPLKPKPLVTPRTVVATSTPPPLINAQQASPGCISPSLPPPPLKLLKGSVEAASNAHLLQSKSGTQPHAATRLSLQQPRAELPGQPEMKTQLEQDSIIEALLPLSMEAKIKQEITEGELKAFMTAPGGKKTPAMRKVLYPCRFCNQVFAFSGVLRAHVRSHLGISPYQCNICDYIAADKAALIRHLRTHSGERPYICKICHYPFTVKANCERHLRKKHLKATRKDIEKNIEYVSSSAAELVDAFCAPDTVCRLCGEDLKHYRALRIHMRTHCGRGLGGGHKGRKPFECKECSAAFAAKRNCIHHILKQHLHVPEQDIESYVLAADGLGPAEAPAAEASGRGEDSGCAALGDCKPLTAFLEPQNGFLHRGPTQPPPPHVSIKLEPASSFAVDFNEPLDFSQKGLALVQVKQENISFLSPSSLVPYDCSMEPIDLSIPKNFRKGDKDLATPSEAKKPEEEAGSSEQPSPCPAPGPSLPVTLGPSGILESPMAPAPAATPEPPAQPLQGPVQLAVPIYSSALVSSPPLVGSSALLSGTALLRPLRPKPPLLLPKPPVTEELPPLASIAQIISSVSSAPTLLKTKVADPGPASTGSNTTASDSLGGSVPKAATTATPAATTSPKESSEPPAPASSPEAASPTEQGPAGTSKKRGRKRGMRSRPRANSGGVDLDSSGEFASIEKMLATTDTNKFSPFLQTAEDNTQDEVAGAPADHHGPSDEEQGSPPEDKLLRAKRNSYTNCLQKITCPHCPRVFPWASSLQRHMLTHTGQKPFPCQKCDAFFSTKSNCERHQLRKHGVTTCSLRRNGLIPQSKESDVGSHDSTDSQSDAETAAAAGEVLDLTSRDREQPSEGATELRQVAGDAPVEQATAETASPVHREEHGRGESHEPEEEHGTEESTGDADGAEEDASSNQSLDLDFATKLMDFKLAEGDGEAGAGGAASQEQKLACDTCGKSFKFLGTLSRHRKAHGRQEPKDEKGDGASTAEEGPQPAPEQEEKPPETPAEVVESAPGAGEAPAEKLAEETEGPSDGESAAEKRSSEKSDDDKKPKTDSPKSVASKADKRKKVCSVCNKRFWSLQDLTRHMRSHTGERPYKCQTCERTFTLKHSLVRHQRIHQKARHAKHHGKDSDKEERGEEDSENESTHSGNNAVSENEAELAPNASNHMAVTRSRKEGLASATKDCSHREEKVTAGWPSEPGQGDLNPESPAALGQDLLEPRSKRPAHPILATADGASQLVGME

SEQ ID NO: 71919 - protein, 778 aa, Homo sapiens
  Payload ID: 14222
  Gene Symbol: RREB1
  Gene Name: ras responsive element binding protein 1
  ENSP ID: ENSP00000419511
MTSSSPAGLEGSDLSSINTMMSAVMSVGKVTENGGSPQGIKSPSKPPGPNRIGRRNQETKEEKSSYNCPLCEKICTTQHQLTMHIRQHNTDTGGADHSCSICGKSLSSASSLDRHMLVHSGERPYKCTVCGQSFTTNGNMHRHMKIHEKDPNSATATAPPSPLKRRRLSSKRKLSHDAESEREDPAPAKKMVEDGQSGDLEKKADEVFHCPVCFKEFVCKYGLETHMETHSDNPLRCDICCVTFRTHRGLLRHNALVHKQLPRDAMGRPFIQNNPSIPAGFHDLGFTDFSCRKFPRISQAWCETNLRRCISEQHRFVCDTCDKAFPMLCSLALHKQTHVAADQGQEKPQATPLPGDALDQKGFLALLGLQHTKDVRPAPAEEPLPDDNQAIQLQTLKCQLPQDPGCTNLLSLSPFEAASLGGSLTVLPATKDSIKHLSLQPFQKGFIIQPDSSIVVKPISGESAIELADIQQILKMAASAPPQISLPPFSKAPAAPLQAIFKHMPPLKPKPLVTPRTVVATSTPPPLINAQQASPGCISPSLPPPPLKLLKGSVEAASNAHLLQSKSGTQPHAATRLSLQQPRAELPGQPEMKTQLEQDSIIEALLPLSMEAKIKQEITEGELKAFMTAPGGKKTPAMRKVLYPCRFCNQVFAFSGVLRAHVRSHLGISPYQCNICDYIAADKAALIRHLRTHSGERPYICKICHYPFTVKANCERHLRKKHLKATRKDIEKNIEYVSSSAAELVDAFCAPDTVCRLCGEDLKHYRALRIHMRTHCGR

SEQ ID NO: 71920 - protein, 164 aa, Homo sapiens
  Payload ID: 14222
  Gene Symbol: RREB1
  Gene Name: ras responsive element binding protein 1
  ENSP ID: ENSP00000420299
MTSSSPAGLEGSDLSSINTMMSAVMSVGKVTENGGSPQGIKSPSKPPGPNRIGRRNQETKEEKSSYNCPLCEKICTTQHQLTMHIRQHNTDTGGADHSCSICGKSLSSASSLDRHMLVHSGERPYKCTVCGQSFTTNGNMHRHMKIHEKDPNSATATAPPSPLK

SEQ ID NO: 71921 - protein, 136 aa, Homo sapiens
  Payload ID: 14222
  Gene Symbol: RREB1
  Gene Name: ras responsive element binding protein 1
  ENSP ID: ENSP00000420519
MTSSSPAGLEGSDLSSINTMMSAVMSVGKVTENGGSPQGIKSPSKPPGPNRIGRRNQETKEEKSSYNCPLCEKICTTQHQLTMHIRQHNTDTGGADHSCSICGKSLSSASSLDRHMLVHSGERPYKCTVCGQSFTT

SEQ ID NO: 71922 - protein, 4 aa, Homo sapiens
  Payload ID: 14222
  Gene Symbol: RREB1
  Gene Name: ras responsive element binding protein 1
  ENSP ID: ENSP00000420571
MTSS

SEQ ID NO: 71923 - protein, 755 aa, Homo sapiens
  Payload ID: 14222
  Gene Symbol: RREB1
  Gene Name: ras responsive element binding protein 1
  ENSP ID: ENSP00000483108
MEPIDLSIPKNFRKGDKDLATPSEAKKPEEEAGSSEQPSPCPAPGPSLPVTLGPSGILESPMAPAPAATPEPPAQPLQGPVQLAVPIYSSALVSSPPLVGSSALLSGTALLRPLRPKPPLLLPKPPVTEELPPLASIAQIISSVSSAPTLLKTKVADPGPASTGSNTTASDSLGGSVPKAATTATPAATTSPKESSEPPAPASSPEAASPTEQGPAGTSKKRGRKRGMRSRPRANSGGVDLDSSGEFASIEKMLATTDTNKFSPFLQTAEDNTQDEVAGAPADHHGPSDEEQGSPPEDKLLRAKRNSYTNCLQKITCPHCPRVFPWASSLQRHMLTHTDSQSDAETAAAAGEVLDLTSRDREQPSEGATELRQVAGDAPVEQATAETASPVHREEHGRGESHEPEEEHGTEESTGDADGGRGRVEQPEPGPGLRHQAHGLQAGGGRRRGRAGGAASQEQKLACDTCGKSFKFLGTLSRHRKAHGRQEPKDEKGDGASTAEEGPQPAPEQEEKPPETPAEVVESAPGAGEAPAEKLAEETEGPSDGESAAEKRSSEKSDDDKKPKTDSPKSVASKADKRKKVCSVCNKRFWSLQDLTRHMRSHTGERPYKCQTCERTFTLKHSLVRHQRIHQKARHAKHHGKDSDKEERGEEDSENESTHSGNNAVSENEAELAPNASNHMAVTRSRKEGLASATKDCSHREEKVTAGWPSEPGQGDLNPESPAALGQDLLEPRSKRPAHPILATADGASQLVGME

SEQ ID NO: 71924 - protein, 277 aa, Homo sapiens
  Payload ID: 14223
  Gene Symbol: RSU1
  Gene Name: Ras suppressor protein 1
  Uniprot ID: Q15404
  ENSP ID: ENSP00000339521
MSKSLKKLVEESREKNQPEVDMSDRGISNMLDVNGLFTLSHITQLVLSHNKLTMVPPNIAELKNLEVLNFFNNQIEELPTQISSLQKLKHLNLGMNRLNTLPRGFGSLPALEVLDLTYNNLSENSLPGNFFYLTTLRALYLSDNDFEILPPDIGKLTKLQILSLRDNDLISLPKEIGELTQLKELHIQGNRLTVLPPELGNLDLTGQKQVFKAENNPWVTPIADQFQLGVSHVFEYIRSETYKYLYGRHMQANPEPPKKNNDKSKKISRKPLAAKNR

SEQ ID NO: 71925 - protein, 277 aa, Homo sapiens; identical to SEQ ID NO: 71924
  Payload ID: 14223
  Gene Symbol: RSU1
  Gene Name: Ras suppressor protein 1
  Uniprot ID: Q15404
  ENSP ID: ENSP00000367154

SEQ ID NO: 71926 - protein, 224 aa, Homo sapiens
  Payload ID: 14223
  Gene Symbol: RSU1
  Gene Name: Ras suppressor protein 1
  Uniprot ID: Q15404
  ENSP ID: ENSP00000473588
MVPPNIAELKNLEVLNFFNNQIEELPTQISSLQKLKHLNLGMNRLNTLPRGFGSLPALEVLDLTYNNLSENSLPGNFFYLTTLRALYLSDNDFEILPPDIGKLTKLQILSLRDNDLISLPKEIGELTQLKELHIQGNRLTVLPPELGNLDLTGQKQVFKAENNPWVTPIADQFQLGVSHVFEYIRSETYKYLYGRHMQANPEPPKKNNDKSKKISRKPLAAKNR

SEQ ID NO: 71927 - protein, 281 aa, Homo sapiens
  Payload ID: 14224
  Gene Symbol: RASD1
  Gene Name: RAS, dexamethasone-induced 1
  Uniprot ID: Q9Y272
  ENSP ID: ENSP00000225688
MKLAAMIKKMCPSDSELSIPAKNCYRMVILGSSKVGKTAIVSRFLTGRFEDAYTPTIEDFHRKFYSIRGEVYQLDILDTSGNHPFPAMRRLSILTGDVFILVFSLDNRDSFEEVQRLRQQILDTKSCLKNKTKENVDVPLVICGNKGDRDFYREVDQREIEQLVGDDPQRCAYFEISAKKNSSLDQMFRALFAMAKLPSEMSPDLHRKVSVQYCDVLHKKALRNKKLLRAGSGGGGGDPGDAFGIVAPFARRPSVHSDLMYIREKASAGSQAKDKERCVIS

SEQ ID NO: 71928 - protein, 122 aa, Homo sapiens
  Payload ID: 14224
  Gene Symbol: RASD1
  Gene Name: RAS, dexamethasone-induced 1
  Uniprot ID: Q9Y272
  ENSP ID: ENSP00000463388
MKLAAMIKKMCPSDSELSIPAKNCYRMVILGSSKVGKTAIVSRFLTGRFEDAYTPTIEDFHRKFYSIRGEVYQLDILDTSGNHPFPAMRRLSILTDPRHQVLPQEQNQGERGRAPGHLRQQG

SEQ ID NO: 71929 - protein, 266 aa, Homo sapiens
  Payload ID: 14225
  Gene Symbol: RASD2
  Gene Name: RASD family, member 2
  Uniprot ID: Q96D21
  ENSP ID: ENSP00000216127
MMKTLSSGNCTLSVPAKNSYRMVVLGASRVGKSSIVSRFLNGRFEDQYTPTIEDFHRKVYNIRGDMYQLDILDTSGNHPFPAMRRLSILTGDVFILVFSLDNRESFDEVKRLQKQILEVKSCLKNKTKEAAELPMVICGNKNDHGELCRQVPTTEAELLVSGDENCAYFEVSAKKNTNVDEMFYVLFSMAKLPHEMSPALHRKISVQYGDAFHPRPFCMRRVKEMDAYGMVSPFARRPSVNSDLKYIKAKVLREGQARERDKCTIQ

SEQ ID NO: 71930 - protein, 211 aa, Homo sapiens
  Payload ID: 14226
  Gene Symbol: RASGEF1A
  Gene Name: RasGEF domain family, member 1A
  ENSP ID: ENSP00000363579
  MOD_RES (1)..(1): Any amino acid
XSCRVAGWVAKLKSFSAKIVQLLKEWTEAFPYDFQDEKAMAELKAITHRVTQCDEENGTVKKAIAQMTQSLLLSLAARSQLQELREKLRPPAVDKGPILKTKPPAAQKDILGVCCDPLVLAQQLTHIELDRVSSIYPEDLMQIVSHMDSLDNHRCRGDLTKTYSLEAYDNWFNCLSMLVATEVCRVVKKKHRTRMLEFFIDVARECFNIGN

SEQ ID NO: 71931 - protein, 489 aa, Homo sapiens
  Payload ID: 14226
  Gene Symbol: RASGEF1A
  Gene Name: RasGEF domain family, member 1A
  Uniprot ID: Q8N9B8
  ENSP ID: ENSP00000363583
MFLEPQETMPQTSVVFSSILGPSCSGQVQPGMGERGGGAGGGSGDLIFQDGHLISGSLEALMEHLVPTVDYYPDRTYIFTFLLSSRVFMPPHDLLARVGQICVEQKQQLEAGPEKAKLKSFSAKIVQLLKEWTEAFPYDFQDEKAMAELKAITHRVTQCDEENGTVKKAIAQMTQSLLLSLAARSQLQELREKLRPPAVDKGPILKTKPPAAQKDILGVCCDPLVLAQQLTHIELDRVSSIYPEDLMQIVSHMDSLDNHRCRGDLTKTYSLEAYDNWFNCLSMLVATEVCRVVKKKHRTRMLEFFIDVARECFNIGNFNSMMAIISGMNLSPVARLKKTWSKVKTAKFDVLEHHMDPSSNFCNYRTALQGATQRSQMANSSREKIVIPVFNLFVKDIYFLHKIHTNHLPNGHINFKKFWEISRQIHEFMTWTQVECPFEKDKKIQSYLLTAPIYSEEALFVASFESEGPENHMEKDSWKTLRTTLLNRA

SEQ ID NO: 71932 - protein, 481 aa, Homo sapiens
  Payload ID: 14226
  Gene Symbol: RASGEF1A
  Gene Name: RasGEF domain family, member 1A
  Uniprot ID: Q8N9B8
  ENSP ID: ENSP00000379154
MPQTSVVFSSILGPSCSGQVQPGMGERGGGAGGGSGDLIFQDGHLISGSLEALMEHLVPTVDYYPDRTYIFTFLLSSRVFMPPHDLLARVGQICVEQKQQLEAGPEKAKLKSFSAKIVQLLKEWTEAFPYDFQDEKAMAELKAITHRVTQCDEENGTVKKAIAQMTQSLLLSLAARSQLQELREKLRPPAVDKGPILKTKPPAAQKDILGVCCDPLVLAQQLTHIELDRVSSIYPEDLMQIVSHMDSLDNHRCRGDLTKTYSLEAYDNWFNCLSMLVATEVCRVVKKKHRTRMLEFFIDVARECFNIGNFNSMMAIISGMNLSPVARLKKTWSKVKTAKFDVLEHHMDPSSNFCNYRTALQGATQRSQMANSSREKIVIPVFNLFVKDIYFLHKIHTNHLPNGHINFKKFWEISRQIHEFMTWTQVECPFEKDKKIQSYLLTAPIYSEEALFVASFESEGPENHMEKDSWKTLRTTLLNRA

SEQ ID NO: 71933 - protein, 481 aa, Homo sapiens; identical to SEQ ID NO: 71932
  Payload ID: 14226
  Gene Symbol: RASGEF1A
  Gene Name: RasGEF domain family, member 1A
  Uniprot ID: Q8N9B8
  ENSP ID: ENSP00000379155

SEQ ID NO: 71934 - protein, 473 aa, Homo sapiens
  Payload ID: 14227
  Gene Symbol: RASGEF1B
  Gene Name: RasGEF domain family, member 1B
  Uniprot ID: Q0VAM2
  ENSP ID: ENSP00000264400
MPQTPPFSAMFDSSGYNRNLYQSAEDSCGGLYYHDNNLLSGSLEALIQHLVPNVDYYPDRTYIFTFLLSSRLFMHPYELMAKVCHLCVEHQRLSDPDSDKNQMRKIAPKILQLLTEWTETFPYDFRDERMMRNLKDLAHRIASGEEQTYRKNVQQMMQCLIRKLAALSQYEEVLAKISSTSTDRLTVLKTKPQSIQRDIITVCNDPYTLAQQLTHIELERLNYIGPEEFVQAFVQKDPLDNDKSCYSERKKTRNLEAYVEWFNRLSYLVATEICMPVKKKHRARMIEYFIDVARECFNIGNFNSLMAIISGMNMSPVSRLKKTWAKVKTAKFDILEHQMDPSSNFYNYRTALRGAAQRSLTAHSSREKIVIPFFSLLIKDIYFLNEGCANRLPNGHVNFEKFWELAKQVSEFMTWKQVECPFERDRKILQYLLTVPVFSEDALYLASYESEGPENHIEKDRWKSLRSSLLGRV

SEQ ID NO: 71935 - protein, 431 aa, Homo sapiens
  Payload ID: 14227
  Gene Symbol: RASGEF1B
  Gene Name: RasGEF domain family, member 1B
  Uniprot ID: Q0VAM2
  ENSP ID: ENSP00000338437
MPQTPPFSAMFDSSGYNRNLYQSAEDSCGGLYYHDNNLLSGSLEALIQHLVPNVDYYPDNQMRKIAPKILQLLTEWTETFPYDFRDERMMRNLKDLAHRIASGEETYRKNVQQMMQCLIRKLAALSQYEEVLAKISSTSTDRLTVLKTKPQSIQRDIITVCNDPYTLAQQLTHIELERLNYIGPEEFVQAFVQKDPLDNDKSCYSERKKTRNLEAYVEWFNRLSYLVATEICMPVKKKHRARMIEYFIDVARECFNIGNFNSLMAIISGMNMSPVSRLKKTWAKVKTAKFDILEHQMDPSSNFYNYRTALRGAAQRSLTAHSSREKIVIPFFSLLIKDIYFLNEGCANRLPNGHVNFEKFWELAKQVSEFMTWKQVECPFERDRKILQYLLTVPVFSEDALYLASYESEGPENHIEKDRWKSLRSSLLGRV

SEQ ID NO: 71936 - protein, 210 aa, Homo sapiens
  Payload ID: 14227
  Gene Symbol: RASGEF1B
  Gene Name: RasGEF domain family, member 1B
  ENSP ID: ENSP00000398763
MPQTPPFSAMFDSSGYNRNLYQSAEDSCGGLYYHDNNLLSGSLEALIQHLVPNVDYYPDRTYIFTFLLSSRLFMHPYELMAKVCHLCVEHQRLSDPDSDKNQMRKIAPKILQLLTEWTETFPYDFRDERMMRNLKDLAHRIASGEEVGNLNLARLLEFPGRAWVGNGAELCILISTASSLFCLWASPPHHILVYLVCQVRMIIPSHFKGI

SEQ ID NO: 71937 - protein, 472 aa, Homo sapiens
  Payload ID: 14227
  Gene Symbol: RASGEF1B
  Gene Name: RasGEF domain family, member 1B
  Uniprot ID: Q0VAM2
  ENSP ID: ENSP00000425393
MPQTPPFSAMFDSSGYNRNLYQSAEDSCGGLYYHDNNLLSGSLEALIQHLVPNVDYYPDRTYIFTFLLSSRLFMHPYELMAKVCHLCVEHQRLSDPDSDKNQMRKIAPKILQLLTEWTETFPYDFRDERMMRNLKDLAHRIASGEETYRKNVQQMMQCLIRKLAALSQYEEVLAKISSTSTDRLTVLKTKPQSIQRDIITVCNDPYTLAQQLTHIELERLNYIGPEEFVQAFVQKDPLDNDKSCYSERKKTRNLEAYVEWFNRLSYLVATEICMPVKKKHRARMIEYFIDVARECFNIGNFNSLMAIISGMNMSPVSRLKKTWAKVKTAKFDILEHQMDPSSNFYNYRTALRGAAQRSLTAHSSREKIVIPFFSLLIKDIYFLNEGCANRLPNGHVNFEKFWELAKQVSEFMTWKQVECPFERDRKILQYLLTVPVFSEDALYLASYESEGPENHIEKDRWKSLRSSLLGRV

SEQ ID NO: 71938 - protein, 232 aa, Homo sapiens
  Payload ID: 14227
  Gene Symbol: RASGEF1B
  Gene Name: RasGEF domain family, member 1B
  ENSP ID: ENSP00000426929
MMQCLIRKLAALSQYEEVLAKISSTSTDRLTVLKTKPQSIQRDIITVCNDPYTLAQQLTHIELERLNYIGPEEFVQAFVQKDPLDNDKSCYSERKKTRNLEAYVEWFNRLSYLVATEICMPVKKKHRARMIEYFIDVARECFNIGNFNSLMAIISGMNMSPVSRLKKTWAKVKTAKFDILEHQMDPSSNFYNYRTALRGAAQRSLTAHSSREKIVIPFFSLLIKDIYFLNEG

SEQ ID NO: 71939 - protein, 10 aa, Homo sapiens
  Payload ID: 14227
  Gene Symbol: RASGEF1B
  Gene Name: RasGEF domain family, member 1B
  ENSP ID: ENSP00000476065
MPQTPPFSAM

SEQ ID NO: 71940 - protein, 210 aa, Homo sapiens; identical to SEQ ID NO: 71936
  Payload ID: 14227
  Gene Symbol: RASGEF1B
  Gene Name: RasGEF domain family, member 1B
  ENSP ID: ENSP00000484927

SEQ ID NO: 71941 - protein, 466 aa, Homo sapiens
  Payload ID: 14228
  Gene Symbol: RASGEF1C
  Gene Name: RasGEF domain family, member 1C
  Uniprot ID: Q8N431
  ENSP ID: ENSP00000354963
MPQTLSASDMVTPGSLSPPPTEPTDGEQAGQPLLDGAPSSASLETLIQHLVPTADYYPEKAYIFTFLLSSRLFIEPRELLARVCHLCIEQQQLDKPVLDKARVRKFGPKLLQLLAEWTETFPRDFQEESTIGHLKDVVGRIAPCDEAYRKRMHQLLQALHQKLAALRQGPEGLVGADKPISYRTKPPASIHRELLGVCSDPYTLAQQLTHVELERLRHIGPEEFVQAFVNKDPLASTKPCFSDKTSNLEAYVKWFNRLCYLVATEICMPAKKKQRAQVIEFFIDVARECFNIGNFNSLMAIISGMNMSPVSRLKKTWAKVRTAKFFILEHQMDPTGNFCNYRTALRGAAHRSLTAHSSREKIVIPFFSLLIKDIYFLNEGCANRLPNGHVNFEKFLELAKQVGEFITWKQVECPFEQDASITHYLYTAPIFSEDGLYLASYESESPENQTEKERWKALRSSILGKT

SEQ ID NO: 71942 - protein, 466 aa, Homo sapiens; identical to SEQ ID NO: 71941
  Payload ID: 14228
  Gene Symbol: RASGEF1C
  Gene Name: RasGEF domain family, member 1C
  Uniprot ID: Q8N431
  ENSP ID: ENSP00000377037

SEQ ID NO: 71943 - protein, 315 aa, Homo sapiens
  Payload ID: 14228
  Gene Symbol: RASGEF1C
  Gene Name: RasGEF domain family, member 1C
  Uniprot ID: Q8N431
  ENSP ID: ENSP00000429114
MHQLLQALHQKLAALRQGPEGLVGADKPISYRTKPPASIHRELLGVCSDPYTLAQQLTHVELERLRHIGPEEFVQAFVNKDPLASTKPCFSDKTSNLEAYVKWFNRLCYLVATEICMPAKKKQRAQVIEFFIDVARECFNIGNFNSLMAIISGMNMSPVSRLKKTWAKVRTAKFFILEHQMDPTGNFCNYRTALRGAAHRSLTAHSSREKIVIPFFSLLIKDIYFLNEGCANRLPNGHVNFEKFLELAKQVGEFITWKQVECPFEQDASITHYLYTAPIFSEDGLYLASYESESPENQTEKERWKALRSSILGKT

SEQ ID NO: 71944 - protein, 238 aa, Homo sapiens
  Payload ID: 14228
  Gene Symbol: RASGEF1C
  Gene Name: RasGEF domain family, member 1C
  ENSP ID: ENSP00000430659
MHQLLQALHQKLAALRQGPEGLVGADKPISYRTKPPASIHRELLGVCSDPYTLAQQLTHVELERLRHIGPEEFVQAFVNKDPLASTKPCFSDKTSNLEAYVKWFNRLCYLVATEICMPAKKKQRAQVIEFFIDVARECFNIGNFNSLMAIISGMNMSPVSRLKKTWAKVRTAKFFILEHQMDPTGNFCNYRTALRGAAHRSLTAHSSREKEATLGGRGEQITRLSFLSSACSSKTSTS

SEQ ID NO: 71945 - protein, 238 aa, Homo sapiens; identical to SEQ ID NO: 71944
  Payload ID: 14228
  Gene Symbol: RASGEF1C
  Gene Name: RasGEF domain family, member 1C
  ENSP ID: ENSP00000481349

SEQ ID NO: 71946 - protein, 236 aa, Homo sapiens
  Payload ID: 14229
  Gene Symbol: RIT1
  Gene Name: Ras-like without CAAX 1
  Uniprot ID: Q92963
  ENSP ID: ENSP00000357305
MERWLFLGATEEGPKRTMDSGTRPVGSCCSSPAGLSREYKLVMLGAGGVGKSAMTMQFISHRFPEDHDPTIEDAYKIRIRIDDEPANLDILDTAGQAEFTAMRDQYMRAGEGFIICYSITDRRSFHEVREFKQLIYRVRRTDDTPVVLVGNKSDLKQLRQVTKEEGLALAREFSCPFFETSAAYRYYIDDVFHALVREIRRKEKEAVLAMEKKSKPKNSVWKRLKSPFRKKKDSVT

SEQ ID NO: 71947 - protein, 219 aa, Homo sapiens
  Payload ID: 14229
  Gene Symbol: RIT1
  Gene Name: Ras-like without CAAX 1
  Uniprot ID: Q92963
  ENSP ID: ENSP00000357306
MDSGTRPVGSCCSSPAGLSREYKLVMLGAGGVGKSAMTMQFISHRFPEDHDPTIEDAYKIRIRIDDEPANLDILDTAGQAEFTAMRDQYMRAGEGFIICYSITDRRSFHEVREFKQLIYRVRRTDDTPVVLVGNKSDLKQLRQVTKEEGLALAREFSCPFFETSAAYRYYIDDVFHALVREIRRKEKEAVLAMEKKSKPKNSVWKRLKSPFRKKKDSVT

SEQ ID NO: 71948 - protein, 183 aa, Homo sapiens
  Payload ID: 14229
  Gene Symbol: RIT1
  Gene Name: Ras-like without CAAX 1
  Uniprot ID: Q92963
  ENSP ID: ENSP00000441950
MTMQFISHRFPEDHDPTIEDAYKIRIRIDDEPANLDILDTAGQAEFTAMRDQYMRAGEGFIICYSITDRRSFHEVREFKQLIYRVRRTDDTPVVLVGNKSDLKQLRQVTKEEGLALAREFSCPFFETSAAYRYYIDDVFHALVREIRRKEKEAVLAMEKKSKPKNSVWKRLKSPFRKKKDSVT

SEQ ID NO: 71949 - protein, 92 aa, Homo sapiens
  Payload ID: 14229
  Gene Symbol: RIT1
  Gene Name: Ras-like without CAAX 1
  ENSP ID: ENSP00000476319
MDSGTRPVGSCCSSPAGLSREYKLVMLGAGGVGKSAMTMQFISHRFPEDHDPTIEDAYKIRIRIDDEPANLDILDTAGQDSRQSLQPCGTSI

SEQ ID NO: 71950 - protein, 151 aa, Homo sapiens
  Payload ID: 14229
  Gene Symbol: RIT1
  Gene Name: Ras-like without CAAX 1
  ENSP ID: ENSP00000476612
MDSGTRPVGSCCSSPAGLSREYKLVMLGAGGVGKSAMTMQFISHRFPEDHDPTIEDAYKIRIRIDDEPANLDILDTAGQAEFTAMRDQYMRAGEGFIICYSITDRRSFHEVREFKQLIYRVRRTDDTPVVLVGNKSDLKQLRQVTKEEGLA

SEQ ID NO: 71951 - protein, 217 aa, Homo sapiens
  Payload ID: 14230
  Gene Symbol: RIT2
  Gene Name: Ras-like without CAAX 2
  Uniprot ID: Q99578
  ENSP ID: ENSP00000321805
MEVENEASCSPGSASGGSREYKVVMLGAGGVGKSAMTMQFISHQFPDYHDPTIEDAYKTQVRIDNEPAYLDILDTAGQAEFTAMREQYMRGGEGFIICYSVTDRQSFQEAAKFKELIFQVRHTYEIPLVLVGNKIDLEQFRQVSTEEGLSLAQEYNCGFFETSAALRFCIDDAFHGLVREIRKKESMPSLMEKKLKRKDSLWKKLKGSLKKKRENMT

SEQ ID NO: 71952 - protein, 169 aa, Homo sapiens
  Payload ID: 14230
  Gene Symbol: RIT2
  Gene Name: Ras-like without CAAX 2
  ENSP ID: ENSP00000466620
MEVENEASCSPGSASGGSREYKVVMLGAGGVGKSAMTMQFISHQFPDYHDPTIEDAYKTQVRIDNEPAYLDILDTAGQLCDWLKHRWEVELWEIRRTEKQNSQPCGSSTCEVGKASSSATPSLTVNHFRRLPSLKSSFFRSATPMKFPWCWWVTKLIWNSSARFLQKKA

SEQ ID NO: 71953 - protein, 153 aa, Homo sapiens
  Payload ID: 14230
  Gene Symbol: RIT2
  Gene Name: Ras-like without CAAX 2
  Uniprot ID: Q99578
  ENSP ID: ENSP00000467217
MEVENEASCSPGSASGGSREYKVVMLGAGGVGKSAMTMQFISHQFPDYHDPTIEDAYKTQVRIDNEPAYLDILDTAGQAEFTAMREQYMRGGEGFIICYSVTDRQSFQEAAKFKELIFQVRHTYEIPLVLVGNKIDLEQFRQPTLKEFGREEF

SEQ ID NO: 71954 - protein, 199 aa, Homo sapiens
  Payload ID: 14231
  Gene Symbol: RERG
  Gene Name: RAS-like, estrogen-regulated, growth inhibitor
  Uniprot ID: Q96A58
  ENSP ID: ENSP00000256953
MAKSAEVKLAIFGRAGVGKSALVVRFLTKRFIWEYDPTLESTYRHQATIDDEVVSMEILDTAGQEDTIQREGHMRWGEGFVLVYDITDRGSFEEVLPLKNILDEIKKPKNVTLILVGNKADLDHSRQVSTEEGEKLATELACAFYECSACTGEGNITEIFYELCREVRRRRMVQGKTRRRSSTTHVKQAINKMLTKISS

SEQ ID NO: 71955 - protein, 199 aa, Homo sapiens; identical to SEQ ID NO: 71954
  Payload ID: 14231
  Gene Symbol: RERG
  Gene Name: RAS-like, estrogen-regulated, growth inhibitor
  Uniprot ID: Q96A58
  ENSP ID: ENSP00000438280

SEQ ID NO: 71956 - protein, 113 aa, Homo sapiens
  Payload ID: 14231
  Gene Symbol: RERG
  Gene Name: RAS-like, estrogen-regulated, growth inhibitor
  ENSP ID: ENSP00000439532
MIRYILQRRRMIHLRNWIVLKERKSITEKGNFKALVVRFLTKRFIWEYDPTLESTYRHQATIDDEVVSMEILDTAGQEDTIQREGHMRWGEGFVLVYDITDRGSFEEVLPLKN

SEQ ID NO: 71957 - protein, 38 aa, Homo sapiens
  Payload ID: 14231
  Gene Symbol: RERG
  Gene Name: RAS-like, estrogen-regulated, growth inhibitor
  ENSP ID: ENSP00000440887
MAKSAEVKLAIFGRAGVGKSALVVRFLTKRFIWEYDPT

SEQ ID NO: 71958 - protein, 199 aa, Homo sapiens; identical to SEQ ID NO: 71954
  Payload ID: 14231
  Gene Symbol: RERG
  Gene Name: RAS-like, estrogen-regulated, growth inhibitor
  Uniprot ID: Q96A58
  ENSP ID: ENSP00000441505

SEQ ID NO: 71959 - protein, 70 aa, Homo sapiens
  Payload ID: 14231
  Gene Symbol: RERG
  Gene Name: RAS-like, estrogen-regulated, growth inhibitor
  ENSP ID: ENSP00000441860
MAKSAEVKLAIFGRAGVGKSALVVRFLTKRFIWEYDPTLESTYRHQATIDDEVVSMEILDTAGQVNKEFS

SEQ ID NO: 71960 - protein, 180 aa, Homo sapiens
  Payload ID: 14231
  Gene Symbol: RERG
  Gene Name: RAS-like, estrogen-regulated, growth inhibitor
  Uniprot ID: Q96A58
  ENSP ID: ENSP00000444485
MAKSAEVKLAIFGRAGVGKSESTYRHQATIDDEVVSMEILDTAGQEDTIQREGHMRWGEGFVLVYDITDRGSFEEVLPLKNILDEIKKPKNVTLILVGNKADLDHSRQVSTEEGEKLATELACAFYECSACTGEGNITEIFYELCREVRRRRMVQGKTRRRSSTTHVKQAINKMLTKISS

SEQ ID NO: 71961 - protein, 203 aa, Homo sapiens
  Payload ID: 14232
  Gene Symbol: RASL10A
  Gene Name: RAS-like, family 10, member A
  Uniprot ID: Q92737
  ENSP ID: ENSP00000216101
MGGSLRVAVLGAPGVGKTAIIRQFLFGDYPERHRPTDGPRLYRPAVLLDGAVYDLSIRDGDVAGPGSSPGGPEEWPDAKDWSLQDTDAFVLVYDICSPDSFDYVKALRQRIAETRPAGAPEAPILVVGNKRDRQRLRFGPRRALAALVRRGWRCGYLECSAKYNWHVLRLFRELLRCALVRARPAHPALRLQGALHPARCSLM

SEQ ID NO: 71962 - protein, 115 aa, Homo sapiens
  Payload ID: 14232
  Gene Symbol: RASL10A
  Gene Name: RAS-like, family 10, member A
  Uniprot ID: Q92737
  ENSP ID: ENSP00000386095
MGGSLRVAVLGAPGVGKTAIIRQFLFGDYPERHRPTDGPRLYRPAVLLDGAVYDLSIRDGDVAGPGSSPGGPEEWPDAKDWSLQDTDAFVLVYDICSPDSFDYVKALRQRIAETR

SEQ ID NO: 71963 - protein, 203 aa, Homo sapiens
  Payload ID: 14233
  Gene Symbol: RASL10B
  Gene Name: RAS-like, family 10, member B
  Uniprot ID: Q96S79
  ENSP ID: ENSP00000474230
MVSTYRVAVLGARGVGKSAIVRQFLYNEFSEVCVPTTARRLYLPAVVMNGHVHDLQILDFPPISAFPVNTLQEWADTCCRGLRSVHAYILVYDICCFDSFEYVKTIRQQILETRVIGTSETPIIIVGNKRDLQRGRVIPRWNVSHLVRKTWKCGYVECSAKYNWHILLLFSELLKSVGCARCKHVHAALRFQGALRRNRCAIM

SEQ ID NO: 71964 - protein, 242 aa, Homo sapiens
  Payload ID: 14234
  Gene Symbol: RASL11A
  Gene Name: RAS-like, family 11, member A
  Uniprot ID: Q6T310
  ENSP ID: ENSP00000241463
MRPLSMSGHFLLAPIPESSSDYLLPKDIKLAVLGAGRVGKSAMIVRFLTKRFIGDYEPNTGKLYSRLVYVEGDQLSLQIQDTPGGVQIQDSLPQVVDSLSKCVQWAEGFLLVYSITDYDSYLSIRPLYQHIRKVHPDSKAPVIIVGNKGDLLHARQVQTQDGIQLANELGSLFLEISTSENYEDVCDVFQHLCKEVSKMHGLSGERRRASIIPRPRSPNMQDLKRRFKQALSPKVKAPSALG

SEQ ID NO: 71965 - protein, 248 aa, Homo sapiens
  Payload ID: 14235
  Gene Symbol: RASL11B
  Gene Name: RAS-like, family 11, member B
  Uniprot ID: Q9BPW5
  ENSP ID: ENSP00000248706
MRLIQNMCTIAEYPAPGNAAASDCCVGAAGRRLVKIAVVGASGVGKTALVVRFLTKRFIGDYERNAGNLYTRQVQIEGETLALQVQDTPGIQVHENSLSCSEQLNRCIRWADAVVIVFSITDYKSYELISQLHQHVQQLHLGTRLPVVVVANKADLLHIKQVDPQLGLQLASMLGCSFYEVSVSENYNDVYSAFHVLCKEVSHKQQPSSTPEKRRTSLIPRPKSPNMQDLKRRFKQALSAKVRTVTSV

SEQ ID NO: 71966 - protein, 266 aa, Homo sapiens
  Payload ID: 14236
  Gene Symbol: RASL12
  Gene Name: RAS-like, family 12
  Uniprot ID: Q9NYN1
  ENSP ID: ENSP00000220062
MSSVFGKPRAGSGPQSAPLEVNLAILGRRGAGKSALTVKFLTKRFISEYDPNLEDTYSSEETVDHQPVHLRVMDTADLDTPRNCERYLNWAHAFLVVYSVDSRQSFDSSSSYLELLALHAKETQRSIPALLLGNKLDMAQYRQVTKAEGVALAGRFGCLFFEVSACLDFEHVQHVFHEAVREARRELEKSPLTRPLFISEERALPHQAPLTARHGLASCTFNTLSTINLKEMPTVAQAKLVTVKSSRAQSKRKAPTLTLLKGFKIF

SEQ ID NO: 71967 - protein, 247 aa, Homo sapiens
  Payload ID: 14236
  Gene Symbol: RASL12
  Gene Name: RAS-like, family 12
  Uniprot ID: Q9NYN1
  ENSP ID: ENSP00000390028
MSSVFGKPRAGSGPQSAPLEVNLAILGRRGAGKSEDTYSSEETVDHQPVHLRVMDTADLDTPRNCERYLNWAHAFLVVYSVDSRQSFDSSSSYLELLALHAKETQRSIPALLLGNKLDMAQYRQVTKAEGVALAGRFGCLFFEVSACLDFEHVQHVFHEAVREARRELEKSPLTRPLFISEERALPHQAPLTARHGLASCTFNTLSTINLKEMPTVAQAKLVTVKSSRAQSKRKAPTLTLLKGFKIF

SEQ ID NO: 71968 - protein, 255 aa, Homo sapiens
  Payload ID: 14236
  Gene Symbol: RASL12
  Gene Name: RAS-like, family 12
  Uniprot ID: Q9NYN1
  ENSP ID: ENSP00000412787
MVIMGPELVGSWSDFKNEAADPRALTVKFLTKRFISEYDPNLEDTYSSEETVDHQPVHLRVMDTADLDTPRNCERYLNWAHAFLVVYSVDSRQSFDSSSSYLELLALHAKETQRSIPALLLGNKLDMAQYRQVTKAEGVALAGRFGCLFFEVSACLDFEHVQHVFHEAVREARRELEKSPLTRPLFISEERALPHQAPLTARHGLASCTFNTLSTINLKEMPTVAQAKLVTVKSSRAQSKRKAPTLTLLKGFKIF

SEQ ID NO: 71969 - protein, 308 aa, Homo sapiens
  Payload ID: 14237
  Gene Symbol: RRAD
  Gene Name: Ras-related associated with diabetes
  Uniprot ID: P55042
  ENSP ID: ENSP00000299759
MTLNGGGSGAGGSRGGGQERERRRGSTPWGPAPPLHRRSMPVDERDLQAALTPGALTAAAAGTGTQGPRLDWPEDSEDSLSSGGSDSDESVYKVLLLGAPGVGKSALARIFGGVEDGPEAEAAGHTYDRSIVVDGEEASLMVYDIWEQDGGRWLPGHCMAMGDAYVIVYSVTDKGSFEKASELRVQLRRARQTDDVPIILVGNKSDLVRSREVSVDEGRACAVVFDCKFIETSAALHHNVQALFEGVVRQIRLRRDSKEANARRQAGTRRRESLGKKAKRFLGRIVARNSRKMAFRAKSKSCHDLSVL

SEQ ID NO: 71970 - protein, 308 aa, Homo sapiens; identical to SEQ ID NO: 71969
  Payload ID: 14237
  Gene Symbol: RRAD
  Gene Name: Ras-related associated with diabetes
  Uniprot ID: P55042
  ENSP ID: ENSP00000388744

SEQ ID NO: 71971 - protein, 136 aa, Homo sapiens
  Payload ID: 14237
  Gene Symbol: RRAD
  Gene Name: Ras-related associated with diabetes
  ENSP ID: ENSP00000461995
  MOD_RES (1)..(1): Any amino acid
XLDWPEDSEDSLSSGGSDSDESVYKVLLLGAPGVGKSALARIFGGVEDGPEAEAAGHTYDRSIVVDGEEASLMVYDIWEQCCPAKWLSGASEGWAHRDACAGSYASQAAAAQPPGRPACRERTLPFFTARVCLPWR

SEQ ID NO: 71972 - protein, 162 aa, Homo sapiens
  Payload ID: 14237
  Gene Symbol: RRAD
  Gene Name: Ras-related associated with diabetes
  ENSP ID: ENSP00000462559
  MOD_RES (1)..(1): Any amino acid
XEDSLSSGGSDSDESVYKVLLLGAPGVGKSALARIFGGVEDGPEAEAAGHTYDRSIVVDGEEASLMVYDIWEQDGGRWLPGHCMAMGDAYVIVYSVTDKGSFEKASELRAQTLGPSELPAGHPQPHGHGQIDSAALRSGSQGPVRAGPTEMHAQAHMRPKQP

SEQ ID NO: 71973 - protein, 192 aa, Homo sapiens
  Payload ID: 14238
  Gene Symbol: RAC1
  Gene Name: ras-related C3 botulinum toxin substrate 1 (rho family, small GTP binding protein Rac1)
  Uniprot ID: P63000
  ENSP ID: ENSP00000258737
MQAIKCVVVGDGAVGKTCLLISYTTNAFPGEYIPTVFDNYSANVMVDGKPVNLGLWDTAGQEDYDRLRPLSYPQTDVFLICFSLVSPASFENVRAKWYPEVRHHCPNTPIILVGTKLDLRDDKDTIEKLKEKKLTPITYPQGLAMAKEIGAVKYLECSALTQRGLKTVFDEAIRAVLCPPPVKKRKRKCLLL

SEQ ID NO: 71974 - protein, 211 aa, Homo sapiens
  Payload ID: 14238
  Gene Symbol: RAC1
  Gene Name: ras-related C3 botulinum toxin substrate 1 (rho family, small GTP binding protein Rac1)
  Uniprot ID: P63000
  ENSP ID: ENSP00000348461
MQAIKCVVVGDGAVGKTCLLISYTTNAFPGEYIPTVFDNYSANVMVDGKPVNLGLWDTAGQEDYDRLRPLSYPQTVGETYGKDITSRGKDKPIADVFLICFSLVSPASFENVRAKWYPEVRHHCPNTPIILVGTKLDLRDDKDTIEKLKEKKLTPITYPQGLAMAKEIGAVKYLECSALTQRGLKTVFDEAIRAVLCPPPVKKRKRKCLLL

SEQ ID NO: 71975 - protein, 192 aa, Homo sapiens
  Payload ID: 14239
  Gene Symbol: RAC2
  Gene Name: ras-related C3 botulinum toxin substrate 2 (rho family, small GTP binding protein Rac2)
  Uniprot ID: P15153
  ENSP ID: ENSP00000249071
MQAIKCVVVGDGAVGKTCLLISYTTNAFPGEYIPTVFDNYSANVMVDSKPVNLGLWDTAGQEDYDRLRPLSYPQTDVFLICFSLVSPASYENVRAKWFPEVRHHCPSTPIILVGTKLDLRDDKDTIEKLKEKKLAPITYPQGLALAKEIDSVKYLECSALTQRGLKTVFDEAIRAVLCPQPTRQQKRACSLL

SEQ ID NO: 71976 - protein, 148 aa, Homo sapiens
  Payload ID: 14239
  Gene Symbol: RAC2
  Gene Name: ras-related C3 botulinum toxin substrate 2 (rho family, small GTP binding protein Rac2)
  ENSP ID: ENSP00000385270
MVDSKPVNLGLWDTAGQEDYDRLRPLSYPQTDVFLICFSLVSPASYENVRAKWFPEVRHHCPSTPIILVGTKLDLRDDKDTIEKLKEKKLAPITYPQGLALAKEIDSVKYLECSALTQRGLKTVFDEAIRAVLCPQPTRQQKRACSLL

SEQ ID NO: 71977 - protein, 185 aa, Homo sapiens
  Payload ID: 14239
  Gene Symbol: RAC2
  Gene Name: ras-related C3 botulinum toxin substrate 2 (rho family, small GTP binding protein Rac2)
  ENSP ID: ENSP00000385590
MQAIKAVGKTCLLISYTTNAFPGEYIPTVFDNYSANVMVDSKPVNLGLWDTAGQEDYDRLRPLSYPQTDVFLICFSLVSPASYENVRAKWFPEVRHHCPSTPIILVGTKLDLRDDKDTIEKLKEKKLAPITYPQGLALAKEIDSVKYLECSALTQRGLKTVFDEAIRAVLCPQPTRQQKRACSLL

SEQ ID NO: 71978 - protein, 86 aa, Homo sapiens
  Payload ID: 14239
  Gene Symbol: RAC2
  Gene Name: ras-related C3 botulinum toxin substrate 2 (rho family, small GTP binding protein Rac2)
  ENSP ID: ENSP00000385666
MQAIKCVVVGDGAVGKTCLLISYTTNAFPGEYIPTVPGRPCALLQDAEAGLSSDVEGACWCQTQEGRMTGEAPAPPWPALRGPHHS

SEQ ID NO: 71979 - protein, 166 aa, Homo sapiens
  Payload ID: 14239
  Gene Symbol: RAC2
  Gene Name: ras-related C3 botulinum toxin substrate 2 (rho family, small GTP binding protein Rac2)
  ENSP ID: ENSP00000403778
MQAIKCVVVGDGAVGKTCLLISYTTNAFPGEYIPTVFDNYSANVMVDSKPVNLGLWDTAGQEDYDRLRPLSYPQTDVFLICFSLVSPASYENVRAKWFPEVRHHCPSTPIILVGTKLDLRDDKDTIEKLKEKKLAPITYPQGLALAKEIDSVKYLECSALTQRGLK

SEQ ID NO: 71980 - protein, 192 aa, Homo sapiens
  Payload ID: 14240
  Gene Symbol: RAC3
  Gene Name: ras-related C3 botulinum toxin substrate 3 (rho family, small GTP binding protein Rac3)
  Uniprot ID: P60763
  ENSP ID: ENSP00000304283
MQAIKCVVVGDGAVGKTCLLISYTTNAFPGEYIPTVFDNYSANVMVDGKPVNLGLWDTAGQEDYDRLRPLSYPQTDVFLICFSLVSPASFENVRAKWYPEVRHHCPHTPILLVGTKLDLRDDKDTIERLRDKKLAPITYPQGLAMAREIGSVKYLECSALTQRGLKTVFDEAIRAVLCPPPVKKPGKKCTVF

SEQ ID NO: 71981 - protein, 130 aa, Homo sapiens
  Payload ID: 14240
  Gene Symbol: RAC3
  Gene Name: ras-related C3 botulinum toxin substrate 3 (rho family, small GTP binding protein Rac3)
  ENSP ID: ENSP00000462421
MVDGKPVNLGLWDTAGQEDYDRLRPLSYPQTDVFLICFSLVSPASFENVRAKWYPEVRHHCPHTPILLVGTKLDLRDDKDTIERLRDKKLAPITYPQGLAMAREIGSVKYLECSALTQRGLKTVFDEAIR

SEQ ID NO: 71982 - protein, 136 aa, Homo sapiens
  Payload ID: 14240
  Gene Symbol: RAC3
  Gene Name: ras-related C3 botulinum toxin substrate 3 (rho family, small GTP binding protein Rac3)
  ENSP ID: ENSP00000463590
MVDGKPVNLGLWDTAGQEDYDRLRPLSYPQTDVFLICFSLVSPASFENVRAKWYPEVRHHCPHTPILLVGTKLDLRDDKDTIERLRDKKLAPITYPQGLAMAREIGSVKYLECSALTQRGLKTVFDEAIRAVLCPP

SEQ ID NO: 71983 - protein, 313 aa, Homo sapiens
  Payload ID: 14241
  Gene Symbol: RRAGA
  Gene Name: Ras-related GTP binding A
  Uniprot ID: Q7L523
  ENSP ID: ENSP00000369899
MPNTAMKKKVLLMGKSGSGKTSMRSIIFANYIARDTRRLGATIDVEHSHVRFLGNLVLNLWDCGGQDTFMENYFTSQRDNIFRNVEVLIYVFDVESRELEKDMHYYQSCLEAILQNSPDAKIFCLVHKMDLVQEDQRDLIFKEREEDLRRLSRPLECACFRTSIWDETLYKAWSSIVYQLIPNVQQLEMNLRNFAQIIEADEVLLFERATFLVISHYQCKEQRDVHRFEKISNIIKQFKLSCSKLAASFQSMEVRNSNFAAFIDIFTSNTYVMVVMSDPSIPSAATLINIRNARKHFEKLERVDGPKHSLLMR

SEQ ID NO: 71984 - protein, 374 aa, Homo sapiens
  Payload ID: 14242
  Gene Symbol: RRAGB
  Gene Name: Ras-related GTP binding B
  Uniprot ID: Q5VZM2
  ENSP ID: ENSP00000262850
MEESDSEKTTEKENLGPRMDPPLGEPEGSLGWVLPNTAMKKKVLLMGKSGSGKTSMRSIIFANYIARDTRRLGATILDRIHSLQINSSLSTYSLVDSVGNTKTFDVEHSHVRFLGNLVLNLWDCGGQDTFMENYFTSQRDNIFRNVEVLIYVFDVESRELEKDMHYYQSCLEAILQNSPDAKIFCLVHKMDLVQEDQRDLIFKEREEDLRRLSRPLECSCFRTSIWDETLYKAWSSIVYQLIPNVQQLEMNLRNFAEIIEADEVLLFERATFLVISHYQCKEQRDAHRFEKISNIIKQFKLSCSKLAASFQSMEVRNSNFAAFIDIFTSNTYVMVVMSDPSIPSAATLINIRNARKHFEKLERVDGPKQCLLMR

SEQ ID NO: 71985 - protein, 346 aa, Homo sapiens
  Payload ID: 14242
  Gene Symbol: RRAGB
  Gene Name: Ras-related GTP binding B
  Uniprot ID: Q5VZM2
  ENSP ID: ENSP00000364077
MEESDSEKTTEKENLGPRMDPPLGEPEGSLGWVLPNTAMKKKVLLMGKSGSGKTSMRSIIFANYIARDTRRLGATIDVEHSHVRFLGNLVLNLWDCGGQDTFMENYFTSQRDNIFRNVEVLIYVFDVESRELEKDMHYYQSCLEAILQNSPDAKIFCLVHKMDLVQEDQRDLIFKEREEDLRRLSRPLECSCFRTSIWDETLYKAWSSIVYQLIPNVQQLEMNLRNFAEIIEADEVLLFERATFLVISHYQCKEQRDAHRFEKISNIIKQFKLSCSKLAASFQSMEVRNSNFAAFIDIFTSNTYVMVVMSDPSIPSAATLINIRNARKHFEKLERVDGPKQCLLMR

SEQ ID NO: 71986 - protein, 194 aa, Homo sapiens
  Payload ID: 14242
  Gene Symbol: RRAGB
  Gene Name: Ras-related GTP binding B
  ENSP ID: ENSP00000410630
MKKKVLLMGKSGSGKTSMRSIIFANYIARDTRRLGATIDVEHSHVRFLGNLVLNLWDCGGQDTFMENYFTSQRDNIFRNVEVLIYVFDVESRELEKDMHYYQSCLEAILQNSPDAKIFCLVHKMDLVQEDQRDLIFKEREEDLRRLSRPLECSCFRTSIWDETLYKAWSSIVYQLIPNVQQLEMNLRNFAEIIE

SEQ ID NO: 71987 - protein, 399 aa, Homo sapiens
  Payload ID: 14243
  Gene Symbol: RRAGC
  Gene Name: Ras-related GTP binding C
  Uniprot ID: Q9HB90
  ENSP ID: ENSP00000362092
MSLQYGAEETPLAGSYGAADSFPKDFGYGVEEEEEEAAAAGGGVGAGAGGGCGPGGADSSKPRILLMGLRRSGKSSIQKVVFHKMSPNETLFLESTNKIYKDDISNSSFVNFQIWDFPGQMDFFDPTFDYEMIFRGTGALIYVIDAQDDYMEALTRLHITVSKAYKVNPDMNFEVFIHKVDGLSDDHKIETQRDIHQRANDDLADAGLEKLHLSFYLTSIYDHSIFEAFSKVVQKLIPQLPTLENLLNIFISNSGIEKAFLFDVVSKIYIATDSSPVDMQSYELCCDMIDVVIDVSCIYGLKEDGSGSAYDKESMAIIKLNNTTVLYLKEVTKFLALVCILREESFERKGLIDYNFHCFRKAIHEVFEVGVTSHRSCGHQTSASSLKALTHNGTPRNAI

SEQ ID NO: 71988 - protein, 249 aa, Homo sapiens
  Payload ID: 14244
  Gene Symbol: RRAGD
  Gene Name: Ras-related GTP binding D
  Uniprot ID: Q9NQL2
  ENSP ID: ENSP00000352131
MEALARLHLTVTRAYKVNTDINFEVFIHKVDGLSDDHKIETQRDIHQRANDDLADAGLEKIHLSFYLTSIYDHSIFEAFSKVVQKLIPQLPTLENLLNIFISNSGIEKAFLFDVVSKIYIATDSTPVDMQTYELCCDMIDVVIDISCIYGLKEDGAGTPYDKESTAIIKLNNTTVLYLKEVTKFLALVCFVREESFERKGLIDYNFHCFRKAIHEVFEVRMKVVKSRKVQNRLQKKKRATPNGTPRVLL

SEQ ID NO: 71989 - protein, 400 aa, Homo sapiens
  Payload ID: 14244
  Gene Symbol: RRAGD
  Gene Name: Ras-related GTP binding D
  Uniprot ID: Q9NQL2
  ENSP ID: ENSP00000358423
MSQVLGKPQPQDEDDAEEEEEEDELVGLADYGDGPDSSDADPDSGTEEGVLDFSDPFSTEVKPRILLMGLRRSGKSSIQKVVFHKMSPNETLFLESTNKICREDVSNSSFVNFQIWDFPGQIDFFDPTFDYEMIFRGTGALIFVIDSQDDYMEALARLHLTVTRAYKVNTDINFEVFIHKVDGLSDDHKIETQRDIHQRANDDLADAGLEKIHLSFYLTSIYDHSIFEAFSKVVQKLIPQLPTLENLLNIFISNSGIEKAFLFDVVSKIYIATDSTPVDMQTYELCCDMIDVVIDISCIYGLKEDGAGTPYDKESTAIIKLNNTTVLYLKEVTKFLALVCFVREESFERKGLIDYNFHCFRKAIHEVFEVRMKVVKSRKVQNRLQKKKRATPNGTPRVLL

SEQ ID NO: 71990 - protein, 165 aa, Homo sapiens
  Payload ID: 14245
  Gene Symbol:
  Gene Name: Ras-related protein Rap-1b-like protein  [Source:UniProtKB/Swiss-Prot
  Acc:A6NIZ1]
  ENSP ID: ENSP00000488326
MREYKLVVLGSRGVGKSALTVQFVQGIFVEKYDPTIEDSYRTEQFTAMRDLYMKNGQGFALVYSITAQSTFNDLQDLREQILRVKDTDDVPMILVGNKCDLEDERVVGKEQGQNLARQWNNCAFLESSAKSKINVNEIFYDLVRQINRKTPVPGKARKKSSCQLL

SEQ ID NO: 71991 - protein, 184 aa, Homo sapiens
  Payload ID: 14245
  Gene Symbol:
  Gene Name: Ras-related protein Rap-1b-like protein  [Source:UniProtKB/Swiss-Prot
  Acc:A6NIZ1]
  Uniprot ID: A6NIZ1
  ENSP ID: ENSP00000488821
MREYKLVVLGSRGVGKSALTVQFVQGIFVEKYDPTIEDSYREQVEVDAQQCMLEILDTAGTEQFTAMRDLYMKNGQGFALVYSITAQSTFNDLQDLREQILRVKDTDDVPMILVGNKCDLEDERVVGKEQGQNLARQWNNCAFLESSAKSKINVNEIFYDLVRQINRKTPVPGKARKKSSCQLL

SEQ ID NO: 71992 - protein, 1594 aa, Homo sapiens
  Payload ID: 14246
  Gene Symbol: RB1CC1
  Gene Name: RB1-inducible coiled-coil 1
  Uniprot ID: Q8TDY2
  ENSP ID: ENSP00000025008
MKLYVFLVNTGTTLTFDTELTVQTVADLKHAIQSKYKIAIQHQVLVVNGGECMAADRRVCTYSAGTDTNPIFLFNKEMILCDRPPAIPKTTFSTENDMEIKVEESLMMPAVFHTVASRTQLALEMYEVAKKLCSFCEGLVHDEHLQHQGWAAIMANLEDCSNSYQKLLFKFESIYSNYLQSIEDIKLKLTHLGTAVSVMAKIPLLECLTRHSYRECLGRLDSLPEHEDSEKAEMKRSTELVLSPDMPRTTNESLLTSFPKSVEHVSPDTADAESGKEIRESCQSTVHQQDETTIDTKDGDLPFFNVSLLDWINVQDRPNDVESLVRKCFDSMSRLDPRIIRPFIAECRQTIAKLDNQNMKAIKGLEDRLYALDQMIASCGRLVNEQKELAQGFLANQKRAENLKDASVLPDLCLSHANQLMIMLQNHRKLLDIKQKCTTAKQELANNLHVRLKWCCFVMLHADQDGEKLQALLRLVIELLERVKIVEALSTVPQMYCLAVVEVVRRKMFIKHYREWAGALVKDGKRLYEAEKSKRESFGKLFRKSFLRNRLFRGLDSWPPSFCTQKPRKFDCELPDISLKDLQFLQSFCPSEVQPFLRVPLLCDFEPLHQHVLALHNLVKAAQSLDEMSQTITDLLSEQKASVSQTSPQSASSPRMESTAGITTTTSPRTPPPLTVQDPLCPAVCPLEELSPDSIDAHTFDFETIPHPNIEQTIHQVSLDLDSLAESPESDFMSAVNEFVIEENLSSPNPISDPQSPEMMVESLYSSVINAIDSRRMQDTNVCGKEDFGDHTSLNVQLERCRVVAQDSHFSIQTIKEDLCHFRTFVQKEQCDFSNSLKCTAVEIRNIIEKVKCSLEITLKEKHQKELLSLKNEYEGKLDGLIKETEENENKIKKLKGELVCLEEVLQNKDNEFALVKHEKEAVICLQNEKDQKLLEMENIMHSQNCEIKELKQSREIVLEDLKKLHVENDEKLQLLRAELQSLEQSHLKELEDTLQVRHIQEFEKVMTDHRVSLEELKKENQQIINQIQESHAEIIQEKEKQLQELKLKVSDLSDTRCKLEVELALKEAETDEIKILLEESRAQQKETLKSLLEQETENLRTEISKLNQKIQDNNENYQVGLAELRTLMTIEKDQCISELISRHEEESNILKAELNKVTSLHNQAFEIEKNLKEQIIELQSKLDSELSALERQKDEKITQQEEKYEAIIQNLEKDRQKLVSSQEQDREQLIQKLNCEKDEAIQTALKEFKLEREVVEKELLEKVKHLENQIAKSPAIDSTRGDSSSLVAELQEKLQEEKAKFLEQLEEQEKRKNEEMQNVRTSLIAEQQTNFNTVLTREKMRKENIINDLSDKLKSTMQQQERDKDLIESLSEDRARLLEEKKKLEEEVSKLRSSSFVPSPYVATAPELYGACAPELPGESDRSAVETADEGRVDSAMETSMMSVQENIHMLSEEKQRIMLLERTLQLKEEENKRLNQRLMSQSMSSVSSRHSEKIAIRDFQVGDLVLIILDERHDNYVLFTVSPTLYFLHSESLPALDLKPGEGASGASRRPWVLGKVMEKEYCQAKKAQNRFKVPLGTKFYRVKAVSWNKKV

SEQ ID NO: 71993 - protein, 1591 aa, Homo sapiens
  Payload ID: 14246
  Gene Symbol: RB1CC1
  Gene Name: RB1-inducible coiled-coil 1
  Uniprot ID: Q8TDY2
  ENSP ID: ENSP00000396067
MKLYVFLVNTGTTLTFDTELTVQTVADLKHAIQSKYKIAIQHQVLVVNGGECMAADRRVCTYSAGTDTNPIFLFNKEMILCDRPPAIPKTTFSTENDMEIKVEESLMMPAVFHTVASRTQLALEMYEVAKKLCSFCEGLVHDEHLQHQGWAAIMANLEDCSNSYQKLLFKFESIYSNYLQSIEDIKLKLTHLGTAVSVMAKIPLLECLTRHSYRECLGRLDSLPEHEDSEKAEMKRSTELVLSPDMPRTTNESLLTSFPKSVEHVSPDTADAESGKEIRESCQSTVHQQDETTIDTKDGDLPFFNVSLLDWINVQDRPNDVESLVRKCFDSMSRLDPRIIRPFIAECRQTIAKLDNQNMKAIKGLEDRLYALDQMIASCGRLVNEQKELAQGFLANQKRAENLKDASVLPDLCLSHANQLMIMLQNHRKLLDIKQKCTTAKQELANNLHVRLKWCCFVMLHADQDGEKLQALLRLVIELLERVKIVEALSTVPQMYCLAVVEVVRRKMFIKHYREWAGALVKDGKRLYEAEKSKRESFGKLFRKSFLRNRLFRGLDSWPPSFCTQKPRKFDCELPDISLKDLQFLQSFCPSEVQPFLRVPLLCDFEPLHQHVLALHNLVKAAQSLDEMSQTITDLLSEQKASVSQTSPQSASSPRMESTAGITTTTSPRTPPPLTVQDPLCPAVCPLEELSPDSIDAHTFDFETIPHPNIEQTIHQVSLDLDSLAESPESDFMSAVNEFVIEENLSSPNPISDPQSPEMMVESLYSSVINAIDSRRMQDTNVCGKEDFGDHTSLNVQLERCRVVAQDSHFSIQTIKEDLCHFRTFVQKEQCDFSNSLKCTAVEIRNIIEKVKCSLEITLKEKHQKELLSLKNEYEGKLDGLIKETEENENKIKKLKGELVCLEEVLQNKDNEFALVKHEKEAVICLQNEKDQKLLEMENIMHSQNCEIKELKQSREIVLEDLKKLHVENDEKLQLLRAELQSLEQSHLKELEDTLQVRHIQEFEKVMTDHRVSLEELKKENQQIINQIQESHAEIIQEKEKQLQELKLKVSDLSDTRCKLEVELALKEAETDEIKILLEESRAQQKETLKSLLEQETENLRTEISKLNQKIQDNNENYQVGLAELRTLMTIEKDQCISELISRHEEESNILKAELNKVTSLHNQAFEIEKNLKEQIIELQSKLDSELSALERQKDEKITQQEEKYEAIIQNLEKDRQKLVSSQEQDREQLIQKLNCEKDEAIQTALKEFKLEREVVEKELLEKVKHLENQIAKSPAIDSTRGDSSSLVAELQEKLQEEKAKFLEQLEEQEKRKNEEMQNVRTSLIAEQQTNFNTVLTREKMRKENIINDLSDKLKSTMQQQERDKDLIESLSEDRARLLEEKKKLEEEVSKLRSSSFVPSPYVATAPELYGACAPELPGESDRSAVETADEGRVDSAMETSMMSVQENIHMLSEEKQRIMLLERTLQLKEEENKRLNQRLMSQSMSSVSSRHSEKIAIRDFQVGDLVLIILDERHDNYVLFTVSPTLYFLHSESLPALDLKPASGASRRPWVLGKVMEKEYCQAKKAQNRFKVPLGTKFYRVKAVSWNKKV

SEQ ID NO: 71994 - protein, 42 aa, Homo sapiens
  Payload ID: 14246
  Gene Symbol: RB1CC1
  Gene Name: RB1-inducible coiled-coil 1
  ENSP ID: ENSP00000429115
MVPGVAGSAAAAGEGGGVAGFLSLTSNAIQLPISSKANISQF

SEQ ID NO: 71995 - protein, 15 aa, Homo sapiens
  Payload ID: 14246
  Gene Symbol: RB1CC1
  Gene Name: RB1-inducible coiled-coil 1
  ENSP ID: ENSP00000429611
MKLYVFLVNTGTTLT

SEQ ID NO: 71996 - protein, 52 aa, Homo sapiens
  Payload ID: 14246
  Gene Symbol: RB1CC1
  Gene Name: RB1-inducible coiled-coil 1
  ENSP ID: ENSP00000429879
MAADRRVCTYSAGTDTNPIFLFNKEMILCDRPPAIPKTTFSTENDMEIKVEE

SEQ ID NO: 71997 - protein, 72 aa, Homo sapiens
  Payload ID: 14246
  Gene Symbol: RB1CC1
  Gene Name: RB1-inducible coiled-coil 1
  ENSP ID: ENSP00000429918
MVPGVAGSAAAAGEGGGVAGVADLKHAIQSKYKIAIQHQVLVVNGGECMAADRRVCTYSAGTDTNPIFLFNK

SEQ ID NO: 71998 - protein, 109 aa, Homo sapiens
  Payload ID: 14246
  Gene Symbol: RB1CC1
  Gene Name: RB1-inducible coiled-coil 1
  ENSP ID: ENSP00000430792
  MOD_RES (1)..(1): Any amino acid
XQELANNLHVRLKWCCFVMLHADQDGEKLQALLRLVIELLERVKIVEALSTVPQMYCLAVVEVVRRKMFIKHYREWAGALVKDGKRLYEAEKSKRESFGKLFNSKASKV

SEQ ID NO: 71999 - protein, 127 aa, Homo sapiens
  Payload ID: 14246
  Gene Symbol: RB1CC1
  Gene Name: RB1-inducible coiled-coil 1
  ENSP ID: ENSP00000430809
  MOD_RES (1)..(1): Any amino acid
XIMLLERTLQLKEEENKRLNQRLMSQSMSSVSSRHSEKIAIRDFQVGDLVLIILDERHDNYVLFTVSPTLYFLHSESLPALDLKPASGASRRPWVLGKVMEKEYCQAKKCSFITPKTAGHLFMQKSA

SEQ ID NO: 72000 - protein, 113 aa, Homo sapiens
  Payload ID: 14247
  Gene Symbol: RBAK-RBAKDN
  Gene Name: RBAK-RBAKDN readthrough
  ENSP ID: ENSP00000380112
MNTLQGPVSFKDVAVDFTQEEWQQLDPDEKITYRDVMLENYSHLVSVGYDTTKPNVIIKLEQGEEPWIMGGEFPCQHSPAALPAGHVAPAVAAAAAAPGRPGPHRQSRSPPGC

SEQ ID NO: 72001 - protein, 243 aa, Homo sapiens
  Payload ID: 14247
  Gene Symbol: RBAK-RBAKDN
  Gene Name: RBAK-RBAKDN readthrough
  ENSP ID: ENSP00000385560
MNTLQGPVSFKDVAVDFTQEEWQQLDPDEKITYRDVMLENYSHLVSVGYDTTKPNVIIKLEQGEEPWIMGGEFPCQHSPEAWRVDDLIERIQENEDKHSSRPARRPCGPRCCCCCCCSRPPRSPPPKPLPTRMLTPRKAFRTCSKESGLAETESCGQTHTWPRALAVLMGLWWPRDQKAGEEDLRFRERRPGLQATATGSGEHGAFPVHSQGVWASTHWQGTAVCPLQTPPPDAFIRNNKVLS

SEQ ID NO: 72002 - protein, 714 aa, Homo sapiens
  Payload ID: 14248
  Gene Symbol: RBAK
  Gene Name: RB-associated KRAB zinc finger
  Uniprot ID: Q9NYW8
  ENSP ID: ENSP00000275423
MNTLQGPVSFKDVAVDFTQEEWQQLDPDEKITYRDVMLENYSHLVSVGYDTTKPNVIIKLEQGEEPWIMGGEFPCQHSPEAWRVDDLIERIQENEDKHSRQAACINSKTLTEEKENTFSQIYMETSLVPSSIIAHNCVSCGKNLESISQLISSDGSYARTKPDECNECGKTYHGEKMCEFNQNGDTYSHNEENILQKISILEKPFEYNECMEALDNEAVFIAHKRAYIGEKPYEWNDSGPDFIQMSNFNAYQRSQMEMKPFECSECGKSFCKKSKFIIHQRAHTGEKPYECNVCGKSFSQKGTLTVHRRSHLEEKPYKCNECGKTFCQKLHLTQHLRTHSGEKPYECSECGKTFCQKTHLTLHQRNHSGERPYPCNECGKSFSRKSALSDHQRTHTGEKLYKCNECGKSYYRKSTLITHQRTHTGEKPYQCSECGKFFSRVSYLTIHYRSHLEEKPYECNECGKTFNLNSAFIRHRKVHTEEKSHECSECGKFSQLYLTDHHTAHLEEKPYECNECGKTFLVNSAFDGHQPLPKGEKSYECNVCGKLFNELSYYTEHYRSHSEEKPYGCSECGKTFSHNSSLFRHQRVHTGEKPYECYECGKFFSQKSYLTIHHRIHSGEKPYECSKCGKVFSRMSNLTVHYRSHSGEKPYECNECGKVFSQKSYLTVHYRTHSGEKPYECNECGKKFHHRSAFNSHQRIHRRGNMNVLDVENL

SEQ ID NO: 72003 - protein, 714 aa, Homo sapiens; identical to SEQ ID NO: 72002
  Payload ID: 14248
  Gene Symbol: RBAK
  Gene Name: RB-associated KRAB zinc finger
  Uniprot ID: Q9NYW8
  ENSP ID: ENSP00000380120

SEQ ID NO: 72004 - protein, 664 aa, Homo sapiens
  Payload ID: 14249
  Gene Symbol: RBBP8NL
  Gene Name: RBBP8 N-terminal like
  Uniprot ID: Q8NC74
  ENSP ID: ENSP00000252998
MESFMESLNRLKEIHEKEVLGLQNKLLELNSERCRDAQRIEELFSKNHQLREQQKTLKENLRVLENRLRAGLCDRCMVTQELARKRQQEFESSHLQNLQRIFILTNEMNGLKEENETLKEEVKRLRGLGDRPKPRAKEGTSDPPSPLLLPSPGGWKAITEKPPGGHEEAEEDHQGVGLRGEEKPAGHRTSPVAKISPGATLPESRAPDMSPQRISNQLHGTIAVVRPGSQACPADRGPANGTPPPLPARSSPPSPAYERGLSLDSFLRASRPSAMTHEAPKLSPKVDRLCLLNRPLSLHLQSPHSSPLAPAAAPSDPRLQDLKAREAEAWEEPTELLGLPSALAGMQDLRLEGALHLLLAQQQLRARARAGSVRPRGQPTPGEMLPSLPVGSDSEGPENEGTRAALAAAGLSGGRHTQPAGPGRAQRTEAAATQDCALDKPLDLSEWGRARGQDTPKPAGQHGSLSPAAAHTASPEPPTQSGPLTRSPQALSNGTKGTRVPEQEEASTPMDPSRPLPGSQLSLSSPGSTEDEDTGRPLPPPHPQPPPHPQPPDLDGHPEPSKAEVLRPESDELDETDTPGSEVGLSSQAEATTSTTGEGPECICTQEHGQGPPRKRKRASEPGDKASKKPSRGRRKLTATEGPGSPRDAEDHSPSPNSSPWEET

SEQ ID NO: 72005 - protein, 339 aa, Homo sapiens
  Payload ID: 14250
  Gene Symbol: RBM14-RBM4
  Gene Name: RBM14-RBM4 readthrough
  ENSP ID: ENSP00000388552
MKIFVGNVDGADTTPEELAALFAPYGTVMSCAVMKQFAFVHMRENAGALRAIEALHGHELRPGRALVVEMSRPRPLNTWKIFVGNVSAACTSQELRSLFERRGRVIECDVVKGKRMHVQLSTSRLRTAPGMGDQSGCYRCGKEGHWSKECPIDRSGRVADLTEQYNEQYGAVRTPYTMSYGDSLYYNNAYGALDAYYKRCRAARSYEAVAAAAASVYNYAEQTLSQLPQVQNTAMASHLTSTSLDPYDRHLLPTSGAAATAAAAAAAAAAVTAASTSYYGRDRSPLRRATAPVPTVGEGYGYGHESELSQASAAARNSLYDMARYEREQYADRARYSAF

SEQ ID NO: 72006 - protein, 147 aa, Homo sapiens
  Payload ID: 14250
  Gene Symbol: RBM14-RBM4
  Gene Name: RBM14-RBM4 readthrough
  ENSP ID: ENSP00000395880
MKIFVGNVDGADTTPEELAALFAPYGTVMSCAVMKQFAFVHMRENAGALRAIEALHGHELRPGRALVVEMSRPRPLNTWKIFVGNVSAACTSQELRSLFERRGRVIECDVVKGSCQDGEAVHRKPAPGGYRAGDSLTLRAVWEGAGM

SEQ ID NO: 72007 - protein, 118 aa, Homo sapiens
  Payload ID: 14250
  Gene Symbol: RBM14-RBM4
  Gene Name: RBM14-RBM4 readthrough
  ENSP ID: ENSP00000421279
MKIFVGNVDGADTTPEELAALFAPYGTVMSCAVMKQFAFVHMRENAGALRAIEALHGHELRPGRALVVEMSRPRPLNTWKIFVGNVSAACTSQELRSLFERRGRVIECDVVKGGMCVG

SEQ ID NO: 72008 - protein, 269 aa, Homo sapiens
  Payload ID: 14251
  Gene Symbol: RITA1
  Gene Name: RBPJ interacting and tubulin associated 1
  Uniprot ID: Q96K30
  ENSP ID: ENSP00000448289
MKTPVELAVSGMQTLGLQHRCRGGYRVKARTSYVDETLFGSPAGTRPTPPDFDPPWVEKANRTRGVGKEASKALGAKGSCETTPSRGSTPTLTPRKKNKYRPISHTPSYCDESLFGSRSEGASFGAPRMAKGDAAKLRALLWTPPPTPRGSHSPRPREAPLRAIHPAGPSKTEPGPAADSQKLSMGGLHSSRPLKRGLSHSLTHLNVPSTGHPATSAPHTNGPQDLRPSTSGVTFRSPLVTSRARSVSISVPSTPRRGGATQKPKPPWK

SEQ ID NO: 72009 - protein, 293 aa, Homo sapiens
  Payload ID: 14251
  Gene Symbol: RITA1
  Gene Name: RBPJ interacting and tubulin associated 1
  Uniprot ID: Q96K30
  ENSP ID: ENSP00000448680
MLREPRKQGLAGRAHLLSPGTTGSMKTPVELAVSGMQTLGLQHRCRGGYRVKARTSYVDETLFGSPAGTRPTPPDFDPPWVEKANRTRGVGKEASKALGAKGSCETTPSRGSTPTLTPRKKNKYRPISHTPSYCDESLFGSRSEGASFGAPRMAKGDAAKLRALLWTPPPTPRGSHSPRPREAPLRAIHPAGPSKTEPGPAADSQKLSMGGLHSSRPLKRGLSHSLTHLNVPSTGHPATSAPHTNGPQDLRPSTSGVTFRSPLVTSRARSVSISVPSTPRRGGATQKPKPPWK

SEQ ID NO: 72010 - protein, 269 aa, Homo sapiens; identical to SEQ ID NO: 72008
  Payload ID: 14251
  Gene Symbol: RITA1
  Gene Name: RBPJ interacting and tubulin associated 1
  Uniprot ID: Q96K30
  ENSP ID: ENSP00000449841

SEQ ID NO: 72011 - protein, 38 aa, Homo sapiens
  Payload ID: 14251
  Gene Symbol: RITA1
  Gene Name: RBPJ interacting and tubulin associated 1
  ENSP ID: ENSP00000484184
RGVGKEASKALGAKGSCETTPSRGSTPTLTPRKKNKYR

SEQ ID NO: 72012 - protein, 115 aa, Homo sapiens
  Payload ID: 14252
  Gene Symbol: RCAN3
  Gene Name: RCAN family member 3
  Uniprot ID: Q9UKA8
  ENSP ID: ENSP00000363514
MLRDTMKSWNDSQSDLCSTDQEEEEEMIFGENEDDLDEMMDLSDLPTSLFACSVHEAVFEAREQKERNMNFTREQSRHPAWWFMSVKVKLKRKKRQKTPNRKLPRRGAPTLRPQR

SEQ ID NO: 72013 - protein, 241 aa, Homo sapiens
  Payload ID: 14252
  Gene Symbol: RCAN3
  Gene Name: RCAN family member 3
  Uniprot ID: Q9UKA8
  ENSP ID: ENSP00000363516
MLRDTMKSWNDSQSDLCSTDQEEEEEMIFGENEDDLDEMMDLSDLPTSLFACSVHEAVFEAREQKERFEALFTIYDDQVTFQLFKSFRRVRINFSKPEAAARARIELHETDFNGQKLKLYFAQVQMSGEVRDKSYLLPPQPVKQFLISPPASPPVGWKQSEDAMPVINYDLLCAVSKLGPGEKYELHAGTESTPSVVVHVCESETEEEEETKNPKQKIAQTRRPDPPTAALNEPQTFDCAL

SEQ ID NO: 72014 - protein, 173 aa, Homo sapiens
  Payload ID: 14252
  Gene Symbol: RCAN3
  Gene Name: RCAN family member 3
  Uniprot ID: Q9UKA8
  ENSP ID: ENSP00000391912
MLRDTMKSWNDSQSDLCSTDQEEEEEMIFGENEDDLDEMMDLSDLPTSLFACSVHEAVFEAREQKERFEALFTIYDDQVTFQLFKSFRRVRINFSKPEAAARARIELHETDFNGQKLKLYFAQERNMNFTREQSRHPAWWFMSVKVKLKRKKRQKTPNRKLPRRGAPTLRPQR

SEQ ID NO: 72015 - protein, 231 aa, Homo sapiens
  Payload ID: 14252
  Gene Symbol: RCAN3
  Gene Name: RCAN family member 3
  Uniprot ID: Q9UKA8
  ENSP ID: ENSP00000409540
MLRDTMKSWNDSQSDLCSTDQEEEEEMIFGENEDDLDEMMDLSDLPTSLFACSVHEAVFEAREQKERFEALFTIYDDQVTFQLFKSFRRVRINFSKPEAAARARIELHETDFNGQKLKLYFAQSYLLPPQPVKQFLISPPASPPVGWKQSEDAMPVINYDLLCAVSKLGPGEKYELHAGTESTPSVVVHVCESETEEEEETKNPKQKIAQTRRPDPPTAALNEPQTFDCAL

SEQ ID NO: 72016 - protein, 183 aa, Homo sapiens
  Payload ID: 14252
  Gene Symbol: RCAN3
  Gene Name: RCAN family member 3
  Uniprot ID: Q9UKA8
  ENSP ID: ENSP00000414447
MLRDTMKSWNDSQSDLCSTDQEEEEEMIFGENEDDLDEMMDLSDLPTSLFACSVHEAVFEAREQKVQMSGEVRDKSYLLPPQPVKQFLISPPASPPVGWKQSEDAMPVINYDLLCAVSKLGPGEKYELHAGTESTPSVVVHVCESETEEEEETKNPKQKIAQTRRPDPPTAALNEPQTFDCAL

SEQ ID NO: 72017 - protein, 108 aa, Homo sapiens
  Payload ID: 14252
  Gene Symbol: RCAN3
  Gene Name: RCAN family member 3
  ENSP ID: ENSP00000437338
  MOD_RES (1)..(1): Any amino acid
XYLLPPQPVKQFLISPPASPPVGWKQSEDAMPVINYDLLCAVSKLGPGEKYELHAGTESTPSVVVHVCESETEEEEETKNPKQKIAQTRRPDPPTAALNEPQTFDCAL

SEQ ID NO: 72018 - protein, 241 aa, Homo sapiens; identical to SEQ ID NO: 72013
  Payload ID: 14252
  Gene Symbol: RCAN3
  Gene Name: RCAN family member 3
  Uniprot ID: Q9UKA8
  ENSP ID: ENSP00000445401

SEQ ID NO: 72019 - protein, 116 aa, Homo sapiens
  Payload ID: 14252
  Gene Symbol: RCAN3
  Gene Name: RCAN family member 3
  Uniprot ID: Q9UKA8
  ENSP ID: ENSP00000478174
MSGEVRDKSYLLPPQPVKQFLISPPASPPVGWKQSEDAMPVINYDLLCAVSKLGPGEKYELHAGTESTPSVVVHVCESETEEEEETKNPKQKIAQTRRPDPPTAALNEPQTFDCAL

SEQ ID NO: 72020 - protein, 241 aa, Homo sapiens; identical to SEQ ID NO: 72013
  Payload ID: 14252
  Gene Symbol: RCAN3
  Gene Name: RCAN family member 3
  Uniprot ID: Q9UKA8
  ENSP ID: ENSP00000479300

SEQ ID NO: 72021 - protein, 116 aa, Homo sapiens; identical to SEQ ID NO: 72019
  Payload ID: 14252
  Gene Symbol: RCAN3
  Gene Name: RCAN family member 3
  Uniprot ID: Q9UKA8
  ENSP ID: ENSP00000484519

SEQ ID NO: 72022 - protein, 183 aa, Homo sapiens; identical to SEQ ID NO: 72016
  Payload ID: 14252
  Gene Symbol: RCAN3
  Gene Name: RCAN family member 3
  Uniprot ID: Q9UKA8
  ENSP ID: ENSP00000486836

SEQ ID NO: 72023 - protein, 376 aa, Homo sapiens
  Payload ID: 14253
  Gene Symbol: RCCD1
  Gene Name: RCC1 domain containing 1
  Uniprot ID: A6NED2
  ENSP ID: ENSP00000377801
MAEERPGAWFGFGFCGFGQELGSGRGRQVHSPSPLRAGVDICRVSASWSYTAFVTRGGRLELSGSASGAAGRCKDAWASEGLLAVLRAGPGPEALLQVWAAESALRGEPLWAQNVVPEAEGEDDPAGEAQAGRLPLLPCARAYVSPRAPFYRPLAPELRARQLELGAEHALLLDAAGQVFSWGGGRHGQLGHGTLEAELEPRLLEALQGLVMAEVAAGGWHSVCVSETGDIYIWGWNESGQLALPTRNLAEDGETVAREATELNEDGSQVKRTGGAEDGAPAPFIAVQPFPALLDLPMGSDAVKASCGSRHTAVVTRTGELYTWGWGKYGQLGHEDTTSLDRPRRVEYFVDKQLQVKAVTCGPWNTYVYAVEKGKS

SEQ ID NO: 72024 - protein, 374 aa, Homo sapiens
  Payload ID: 14253
  Gene Symbol: RCCD1
  Gene Name: RCC1 domain containing 1
  ENSP ID: ENSP00000450678
MAEERPGAWFGFGFCGFGQELGSGRGRQVHSPSPLRAGVDICRVSASWSYTAFVTRGGRLELSGSASGAAGRCKDAWASEGLLAVLRAGPGPEALLQVWAAESALRGEPLWAQNVVPEAEGEDDPAGEAQAGRLPLLPCARAYVSPRAPFYRPLAPELRARQLELGAEHALLLDAAGQVFSWGGGRHGQLGHGTLEAELEPRLLEALQGLVMAEVAAGGWHSVCVSETGDIYIWGWNESGQLALPTRNLAEDGETVAREELNEDGSQVKRTGGAEDGAPAPFIAVQPFPALLDLPMGSDAVKASCGSRHTAVVTRTGELYTWGWGKYGQLGHEDTTSLDRPRRVEYFVDKQLQVKAVTCGPWNTYVYAVEKGKS

SEQ ID NO: 72025 - protein, 78 aa, Homo sapiens
  Payload ID: 14253
  Gene Symbol: RCCD1
  Gene Name: RCC1 domain containing 1
  ENSP ID: ENSP00000451365
  MOD_RES (1)..(1): Any amino acid
XEERPGAWFGFGFCGFGQELGSGRGRQVHSPSPLRAGVDICRVSASWSYTAFVTRMDSWAMGPWRQSWSHGCWRRCRA

SEQ ID NO: 72026 - protein, 376 aa, Homo sapiens; identical to SEQ ID NO: 72023
  Payload ID: 14253
  Gene Symbol: RCCD1
  Gene Name: RCC1 domain containing 1
  Uniprot ID: A6NED2
  ENSP ID: ENSP00000451963

SEQ ID NO: 72027 - protein, 299 aa, Homo sapiens
  Payload ID: 14254
  Gene Symbol: RQCD1
  Gene Name: RCD1 required for cell differentiation1 homolog (S. pombe)
  Uniprot ID: Q92600
  ENSP ID: ENSP00000273064
MHSLATAAPVPTTLAQVDREKIYQWINELSSPETRENALLELSKKRESVPDLAPMLWHSFGTIAALLQEIVNIYPSINPPTLTAHQSNRVCNALALLQCVASHPETRSAFLAAHIPLFLYPFLHTVSKTRPFEYLRLTSLGVIGALVKTDEQEVINFLLTTEIIPLCLRIMESGSELSKTVATFILQKILLDDTGLAYICQTYERFSHVAMILGKMVLQLSKEPSARLLKHVVRCYLRLSDNPRAREALRQCLPDQLKDTTFAQVLKDDTTTKRWLAQLVKNLQEGQVTDPRGIPLPPQ

SEQ ID NO: 72028 - protein, 258 aa, Homo sapiens
  Payload ID: 14254
  Gene Symbol: RQCD1
  Gene Name: RCD1 required for cell differentiation1 homolog (S. pombe)
  Uniprot ID: Q92600
  ENSP ID: ENSP00000295701
MHSLATAAPVPTTLAQVDREKIYQWINELSSPETRENALLELSKKRESVPDLAPMLWHSFGTIAALLQEIVNIYPSINPPTLTAHQSNRVCNALALLQCVASHPETRSAFLAAHIPLFLYPFLHTVSKTRPFEYLRLTSLGVIGALVKTDEQEVINFLLTTEIIPLCLRIMESGSELSKTVATFILQKILLDDTGLAYICQTYERFSHVAMILGKMVLQLSKEPSARLLKHVVRCYLRLSDNPRFSDLTFCWSSFQRK

SEQ ID NO: 72029 - protein, 75 aa, Homo sapiens
  Payload ID: 14254
  Gene Symbol: RQCD1
  Gene Name: RCD1 required for cell differentiation1 homolog (S. pombe)
  ENSP ID: ENSP00000392394
MHSLATAAPVPTTLAQVDREKIYQWINELSSPETRENALLELSKKRESVPDLAPMLWHSFGTIAALLQVIVMQVI

SEQ ID NO: 72030 - protein, 61 aa, Homo sapiens
  Payload ID: 14254
  Gene Symbol: RQCD1
  Gene Name: RCD1 required for cell differentiation1 homolog (S. pombe)
  ENSP ID: ENSP00000396938
ILQKILLDDTGLAYICQTYERFSHVAMILGKMVLQLSKEPSARLLKHVVRCYLRLSDNPRC

SEQ ID NO: 72031 - protein, 41 aa, Homo sapiens
  Payload ID: 14254
  Gene Symbol: RQCD1
  Gene Name: RCD1 required for cell differentiation1 homolog (S. pombe)
  ENSP ID: ENSP00000415607
MHSLATAADLALLPRLECSGVILAHRNLDLLGSVDSPTSAS

SEQ ID NO: 72032 - protein, 299 aa, Homo sapiens; identical to SEQ ID NO: 72027
  Payload ID: 14254
  Gene Symbol: RQCD1
  Gene Name: RCD1 required for cell differentiation1 homolog (S. pombe)
  Uniprot ID: Q92600
  ENSP ID: ENSP00000443687

SEQ ID NO: 72033 - protein, 331 aa, Homo sapiens
  Payload ID: 14254
  Gene Symbol: RQCD1
  Gene Name: RCD1 required for cell differentiation1 homolog (S. pombe)
  Uniprot ID: Q92600
  ENSP ID: ENSP00000486540
MHSLATAAPVPTTLAQVDREKIYQWINELSSPETRENALLELSKKRESVPDLAPMLWHSFGTIAALLQEIVNIYPSINPPTLTAHQSNRVCNALALLQCVASHPETRSAFLAAHIPLFLYPFLHTVSKTRPFEYLRLTSLGVIVETGFHHVGQADLELPTSSDLPASASQSAGITGALVKTDEQEVINFLLTTEIIPLCLRIMESGSELSKTVATFILQKILLDDTGLAYICQTYERFSHVAMILGKMVLQLSKEPSARLLKHVVRCYLRLSDNPRAREALRQCLPDQLKDTTFAQVLKDDTTTKRWLAQLVKNLQEGQVTDPRGIPLPPQ

SEQ ID NO: 72034 - protein, 197 aa, Homo sapiens
  Payload ID: 14255
  Gene Symbol: RCSD1
  Gene Name: RCSD domain containing 1
  ENSP ID: ENSP00000355291
MEERPAETNANVDNSASPSVAQLAGRFREQAAAAKETPASKPTRRKPPCSLPLFPPKVDLGQNGEEANLTFDPAALLPGASPKSPGLKAMVSPFHSPPSTPSSPGVRSRPSEAEEVPVSFDQPPEGSHLPCYNKVRTRGSIKRRPPSRRFRRSQSDCGELGDFRAVESSQQNGAKEEDGDEVLPSKSKAPGSPLSSE

SEQ ID NO: 72035 - protein, 416 aa, Homo sapiens
  Payload ID: 14255
  Gene Symbol: RCSD1
  Gene Name: RCSD domain containing 1
  Uniprot ID: Q6JBY9
  ENSP ID: ENSP00000356828
MEERPAETNANVDNSASPSVAQLAGRFREQAAAAKETPASKPTRRKPPCSLPLFPPKVDLGQNGEEKSPPNASHPPKFKVKSSPLIEKLQANLTFDPAALLPGASPKSPGLKAMVSPFHSPPSTPSSPGVRSRPSEAEEVPVSFDQPPEGSHLPCYNKVRTRGSIKRRPPSRRFRRSQSDCGELGDFRAVESSQQNGAKEEDGDEVLPSKSKAPGSPLSSEGAAGEGVRTLGPAEKPPLRRSPSRTEKQEEDRATEEAKNGEKARRSSEEVDGQHPAQEEVPESPQTSGPEAENRCGSPREEKPAGEEAEMEKATEVKGERVQNEEVGPEHDSQETKKLEEGAAVKETPHSPPGGVKGGDVPKQEKGKEKQQEGAVLEPGCSPQTGPAQLETSSEVQSEPAVPKPEDDTPVQDTKM

SEQ ID NO: 72036 - protein, 386 aa, Homo sapiens
  Payload ID: 14255
  Gene Symbol: RCSD1
  Gene Name: RCSD domain containing 1
  ENSP ID: ENSP00000439409
MEERPAETNANVDNSASPSVAQLAGRFREQAAAAKEKSPPNASHPPKFKVKSSPLIEKLQANLTFDPAALLPGASPKSPGLKAMVSPFHSPPSTPSSPGVRSRPSEAEEVPVSFDQPPEGSHLPCYNKVRTRGSIKRRPPSRRFRRSQSDCGELGDFRAVESSQQNGAKEEDGDEVLPSKSKAPGSPLSSEGAAGEGVRTLGPAEKPPLRRSPSRTEKQEEDRATEEAKNGEKARRSSEEVDGQHPAQEEVPESPQTSGPEAENRCGSPREEKPAGEEAEMEKATEVKGERVQNEEVGPEHDSQETKKLEEGAAVKETPHSPPGGVKGGDVPKQEKGKEKQQEGAVLEPGCSPQTGPAQLETSSEVQSEPAVPKPEDDTPVQDTKM

SEQ ID NO: 72037 - protein, 1097 aa, Homo sapiens
  Payload ID: 14256
  Gene Symbol: REST
  Gene Name: RE1-silencing transcription factor
  Uniprot ID: Q13127
  ENSP ID: ENSP00000311816
MATQVMGQSSGGGGLFTSSGNIGMALPNDMYDLHDLSKAELAAPQLIMLANVALTGEVNGSCCDYLVGEERQMAELMPVGDNNFSDSEEGEGLEESADIKGEPHGLENMELRSLELSVVEPQPVFEASGAPDIYSSNKDLPPETPGAEDKGKSSKTKPFRCKPCQYEAESEEQFVHHIRVHSAKKFFVEESAEKQAKARESGSSTAEEGDFSKGPIRCDRCGYNTNRYDHYTAHLKHHTRAGDNERVYKCIICTYTTVSEYHWRKHLRNHFPRKVYTCGKCNYFSDRKNNYVQHVRTHTGERPYKCELCPYSSSQKTHLTRHMRTHSGEKPFKCDQCSYVASNQHEVTRHARQVHNGPKPLNCPHCDYKTADRSNFKKHVELHVNPRQFNCPVCDYAASKKCNLQYHFKSKHPTCPNKTMDVSKVKLKKTKKREADLPDNITNEKTEIEQTKIKGDVAGKKNEKSVKAEKRDVSKEKKPSNNVSVIQVTTRTRKSVTEVKEMDVHTGSNSEKFSKTKKSKRKLEVDSHSLHGPVNDEESSTKKKKKVESKSKNNSQEVPKGDSKVEENKKQNTCMKKSTKKKTLKNKSSKKSSKPPQKEPVEKGSAQMDPPQMGPAPTEAVQKGPVQVEPPPPMEHAQMEGAQIRPAPDEPVQMEVVQEGPAQKELLPPVEPAQMVGAQIVLAHMELPPPMETAQTEVAQMGPAPMEPAQMEVAQVESAPMQVVQKEPVQMELSPPMEVVQKEPVQIELSPPMEVVQKEPVKIELSPPIEVVQKEPVQMELSPPMGVVQKEPAQREPPPPREPPLHMEPISKKPPLRKDKKEKSNMQSERARKEQVLIEVGLVPVKDSWLLKESVSTEDLSPPSPPLPKENLREEASGDQKLLNTGEGNKEAPLQKVGAEEADESLPGLAANINESTHISSSGQNLNTPEGETLNGKHQTDSIVCEMKMDTDQNTRENLTGINSTVEEPVSPMLPPSAVEEREAVSKTALASPPATMAANESQEIDEDEGIHSHEGSDLSDNMSEGSDDSGLHGARPVPQESSRKNAKEALAVKAAKGDFVCIFCDRSFRKGKDYSKHLNRHLVNVYYLEEAAQGQE

SEQ ID NO: 72038 - protein, 340 aa, Homo sapiens
  Payload ID: 14256
  Gene Symbol: REST
  Gene Name: RE1-silencing transcription factor
  ENSP ID: ENSP00000479151
MATQVMGQSSGGGGLFTSSGNIGMALPNDMYDLHDLSKAELAAPQLIMLANVALTGEVNGSCCDYLVGEERQMAELMPVGDNNFSDSEEGEGLEESADIKGEPHGLENMELRSLELSVVEPQPVFEASGAPDIYSSNKDLPPETPGAEDKGKSSKTKPFRCKPCQYEAESEEQFVHHIRVHSAKKFFVEESAEKQAKARESGSSTAEEGDFSKGPIRCDRCGYNTNRYDHYTAHLKHHTRAGDNERVYKCIICTYTTVSEYHWRKHLRNHFPRKVYTCGKCNYFSDRKNNYVQHVRTHTGERPYKCELCPYSSSQKTHLTRHMRTHSVGYGYHLVIFTRV

SEQ ID NO: 72039 - protein, 314 aa, Homo sapiens
  Payload ID: 14256
  Gene Symbol: REST
  Gene Name: RE1-silencing transcription factor
  ENSP ID: ENSP00000481650
MATQVMGQSSGGGGLFTSSGNIGMALPNDMYDLHDLSKAELAAPQLIMLANVALTGEVNGSCCDYLVGEERQMAELMPVGDNNFSDSEEGEGLEESADIKAHLKHHTRAGDNERVYKCIICTYTTVSEYHWRKHLRNHFPRKVYTCGKCNYFSDRKNNYVQHVRTHTGERPYKCELCPYSSSQKTHLTRHMRTHSVEEREAVSKTALASPPATMAANESQEIDEDEGIHSHEGSDLSDNMSEGSDDSGLHGARPVPQESSRKNAKEALAVKAAKGDFVCIFCDRSFRKGKDYSKHLNRHLVNVYYLEEAAQGQE

SEQ ID NO: 72040 - protein, 340 aa, Homo sapiens; identical to SEQ ID NO: 72038
  Payload ID: 14256
  Gene Symbol: REST
  Gene Name: RE1-silencing transcription factor
  ENSP ID: ENSP00000484058

SEQ ID NO: 72041 - protein, 342 aa, Homo sapiens
  Payload ID: 14256
  Gene Symbol: REST
  Gene Name: RE1-silencing transcription factor
  ENSP ID: ENSP00000484206
MATQVMGQSSGGGGLFTSSGNIGMALPNDMYDLHDLSKAELAAPQLIMLANVALTGEVNGSCCDYLVGEERQMAELMPVGDNNFSDSEEGEGLEESADIKGEPHGLENMELRSLELSVVEPQPVFEASGAPDIYSSNKDLPPETPGAEDKGKSSKTKPFRCKPCQYEAESEEQFVHHIRVHSAKKFFVEESAEKQAKARESGSSTAEEGDFSKGPIRCDRCGYNTNRYDHYTAHLKHHTRAGDNERVYKCIICTYTTVSEYHWRKHLRNHFPRKVYTCGKCNYFSDRKNNYVQHVRTHTGERPYKCELCPYSSSQKTHLTRHMRTHSEMEFRSCCPGWNKMV

SEQ ID NO: 72042 - protein, 1097 aa, Homo sapiens; identical to SEQ ID NO: 72037
  Payload ID: 14256
  Gene Symbol: REST
  Gene Name: RE1-silencing transcription factor
  Uniprot ID: Q13127
  ENSP ID: ENSP00000484836

SEQ ID NO: 72043 - protein, 79 aa, Homo sapiens
  Payload ID: 14257
  Gene Symbol: ROMO1
  Gene Name: reactive oxygen species modulator 1
  Uniprot ID: P60602
  ENSP ID: ENSP00000338293
MPVAVGPYGQSQPSCFDRVKMGFVMGCAVGMAAGALFGTFSCLRIGMRGRELMGGIGKTMMQSGGTFGTFMAIGMGIRC

SEQ ID NO: 72044 - protein, 59 aa, Homo sapiens
  Payload ID: 14257
  Gene Symbol: ROMO1
  Gene Name: reactive oxygen species modulator 1
  Uniprot ID: P60602
  ENSP ID: ENSP00000363185
MPVAVGPYGQSQPSCFDRVKMGFVMGCAVGMAAGALFGTFSCLSSILVSSSGSECGVES

SEQ ID NO: 72045 - protein, 79 aa, Homo sapiens; identical to SEQ ID NO: 72043
  Payload ID: 14257
  Gene Symbol: ROMO1
  Gene Name: reactive oxygen species modulator 1
  Uniprot ID: P60602
  ENSP ID: ENSP00000363190

SEQ ID NO: 72046 - protein, 79 aa, Homo sapiens; identical to SEQ ID NO: 72043
  Payload ID: 14257
  Gene Symbol: ROMO1
  Gene Name: reactive oxygen species modulator 1
  Uniprot ID: P60602
  ENSP ID: ENSP00000363191

SEQ ID NO: 72047 - protein, 79 aa, Homo sapiens; identical to SEQ ID NO: 72043
  Payload ID: 14257
  Gene Symbol: ROMO1
  Gene Name: reactive oxygen species modulator 1
  Uniprot ID: P60602
  ENSP ID: ENSP00000380561

SEQ ID NO: 72048 - protein, 1914 aa, Homo sapiens
  Payload ID: 14258
  Gene Symbol: RLF
  Gene Name: rearranged L-myc fusion
  Uniprot ID: Q13129
  ENSP ID: ENSP00000361857
MADGKGDAAAVAGAGAEAPAVAGAGDGVETESMVRGHRPVSPAPGASGLRPCLWQLETELREQEVSEVSSLNYCRSFCQTLLQYASNKNASEHIVYLLEVYRLAIQSFASARPYLTTECEDVLLVLGRLVLSCFELLLSVSESELPCEVWLPFLQSLQESHDALLEFGNNNLQILVHVTKEGVWKNPVLLKILSQQPVETEEVNKLIAQEGPSFLQMRIKHLLKSNCIPQATALSKLCAESKEISNVSSFQQAYITCLCSMLPNEDAIKEIAKVDCKEVLDIICNLESEGQDNTAFVLCTTYLTQQLQTASVYCSWELTLFWSKLQRRIDPSLDTFLERCRQFGVIAKTQQHLFCLIRVIQTEAQDAGLGVSILLCVRALQLRSSEDEEMKASVCKTIACLLPEDLEVRRACQLTEFLIEPSLDGFNMLEELYLQPDQKFDEENAPVPNSLRCELLLALKAHWPFDPEFWDWKTLKRHCHQLLGQEASDSDDDLSGYEMSINDTDVLESFLSDYDEGKEDKQYRRRDLTDQHKEKRDKKPIGSSERYQRWLQYKFFCLLCKRECIEARILHHSKMHMEDGIYTCPVCIKKFKRKEMFVPHVMEHVKMPPSRRDRSKKKLLLKGSQKGICPKSPSAIPEQNHSLNDQAKGESHEYVTFSKLEDCHLQDRDLYPCPGTDCSRVFKQFKYLSVHLKAEHQNNDENAKHYLDMKNRREKCTYCRRHFMSAFHLREHEQVHCGPQPYMCVSIDCYARFGSVNELLNHKQKHDDLRYKCELNGCNIVFSDLGQLYHHEAQHFRDASYTCNFLGCKKFYYSKIEYQNHLSMHNVENSNGDIKKSVKLEESATGEKQDCINQPHLLNQTDKSHLPEDLFCAESANSQIDTETAENLKENSDSNSSDQLSHSSSASMNEELIDTLDHSETMQDVLLSNEKVFGPSSLKEKCSSMAVCFDGTKFTCGFDGCGSTYKNARGMQKHLRKVHPYHFKPKKIKTKDLFPSLGNEHNQTTEKLDAEPKPCSDTNSDSPDEGLDHNIHIKCKREHQGYSSESSICASKRPCTEDTMLELLLRLKHLSLKNSITHGSFSGSLQGYPSSGAKSLQSVSSISDLNFQNQDENMPSQYLAQLAAKPFFCELQGCKYEFVTREALLMHYLKKHNYSKEKVLQLTMFQHRYSPFQCHICQRSFTRKTHLRIHYKNKHQIGSDRATHKLLDNEKCDHEGPCSVDRLKGDCSAELGGDPSSNSEKPHCHPKKDECSSETDLESSCEETESKTSDISSPIGSHREEQEGREGRGSRRTVAKGNLCYILNKYHKPFHCIHKTCNSSFTNLKGLIRHYRTVHQYNKEQLCLEKDKARTKRELVKCKKIFACKYKECNKRFLCSKALAKHCSDSHNLDHIEEPKVLSEAGSAARFSCNQPQCPAVFYTFNKLKHHLMEQHNIEGEIHSDYEIHCDLNGCGQIFTHRSNYSQHVYYRHKDYYDDLFRSQKVANERLLRSEKVCQTADTQGHEHQTTRRSFNAKSKKCGLIKEKKAPISFKTRAEALHMCVEHSEHTQYPCMVQGCLSVVKLESSIVRHYKRTHQMSSAYLEQQMENLVVCVKYGTKIKEEPPSEADPCIKKEENRSCESERTEHSHSPGDSSAPIQNTDCCHSSERDGGQKGCIESSSVFDADTLLYRGTLKCNHSSKTTSLEQCNIVQPPPPCKIENSIPNPNGTESGTYFTSFQLPLPRIKESETRQHSSGQENTVKNPTHVPKENFRKHSQPRSFDLKTYKPMGFESSFLKFIQESEEKEDDFDDWEPSEHLTLSNSSQSSNDLTGNVVANNMVNDSEPEVDIPHSSSDSTIHENLTAIPPLIVAETTTVPSLENLRVVLDKALTDCGELALKQLHYLRPVVVLERSKFSTPILDLFPTKKTDELCVGSS

SEQ ID NO: 72049 - protein, 266 aa, Homo sapiens
  Payload ID: 14259
  Gene Symbol: REC114
  Gene Name: REC114 meiotic recombination protein
  Uniprot ID: Q7Z4M0
  ENSP ID: ENSP00000328423
MAEAGKVPLSLGLTGGEAAEWPLQRYARCIPSNTRDPPGPCLEAGTAPCPTWKVFDSNEESGYLVLTIVISGHFFIFQGQTLLEGFSLIGSKDWLKIVRRVDCLLFGTTIKDKSRLFRVQFSGESKEQALEHCCSCVQKLAQYITVQVPDGNIQELQLIPGPPRATESQGKDSAKSVPRQPGSHQHSEQQQVCVTAGTGAPDGRTSLTQLAQTLLASEELPHVYEQSAWGAEELGPFLRLCLMDQNFPAFVEEVEKELKKLAGLRN

SEQ ID NO: 72050 - protein, 238 aa, Homo sapiens
  Payload ID: 14259
  Gene Symbol: REC114
  Gene Name: REC114 meiotic recombination protein
  ENSP ID: ENSP00000452908
MAEAGKVPLSLGLTGGEAAEWPLQRYARCIPSNTRDPPGPCLEAGTAPCPTWKVFDSNEESGYLVLTIVISGHFFIFQGQTLLDKSRLFRVQFSGESKEQALEHCCSCVQKLAQYITVQVPDGNIQELQLIPGPPRATESQGKDSAKSVPRQPGSHQHSEQQQVCVTAGTGAPDGRTSLTQLAQTLLASEELPHVYEQSAWGAEELGPFLRLCLMDQNFPAFVEEVEKELKKLAGLRN

SEQ ID NO: 72051 - protein, 336 aa, Homo sapiens
  Payload ID: 14260
  Gene Symbol: REC8
  Gene Name: REC8 meiotic recombination protein
  ENSP ID: ENSP00000452701
  MOD_RES (1)..(1): Any amino acid
XRRRRLLFWDKETQISPEKFQEQLQTRAHCWECPMVQPPERTIRGPAELFRTPTLSGWLPPELLGLWTHCAQPPPKALRRELPEEAAAEEERRKIEVPSEIEVPREALEPSVPLMVSLEISLEAAEEEKSRISLIPPEERWAWPEVEAPEAPALPVVPELPEVPMEMPLVLPPELELLSLEAVHRAVALELQANREPDFSSLVSPLSPRRMAARVFYLLLGECMHVCVCMWGRDTETRGPYRDSPDLPSPRLLTSALSATDSSRETRKAIWSPPDPAGAQIPLRLESIYKAARKPATSSKPRRASLGPAYLISECAFPAFLLSELLFKQKTSCFYY

SEQ ID NO: 72052 - protein, 93 aa, Homo sapiens
  Payload ID: 14260
  Gene Symbol: REC8
  Gene Name: REC8 meiotic recombination protein
  ENSP ID: ENSP00000453506
METELPSLLLPNHLAMMETLEDAPDPFFGMMSVDPRLPSPFDIPQIRHLLEAAIPERVEEIPPEVPTEPREPERIPVTVLPPEAITILEAEPI

SEQ ID NO: 72053 - protein, 74 aa, Homo sapiens
  Payload ID: 14260
  Gene Symbol: REC8
  Gene Name: REC8 meiotic recombination protein
  ENSP ID: ENSP00000453763
MFYYPNVLQRHTGCFATIWLAATRGSRLVKREYLRVNVVKTCEEILNYVLVRVQPPQPGLPRPRFSLYLSAQLQ

SEQ ID NO: 72054 - protein, 547 aa, Homo sapiens
  Payload ID: 14260
  Gene Symbol: REC8
  Gene Name: REC8 meiotic recombination protein
  Uniprot ID: O95072
  ENSP ID: ENSP00000482439
MFYYPNVLQRHTGCFATIWLAATRGSRLVKREYLRVNVVKTCEEILNYVLVRVQPPQPGLPRPRFSLYLSAQLQIGVIRVYSQQCQYLVEDIQHILERLHRAQLQIRIDMETELPSLLLPNHLAMMETLEDAPDPFFGMMSVDPRLPSPFDIPQIRHLLEAAIPERVEEIPPEVPTEPREPERIPVTVLPPEAITILEAEPIRMLEIEGERELPEVSRRELDLLIAEEEEAILLEIPRLPPPAPAEVEGIGEALGPEELRLTGWEPGALLMEVTPPEELRLPAPPSPERRPPVPPPPRRRRRRRLLFWDKETQISPEKFQEQLQTRAHCWECPMVQPPERTIRGPAELFRTPTLSGWLPPELLGLWTHCAQPPPKALRRELPEEAAAEEERRKIEVPSEIEVPREALEPSVPLMVSLEISLEAAEEEKSRISLIPPEERWAWPEVEAPEAPALPVVPELPEVPMEMPLVLPPELELLSLEAVHRAVALELQANREPDFSSLVSPLSPRRMAARVFYLLLVLSAQQILHVKQEKPYGRLLIQPGPRFH

SEQ ID NO: 72055 - protein, 547 aa, Homo sapiens; identical to SEQ ID NO: 72054
  Payload ID: 14260
  Gene Symbol: REC8
  Gene Name: REC8 meiotic recombination protein
  Uniprot ID: O95072
  ENSP ID: ENSP00000482546

SEQ ID NO: 72056 - protein, 263 aa, Homo sapiens
  Payload ID: 14261
  Gene Symbol: RTP1
  Gene Name: receptor (chemosensory) transporter protein 1
  Uniprot ID: P59025
  ENSP ID: ENSP00000311712
MRIFRPWRLRCPALHLPSLSVFSLRWKLPSLTTDETMCKSVTTDEWKKVFYEKMEEAKPADSWDLIIDPNLKHNVLSPGWKQYLELHASGRFHCSWCWHTWQSPYVVILFHMFLDRAQRAGSVRMRVFKQLCYECGTARLDESSMLEENIEGLVDNLITSLREQCYGERGGQYRIHVASRQDNRRHRGEFCEACQEGIVHWKPSEKLLEEEATTYTFSRAPSPTKSQDQTGSGWNFCSIPWCLFWATVLLLIIYLQFSFRSSV

SEQ ID NO: 72057 - protein, 225 aa, Homo sapiens
  Payload ID: 14262
  Gene Symbol: RTP2
  Gene Name: receptor (chemosensory) transporter protein 2
  Uniprot ID: Q5QGT7
  ENSP ID: ENSP00000350976
MCTSLTTCEWKKVFYEKMEVAKPADSWELIIDPNLKPSELAPGWKQYLEQHASGRFHCSWCWHTWQSAHVVILFHMFLDRAQRAGSVRMRVFKQLCYECGTARLDESSMLEENIEGLVDNLITSLREQCYEEDGGQYRIHVASRPDSGPHRAEFCEACQEGIVHWKPSEKLLEEEVTTYTSEASKPRAQAGSGYNFLSLRWCLFWASLCLLVVYLQFSFLSPAFF

SEQ ID NO: 72058 - protein, 232 aa, Homo sapiens
  Payload ID: 14263
  Gene Symbol: RTP3
  Gene Name: receptor (chemosensory) transporter protein 3
  Uniprot ID: Q9BQQ7
  ENSP ID: ENSP00000296142
MAGDTEVWKQMFQELMREVKPWHRWTLRPDKGLLPNVLKPGWMQYQQWTFARFQCSSCSRNWASAQVLVLFHMNWSEEKSRGQVKMRVFTQRCKKCPQPLFEDPEFTQENISRILKNLVFRILKKCYRGRFQLIEEVPMIKDISLEGPHNSDNCEACLQGFCAGPIQVTSLPPSQTPRVHSIYKVEEVVKPWASGENVYSYACQNHICRNLSIFCCCVILIVIVVIVVKTAI

SEQ ID NO: 72059 - protein, 246 aa, Homo sapiens
  Payload ID: 14264
  Gene Symbol: RTP4
  Gene Name: receptor (chemosensory) transporter protein 4
  Uniprot ID: Q96DX8
  ENSP ID: ENSP00000259030
MVVDFWTWEQTFQELIQEAKPRATWTLKLDGNLQLDCLAQGWKQYQQRAFGWFRCSSCQRSWASAQVQILCHTYWEHWTSQGQVRMRLFGQRCQKCSWSQYEMPEFSSDSTMRILSNLVQHILKKYYGNGTRKSPEMPVILEVSLEGSHDTANCEACTLGICGQGLKSCMTKPSKSLLPHLKTGNSSPGIGAVYLANQAKNQSAEAKEAKGSGYEKLGPSRDPDPLNICVFILLLVFIVVKCFTSE

SEQ ID NO: 72060 - protein, 572 aa, Homo sapiens
  Payload ID: 14265
  Gene Symbol: RTP5
  Gene Name: receptor (chemosensory) transporter protein 5 (putative)
  Uniprot ID: Q14D33
  ENSP ID: ENSP00000345374
MDRAGADMWASTFTLAMAERKPQDVWVLLPEHSLVPGCLDGGGVQYLLVGLSRLQCGHCPGTWDSAHVHVLFHLWWDRASHRGLVKMRIWGQRCRLCPAPGDCQVRPPGEQPFLSRLVLHILQDCYGDGPGPARHPREAYEGCCEACELGVCFLQKAPDPAWSANATKGNFPATAWGGTGTVSRGKPLSTPGDDLGKGGVVIAIPFSLVGTSNDQVPIAEGPAPPAGASLPVTGSCEALVIGQGSIFLSGDSVAMPGGKGFPVAIGDPLFHGPGLLGSSIQTFELKGFLFKGRGSLCSPVGVAQGWGPISLNNGLVPVGKHTPTVFYCVGLSASGEGSLTFPSSLTSIFTNTLSEPTDGPVATKEASITFPFIFTDVKDAVAEVAEGNGKEGGGQGLVPVGHDALPETNAGGLPSQVKGSLALPFPADVQGKDAFTDITEGKEKEGGLVTAGHDAPLEANAEGPITVSEGCITIPFAVFDVIKRKGGGHVAYGPQGNGCFSQGYYQKRQLRSRFHKARCGCRREEDERPGRACRRPHAEPYEDFWIWVSMTVCVFWLMCMCRLNPGIYPQQV

SEQ ID NO: 72061 - protein, 55 aa, Homo sapiens
  Payload ID: 14265
  Gene Symbol: RTP5
  Gene Name: receptor (chemosensory) transporter protein 5 (putative)
  ENSP ID: ENSP00000397191
MDRAGADMWASTFTLAMAERKPQDVWVLLPEHSLVPGCLDGGGVQYLLVGLSRVP

SEQ ID NO: 72062 - protein, 572 aa, Homo sapiens; identical to SEQ ID NO: 72060
  Payload ID: 14265
  Gene Symbol: RTP5
  Gene Name: receptor (chemosensory) transporter protein 5 (putative)
  Uniprot ID: Q14D33
  ENSP ID: ENSP00000482049

SEQ ID NO: 72063 - protein, 55 aa, Homo sapiens; identical to SEQ ID NO: 72061
  Payload ID: 14265
  Gene Symbol: RTP5
  Gene Name: receptor (chemosensory) transporter protein 5 (putative)
  ENSP ID: ENSP00000486266

SEQ ID NO: 72064 - protein, 148 aa, Homo sapiens
  Payload ID: 14266
  Gene Symbol: RAMP1
  Gene Name: receptor (G protein-coupled) activity modifying protein 1
  Uniprot ID: O60894
  ENSP ID: ENSP00000254661
MARALCRLPRRGLWLLLAHHLFMTTACQEANYGALLRELCLTQFQVDMEAVGETLWCDWGRTIRSYRELADCTWHMAEKLGCFWPNAEVDRFFLAVHGRYFRSCPISGRAVRDPPGSILYPFIVVPITVTLLVTALVVWQSKRTEGIV

SEQ ID NO: 72065 - protein, 126 aa, Homo sapiens
  Payload ID: 14266
  Gene Symbol: RAMP1
  Gene Name: receptor (G protein-coupled) activity modifying protein 1
  ENSP ID: ENSP00000384688
MTTACQEANYGALLRELCLTQFQVDMEAVGETLWCDWGRTIRSYRELADCTWHMAEKLGCFWPNAEVDRFFLAVHGRYFRSCPISGRAVRDPPGSILYPFIVVPITVTLLVTALVVWQSKRTEGIV

SEQ ID NO: 72066 - protein, 126 aa, Homo sapiens; identical to SEQ ID NO: 72065
  Payload ID: 14266
  Gene Symbol: RAMP1
  Gene Name: receptor (G protein-coupled) activity modifying protein 1
  ENSP ID: ENSP00000386046

SEQ ID NO: 72067 - protein, 126 aa, Homo sapiens; identical to SEQ ID NO: 72065
  Payload ID: 14266
  Gene Symbol: RAMP1
  Gene Name: receptor (G protein-coupled) activity modifying protein 1
  ENSP ID: ENSP00000386720

SEQ ID NO: 72068 - protein, 175 aa, Homo sapiens
  Payload ID: 14267
  Gene Symbol: RAMP2
  Gene Name: receptor (G protein-coupled) activity modifying protein 2
  Uniprot ID: O60895
  ENSP ID: ENSP00000253796
MASLRVERAGGPRLPRTRVGRPAALRLLLLLGAVLNPHEALAQPLPTTGTPGSEGGTVKNYETAVQFCWNHYKDQMDPIEKDWCDWAMISRPYSTLRDCLEHFAELFDLGFPNPLAERIIFETHQIHFANCSLVQPTFSDPPEDVLLAMIIAPICLIPFLITLVVWRSKDSEAQA

SEQ ID NO: 72069 - protein, 112 aa, Homo sapiens
  Payload ID: 14267
  Gene Symbol: RAMP2
  Gene Name: receptor (G protein-coupled) activity modifying protein 2
  ENSP ID: ENSP00000465725
MASLRVERAGGPRLPRTRVGRPAALRLLLLLGAVLNPHEALAQPLPTTGTPGSEGLIAPCEIAWSTLQSCLTWASPIPWQRGSSLRLTRSTLPTAPWCSPPSLTPQRMYSWP

SEQ ID NO: 72070 - protein, 180 aa, Homo sapiens
  Payload ID: 14267
  Gene Symbol: RAMP2
  Gene Name: receptor (G protein-coupled) activity modifying protein 2
  Uniprot ID: O60895
  ENSP ID: ENSP00000466455
MASLRVERAGGPRLPRTRVGRPAALRLLLLLGAVLNPHEALAQPLPTTGTPGSEASVPTGGTVKNYETAVQFCWNHYKDQMDPIEKDWCDWAMISRPYSTLRDCLEHFAELFDLGFPNPLAERIIFETHQIHFANCSLVQPTFSDPPEDVLLAMIIAPICLIPFLITLVVWRSKDSEAQA

SEQ ID NO: 72071 - protein, 49 aa, Homo sapiens
  Payload ID: 14267
  Gene Symbol: RAMP2
  Gene Name: receptor (G protein-coupled) activity modifying protein 2
  ENSP ID: ENSP00000466980
MDPIEKDWCDWAMISRPYSTLRDCLEHFAELFDLGFPNPLAERIIFETH

SEQ ID NO: 72072 - protein, 100 aa, Homo sapiens
  Payload ID: 14267
  Gene Symbol: RAMP2
  Gene Name: receptor (G protein-coupled) activity modifying protein 2
  ENSP ID: ENSP00000467463
MDPIEKDWCDWAMISRPYSTLRDCLEHFAELFDLGFPNPLAERIIFETHQIHFANCSLVQPTFSDPPEDVLLAMIIAPICLIPFLITLVVWRSKDSEAQA

SEQ ID NO: 72073 - protein, 148 aa, Homo sapiens
  Payload ID: 14268
  Gene Symbol: RAMP3
  Gene Name: receptor (G protein-coupled) activity modifying protein 3
  Uniprot ID: O60896
  ENSP ID: ENSP00000242249
METGALRRPQLLPLLLLLCGGCPRAGGCNETGMLERLPLCGKAFADMMGKVDVWKWCNLSEFIVYYESFTNCTEMEANVVGCYWPNPLAQGFITGIHRQFFSNCTVDRVHLEDPPDEVLIPLIVIPVVLTVAMAGLVVWRSKRTDTLL

SEQ ID NO: 72074 - protein, 151 aa, Homo sapiens
  Payload ID: 14268
  Gene Symbol: RAMP3
  Gene Name: receptor (G protein-coupled) activity modifying protein 3
  ENSP ID: ENSP00000418460
METGALRRPQLLPLLLLLCGGCPRAGGCNETGMLERLPLCGKAFADMMGKVDVWKWCNLSEFIVYYESFTNCTEMEANVVGCYWPNPLAQGFITGIHRQFFSNCTVDRVHLEDPPDEVLIPLIVIPVVLTVAMAGLVVWRSKRTDTLLCGN

SEQ ID NO: 72075 - protein, 148 aa, Homo sapiens; identical to SEQ ID NO: 72073
  Payload ID: 14268
  Gene Symbol: RAMP3
  Gene Name: receptor (G protein-coupled) activity modifying protein 3
  Uniprot ID: O60896
  ENSP ID: ENSP00000419012

SEQ ID NO: 72076 - protein, 671 aa, Homo sapiens
  Payload ID: 14269
  Gene Symbol: RIPK1
  Gene Name: receptor (TNFRSF)-interacting serine-threonine kinase 1
  Uniprot ID: Q13546
  ENSP ID: ENSP00000259808
MQPDMSLNVIKMKSSDFLESAELDSGGFGKVSLCFHRTQGLMIMKTVYKGPNCIEHNEALLEEAKMMNRLRHSRVVKLLGVIIEEGKYSLVMEYMEKGNLMHVLKAEMSTPLSVKGRIILEIIEGMCYLHGKGVIHKDLKPENILVDNDFHIKIADLGLASFKMWSKLNNEEHNELREVDGTAKKNGGTLYYMAPEHLNDVNAKPTEKSDVYSFAVVLWAIFANKEPYENAICEQQLIMCIKSGNRPDVDDITEYCPREIISLMKLCWEANPEARPTFPGIEEKFRPFYLSQLEESVEEDVKSLKKEYSNENAVVKRMQSLQLDCVAVPSSRSNSATEQPGSLHSSQGLGMGPVEESWFAPSLEHPQEENEPSLQSKLQDEANYHLYGSRMDRQTKQQPRQNVAYNREEERRRRVSHDPFAQQRPYENFQNTEGKGTAYSSAASHGNAVHQPSGLTSQPQVLYQNNGLYSSHGFGTRPLDPGTAGPRVWYRPIPSHMPSLHNIPVPETNYLGNTPTMPFSSLPPTDESIKYTIYNSTGIQIGAYNYMEIGGTSSSLLDSTNTNFKEEPAAKYQAIFDNTTSLTDKHLDPIRENLGKHWKNCARKLGFTQSQIDEIDHDYERDGLKEKVYQMLQKWVMREGIKGATVGKLAQALHQCSRIDLLSSLIYVSQN

SEQ ID NO: 72077 - protein, 671 aa, Homo sapiens; identical to SEQ ID NO: 72076
  Payload ID: 14269
  Gene Symbol: RIPK1
  Gene Name: receptor (TNFRSF)-interacting serine-threonine kinase 1
  Uniprot ID: Q13546
  ENSP ID: ENSP00000369773

SEQ ID NO: 72078 - protein, 201 aa, Homo sapiens
  Payload ID: 14270
  Gene Symbol: REEP1
  Gene Name: receptor accessory protein 1
  Uniprot ID: Q9H902
  ENSP ID: ENSP00000165698
MVSWIISRLVVLIFGTLYPAYYSYKAVKSKDIKEYVKWMMYWIIFALFTTAETFTDIFLCWFPFYYELKIAFVAWLLSPYTKGSSLLYRKFVHPTLSSKEKEIDDCLVQAKDRSYDALVHFGKRGLNVAATAAVMAASKGQGALSERLRSFSMQDLTTIRGDGAPAPSGPPPPGSGRASGKHGQPKMSRSASESASSSGTA

SEQ ID NO: 72079 - protein, 190 aa, Homo sapiens
  Payload ID: 14270
  Gene Symbol: REEP1
  Gene Name: receptor accessory protein 1
  ENSP ID: ENSP00000392197
MQKVLSNGQTEEVRSGSRLIFGTLYPAYYSYKAVKSKDIKEYVKWMMYWIIFALFTTAETFTDIFLCWFPFYYELKIAFVAWLLSPYTKGSSLLYRKFVHPTLSSKEKEIDDCLVQAKDRSYDALVHFGKRGLNVAATAAVMAASKGQGALSERLRSFSMQDLTTIRGDGAPAPSGPPPPGSGRASGKHG

SEQ ID NO: 72080 - protein, 140 aa, Homo sapiens
  Payload ID: 14270
  Gene Symbol: REEP1
  Gene Name: receptor accessory protein 1
  ENSP ID: ENSP00000400607
MDHLQAGGVKWMMYWIIFALFTTAETFTDIFLCWFPFYYELKIAFVAWLLSPYTKGSSLLYRKFVHPTLSSKEKEIDDCLVQAKDRSYDALVHFGKRGLNVAATAAVMAASKGQGALSERLRSFSMQDLTTIRGDGAPAP

SEQ ID NO: 72081 - protein, 120 aa, Homo sapiens
  Payload ID: 14270
  Gene Symbol: REEP1
  Gene Name: receptor accessory protein 1
  ENSP ID: ENSP00000401140
MVSWIISRLVVLIFGTLYPAYYSYKAVKSKDIKEYVKWMMYWIIFALFTTAETFTDIFLCWDRVPYRRDCGASACRTSPPSGETAPLLPRAPHHRGLGGPAANTASLRCPGVLLRALAAQ

SEQ ID NO: 72082 - protein, 174 aa, Homo sapiens
  Payload ID: 14270
  Gene Symbol: REEP1
  Gene Name: receptor accessory protein 1
  Uniprot ID: Q9H902
  ENSP ID: ENSP00000437567
MDHLQAGGVKWMMYWIIFALFTTAETFTDIFLCWFPFYYELKIAFVAWLLSPYTKGSSLLYRKFVHPTLSSKEKEIDDCLVQAKDRSYDALVHFGKRGLNVAATAAVMAASKGQGALSERLRSFSMQDLTTIRGDGAPAPSGPPPPGSGRASGKHGQPKMSRSASESASSSGTA

SEQ ID NO: 72083 - protein, 208 aa, Homo sapiens
  Payload ID: 14270
  Gene Symbol: REEP1
  Gene Name: receptor accessory protein 1
  Uniprot ID: Q9H902
  ENSP ID: ENSP00000438346
MQKVLSNGQTEEVRSGSRLIFGTLYPAYYSYKAVKSKDIKEYVKWMMYWIIFALFTTAETFTDIFLCWFPFYYELKIAFVAWLLSPYTKGSSLLYRKFVHPTLSSKEKEIDDCLVQAKDRSYDALVHFGKRGLNVAATAAVMAASKGQGALSERLRSFSMQDLTTIRGDGAPAPSGPPPPGSGRASGKHGQPKMSRSASESASSSGTA

SEQ ID NO: 72084 - protein, 143 aa, Homo sapiens
  Payload ID: 14270
  Gene Symbol: REEP1
  Gene Name: receptor accessory protein 1
  Uniprot ID: Q9H902
  ENSP ID: ENSP00000442681
MVSWIISRLVVLIFGTLYPAYYSYKAVKSKDIKEYVKWMMYWIIFALFTTAETFTDIFLCWDRVPYRRDCGASACRTSPPSGETAPLLPRAPHHRGLGGPAANTASLRCPGVLLRALAAQAPPRILRSRFRKKSTSSSATETT

SEQ ID NO: 72085 - protein, 147 aa, Homo sapiens
  Payload ID: 14270
  Gene Symbol: REEP1
  Gene Name: receptor accessory protein 1
  ENSP ID: ENSP00000475269
  MOD_RES (1)..(1): Any amino acid
XSYKAVKSKDIKEYVKWMMYWIIFALFTTAETFTDIFLCWFPFYYELKIAFVAWLLSPYTKGSSLLYRKFVHPTLSSKEKEIDDCLVQAKDRSYDALVHFGKRGLNVAATAAVMAASKVLCWKYHNYMSLSPSSVPCSSPVRPHRTG

SEQ ID NO: 72086 - protein, 252 aa, Homo sapiens
  Payload ID: 14271
  Gene Symbol: REEP2
  Gene Name: receptor accessory protein 2
  Uniprot ID: Q9BRK0
  ENSP ID: ENSP00000254901
MVSWIISRLVVLIFGTLYPAYSSYKAVKTKNVKEYVKWMMYWIVFAFFTTAETLTDIVLSWFPFYFELKIAFVIWLLSPYTKGSSVLYRKFVHPTLSNKEKEIDEYITQARDKSYETMMRVGKRGLNLAANAAVTAAAKGVLSEKLRSFSMQDLTLIRDEDALPLQRPDGRLRPSPGSLLDTIEDLGDDPALSLRSSTNPADSRTEASEDDMGDKAPKRAKPIKKAPKAEPLASKTLKTRPKKKTSGGGDSA

SEQ ID NO: 72087 - protein, 254 aa, Homo sapiens
  Payload ID: 14271
  Gene Symbol: REEP2
  Gene Name: receptor accessory protein 2
  Uniprot ID: Q9BRK0
  ENSP ID: ENSP00000367590
MVSWIISRLVVLIFGTLYPAYSSYKAVKTKNVKEYVKWMMYWIVFAFFTTAETLTDIVLSWFPFYFELKIAFVIWLLSPYTKGSSVLYRKFVHPTLSNKEKEIDEYITQARDKSYETMMRVGKRGLNLAANAAVTAAAKGQGVLSEKLRSFSMQDLTLIRDEDALPLQRPDGRLRPSPGSLLDTIEDLGDDPALSLRSSTNPADSRTEASEDDMGDKAPKRAKPIKKAPKAEPLASKTLKTRPKKKTSGGGDSA

SEQ ID NO: 72088 - protein, 214 aa, Homo sapiens
  Payload ID: 14271
  Gene Symbol: REEP2
  Gene Name: receptor accessory protein 2
  ENSP ID: ENSP00000422530
MMYWIVFAFFTTAETLTDIVLSWFPFYFELKIAFVIWLLSPYTKGSSVLYRKFVHPTLSNKEKEIDEYITQARDKSYETMMRVGKRGLNLAANAAVTAAAKGVLSEKLRSFSMQDLTLIRDEDALPLQRPDGRLRPSPGSLLDTIEDLGDDPALSLRSSTNPADSRTEASEDDMGDKAPKRAKPIKKAPKAEPLASKTLKTRPKKKTSGGGDSA

SEQ ID NO: 72089 - protein, 40 aa, Homo sapiens
  Payload ID: 14271
  Gene Symbol: REEP2
  Gene Name: receptor accessory protein 2
  ENSP ID: ENSP00000424441
MVSWIISRLVVLIFGTLYPAYSSYKAVKTKNVKEYVPLLL

SEQ ID NO: 72090 - protein, 191 aa, Homo sapiens
  Payload ID: 14271
  Gene Symbol: REEP2
  Gene Name: receptor accessory protein 2
  ENSP ID: ENSP00000426658
  MOD_RES (1)..(1): Any amino acid
XLRAITRPLGLSLPLTVRRLGTRAYALRPPREEVWVSGSRNARRTKCERLIFGTLYPAYSSYKAVKTKNVKEYVKWMMYWIVFAFFTTAETLTDIVLSWFPFYFELKIAFVIWLLSPYTKGSSVLYRKFVHPTLSNKEKEIDEYITQARDKSYETMMRVGKRGLNLAANAAVTAAAKGQGVLSEKLRSFSM

SEQ ID NO: 72091 - protein, 151 aa, Homo sapiens
  Payload ID: 14271
  Gene Symbol: REEP2
  Gene Name: receptor accessory protein 2
  ENSP ID: ENSP00000479268
MMYWIVFAFFTTAETLTDIVLSWFPFYFELKIAFVIWLLSPYTKGSSVLYRKFVHPTLSNKEKEIDEYITQARDKSYETMMRVGKRGLNLAANAAVTAAAKGQGVLSEKLRSFSMQDLTLIRDEDALPLQRPDGPPTQPWQPPGHHRGLRR

SEQ ID NO: 72092 - protein, 255 aa, Homo sapiens
  Payload ID: 14272
  Gene Symbol: REEP3
  Gene Name: receptor accessory protein 3
  Uniprot ID: Q6NUK4
  ENSP ID: ENSP00000362863
MVSWMISRAVVLVFGMLYPAYYSYKAVKTKNVKEYVRWMMYWIVFALYTVIETVADQTVAWFPLYYELKIAFVIWLLSPYTKGASLIYRKFLHPLLSSKEREIDDYIVQAKERGYETMVNFGRQGLNLAATAAVTAAVKSQGAITERLRSFSMHDLTTIQGDEPVGQRPYQPLPEAKKKSKPAPSESAGYGIPLKDGDEKTDEEAEGPYSDNEMLTHKGLRRSQSMKSVKTTKGRKEVRYGSLKYKVKKRPQVYF

SEQ ID NO: 72093 - protein, 84 aa, Homo sapiens
  Payload ID: 14272
  Gene Symbol: REEP3
  Gene Name: receptor accessory protein 3
  ENSP ID: ENSP00000489394
KIAFVIWLLSPYTKGASLIYRKFLHPLLSSKEREIDDYIVQAKERGYETMVNFGRQGLNLAATAAVTAAVKDFWLTSAPLLQSI

SEQ ID NO: 72094 - protein, 257 aa, Homo sapiens
  Payload ID: 14273
  Gene Symbol: REEP4
  Gene Name: receptor accessory protein 4
  Uniprot ID: Q9H6H4
  ENSP ID: ENSP00000303482
MVSWMICRLVVLVFGMLCPAYASYKAVKTKNIREYVRWMMYWIVFALFMAAEIVTDIFISWFPFYYEIKMAFVLWLLSPYTKGASLLYRKFVHPSLSRHEKEIDAYIVQAKERSYETVLSFGKRGLNIAASAAVQAATKSQGALAGRLRSFSMQDLRSISDAPAPAYHDPLYLEDQVSHRRPPIGYRAGGLQDSDTEDECWSDTEAVPRAPARPREKPLIRSQSLRVVKRKPPVREGTSRSLKVRTRKKTVPSDVDS

SEQ ID NO: 72095 - protein, 173 aa, Homo sapiens
  Payload ID: 14273
  Gene Symbol: REEP4
  Gene Name: receptor accessory protein 4
  Uniprot ID: Q9H6H4
  ENSP ID: ENSP00000333889
MVSWMICRLVVLVFGMLCPAYASYKAVKTKNIREYVRWMMYWIVFALFMAAEIVTDIFISWFPFYYEIKMAFVLWLLSPYTKGASLLYRKFVHPSLSRHEKEIDAYIVQAKERSYETVLSFGKRGLNIAASAAVQAATKGTGPGACRTATPRMSVGQILRQSPGRQPGPERSP

SEQ ID NO: 72096 - protein, 251 aa, Homo sapiens
  Payload ID: 14273
  Gene Symbol: REEP4
  Gene Name: receptor accessory protein 4
  ENSP ID: ENSP00000428709
MVSWMICRLVVLVFGMLCPAYASYKAVKTKNIREYVRWMMYWIVFALFMAAEIVTDIFISWFPFYYEIKMAFVLWLLSPYTKGASLLYRKFVHPSLSRHEKEIDAYIVQAKERSYETVLSFGKRGLNIAASAAVQAATKSQGALAGRLRSFSMQDLRSISDAPAPAYHDPLYLEDQVSHRRPPIGHLALPEGSDEEKDCALRRGQLGSAASAPFLPRALQGSRAIWRDLGLHIWPACTSCLGPTLLTPADG

SEQ ID NO: 72097 - protein, 55 aa, Homo sapiens
  Payload ID: 14273
  Gene Symbol: REEP4
  Gene Name: receptor accessory protein 4
  ENSP ID: ENSP00000429451
MVSWMICRLVVLVFGMLCPAYASYKAVKTKNIREYVSVGVWVRWMMYWIVFALFM

SEQ ID NO: 72098 - protein, 165 aa, Homo sapiens
  Payload ID: 14274
  Gene Symbol: REEP5
  Gene Name: receptor accessory protein 5
  ENSP ID: ENSP00000261482
MSAPRPGALFLLSCAVGADGGAPAGGRVDGGVIGLVALYLVFGYGASLLCNLIGFGYPAYISIKAIESPNKEDDTQWLTYWVVYGVFSIAEFFSDIFLSWFPFYYMLKCGFLLWCMAPSPSNGAELLYKRIIRPFFLKHESQMDSVVKDLKDKAKETADAITKEA

SEQ ID NO: 72099 - protein, 189 aa, Homo sapiens
  Payload ID: 14274
  Gene Symbol: REEP5
  Gene Name: receptor accessory protein 5
  Uniprot ID: Q00765
  ENSP ID: ENSP00000368959
MSAAMRERFDRFLHEKNCMTDLLAKLEAKTGVNRSFIALGVIGLVALYLVFGYGASLLCNLIGFGYPAYISIKAIESPNKEDDTQWLTYWVVYGVFSIAEFFSDIFLSWFPFYYMLKCGFLLWCMAPSPSNGAELLYKRIIRPFFLKHESQMDSVVKDLKDKAKETADAITKEAKKATVNLLGEEKKST

SEQ ID NO: 72100 - protein, 145 aa, Homo sapiens
  Payload ID: 14274
  Gene Symbol: REEP5
  Gene Name: receptor accessory protein 5
  ENSP ID: ENSP00000421305
  MOD_RES (1)..(1): Any amino acid
XALGTAPSGETVPAMSAAMRERFDRFLHEKNCMTDLLAKLEAKTGVNRSFIALGVIGLVALYLVFGYGASLLCNLIGFGYPAYISIKAIESPNKEDDTQWLTYWVVYGVFSIAEFFSDIFLSWFPFYYMLKVWSGLGFLLPRCLL

SEQ ID NO: 72101 - protein, 99 aa, Homo sapiens
  Payload ID: 14274
  Gene Symbol: REEP5
  Gene Name: receptor accessory protein 5
  ENSP ID: ENSP00000421881
MSAAMRERFDRFLHEKNCMTDLLAKLEAKTGVNRSFIALGVIGLVALYLVFGYGASLLCNLIGFGYPAYISVASCCGAWPRALLMGLNCSTSASSVLSS

SEQ ID NO: 72102 - protein, 122 aa, Homo sapiens
  Payload ID: 14274
  Gene Symbol: REEP5
  Gene Name: receptor accessory protein 5
  ENSP ID: ENSP00000425901
MSAAMRERFDRFLHEKNCMTDLLAKLEAKTGVNRSFIALGVIGLVALYLVFGYGASLLCNLIGFGYPAYISIKAIESPNKEDDTQWLTYWVVYGVFSIAEFFSDIFLSWFPFYYMLKRRKLP

SEQ ID NO: 72103 - protein, 184 aa, Homo sapiens
  Payload ID: 14275
  Gene Symbol: REEP6
  Gene Name: receptor accessory protein 6
  Uniprot ID: Q96HR9
  ENSP ID: ENSP00000233596
MDGLRQRVEHFLEQRNLVTEVLGALEAKTGVEKRYLAAGAVTLLSLYLLFGYGASLLCNLIGFVYPAYASIKAIESPSKDDDTVWLTYWVVYALFGLAEFFSDLLLSWFPFYYVGKCAFLLFCMAPRPWNGALMLYQRVVRPLFLRHHGAVDRIMNDLSGRALDAAAGITRNVKPSQTPQPKDK

SEQ ID NO: 72104 - protein, 150 aa, Homo sapiens
  Payload ID: 14275
  Gene Symbol: REEP6
  Gene Name: receptor accessory protein 6
  ENSP ID: ENSP00000378861
  MOD_RES (1)..(1): Any amino acid
XFVYPAYASIKAIESPSKDDDTVWLTYWVVYALFGLAEFFSDLLLSWFPFYYVGKCAFLLFCMAPRPWNGALMLYQRVVRPLFLRHHGAVDRIMNDLSGRALDAAAGITRNVLQVLARSRAGITPVAVAGPSTPLEADLKPSQTPQPKDK

SEQ ID NO: 72105 - protein, 139 aa, Homo sapiens
  Payload ID: 14275
  Gene Symbol: REEP6
  Gene Name: receptor accessory protein 6
  ENSP ID: ENSP00000378865
AIESPSKDDDTVWLTYWVVYALFGLAEFFSDLLLSWFPFYYVGKCAFLLFCMAPRPWNGALMLYQRVVRPLFLRHHGAVDRIMNDLSGRALDAAAGITRNVLQVLARSRAGITPVAVAGPSTPLEADLKPSQTPQPKDK

SEQ ID NO: 72106 - protein, 937 aa, Homo sapiens
  Payload ID: 14276
  Gene Symbol: ROR1
  Gene Name: receptor tyrosine kinase-like orphan receptor 1
  Uniprot ID: Q01973
  ENSP ID: ENSP00000360120
MHRPRRRGTRPPLLALLAALLLAARGAAAQETELSVSAELVPTSSWNISSELNKDSYLTLDEPMNNITTSLGQTAELHCKVSGNPPPTIRWFKNDAPVVQEPRRLSFRSTIYGSRLRIRNLDTTDTGYFQCVATNGKEVVSSTGVLFVKFGPPPTASPGYSDEYEEDGFCQPYRGIACARFIGNRTVYMESLHMQGEIENQITAAFTMIGTSSHLSDKCSQFAIPSLCHYAFPYCDETSSVPKPRDLCRDECEILENVLCQTEYIFARSNPMILMRLKLPNCEDLPQPESPEAANCIRIGIPMADPINKNHKCYNSTGVDYRGTVSVTKSGRQCQPWNSQYPHTHTFTALRFPELNGGHSYCRNPGNQKEAPWCFTLDENFKSDLCDIPACDSKDSKEKNKMEILYILVPSVAIPLAIALLFFFICVCRNNQKSSSAPVQRQPKHVRGQNVEMSMLNAYKPKSKAKELPLSAVRFMEELGECAFGKIYKGHLYLPGMDHAQLVAIKTLKDYNNPQQWTEFQQEASLMAELHHPNIVCLLGAVTQEQPVCMLFEYINQGDLHEFLIMRSPHSDVGCSSDEDGTVKSSLDHGDFLHIAIQIAAGMEYLSSHFFVHKDLAARNILIGEQLHVKISDLGLSREIYSADYYRVQSKSLLPIRWMPPEAIMYGKFSSDSDIWSFGVVLWEIFSFGLQPYYGFSNQEVIEMVRKRQLLPCSEDCPPRMYSLMTECWNEIPSRRPRFKDIHVRLRSWEGLSSHTSSTTPSGGNATTQTTSLSASPVSNLSNPRYPNYMFPSQGITPQGQIAGFIGPPIPQNQRFIPINGYPIPPGYAAFPAAHYQPTGPPRVIQHCPPPKSRSPSSASGSTSTGHVTSLPSSGSNQEANIPLLPHMSIPNHPGGMGITVFGNKSQKPYKIDSKQASLLGDANIHGHTESMISAEL

SEQ ID NO: 72107 - protein, 393 aa, Homo sapiens
  Payload ID: 14276
  Gene Symbol: ROR1
  Gene Name: receptor tyrosine kinase-like orphan receptor 1
  Uniprot ID: Q01973
  ENSP ID: ENSP00000360121
MHRPRRRGTRPPLLALLAALLLAARGAAAQETELSVSAELVPTSSWNISSELNKDSYLTLDEPMNNITTSLGQTAELHCKVSGNPPPTIRWFKNDAPVVQEPRRLSFRSTIYGSRLRIRNLDTTDTGYFQCVATNGKEVVSSTGVLFVKFGPPPTASPGYSDEYEEDGFCQPYRGIACARFIGNRTVYMESLHMQGEIENQITAAFTMIGTSSHLSDKCSQFAIPSLCHYAFPYCDETSSVPKPRDLCRDECEILENVLCQTEYIFARSNPMILMRLKLPNCEDLPQPESPEAANCIRIGIPMADPINKNHKCYNSTGVDYRGTVSVTKSGRQCQPWNSQYPHTHTFTALRFPELNGGHSYCRNPGNQKEAPWCFTLDENFKSDLCDIPACGK

SEQ ID NO: 72108 - protein, 882 aa, Homo sapiens
  Payload ID: 14276
  Gene Symbol: ROR1
  Gene Name: receptor tyrosine kinase-like orphan receptor 1
  ENSP ID: ENSP00000441637
SYLTLDEPMNNITTSLGQTAELHCKVSGNPPPTIRWFKNDAPVVQEPRRLSFRSTIYGSRLRIRNLDTTDTGYFQCVATNGKEVVSSTGVLFVKFGPPPTASPGYSDEYEEDGFCQPYRGIACARFIGNRTVYMESLHMQGEIENQITAAFTMIGTSSHLSDKCSQFAIPSLCHYAFPYCDETSSVPKPRDLCRDECEILENVLCQTEYIFARSNPMILMRLKLPNCEDLPQPESPEAANCIRIGIPMADPINKNHKCYNSTGVDYRGTVSVTKSGRQCQPWNSQYPHTHTFTALRFPELNGGHSYCRNPGNQKEAPWCFTLDENFKSDLCDIPACDSKDSKEKNKMEILYILVPSVAIPLAIALLFFFICVCRNNQKSSSAPVQRQPKHVRGQNVEMSMLNAYKPKSKAKELPLSAVRFMEELGECAFGKIYKGHLYLPGMDHAQLVAIKTLKDYNNPQQWTEFQQEASLMAELHHPNIVCLLGAVTQEQPVCMLFEYINQGDLHEFLIMRSPHSDVGCSSDEDGTVKSSLDHGDFLHIAIQIAAGMEYLSSHFFVHKDLAARNILIGEQLHVKISDLGLSREIYSADYYRVQSKSLLPIRWMPPEAIMYGKFSSDSDIWSFGVVLWEIFSFGLQPYYGFSNQEVIEMVRKRQLLPCSEDCPPRMYSLMTECWNEIPSRRPRFKDIHVRLRSWEGLSSHTSSTTPSGGNATTQTTSLSASPVSNLSNPRYPNYMFPSQGITPQGQIAGFIGPPIPQNQRFIPINGYPIPPGYAAFPAAHYQPTGPPRVIQHCPPPKSRSPSSASGSTSTGHVTSLPSSGSNQEANIPLLPHMSIPNHPGGMGITVFGNKSQKPYKIDSKQASLLGDANIHGHTESMISAEL

SEQ ID NO: 72109 - protein, 943 aa, Homo sapiens
  Payload ID: 14277
  Gene Symbol: ROR2
  Gene Name: receptor tyrosine kinase-like orphan receptor 2
  Uniprot ID: Q01974
  ENSP ID: ENSP00000364860
MARGSALPRRPLLCIPAVWAAAALLLSVSRTSGEVEVLDPNDPLGPLDGQDGPIPTLKGYFLNFLEPVNNITIVQGQTAILHCKVAGNPPPNVRWLKNDAPVVQEPRRIIIRKTEYGSRLRIQDLDTTDTGYYQCVATNGMKTITATGVLFVRLGPTHSPNHNFQDDYHEDGFCQPYRGIACARFIGNRTIYVDSLQMQGEIENRITAAFTMIGTSTHLSDQCSQFAIPSFCHFVFPLCDARSRTPKPRELCRDECEVLESDLCRQEYTIARSNPLILMRLQLPKCEALPMPESPDAANCMRIGIPAERLGRYHQCYNGSGMDYRGTASTTKSGHQCQPWALQHPHSHHLSSTDFPELGGGHAYCRNPGGQMEGPWCFTQNKNVRMELCDVPSCSPRDSSKMGILYILVPSIAIPLVIACLFFLVCMCRNKQKASASTPQRRQLMASPSQDMEMPLINQHKQAKLKEISLSAVRFMEELGEDRFGKVYKGHLFGPAPGEQTQAVAIKTLKDKAEGPLREEFRHEAMLRARLQHPNVVCLLGVVTKDQPLSMIFSYCSHGDLHEFLVMRSPHSDVGSTDDDRTVKSALEPPDFVHLVAQIAAGMEYLSSHHVVHKDLATRNVLVYDKLNVKISDLGLFREVYAADYYKLLGNSLLPIRWMAPEAIMYGKFSIDSDIWSYGVVLWEVFSYGLQPYCGYSNQDVVEMIRNRQVLPCPDDCPAWVYALMIECWNEFPSRRPRFKDIHSRLRAWGNLSNYNSSAQTSGASNTTQTSSLSTSPVSNVSNARYVGPKQKAPPFPQPQFIPMKGQIRPMVPPPQLYVPVNGYQPVPAYGAYLPNFYPVQIPMQMAPQQVPPQMVPKPSSHHSGSGSTSTGYVTTAPSNTSMADRAALLSEGADDTQNAPEDGAQSTVQEAEEEEEGSVPETELLGDCDTLQVDEAQVQLEA

SEQ ID NO: 72110 - protein, 704 aa, Homo sapiens
  Payload ID: 14277
  Gene Symbol: ROR2
  Gene Name: receptor tyrosine kinase-like orphan receptor 2
  ENSP ID: ENSP00000364867
MKTITATGVLFVRLGPTHSPNHNFQDDYHEDGFCQPYRGIACARFIGNRTIYVDSLQMQGEIENRITAAFTMIGTSTHLSDQCSQFAIPSFCHFVFPLCDARSRTPKPRELCRDECEVLESDLCRQEYTIARSNPLILMRLQLPKCEALPMPESPDAANCMRIGIPAERLGRYHQCYNGSGMDYRGTASTTKSGHQCQPWALQHPHSHHLSSTDFPELGGGHAYCRNPGGQMEGPWCFTQNKNVRMELCDVPSCSPRDSSKMGILYILVPSIAIPLVIACLFFLVCMCRNKQKASASTPQRRQLMASPSQDMEMPLINQHKQAKLKEISLSAVRFMEELGEDRFGKVYKGHLFGPAPGEQTQAVAIKTLKDKAEGPLREEFRHEAMLRARLQHPNVVCLLGVVTKDQPLSMIFSYCSHGDLHEFLVMRSPHSDVGSTDDDRTVKSALEPPDFVHLVAQIAAGMEYLSSHHVVHKDLATRNVLVYDKLNVKISDLGLFREVYAADYYKLLGNSLLPIRWMAPEAIMYGKFSIDSDIWSYGVVLWEVFSYGLQPYCGYSNQDVVEMIRNRQVLPCPDDCPAWVYALMIECWNEFPSRRPRFKDIHSRLRAWGNLSNYNSSAQTSGASNTTQTSSLSTSPVSNVVRMRGSGRQCWMTETPNALLWHNVSGVGSCRWVRGLADFKDEATDFRVMPRDPSLHCHVTSTA

SEQ ID NO: 72111 - protein, 353 aa, Homo sapiens
  Payload ID: 14278
  Gene Symbol: RAPSN
  Gene Name: receptor-associated protein of the synapse
  Uniprot ID: Q13702
  ENSP ID: ENSP00000298853
MGQDQTKQQIEKGLQLYQSNQTEKALQVWTKVLEKSSDLMGRFRVLGCLVTAHSEMGRYKEMLKFAVVQIDTARELEDADFLLESYLNLARSNEKLCEFHKTISYCKTCLGLPGTRAGAQLGGQVSLSMGNAFLGLSVFQKALESFEKALRYAHNNDDAMLECRVCCSLGSFYAQVKDYEKALFFPCKAAELVNNYGKGWSLKYRAMSQYHMAVAYRLLGRLGSAMECCEESMKIALQHGDRPLQALCLLCFADIHRSRGDLELSQLKLHCLSESIYRSKGLQRELRAHVVRFHECVEETELYCGLCGESIGEKNSRLQALPCSHIFHLRCLQNNGTRSCPNCRRSSMKPGFV

SEQ ID NO: 72112 - protein, 412 aa, Homo sapiens
  Payload ID: 14278
  Gene Symbol: RAPSN
  Gene Name: receptor-associated protein of the synapse
  Uniprot ID: Q13702
  ENSP ID: ENSP00000298854
MGQDQTKQQIEKGLQLYQSNQTEKALQVWTKVLEKSSDLMGRFRVLGCLVTAHSEMGRYKEMLKFAVVQIDTARELEDADFLLESYLNLARSNEKLCEFHKTISYCKTCLGLPGTRAGAQLGGQVSLSMGNAFLGLSVFQKALESFEKALRYAHNNDDAMLECRVCCSLGSFYAQVKDYEKALFFPCKAAELVNNYGKGWSLKYRAMSQYHMAVAYRLLGRLGSAMECCEESMKIALQHGDRPLQALCLLCFADIHRSRGDLETAFPRYDSAMSIMTEIGNRLGQVQALLGVAKCWVARKALDKALDAIERAQDLAEEVGNKLSQLKLHCLSESIYRSKGLQRELRAHVVRFHECVEETELYCGLCGESIGEKNSRLQALPCSHIFHLRCLQNNGTRSCPNCRRSSMKPGFV

SEQ ID NO: 72113 - protein, 353 aa, Homo sapiens
  Payload ID: 14278
  Gene Symbol: RAPSN
  Gene Name: receptor-associated protein of the synapse
  ENSP ID: ENSP00000431732
MGQDQTKQQIEKGLQLYQSNQTEKALQVWTKVLEKSSDLMGRFRVLGCLVTAHSEMGRYKEMLKFAVVQIDTARELEDADFLLESYLNLARSNEKLCEFHKTISYCKTCLGLPGTRAGAQLGGQVSLSMGNAFLGLSVFQKALESFEKALRYAHNNDDAMLECRVCCSLGSFYAQVKDYEKALFFPCKAAELVNNYGKGWSLKYRAMSQYHMAVAYRLLGRLGSAMECCEESMKIALQHGDRPLQALCLLCFADIHRSRGDLELSQLKLHCLSESIYRSKGLQRELRAHVVRFHECVEETELYCGLCGESIGEKNSRLQALPCSHIFHLRWGLLGGWTGVGRISSGHSRAQLA

SEQ ID NO: 72114 - protein, 359 aa, Homo sapiens
  Payload ID: 14278
  Gene Symbol: RAPSN
  Gene Name: receptor-associated protein of the synapse
  ENSP ID: ENSP00000435551
MGQDQTKQQIEKGLQLYQSNQTEKALQVWTKVLEKSSDLMGRFRVLGCLVTAHSEMGRYKEMLKFAVVQIDTARELEDADFLLESYLNLARSNEKLCEFHKTISYCKTCLGLPGTRAGAQLGGQVSLSMGNAFLGLSVFQKALESFEKALRYAHNNDDAMLECRVCCSLGSFYAQVKESMKIALQHGDRPLQALCLLCFADIHRSRGDLETAFPRYDSAMSIMTEIGNRLGQVQALLGVAKCWVARKALDKALDAIERAQDLAEEVGNKLSQLKLHCLSESIYRSKGLQRELRAHVVRFHECVEETELYCGLCGESIGEKNSRLQALPCSHIFHLRCLQNNGTRSCPNCRRSSMKPGFV

SEQ ID NO: 72115 - protein, 540 aa, Homo sapiens
  Payload ID: 14279
  Gene Symbol: RIPK2
  Gene Name: receptor-interacting serine-threonine kinase 2
  Uniprot ID: O43353
  ENSP ID: ENSP00000220751
MNGEAICSALPTIPYHKLADLRYLSRGASGTVSSARHADWRVQVAVKHLHIHTPLLDSERKDVLREAEILHKARFSYILPILGICNEPEFLGIVTEYMPNGSLNELLHRKTEYPDVAWPLRFRILHEIALGVNYLHNMTPPLLHHDLKTQNILLDNEFHVKIADFGLSKWRMMSLSQSRSSKSAPEGGTIIYMPPENYEPGQKSRASIKHDIYSYAVITWEVLSRKQPFEDVTNPLQIMYSVSQGHRPVINEESLPYDIPHRARMISLIESGWAQNPDERPSFLKCLIELEPVLRTFEEITFLEAVIQLKKTKLQSVSSAIHLCDKKKMELSLNIPVNHGPQEESCGSSQLHENSGSPETSRSLPAPQDNDFLSRKAQDCYFMKLHHCPGNHSWDSTISGSQRAAFCDHKTTPCSSAIINPLSTAGNSERLQPGIAQQWIQSKREDIVNQMTEACLNQSLDALLSRDLIMKEDYELVSTKPTRTSKVRQLLDTTDIQGEEFAKVIVQKLKDNKQMGLQPYPEILVVSRSPSLNLLQNKSM

SEQ ID NO: 72116 - protein, 70 aa, Homo sapiens
  Payload ID: 14279
  Gene Symbol: RIPK2
  Gene Name: receptor-interacting serine-threonine kinase 2
  ENSP ID: ENSP00000427736
MNGEAICSALPTIPYHKLADLRYLSRGASGTVSSARHADWRVQVAVKHLHIHTPLLDRDLTRPSIQFLVS

SEQ ID NO: 72117 - protein, 68 aa, Homo sapiens
  Payload ID: 14279
  Gene Symbol: RIPK2
  Gene Name: receptor-interacting serine-threonine kinase 2
  ENSP ID: ENSP00000429271
MNGEAICSALPTIPYHKLADLRYLSRGASGTVSSARHADWRVQVAVKHLHIHTPLLDRKLNILMLLGH

SEQ ID NO: 72118 - protein, 518 aa, Homo sapiens
  Payload ID: 14280
  Gene Symbol: RIPK3
  Gene Name: receptor-interacting serine-threonine kinase 3
  Uniprot ID: Q9Y572
  ENSP ID: ENSP00000216274
MSCVKLWPSGAPAPLVSIEELENQELVGKGGFGTVFRAQHRKWGYDVAVKIVNSKAISREVKAMASLDNEFVLRLEGVIEKVNWDQDPKPALVTKFMENGSLSGLLQSQCPRPWPLLCRLLKEVVLGMFYLHDQNPVLLHRDLKPSNVLLDPELHVKLADFGLSTFQGGSQSGTGSGEPGGTLGYLAPELFVNVNRKASTASDVYSFGILMWAVLAGREVELPTEPSLVYEAVCNRQNRPSLAELPQAGPETPGLEGLKELMQLCWSSEPKDRPSFQECLPKTDEVFQMVENNMNAAVSTVKDFLSQLRSSNRRFSIPESGQGGTEMDGFRRTIENQHSRNDVMVSEWLNKLNLEEPPSSVPKKCPSLTKRSRAQEEQVPQAWTAGTSSDSMAQPPQTPETSTFRNQMPSPTSTGTPSPGPRGNQGAERQGMNWSCRTPEPNPVTGRPLVNIYNCSGVQVGDNNYLTMQQTTALPTWGLAPSGKGRGLQHPPPVGSQEGPKDPEAWSRPQGWYNHSGK

SEQ ID NO: 72119 - protein, 162 aa, Homo sapiens
  Payload ID: 14280
  Gene Symbol: RIPK3
  Gene Name: receptor-interacting serine-threonine kinase 3
  ENSP ID: ENSP00000451840
  MOD_RES (1)..(1): Any amino acid
XGQGGTEMDGFRRTIENQHSRNDVMVSEWLNKLNLEEPPSSVPKKCPSLTKRSRAQEEQVPQAWTAGTSSDSMAQPPQTPETSTFRNQMPSPTSTGTPSPGPRGNQGAERQGMNWSCRTPEPNPVTGTHSLPLSFPCSILPPDSSSRPISRFRVLCGGEGRR

SEQ ID NO: 72120 - protein, 231 aa, Homo sapiens
  Payload ID: 14280
  Gene Symbol: RIPK3
  Gene Name: receptor-interacting serine-threonine kinase 3
  Uniprot ID: Q9Y572
  ENSP ID: ENSP00000452328
MSCVKLWPSGAPAPLVSIEELENQELVGKGGFGTVFRAQHRKWGYDVAVKIVNSKAISREVKAMASLDNEFVLRLEGVIEKVNWDQDPKPALVTKFMENGSLSGLLQSQCPRPWPLLCRLLKEVVLGMFYLHDQNPVLLHRDLKPSNVLLDPELHVKLADFGLSTFQGGSQSGTGSGEPGGTLGYLAPELFVNVNRKASTASDVYSFGILMWAVLAGREVECKTLGGFWDP

SEQ ID NO: 72121 - protein, 832 aa, Homo sapiens
  Payload ID: 14281
  Gene Symbol: RIPK4
  Gene Name: receptor-interacting serine-threonine kinase 4
  Uniprot ID: P57078
  ENSP ID: ENSP00000330161
MEGDGGTPWALALLRTFDAGEFTGWEKVGSGGFGQVYKVRHVHWKTWLAIKCSPSLHVDDRERMELLEEAKKMEMAKFRYILPVYGICREPVGLVMEYMETGSLEKLLASEPLPWDLRFRIIHETAVGMNFLHCMAPPLLHLDLKPANILLDAHYHVKISDFGLAKCNGLSHSHDLSMDGLFGTIAYLPPERIREKSRLFDTKHDVYSFAIVIWGVLTQKKPFADEKNILHIMVKVVKGHRPELPPVCRARPRACSHLIRLMQRCWQGDPRVRPTFQGNGLNGELIRQVLAALLPVTGRWRSPGEGFRLESEVIIRVTCPLSSPQEITSETEDLCEKPDDEVKETAHDLDVKSPPEPRSEVVPARLKRASAPTFDNDYSLSELLSQLDSGVSQAVEGPEELSRSSSESKLPSSGSGKRLSGVSSVDSAFSSRGSLSLSFEREPSTSDLGTTDVQKKKLVDAIVSGDTSKLMKILQPQDVDLALDSGASLLHLAVEAGQEECAKWLLLNNANPNLSNRRGSTPLHMAVERRVRGVVELLLARKISVNAKDEDQWTALHFAAQNGDESSTRLLLEKNASVNEVDFEGRTPMHVACQHGQENIVRILLRRGVDVSLQGKDAWLPLHYAAWQGHLPIVKLLAKQPGVSVNAQTLDGRTPLHLAAQRGHYRVARILIDLCSDVNVCSLLAQTPLHVAAETGHTSTARLLLHRGAGKEAMTSDGYTALHLAARNGHLATVKLLVEEKADVLARGPLNQTALHLAAAHGHSEVVEELVSADVIDLFDEQGLSALHLAAQGRHAQTVETLLRHGAHINLQSLKFQGGHGPAATLLRRSKT

SEQ ID NO: 72122 - protein, 784 aa, Homo sapiens
  Payload ID: 14281
  Gene Symbol: RIPK4
  Gene Name: receptor-interacting serine-threonine kinase 4
  Uniprot ID: P57078
  ENSP ID: ENSP00000332454
MEGDGGTPWALALLRTFDAGEFTGWEKVGSGGFGQVYKVRHVHWKTWLAIKCSPSLHVDDRERMELLEEAKKMEMAKFRYILPVYGICREPVGLVMEYMETGSLEKLLASEPLPWDLRFRIIHETAVGMNFLHCMAPPLLHLDLKPANILLDAHYHVKISDFGLAKCNGLSHSHDLSMDGLFGTIAYLPPERIREKSRLFDTKHDVYSFAIVIWGVLTQKKPFADEKNILHIMVKVVKGHRPELPPVCRARPRACSHLIRLMQRCWQGDPRVRPTFQEITSETEDLCEKPDDEVKETAHDLDVKSPPEPRSEVVPARLKRASAPTFDNDYSLSELLSQLDSGVSQAVEGPEELSRSSSESKLPSSGSGKRLSGVSSVDSAFSSRGSLSLSFEREPSTSDLGTTDVQKKKLVDAIVSGDTSKLMKILQPQDVDLALDSGASLLHLAVEAGQEECAKWLLLNNANPNLSNRRGSTPLHMAVERRVRGVVELLLARKISVNAKDEDQWTALHFAAQNGDESSTRLLLEKNASVNEVDFEGRTPMHVACQHGQENIVRILLRRGVDVSLQGKDAWLPLHYAAWQGHLPIVKLLAKQPGVSVNAQTLDGRTPLHLAAQRGHYRVARILIDLCSDVNVCSLLAQTPLHVAAETGHTSTARLLLHRGAGKEAMTSDGYTALHLAARNGHLATVKLLVEEKADVLARGPLNQTALHLAAAHGHSEVVEELVSADVIDLFDEQGLSALHLAAQGRHAQTVETLLRHGAHINLQSLKFQGGHGPAATLLRRSKT

SEQ ID NO: 72123 - protein, 93 aa, Homo sapiens
  Payload ID: 14282
  Gene Symbol: RYK
  Gene Name: receptor-like tyrosine kinase
  ENSP ID: ENSP00000417836
  MOD_RES (1)..(1): Any amino acid
XKGKVKDIAISRERITLKDVLQEGTFGRIFHGILIDEKDPNKEKQAFVKTVKDQASEIQVTMMLTESCKLRGLHHRQFLSKTWYTWLFRLPVE

SEQ ID NO: 72124 - protein, 548 aa, Homo sapiens
  Payload ID: 14282
  Gene Symbol: RYK
  Gene Name: receptor-like tyrosine kinase
  ENSP ID: ENSP00000419122
SVSLYLSEDEVRRLIGLDAELYYVRNDLISHYALSFSLLVPSETNFLHFTWHAKSKVEYKLGFQVDNVLAMDMPQVNISVQGEVPRTLSVFRVELSCTGKVDSEVMILMQLNLTVNSSKNFTVLNFKRRKMCYKKLEEVKTSALDKNTSRTIYDPVHAAPTTSTRVFYISVGVCCAVIFLVAIILAVLHLHSMKRIELDDSISASSSSQGLSQPSTQTTQYLRADTPNNATPITSSLGYPTLRIEKNDLRSVTLLEAKGKVKDIAISRERITLKDVLQEGTFGRIFHGILIDEKDPNKEKQAFVKTVKDQASEIQVTMMLTESCKLRGLHHRNLLPITHVCIEEGEKPMVILPYMNWGNLKLFLRQCKLVEANNPQAISQQDLVHMAIQIACGMSYLARREVIHKDLAARNCVIDDTLQVKITDNALSRDLFPMDYHCLGDNENRPVRWMALESLVNNEFSSASDVWAFGVTLWELMTLGQTPYVDIDPFEMAAYLKDGYRIAQPINCPDELFAVMACCWALDPEERPKFQQLVQCLTEFHAALGAYV

SEQ ID NO: 72125 - protein, 610 aa, Homo sapiens
  Payload ID: 14282
  Gene Symbol: RYK
  Gene Name: receptor-like tyrosine kinase
  ENSP ID: ENSP00000478721
MRGAARLGRPGRSCLPGARGLRAPPPPPLLLLLALLPLLPAPGAAAAPAPRPPELQSASAGPSVSLYLSEDEVRRLIGLDAELYYVRNDLISHYALSFSLLVPSETNFLHFTWHAKSKVEYKLGFQVDNVLAMDMPQVNISVQGEVPRTLSVFRVELSCTGKVDSEVMILMQLNLTVNSSKNFTVLNFKRRKMCYKKLEEVKTSALDKNTSRTIYDPVHAAPTTSTRVFYISVGVCCAVIFLVAIILAVLHLHSMKRIELDDSISASSSSQGLSQPSTQTTQYLRADTPNNATPITSSLGYPTLRIEKNDLRSVTLLEAKGKVKDIAISRERITLKDVLQEGTFGRIFHGILIDEKDPNKEKQAFVKTVKDQASEIQVTMMLTESCKLRGLHHRNLLPITHVCIEEGEKPMVILPYMNWGNLKLFLRQCKLVEANNPQAISQQDLVHMAIQIACGMSYLARREVIHKDLAARNCVIDDTLQVKITDNALSRDLFPMDYHCLGDNENRPVRWMALESLVNNEFSSASDVWAFGVTLWELMTLGQTPYVDIDPFEMAAYLKDGYRIAQPINCPDELFAVMACCWALDPEERPKFQQLVQCLTEFHAALGAYV

SEQ ID NO: 72126 - protein, 607 aa, Homo sapiens
  Payload ID: 14282
  Gene Symbol: RYK
  Gene Name: receptor-like tyrosine kinase
  ENSP ID: ENSP00000485095
MRGAARLGRPGRSCLPGARGLRAPPPPPLLLLLALLPLLPAPGAAAAPAPRPPELQSASAGPSVSLYLSEDEVRRLIGLDAELYYVRNDLISHYALSFSLLVPSETNFLHFTWHAKSKVEYKLGFQVDNVLAMDMPQVNISVQGEVPRTLSVFRVELSCTGKVDSEVMILMQLNLTVNSSKNFTVLNFKRRKMCYKKLEEVKTSALDKNTSRTIYDPVHAAPTTSTRVFYISVGVCCAVIFLVAIILAVLHLHSMKRIELDDSISASSSSQGLSQPSTQTTQYLRADTPNNATPITSYPTLRIEKNDLRSVTLLEAKGKVKDIAISRERITLKDVLQEGTFGRIFHGILIDEKDPNKEKQAFVKTVKDQASEIQVTMMLTESCKLRGLHHRNLLPITHVCIEEGEKPMVILPYMNWGNLKLFLRQCKLVEANNPQAISQQDLVHMAIQIACGMSYLARREVIHKDLAARNCVIDDTLQVKITDNALSRDLFPMDYHCLGDNENRPVRWMALESLVNNEFSSASDVWAFGVTLWELMTLGQTPYVDIDPFEMAAYLKDGYRIAQPINCPDELFAVMACCWALDPEERPKFQQLVQCLTEFHAALGAYV

SEQ ID NO: 72127 - protein, 157 aa, Homo sapiens
  Payload ID: 14282
  Gene Symbol: RYK
  Gene Name: receptor-like tyrosine kinase
  ENSP ID: ENSP00000487023
ESCKLRGLHHRNLLPITHVCIEEGEKPMVILPYMNWGNLKLFLRQCKLVEANNPQAISQQDLVHMAIQIACGMSYLARREVIHKDLAARNCVIDDTLQVKITDNALSRDLFPMDYHCLGDNENRPVRWMALESLVNNEFSSASDVAPPCGAALFGVS

SEQ ID NO: 72128 - protein, 1043 aa, Homo sapiens
  Payload ID: 14283
  Gene Symbol: RAG1
  Gene Name: recombination activating gene 1
  Uniprot ID: P15918
  ENSP ID: ENSP00000299440
MAASFPPTLGLSSAPDEIQHPHIKFSEWKFKLFRVRSFEKTPEEAQKEKKDSFEGKPSLEQSPAVLDKADGQKPVPTQPLLKAHPKFSKKFHDNEKARGKAIHQANLRHLCRICGNSFRADEHNRRYPVHGPVDGKTLGLLRKKEKRATSWPDLIAKVFRIDVKADVDSIHPTEFCHNCWSIMHRKFSSAPCEVYFPRNVTMEWHPHTPSCDICNTARRGLKRKSLQPNLQLSKKLKTVLDQARQARQHKRRAQARISSKDVMKKIANCSKIHLSTKLLAVDFPEHFVKSISCQICEHILADPVETNCKHVFCRVCILRCLKVMGSYCPSCRYPCFPTDLESPVKSFLSVLNSLMVKCPAKECNEEVSLEKYNHHISSHKESKEIFVHINKGGRPRQHLLSLTRRAQKHRLRELKLQVKAFADKEEGGDVKSVCMTLFLLALRARNEHRQADELEAIMQGKGSGLQPAVCLAIRVNTFLSCSQYHKMYRTVKAITGRQIFQPLHALRNAEKVLLPGYHHFEWQPPLKNVSSSTDVGIIDGLSGLSSSVDDYPVDTIAKRFRYDSALVSALMDMEEDILEGMRSQDLDDYLNGPFTVVVKESCDGMGDVSEKHGSGPVVPEKAVRFSFTIMKITIAHSSQNVKVFEEAKPNSELCCKPLCLMLADESDHETLTAILSPLIAEREAMKSSELMLELGGILRTFKFIFRGTGYDEKLVREVEGLEASGSVYICTLCDATRLEASQNLVFHSITRSHAENLERYEVWRSNPYHESVEELRDRVKGVSAKPFIETVPSIDALHCDIGNAAEFYKIFQLEIGEVYKNPNASKEERKRWQATLDKHLRKKMNLKPIMRMNGNFARKLMTKETVDAVCELIPSEERHEALRELMDLYLKMKPVWRSSCPAKECPESLCQYSFNSQRFAELLSTKFKYRYEGKITNYFHKTLAHVPEIIERDGSIGAWASEGNESGNKLFRRFRKMNARQSKCYEMEDVLKHHWLYTSKYLQKFMNAHNALKTSGFTMNPQASLGDPLGIEDSLESQDSMEF

SEQ ID NO: 72129 - protein, 931 aa, Homo sapiens
  Payload ID: 14283
  Gene Symbol: RAG1
  Gene Name: recombination activating gene 1
  Uniprot ID: P15918
  ENSP ID: ENSP00000434610
MAASFPPTLGLSSAPDEIQHPHIKFSEWKFKLFRVRSFEKTPEEAQKEKKDSFEGKPSLEQSPAVLDKADGQKPVPTQPLLKAHPKFSKKFHDNEKARGKAIHQANLRHLCRICGNSFRADEHNRRYPVHGPVDGKTLGLLRKKEKRATSWPDLIAKVFRIDVKADVDSIHPTEFCHNCWSIMHRKFSSAPCEVYFPRNVTMEWHPHTPSCDICNTARRGLKRKSLQPNLQLSKKLKTVLDQARQARQHKRRAQARISSKDVMKKIANCSKIHLSTKLLAVDFPEHFVKSISCQICEHILADPVETNCKHVFCRVCILRCLKVMGSYCPSCRYPCFPTDLESPVKSFLSVLNSLMVKCPAKECNEEVSLEKYNHHISSHKESKEIFVHINKGGRPRQHLLSLTRRAQKHRLRELKLQVKAFADKEEGGDVKSVCMTLFLLALRARNEHRQADELEAIMQGKGSGLQPAVCLAIRVNTFLSCSQYHKMYRTVKAITGRQIFQPLHALRNAEKVLLPGYHHFEWQPPLKNVSSSTDVGIIDGLSGLSSSVDDYPVDTIAKRFRYDSALVSALMDMEEDILEGMRSQDLDDYLNGPFTVVVKESCDGMGDVSEKHGSGPVVPEKAVRFSFTIMKITIAHSSQNVKVFEEAKPNSELCCKPLCLMLADESDHETLTAILSPLIAEREAMKSSELMLELGGILRTFKFIFRGTGYDEKLVREVEGLEASGSVYICTLCDATRLEASQNLVFHSITRSHAENLERYEVWRSNPYHESVEELRDRVKGVSAKPFIETVPSIDALHCDIGNAAEFYKIFQLEIGEVYKNPNASKEERKRWQATLDKHLRKKMNLKPIMRMNGNFARKLMTKETVDAVCELIPSEERHEALRELMDLYLKMKPVWRSSCPAKECPESLCQYSFNSQRFAELLSTKFKYRN

SEQ ID NO: 72130 - protein, 527 aa, Homo sapiens
  Payload ID: 14284
  Gene Symbol: RAG2
  Gene Name: recombination activating gene 2
  Uniprot ID: P55895
  ENSP ID: ENSP00000308620
MSLQMVTVSNNIALIQPGFSLMNFDGQVFFFGQKGWPKRSCPTGVFHLDVKHNHVKLKPTIFSKDSCYLPPLRYPATCTFKGSLESEKHQYIIHGGKTPNNEVSDKIYVMSIVCKNNKKVTFRCTEKDLVGDVPEARYGHSINVVYSRGKSMGVLFGGRSYMPSTHRTTEKWNSVADCLPCVFLVDFEFGCATSYILPELQDGLSFHVSIAKNDTIYILGGHSLANNIRPANLYRIRVDLPLGSPAVNCTVLPGGISVSSAILTQTNNDEFVIVGGYQLENQKRMICNIISLEDNKIEIREMETPDWTPDIKHSKIWFGSNMGNGTVFLGIPGDNKQVVSEGFYFYMLKCAEDDTNEEQTTFTNSQTSTEDPGDSTPFEDSEEFCFSAEANSFDGDDEFDTYNEDDEEDESETGYWITCCPTCDVDINTWVPFYSTELNKPAMIYCSHGDGHWVHAQCMDLAERTLIHLSAGSNKYYCNEHVEIARALHTPQRVLPLKKPPMKSLRKKGSGKILTPAKKSFLRRLFD

SEQ ID NO: 72131 - protein, 1 aa, Homo sapiens
  Payload ID: 14284
  Gene Symbol: RAG2
  Gene Name: recombination activating gene 2
  ENSP ID: ENSP00000432174
M

SEQ ID NO: 72132 - protein, 150 aa, Homo sapiens
  Payload ID: 14284
  Gene Symbol: RAG2
  Gene Name: recombination activating gene 2
  ENSP ID: ENSP00000436327
MSLQMVTVSNNIALIQPGFSLMNFDGQVFFFGQKGWPKRSCPTGVFHLDVKHNHVKLKPTIFSKDSCYLPPLRYPATCTFKGSLESEKHQYIIHGGKTPNNEVSDKIYVMSIVCKNNKKVTFRCTEKDLVGDVPEARYGHSINVVYSRGK

SEQ ID NO: 72133 - protein, 70 aa, Homo sapiens
  Payload ID: 14284
  Gene Symbol: RAG2
  Gene Name: recombination activating gene 2
  ENSP ID: ENSP00000436895
MSLQMVTVSNNIALIQPGFSLMNFDGQVFFFGQKGWPKRSCPTGVFHLDVKHNHVKLKPTIFSKDSCYLP

SEQ ID NO: 72134 - protein, 527 aa, Homo sapiens; identical to SEQ ID NO: 72130
  Payload ID: 14284
  Gene Symbol: RAG2
  Gene Name: recombination activating gene 2
  Uniprot ID: P55895
  ENSP ID: ENSP00000478672

SEQ ID NO: 72135 - protein, 485 aa, Homo sapiens
  Payload ID: 14285
  Gene Symbol: RBPJ
  Gene Name: recombination signal binding protein for immunoglobulin kappa J region
  Uniprot ID: Q06330
  ENSP ID: ENSP00000305815
MGGCRKFGERPPPKRLTREAMRNYLKERGDQTVLILHAKVAQKSYGNEKRFFCPPPCVYLMGSGWKKKKEQMERDGCSEQESQPCAFIGIGNSDQEMQQLNLEGKNYCTAKTLYISDSDKRKHFMLSVKMFYGNSDDIGVFLSKRIKVISKPSKKKQSLKNADLCIASGTKVALFNRLRSQTVSTRYLHVEGGNFHASSQQWGAFFIHLLDDDESEGEEFTVRDGYIHYGQTVKLVCSVTGMALPRLIIRKVDKQTALLDADDPVSQLHKCAFYLKDTERMYLCLSQERIIQFQATPCPKEPNKEMINDGASWTIISTDKAEYTFYEGMGPVLAPVTPVPVVESLQLNGGGDVAMLELTGQNFTPNLRVWFGDVEAETMYRCGESMLCVVPDISAFREGWRWVRQPVQVPVTLVRNDGIIYSTSLTFTYTPEPGPRPHCSAAGAILRANSSQVPPNESNTNSEGSYTNASTNSTSVTSSTATVVS

SEQ ID NO: 72136 - protein, 487 aa, Homo sapiens
  Payload ID: 14285
  Gene Symbol: RBPJ
  Gene Name: recombination signal binding protein for immunoglobulin kappa J region
  Uniprot ID: Q06330
  ENSP ID: ENSP00000339699
MAPVVTGKFGERPPPKRLTREAMRNYLKERGDQTVLILHAKVAQKSYGNEKRFFCPPPCVYLMGSGWKKKKEQMERDGCSEQESQPCAFIGIGNSDQEMQQLNLEGKNYCTAKTLYISDSDKRKHFMLSVKMFYGNSDDIGVFLSKRIKVISKPSKKKQSLKNADLCIASGTKVALFNRLRSQTVSTRYLHVEGGNFHASSQQWGAFFIHLLDDDESEGEEFTVRDGYIHYGQTVKLVCSVTGMALPRLIIRKVDKQTALLDADDPVSQLHKCAFYLKDTERMYLCLSQERIIQFQATPCPKEPNKEMINDGASWTIISTDKAEYTFYEGMGPVLAPVTPVPVVESLQLNGGGDVAMLELTGQNFTPNLRVWFGDVEAETMYRCGESMLCVVPDISAFREGWRWVRQPVQVPVTLVRNDGIIYSTSLTFTYTPEPGPRPHCSAAGAILRANSSQVPPNESNTNSEGSYTNASTNSTSVTSSTATVVS

SEQ ID NO: 72137 - protein, 486 aa, Homo sapiens
  Payload ID: 14285
  Gene Symbol: RBPJ
  Gene Name: recombination signal binding protein for immunoglobulin kappa J region
  Uniprot ID: Q06330
  ENSP ID: ENSP00000340124
MAWIKRKFGERPPPKRLTREAMRNYLKERGDQTVLILHAKVAQKSYGNEKRFFCPPPCVYLMGSGWKKKKEQMERDGCSEQESQPCAFIGIGNSDQEMQQLNLEGKNYCTAKTLYISDSDKRKHFMLSVKMFYGNSDDIGVFLSKRIKVISKPSKKKQSLKNADLCIASGTKVALFNRLRSQTVSTRYLHVEGGNFHASSQQWGAFFIHLLDDDESEGEEFTVRDGYIHYGQTVKLVCSVTGMALPRLIIRKVDKQTALLDADDPVSQLHKCAFYLKDTERMYLCLSQERIIQFQATPCPKEPNKEMINDGASWTIISTDKAEYTFYEGMGPVLAPVTPVPVVESLQLNGGGDVAMLELTGQNFTPNLRVWFGDVEAETMYRCGESMLCVVPDISAFREGWRWVRQPVQVPVTLVRNDGIIYSTSLTFTYTPEPGPRPHCSAAGAILRANSSQVPPNESNTNSEGSYTNASTNSTSVTSSTATVVS

SEQ ID NO: 72138 - protein, 500 aa, Homo sapiens
  Payload ID: 14285
  Gene Symbol: RBPJ
  Gene Name: recombination signal binding protein for immunoglobulin kappa J region
  Uniprot ID: Q06330
  ENSP ID: ENSP00000345206
MDHTEGSPAEEPPAHAPSPGKFGERPPPKRLTREAMRNYLKERGDQTVLILHAKVAQKSYGNEKRFFCPPPCVYLMGSGWKKKKEQMERDGCSEQESQPCAFIGIGNSDQEMQQLNLEGKNYCTAKTLYISDSDKRKHFMLSVKMFYGNSDDIGVFLSKRIKVISKPSKKKQSLKNADLCIASGTKVALFNRLRSQTVSTRYLHVEGGNFHASSQQWGAFFIHLLDDDESEGEEFTVRDGYIHYGQTVKLVCSVTGMALPRLIIRKVDKQTALLDADDPVSQLHKCAFYLKDTERMYLCLSQERIIQFQATPCPKEPNKEMINDGASWTIISTDKAEYTFYEGMGPVLAPVTPVPVVESLQLNGGGDVAMLELTGQNFTPNLRVWFGDVEAETMYRCGESMLCVVPDISAFREGWRWVRQPVQVPVTLVRNDGIIYSTSLTFTYTPEPGPRPHCSAAGAILRANSSQVPPNESNTNSEGSYTNASTNSTSVTSSTATVVS

SEQ ID NO: 72139 - protein, 486 aa, Homo sapiens; identical to SEQ ID NO: 72137
  Payload ID: 14285
  Gene Symbol: RBPJ
  Gene Name: recombination signal binding protein for immunoglobulin kappa J region
  Uniprot ID: Q06330
  ENSP ID: ENSP00000347659

SEQ ID NO: 72140 - protein, 500 aa, Homo sapiens; identical to SEQ ID NO: 72138
  Payload ID: 14285
  Gene Symbol: RBPJ
  Gene Name: recombination signal binding protein for immunoglobulin kappa J region
  Uniprot ID: Q06330
  ENSP ID: ENSP00000354528

SEQ ID NO: 72141 - protein, 135 aa, Homo sapiens
  Payload ID: 14285
  Gene Symbol: RBPJ
  Gene Name: recombination signal binding protein for immunoglobulin kappa J region
  ENSP ID: ENSP00000421804
IIRKVDKQTALLDADDPVSQLHKCAFYLKDTERMYLCLSQERIIQFQLNGGGDVAMLELTGQNFTPNLRVWFGDVEAETMYRCGESMLCVVPDISAFREGWRWVRQPVQVPVTLVRNDGIIYSTSLTFTYTPEPG

SEQ ID NO: 72142 - protein, 157 aa, Homo sapiens
  Payload ID: 14285
  Gene Symbol: RBPJ
  Gene Name: recombination signal binding protein for immunoglobulin kappa J region
  ENSP ID: ENSP00000422617
MRNYLKERGDQTVLILHAKVAQKSYGNEKRFFCPPPCVYLMGSGWKKKKEQMERDGCSEQESQPCAFIGIGNSDQEMQQLNLEGKNYCTAKTLYISDSDKRKHFMLSVKMFYGNSDDIGVFLSKRIKVISKPSKKKQSLKNADLCIASGTKVALFNR

SEQ ID NO: 72143 - protein, 107 aa, Homo sapiens
  Payload ID: 14285
  Gene Symbol: RBPJ
  Gene Name: recombination signal binding protein for immunoglobulin kappa J region
  ENSP ID: ENSP00000422838
MAWIKRKFGERPPPKRLTREAMRNYLKERGDQTVLILHAKVAQKSYGNEKRFFCPPPCVYLMGSGWKKKKEQMERDGCSEQESQPCAFIGIGNSDQEMQQLNLEGKN

SEQ ID NO: 72144 - protein, 189 aa, Homo sapiens
  Payload ID: 14285
  Gene Symbol: RBPJ
  Gene Name: recombination signal binding protein for immunoglobulin kappa J region
  ENSP ID: ENSP00000423406
MRNYLKERGDQTVLILHAKVAQKSYGNEKRFFCPPPCVYLMGSGWKKKKEQMERDGCSEQESQPCAFIGIGNSDQEMQQLNLEGKNYCTAKTLYISDSDKRKHFMLSVKMFYGNSDDIGVFLSKRIKVISKPSKKKQSLKNADLCIASGTKVALFNRLRSQTVSTRYLHVEGGNFHASSQQWGAFFIHL

SEQ ID NO: 72145 - protein, 110 aa, Homo sapiens
  Payload ID: 14285
  Gene Symbol: RBPJ
  Gene Name: recombination signal binding protein for immunoglobulin kappa J region
  ENSP ID: ENSP00000423575
MAWIKRKFGERPPPKRLTREAMRNYLKERGDQTVLILHAKVAQKSYGNEKRFFCPPPCVYLMGSGWKKKKEQMERDGCSEQESQPCAFIGIGNSDQEMQQLNLEGKNYCT

SEQ ID NO: 72146 - protein, 178 aa, Homo sapiens
  Payload ID: 14285
  Gene Symbol: RBPJ
  Gene Name: recombination signal binding protein for immunoglobulin kappa J region
  ENSP ID: ENSP00000423644
MDHTEGSPAEEPPAHAPSPGKFGERPPPKRLTREAMRNYLKERGDQTVLILHAKVAQKSYGNEKRFFCPPPCVYLMGSGWKKKKEQMERDGCSEQESQPCAFIGIGNSDQEMQQLNLEGKNYCTAKTLYISDSDKRKHFMLSVKMFYGNSDDIGVFLSKRIKVISKPSKKKQSLKNAD

SEQ ID NO: 72147 - protein, 382 aa, Homo sapiens
  Payload ID: 14285
  Gene Symbol: RBPJ
  Gene Name: recombination signal binding protein for immunoglobulin kappa J region
  ENSP ID: ENSP00000423703
MAWIKRKFGERPPPKRLTREAMRNYLKERGDQTVLILHAKVAQKSYGNEKRFFCPPPCVYLMGSGWKKKKEQMERDGCSEQESQPCAFIGIGNSDQEMQQLNLEGKNYCTAKTLYISDSDKRKHFMLSVKMFYGNSDDIGVFLSKRIKVISKPSKKKQSLKNADLCIASGTKVALFNRLRSQTVSTRYLHVEGGNFHASSQQWGAFFIHLLDDDESEGEEFTVRDGYIHYGQTVKLVCSVTGMALPRLIIRKVDKQTALLDADDPVSQLHKCAFYLKDTERMYLCLSQERIIQFQATPCPKEPNKEMINDGASWTIISTDKAEYTFYEGMGPVLAPVTPVPVVESLQVWREYALCRPRHFCIPRRLEMGPATSPGSSNFGPK

SEQ ID NO: 72148 - protein, 465 aa, Homo sapiens
  Payload ID: 14285
  Gene Symbol: RBPJ
  Gene Name: recombination signal binding protein for immunoglobulin kappa J region
  Uniprot ID: Q06330
  ENSP ID: ENSP00000423907
MRNYLKERGDQTVLILHAKVAQKSYGNEKRFFCPPPCVYLMGSGWKKKKEQMERDGCSEQESQPCAFIGIGNSDQEMQQLNLEGKNYCTAKTLYISDSDKRKHFMLSVKMFYGNSDDIGVFLSKRIKVISKPSKKKQSLKNADLCIASGTKVALFNRLRSQTVSTRYLHVEGGNFHASSQQWGAFFIHLLDDDESEGEEFTVRDGYIHYGQTVKLVCSVTGMALPRLIIRKVDKQTALLDADDPVSQLHKCAFYLKDTERMYLCLSQERIIQFQATPCPKEPNKEMINDGASWTIISTDKAEYTFYEGMGPVLAPVTPVPVVESLQLNGGGDVAMLELTGQNFTPNLRVWFGDVEAETMYRCGESMLCVVPDISAFREGWRWVRQPVQVPVTLVRNDGIIYSTSLTFTYTPEPGPRPHCSAAGAILRANSSQVPPNESNTNSEGSYTNASTNSTSVTSSTATVVS

SEQ ID NO: 72149 - protein, 143 aa, Homo sapiens
  Payload ID: 14285
  Gene Symbol: RBPJ
  Gene Name: recombination signal binding protein for immunoglobulin kappa J region
  ENSP ID: ENSP00000424459
MRNYLKERGDQTVLILHAKVAQKSYGNEKRFFCPPPCVYLMGSGWKKKKEQMERDGCSEQESQPCAFIGIGNSDQEMQQLNLEGKNYCTAKTLYISDSDKRKHFMLSVKMFYGNSDDIGVFLSKRIKVISKPSKKKQSLKNAD

SEQ ID NO: 72150 - protein, 94 aa, Homo sapiens
  Payload ID: 14285
  Gene Symbol: RBPJ
  Gene Name: recombination signal binding protein for immunoglobulin kappa J region
  ENSP ID: ENSP00000424789
MAWIKRKFGERPPPKRLTREAMRNYLKERGDQTVLILHAKVAQKSYGNEKRFFCPPPCVYLMGSGWKKKKEQMERDGCSEQESQPCAFIGIGNS

SEQ ID NO: 72151 - protein, 49 aa, Homo sapiens
  Payload ID: 14285
  Gene Symbol: RBPJ
  Gene Name: recombination signal binding protein for immunoglobulin kappa J region
  ENSP ID: ENSP00000424804
MAWIKRKFGERPPPKRLTREAMRNYLKERGDQTVLILHAKVAQKSYGNE

SEQ ID NO: 72152 - protein, 48 aa, Homo sapiens
  Payload ID: 14285
  Gene Symbol: RBPJ
  Gene Name: recombination signal binding protein for immunoglobulin kappa J region
  ENSP ID: ENSP00000424989
MAWIKRKFGERPPPKRLTREAMRNYLKERGDQTVLILHAKVAQKSYGN

SEQ ID NO: 72153 - protein, 113 aa, Homo sapiens
  Payload ID: 14285
  Gene Symbol: RBPJ
  Gene Name: recombination signal binding protein for immunoglobulin kappa J region
  ENSP ID: ENSP00000425061
MAWIKRKFGERPPPKRLTREAMRNYLKERGDQTVLILHAKVAQKSYGNEKRFFCPPPCVYLMGSGWKKKKEQMERDGCSEQESQPCAFIGIGNSDQEMQQLNLEGKNYCTAKT

SEQ ID NO: 72154 - protein, 97 aa, Homo sapiens
  Payload ID: 14285
  Gene Symbol: RBPJ
  Gene Name: recombination signal binding protein for immunoglobulin kappa J region
  ENSP ID: ENSP00000425750
MAWIKRKFGERPPPKRLTREAMRNYLKERGDQTVLILHAKVAQKSYGNEKRFFCPPPCVYLMGSGWKKKKEQMERDGCSEQESQPCAFIGIGNSDQE

SEQ ID NO: 72155 - protein, 28 aa, Homo sapiens
  Payload ID: 14285
  Gene Symbol: RBPJ
  Gene Name: recombination signal binding protein for immunoglobulin kappa J region
  ENSP ID: ENSP00000426872
MAWIKRKFGERPPPKRLTREAMRNYLKE

SEQ ID NO: 72156 - protein, 229 aa, Homo sapiens
  Payload ID: 14285
  Gene Symbol: RBPJ
  Gene Name: recombination signal binding protein for immunoglobulin kappa J region
  ENSP ID: ENSP00000427170
MNLHFVFIFSKVIHSSWFLNTCLKIGLTFLCPWGAPTIFETMRKFGERPPPKRLTREAMRNYLKERGDQTVLILHAKVAQKSYGNEKRFFCPPPCVYLMGSGWKKKKEQMERDGCSEQESQPCAFIGIGNSDQEMQQLNLEGKNYCTAKTLYISDSDKRKHFMLSVKMFYGNSDDIGVFLSKRIKVISKPSKKKQSLKNADLCIASGTKVALFNRLRSQTVSTRYLHVE

SEQ ID NO: 72157 - protein, 53 aa, Homo sapiens
  Payload ID: 14285
  Gene Symbol: RBPJ
  Gene Name: recombination signal binding protein for immunoglobulin kappa J region
  ENSP ID: ENSP00000427344
MAPVVTGKFGERPPPKRLTREAMRNYLKERGDQTVLILHAKVAQKSYGNEKRC

SEQ ID NO: 72158 - protein, 517 aa, Homo sapiens
  Payload ID: 14286
  Gene Symbol: RBPJL
  Gene Name: recombination signal binding protein for immunoglobulin kappa J region-like
  Uniprot ID: Q9UBG7
  ENSP ID: ENSP00000341243
MDPAGAADPSVPPNPLTHLSLQDRSEMQLQSEADRRSLPGTWTRSSPEHTTILRGGVRRCLQQQCEQTVRILHAKVAQKSYGNEKRFFCPPPCVYLSGPGWRVKPGQDQAHQAGETGPTVCGYMGLDSASGSATETQKLNFEQQPDSREFGCAKTLYISDADKRKHFRLVLRLVLRGGRELGTFHSRLIKVISKPSQKKQSLKNTDLCISSGSKVSLFNRLRSQTVSTRYLSVEDGAFVASARQWAAFTLHLADGHSAQGDFPPREGYVRYGSLVQLVCTVTGITLPPMIIRKVAKQCALLDVDEPISQLHKCAFQFPGSPPGGGGTYLCLATEKVVQFQASPCPKEANRALLNDSSCWTIIGTESVEFSFSTSLACTLEPVTPVPLISTLELSGGGDVATLELHGENFHAGLKVWFGDVEAETMYRSPRSLVCVVPDVAAFCSDWRWLRAPITIPMSLVRADGLFYPSAFSFTYTPEYSVRPGHPGVPEPATDADALLESIHQEFTRTNFHLFIQT

SEQ ID NO: 72159 - protein, 471 aa, Homo sapiens
  Payload ID: 14286
  Gene Symbol: RBPJL
  Gene Name: recombination signal binding protein for immunoglobulin kappa J region-like
  ENSP ID: ENSP00000361826
MDPAGAADPSVPPNPLTHLSLQDRSEMQLQSEADRRSLPGTWTRSSPEHTTILRGGVRRCLQQQCEQTVRILHAKVAQKSYGNEKRFFCPPPCVYLSGPGWRVKPGQDQAHQAGETGPTVCGYMGLDSASGSATETQKLNFEQQPDSREFGCAKTLYISDADKRKHFRLVLRLVLRGGRELGTFHSRLIKVISKPSQKKQSLKNTDLCISSGSKVSLFNRLRSQTVSTRYLSVEDGAFVASARQWAAFTLHLADGHSAQGDFPPREGYVRYGSLVQLVCTVTGITLPPMIIRKVAKQCALLDVDEPISQLHKCAFQFPGSPPGGGGTYLCLATEKVVQFQASPCPKEANRALLNDSSCWTIIGTESVEFSFSTSLACTLEPVTPVPLISTLELSGGGDVATLELHGENFHAGLKVWFGDVEAETMYRYGVEPAVPGVRGAGRGGLLQRLALAARSHHNPHEPGARRRALLP

SEQ ID NO: 72160 - protein, 516 aa, Homo sapiens
  Payload ID: 14286
  Gene Symbol: RBPJL
  Gene Name: recombination signal binding protein for immunoglobulin kappa J region-like
  Uniprot ID: Q9UBG7
  ENSP ID: ENSP00000361828
MDPAGAADPSVPPNPLTHLSLQDRSEMQLQSEADRRSLPGTWTRSSPEHTTILRGGVRRCLQQQCEQTVRILHAKVAQKSYGNEKRFFCPPPCVYLSGPGWRVKPGQDQAHQAGETGPTVCGYMGLDSASGSATETQKLNFEQQPDSREFGCAKTLYISDADKRKHFRLVLRLVLRGGRELGTFHSRLIKVISKPSQKKQSLKNTDLCISSGSKVSLFNRLRSQTVSTRYLSVEDGAFVASARQWAAFTLHLADGHSAQGDFPPREGYVRYGSLVQLVCTVTGITLPPMIIRKVAKQCALLDVDEPISQLHKCAFQFPGSPPGGGGTYLCLATEKVVQFQASPCPKEANRALLNDSSCWTIIGTESVEFSFSTSLACTLEPVTPVPLISTLELSGGGDVATLELHGENFHAGLKVWFGDVEAETMYSPRSLVCVVPDVAAFCSDWRWLRAPITIPMSLVRADGLFYPSAFSFTYTPEYSVRPGHPGVPEPATDADALLESIHQEFTRTNFHLFIQT

SEQ ID NO: 72161 - protein, 184 aa, Homo sapiens
  Payload ID: 14286
  Gene Symbol: RBPJL
  Gene Name: recombination signal binding protein for immunoglobulin kappa J region-like
  ENSP ID: ENSP00000483978
  MOD_RES (1)..(1): Any amino acid
XDGHSAQGDFPPREGYVRYGSLVQLVCTVTGITLPPMIIRKVAKQCALLDVDEPISQLHKCAFQFPGSPPGGGGTYLCLATEKVVQFQHQPGVYPGAGHSGASHQHPRAERRGRRGHAGAPRRELPRGAQGVVWGRGGRNHVQEPAVPGVRGAGRGGLLQRLALAARSHHNPHEPGARRRALLP

SEQ ID NO: 72162 - protein, 200 aa, Homo sapiens
  Payload ID: 14287
  Gene Symbol: RCVRN
  Gene Name: recoverin
  Uniprot ID: P35243
  ENSP ID: ENSP00000226193
MGNSKSGALSKEILEELQLNTKFSEEELCSWYQSFLKDCPTGRITQQQFQSIYAKFFPDTDPKAYAQHVFRSFDSNLDGTLDFKEYVIALHMTTAGKTNQKLEWAFSLYDVDGNGTISKNEVLEIVMAIFKMITPEDVKLLPDDENTPEKRAEKIWKYFGKNDDDKLTEKEFIEGTLANKEILRLIQFEPQKVKEKMKNA

SEQ ID NO: 72163 - protein, 199 aa, Homo sapiens
  Payload ID: 14288
  Gene Symbol: RECQL
  Gene Name: RecQ helicase-like
  ENSP ID: ENSP00000318727
MASVSALTEELDSITSELHAVEIQIQELTERQQELIQKKKVLTKKIKQCLEDSDAGASNEYDSSPAAWNKEDFPWSGKVKDILQNVFKLEKFRPLQLETINVTMAGKEVFLVMPTGGGKSLCYQLPALCSDGFTLVICPLISLMEDQLMVLKQLGISATMLNASSSKEHVKWVHAEMVNKNSELKLIYVTPEKIAKSKM

SEQ ID NO: 72164 - protein, 211 aa, Homo sapiens
  Payload ID: 14288
  Gene Symbol: RECQL
  Gene Name: RecQ helicase-like
  ENSP ID: ENSP00000379400
MASVSALTEELDSITSELHAVEIQIQELTERQQELIQKKKVLTKKIKQCLEDSDAGASNEYDSSPAAWNKEDFPWSGKVKDILQNVFKLEKFRPLQLETINVTMAGKEVFLVMPTGGGKSLCYQLPALCSDGFTLVICPLISLMEDQLMVLKQLGISATMLNASSSKEHVKWVHAEMVNKNSELKLIYVTPEKIAKSKMFMSRLEKAYEAR

SEQ ID NO: 72165 - protein, 649 aa, Homo sapiens
  Payload ID: 14288
  Gene Symbol: RECQL
  Gene Name: RecQ helicase-like
  Uniprot ID: P46063
  ENSP ID: ENSP00000395449
MASVSALTEELDSITSELHAVEIQIQELTERQQELIQKKKVLTKKIKQCLEDSDAGASNEYDSSPAAWNKEDFPWSGKVKDILQNVFKLEKFRPLQLETINVTMAGKEVFLVMPTGGGKSLCYQLPALCSDGFTLVICPLISLMEDQLMVLKQLGISATMLNASSSKEHVKWVHAEMVNKNSELKLIYVTPEKIAKSKMFMSRLEKAYEARRFTRIAVDEVHCCSQWGHDFRPDYKALGILKRQFPNASLIGLTATATNHVLTDAQKILCIEKCFTFTASFNRPNLYYEVRQKPSNTEDFIEDIVKLINGRYKGQSGIIYCFSQKDSEQVTVSLQNLGIHAGAYHANLEPEDKTTVHRKWSANEIQVVVATVAFGMGIDKPDVRFVIHHSMSKSMENYYQESGRAGRDDMKADCILYYGFGDIFRISSMVVMENVGQQKLYEMVSYCQNISKCRRVLMAQHFDEVWNSEACNKMCDNCCKDSAFERKNITEYCRDLIKILKQAEELNEKLTPLKLIDSWMGKGAAKLRVAGVVAPTLPREDLEKIIAHFLIQQYLKEDYSFTAYATISYLKIGPKANLLNNEAHAITMQVTKSTQNSFRAESSQTCHSEQGDKKMEEKNSGNFQKKAANMLQQSGSKNTGAKKRKIDDA

SEQ ID NO: 72166 - protein, 649 aa, Homo sapiens; identical to SEQ ID NO: 72165
  Payload ID: 14288
  Gene Symbol: RECQL
  Gene Name: RecQ helicase-like
  Uniprot ID: P46063
  ENSP ID: ENSP00000416739

SEQ ID NO: 72167 - protein, 106 aa, Homo sapiens
  Payload ID: 14288
  Gene Symbol: RECQL
  Gene Name: RecQ helicase-like
  ENSP ID: ENSP00000439069
MASVSALTEELDSITSELHAVEIQIQELTERQQELIQKKKVLTKKIKQCLEDSDAGASNEYDSSPAAWNKEDFPWSGKVKDILQNVFKLEKFRPLQLETINVTMAG

SEQ ID NO: 72168 - protein, 72 aa, Homo sapiens
  Payload ID: 14288
  Gene Symbol: RECQL
  Gene Name: RecQ helicase-like
  ENSP ID: ENSP00000440700
MASVSALTEELDSITSELHAVEIQIQELTERQQELIQKKKVLTKKIKQCLEDSDAGASNEYDSSPAAWNKED

SEQ ID NO: 72169 - protein, 131 aa, Homo sapiens
  Payload ID: 14288
  Gene Symbol: RECQL
  Gene Name: RecQ helicase-like
  ENSP ID: ENSP00000445555
MASVSALTEELDSITSELHAVEIQIQELTERQQELIQKKKVLTKKIKQCLEDSDAGASNEYDSSPAAWNKEDFPWSGKVKDILQNVFKLEKFRPLQLETINVTMAGKEVFLVMPTGGGKSLCYQLPALCSD

SEQ ID NO: 72170 - protein, 96 aa, Homo sapiens
  Payload ID: 14288
  Gene Symbol: RECQL
  Gene Name: RecQ helicase-like
  ENSP ID: ENSP00000446036
MASVSALTEELDSITSELHAVEIQIQELTERQQELIQKKKVLTKKIKQCLEDSDAGASNEYDSSPAAWNKEDFPWSGKVKDILQNVFKLEKFRPLQ

SEQ ID NO: 72171 - protein, 15 aa, Homo sapiens
  Payload ID: 14289
  Gene Symbol: RECQL4
  Gene Name: RecQ helicase-like 4
  ENSP ID: ENSP00000476318
  MOD_RES (1)..(1): Any amino acid
XEAAPEETRGAQAPP

SEQ ID NO: 72172 - protein, 37 aa, Homo sapiens
  Payload ID: 14289
  Gene Symbol: RECQL4
  Gene Name: RecQ helicase-like 4
  ENSP ID: ENSP00000476426
  MOD_RES (1)..(1): Any amino acid
XATTYTHCRLNCPGGPAQLQALAHRCAAWDRGACGVQ

SEQ ID NO: 72173 - protein, 352 aa, Homo sapiens
  Payload ID: 14289
  Gene Symbol: RECQL4
  Gene Name: RecQ helicase-like 4
  ENSP ID: ENSP00000476551
  MOD_RES (1)..(1): Any amino acid
XLLRKQAWKQKWRKKGECFGGGGATVTTKESCFLNEQFDHWAAQCPRPASEEDTDAVGPEPLVPSPQPVPEVPSLDPTVLPLYSLGPSGQLAETPAEVFQALEQLGHQAFRPGQERAVMRILSGAGKSLCYQLPALLYSRRSPCLTLVVSPLLSLMDDQVSGLPPCLKAACIHSGMTRKQRESVLQKIRAAQVHVLMLTPEALVGAGGLPPAAQLPPVAFACIDEAHCLSQWSHNFRPCYLRVCKVLRERMGVHCFLGLTATATRRTASDVAQHLAVAEEPDLHGPAPVPTNLHLSVSMDRDTDQALLTLLQGKRFQNLDSIIIYCNRREDTERIAALLRTCLHAAWVPGSG

SEQ ID NO: 72174 - protein, 229 aa, Homo sapiens
  Payload ID: 14289
  Gene Symbol: RECQL4
  Gene Name: RecQ helicase-like 4
  ENSP ID: ENSP00000476579
  MOD_RES (1)..(1): Any amino acid
XEYRTLKRTTGQAGGGLRSSESLPAAAEEAPEPRCWGPHLNRAATKSPQSTPGRSRQGSVPDYGQRLKANLKGTLQGPEASAFQEVSIRVGSPQPSSSGGEKRRWNEEPWESPAQVQQESSQAGPPSEGAGAVAVEEDPPGEPVQAQPPQPCSSPSNPRYHGLSPSSQARAGKAEGTAPLHIFPRLARHDRGNYVRLNMKQKHYVRGRALRSRLLRKQAWKQKWRKKGE

SEQ ID NO: 72175 - protein, 389 aa, Homo sapiens
  Payload ID: 14289
  Gene Symbol: RECQL4
  Gene Name: RecQ helicase-like 4
  ENSP ID: ENSP00000477457
  MOD_RES (1)..(1): Any amino acid
XPPCLKAACIHSGMTRKQRESVLQKIRAAQVHVLMLTPEALVGAGGLPPAAQLPPVAFACIDEAHCLSQWSHNFRPCYLRVCKVLRERMGVHCFLGLTATATRRTASDVAQHLAVAEEPDLHGPAPVPTNLHLSVSMDRDTDQALLTLLQGKRFQNLDSIIIYCNRREDTERIAALLRTCLHAAWVPGSGGRAPKTTAEAYHAGMCSRERRRGEDLRELRRHVHADSTDFLAVKRLVQRVFPACTCTCTRPPSEQEGAVGGERPVPKYPPQEAEQLSHQAAPGPRRVCMGHERALPIQLTVQALDMPEEAIETLLCYLELHPHHWLELLATTYTHCRLNCPGGPAQLQALAHRCPPLAVCLAQQLPEDPGQGSSSVEFDMVKLVDSMGW

SEQ ID NO: 72176 - protein, 293 aa, Homo sapiens
  Payload ID: 14289
  Gene Symbol: RECQL4
  Gene Name: RecQ helicase-like 4
  ENSP ID: ENSP00000477910
AIETLLCYLELHPHHWLELLATTYTHCRLNCPGGPAQLQALAHRCPPLAVCLAQQLPEDPGQGSSSVEFDMVKLVDSMGWELASVRRALCQLQWDHEPRTGVRRGTGVLVEFSELAFHLRSPGDLTAEEKDQICDFLYGRVQARERQALARLRRTFQAFHSVAFPSCGPCLEQQDEERSTRLKDLLGRYFEEEEGQEPGGMEDAQGPEPGQARVSALQDWEDQVRCDIRQFLSLRPEEKFSSRAVARIFHGIGSPCYPAQVYGQDRRFWRKYLHLSFHALVGLATEELLQVAR

SEQ ID NO: 72177 - protein, 1208 aa, Homo sapiens
  Payload ID: 14289
  Gene Symbol: RECQL4
  Gene Name: RecQ helicase-like 4
  ENSP ID: ENSP00000482313
MERLRDVRERLQAWERAFRRQRGRRPSQDDVEAAPEETRALYREYRTLKRTTGQAGGGLRSSESLPAAAEEAPEPRCWGPHLNRAATKSPQSTPGRSRQGSVPDYGQRLKANLKGTLQAGPALGRRPWPLGRASSKASTPKPPGTGPVPSFAEKVSDEPPQLPEPQPRPGRLQHLQASLSQRLGSLDPGWLQRCHSEVPDFLGAPKACRPDLGSEESQLLIPGESAVLGPGAGSQGPEASAFQEVSIRVGSPQPSSSGGEKRRWNEEPWESPAQVQQESSQAGPPSEGAGAVAVEEDPPGEPVQAQPPQPCSSPSNPRYHGLSPSSQARAGKAEGTAPLHIFPRLARHDRGNYVRLNMKQKHYVRGRALRSRLLRKQAWKQKWRKKGECFGGGGATVTTKESCFLNEQFDHWAAQCPRPASEEDTDAVGPEPLVPSPQPVPEVPSLDPTVLPLYSLGPSGQLAETPAEVFQALEQLGHQAFRPGQERAVMRILSGISTLLVLPTGAGKSLCYQLPALLYSRRSPCLTLVVSPLLSLMDDQVSGLPPCLKAACIHSGMTRKQRESVLQKIRAAQVHVLMLTPEALVGAGGLPPAAQLPPVAFACIDEAHCLSQWSHNFRPCYLRVCKVLRERMGVHCFLGLTATATRRTASDVAQHLAVAEEPDLHGPAPVPTNLHLSVSMDRDTDQALLTLLQGKRFQNLDSIIIYCNRREDTERIAALLRTCLHAAWVPGSGGRAPKTTAEAYHAGMCSRERRRVQRAFMQGQLRVVVATVAFGMGLDRPDVRAVLHLGLPPSFESYVQAVGRAGRDGQPAHCHLFLQPQGEDLRELRRHVHADSTDFLAVKRLVQRVFPACTCTCTRPPSEQEGAVGGERPVPKYPPQEAEQLSHQAAPGPRRVCMGHERALPIQLTVQALDMPEEAIETLLCYLELHPHHWLELLATTYTHCRLNCPGGPAQLQALAHRCPPLAVCLAQQLPEDPGQGSSSVEFDMVKLVDSMGWELASVRRALCQLQWDHEPRTGVRRGTGVLVEFSELAFHLRSPGDLTAEEKDQICDFLYGRVQARERQALARLRRTFQAFHSVAFPSCGPCLEQQDEERSTRLKDLLGRYFEEEEGQEPGGMEDAQGPEPGQARLQDWEDQVRCDIRQFLSLRPEEKFSSRAVARIFHGIGSPCYPAQVYGQDRRFWRKYLHLSFHALVGLATEELLQVAR

SEQ ID NO: 72178 - protein, 851 aa, Homo sapiens
  Payload ID: 14289
  Gene Symbol: RECQL4
  Gene Name: RecQ helicase-like 4
  ENSP ID: ENSP00000483145
MKQKHYVRGRALRSRLLRKQAWKQKWRKKGECFGGGGATVTTKESCFLNEQFDHWAAQCPRPASEEDTDAVGPEPLVPSPQPVPEVPSLDPTVLPLYSLGPSGQLAETPAEVFQALEQLGHQAFRPGQERAVMRILSGISTLLVLPTGAGKSLCYQLPALLYSRRSPCLTLVVSPLLSLMDDQVSGLPPCLKAACIHSGMTRKQRESVLQKIRAAQVHVLMLTPEALVGAGGLPPAAQLPPVAFACIDEAHCLSQWSHNFRPCYLRVCKVLRERMGVHCFLGLTATATRRTASDVAQHLAVAEEPDLHGPAPVPTNLHLSVSMDRDTDQALLTLLQGKRFQNLDSIIIYCNRREDTERIAALLRTCLHAAWVPGSGGRAPKTTAEAYHAGMCSRERRRVQRAFMQGQLRVVVATVAFGMGLDRPDVRAVLHLGLPPSFESYVQAVGRAGRDGQPAHCHLFLQPQGEDLRELRRHVHADSTDFLAVKRLVQRVFPACTCTCTRPPSEQEGAVGGERPVPKYPPQEAEQLSHQAAPGPRRVCMGHERALPIQLTVQALDMPEEAIETLLCYLELHPHHWLELLATTYTHCRLNCPGGPAQLQALAHRCPPLAVCLAQQLPEDPGQGSSSVEFDMVKLVDSMGWELASVRRALCQLQWDHEPRTGVRRGTGVLVEFSELAFHLRSPGDLTAEEKDQICDFLYGRVQARERQALARLRRTFQAFHSVAFPSCGPCLEQQDEERSTRLKDLLGRYFEEEEGQEPGGMEDAQGPEPGQARLQDWEDQVRCDIRQFLSLRPEEKFSSRAVARIFHGIGSPCYPAQVYGQDRRFWRKYLHLSFHALVGLATEELLQVAR

SEQ ID NO: 72179 - protein, 991 aa, Homo sapiens
  Payload ID: 14290
  Gene Symbol: RECQL5
  Gene Name: RecQ helicase-like 5
  Uniprot ID: O94762
  ENSP ID: ENSP00000317636
MSSHHTTFPFDPERRVRSTLKKVFGFDSFKTPLQESATMAVVKGNKDVFVCMPTGAGKSLCYQLPALLAKGITIVVSPLIALIQDQVDHLLTLKVRVSSLNSKLSAQERKELLADLEREKPQTKILYITPEMAASSSFQPTLNSLVSRHLLSYLVVDEAHCVSQWGHDFRPDYLRLGALRSRLGHAPCVALTATATPQVQEDVFAALHLKKPVAIFKTPCFRANLFYDVQFKELISDPYGNLKDFCLKALGQEADKGLSGCGIVYCRTREACEQLAIELSCRGVNAKAYHAGLKASERTLVQNDWMEEKVPVIVATISFGMGVDKANVRFVAHWNIAKSMAGYYQESGRAGRDGKPSWCRLYYSRNDRDQVSFLIRKEVAKLQEKRGNKASDKATIMAFDALVTFCEELGCRHAAIAKYFGDALPACAKGCDHCQNPTAVRRRLEALERSSSWSKTCIGPSQGNGFDPELYEGGRKGYGDFSRYDEGSGGSGDEGRDEAHKREWNLFYQKQMQLRKGKDPKIEEFVPPDENCPLKEASSRRIPRLTVKAREHCLRLLEEALSSNRQSTRTADEADLRAKAVELEHETFRNAKVANLYKASVLKKVADIHRASKDGQPYDMGGSAKSCSAQAEPPEPNEYDIPPASHVYSLKPKRVGAGFPKGSCPFQTATELMETTRIREQAPQPERGGEHEPPSRPCGLLDEDGSEPLPGPRGEVPGGSAHYGGPSPEKKAKSSSGGSSLAKGRASKKQQLLATAAHKDSQSIARFFCRRVESPALLASAPEAEGACPSCEGVQGPPMAPEKYTGEEDGAGGHSPAPPQTEECLRERPSTCPPRDQGTPEVQPTPAKDTWKGKRPRSQQENPESQPQKRPRPSAKPSVVAEVKGSVSASEQGTLNPTAQDPFQLSAPGVSLKEAANVVVKCLTPFYKEGKFASKELFKGFARHLSHLLTQKTSPGRSVKEEAQNLIRHFFHGRARCESEADWHGLCGPQR

SEQ ID NO: 72180 - protein, 435 aa, Homo sapiens
  Payload ID: 14290
  Gene Symbol: RECQL5
  Gene Name: RecQ helicase-like 5
  Uniprot ID: O94762
  ENSP ID: ENSP00000341983
MSSHHTTFPFDPERRVRSTLKKVFGFDSFKTPLQESATMAVVKGNKDVFVCMPTGAGKSLCYQLPALLAKGITIVVSPLIALIQDQVDHLLTLKVRVSSLNSKLSAQERKELLADLEREKPQTKILYITPEMAASSSFQPTLNSLVSRHLLSYLVVDEAHCVSQWGHDFRPDYLRLGALRSRLGHAPCVALTATATPQVQEDVFAALHLKKPVAIFKTPCFRANLFYDVQFKELISDPYGNLKDFCLKALGQEADKGLSGCGIVYCRTREACEQLAIELSCRGVNAKAYHAGLKASERTLVQNDWMEEKVPVIVATISFGMGVDKANVRFVAHWNIAKSMAGYYQESGRAGRDGKPSWCRLYYSRNDRDQVSFLIRKEVAKLQEKRGNKASDKATIMAFDALVTFCEELGRWGRGHGKSLRAAWCSQVVSRHAEL

SEQ ID NO: 72181 - protein, 964 aa, Homo sapiens
  Payload ID: 14290
  Gene Symbol: RECQL5
  Gene Name: RecQ helicase-like 5
  Uniprot ID: O94762
  ENSP ID: ENSP00000394820
MSSHHTTFPFDPERRVRSTLKKVFGFDSFKTPLQESATMAVVKGITIVVSPLIALIQDQVDHLLTLKVRVSSLNSKLSAQERKELLADLEREKPQTKILYITPEMAASSSFQPTLNSLVSRHLLSYLVVDEAHCVSQWGHDFRPDYLRLGALRSRLGHAPCVALTATATPQVQEDVFAALHLKKPVAIFKTPCFRANLFYDVQFKELISDPYGNLKDFCLKALGQEADKGLSGCGIVYCRTREACEQLAIELSCRGVNAKAYHAGLKASERTLVQNDWMEEKVPVIVATISFGMGVDKANVRFVAHWNIAKSMAGYYQESGRAGRDGKPSWCRLYYSRNDRDQVSFLIRKEVAKLQEKRGNKASDKATIMAFDALVTFCEELGCRHAAIAKYFGDALPACAKGCDHCQNPTAVRRRLEALERSSSWSKTCIGPSQGNGFDPELYEGGRKGYGDFSRYDEGSGGSGDEGRDEAHKREWNLFYQKQMQLRKGKDPKIEEFVPPDENCPLKEASSRRIPRLTVKAREHCLRLLEEALSSNRQSTRTADEADLRAKAVELEHETFRNAKVANLYKASVLKKVADIHRASKDGQPYDMGGSAKSCSAQAEPPEPNEYDIPPASHVYSLKPKRVGAGFPKGSCPFQTATELMETTRIREQAPQPERGGEHEPPSRPCGLLDEDGSEPLPGPRGEVPGGSAHYGGPSPEKKAKSSSGGSSLAKGRASKKQQLLATAAHKDSQSIARFFCRRVESPALLASAPEAEGACPSCEGVQGPPMAPEKYTGEEDGAGGHSPAPPQTEECLRERPSTCPPRDQGTPEVQPTPAKDTWKGKRPRSQQENPESQPQKRPRPSAKPSVVAEVKGSVSASEQGTLNPTAQDPFQLSAPGVSLKEAANVVVKCLTPFYKEGKFASKELFKGFARHLSHLLTQKTSPGRSVKEEAQNLIRHFFHGRARCESEADWHGLCGPQR

SEQ ID NO: 72182 - protein, 410 aa, Homo sapiens
  Payload ID: 14290
  Gene Symbol: RECQL5
  Gene Name: RecQ helicase-like 5
  Uniprot ID: O94762
  ENSP ID: ENSP00000414933
MSSHHTTFPFDPERRVRSTLKKVFGFDSFKTPLQESATMAVVKGNKDVFVCMPTGAGKSLCYQLPALLAKGITIVVSPLIALIQDQVDHLLTLKVRVSSLNSKLSAQERKELLADLEREKPQTKILYITPEMAASSSFQPTLNSLVSRHLLSYLVVDEAHCVSQWGHDFRPDYLRLGALRSRLGHAPCVALTATATPQVQEDVFAALHLKKPVAIFKTPCFRANLFYDVQFKELISDPYGNLKDFCLKALGQEADKGLSGCGIVYCRTREACEQLAIELSCRGVNAKAYHAGLKASERTLVQNDWMEEKVPVIVATISFGMGVDKANVRFVAHWNIAKSMAGYYQESGRAGRDGKPSWCRLYYSRNDRDQVSFLIRKEVAKLQEKRGNKASDKATIMAFDALVTFCEELG

SEQ ID NO: 72183 - protein, 118 aa, Homo sapiens
  Payload ID: 14290
  Gene Symbol: RECQL5
  Gene Name: RecQ helicase-like 5
  ENSP ID: ENSP00000462077
  MOD_RES (1)..(1): Any amino acid
XFGMGVDKANVRFVAHWNIAKSMAGYYQESGRAGRDGKPSWCRLYYSRNDRDQVSFLIRKEVAKLQEKRGNKASDKATIMAFDALVTFCEELGRWGRGHGKSLRAAWCSQVVSRHAEL

SEQ ID NO: 72184 - protein, 435 aa, Homo sapiens; identical to SEQ ID NO: 72180
  Payload ID: 14290
  Gene Symbol: RECQL5
  Gene Name: RecQ helicase-like 5
  Uniprot ID: O94762
  ENSP ID: ENSP00000462248

SEQ ID NO: 72185 - protein, 236 aa, Homo sapiens
  Payload ID: 14290
  Gene Symbol: RECQL5
  Gene Name: RecQ helicase-like 5
  ENSP ID: ENSP00000462291
KGSCPFQTATELMETTRIREQAPQPERGGEHEPPSRPCGLLDEDGSEPLPGPRGEVPGGSAHYGGPSPEKKAKSSSGGSSLAKGRASKKQQLLATAAHKDSQSIARFFCRRVESPALLASAPEAEGACPSCEGVQGPPMAPEKYTGEEDGAGGHSPAPPQTEECLRERPRPPGMREPPGPSAVMPALPSTSTCPPRDQGTPEVQPTPAKDTWKGKRPRSQQENPESQPQKRPRPSA

SEQ ID NO: 72186 - protein, 198 aa, Homo sapiens
  Payload ID: 14290
  Gene Symbol: RECQL5
  Gene Name: RecQ helicase-like 5
  ENSP ID: ENSP00000462547
  MOD_RES (1)..(1): Any amino acid
XSSLNSKLSAQERKELLADLEREKPQTKILYITPEMAASSSFQPTLNSLVSRHLLSYLVVDEAHCVSQWGHDFRPDYLRLGALRSRLGHAPCVALTATATPQVQEDVFAALHLKKPVAIFKTPCFRANLFYDVQFKELISDPYGNLKDFCLKALGQEADKGVCRPLEYCQVYGWVLPGVWPGWQGWEAFLVPSLLLQE

SEQ ID NO: 72187 - protein, 206 aa, Homo sapiens
  Payload ID: 14290
  Gene Symbol: RECQL5
  Gene Name: RecQ helicase-like 5
  ENSP ID: ENSP00000462678
  MOD_RES (1)..(1): Any amino acid
XLLASAPEAEGACPSCEGVQGPPMAPEKYTGEEDGAGGHSPAPPQTEECLRERPSTCPPRDQGTPEVQPTPAKDTWKGKRPRSQQENPESQPQKRPRPSAKPSVVAEVKGSVSASEQGTLNPTAQDPFQLSAPGVSLKEAANVVVKCLTPFYKEGKFASKPIDPSQSGPHGWVFWDTCRGQKVEGGGAAAGRRGRKSGPSPSSKSG

SEQ ID NO: 72188 - protein, 480 aa, Homo sapiens
  Payload ID: 14290
  Gene Symbol: RECQL5
  Gene Name: RecQ helicase-like 5
  ENSP ID: ENSP00000463099
MSSHHTTFPFDPERRVRSTLKKVFGFDSFKTPLQESATMAVVKGNKDVFVCMPTGAGKSLCYQLPALLAKGITIVVSPLIALIQDQVDHLLTLKVRVSSLNSKLSAQERKELLADLEREKPQTKILYITPEMAASSSFQPTLNSLVSRHLLSYLVVDEAHCVSQWGHDFRPDYLRLGALRSRLGHAPCVALTATATPQVQEDVFAALHLKKPVAIFKTPCFRANLFYDVQFKELISDPYGNLKDFCLKALGQEADKGLSGCGIVYCRTREACEQLAIELSCRGVNAKAYHAGLKASERTLVQNDWMEEKVPVIVATISFGMGVDKANVRFVAHWNIAKSMAGYYQESGRAGRDGKPSWCRLYYSRNDRDQVSFLIRKEVAKLQEKRGNKASDKATIMAFDALVTFCEELGCRHAAIAKYFGDALPACAKGCDHCQNPTAVRRRLEALERSSSWSKTCIGPSQGNGFDPELYEGGRKGYGD

SEQ ID NO: 72189 - protein, 190 aa, Homo sapiens
  Payload ID: 14290
  Gene Symbol: RECQL5
  Gene Name: RecQ helicase-like 5
  ENSP ID: ENSP00000463701
MQLRKGKDPKIEEFVPPDENCPLKEASSRRIPRLTVKAREHCLRLLEEALSSNRQSTRTADEADLRAKAVELEHETFRNAKVANLYKASVLKKVADIHRASKDGQPYDMGGSAKSCSAQAEPPEPNEYDIPPASHVYSLKPKRVGAGFPKGSCPFQTATELMETTRIREQAPQPERGGEHEPPSRPCGLL

SEQ ID NO: 72190 - protein, 625 aa, Homo sapiens
  Payload ID: 14291
  Gene Symbol: RMI1
  Gene Name: RecQ mediated genome instability 1
  Uniprot ID: Q9H9A7
  ENSP ID: ENSP00000317039
MNVTSIALRAETWLLAAWHVKVPPMWLEACINWIQEENNNVNLSQAQMNKQVFEQWLLTDLRDLEHPLLPDGILEIPKGELNGFYALQINSLVDVSQPAYSQIQKLRGKNTTNDLVTAEAQVTPKPWEAKPSRMLMLQLTDGIVQIQGMEYQPIPILHSDLPPGTKILIYGNISFRLGVLLLKPENVKVLGGEVDALLEEYAQEKVLARLIGEPDLVVSVIPNNSNENIPRVTDVLDPALGPSDEELLASLDENDELTANNDTSSERCFTTGSSSNTIPTRQSSFEPEFVISPRPKEEPSNLSIHVMDGELDDFSLEEALLLEETVQKEQMETKELQPLTFNRNADRSIERFSHNPNTTNNFSLTCKNGNNNWSEKNVSEQMTNEDKSFGCPSVRDQNRSIFSVHCNVPLAHDFTNKEKNLETDNKIKQTSSSDSHSLNNKILNREVVNYVQKRNSQISNENDCNLQSCSLRSSENSINLSIAMDLYSPPFVYLSVLMASKPKEVTTVKVKAFIVTLTGNLSSSGGIWSITAKVSDGTAYLDVDFVDEILTSLIGFSVPEMKQSKKDPLQYQKFLEGLQKCQRDLIDLCCLMTISFNPSLSKAMVLALQDVNMEHLENLKKRLNK

SEQ ID NO: 72191 - protein, 415 aa, Homo sapiens
  Payload ID: 14291
  Gene Symbol: RMI1
  Gene Name: RecQ mediated genome instability 1
  ENSP ID: ENSP00000402433
MNVTSIALRAETWLLAAWHVKVPPMWLEACINWIQEENNNVNLSQAQMNKQVFEQWLLTDLRDLEHPLLPDGILEIPKGELNGFYALQINSLVDVSQPAYSQIQKLRGKNTTNDLVTAEAQVTPKPWEAKPSRMLMLQLTDGIVQIQGMEYQPIPILHSDLPPGTKILIYGNISFRLGVLLLKPENVKVLGGEVDALLEEYAQEKVLARLIGEPDLVVSVIPNNSNENIPRVTDVLDPALGPSDEELLASLDENDELTANNDTSSERCFTTGSSSNTIPTRQSSFEPEFVISPRPKEEPSNLSIHVMDGELDDFSLEEALLLEETVQKEQMETKELQPLTFNRNADRSIERFSHNPNTTNNFSLTCKNGNNNWSEKNVSEQMTNEDKSFGCPSVRDQNRSIFSVHCNVPLAHDFT

SEQ ID NO: 72192 - protein, 470 aa, Homo sapiens
  Payload ID: 14291
  Gene Symbol: RMI1
  Gene Name: RecQ mediated genome instability 1
  ENSP ID: ENSP00000483816
MNVTSIALRAETWLLAAWHVKVPPMWLEACINWIQEENNNVNLSQAQMNKQVFEQWLLTDLRDLEHPLLPDGILEIPKGELNGFYALQINSLVDVSQPAYSQIQKLRGKNTTNDLVTAEAQVTPKPWEAKPSRMLMLQLTDGIVQIQGMEYQPIPILHSDLPPGTKILIYGNISFRLGVLLLKPENVKVLGGEVDALLEEYAQEKVLARLIGEPDLVVSVIPNNSNENIPRVTDVLDPALGPSDEELLASLDENDELTANNDTSSERCFTTGSSSNTIPTRQSSFEPEFVISPRPKEEPSNLSIHVMDGELDDFSLEEALLLEETVQKEQMETKELQPLTFNRNADRSIERFSHNPNTTNNFSLTCKNGNNNWSEKNVSEQMTNEDKSFGCPSVRDQNRSIFSVHCNVPLAHDFTNKEKNLETDNKIKQTSSSDSHSLNNKILIERWSTMYRKGIHKFLMKMIVIYRVVL

SEQ ID NO: 72193 - protein, 147 aa, Homo sapiens
  Payload ID: 14292
  Gene Symbol: RMI2
  Gene Name: RecQ mediated genome instability 2
  Uniprot ID: Q96E14
  ENSP ID: ENSP00000310356
MAAAADSFSGGPAGVRLPRSPPLKVLAEQLRRDAEGGPGAWRLSRAAAGRGPLDLAAVWMQGRVVMADRGEARLRDPSGDFSVRGLERVPRGRPCLVPGKYVMVMGVVQACSPEPCLQAVKMTDLSDNPIHESMWELEVEDLHRNIP

SEQ ID NO: 72194 - protein, 27 aa, Homo sapiens
  Payload ID: 14292
  Gene Symbol: RMI2
  Gene Name: RecQ mediated genome instability 2
  ENSP ID: ENSP00000459601
MAAAADSFSGGPAGVRLPRSPPLKESM

SEQ ID NO: 72195 - protein, 84 aa, Homo sapiens
  Payload ID: 14292
  Gene Symbol: RMI2
  Gene Name: RecQ mediated genome instability 2
  Uniprot ID: Q96E14
  ENSP ID: ENSP00000461206
MKQTQVGSLFSLGIRNPEPGPVSGTAVPRQLAWKSGKYVMVMGVVQACSPEPCLQAVKMTDLSDNPIHESMWELEVEDLHRNIP

SEQ ID NO: 72196 - protein, 3458 aa, Homo sapiens
  Payload ID: 14293
  Gene Symbol: RELN
  Gene Name: reelin
  Uniprot ID: P78509
  ENSP ID: ENSP00000345694
MERSGWARQTFLLALLLGATLRARAAAGYYPRFSPFFFLCTHHGELEGDGEQGEVLISLHIAGNPTYYVPGQEYHVTISTSTFFDGLLVTGLYTSTSVQASQSIGGSSAFGFGIMSDHQFGNQFMCSVVASHVSHLPTTNLSFIWIAPPAGTGCVNFMATATHRGQVIFKDALAQQLCEQGAPTDVTVHPHLAEIHSDSIILRDDFDSYHQLQLNPNIWVECNNCETGEQCGAIMHGNAVTFCEPYGPRELITTGLNTTTASVLQFSIGSGSCRFSYSDPSIIVLYAKNNSADWIQLEKIRAPSNVSTIIHILYLPEDAKGENVQFQWKQENLRVGEVYEACWALDNILIINSAHRQVVLEDSLDPVDTGNWLFFPGATVKHSCQSDGNSIYFHGNEGSEFNFATTRDVDLSTEDIQEQWSEEFESQPTGWDVLGAVIGTECGTIESGLSMVFLKDGERKLCTPSMDTTGYGNLRFYFVMGGICDPGNSHENDIILYAKIEGRKEHITLDTLSYSSYKVPSLVSVVINPELQTPATKFCLRQKNHQGHNRNVWAVDFFHVLPVLPSTMSHMIQFSINLGCGTHQPGNSVSLEFSTNHGRSWSLLHTECLPEICAGPHLPHSTVYSSENYSGWNRITIPLPNAALTRNTRIRWRQTGPILGNMWAIDNVYIGPSCLKFCSGRGQCTRHGCKCDPGFSGPACEMASQTFPMFISESFGSSRLSSYHNFYSIRGAEVSFGCGVLASGKALVFNKDGRRQLITSFLDSSQSRFLQFTLRLGSKSVLSTCRAPDQPGEGVLLHYSYDNGITWKLLEHYSYLSYHEPRIISVELPGDAKQFGIQFRWWQPYHSSQREDVWAIDEIIMTSVLFNSISLDFTNLVEVTQSLGFYLGNVQPYCGHDWTLCFTGDSKLASSMRYVETQSMQIGASYMIQFSLVMGCGQKYTPHMDNQVKLEYSTNHGLTWHLVQEECLPSMPSCQEFTSASIYHASEFTQWRRVIVLLPQKTWSSATRFRWSQSYYTAQDEWALDSIYIGQQCPNMCSGHGSCDHGICRCDQGYQGTECHPEAALPSTIMSDFENQNGWESDWQEVIGGEIVKPEQGCGVISSGSSLYFSKAGKRQLVSWDLDTSWVDFVQFYIQIGGESASCNKPDSREEGVLLQYSNNGGIQWHLLAEMYFSDFSKPRFVYLELPAAAKTPCTRFRWWQPVFSGEDYDQWAVDDIIILSEKQKQIIPVINPTLPQNFYEKPAFDYPMNQMSVWLMLANEGMVKNETFCAATPSAMIFGKSDGDRFAVTRDLTLKPGYVLQFKLNIGCANQFSSTAPVLLQYSHDAGMSWFLVKEGCYPASAGKGCEGNSRELSEPTMYHTGDFEEWTRITIVIPRSLASSKTRFRWIQESSSQKNVPPFGLDGVYISEPCPSYCSGHGDCISGVCFCDLGYTAAQGTCVSNVPNHNEMFDRFEGKLSPLWYKITGAQVGTGCGTLNDGKSLYFNGPGKREARTVPLDTRNIRLVQFYIQIGSKTSGITCIKPRTRNEGLIVQYSNDNGILWHLLRELDFMSFLEPQIISIDLPQDAKTPATAFRWWQPQHGKHSAQWALDDVLIGMNDSSQTGFQDKFDGSIDLQANWYRIQGGQVDIDCLSMDTALIFTENIGKPRYAETWDFHVSASTFLQFEMSMGCSKPFSNSHSVQLQYSLNNGKDWHLVTEECVPPTIGCLHYTESSIYTSERFQNWKRITVYLPLSTISPRTRFRWIQANYTVGADSWAIDNVVLASGCPWMCSGRGICDAGRCVCDRGFGGPYCVPVVPLPSILKDDFNGNLHPDLWPEVYGAERGNLNGETIKSGTSLIFKGEGLRMLISRDLDCTNTMYVQFSLRFIAKSTPERSHSILLQFSISGGITWHLMDEFYFPQTTNILFINVPLPYTAQTNATRFRLWQPYNNGKKEEIWIVDDFIIDGNNVNNPVMLLDTFDFGPREDNWFFYPGGNIGLYCPYSSKGAPEEDSAMVFVSNEVGEHSITTRDLNVNENTIIQFEINVGCSTDSSSADPVRLEFSRDFGATWHLLLPLCYHSSSHVSSLCSTEHHPSSTYYAGTMQGWRREVVHFGKLHLCGSVRFRWYQGFYPAGSQPVTWAIDNVYIGPQCEEMCNGQGSCINGTKCICDPGYSGPTCKISTKNPDFLKDDFEGQLESDRFLLMSGGKPSRKCGILSSGNNLFFNEDGLRMLMTRDLDLSHARFVQFFMRLGCGKGVPDPRSQPVLLQYSLNGGLSWSLLQEFLFSNSSNVGRYIALEIPLKARSGSTRLRWWQPSENGHFYSPWVIDQILIGGNISGNTVLEDDFTTLDSRKWLLHPGGTKMPVCGSTGDALVFIEKASTRYVVSTDVAVNEDSFLQIDFAASCSVTDSCYAIELEYSVDLGLSWHPLVRDCLPTNVECSRYHLQRILVSDTFNKWTRITLPLPPYTRSQATRFRWHQPAPFDKQQTWAIDNVYIGDGCIDMCSGHGRCIQGNCVCDEQWGGLYCDDPETSLPTQLKDNFNRAPSSQNWLTVNGGKLSTVCGAVASGMALHFSGGCSRLLVTVDLNLTNAEFIQFYFMYGCLITPNNRNQGVLLEYSVNGGITWNLLMEIFYDQYSKPGFVNILLPPDAKEIATRFRWWQPRHDGLDQNDWAIDNVLISGSADQRTVMLDTFSSAPVPQHERSPADAGPVGRIAFDMFMEDKTSVNEHWLFHDDCTVERFCDSPDGVMLCGSHDGREVYAVTHDLTPTEGWIMQFKISVGCKVSEKIAQNQIHVQYSTDFGVSWNYLVPQCLPADPKCSGSVSQPSVFFPTKGWKRITYPLPESLVGNPVRFRFYQKYSDMQWAIDNFYLGPGCLDNCRGHGDCLREQCICDPGYSGPNCYLTHTLKTFLKERFDSEEIKPDLWMSLEGGSTCTECGILAEDTALYFGGSTVRQAVTQDLDLRGAKFLQYWGRIGSENNMTSCHRPICRKEGVLLDYSTDGGITWTLLHEMDYQKYISVRHDYILLPEDALTNTTRLRWWQPFVISNGIVVSGVERAQWALDNILIGGAEINPSQLVDTFDDEGTSHEENWSFYPNAVRTAGFCGNPSFHLYWPNKKKDKTHNALSSRELIIQPGYMMQFKIVVGCEATSCGDLHSVMLEYTKDARSDSWQLVQTQCLPSSSNSIGCSPFQFHEATIYNSVNSSSWKRITIQLPDHVSSSATQFRWIQKGEETEKQSWAIDHVYIGEACPKLCSGHGYCTTGAICICDESFQGDDCSVFSHDLPSYIKDNFESARVTEANWETIQGGVIGSGCGQLAPYAHGDSLYFNGCQIRQAATKPLDLTRASKIMFVLQIGSMSQTDSCNSDLSGPHAVDKAVLLQYSVNNGITWHVIAQHQPKDFTQAQRVSYNVPLEARMKGVLLRWWQPRHNGTGHDQWALDHVEVVLTRKQNYMMNFSRQHGLRHFYNRRRRSLRRYP

SEQ ID NO: 72197 - protein, 3460 aa, Homo sapiens [sequence omitted]

SEQ ID NO: 72198 - protein, 3460 aa, Homo sapiens
  Payload ID: 14293
  Gene Symbol: RELN
  Gene Name: reelin
  Uniprot ID: P78509
  ENSP ID: ENSP00000392423
MERSGWARQTFLLALLLGATLRARAAAGYYPRFSPFFFLCTHHGELEGDGEQGEVLISLHIAGNPTYYVPGQEYHVTISTSTFFDGLLVTGLYTSTSVQASQSIGGSSAFGFGIMSDHQFGNQFMCSVVASHVSHLPTTNLSFIWIAPPAGTGCVNFMATATHRGQVIFKDALAQQLCEQGAPTDVTVHPHLAEIHSDSIILRDDFDSYHQLQLNPNIWVECNNCETGEQCGAIMHGNAVTFCEPYGPRELITTGLNTTTASVLQFSIGSGSCRFSYSDPSIIVLYAKNNSADWIQLEKIRAPSNVSTIIHILYLPEDAKGENVQFQWKQENLRVGEVYEACWALDNILIINSAHRQVVLEDSLDPVDTGNWLFFPGATVKHSCQSDGNSIYFHGNEGSEFNFATTRDVDLSTEDIQEQWSEEFESQPTGWDVLGAVIGTECGTIESGLSMVFLKDGERKLCTPSMDTTGYGNLRFYFVMGGICDPGNSHENDIILYAKIEGRKEHITLDTLSYSSYKVPSLVSVVINPELQTPATKFCLRQKNHQGHNRNVWAVDFFHVLPVLPSTMSHMIQFSINLGCGTHQPGNSVSLEFSTNHGRSWSLLHTECLPEICAGPHLPHSTVYSSENYSGWNRITIPLPNAALTRNTRIRWRQTGPILGNMWAIDNVYIGPSCLKFCSGRGQCTRHGCKCDPGFSGPACEMASQTFPMFISESFGSSRLSSYHNFYSIRGAEVSFGCGVLASGKALVFNKDGRRQLITSFLDSSQSRFLQFTLRLGSKSVLSTCRAPDQPGEGVLLHYSYDNGITWKLLEHYSYLSYHEPRIISVELPGDAKQFGIQFRWWQPYHSSQREDVWAIDEIIMTSVLFNSISLDFTNLVEVTQSLGFYLGNVQPYCGHDWTLCFTGDSKLASSMRYVETQSMQIGASYMIQFSLVMGCGQKYTPHMDNQVKLEYSTNHGLTWHLVQEECLPSMPSCQEFTSASIYHASEFTQWRRVIVLLPQKTWSSATRFRWSQSYYTAQDEWALDSIYIGQQCPNMCSGHGSCDHGICRCDQGYQGTECHPEAALPSTIMSDFENQNGWESDWQEVIGGEIVKPEQGCGVISSGSSLYFSKAGKRQLVSWDLDTSWVDFVQFYIQIGGESASCNKPDSREEGVLLQYSNNGGIQWHLLAEMYFSDFSKPRFVYLELPAAAKTPCTRFRWWQPVFSGEDYDQWAVDDIIILSEKQKQIIPVINPTLPQNFYEKPAFDYPMNQMSVWLMLANEGMVKNETFCAATPSAMIFGKSDGDRFAVTRDLTLKPGYVLQFKLNIGCANQFSSTAPVLLQYSHDAGMSWFLVKEGCYPASAGKGCEGNSRELSEPTMYHTGDFEEWTRITIVIPRSLASSKTRFRWIQESSSQKNVPPFGLDGVYISEPCPSYCSGHGDCISGVCFCDLGYTAAQGTCVSNVPNHNEMFDRFEGKLSPLWYKITGAQVGTGCGTLNDGKSLYFNGPGKREARTVPLDTRNIRLVQFYIQIGSKTSGITCIKPRTRNEGLIVQYSNDNGILWHLLRELDFMSFLEPQIISIDLPQDAKTPATAFRWWQPQHGKHSAQWALDDVLIGMNDSSQTGFQDKFDGSIDLQANWYRIQGGQVDIDCLSMDTALIFTENIGKPRYAETWDFHVSASTFLQFEMSMGCSKPFSNSHSVQLQYSLNNGKDWHLVTEECVPPTIGCLHYTESSIYTSERFQNWKRITVYLPLSTISPRTRFRWIQANYTVGADSWAIDNVVLASGCPWMCSGRGICDAGRCVCDRGFGGPYCVPVVPLPSILKDDFNGNLHPDLWPEVYGAERGNLNGETIKSGTSLIFKGEGLRMLISRDLDCTNTMYVQFSLRFIAKSTPERSHSILLQFSISGGITWHLMDEFYFPQTTNILFINVPLPYTAQTNATRFRLWQPYNNGKKEEIWIVDDFIIDGNNVNNPVMLLDTFDFGPREDNWFFYPGGNIGLYCPYSSKGAPEEDSAMVFVSNEVGEHSITTRDLNVNENTIIQFEINVGCSTDSSSADPVRLEFSRDFGATWHLLLPLCYHSSSHVSSLCSTEHHPSSTYYAGTMQGWRREVVHFGKLHLCGSVRFRWYQGFYPAGSQPVTWAIDNVYIGPQCEEMCNGQGSCINGTKCICDPGYSGPTCKISTKNPDFLKDDFEGQLESDRFLLMSGGKPSRKCGILSSGNNLFFNEDGLRMLMTRDLDLSHARFVQFFMRLGCGKGVPDPRSQPVLLQYSLNGGLSWSLLQEFLFSNSSNVGRYIALEIPLKARSGSTRLRWWQPSENGHFYSPWVIDQILIGGNISGNTVLEDDFTTLDSRKWLLHPGGTKMPVCGSTGDALVFIEKASTRYVVSTDVAVNEDSFLQIDFAASCSVTDSCYAIELEYSVDLGLSWHPLVRDCLPTNVECSRYHLQRILVSDTFNKWTRITLPLPPYTRSQATRFRWHQPAPFDKQQTWAIDNVYIGDGCIDMCSGHGRCIQGNCVCDEQWGGLYCDDPETSLPTQLKDNFNRAPSSQNWLTVNGGKLSTVCGAVASGMALHFSGGCSRLLVTVDLNLTNAEFIQFYFMYGCLITPNNRNQGVLLEYSVNGGITWNLLMEIFYDQYSKPGFVNILLPPDAKEIATRFRWWQPRHDGLDQNDWAIDNVLISGSADQRTVMLDTFSSAPVPQHERSPADAGPVGRIAFDMFMEDKTSVNEHWLFHDDCTVERFCDSPDGVMLCGSHDGREVYAVTHDLTPTEGWIMQFKISVGCKVSEKIAQNQIHVQYSTDFGVSWNYLVPQCLPADPKCSGSVSQPSVFFPTKGWKRITYPLPESLVGNPVRFRFYQKYSDMQWAIDNFYLGPGCLDNCRGHGDCLREQCICDPGYSGPNCYLTHTLKTFLKERFDSEEIKPDLWMSLEGGSTCTECGILAEDTALYFGGSTVRQAVTQDLDLRGAKFLQYWGRIGSENNMTSCHRPICRKEGVLLDYSTDGGITWTLLHEMDYQKYISVRHDYILLPEDALTNTTRLRWWQPFVISNGIVVSGVERAQWALDNILIGGAEINPSQLVDTFDDEGTSHEENWSFYPNAVRTAGFCGNPSFHLYWPNKKKDKTHNALSSRELIIQPGYMMQFKIVVGCEATSCGDLHSVMLEYTKDARSDSWQLVQTQCLPSSSNSIGCSPFQFHEATIYNSVNSSSWKRITIQLPDHVSSSATQFRWIQKGEETEKQSWAIDHVYIGEACPKLCSGHGYCTTGAICICDESFQGDDCSVFSHDLPSYIKDNFESARVTEANWETIQGGVIGSGCGQLAPYAHGDSLYFNGCQIRQAATKPLDLTRASKIMFVLQIGSMSQTDSCNSDLSGPHAVDKAVLLQYSVNNGITWHVIAQHQPKDFTQAQRVSYNVPLEARMKGVLLRWWQPRHNGTGHDQWALDHVEVVLVSTRKQNYMMNFSRQHGLRHFYNRRRRSLRRYP

SEQ ID NO: 72199 - protein, 68 aa, Homo sapiens
  Payload ID: 14293
  Gene Symbol: RELN
  Gene Name: reelin
  ENSP ID: ENSP00000404818
  MOD_RES (1)..(1): Any amino acid
XLRWWQPRHNGTGHDQWALDHVEVVLDEKSYIASKPDQTFMTNHSAACIERHFLTCVIFHYLLSLVFH

SEQ ID NO: 72200 - protein, 166 aa, Homo sapiens
  Payload ID: 14294
  Gene Symbol: REG1A
  Gene Name: regenerating islet-derived 1 alpha
  Uniprot ID: P05451
  ENSP ID: ENSP00000233735
MAQTSSYFMLISCLMFLSQSQGQEAQTELPQARISCPEGTNAYRSYCYYFNEDRETWVDADLYCQNMNSGNLVSVLTQAEGAFVASLIKESGTDDFNVWIGLHDPKKNRRWHWSSGSLVSYKSWGIGAPSSVNPGYCVSLTSSTGFQKWKDVPCEDKFSFVCKFKN

SEQ ID NO: 72201 - protein, 166 aa, Homo sapiens
  Payload ID: 14295
  Gene Symbol: REG1B
  Gene Name: regenerating islet-derived 1 beta
  Uniprot ID: P48304
  ENSP ID: ENSP00000303206
MAQTNSFFMLISSLMFLSLSQGQESQTELPNPRISCPEGTNAYRSYCYYFNEDPETWVDADLYCQNMNSGNLVSVLTQAEGAFVASLIKESSTDDSNVWIGLHDPKKNRRWHWSSGSLVSYKSWDTGSPSSANAGYCASLTSCSGFKKWKDESCEKKFSFVCKFKN

SEQ ID NO: 72202 - protein, 149 aa, Homo sapiens
  Payload ID: 14295
  Gene Symbol: REG1B
  Gene Name: regenerating islet-derived 1 beta
  ENSP ID: ENSP00000387410
FNEDPETWVDADLYCQNMNSGNLVSVLTQAEGAFVASLIKESSTDDSNVWIGLHDPKKNRRWHWSSGSLVSYKSWDTGSPSSANAGYCASLTSCSGERQTIYPPVAISFPLISGDEHGDWDRGKDSRNGRMNLVRRSSPLFASSKTRGS

SEQ ID NO: 72203 - protein, 175 aa, Homo sapiens
  Payload ID: 14296
  Gene Symbol: REG3A
  Gene Name: regenerating islet-derived 3 alpha
  Uniprot ID: Q06141
  ENSP ID: ENSP00000304311
MLPPMALPSVSWMLLSCLMLLSQVQGEEPQRELPSARIRCPKGSKAYGSHCYALFLSPKSWTDADLACQKRPSGNLVSVLSGAEGSFVSSLVKSIGNSYSYVWIGLHDPTQGTEPNGEGWEWSSSDVMNYFAWERNPSTISSPGHCASLSRSTAFLRWKDYNCNVRLPYVCKFTD

SEQ ID NO: 72204 - protein, 175 aa, Homo sapiens; identical to SEQ ID NO: 72203
  Payload ID: 14296
  Gene Symbol: REG3A
  Gene Name: regenerating islet-derived 3 alpha
  Uniprot ID: Q06141
  ENSP ID: ENSP00000377456

SEQ ID NO: 72205 - protein, 175 aa, Homo sapiens; identical to SEQ ID NO: 72203
  Payload ID: 14296
  Gene Symbol: REG3A
  Gene Name: regenerating islet-derived 3 alpha
  Uniprot ID: Q06141
  ENSP ID: ENSP00000386630

SEQ ID NO: 72206 - protein, 175 aa, Homo sapiens
  Payload ID: 14297
  Gene Symbol: REG3G
  Gene Name: regenerating islet-derived 3 gamma
  Uniprot ID: Q6UW15
  ENSP ID: ENSP00000272324
MLPPMALPSVSWMLLSCLILLCQVQGEETQKELPSPRISCPKGSKAYGSPCYALFLSPKSWMDADLACQKRPSGKLVSVLSGAEGSFVSSLVRSISNSYSYIWIGLHDPTQGSEPDGDGWEWSSTDVMNYFAWEKNPSTILNPGHCGSLSRSTGFLKWKDYNCDAKLPYVCKFKD

SEQ ID NO: 72207 - protein, 175 aa, Homo sapiens; identical to SEQ ID NO: 72206
  Payload ID: 14297
  Gene Symbol: REG3G
  Gene Name: regenerating islet-derived 3 gamma
  Uniprot ID: Q6UW15
  ENSP ID: ENSP00000377475

SEQ ID NO: 72208 - protein, 129 aa, Homo sapiens
  Payload ID: 14297
  Gene Symbol: REG3G
  Gene Name: regenerating islet-derived 3 gamma
  Uniprot ID: Q6UW15
  ENSP ID: ENSP00000387105
MLPPMALPSVSWMLLSCLILLCQVQGEETQKELPSPRISCPKGSKAYGSPCYALFLSPKSWMDADGSEPDGDGWEWSSTDVMNYFAWEKNPSTILNPGHCGSLSRSTGFLKWKDYNCDAKLPYVCKFKD

SEQ ID NO: 72209 - protein, 158 aa, Homo sapiens
  Payload ID: 14298
  Gene Symbol: REG4
  Gene Name: regenerating islet-derived family, member 4
  Uniprot ID: Q9BYZ8
  ENSP ID: ENSP00000256585
MASRSMRLLLLLSCLAKTGVLGDIIMRPSCAPGWFYHKSNCYGYFRKLRNWSDAELECQSYGNGAHLASILSLKEASTIAEYISGYQRSQPIWIGLHDPQKRQQWQWIDGAMYLYRSWSGKSMGGNKHCAEMSSNNNFLTWSSNECNKRQHFLCKYRP

SEQ ID NO: 72210 - protein, 158 aa, Homo sapiens; identical to SEQ ID NO: 72209
  Payload ID: 14298
  Gene Symbol: REG4
  Gene Name: regenerating islet-derived family, member 4
  Uniprot ID: Q9BYZ8
  ENSP ID: ENSP00000346158

SEQ ID NO: 72211 - protein, 134 aa, Homo sapiens
  Payload ID: 14298
  Gene Symbol: REG4
  Gene Name: regenerating islet-derived family, member 4
  Uniprot ID: Q9BYZ8
  ENSP ID: ENSP00000358409
MASRSMRLLLLLSCLAKTGVLGDIIMRPSCAPGWFYHKSNCYGYFRKLRNWSDAEVRNLLPAWPGLSRAKDQPEPQISFDSGSSVLPGHYEEKPLWLVKWREEGCVFNSFNSVSIAEAGAVCQTLDGLQAHTDT

SEQ ID NO: 72212 - protein, 103 aa, Homo sapiens
  Payload ID: 14298
  Gene Symbol: REG4
  Gene Name: regenerating islet-derived family, member 4
  ENSP ID: ENSP00000437135
MASRSMRLLLLLSCLAKTGVLGDIIMRPSCAPGWFYHKSNCYGYFRKLRNWSDAELECQSYGNGAHLASILSLKEASTIAEYISGYQRSQPIWIGLHDPQKTF

SEQ ID NO: 72213 - protein, 299 aa, Homo sapiens
  Payload ID: 14299
  Gene Symbol: RGN
  Gene Name: regucalcin
  Uniprot ID: Q15493
  ENSP ID: ENSP00000253303
MSSIKIECVLPENCRCGESPVWEEVSNSLLFVDIPAKKVCRWDSFTKQVQRVTMDAPVSSVALRQSGGYVATIGTKFCALNWKEQSAVVLATVDNDKKNNRFNDGKVDPAGRYFAGTMAEETAPAVLERHQGALYSLFPDHHVKKYFDQVDISNGLDWSLDHKIFYYIDSLSYSVDAFDYDLQTGQISNRRSVYKLEKEEQIPDGMCIDAEGKLWVACYNGGRVIRLDPVTGKRLQTVKLPVDKTTSCCFGGKNYSEMYVTCARDGMDPEGLLRQPEAGGIFKITGLGVKGIAPYSYAG

SEQ ID NO: 72214 - protein, 299 aa, Homo sapiens; identical to SEQ ID NO: 72213
  Payload ID: 14299
  Gene Symbol: RGN
  Gene Name: regucalcin
  Uniprot ID: Q15493
  ENSP ID: ENSP00000338400

SEQ ID NO: 72215 - protein, 299 aa, Homo sapiens; identical to SEQ ID NO: 72213
  Payload ID: 14299
  Gene Symbol: RGN
  Gene Name: regucalcin
  Uniprot ID: Q15493
  ENSP ID: ENSP00000380365

SEQ ID NO: 72216 - protein, 227 aa, Homo sapiens
  Payload ID: 14299
  Gene Symbol: RGN
  Gene Name: regucalcin
  Uniprot ID: Q15493
  ENSP ID: ENSP00000406568
MSSIKIECVLPENCRCGESPVWEEVSNSLLFVDIPAKKVCRWDSFTKQVQRVTMDAPVSSVALRQSGGYVATIGTKFCALNWKEQSAVVLATVDNDKKNNRFNDGKVDPAGRYFAANRRSVYKLEKEEQIPDGMCIDAEGKLWVACYNGGRVIRLDPVTGKRLQTVKLPVDKTTSCCFGGKNYSEMYVTCARDGMDPEGLLRQPEAGGIFKITGLGVKGIAPYSYAG

SEQ ID NO: 72217 - protein, 228 aa, Homo sapiens
  Payload ID: 14300
  Gene Symbol: RESP18
  Gene Name: regulated endocrine-specific protein 18
  Uniprot ID: Q5W5W9
  ENSP ID: ENSP00000330269
MAVDVEFGVAGWWEAAAPLSPSAVAATFTETWPGSERAEPGRIQHPLWPGSSEGLQLLVCFLLLNSCPGGCSDTSAHDGQDQVGVGQLWPLQGFATPVFQHLQVVLQQIIPQGLFWKDDITQDAMIQKMEHASRLHPQEPCLKDGKALFPTKTTESPLAKVNRDQCFTSEVVSKALKQEVANPVKITYRCSYGGLDMMQAPGPSKEEIIYKIMRLLWATSYCGPQPCG

SEQ ID NO: 72218 - protein, 91 aa, Homo sapiens
  Payload ID: 14300
  Gene Symbol: RESP18
  Gene Name: regulated endocrine-specific protein 18
  ENSP ID: ENSP00000375933
MIQKMEHASRLHPQEPCLKDGKALFPTKTTEQEEKLQLLFPSETHSPLAKVNRDQCFTSEVVSKALKQEVANPVKGFSGPLPTVGRNPVAD

SEQ ID NO: 72219 - protein, 1541 aa, Homo sapiens
  Payload ID: 14301
  Gene Symbol: RIMS1
  Gene Name: regulating synaptic membrane exocytosis 1
  Uniprot ID: Q86UR5
  ENSP ID: ENSP00000264839
MSSAVGPRGPRPPTVPPPMQELPDLSHLTEEERNIIMAVMDRQKEEEEKEEAMLKCVVRDMAKPAACKTPRNAENQPHQPSPRLHQQFESYKEQVRKIGEEARRYQGEHKDDAPTCGICHKTKFADGCGHLCSYCRTKFCARCGGRVSLRSNNEDKVVMWVCNLCRKQQEILTKSGAWFFGSGPQQTSQDGTLSDTATGAGSEVPREKKARLQERSRSQTPLSTAAASSQDAAPPSAPPDRSKGAEPSQQALGPEQKQASSRSRSEPPRERKKTPGLSEQNGKGALKSERKRVPKTSAQPVEGAVEERERKERRESRRLEKGRSQDYPDTPEKRDEGKAADEEKQRKEEDYQTRYRSDPNLARYPVKPPPEEQQMRMHARVSRARHERRHSDVALPRTEAGAALPEGKAGKRAPAAARASPPDSPRAYSAERTAETRAPGAKQLTNHSPPAPRHGPVPAEAPELKAQEPLRKQSRLDPSSAVLMRKAKREKVETMLRNDSLSSDQSESVRPSPPKPHRSKRGGKKRQMSVSSSEEEGVSTPEYTSCEDVELESESVSEKGDLDYYWLDPATWHSRETSPISSHPVTWQPSKEGDRLIGRVILNKRTTMPKDSGALLGLKVVGGKMTDLGRLGAFITKVKKGSLADVVGHLRAGDEVLEWNGKPLPGATNEEVYNIILESKSEPQVEIIVSRPIGDIPRIPESSHPPLESSSSSFESQKMERPSISVISPTSPGALKDAPQVLPGQLSVKLWYDKVGHQLIVNVLQATDLPARVDGRPRNPYVKMYFLPDRSDKSKRRTKTVKKILEPKWNQTFVYSHVHRRDFRERMLEITVWDQPRVQEEESEFLGEILIELETALLDDEPHWYKLQTHDESSLPLPQPSPFMPRRHIHGESSSKKLQRSQRISDSDISDYEVDDGIGVVPPVGYRSSARESKSTTLTVPEQQRTTHHRSRSVSPHRGNDQGKPRSRLPNVPLQRSLDEIHPTRRSRSPTRHHDASRSPVDHRTRDVDSQYLSEQDSELLMLPRAKRGRSAECLHTTRHLVRHYKTLPPKMPLLQSSSHWNIYSELQPFLDRARSASTNCLRPDTSLHSPERERMHRQRSPTQSPPADTSFSSRRGRQLPQVPVRSGSIEQASLVVEERTRQMKMKVHRFKQTTGSGSSQELDREQYSKYNIHKDQYRSCDNVSAKSSDSDVSDVSAISRTSSASRLSSTSFMSEQSERPRGRISSFTPKMQGRRMGTSGRSIMKSTSVSGEMYTLEHNDGSQSDTAVGTVGAGGKKRRSSLSAKVVAIVSRRSRSTSQLSQTESGHKKLKSTIQRSTETGMAAEMRKMVRQPSRESTDGSINSYSSEGNLIFPGVRLGADSQFSDFLDGLGPAQLVGRQTLATPAMGDIQIGMEDKKGQLEVEVIRARSLTQKPGSKSTPAPYVKVYLLENGACIAKKKTRIARKTLDPLYQQSLVFDESPQGKVLQVIVWGDYGRMDHKCFMGVAQILLEELDLSSMVIGWYKLFPPSSLVDPTLTPLTRRASQSSLESSTGPPCIRS

SEQ ID NO: 72220 - protein, 740 aa, Homo sapiens
  Payload ID: 14301
  Gene Symbol: RIMS1
  Gene Name: regulating synaptic membrane exocytosis 1
  ENSP ID: ENSP00000359448
RPRNPYVKMYFLPDRSDKSKRRTKTVKKILEPKWNQTFVYSHVHRRDFRERMLEITVWDQPRVQEEESEFLGEILIELETALLDDEPHWYKLQTHDESSLPLPQPSPFMPRRHIHGESSSKKLQRSQRISDSDISDYEVDDGIGVVPPVGYRSSARESKSTTLTVPEQQRTTHHRSRSVSPHRGNDQGKPRSRLPNVPLQRSLDEIHPTRRSRSPTRHHDASRSPVDHRTRDVDSQYLSEQDSELLMLPRAKRGRSAECLHTTSELQPFLDRARSASTNCLRPDTSLHSPERERMHRQRSPTQSPPADTSFSSRRGRQLPQVPVRSGSIEQASLVVEERTRQMKMKVHRFKQTTGSGSSQELDREQYSKYNIHKDQYRSCDNVSAKSSDSDVSDVSAISRTSSASRLSSTSFMSEQSERPRGRISSFTPKMQGRRMGTSGRSIMKSTSVSGEMYTLEHNDGSQSDTAVGTVGAGGKKRRSSLSAKVVAIVSRRSRSTSQLSQTESGHKKLKSTIQRSTETGMAAEMRKMVRQPSRESTDGSINSYSSEGNLIFPGVRLGADSQFSDFLDGLGPAQLVGRQTLATPAMGDIQIGMEDKKGQLEVEVIRARSLTQKPGSKSTPAPYVKVYLLENGACIAKKKTRIARKTLDPLYQQSLVFDESPQGKVLQVIVWGDYGRMDHKCFMGVAQILLEELDLSSMVIGWYKLFPPSSLVDPTLTPLTRRASQSSLESSTGPPCIRS

SEQ ID NO: 72221 - protein, 1012 aa, Homo sapiens
  Payload ID: 14301
  Gene Symbol: RIMS1
  Gene Name: regulating synaptic membrane exocytosis 1
  Uniprot ID: Q86UR5
  ENSP ID: ENSP00000385649
MCAPGIHVSSEGWEEVRSVDSEEGTIEARRAVAGDLDYYWLDPATWHSRETSPISSHPVTWQPSKEGDRLIGRVILNKRTTMPKDSGALLGLKVVGGKMTDLGRLGAFITKVKKGSLADVVGHLRAGDEVLEWNGKPLPGATNEEVYNIILESKSEPQVEIIVSRPIGDIPRIPESSHPPLESSSSSFESQKMERPSISVISPTSPGALKDAPQVLPGQLSVKLWYDKVGHQLIVNVLQATDLPARVDGRPRNPYVKMYFLPDRSDKSKRRTKTVKKILEPKWNQTFVYSHVHRRDFRERMLEITVWDQPRVQEEESEFLGEILIELETALLDDEPHWYKLQTHDESSLPLPQPSPFMPRRHIHGESSSKKLQRSQRISDSDISDYEVDDGIGVVPPGYRSSARESKSTTLTVPEQQRTTHHRSRSVSPHRGNDQGKPRSRLPNVPLQRSLDEIHPTRRSRSPTRHHDASRSPVDHRTRDVDSQYLSEQDSELLMLPRAKRGRSAECLHTTSELQPFLDRARSASTNCLRPDTSLHSPERERHSRKSERSSIQKQTRKGTASDAERMHRQRSPTQSPPADTSFSSRRGRQLPQVPVRSGSIEQASLVVEERTRQMKMKVHRFKQTTGSGSSQELDREQYSKYNIHKDQYRSCDNVSAKSSDSDVSDVSAISRTSSASRLSSTSFMSEQSERPRGRISSFTPKMQGRRMGTSGRSIMKSTSVSGEMYTLEHNDGSQSDTAVGTVGAGGKKRRSSLSAKVVAIVSRRSRSTSQLSQTESGHKKLKSTIQRSTETGMAAEMRKMVRQPSRESTDGSINSYSSEGNLIFPGVRLGADSQFSDFLDGLGPAQLVGRQTLATPAMGDIQIGMEDKKGQLEVEVIRARSLTQKPGSKSTPAPYVKVYLLENGACIAKKKTRIARKTLDPLYQQSLVFDESPQGKVLQVIVWGDYGRMDHKCFMGVAQILLEELDLSSMVIGWYKLFPPSSLVDPTLTPLTRRASQSSLESSTGPPCIRS

SEQ ID NO: 72222 - protein, 753 aa, Homo sapiens
  Payload ID: 14301
  Gene Symbol: RIMS1
  Gene Name: regulating synaptic membrane exocytosis 1
  ENSP ID: ENSP00000389503
MPKDSGALLGLKVVGGKMTDLGRLGAFITKVKKGSLADVVGHLRAGDEVLEWNGKPLPGATNEEVYNIILESKSEPQVEIIVSRPIGDIPRIPESSHPPLESSSSSFESQKMERPSISVISPTSPGALKDAPQVLPGQLSVKLWYDKVGHQLIVNVLQATDLPARVDGRPRNPYVKMYFLPDRSDKSKRRTKTVKKILEPKWNQTFVYSHVHRRDFRERMLEITVWDQPRVQEEESEFLGEILIELETALLDDEPHWYKLQTHDESSLPLPQPSPFMPRRHIHGESSSKKLQRSQRISDSDISDYEVDDGIGVVPPVGYRSSARESKSTTLTVPEQQRTTHHRSRSVSPHRGNDQGKPRSRLPNVPLQRSLDEIHPTRRSRSPTRHHDASRSPVDHRTRDVDSQYLSEQDRMHRQRSPTQSPPADTSFSSRRGRQLPQVPVRSGSIEQASLVVEERTRQMKMKVHRFKQTTGSGSSQELDREQYSKYNIHKDQYRSCDNVSAKSSDSDVSDVSAISRTSSASRLSSTSFMSEQSERPRGRISSFTPKMQGRRMGTSGRSIMKSTSVSGEMYTLEHNDGSQSDTAVGTVGAGGKKRRSSLSAKVVAIVSRRSRSTSQLSQTESGHKKLKSTIQRSTETGMAAEMRKMVRQPSRESTDGSINSYSSEGNLIFPGVRLGADSQFSDFLDGLGPAQLVGRQTLATPAMGDIQIGMEDKKGQLEVEVIRARSLTQKPGSKSTPAPYVKVYLLENGACI

SEQ ID NO: 72223 - protein, 219 aa, Homo sapiens
  Payload ID: 14301
  Gene Symbol: RIMS1
  Gene Name: regulating synaptic membrane exocytosis 1
  Uniprot ID: Q86UR5
  ENSP ID: ENSP00000402273
MAAEMRKMVRQPSRESTDGSINSYSSEGNLIFPGVRLGADSQFSDFLDGLGPAQLVGRQTLATPAMGDIQIGMEDKKGQLEVEVIRARSLTQKPGSKSTPAPYVKVYLLENGACIAKKKTRIARKTLDPLYQQSLVFDESPQGKVLQVIVWGDYGRMDHKCFMGVAQILLEELDLSSMVIGWYKLFPPSSLVDPTLTPLTRRASQSSLESSTGPPCIRS

SEQ ID NO: 72224 - protein, 760 aa, Homo sapiens
  Payload ID: 14301
  Gene Symbol: RIMS1
  Gene Name: regulating synaptic membrane exocytosis 1
  Uniprot ID: Q86UR5
  ENSP ID: ENSP00000411235
MPKDSGALLGLKVVGGKMTDLGRLGAFITKVKKGSLADVVGHLRAGDEVLEWNGKPLPGATNEEVYNIILESKSEPQVEIIVSRPIGDIPRIPESSHPPLESSSSSFESQKMERPSISVISPTSPGALKDAPQVLPGQLSVKLWYDKVGHQLIVNVLQATDLPARVDGRPRNPYVKMYFLPDRSDKSKRRTKTVKKILEPKWNQTFVYSHVHRRDFRERMLEITVWDQPRVQEEESEFLGEILIELETALLDDEPHWYKLQTHDESSLPLPQPSPFMPRRHIHGESSSKKLQRSQRISDSDISDYEVDDGIGVVPPVGYRSSARESKSTTLTVPEQQRTTHHRSRSVSPHRGNDQGKPRSRLPNVPLQRSLDEIHPTRRSRSPTRHHDASRSPVDHRTRDVDSQYLSEQDSELLMLPRAKRGRSAECLHTTSELQPFLDRARSASTNCLRPDTSLHSPERERHSRKSERSSIQKQTRKGTASDAERMHRQRSPTQSPPADTSFSSRRGRQLPQVPVRSGSIEQESGHKKLKSTIQRSTETGMAAEMRKMVRQPSRESTDGSINSYSSEGNLIFPGVRLGADSQFSDFLDGLGPAQLVGRQTLATPAMGDIQIGMEDKKGQLEVEVIRARSLTQKPGSKSTPAPYVKVYLLENGACIAKKKTRIARKTLDPLYQQSLVFDESPQGKVLQVIVWGDYGRMDHKCFMGVAQILLEELDLSSMVIGWYKLFPPSSLVDPTLTPLTRRASQSSLESSTGPPCIRS

SEQ ID NO: 72225 - protein, 817 aa, Homo sapiens
  Payload ID: 14301
  Gene Symbol: RIMS1
  Gene Name: regulating synaptic membrane exocytosis 1
  Uniprot ID: Q86UR5
  ENSP ID: ENSP00000428328
MCAPGIHVSSEGWEEVRSVDSEEGTIEARRAVAGDLDYYWLDPATWHSRETSPISSHPVTWQPSKEGDRLIGRVILNKRTTMPKDSGALLGLKVVGGKMTDLGRLGAFITKVKKGSLADVVGHLRAGDEVLEWNGKPLPGATNEEVYNIILESKSEPQVEIIVSRPIGDIPRIPESSHPPLESSSSSFESQKMERPSISVISPTSPGALKDAPQVLPGQLSVKLWYDKVGHQLIVNVLQATDLPARVDGRPRNPYVKMYFLPDRSDKSKRRTKTVKKILEPKWNQTFVYSHVHRRDFRERMLEITVWDQPRVQEEESEFLGEILIELETALLDDEPHWYKLQTHDESSLPLPQPSPFMPRRHIHGESSSKKLQRSQRISDSDISDYEVDDGIGVVPPVGYRSSARESKSTTLTVPEQQRTTHHRSRSVSPHRGNDQGKPRSRLPNVPLQRSLDEIHPTRRSRSPTRHHDASRSPVDHRTRDVDSQYLSEQDSELLMLPRAKRGRSAECLHTTSELQPFLDRARSASTNCLRPDTSLHSPERERMHRQRSPTQSPPADTSFSSRRGRQLPQVPVRSGSIEQESGHKKLKSTIQRSTETGMAAEMRKMVRQPSRESTDGSINSYSSEGNLIFPGVRLGADSQFSDFLDGLGPAQLVGRQTLATPAMGDIQIGMEDKKGQLEVEVIRARSLTQKPGSKSTPAPYVKVYLLENGACIAKKKTRIARKTLDPLYQQSLVFDESPQGKVLQVIVWGDYGRMDHKCFMGVAQILLEELDLSSMVIGWYKLFPPSSLVDPTLTPLTRRASQSSLESSTGPPCIRS

SEQ ID NO: 72226 - protein, 826 aa, Homo sapiens
  Payload ID: 14301
  Gene Symbol: RIMS1
  Gene Name: regulating synaptic membrane exocytosis 1
  Uniprot ID: Q86UR5
  ENSP ID: ENSP00000428367
MFAGFLQFLLLHTLHSGTGDLDYYWLDPATWHSRETSPISSHPVTWQPSKEGDRLIGRVILNKRTTMPKDSGALLGLKVVGGKMTDLGRLGAFITKVKKGSLADVVGHLRAGDEVLEWNGKPLPGATNEEVYNIILESKSEPQVEIIVSRPIGDIPRIPESSHPPLESSSSSFESQKMERPSISVISPTSPGALKDAPQVLPGQLSVKLWYDKVGHQLIVNVLQATDLPARVDGRPRNPYVKMYFLPDRSDKSKRRTKTVKKILEPKWNQTFVYSHVHRRDFRERMLEITVWDQPRVQEEESEFLGEILIELETALLDDEPHWYKLQTHDESSLPLPQPSPFMPRRHIHGESSSKKLQRSQRISDSDISDYEVDDGIGVVPPVGYRSSARESKSTTLTVPEQQRTTHHRSRSVSPHRGNDQGKPRSRLPNVPLQRSLDEIHPTRRSRSPTRHHDASRSPVDHRTRDVDSQYLSEQDSELLMLPRAKRGRSAECLHTTSELQPFLDRARSASTNCLRPDTSLHSPERERHSRKSERSSIQKQTRKGTASDAERMHRQRSPTQSPPADTSFSSRRGRQLPQVPVRSGSIEQESGHKKLKSTIQRSTETGMAAEMRKMVRQPSRESTDGSINSYSSEGNLIFPGVRLGADSQFSDFLDGLGPAQLVGRQTLATPAMGDIQIGMEDKKGQLEVEVIRARSLTQKPGSKSTPAPYVKVYLLENGACIAKKKTRIARKTLDPLYQQSLVFDESPQGKVLQVIVWGDYGRMDHKCFMGVAQILLEELDLSSMVIGWYKLFPPSSLVDPTLTPLTRRASQSSLESSTGPPCIRS

SEQ ID NO: 72227 - protein, 1692 aa, Homo sapiens
  Payload ID: 14301
  Gene Symbol: RIMS1
  Gene Name: regulating synaptic membrane exocytosis 1
  Uniprot ID: Q86UR5
  ENSP ID: ENSP00000428417
MSSAVGPRGPRPPTVPPPMQELPDLSHLTEEERNIIMAVMDRQKEEEEKEEAMLKCVVRDMAKPAACKTPRNAENQPHQPSPRLHQQFESYKEQVRKIGEEARRYQGEHKDDAPTCGICHKTKFADGCGHLCSYCRTKFCARCGGRVSLRSNNEDKVVMWVCNLCRKQQEILTKSGAWFFGSGPQQTSQDGTLSDTATGAGSEVPREKKARLQERSRSQTPLSTAAASSQDAAPPSAPPDRSKGAEPSQQALGPEQKQASSRSRSEPPRERKKTPGLSEQNGKGALKSERKRVPKTSAQPVEGAVEERERKERRESRRLEKGRSQDYPDTPEKRDEGKAADEEKQRKEEDYQTRYRSDPNLARYPVKPPPEEQQMRMHARVSRARHERRHSDVALPRTEAGAALPEGKAGKRAPAAARASPPDSPRAYSAERTAETRAPGAKQLTNHSPPAPRHGPVPAEAPELKAQEPLRKQSRLDPSSAVLMRKAKREKVETMLRNDSLSSDQSESVRPSPPKPHRSKRGGKKRQMSVSSSEEEGVSTPEYTSCEDVELESESVSEKGDLDYYWLDPATWHSRETSPISSHPVTWQPSKEGDRLIGRVILNKRTTMPKDSGALLGLKVVGGKMTDLGRLGAFITKVKKGSLADVVGHLRAGDEVLEWNGKPLPGATNEEVYNIILESKSEPQVEIIVSRPIGDIPRIPESSHPPLESSSSSFESQKMERPSISVISPTSPGALKDAPQVLPGQLSVKLWYDKVGHQLIVNVLQATDLPARVDGRPRNPYVKMYFLPDRSDKSKRRTKTVKKILEPKWNQTFVYSHVHRRDFRERMLEITVWDQPRVQEEESEFLGEILIELETALLDDEPHWYKLQTHDESSLPLPQPSPFMPRRHIHGESSSKKLQRSQRISDSDISDYEVDDGIGVVPPVGYRSSARESKSTTLTVPEQQRTTHHRSRSVSPHRGNDQGKPRSRLPNVPLQRSLDEIHPTRRSRSPTRHHDASRSPVDHRTRDVDSQYLSEQDSELLMLPRAKRGRSAECLHTTRHLVRHYKTLPPKMPLLQSSSHWNIYSSILPAHTKTKSVTRQDISLHHECFNSTVLRFTDEILVSELQPFLDRARSASTNCLRPDTSLHSPERERGRWSPSLDRRRPPSPRIQIQHASPENDRHSRKSERSSIQKQTRKGTASDAERVLPTCLSRRGHAAPRATDQPVIRGKHPARSRSSEHSSIRTLCSMHHLVPGGSAPPSPLLTRMHRQRSPTQSPPADTSFSSRRGRQLPQVPVRSGSIEQASLVVEERTRQMKMKVHRFKQTTGSGSSQELDREQYSKYNIHKDQYRSCDNVSAKSSDSDVSDVSAISRTSSASRLSSTSFMSEQSERPRGRISSFTPKMQGRRMGTSGRSIMKSTSVSGEMYTLEHNDGSQSDTAVGTVGAGGKKRRSSLSAKVVAIVSRRSRSTSQLSQTESGHKKLKSTIQRSTETGMAAEMRKMVRQPSRESTDGSINSYSSEGNLIFPGVRLGADSQFSDFLDGLGPAQLVGRQTLATPAMGDIQIGMEDKKGQLEVEVIRARSLTQKPGSKSTPAPYVKVYLLENGACIAKKKTRIARKTLDPLYQQSLVFDESPQGKVLQVIVWGDYGRMDHKCFMGVAQILLEELDLSSMVIGWYKLFPPSSLVDPTLTPLTRRASQSSLESSTGPPCIRS

SEQ ID NO: 72228 - protein, 610 aa, Homo sapiens
  Payload ID: 14301
  Gene Symbol: RIMS1
  Gene Name: regulating synaptic membrane exocytosis 1
  ENSP ID: ENSP00000429338
  MOD_RES (1)..(1): Any amino acid
XDYEVDDGIGVVPPVGYRSSARESKSTTLTVPEQQRTTHHRSRSVSPHRGNDQGKPRSRLPNVPLQRSLDEIHPTRRSRSPTRHHDASRSPVDHRTRDVDSQYLSEQDSELLMLPRAKRGRSAECLHTTRHSRKSERSSIQKQTRKGTASDAERMHRQRSPTQSPPADTSFSSRRGRQLPQVPVRSGSIEQEQEKYNSSTKASLVVEERTRQMKMKVHRFKQTTGSGSSQELDREQYSKYNIHKDQYRSCDNVSAKSSDSDVSDVSAISRTSSASRLSSTSFMSEQSERPRGRISSFTPKMQGRRMGTSGRSIMKSTSVSGEMYTLEHNDGSQSDTAVGTVGAGGKKRRSSLSAKVVAIVSRRSRSTSQLSQTESGHKKLKSTIQRSTETGMAAEMRKMVRQPSRESTDGSINSYSSEGNLIFPGVRLGADSQFSDFLDGLGPAQLVGRQTLATPAMGDIQIGMEDKKGQLEVEVIRARSLTQKPGSKSTPAPYVKVYLLENGACIAKKKTRIARKTLDPLYQQSLVFDESPQGKVLQVIVWGDYGRMDHKCFMGVAQILLEELDLSSMVIGWYKLFPPSSLVDPTLTPLTRRASQSSLESSTGPPCIRS

SEQ ID NO: 72229 - protein, 1475 aa, Homo sapiens
  Payload ID: 14301
  Gene Symbol: RIMS1
  Gene Name: regulating synaptic membrane exocytosis 1
  Uniprot ID: Q86UR5
  ENSP ID: ENSP00000429959
MSSAVGPRGPRPPTVPPPMQELPDLSHLTEEERNIIMAVMDRQKEEEEKEEAMLKCVVRDMAKPAACKTPRNAENQPHQPSPRLHQQFESYKEQVRKIGEEARRYQGEHKDDAPTCGICHKTKFADGCGHLCSYCRTKFCARCGGRVSLRSNNEDKVVMWVCNLCRKQQEILTKSGAWFFGSGPQQTSQDGTLSDTATGAGSEVPREKKARLQERSRSQTPLSTAAASSQDAAPPSAPPDRSKGAEPSQQALGPEQKQASSRSRSEPPRERKKTPGLSEQNGKGALKSERKRVPKTSAQPVEGAVEERERKERRESRRLEKGRSQDYPDTPEKRDEGKAADEEKQRKEEDYQTRYRSDPNLARYPVKPPPEEQQMRMHARVSRARHERRHSDVALPRTEAGAALPEGKAGKRAPAAARASPPDSPRAYSAERTAETRAPGAKQLTNHSPPAPRHGPVPAEAPELKAQEPLRKQSRLDPSSAVLMRKAKREKVETMLRNDSLSSDQSESVRPSPPKPHRSKRGGKKRQMSVSSSEEEGVSTPEYTSCEDVELESESVSEKGDLDYYWLDPATWHSRETSPISSHPVTWQPSKEGDRLIGRVILNKRTTMPKDSGALLGLKVVGGKMTDLGRLGAFITKVKKGSLADVVGHLRAGDEVLEWNGKPLPGATNEEVYNIILESKSEPQVEIIVSRPIGDIPRIPESSHPPLESSSSSFESQKMERPSISVISPTSPGALKDAPQVLPGQLSVKLWYDKVGHQLIVNVLQATDLPARVDGRPRNPYVKMYFLPDRSDKSKRRTKTVKKILEPKWNQTFVYSHVHRRDFRERMLEITVWDQPRVQEEESEFLGEILIELETALLDDEPHWYKLQTHDESSLPLPQPSPFMPRRHIHGESSSKKLQRSQRISDSDISDYEVDDGIGVVPPGYRSSARESKSTTLTVPEQQRTTHHRSRSVSPHRGNDQGKPRSRLPNVPLQRSLDEIHPTRRSRSPTRHHDASRSPVDHRTRDVDSQYLSEQDSELLMLPRAKRGRSAECLHTTRMHRQRSPTQSPPADTSFSSRRGRQLPQVPVRSGSIEQASLVVEERTRQMKMKVHRFKQTTGSGSSQELDREQYSKYNIHKDQYRSCDNVSAKSSDSDVSDVSAISRTSSASRLSSTSFMSEQSERPRGRIRRMGTSGRSIMKSTSVSGEMYTLEHNDGSQSDTAVGTVGAGGKKRRSSLSAKVVAIVSRRSRSTSQLSQTESGHKKLKSTIQRSTETGMAAEMRKMVRQPSRESTDGSINSYSSEGNLIFPGVRLGADSQFSDFLDGLGPAQLVGRQTLATPAMGDIQIGMEDKKGQLEVEVIRARSLTQKPGSKSTPAPYVKVYLLENGACIAKKKTRIARKTLDPLYQQSLVFDESPQGKVLQVIVWGDYGRMDHKCFMGVAQILLEELDLSSMVIGWYKLFPPSSLVDPTLTPLTRRASQSSLESSTGPPCIRS

SEQ ID NO: 72230 - protein, 1481 aa, Homo sapiens
  Payload ID: 14301
  Gene Symbol: RIMS1
  Gene Name: regulating synaptic membrane exocytosis 1
  Uniprot ID: Q86UR5
  ENSP ID: ENSP00000430101
MSSAVGPRGPRPPTVPPPMQELPDLSHLTEEERNIIMAVMDRQKEEEEKEEAMLKCVVRDMAKPAACKTPRNAENQPHQPSPRLHQQFESYKEQVRKIGEEARRYQGEHKDDAPTCGICHKTKFADGCGHLCSYCRTKFCARCGGRVSLRSNNEDKVVMWVCNLCRKQQEILTKSGAWFFGSGPQQTSQDGTLSDTATGAGSEVPREKKARLQERSRSQTPLSTAAASSQDAAPPSAPPDRSKGAEPSQQALGPEQKQASSRSRSEPPRERKKTPGLSEQNGKGALKSERKRVPKTSAQPVEGAVEERERKERRESRRLEKGRSQDYPDTPEKRDEGKAADEEKQRKEEDYQTRYRSDPNLARYPVKPPPEEQQMRMHARVSRARHERRHSDVALPRTEAGAALPEGKAGKRAPAAARASPPDSPRAYSAERTAETRAPGAKQLTNHSPPAPRHGPVPAEAPELKAQEPLRKQSRLDPSSAVLMRKAKREKVETMLRNDSLSSDQSESVRPSPPKPHRSKRGGKKRQMSVSSSEEEGVSTPEYTSCEDVELESESVSEKGDLDYYWLDPATWHSRETSPISSHPVTWQPSKEGDRLIGRVILNKRTTMPKDSGALLGLKVVGGKMTDLGRLGAFITKVKKGSLADVVGHLRAGDEVLEWNGKPLPGATNEEVYNIILESKSEPQVEIIVSRPIGDIPRIPESSHPPLESSSSSFESQKMERPSISVISPTSPGALKDAPQVLPGQLSVKLWYDKVGHQLIVNVLQATDLPARVDGRPRNPYVKMYFLPDRSDKSKRRTKTVKKILEPKWNQTFVYSHVHRRDFRERMLEITVWDQPRVQEEESEFLGEILIELETALLDDEPHWYKLQTHDESSLPLPQPSPFMPRRHIHGESSSKKLQRSQRISDSDISDYEVDDGIGVVPPVGYRSSARESKSTTLTVPEQQRTTHHRSRSVSPHRGNDQGKPRSRLPNVPLQRSLDEIHPTRRSRSPTRHHDASRSPVDHRTRDVDSQYLSEQDSELLMLPRAKRGRSAECLHTTSELQPFLDRARSASTNCLRPDTSLHSPERERMHRQRSPTQSPPADTSFSSRRGRQLPQVPVRSGSIEQASLVVEERTRQMKMKVHRFKQTTGSGSSQELDREQYSKYNIHKDQYRSCDNVSAKSSDSDVSDVSAISRTSSASRLSSTSFMSEQSERPRGRISSFTPKMQGRRMGTSGRSIMKSTSVSGEMYTLEHNDGSQSDTAVGTVGAGGKKRRSSLSAKVVAIVSRRSRSTSQLSQTESGHKKLKSTIQRSTETGMAAEMRKMVRQPSRESTDGSINSYSSEGNLIFPGVRLGADSQFSDFLDGLGPAQLVGRQTLATPAMAPYVKVYLLENGACIAKKKTRIARKTLDPLYQQSLVFDESPQGKVLQVIVWGDYGRMDHKCFMGVAQILLEELDLSSMVIGWYKLFPPSSLVDPTLTPLTRRASQSSLESSTGPPCIRS

SEQ ID NO: 72231 - protein, 1038 aa, Homo sapiens
  Payload ID: 14301
  Gene Symbol: RIMS1
  Gene Name: regulating synaptic membrane exocytosis 1
  ENSP ID: ENSP00000430359
  MOD_RES (1)..(1): Any amino acid
XYSAERTAETRAPGAKQLTNHSPPAPRHGPVPAEAPELKAQEPLRKQSRLDPSSAVLMRKAKREKVETMLRNDSLSSDQSESVRPSPPKPHRSKRGGKKRQMSVSSSEEEGVSTPEYTSCEDVELESESVSEKGDLDYYWLDPATWHSRETSPISSHPVTWQPSKEGDRLIGRVILNKRTTMPKDSGALLGLKVVGGKMTDLGRLGAFITKVKKGSLADVVGHLRAGDEVLEWNGKPLPGATNEEVYNIILESKSEPQVEIIVSRPIGDIPRIPESSHPPLESSSSSFESQKMERPSISVISPTSPGALKDAPQVLPGQLSVKLWYDKVGHQLIVNVLQATDLPARVDGRPRNPYVKMYFLPDRSDKSKRRTKTVKKILEPKWNQTFVYSHVHRRDFRERMLEITVWDQPRVQEEESEFLGEILIELETALLDDEPHWYKLQTHDESSLPLPQPSPFMPRRHIHGESSSKKLQRSQRISDSDISDYEVDDGIGVVPPVGYRSSARESKSTTLTVPEQQRTTHHRSRSVSPHRGNDQGKPRSRLPNVPLQRSLDEIHPTRRSRSPTRHHDASRSPVDHRTRDVDSQYLSEQDRMHRQRSPTQSPPADTSFSSRRGRQLPQVPVRSGSIEQASLVVEERTRQMKMKVHRFKQTTGSGSSQELDREQYSKYNIHKDQYRSCDNVSAKSSDSDVSDVSAISRTSSASRLSSTSFMSEQSERPRGRISSFTPKMQGRRMGTSGRSIMKSTSVSGEMYTLEHNDGSQSDTAVGTVGAGGKKRRSSLSAKVVAIVSRRSRSTSQLSQTESGHKKLKSTIQRSTETGMAAEMRKMVRQPSRESTDGSINSYSSEGNLIFPGVRLGADSQFSDFLDGLGPAQLVGRQTLATPAMGDIQIGMEDKKGQLEVEVIRARSLTQKPGSKSTPAPYVKVYLLENGACIAKKKTRIARKTLDPLYQQSLVFDESPQGKVLQVIVWGDYGRMDHKCFMGVAQILLEELDLSSMVIGWYKLFPPSSLVDPTLTPLTRRASQSSLESSTGPPCIRS

SEQ ID NO: 72232 - protein, 1371 aa, Homo sapiens
  Payload ID: 14301
  Gene Symbol: RIMS1
  Gene Name: regulating synaptic membrane exocytosis 1
  Uniprot ID: Q86UR5
  ENSP ID: ENSP00000430408
MSSAVGPRGPRPPTVPPPMQELPDLSHLTEEERNIIMAVMDRQKEEEEKEEAMLKCVVRDMAKPAACKTPRNAENQPHQPSPRLHQQFESYKEQVRKIGEEARRYQGEHKDDAPTCGICHKTKFADGCGHLCSYCRTKFCARCGGRVSLRSNNEDKVVMWVCNLCRKQQEILTKSGAWFFGSGPQQTSQDGTLSDTATGAGSEVPREKKARLQERSRSQTPLSTAAASSQDAAPPSAPPDRSKGAEPSQQALGPEQKQASSRSRSEPPRERKKTPGLSEQNGKGALKSERKRVPKTSAQPVEGAVEERERKERRESRRLEKGRSQDYPDTPEKRDEGKAADEEKQRKEEDYQTRYRSDPNLARYPVKPPPEEQQMRMHARVSRARHERRHSDVALPRTEAGAALPEGKAGKRAPAAARASPPDSPRAYSAERTAETRAPGAKQLTNHSPPAPRHGPVPAEAPELKAQEPLRKQSRLDPSSAVLMRKAKREKVETMLRNDSLSSDQSESVRPSPPKPHRSKRGGKKRQMSVSSSEEEGVSTPEYTSCEDVELESESVSEKGDLDYYWLDPATWHSRETSPISSHPVTWQPSKEGDRLIGRVILNKRTTMPKDSGALLGLKVVGGKMTDLGRLGAFITKVKKGSLADVVGHLRAGDEVLEWNGKPLPGATNEEVYNIILESKSEPQVEIIVSRPIGDIPRIPESSHPPLESSSSSFESQKMERPSISVISPTSPGALKDAPQVLPGQLSVKLWYDKVGHQLIVNVLQATDLPARVDGRPRNPYVKMYFLPDRSDKSKRRTKTVKKILEPKWNQTFVYSHVHRRDFRERMLEITVWDQPRVQEEESEFLGEILIELETALLDDEPHWYKLQTHDESSLPLPQPSPFMPRRHIHGESSSKKLQRSQRISDSDISDYEVDDGIGVVPPVGYRSSARESKSTTLTVPEQQRTTHHRSRSVSPHRGNDQGKPRSRLPNVPLQRSLDEIHPTRRSRSPTRHHDASRSPVDHRTRDVDSQYLSEQDSELLMLPRAKRGRSAECLHTTSELQPFLDRARSASTNCLRPDTSLHSPERERGRWSPSLDRRRPPSPRIQIQHASPENDRMHRQRSPTQSPPADTSFSSRRGRQLPQVPVRSGSIEQESGHKKLKSTIQRSTETGMAAEMRKMVRQPSRESTDGSINSYSSEGNLIFPGVRLGADSQFSDFLDGLGPAQLVGRQTLATPAMGDIQIGMEDKKGQLEVEVIRARSLTQKPGSKSTPAPYVKVYLLENGACIAKKKTRIARKTLDPLYQQSLVFDESPQGKVLQVIVWGDYGRMDHKCFMGVAQILLEELDLSSMVIGWYKLFPPSSLVDPTLTPLTRRASQSSLESSTGPPCIRS

SEQ ID NO: 72233 - protein, 1342 aa, Homo sapiens
  Payload ID: 14301
  Gene Symbol: RIMS1
  Gene Name: regulating synaptic membrane exocytosis 1
  Uniprot ID: Q86UR5
  ENSP ID: ENSP00000430502
MSSAVGPRGPRPPTVPPPMQELPDLSHLTEEERNIIMAVMDRQKEEEEKEEAMLKCVVRDMAKPAACKTPRNAENQPHQPSPRLHQQFESYKEQVRKIGEEARRYQGEHKDDAPTCGICHKTKFADGCGHLCSYCRTKFCARCGGRVSLRSNNEDKVVMWVCNLCRKQQEILTKSGAWFFGSGPQQTSQDGTLSDTATGAGSEVPREKKARLQERSRSQTPLSTAAASSQDAAPPSAPPDRSKGAEPSQQALGPEQKQASSRSRSEPPRERKKTPGLSEQNGKGALKSERKRVPKTSAQPVEGAVEERERKERRESRRLEKGRSQDYPDTPEKRDEGKAADEEKQRKEEDYQTRYRSDPNLARYPVKPPPEEQQMRMHARVSRARHERRHSDVALPRTEAGAALPEGKAGKRAPAAARASPPDSPRAYSAERTAETRAPGAKQLTNHSPPAPRHGPVPAEAPELKAQEPLRKQSRLDPSSAVLMRKAKREKVETMLRNDSLSSDQSESVRPSPPKPHRSKRGGKKRQMSVSSSEEEGVSTPEYTSCEDVELESESVSEKGDLDYYWLDPATWHSRETSPISSHPVTWQPSKEGDRLIGRVILNKRTTMPKDSGALLGLKVVGGKMTDLGRLGAFITKVKKGSLADVVGHLRAGDEVLEWNGKPLPGATNEEVYNIILESKSEPQVEIIVSRPIGDIPRIPESSHPPLESSSSSFESQKMERPSISVISPTSPGALKDAPQVLPGQLSVKLWYDKVGHQLIVNVLQATDLPARVDGRPRNPYVKMYFLPDRSDKSKRRTKTVKKILEPKWNQTFVYSHVHRRDFRERMLEITVWDQPRVQEEESEFLGEILIELETALLDDEPHWYKLQTHDESSLPLPQPSPFMPRRHIHGESSSKKLQRSQRISDSDISDYEVDDGIGVVPPGYRSSARESKSTTLTVPEQQRTTHHRSRSVSPHRGNDQGKPRSRLPNVPLQRSLDEIHPTRRSRSPTRHHDASRSPVDHRTRDVDSQYLSEQDSELLMLPRAKRGRSAECLHTTSELQPFLDRARSASTNCLRPDTSLHSPERERMHRQRSPTQSPPADTSFSSRRGRQLPQVPVRSGSIEQESGHKKLKSTIQRSTETGMAAEMRKMVRQPSRESTDGSINSYSSEGNLIFPGVRLGADSQFSDFLDGLGPAQLVGRQTLATPAMGDIQIGMEDKKGQLEVEVIRARSLTQKPGSKSTPAPYVKVYLLENGACIAKKKTRIARKTLDPLYQQSLVFDESPQGKVLQVIVWGDYGRMDHKCFMGVAQILLEELDLSSMVIGWYKLFPPSSLVDPTLTPLTRRASQSSLESSTGPPCIRS

SEQ ID NO: 72234 - protein, 1291 aa, Homo sapiens
  Payload ID: 14301
  Gene Symbol: RIMS1
  Gene Name: regulating synaptic membrane exocytosis 1
  Uniprot ID: Q86UR5
  ENSP ID: ENSP00000430932
MSSAVGPRGPRPPTVPPPMQELPDLSHLTEEERNIIMAVMDRQKEEEEKEEAMLKCVVRDMAKPAACKTPRNAENQPHQPSPRLHQQFESYKEQVRKIGEEARRYQGEHKDDAPTCGICHKTKFADGCGHLCSYCRTKFCARCGGRVSLRSNNEDKVVMWVCNLCRKQQEILTKSGAWFFGSGPQQTSQDGTLSDTATGAGSEVPREKKARLQERSRSQTPLSTAAASSQDAAPPSAPPDRSKGAEPSQQALGPEQKQASSRSRSEPPRERKKTPGLSEQNGKGALKSERKRVPKTSAQPVEGAVEERERKERRESRRLEKGRSQDYPDTPEKRDEGKAADEEKQRKEEDYQTRYRSDPNLARYPVKPPPEEQQMRMHARVSRARHERRHSDVALPRTEAGAALPEGKAGKRAPAAARASPPDSPRAYSAERTAETRAPGAKQLTNHSPPAPRHGPVPAEAPELKAQEPLRKQSRLDPSSAVLMRKAKREKVETMLRNDSLSSDQSESVRPSPPKPHRSKRGGKKRQMSVSSSEEEGVSTPEYTSCEDVELESESVSEKGDLDYYWLDPATWHSRETSPISSHPVTWQPSKEGDRLIGRVILNKRTTMPKDSGALLGLKVVGGKMTDLGRLGAFITKVKKGSLADVVGHLRAGDEVLEWNGKPLPGATNEEVYNIILESKSEPQVEIIVSRPIGDIPRIPESSHPPLESSSSSFESQKMERPSISVISPTSPGALKDAPQVLPGQLSVKLWYDKVGHQLIVNVLQATDLPARVDGRPRNPYVKMYFLPDRSDKSKRRTKTVKKILEPKWNQTFVYSHVHRRDFRERMLEITVWDQPRVQEEESEFLGEILIELETALLDDEPHWYKLQTHDESSLPLPQPSPFMPRRHIHGESSSKKLQRSQRISDSDISDYEVDDGIGVVPPGYRSSARESKSTTLTVPEQQRTTHHRSRSVSPHRGNDQGKPRSRLPNVPLQRSLDEIHPTRRSRSPTRHHDASRSPVDHRTRDVDSQYLSEQDRMHRQRSPTQSPPADTSFSSRRGRQLPQVPVRSGSIEQESGHKKLKSTIQRSTETGMAAEMRKMVRQPSRESTDGSINSYSSEGNLIFPGVRLGADSQFSDFLDGLGPAQLVGRQTLATPAMGDIQIGMEDKKGQLEVEVIRARSLTQKPGSKSTPAPYVKVYLLENGACIAKKKTRIARKTLDPLYQQSLVFDESPQGKVLQVIVWGDYGRMDHKCFMGVAQILLEELDLSSMVIGWYKLFPPSSLVDPTLTPLTRRASQSSLESSTGPPCIRS

SEQ ID NO: 72235 - protein, 1188 aa, Homo sapiens
  Payload ID: 14302
  Gene Symbol: RIMS2
  Gene Name: regulating synaptic membrane exocytosis 2
  Uniprot ID: Q9UQ26
  ENSP ID: ENSP00000262231
MQFETLRQVCNSVLSHFHGVFSSPPNILQNELFGQTLNNARKRSPSVSRDQNRRYDQREEREEYSQYATSDTAMPRSPSDYADRRSQHEPQFYEDSDHLSYRDSNRRSHRHSKEYIVDDEDVESRDEYERQRREEEYQSRYRSDPNLARYPVKPQPYEEQMRIHAEVSRARHERRHSDVSLANADLEDSRISMLRMDRPSRQRSISERRAAMENQRSYSMERTREAQGPSSYAQRTTNHSPPTPRRSPLPIDRPDLRRTDSLRKQHHLDPSSAVRKTKREKMETMLRNDSLSSDQSESVRPPPPKPHKSKKGGKMRQISLSSSEEELASTPEYTSCDDVEIESESVSEKGDSQKGKRKTSEQAVLSDSNTRSERQKEMMYFGGHSLEEDLEWSEPQIKDSGVDTCSSTTLNEEHSHSDKHPVTWQPSKDGDRLIGRILLNKRLKDGSVPRDSGAMLGLKVVGGKMTESGRLCAFITKVKKGSLADTVGHLRPGDEVLEWNGRLLQGATFEEVYNIILESKPEPQVELVVSRPIGDIPRIPDSTHAQLESSSSSFESQKMDRPSISVTSPMSPGMLRDVPQFLSGQLSIKLWFDKVGHQLIVTILGAKDLPSREDGRPRNPYVKIYFLPDRSDKNKRRTKTVKKTLEPKWNQTFIYSPVHRREFRERMLEITLWDQARVREEESEFLGEILIELETALLDDEPHWYKLQTHDVSSLPLPHPSPYMPRRQLHGESPTRRLQRSKRISDSEVSDYDCDDGIGVVSDYRHDGRDLQSSTLSVPEQVMSSNHCSPSGSPHRVDVIGRTRSWSPSVPPPQSRNVEQGLRGTRTMTGHYNTISRMDRHRVMDDHYSPDRDRDCEAADRQPYHRSRSTEQRPLLERTTTRSRSTERPDTNLMRSMPSLMTGRSAPPSPALSRSHPRTGSVQTSPSSTPVAGRRGRQLPQLPPKGTLDRKAGGKKLRSTVQRSTETGLAVEMRNWMTRQASRESTDGSMNSYSSEGNLIFPGVRLASDSQFSDFLDGLGPAQLVGRQTLATPAMGDIQVGMMDKKGQLEVEIIRARGLVVKPGSKTLPAPYVKVYLLDNGVCIAKKKTKVARKTLEPLYQQLLSFEESPQGKVLQIIVWGDYGRMDHKSFMGVAQILLDELELSNMVIGWFKLFPPSSLVDPTLAPLTRRASQSSLESSTGPSYSRS

SEQ ID NO: 72236 - protein, 285 aa, Homo sapiens
  Payload ID: 14302
  Gene Symbol: RIMS2
  Gene Name: regulating synaptic membrane exocytosis 2
  Uniprot ID: Q9UQ26
  ENSP ID: ENSP00000342051
MGRQGLGGASAAGRSMQRSQSRSSLSASFEALAGYFPCMNSLEEEEGEAGGKKLRSTVQRSTETGLAVEMRNWMTRQASRESTDGSMNSYSSEGNLIFPGVRLASDSQFSDFLDGLGPAQLVGRQTLATPAMGDIQVGMMDKKGQLEVEIIRARGLVVKPGSKTLPAPYVKVYLLDNGVCIAKKKTKVARKTLEPLYQQLLSFEESPQGKVLQIIVWGDYGRMDHKSFMGVAQILLDELELSNMVIGWFKLFPPSSLVDPTLAPLTRRASQSSLESSTGPSYSRS

SEQ ID NO: 72237 - protein, 470 aa, Homo sapiens
  Payload ID: 14302
  Gene Symbol: RIMS2
  Gene Name: regulating synaptic membrane exocytosis 2
  ENSP ID: ENSP00000384892
MPRSPSDYADRRSQHEPQFYEDSDHLSYRDSNRRSHRHSKEYIVDDEDVESRDEYERQRREEEYQSRYRSDPNLARYPVKPQPYEEQMRIHAEVSRARHERRHSDVSLANADLEDSRISMLRMDRPSRQRSISERRAAMENQRSYSMERTREAQGPSSYAQRTTNHSPPTPRRSPLPIDRPDLRRTDSLRKQHHLDPSSAVRKTKREKMETMLRNDSLSSDQSESVRPPPPKPHKSKKGGKMRQISLSSSEEELASTPEYTSCDDVEIESESVSEKGDMDYNWLDHTSWHSSEASPMSLHPVTWQPSKDGDRLIGRILLNKRLKDGSVPRDSGAMLGLKVVGGKMTESGRLCAFITKVKKGSLADTVGHLRPGDEVLEWNGRLLQGATFEEVYNIILESKPEPQVELVVSRPIGDIPRIPDSTHAQLESSSSSFESQKMDSFYFCYLSHESWNVEGCPTVLIRTTFKPKP

SEQ ID NO: 72238 - protein, 1253 aa, Homo sapiens
  Payload ID: 14302
  Gene Symbol: RIMS2
  Gene Name: regulating synaptic membrane exocytosis 2
  ENSP ID: ENSP00000386228
MQFETLRQVCNSVLSHFHGVFSSPPNILQNELFGQTLNNARKRSPSVSRDQNRRYDQREEREEYSQYATSDTAMPRSPSDYADRRSQHEPQFYEDSDHLSYRDSNRRSHRHSKEYIVDDEDVESRDEYERQRREEEYQSRYRSDPNLARYPVKPQPYEEQMRIHAEVSRARHERRHSDVSLANADLEDSRISMLRMDRPSRQRSISERRAAMENQRSYSMERTREAQGPSSYAQRTTNHSPPTPRRSPLPIDRPDLRRTDSLRKQHHLDPSSAVRKTKREKMETMLRNDSLSSDQSESVRPPPPKPHKSKKGGKMRQISLSSSEEELASTPEYTSCDDVEIESESVSEKGDMDYNWLDHTSWHSSEASPMSLHPVTWQPSKDGDRLIGRILLNKRLKDGSVPRDSGAMLGLKVVGGKMTESGRLCAFITKVKKGSLADTVGHLRPGDEVLEWNGRLLQGATFEEVYNIILESKPEPQVELVVSRPIGDIPRIPDSTHAQLESSSSSFESQKMDRPSISVTSPMSPGMLRDVPQFLSGQLSIKLWFDKVGHQLIVTILGAKDLPSREDGRPRNPYVKIYFLPDRSDKNKRRTKTVKKTLEPKWNQTFIYSPVHRREFRERMLEITLWDQARVREEESEFLGEILIELETALLDDEPHWYKLQTHDVSSLPLPHPSPYMPRRQLHGESPTRRLQRSKRISDSEVSDYDCDDGIGVVSDYRHDGRDLQSSTLSVPEQVMSSNHCSPSGSPHRVDVIGRTRSWSPSVPPPQSRNVEQGLRGTRTMTGHYNTISRMDRHRVMDDHYSPDRDSHFLTLPRSRYSQTIDHHHRDGRDCEAADRQPYHRSRSTEQRPLLERTTTRSRSTERPDTNLMRSMPSLMTGRSAPPSPALSRSHPRTGSVQTSPSSTPVAGRRGRQLPQLPPKGTLDRNNGVKEIEPYEELDSTRRRYAGTMDIEERNRQMKINKYKQVAGSDPRLEQDYHSKYRSGWDPHRGADNVSTKSSDSDVSDISAVSRTSSASRFSSTSYMSVQSERPGGNKKISVFTSKMQSRQMGISGKNMTKSTSISGDMCSLEKNDGSQSDTAVGTLGTSGKKRRSSLGAKMVAIVGLSRKSRSASQLSQTEAGGKKLRSTVQRSTETGLAVEMRNWMTRQASRESTDGSMNSYSSEGNLIFPGVRLASDSQFSDFLDGLGPAQLVGRQTLATPAMGDIQVGMMDKKGQLEVEIIRARGLVVKPGSKTLPAPYVKVYLLDNGVCIA

SEQ ID NO: 72239 - protein, 1367 aa, Homo sapiens
  Payload ID: 14302
  Gene Symbol: RIMS2
  Gene Name: regulating synaptic membrane exocytosis 2
  ENSP ID: ENSP00000390665
MLDRCALVEQRKRSPSVSRDQNRRYDQREEREEYSQYATSDTAMPRSPSDYADRRSQHEPQFYEDSDHLSYRDSNRRSHRHSKEYIVDDEDVESRDEYERQRREEEYQSRYRSDPNLARYPVKPQPYEEQMRIHAEVSRARHERRHSDVSLANADLEDSRISMLRMDRPSRQRSISERRAAMENQRSYSMERTREAQGPSSYAQRTTNHSPPTPRRSPLPIDRPDLRRTDSLRKQHHLDPSSAVRKTKREKMETMLRNDSLSSDQSESVRPPPPKPHKSKKGGKMRQISLSSSEEELASTPEYTSCDDVEIESESVSEKGDMDYNWLDHTSWHSSEASPMSLHPVTWQPSKDGDRLIGRILLNKRLKDGSVPRDSGAMLGLKVVGGKMTESGRLCAFITKVKKGSLADTVGHLRPGDEVLEWNGRLLQGATFEEVYNIILESKPEPQVELVVSRPIGDIPRIPDSTHAQLESSSSSFESQKMDRPSISVTSPMSPGMLRDVPQFLSGQLSSQSLSRRTTPFVPRVQIKLWFDKVGHQLIVTILGAKDLPSREDGRPRNPYVKIYFLPDRSDKNKRRTKTVKKTLEPKWNQTFIYSPVHRREFRERMLEITLWDQARVREEESEFLGEILIELETALLDDEPHWYKLQTHDVSSLPLPHPSPYMPRRQLHGESPTRRLQRSKRISDSEVSDYDCDDGIGVVSDYRHDGRDLQSSTLSVPEQVMSSNHCSPSGSPHRVDVIGRTRSWSPSVPPPQSRNVEQGLRGTRTMTGHYNTISRMDRHRVMDDHYSPDRDSHFLTLPRSRYSQTIDHHHRDGRSHPRTGSVQTSPSSTPVAGRRGRQLPQLPPKGTLDRNNGVKEIEPYEEELDSTRRRYAGTMDIEERNRQMKINKYKQVAGSDPRLEQDYHSKYRSGWDPHRGADNVSTKSSDSDVSDISAVSRTSSASRFSSTSYMSVQSERPGGNKKIRPKGIEEGGKEGDKHEEIVHEKEEVKEERINENEKGKEIAKTCNKEKNRESGDEEKTQDIHEQGKEKEQWNKEDLQRRFSQDDTSVFTSKMQSRQMGISGKNMTKSTSISGDMCSLEKNDGSQSDTAVGTLGTSGKKRRSSLGAKMVAIVGLSRKSRSASQLSQTEAGGKKLRSTVQRSTETGLAVEMRNWMTRQASRESTDGSMNSYSSEGNLIFPGVRLASDSQFSDFLDGLGPAQLVGRQTLATPAMGDIQVGMMDKKGQLEVEIIRARGLVVKPGSKTLPAPYVKVYLLDNGVCIAKKKTKVARKTLEPLYQQLLSFEESPQGKVLQIIVWGDYGRMDHKSFMGVAQILLDELELSNMVIGWFKLFPPSSLVDPTLAPLTRRASQSSLESSTGPSYSRS

SEQ ID NO: 72240 - protein, 1163 aa, Homo sapiens
  Payload ID: 14302
  Gene Symbol: RIMS2
  Gene Name: regulating synaptic membrane exocytosis 2
  Uniprot ID: Q9UQ26
  ENSP ID: ENSP00000423559
MQFETLRQVCNSVLSHFHGVFSSPPNILQNELFGQTLNNARKRSPSVSRDQNRRYDQREEREEYSQYATSDTAMPRSPSDYADRRSQHEPQFYEDSDHLSYRDSNRRSHRHSKEYIVDDEDVESRDEYERQRREEEYQSRYRSDPNLARYPVKPQPYEEQMRIHAEVSRARHERRHSDVSLANADLEDSRISMLRMDRPSRQRSISERRAAMENQRSYSMERTREAQGPSSYAQRTTNHSPPTPRRSPLPIDRPDLRRTDSLRKQHHLDPSSAVRKTKREKMETMLRNDSLSSDQSESVRPPPPKPHKSKKGGKMRQISLSSSEEELASTPEYTSCDDVEIESESVSEKGDMDYNWLDHTSWHSSEASPMSLHPVTWQPSKDGDRLIGRILLNKRLKDGSVPRDSGAMLGLKVVGGKMTESGRLCAFITKVKKGSLADTVGHLRPGDEVLEWNGRLLQGATFEEVYNIILESKPEPQVELVVSRPIGDIPRIPDSTHAQLESSSSSFESQKMDRPSISVTSPMSPGMLRDVPQFLSGQLSIKLWFDKVGHQLIVTILGAKDLPSREDGRPRNPYVKIYFLPDRSDKNKRRTKTVKKTLEPKWNQTFIYSPVHRREFRERMLEITLWDQARVREEESEFLGEILIELETALLDDEPHWYKLQTHDVSSLPLPHPSPYMPRRQLHGESPTRRLQRSKRISDSEVSDYDCDDGIGVVSDYRHDGRDLQSSTLSVPEQVMSSNHCSPSGSPHRVDVIGRTRSWSPSVPPPQSRNVEQGLRGTRTMTGHYNTISRMDRHRVMDDHYSPDRDSHFLTLPRSRYSQTIDHHHRDGRDCEAADRQPYHRSRSTEQRPLLERTTTRSRSTERPDTNLMRSMPSLMTGRSAPPSPALSRSHPRTGSVQTSPSSTPVAGRRGRQLPQLPPKGTLDRKAGGKKLRSTVQRSTETGLAVEMRNWMTRQASRESTDGSMNSYSSEGNLIFPGVRLASDSQFSDFLDGLGPAQLVGRQTLATPAMGDIQVGMMDKKGQLEVEIIRARGLVVKPGSKTLPAPYVKVYLLDNGVCIAKKKTKVARKTLEPLYQQLLSFEESPQGKVLQIIVWGDYGRMDHKSFMGVAQILLDELELSNMVIGWFKLFPPSSLVDPTLAPLTRRASQSSLESSTGPSYSRS

SEQ ID NO: 72241 - protein, 665 aa, Homo sapiens
  Payload ID: 14302
  Gene Symbol: RIMS2
  Gene Name: regulating synaptic membrane exocytosis 2
  ENSP ID: ENSP00000425205
MQFETLRQVCNSVLSHFHGVFSSPPNILQNELFGQTLNNARKRSPSVSRDQNRRYDQREEREEYSQYATSDTAMPRSPSDYADRRSQHEPQFYEDSDHLSYRDSNRRSHRHSKEYIVDDEDVESRDEYERQRREEEYQSRYRSDPNLARYPVKPQPYEEQMRIHAEVSRARHERRHSDVSLANADLEDSRISMLRMDRPSRQRSISERRAAMENQRSYSMERTREAQGPSSYAQRTTNHSPPTPRRSPLPIDRPDLRRTDSLRKQHHLDPSSAVRKTKREKMETMLRNDSLSSDQSESVRPPPPKPHKSKKGGKMRQISLSSSEEELASTPEYTSCDDVEIESESVSEKGDMDYNWLDHTSWHSSEASPMSLHPVTWQPSKDGDRLIGRILLNKRLKDGSVPRDSGAMLGLKVVGGKMTESGRLCAFITKVKKGSLADTVGHLRPGDEVLEWNGRLLQGATFEEVYNIILESKPEPQVELVVSRPIGDIPRIPDSTHAQLESSSSSFESQKMDRPSISVTSPMSPGMLRDVPQFLSGQLSIKLWFDKVGHQLIVTILGAKDLPSREDGRPRNPYVKIYFLPDRSDKNKRRTKTVKKTLEPKWNQTFIYSPVHRREFRERMLEITLWDQARVREEESEFLGEILIELETALLDDEPHWYKLQTHDV

SEQ ID NO: 72242 - protein, 1349 aa, Homo sapiens
  Payload ID: 14302
  Gene Symbol: RIMS2
  Gene Name: regulating synaptic membrane exocytosis 2
  Uniprot ID: Q9UQ26
  ENSP ID: ENSP00000427018
MSAPVGPRGRLAPIPAASQPPLQPEMPDLSHLTEEERKIILAVMDRQKKEEEKEQSVLKKLHQQFEMYKEQVKKMGEESQQQQEQKGDAPTCGICHKTKFADGCGHNCSYCQTKFCARCGGRVSLRSNKVMWVCNLCRKQQEILTKSGAWFYNSGSNTPQQPDQKVLRGLRNEEAPQEKKPKLHEQTQFQGPSGDLSVPAVEKSRSHGLTRQHSIKNGSGVKHHIASDIASDRKRSPSVSRDQNRRYDQREEREEYSQYATSDTAMPRSPSDYADRRSQHEPQFYEDSDHLSYRDSNRRSHRHSKEYIVDDEDVESRDEYERQRREEEYQSRYRSDPNLARYPVKPQPYEEQMRIHAEVSRARHERRHSDVSLANADLEDSRISMLRMDRPSRQRSISERRAAMENQRSYSMERTREAQGPSSYAQRTTNHSPPTPRRSPLPIDRPDLRRTDSLRKQHHLDPSSAVRKTKREKMETMLRNDSLSSDQSESVRPPPPKPHKSKKGGKMRQISLSSSEEELASTPEYTSCDDVEIESESVSEKGDMDYNWLDHTSWHSSEASPMSLHPVTWQPSKDGDRLIGRILLNKRLKDGSVPRDSGAMLGLKVVGGKMTESGRLCAFITKVKKGSLADTVGHLRPGDEVLEWNGRLLQGATFEEVYNIILESKPEPQVELVVSRPIGDIPRIPDSTHAQLESSSSSFESQKMDRPSISVTSPMSPGMLRDVPQFLSGQLSSQSLSRRTTPFVPRVQIKLWFDKVGHQLIVTILGAKDLPSREDGRPRNPYVKIYFLPDRSDKNKRRTKTVKKTLEPKWNQTFIYSPVHRREFRERMLEITLWDQARVREEESEFLGEILIELETALLDDEPHWYKLQTHDVSSLPLPHPSPYMPRRQLHGESPTRRLQRSKRISDSEVSDYDCDDGIGVVSDYRHDGRDLQSSTLSVPEQVMSSNHCSPSGSPHRVDVIGRTRSWSPSVPPPQSRNVEQGLRGTRTMTGHYNTISRMDRHRVMDDHYSPDRDRDCEAADRQPYHRSRSTEQRPLLERTTTRSRSTERPDTNLMRSMPSLMTGRSAPPSPALSRSHPRTGSVQTSPSSTPVAGRRGRQLPQLPPKGTLDRKAGGKKLRSTVQRSTETGLAVEMRNWMTRQASRESTDGSMNSYSSEGNLIFPGVRLASDSQFSDFLDGLGPAQLVGRQTLATPAMGDIQVGMMDKKGQLEVEIIRARGLVVKPGSKTLPAPYVKVYLLDNGVCIAKKKTKVARKTLEPLYQQLLSFEESPQGKVLQIIVWGDYGRMDHKSFMGVAQILLDELELSNMVIGWFKLFPPSSLVDPTLAPLTRRASQSSLESSTGPSYSRS

SEQ ID NO: 72243 - protein, 258 aa, Homo sapiens
  Payload ID: 14302
  Gene Symbol: RIMS2
  Gene Name: regulating synaptic membrane exocytosis 2
  ENSP ID: ENSP00000428478
MGRQGLGGASAAGRSMQRSQSRSSLSASFEALAGYFPCMNSLEEEEGEAGGKKLRSTVQRSTETGLAVEMRNWMTRQASRESTDGSMNSYSSEGNLIFPGVRLASDSQFSDFLDGLGPAQLVGRQTLATPAMGDIQVGMMDKKGQLEVEIIRARGLVVKPGSKTLPAPYVKVYLLDNGVCIAKKKTKVARKTLEPLYQQLLSFEESPQGKVLQIIVWGDYGRMDHKSFMGVAQILLDELELSNMVIGWFKLFPPSSLV

SEQ ID NO: 72244 - protein, 1060 aa, Homo sapiens
  Payload ID: 14302
  Gene Symbol: RIMS2
  Gene Name: regulating synaptic membrane exocytosis 2
  ENSP ID: ENSP00000487079
RKLHQQFEMYKEQVKKMGEESQQQQEQKGDAPTCGICHKTKFADGCGHNCSYCQTKFCARCGGRVSLRSNKVMWVCNLCRKQQEILTKSGAWFYNSGSNTPQQPDQKVLRGLRNEEAPQEKKPKLHEQTQFQGPSGDLSVPAVEKSRSHGLTRQHSIKNGSGVKHHIASDIASDRKRSPSVSRDQNRRYDQREEREEYSQYATSDTAMPRSPSDYADRRSQHEPQFYEDSDHLSYRDSNRRSHRHSKEYIVDDEDVESRDEYERQRREEEYQSRYRSDPNLARYPVKPQPYEEQMRIHAEVSRARHERRHSDVSLANADLEDSRISMLRMDRPSRQRSISERRAAMENQRSYSMERTREAQGPSSYAQRTTNHSPPTPRRSPLPIDRPDLRRTDSLRKQHHLDPSSAVRKTKREKMETMLRNDSLSSDQSESVRPPPPKPHKSKKGGKMRQISLSSSEEELASTPEYTSCDDVEIESESVSEKGDMDYNWLDHTSWHSSEASPMSLHPVTWQPSKDGDRLIGRILLNKRLKDGSVPRDSGAMLGLKVVGGKMTESGRLCAFITKVKKGSLADTVGHLRPGDEVLEWNGRLLQGATFEEVYNIILESKPEPQVELVVSRPIGDIPRIPDSTHAQLESSSSSFESQKMDRPSISVTSPMSPGMLRDVPQFLSGQLSSQSLSRRTTPFVPRVQIKLWFDKVGHQLIVTILGAKDLPSREDGRPRNPYVKIYFLPDRSDKNKRRTKTVKKTLEPKWNQTFIYSPVHRREFRERMLEITLWDQARVREEESEFLGEILIELETALLDDEPHWYKLQTHDVSSLPLPHPSPYMPRRQLHGESPTRRLQRSKRISDSEVSDYDCDDGIGVVSDYRHDGRDLQSSTLSVPEQVMSSNHCSPSGSPHRVDVIGRTRSWSPSVPPPQSRNVEQGLRGTRTMTGHYNTISRMDRHRVMDDHYSPDRDRDCEAADRQPYHRSRSTEQRPLLERTTTRSRSTERPDTNLMRSMPSLMTGRSAPPSPALSRSHPRTGSVQTSPSSTPVAGRRGRQLPQLPPKGTLDRNNGVKEI

SEQ ID NO: 72245 - protein, 1121 aa, Homo sapiens
  Payload ID: 14302
  Gene Symbol: RIMS2
  Gene Name: regulating synaptic membrane exocytosis 2
  ENSP ID: ENSP00000487907
MSAPVGPRGRLAPIPAASQPPLQPEMPDLSHLTEEERKIILAVMDRQKKEEEKEQSVLKKLHQQFEMYKEQVKKMGEESQQQQEQKGDAPTCGICHKTKFADGCGHNCSYCQTKFCARCGGRVSLRSNKEDKVVMWVCNLCRKQQEILTKSGAWFYNSGSNTPQQPDQKVLRGLRNEEAPQEKKPKLHEQTQFQGPSGDLSVPAVEKSRSHGLTRQHSIKNGSGVKHHIASDIASDRKRSPSVSRDQNRRYDQREEREEYSQYATSDTAMPRSPSDYADRRSQHEPQFYEDSDHLSYRDSNRRSHRHSKEYIVDDEDVESRDEYERQRREEEYQSRYRSDPNLARYPVKPQPYEEQMRIHAEVSRARHERRHSDVSLANADLEDSRISMLRMDRPSRQRSISERRAAMENQRSYSMERTREAQGPSSYAQRTTNHSPPTPRRSPLPIDRPDLRRTDSLRKQHHLDPSSAVRKTKREKMETMLRNDSLSSDQSESVRPPPPKPHKSKKGGKMRQISLSSSEEELASTPEYTSCDDVEIESESVSEKGDMDYNWLDHTSWHSSEASPMSLHPVTWQPSKDGDRLIGRILLNKRLKDGSVPRDSGAMLGLKVVGGKMTESGRLCAFITKVKKGSLADTVGHLRPGDEVLEWNGRLLQGATFEEVYNIILESKPEPQVELVVSRPIGDIPRIPDSTHAQLESSSSSFESQKMDRPSISVTSPMSPGMLRDVPQFLSGQLSIKLWFDKVGHQLIVTILGAKDLPSREDGRPRNPYVKIYFLPDRSDKNKRRTKTVKKTLEPKWNQTFIYSPVHRREFRERMLEITLWDQARVREEESEFLGEILIELETALLDDEPHWYKLQTHDVSSLPLPHPSPYMPRRQLHGESPTRRLQRSKRISDSEVSDYDCDDGIGVVSDYRHDGRDLQSSTLSVPEQVMSSNHCSPSGSPHRVDVIGRTRSWSPSVPPPQSRNVEQGLRGTRTMTGHYNTISRMDRHRVMDDHYSPDRDSHFLTLPRSRYSQTIDHHHRDGRDCEAADRQPYHRSRSTEQRPLLERTTTRSRSTERPDTNLMRSMPSLMTGRSAPPSPALSRSHPRTGSVQTSPSSTPVAGRRGRQLPQLPPKGTLDR

SEQ ID NO: 72246 - protein, 370 aa, Homo sapiens
  Payload ID: 14302
  Gene Symbol: RIMS2
  Gene Name: regulating synaptic membrane exocytosis 2
  ENSP ID: ENSP00000488393
  MOD_RES (1)..(1): Any amino acid
XSVPRDSGAMLGLKVVGGKMTESGRLCAFITKVKKGSLADTVGHLRPGDEVLEWNGRLLQGATFEEVYNIILESKPEPQVELVVSRPIGDIPRIPDSTHAQLESSSSSFESQKMDRPSISVTSPMSPGMLRDVPQFLSGQLSIKLWFDKVGHQLIVTILGAKDLPSREDGRPRNPYVKIYFLPDRSDKNKRRTKTVKKTLEPKWNQTFIYSPVHRREFRERMLEITLWDQARVREEESEFLGEILIELETALLDDEPHWYKLQTHDVSSLPLPHPSPYMPRRQLHGESPTRRLQRSKRISDSEVSDYDCDDGIGVVSDYRHDGRDLQSSTLSVPEQVMSSNHCSPSGSPHRVDVIGRTRSWSPSVPPPQR

SEQ ID NO: 72247 - protein, 308 aa, Homo sapiens
  Payload ID: 14303
  Gene Symbol: RIMS3
  Gene Name: regulating synaptic membrane exocytosis 3
  Uniprot ID: Q9UJD0
  ENSP ID: ENSP00000361768
MFNGEPGPASSGASRNVVRSSSISGEICGSQQAGGGAGTTTAKKRRSSLGAKMVAIVGLTQWSKSTLQLPQPEGATKKLRSNIRRSTETGIAVEMRSRVTRQGSRESTDGSTNSNSSDGTFIFPTTRLGAESQFSDFLDGLGPAQIVGRQTLATPPMGDVHIAIMDRSGQLEVEVIEARGLTPKPGSKSLPATYIKVYLLENGACLAKKKTKMTKKTCDPLYQQALLFDEGPQGKVLQVIVWGDYGRMDHKCFMGMAQIMLDELDLSAAVTGWYKLFPTSSVADSTLGSLTRRLSQSSLESATSPSCS

SEQ ID NO: 72248 - protein, 308 aa, Homo sapiens; identical to SEQ ID NO: 72247
  Payload ID: 14303
  Gene Symbol: RIMS3
  Gene Name: regulating synaptic membrane exocytosis 3
  Uniprot ID: Q9UJD0
  ENSP ID: ENSP00000361769

SEQ ID NO: 72249 - protein, 269 aa, Homo sapiens
  Payload ID: 14304
  Gene Symbol: RIMS4
  Gene Name: regulating synaptic membrane exocytosis 4
  Uniprot ID: Q9H426
  ENSP ID: ENSP00000361942
MERSQSRLSLSASFEALAIYFPCMNSFDDEDAGDSRRLKGAIQRSTETGLAVEMPSRTLRQASHESIEDSMNSYGSEGNLNYGGVCLASDAQFSDFLGSMGPAQFVGRQTLATTPMGDVEIGLQERNGQLEVDIIQARGLTAKPGSKTLPAAYIKAYLLENGICIAKKKTKVARKSLDPLYNQVLLFPESPQGKVLQVIVWGNYGRMERKQFMGVARVLLEELDLTTLAVGWYKLFPTSSMVDPATGPLLRQASQLSLESTVGPCGERS

SEQ ID NO: 72250 - protein, 270 aa, Homo sapiens
  Payload ID: 14304
  Gene Symbol: RIMS4
  Gene Name: regulating synaptic membrane exocytosis 4
  Uniprot ID: Q9H426
  ENSP ID: ENSP00000439287
MERSQSRLSLSASFEALAIYFPCMNSFDDEDAEGDSRRLKGAIQRSTETGLAVEMPSRTLRQASHESIEDSMNSYGSEGNLNYGGVCLASDAQFSDFLGSMGPAQFVGRQTLATTPMGDVEIGLQERNGQLEVDIIQARGLTAKPGSKTLPAAYIKAYLLENGICIAKKKTKVARKSLDPLYNQVLLFPESPQGKVLQVIVWGNYGRMERKQFMGVARVLLEELDLTTLAVGWYKLFPTSSMVDPATGPLLRQASQLSLESTVGPCGERS

SEQ ID NO: 72251 - protein, 312 aa, Homo sapiens
  Payload ID: 14305
  Gene Symbol: RPRD1A
  Gene Name: regulation of nuclear pre-mRNA domain containing 1A
  Uniprot ID: Q96P16
  ENSP ID: ENSP00000349955
MSAFSEAALEKKLSELSNSQQSVQTLSLWLIHHRKHSRPIVTVWERELRKAKPNRKLTFLYLANDVIQNSKRKGPEFTKDFAPVIVEAFKHVSSETDESCKKHLGRVLSIWEERSVYENDVLEQLKQALYGDKKPRKRTYEQIKVDENENCSSLGSPSEPPQTLDLVRALQDLENAASGDAAVHQRIASLPVEVQEVSLLDKITDKESGERLSKMVEDACMLLADYNGRLAAEIDDRKQLTRMLADFLRCQKEALAEKEHKLEEYKRKLARVSLVRKELRSRIQSLPDLSRLPNVTGSHMHLPFAGDIYSED

SEQ ID NO: 72252 - protein, 312 aa, Homo sapiens; identical to SEQ ID NO: 72251
  Payload ID: 14305
  Gene Symbol: RPRD1A
  Gene Name: regulation of nuclear pre-mRNA domain containing 1A
  Uniprot ID: Q96P16
  ENSP ID: ENSP00000381984

SEQ ID NO: 72253 - protein, 276 aa, Homo sapiens
  Payload ID: 14305
  Gene Symbol: RPRD1A
  Gene Name: regulation of nuclear pre-mRNA domain containing 1A
  Uniprot ID: Q96P16
  ENSP ID: ENSP00000465444
MRNSNWRFCQTGIYSKPNRKLTFLYLANDVIQNSKRKGPEFTKDFAPVIVEAFKHVSSETDESCKKHLGRVLSIWEERSVYENDVLEQLKQALYGDKKPRKRTYEQIKVDENENCSSLGSPSEPPQTLDLVRALQDLENAASGDAAVHQRIASLPVEVQEVSLLDKITDKESGERLSKMVEDACMLLADYNGRLAAEIDDRKQLTRMLADFLRCQKEALAEKEHKLEEYKRKLARVSLVRKELRSRIQSLPDLSRLPNVTGSHMHLPFAGDIYSED

SEQ ID NO: 72254 - protein, 123 aa, Homo sapiens
  Payload ID: 14305
  Gene Symbol: RPRD1A
  Gene Name: regulation of nuclear pre-mRNA domain containing 1A
  ENSP ID: ENSP00000467268
  MOD_RES (1)..(1): Any amino acid
XENCSSLGSPSEPPQTLDLVRALQDLENAASGDAAVHQRIASLPVEVQEVSLLDKITDKESGERLSKMVEDACMLLADYNGRLAAEIDDRKQLTRMLADFLRCQKEALAEKEHKLEVRNLFLL

SEQ ID NO: 72255 - protein, 73 aa, Homo sapiens
  Payload ID: 14305
  Gene Symbol: RPRD1A
  Gene Name: regulation of nuclear pre-mRNA domain containing 1A
  ENSP ID: ENSP00000467949
MSAFSEAALEKKLSELSNSQQSVQTLSLWLIHHRKHSRPIVTVWERELRKERVSVWRDKLQGLCEDQNGIQFS

SEQ ID NO: 72256 - protein, 276 aa, Homo sapiens; identical to SEQ ID NO: 72253
  Payload ID: 14305
  Gene Symbol: RPRD1A
  Gene Name: regulation of nuclear pre-mRNA domain containing 1A
  Uniprot ID: Q96P16
  ENSP ID: ENSP00000467991

SEQ ID NO: 72257 - protein, 49 aa, Homo sapiens
  Payload ID: 14305
  Gene Symbol: RPRD1A
  Gene Name: regulation of nuclear pre-mRNA domain containing 1A
  ENSP ID: ENSP00000468108
EYKRKLARVSLVRKELRSRIQSLPDLSRLPNVTGSHMHLPFAGDIYSED

SEQ ID NO: 72258 - protein, 4 aa, Homo sapiens
  Payload ID: 14305
  Gene Symbol: RPRD1A
  Gene Name: regulation of nuclear pre-mRNA domain containing 1A
  ENSP ID: ENSP00000468173
  MOD_RES (1)..(1): Any amino acid
XSED

SEQ ID NO: 72259 - protein, 289 aa, Homo sapiens
  Payload ID: 14305
  Gene Symbol: RPRD1A
  Gene Name: regulation of nuclear pre-mRNA domain containing 1A
  ENSP ID: ENSP00000468209
MSAFSEAALEKKLSELSNSQQSVQTLSLWLIHHRKHSRPIVTVWERELRKAKPNRKLTFLYLANDVIQNSKRKGPEFTKDFAPVIVEAFKHVSSETDESCKKHLGRVLSIWEERSVYENDVLEQLKQALYGDKKPRKRTYEQIKVDENENCSSLGSPSEPPQTLDLVRALQDLENAASGDAAVHQRIASLPVEVQEVSLLDKITDKESGERLSKMVEDACMLLADYNGRLAAEIDDRKQLTRMLADFLRCQKEALAEKEHKLEILDMGVSSNDVVTISIFFLLKINIKP

SEQ ID NO: 72260 - protein, 326 aa, Homo sapiens
  Payload ID: 14306
  Gene Symbol: RPRD1B
  Gene Name: regulation of nuclear pre-mRNA domain containing 1B
  Uniprot ID: Q9NQG5
  ENSP ID: ENSP00000362532
MSSFSESALEKKLSELSNSQQSVQTLSLWLIHHRKHAGPIVSVWHRELRKAKSNRKLTFLYLANDVIQNSKRKGPEFTREFESVLVDAFSHVAREADEGCKKPLERLLNIWQERSVYGGEFIQQLKLSMEDSKSPPPKATEEKKSLKRTFQQIQEEEDDDYPGSYSPQDPSAGPLLTEELIKALQDLENAASGDATVRQKIASLPQEVQDVSLLEKITDKEAAERLSKTVDEACLLLAEYNGRLAAELEDRRQLARMLVEYTQNQKDVLSEKEKKLEEYKQKLARVTQVRKELKSHIQSLPDLSLLPNVTGGLAPLPSAGDLFSTD

SEQ ID NO: 72261 - protein, 197 aa, Homo sapiens
  Payload ID: 14306
  Gene Symbol: RPRD1B
  Gene Name: regulation of nuclear pre-mRNA domain containing 1B
  ENSP ID: ENSP00000416420
MFLSYRSDLPAYMFPGGSSPTTEEKKSLKRTFQQIQEEEDDDYPGSYSPQDPSAGPLLTEELIKALQDLENAASGDATVRQKIASLPQEVQDVSLLEKITDKEAAERLSKTVDEACLLLAEYNGRLAAELEDRRQLARMLVEYTQNQKDVLSEKEKKLEEYKQKLARVTQVRKELKSHIQSLPDLSLLPNVTGGLAP

SEQ ID NO: 72262 - protein, 113 aa, Homo sapiens
  Payload ID: 14306
  Gene Symbol: RPRD1B
  Gene Name: regulation of nuclear pre-mRNA domain containing 1B
  ENSP ID: ENSP00000433947
MSSFSESALEKKLSELSNSQQSVQTLSLWLIHHRKHAGPIVSVWHRELRKAKSNRKLTFLYLANDVIQNSKRKGPEFTREFESVLVDAFSHVASNRREEISETNFSANSGGGG

SEQ ID NO: 72263 - protein, 60 aa, Homo sapiens
  Payload ID: 14306
  Gene Symbol: RPRD1B
  Gene Name: regulation of nuclear pre-mRNA domain containing 1B
  ENSP ID: ENSP00000436816
MSSFSESALEKKLSELSNSQQSVQTLSLWLIHHRKHAGPIVSVWHRELRKERQMKAVKNL

SEQ ID NO: 72264 - protein, 34 aa, Homo sapiens
  Payload ID: 14306
  Gene Symbol: RPRD1B
  Gene Name: regulation of nuclear pre-mRNA domain containing 1B
  ENSP ID: ENSP00000478724
  MOD_RES (1)..(1): Any amino acid
XQLARMLVEYTQNQKDVLSEKEKKLEGVMIDFGL

SEQ ID NO: 72265 - protein, 63 aa, Homo sapiens
  Payload ID: 14306
  Gene Symbol: RPRD1B
  Gene Name: regulation of nuclear pre-mRNA domain containing 1B
  ENSP ID: ENSP00000484897
  MOD_RES (1)..(1): Any amino acid
XKEAAERLSKTVDEACLLLAEYNGRLAAELEDRRQLARMLVEYTQNQKDVLSEKEKKLELVTH

SEQ ID NO: 72266 - protein, 152 aa, Homo sapiens
  Payload ID: 14307
  Gene Symbol: RPRD2
  Gene Name: regulation of nuclear pre-mRNA domain containing 2
  Uniprot ID: Q5VT52
  ENSP ID: ENSP00000358063
MAAGGGGGSSKASSSSASSAGALESSLDRKFQSVTNTMESIQGLSSWCIENKKHHSTIVYHWMKWLRRSAYPHRLNLFYLANDVIQNCKRKNAIIFRESFADVLPEAAALVKDPSVSKSVERIFKIWEDRNVYPEEMIVALREALSKCLFLS

SEQ ID NO: 72267 - protein, 1461 aa, Homo sapiens
  Payload ID: 14307
  Gene Symbol: RPRD2
  Gene Name: regulation of nuclear pre-mRNA domain containing 2
  Uniprot ID: Q5VT52
  ENSP ID: ENSP00000358064
MAAGGGGGSSKASSSSASSAGALESSLDRKFQSVTNTMESIQGLSSWCIENKKHHSTIVYHWMKWLRRSAYPHRLNLFYLANDVIQNCKRKNAIIFRESFADVLPEAAALVKDPSVSKSVERIFKIWEDRNVYPEEMIVALREALSTTFKTQKQLKENLNKQPNKQWKKSQTSTNPKAALKSKIVAEFRSQALIEELLLYKRSEDQIELKEKQLSTMRVDVCSTETLKCLKDKTGGKKFSKEFEEASSKLEEFVNGLDKQVKNGPSLTEALENAGIFYEAQYKEVKVVANAYKTFANRVNNLKKKLDQLKSTLPDPEESPVPSPSMDAPSPTGSESPFQGMGGEESQSPTMESEKSATPEPVTDNRDVEDMELSDVEDDGSKIIVEDRKEKPAEKSAVSTSVPTKPTENISKASSCTPVPVTMTATPPLPKPVNTSLSPSPALALPNLANVDLAKISSILSSLTSVMKNTGVSPASRPSPGTPTSPSNLTSGLKTPAPATTTSHNPLANILSKVEITPESILSALSKTQTQSAPALQGLSSLLQSVTGNPVPASEAASQSTSASPANTTVSTIKGRNLPSSAQPFIPKSFNYSPNSSTSEVSSTSASKASIGQSPGLPSTTFKLPSNSLGFTATHNTSPAAPPTEVTICQSSEVSKPKLESESTSPSLEMKIHNFLKGNPGFSGLNLNIPILSSLGSSAPSESHPSDFQRGPTSTSIDNIDGTPVRDERSGTPTQDEMMDKPTSSSVDTMSLLSKIISPGSSTPSSTRSPPPGRDESYPRELSNSVSTYRPFGLGSESPYKQPSDGMERPSSLMDSSQEKFYPDTSFQEDEDYRDFEYSGPPPSAMMNLEKKPAKSILKSSKLSDTTEYQPILSSYSHRAQEFGVKSAFPPSVRALLDSSENCDRLSSSPGLFGAFSVRGNEPGSDRSPSPSKNDSFFTPDSNHNSLSQSTTGHLSLPQKQYPDSPHPVPHRSLFSPQNTLAAPTGHPPTSGVEKVLASTISTTSTIEFKNMLKNASRKPSDDKHFGQAPSKGTPSDGVSLSNLTQPSLTATDQQQQEEHYRIETRVSSSCLDLPDSTEEKGAPIETLGYHSASNRRMSGEPIQTVESIRVPGKGNRGHGREASRVGWFDLSTSGSSFDNGPSSASELASLGGGGSGGLTGFKTAPYKERAPQFQESVGSFRSNSFNSTFEHHLPPSPLEHGTPFQREPVGPSSAPPVPPKDHGGIFSRDAPTHLPSVDLSNPFTKEAALAHAAPPPPPGEHSGIPFPTPPPPPPPGEHSSSGGSGVPFSTPPPPPPPVDHSGVVPFPAPPLAEHGVAGAVAVFPKDHSSLLQGTLAEHFGVLPGPRDHGGPTQRDLNGPGLSRVRESLTLPSHSLEHLGPPHGGGGGGGSNSSSGPPLGPSHRDTISRSGIILRSPRPDFRPREPFLSRDPFHSLKRPRPPFARGPPFFAPKRPFFPPRY

SEQ ID NO: 72268 - protein, 1435 aa, Homo sapiens
  Payload ID: 14307
  Gene Symbol: RPRD2
  Gene Name: regulation of nuclear pre-mRNA domain containing 2
  Uniprot ID: Q5VT52
  ENSP ID: ENSP00000383785
MAAGGGGGSSKASSSSASSAGALESSLDRKFQSVTNTMESIQGLSSWCIENKKHHSTIVYHWMKWLRRSAYPHRLNLFYLANDVIQNCKRKNAIIFRESFADVLPEAAALVKDPSVSKSVERIFKIWEDRNVYPEEMIVALREALTSTNPKAALKSKIVAEFRSQALIEELLLYKRSEDQIELKEKQLSTMRVDVCSTETLKCLKDKTGGKKFSKEFEEASSKLEEFVNGLDKQVKNGPSLTEALENAGIFYEAQYKEVKVVANAYKTFANRVNNLKKKLDQLKSTLPDPEESPVPSPSMDAPSPTGSESPFQGMGGEESQSPTMESEKSATPEPVTDNRDVEDMELSDVEDDGSKIIVEDRKEKPAEKSAVSTSVPTKPTENISKASSCTPVPVTMTATPPLPKPVNTSLSPSPALALPNLANVDLAKISSILSSLTSVMKNTGVSPASRPSPGTPTSPSNLTSGLKTPAPATTTSHNPLANILSKVEITPESILSALSKTQTQSAPALQGLSSLLQSVTGNPVPASEAASQSTSASPANTTVSTIKGRNLPSSAQPFIPKSFNYSPNSSTSEVSSTSASKASIGQSPGLPSTTFKLPSNSLGFTATHNTSPAAPPTEVTICQSSEVSKPKLESESTSPSLEMKIHNFLKGNPGFSGLNLNIPILSSLGSSAPSESHPSDFQRGPTSTSIDNIDGTPVRDERSGTPTQDEMMDKPTSSSVDTMSLLSKIISPGSSTPSSTRSPPPGRDESYPRELSNSVSTYRPFGLGSESPYKQPSDGMERPSSLMDSSQEKFYPDTSFQEDEDYRDFEYSGPPPSAMMNLEKKPAKSILKSSKLSDTTEYQPILSSYSHRAQEFGVKSAFPPSVRALLDSSENCDRLSSSPGLFGAFSVRGNEPGSDRSPSPSKNDSFFTPDSNHNSLSQSTTGHLSLPQKQYPDSPHPVPHRSLFSPQNTLAAPTGHPPTSGVEKVLASTISTTSTIEFKNMLKNASRKPSDDKHFGQAPSKGTPSDGVSLSNLTQPSLTATDQQQQEEHYRIETRVSSSCLDLPDSTEEKGAPIETLGYHSASNRRMSGEPIQTVESIRVPGKGNRGHGREASRVGWFDLSTSGSSFDNGPSSASELASLGGGGSGGLTGFKTAPYKERAPQFQESVGSFRSNSFNSTFEHHLPPSPLEHGTPFQREPVGPSSAPPVPPKDHGGIFSRDAPTHLPSVDLSNPFTKEAALAHAAPPPPPGEHSGIPFPTPPPPPPPGEHSSSGGSGVPFSTPPPPPPPVDHSGVVPFPAPPLAEHGVAGAVAVFPKDHSSLLQGTLAEHFGVLPGPRDHGGPTQRDLNGPGLSRVRESLTLPSHSLEHLGPPHGGGGGGGSNSSSGPPLGPSHRDTISRSGIILRSPRPDFRPREPFLSRDPFHSLKRPRPPFARGPPFFAPKRPFFPPRY

SEQ ID NO: 72269 - protein, 252 aa, Homo sapiens
  Payload ID: 14308
  Gene Symbol: RCAN1
  Gene Name: regulator of calcineurin 1
  Uniprot ID: P53805
  ENSP ID: ENSP00000320768
MEDGVAGPQLGAAAEAAEAAEARARPGVTLRPFAPLSGAAEADEGGGDWSFIDCEMEEVDLQDLPSATIACHLDPRVFVDGLCRAKFESLFRTYDKDITFQYFKSFKRVRINFSNPFSAADARLQLHKTEFLGKEMKLYFAQTLHIGSSHLAPPNPDKQFLISPPASPPVGWKQVEDATPVINYDLLYAISKLGPGEKYELHAATDTTPSVVVHVCESDQEKEEEEEMERMRRPKPKIIQTRRPEYTPIHLS

SEQ ID NO: 72270 - protein, 197 aa, Homo sapiens
  Payload ID: 14308
  Gene Symbol: RCAN1
  Gene Name: regulator of calcineurin 1
  Uniprot ID: P53805
  ENSP ID: ENSP00000370524
MHFRNFNYSFSSLIACVANSDIFSESETRAKFESLFRTYDKDITFQYFKSFKRVRINFSNPFSAADARLQLHKTEFLGKEMKLYFAQTLHIGSSHLAPPNPDKQFLISPPASPPVGWKQVEDATPVINYDLLYAISKLGPGEKYELHAATDTTPSVVVHVCESDQEKEEEEEMERMRRPKPKIIQTRRPEYTPIHLS

SEQ ID NO: 72271 - protein, 277 aa, Homo sapiens
  Payload ID: 14308
  Gene Symbol: RCAN1
  Gene Name: regulator of calcineurin 1
  ENSP ID: ENSP00000370527
MNSTVRQLRVPSHVPLRDPSWESLRNVPKLKKSRGMQGEQGRRLFRLLLNDLPGRDRLPCSYPQPHVEQASTSASPRLLAVNIPEDTLLSYPESSLPLQRHCAFHRFSKAKFESLFRTYDKDITFQYFKSFKRVRINFSNPFSAADARLQLHKTEFLGKEMKLYFAQTLHIGSSHLAPPNPDKQFLISPPASPPVGWKQVEDATPVINYDLLYAISKLGPGEKYELHAATDTTPSVVVHVCESDQEKEEEEEMERMRRPKPKIIQTRRPEYTPIHLS

SEQ ID NO: 72272 - protein, 171 aa, Homo sapiens
  Payload ID: 14308
  Gene Symbol: RCAN1
  Gene Name: regulator of calcineurin 1
  Uniprot ID: P53805
  ENSP ID: ENSP00000382214
MVYAKFESLFRTYDKDITFQYFKSFKRVRINFSNPFSAADARLQLHKTEFLGKEMKLYFAQTLHIGSSHLAPPNPDKQFLISPPASPPVGWKQVEDATPVINYDLLYAISKLGPGEKYELHAATDTTPSVVVHVCESDQEKEEEEEMERMRRPKPKIIQTRRPEYTPIHLS

SEQ ID NO: 72273 - protein, 117 aa, Homo sapiens
  Payload ID: 14308
  Gene Symbol: RCAN1
  Gene Name: regulator of calcineurin 1
  Uniprot ID: P53805
  ENSP ID: ENSP00000392438
MKLYFAQTLHIGSSHLAPPNPDKQFLISPPASPPVGWKQVEDATPVINYDLLYAISKLGPGEKYELHAATDTTPSVVVHVCESDQEKEEEEEMERMRRPKPKIIQTRRPEYTPIHLS

SEQ ID NO: 72274 - protein, 242 aa, Homo sapiens
  Payload ID: 14308
  Gene Symbol: RCAN1
  Gene Name: regulator of calcineurin 1
  ENSP ID: ENSP00000417926
MQGEQGRRLFRLLLNDLPGRDRLPCSYPQPHVEQASTSASPRLLAVNIPEDTLLSYPESSLPLQRHCAFHRFSKAKFESLFRTYDKDITFQYFKSFKRVRINFSNPFSAADARLQLHKTEFLGKEMKLYFAQTLHIGSSHLAPPNPDKQFLISPPASPPVGWKQVEDATPVINYDLLYAISKLGPGEKYELHAATDTTPSVVVHVCESDQEKEEEEEMERMRRPKPKIIQTRRPEYTPIHLS

SEQ ID NO: 72275 - protein, 117 aa, Homo sapiens; identical to SEQ ID NO: 72273
  Payload ID: 14308
  Gene Symbol: RCAN1
  Gene Name: regulator of calcineurin 1
  Uniprot ID: P53805
  ENSP ID: ENSP00000419252

SEQ ID NO: 72276 - protein, 117 aa, Homo sapiens; identical to SEQ ID NO: 72273
  Payload ID: 14308
  Gene Symbol: RCAN1
  Gene Name: regulator of calcineurin 1
  Uniprot ID: P53805
  ENSP ID: ENSP00000419624

SEQ ID NO: 72277 - protein, 205 aa, Homo sapiens
  Payload ID: 14308
  Gene Symbol: RCAN1
  Gene Name: regulator of calcineurin 1
  ENSP ID: ENSP00000477155
MHFRNFNYSFSSLIACVANSDIFSESETRAKFESLFRTYDKDITFQYFKSFKRVRINFSNPFSAADARLQLHKTEFLGKEMKLYFAQTLHIGSSHLAPPNPDKQFLISPPASPPVGWKQVEDATPVINYDLLYAISKLGPGEQGPRVGGRQGETQLLPCTREQYHHYPRSSPEPMPACFVSFSVFFCATVPCAGSMPASWHHLQC

SEQ ID NO: 72278 - protein, 117 aa, Homo sapiens; identical to SEQ ID NO: 72273
  Payload ID: 14308
  Gene Symbol: RCAN1
  Gene Name: regulator of calcineurin 1
  Uniprot ID: P53805
  ENSP ID: ENSP00000477646

SEQ ID NO: 72279 - protein, 243 aa, Homo sapiens
  Payload ID: 14309
  Gene Symbol: RCAN2
  Gene Name: regulator of calcineurin 2
  Uniprot ID: Q14206
  ENSP ID: ENSP00000305223
MRGESYFIGMRSPGQQGHVPEDGGLFLLCCIDRDWAVTRCFAEEAFQAITDFNDLPNSLFACNVHQSVFEGEESKEKFEGLFRTYDDCVTFQLFKSFRRVRINFSNPKSAARARIELHETQFRGKKLKLYFAQVQTPETDGDKLHLAPPQPAKQFLISPPSSPPVGWQPINDATPVLNYDLLYAVAKLGPGEKYELHAGTESTPSVVVHVCDSDIEEEEDPKTSPKPKIIQTRRPGLPPSVSN

SEQ ID NO: 72280 - protein, 197 aa, Homo sapiens [sequence omitted]

SEQ ID NO: 72281 - protein, 243 aa, Homo sapiens; identical to SEQ ID NO: 72279
  Payload ID: 14309
  Gene Symbol: RCAN2
  Gene Name: regulator of calcineurin 2
  Uniprot ID: Q14206
  ENSP ID: ENSP00000360425

SEQ ID NO: 72282 - protein, 224 aa, Homo sapiens
  Payload ID: 14309
  Gene Symbol: RCAN2
  Gene Name: regulator of calcineurin 2
  ENSP ID: ENSP00000384317
MPAPSMDCDVSTLVACVVDVEVFTNQEVKEKFEGLFRTYDDCVTFQLFKSFRRVRINFSNPKSAARARIELHETQFRGKKLKLYFAQVQTPETDGDKLHLAPPQPAKQFLISPPSSPPVGWQPINDATPVLNYDLLYAVAKLGPGEKYELHAGTESTPSVVVHVCDSDIEEEEDPKTSPKPKIIQTRRPGLPPSVSNAACSFSIIAVSSLSCFFPLLFVKKNCL

SEQ ID NO: 72283 - protein, 137 aa, Homo sapiens
  Payload ID: 14310
  Gene Symbol: RGCC
  Gene Name: regulator of cell cycle
  Uniprot ID: Q9H4X1
  ENSP ID: ENSP00000368664
MKPPAAQGSPAAAAAAAPALDSAAAEDLSDALCEFDAVLADFASPFHERHFHYEEHLERMKRRSSASVSDSSGFSDSESADSLYRNSFSFSDEKLNSPTDSTPALLSATVTPQKAKLGDTKELEAFIADLDKTLASM

SEQ ID NO: 72284 - protein, 531 aa, Homo sapiens
  Payload ID: 14311
  Gene Symbol: RCBTB1
  Gene Name: regulator of chromosome condensation (RCC1) and BTB (POZ) domain containing protein 1
  Uniprot ID: Q8NDN9
  ENSP ID: ENSP00000258646
MVDVGKWPIFTLLSPQEIASIRKACVFGTSASEALYVTDNDEVFVFGLNYSNCLGTGDNQSTLVPKKLEGLCGKKIKSLSYGSGPHVLLSTEDGVVYAWGHNGYSQLGNGTTNQGIAPVQVCTNLLIKQVVEVACGSHHSMALAADGEVFAWGYNNCGQVGSGSTANQPTPRKVTNCLHIKRVVGIACGQTSSMAVLDNGEVYGWGYNGNGQLGLGNNGNQLTPVRVAALHSVCVNQIVCGYAHTLALTDEGLLYAWGANTYGQLGTGNKNNLLSPAHIMVEKERVVEIAACHSAHTSAAKTQGGHVYMWGQCRGQSVILPHLTHFSCTDDVFACFATPAVSWRLLSVEHEDFLTVAESLKKEFDSPETADLKFRIDGKYIHVHKAVLKIRCEHFRSMFQSYWNEDMKEVIEIDQFSYPVYRAFLQYLYTDTVDLPPEDAIGLLDLATSYCENRLKKLCQHIIKRGITVENAFSLFSAAVRYDAEDLEEFCFKFCINHLTEVTQTAAFWQMDGPLLKEFIAKASKCGAFKN

SEQ ID NO: 72285 - protein, 531 aa, Homo sapiens; identical to SEQ ID NO: 72284
  Payload ID: 14311
  Gene Symbol: RCBTB1
  Gene Name: regulator of chromosome condensation (RCC1) and BTB (POZ) domain containing protein 1
  Uniprot ID: Q8NDN9
  ENSP ID: ENSP00000367552

SEQ ID NO: 72286 - protein, 551 aa, Homo sapiens
  Payload ID: 14312
  Gene Symbol: RCBTB2
  Gene Name: regulator of chromosome condensation (RCC1) and BTB (POZ) domain containing protein 2
  Uniprot ID: O95199
  ENSP ID: ENSP00000345144
MEEELPLFSGDSGKPVQATLSSLKMLDVGKWPIFSLCSEEELQLIRQACVFGSAGNEVLYTTVNDEIFVLGTNCCGCLGLGDVQSTIEPRRLDSLNGKKIACLSYGSGPHIVLATTEGEVFTWGHNAYSQLGNGTTNHGLVPCHISTNLSNKQVIEVACGSYHSLVLTSDGEVFAWGYNNSGQVGSGSTVNQPIPRRVTGCLQNKVVVTIACGQMCCMAVVDTGEVYVWGYNGNGQLGLGNSGNQPTPCRVAALQGIRVQRVACGYAHTLVLTDEGQVYAWGANSYGQLGTGNKSNQSYPTPVTVEKDRIIEIAACHSTHTSAAKTQGGHVYMWGQCRGQSVILPHLTHFSCTDDVFACFATPAVTWRLLSVEPDDHLTVAESLKREFDNPDTADLKFLVDGKYIYAHKVLLKIRCEHFRSSLEDNEDDIVEMSEFSYPVYRAFLEYLYTDSISLSPEEAVGLLDLATFYRENRLKKLCQQTIKQGICEENAIALLSAAVKYDAQDLEEFCFRFCINHLTVVTQTSGFAEMDHDLLKNFISKASRVGAFKN

SEQ ID NO: 72287 - protein, 556 aa, Homo sapiens
  Payload ID: 14312
  Gene Symbol: RCBTB2
  Gene Name: regulator of chromosome condensation (RCC1) and BTB (POZ) domain containing protein 2
  ENSP ID: ENSP00000389910
MSALPRDLELSNPREKLTKPVQATLSSLKMLDVGKWPIFSLCSEEELQLIRQACVFGSAGNEVLYTTVNDEIFVLGTNCCGCLGLGDVQSTIEPRRLDSLNGKKIACLSYGSGPHIVLATTEGEVFTWGHNAYSQLGNGTTNHGLVPCHISTNLSNKQVIEVACGSYHSLVLTSDGEVFAWGYNNSGQVGSGSTVNQPIPRRVTGCLQNKVVVTIACGQMCCMAVVDTGEVYVWGYNGNGQLGLGNSGNQPTPCRVAALQGIRVQRVACGYAHTLVLTDEGQVYAWGANSYGQLGTGNKSNQSYPTPVTVEKDRIIEIAACHSTHTSAAKTQGGHVYMWGQCRGQSVILPHLTHFSCTDDVFACFATPAVTWRLLSVEPDDHLTVAESLKREFDNPDTADLKFLVDGKYIYAHKVLLKIRCEHFRSSLEDNEDDIVEMSEFSYPVYRAFLEYLYTDSISLSPEEAVGLLDLATFYRENRLKKLCQQTIKQGICEENAIALLSAAVKYDAQDLEEFCFRFCINHLTVVTQTSGFAEMDHDLLKNFISKASRVGAFKN

SEQ ID NO: 72288 - protein, 277 aa, Homo sapiens
  Payload ID: 14312
  Gene Symbol: RCBTB2
  Gene Name: regulator of chromosome condensation (RCC1) and BTB (POZ) domain containing protein 2
  ENSP ID: ENSP00000443862
MSGVTTETGSLDSATVATSQPLAEWQLCKASVSRGIIEIAACHSTHTSAAKTQGGHVYMWGQCRGQSVILPHLTHFSCTDDVFACFATPAVTWRLLSVEPDDHLTVAESLKREFDNPDTADLKFLVDGKYIYAHKVLLKIRCEHFRSSLEDNEDDIVEMSEFSYPVYRAFLEYLYTDSISLSPEEAVGLLDLATFYRENRLKKLCQQTIKQGICEENAIALLSAAVKYDAQDLEEFCFRFCINHLTVVTQTSGFAEMDHDLLKNFISKASRVGAFKN

SEQ ID NO: 72289 - protein, 527 aa, Homo sapiens
  Payload ID: 14312
  Gene Symbol: RCBTB2
  Gene Name: regulator of chromosome condensation (RCC1) and BTB (POZ) domain containing protein 2
  Uniprot ID: O95199
  ENSP ID: ENSP00000443904
MLDVGKWPIFSLCSEEELQLIRQACVFGSAGNEVLYTTVNDEIFVLGTNCCGCLGLGDVQSTIEPRRLDSLNGKKIACLSYGSGPHIVLATTEGEVFTWGHNAYSQLGNGTTNHGLVPCHISTNLSNKQVIEVACGSYHSLVLTSDGEVFAWGYNNSGQVGSGSTVNQPIPRRVTGCLQNKVVVTIACGQMCCMAVVDTGEVYVWGYNGNGQLGLGNSGNQPTPCRVAALQGIRVQRVACGYAHTLVLTDEGQVYAWGANSYGQLGTGNKSNQSYPTPVTVEKDRIIEIAACHSTHTSAAKTQGGHVYMWGQCRGQSVILPHLTHFSCTDDVFACFATPAVTWRLLSVEPDDHLTVAESLKREFDNPDTADLKFLVDGKYIYAHKVLLKIRCEHFRSSLEDNEDDIVEMSEFSYPVYRAFLEYLYTDSISLSPEEAVGLLDLATFYRENRLKKLCQQTIKQGICEENAIALLSAAVKYDAQDLEEFCFRFCINHLTVVTQTSGFAEMDHDLLKNFISKASRVGAFKN

SEQ ID NO: 72290 - protein, 452 aa, Homo sapiens
  Payload ID: 14313
  Gene Symbol: RCC1
  Gene Name: regulator of chromosome condensation 1
  Uniprot ID: P18754
  ENSP ID: ENSP00000362937
MSPKRIAKRRSPPADAIPKSKKVKDTRAAASRRVPGARSCQGACGPSPPDQKTRPVSHRSHSTEPGLVLTLGQGDVGQLGLGENVMERKKPALVSIPEDVVQAEAGGMHTVCLSKSGQVYSFGCNDEGALGRDTSVEGSEMVPGKVELQEKVVQVSAGDSHTAALTDDGRVFLWGSFRDNNGVIGLLEPMKKSMVPVQVQLDVPVVKVASGNDHLVMLTADGDLYTLGCGEQGQLGRVPELFANRGGRQGLERLLVPKCVMLKSRGSRGHVRFQDAFCGAYFTFAISHEGHVYGFGLSNYHQLGTPGTESCFIPQNLTSFKNSTKSWVGFSGGQHHTVCMDSEGKAYSLGRAEYGRLGLGEGAEEKSIPTLISRLPAVSSVACGASVGYAVTKDGRVFAWGMGTNYQLGTGQDEDAWSPVEMMGKQLENRVVLSVSSGGQHTVLLVKDKEQS

SEQ ID NO: 72291 - protein, 421 aa, Homo sapiens
  Payload ID: 14313
  Gene Symbol: RCC1
  Gene Name: regulator of chromosome condensation 1
  Uniprot ID: P18754
  ENSP ID: ENSP00000362938
MSPKRIAKRRSPPADAIPKSKKVKVSHRSHSTEPGLVLTLGQGDVGQLGLGENVMERKKPALVSIPEDVVQAEAGGMHTVCLSKSGQVYSFGCNDEGALGRDTSVEGSEMVPGKVELQEKVVQVSAGDSHTAALTDDGRVFLWGSFRDNNGVIGLLEPMKKSMVPVQVQLDVPVVKVASGNDHLVMLTADGDLYTLGCGEQGQLGRVPELFANRGGRQGLERLLVPKCVMLKSRGSRGHVRFQDAFCGAYFTFAISHEGHVYGFGLSNYHQLGTPGTESCFIPQNLTSFKNSTKSWVGFSGGQHHTVCMDSEGKAYSLGRAEYGRLGLGEGAEEKSIPTLISRLPAVSSVACGASVGYAVTKDGRVFAWGMGTNYQLGTGQDEDAWSPVEMMGKQLENRVVLSVSSGGQHTVLLVKDKEQS

SEQ ID NO: 72292 - protein, 421 aa, Homo sapiens; identical to SEQ ID NO: 72291
  Payload ID: 14313
  Gene Symbol: RCC1
  Gene Name: regulator of chromosome condensation 1
  Uniprot ID: P18754
  ENSP ID: ENSP00000362939

SEQ ID NO: 72293 - protein, 421 aa, Homo sapiens; identical to SEQ ID NO: 72291
  Payload ID: 14313
  Gene Symbol: RCC1
  Gene Name: regulator of chromosome condensation 1
  Uniprot ID: P18754
  ENSP ID: ENSP00000381931

SEQ ID NO: 72294 - protein, 283 aa, Homo sapiens
  Payload ID: 14313
  Gene Symbol: RCC1
  Gene Name: regulator of chromosome condensation 1
  ENSP ID: ENSP00000394650
MSPKRIAKRRSPPADAIPKSKKVKVSHRSHSTEPGLVLTLGQGDVGQLGLGENVMERKKPALVSIPEDVVQAEAGGMHTVCLSKSGQVYSFGCNDEGALGRDTSVEGSEMVPGKVELQEKVVQVSAGDSHTAALTDDGRVFLWGSFRDNNGVIGLLEPMKKSMVPVQVQLDVPVVKVASGNDHLVMLTADGDLYTLGCGEQGQLGRVPELFANRGGRQGLERLLVPKCVMLKSRGSRGHVRFQDAFCGAYFTFAISHEGHVYGFGLSNYHQLGTPGTESCFIP

SEQ ID NO: 72295 - protein, 272 aa, Homo sapiens
  Payload ID: 14313
  Gene Symbol: RCC1
  Gene Name: regulator of chromosome condensation 1
  ENSP ID: ENSP00000402260
MSPKRIAKRRSPPADAIPKSKKVKVSHRSHSTEPGLVLTLGQGDVGQLGLGENVMERKKPALVSIPEDVVQAEAGGMHTVCLSKSGQVYSFGCNDEGALGRDTSVEGSEMVPGKVELQEKVVQVSAGDSHTAALTDDGRVFLWGSFRDNNGVIGLLEPMKKSMVPVQVQLDVPVVKVASGNDHLVMLTADGDLYTLGCGEQGQLGRVPELFANRGGRQGLERLLVPKCVMLKSRGSRGHVRFQDAFCGAYFTFAISHEGHVYGFGLSNYHQL

SEQ ID NO: 72296 - protein, 230 aa, Homo sapiens
  Payload ID: 14313
  Gene Symbol: RCC1
  Gene Name: regulator of chromosome condensation 1
  ENSP ID: ENSP00000402740
MSPKRIAKRRSPPADAIPKSKKVKVSHRSHSTEPGLVLTLGQGDVGQLGLGENVMERKKPALVSIPEDVVQAEAGGMHTVCLSKSGQVYSFGCNDEGALGRDTSVEGSEMVPGKVELQEKVVQVSAGDSHTAALTDDGRVFLWGSFRDNNGVIGLLEPMKKSMVPVQVQLDVPVVKVASGNDHLVMLTADGDLYTLGCGEQGQLGRVPELFANRGGRQGLERLLVPKCVM

SEQ ID NO: 72297 - protein, 272 aa, Homo sapiens
  Payload ID: 14313
  Gene Symbol: RCC1
  Gene Name: regulator of chromosome condensation 1
  ENSP ID: ENSP00000405258
MMEAEDRKMSPKRIAKRRSPPADAIPKSKKVKVSHRSHSTEPGLVLTLGQGDVGQLGLGENVMERKKPALVSIPEDVVQAEAGGMHTVCLSKSGQVYSFGCNDEGALGRDTSVEGSEMVPGKVELQEKVVQVSAGDSHTAALTDDGRVFLWGSFRHCLFHTSQRLGWGKEVWRQGLSHLRVSKDNNGVIGLLEPMKKSMVPVQVQLDVPVVKVASGNDHLVMLTADGDLYTLGCGEQGQLGRVPELFANRGGRQGLERLLVPKCVMLKSRGS

SEQ ID NO: 72298 - protein, 372 aa, Homo sapiens
  Payload ID: 14313
  Gene Symbol: RCC1
  Gene Name: regulator of chromosome condensation 1
  ENSP ID: ENSP00000413644
MSPKRIAKRRSPPADAIPKSKKVKDTRAAASRRVPGARSCQVSHRSHSTEPGLVLTLGQGDVGQLGLGENVMERKKPALVSIPEDVVQAEAGGMHTVCLSKSGQVYSFGCNDEGALGRDTSVEGSEMVPGKVELQEKVVQVSAGDSHTAALTDDGRVFLWGSFRDNNGVIGLLEPMKKSMVPVQVQLDVPVVKVASGNDHLVMLTADGDLYTLGCGEQGQLGRVPELFANRGGRQGLERLLVPKCVMLKSRGSRGHVRFQDAFCGAYFTFAISHEGHVYGFGLSNYHQLGTPGTESCFIPQNLTSFKNSTKSWVGFSGGQHHTVCMDSEGKAYSLGRAEYGRLGLGEGAEEKSIPTLISRLPAVSSVACGAS

SEQ ID NO: 72299 - protein, 148 aa, Homo sapiens
  Payload ID: 14313
  Gene Symbol: RCC1
  Gene Name: regulator of chromosome condensation 1
  ENSP ID: ENSP00000472057
MGLCREEDGFVRHALGEGGLQIGEGALPGRGWVVGARGSPAVDLWEPCVLNSAAAQSVSRLFAGHLLRPSLAGLGDSSEKSRPVSLANYALEPRRRTLLDRKMSPKRIAKRRSPPADAIPKSKKVKDTRAAASRRVPGARSCQVSHRS

SEQ ID NO: 72300 - protein, 522 aa, Homo sapiens; identical to SEQ ID NO: 69015
  Payload ID: 14314
  Gene Symbol: RCC2
  Gene Name: regulator of chromosome condensation 2
  Uniprot ID: Q9P258
  ENSP ID: ENSP00000364582

SEQ ID NO: 72301 - protein, 522 aa, Homo sapiens; identical to SEQ ID NO: 69015
  Payload ID: 14314
  Gene Symbol: RCC2
  Gene Name: regulator of chromosome condensation 2
  Uniprot ID: Q9P258
  ENSP ID: ENSP00000364585

SEQ ID NO: 72302 - protein, 235 aa, Homo sapiens
  Payload ID: 14315
  Gene Symbol: RGS9BP
  Gene Name: regulator of G protein signaling 9 binding protein
  Uniprot ID: Q6ZS82
  ENSP ID: ENSP00000334134
MAREECKALLDGLNKTTACYHHLVLTVGGSADSQNLRQELQKTRQKAQELAVSTCARLTAVLRDRGLAADERAEFERLWVAFSGCLDLLEADMRRALELGAAFPLHAPRRPLVRTGVAGASSGVAARALSTRSLRLEAEGDFDVADLRELEREVLQVGEMIDNMEMKVNVPRWTVQARQAAGAELLSTVSAGPSSVVSLQERGGGCDPRKALAAILFGAVLLAAVALAVCVAKLS

SEQ ID NO: 72303 - protein, 209 aa, Homo sapiens
  Payload ID: 14316
  Gene Symbol: RGS1
  Gene Name: regulator of G-protein signaling 1
  Uniprot ID: Q08116
  ENSP ID: ENSP00000356429
MRAAAISTPKLDKMPGMFFSANPKELKGTTHSLLDDKMQKRRPKTFGMDMKAYLRSMIPHLESGMKSSKSKDVLSAAEVMQWSQSLEKLLANQTGQNVFGSFLKSEFSEENIEFWLACEDYKKTESDLLPCKAEEIYKAFVHSDAAKQINIDFRTRESTAKKIKAPTPTCFDEAQKVIYTLMEKDSYPRFLKSDIYLNLLNDLQANSLK

SEQ ID NO: 72304 - protein, 169 aa, Homo sapiens
  Payload ID: 14316
  Gene Symbol: RGS1
  Gene Name: regulator of G-protein signaling 1
  Uniprot ID: Q08116
  ENSP ID: ENSP00000464323
MRAAAISTPKLDKMPGMFFSANPKELKGTTHSLLDDKMQKRRPKTFGMDMKAYLRSMIPHLESGMKSSKSKDVLSAAEVMQWSQSLEKLLANQTGQNVFGSFLKSEFSEENIEFWLACEDYKKTESDLLPCKAEEIYKAFVHSDAAKQVSIKLIIISFSIKDPICRNNI

SEQ ID NO: 72305 - protein, 173 aa, Homo sapiens
  Payload ID: 14317
  Gene Symbol: RGS10
  Gene Name: regulator of G-protein signaling 10
  Uniprot ID: O43665
  ENSP ID: ENSP00000358097
MQSELCFADIHDSDGSSSSSHQSLKSTAKWAASLENLLEDPEGVKRFREFLKKEFSEENVLFWLACEDFKKMQDKTQMQEKAKEIYMTFLSSKASSQVNVEGQSRLNEKILEEPHPLMFQKLQDQIFNLMKYDSYSRFLKSDLFLKHKRTEEEEEDLPDAQTAAKRASRIYNT

SEQ ID NO: 72306 - protein, 181 aa, Homo sapiens
  Payload ID: 14317
  Gene Symbol: RGS10
  Gene Name: regulator of G-protein signaling 10
  Uniprot ID: O43665
  ENSP ID: ENSP00000358099
MFNRAVSRLSRKRPPSDIHDSDGSSSSSHQSLKSTAKWAASLENLLEDPEGVKRFREFLKKEFSEENVLFWLACEDFKKMQDKTQMQEKAKEIYMTFLSSKASSQVNVEGQSRLNEKILEEPHPLMFQKLQDQIFNLMKYDSYSRFLKSDLFLKHKRTEEEEEDLPDAQTAAKRASRIYNT

SEQ ID NO: 72307 - protein, 167 aa, Homo sapiens
  Payload ID: 14317
  Gene Symbol: RGS10
  Gene Name: regulator of G-protein signaling 10
  Uniprot ID: O43665
  ENSP ID: ENSP00000376605
MEHIHDSDGSSSSSHQSLKSTAKWAASLENLLEDPEGVKRFREFLKKEFSEENVLFWLACEDFKKMQDKTQMQEKAKEIYMTFLSSKASSQVNVEGQSRLNEKILEEPHPLMFQKLQDQIFNLMKYDSYSRFLKSDLFLKHKRTEEEEEDLPDAQTAAKRASRIYNT

SEQ ID NO: 72308 - protein, 84 aa, Homo sapiens
  Payload ID: 14318
  Gene Symbol: RGS11
  Gene Name: regulator of G-protein signaling 11
  ENSP ID: ENSP00000168869
MERVVVSMQDPDQGVKMRSQRLLVTVIPHAVTGSDVVQWLAQKFCVSEEDPVLLDKYPEAGCRAGLCHLPGQEEHPKTGDPGGL

SEQ ID NO: 72309 - protein, 446 aa, Homo sapiens
  Payload ID: 14318
  Gene Symbol: RGS11
  Gene Name: regulator of G-protein signaling 11
  Uniprot ID: O94810
  ENSP ID: ENSP00000319069
MERVVVSMQDPDQGVKMRSQRLLVTVIPHAVTGSDVVQWLAQKFCVSEEEALHLGAVLVQHGYIYPLRDPRSLMLRPDETPYRFQTPYFWTSTLRPAAELDYAIYLAKKNIRKRGTLVDYEKDCYDRLHKKINHAWDLVLMQAREQLRAAKQRSKGDRLVIACQEQTYWLVNRPPPGAPDVLEQGPGRGSCAASRVLMTKSADFHKREIEYFRKALGRTRVKSSVCLEAYLSFCGQRGPHDPLVSGCLPSNPWISDNDAYWVMNAPTVAAPTKLRVERWGFSFRELLEDPVGRAHFMDFLGKEFSGENLSFWEACEELRYGAQAQVPTLVDAVYEQFLAPGAAHWVNIDSRTMEQTLEGLRQPHRYVLDDAQLHIYMLMKKDSYPRFLKSDMYKALLAEAGIPLEMKRRVFPFTWRPRHSSPSPALLPTPVEPTAACGPGGGDGVA

SEQ ID NO: 72310 - protein, 456 aa, Homo sapiens
  Payload ID: 14318
  Gene Symbol: RGS11
  Gene Name: regulator of G-protein signaling 11
  Uniprot ID: O94810
  ENSP ID: ENSP00000352778
MAAGPAPPPGRPRAQMPHLRKMERVVVSMQDPDQGVKMRSQRLLVTVIPHAVTGSDVVQWLAQKFCVSEEEALHLGAVLVQHGYIYPLRDPRSLMLRPDETPYRFQVRLGGAAIYLAKKNIRKRGTLVDYEKDCYDRLHKKINHAWDLVLMQAREQLRAAKQRSKGDRLVIACQEQTYWLVNRPPPGAPDVLEQGPGRGSCAASRVLMTKSADFHKREIEYFRKALGRTRVKSSVCLEAYLSFCGQRGPHDPLVSGCLPSNPWISDNDAYWVMNAPTVAAPTKLRVERWGFSFRELLEDPVGRAHFMDFLGKEFSGENLSFWEACEELRYGAQAQVPTLVDAVYEQFLAPGAAHWVNIDSRTMEQTLEGLRQPHRYVLDDAQLHIYMLMKKDSYPRFLKSDMYKALLAEAGIPLEMKRRVFPFTWRPRHSSPSPALLPTPVEPTAACGPGGGDGVA

SEQ ID NO: 72311 - protein, 467 aa, Homo sapiens
  Payload ID: 14318
  Gene Symbol: RGS11
  Gene Name: regulator of G-protein signaling 11
  Uniprot ID: O94810
  ENSP ID: ENSP00000380876
MAAGPAPPPGRPRAQMPHLRKMERVVVSMQDPDQGVKMRSQRLLVTVIPHAVTGSDVVQWLAQKFCVSEEEALHLGAVLVQHGYIYPLRDPRSLMLRPDETPYRFQTPYFWTSTLRPAAELDYAIYLAKKNIRKRGTLVDYEKDCYDRLHKKINHAWDLVLMQAREQLRAAKQRSKGDRLVIACQEQTYWLVNRPPPGAPDVLEQGPGRGSCAASRVLMTKSADFHKREIEYFRKALGRTRVKSSVCLEAYLSFCGQRGPHDPLVSGCLPSNPWISDNDAYWVMNAPTVAAPTKLRVERWGFSFRELLEDPVGRAHFMDFLGKEFSGENLSFWEACEELRYGAQAQVPTLVDAVYEQFLAPGAAHWVNIDSRTMEQTLEGLRQPHRYVLDDAQLHIYMLMKKDSYPRFLKSDMYKALLAEAGIPLEMKRRVFPFTWRPRHSSPSPALLPTPVEPTAACGPGGGDGVA

SEQ ID NO: 72312 - protein, 1447 aa, Homo sapiens
  Payload ID: 14319
  Gene Symbol: RGS12
  Gene Name: regulator of G-protein signaling 12
  Uniprot ID: O14924
  ENSP ID: ENSP00000338509
MFRAGEASKRPLPGPSPPRVRSVEVARGRAGYGFTLSGQAPCVLSCVMRGSPADFVGLRAGDQILAVNEINVKKASHEDVVKLIGKCSGVLHMVIAEGVGRFESCSSDEEGGLYEGKGWLKPKLDSKALGINRAERVVEEMQSGGIFNMIFENPSLCASNSEPLKLKQRSLSESAATRFDVGHESINNPNPNMLSKEEISKVIHDDSVFSIGLESHDDFALDASILNVAMIVGYLGSIELPSTSSNLESDSLQAIRGCMRRLRAEQKIHSLVTMKIMHDCVQLSTDKAGVVAEYPAEKLAFSAVCPDDRRFFGLVTMQTNDDGSLAQEEEGALRTSCHVFMVDPDLFNHKIHQGIARRFGFECTADPDTNGCLEFPASSLPVLQFISVLYRDMGELIEGMRARAFLDGDADAHQNNSTSSNSDSGIGNFHQEEKSNRVLVVDLGGSSSRHGPGGSAWDGVGGRGAQPWGAPWTGPFCPDPEGSPPFEAAHQTDRFWDLNKHLGPASPVEVPPASLRSSVPPSKRGTVGAGCGFNQRWLPVHVLREWQCGHTSDQDSYTDSTDGWSSINCGTLPPPMSKIPADRYRVEGSFAQPPLNAPKREWSRKAFGMQSIFGPHRNVRKTKEDKKGSKFGRGTGLTQPSQRTSARRSFGRSKRFSITRSLDDLESATVSDGELTGADLKDCVSNNSLSSNASLPSVQSCRRLRERRVASWAVSFERLLQDPVGVRYFSDFLRKEFSEENILFWQACEYFNHVPAHDKKELSYRAREIFSKFLCSKATTPVNIDSQAQLADDVLRAPHPDMFKEQQLQIFNLMKFDSYTRFLKSPLYQECILAEVEGRALPDSQQVPSSPASKHSLGSDHSSVSTPKKLSGKSKSGRSLNEELGDEDSEKKRKGAFFSWSRTRSTGRSQKKREHGDHADDALHANGGLCRRESQGSVSSAGSLDLSEACRTLAPEKDKATKHCCIHLPDGTSCVVAVKAGFSIKDILSGLCERHGINGAAADLFLVGGDKPLVLHQDSSILESRDLRLEKRTLFRLDLVPINRSVGLKAKPTKPVTEVLRPVVARYGLDLSGLLVRLSGEKEPLDLGAPISSLDGQRVVLEEKDPSRGKASADKQKGVPVKQNTAVNSSSRNHSATGEERTLGKSNSIKIKGENGKNARDPRLSKREESIAKIGKKKYQKINLDEAEEFFELISKAQSNRADDQRGLLRKEDLVLPEFLRLPPGSTELTLPTPAAVAKGFSKRSATGNGRESASQPGEQWEPVQESSDSPSTSPGSASSPPGPPGTTPPGQKSPSGPFCTPQSPVSLAQEGTAQIWKRQSQEVEAGGIQTVEDEHVAELTLMGEGDISSPNSTLLPPPSTPQEVPGPSRPGSGTHGSRDLPVNRIIDVDLVTGSAPGRDGGIAGAQAGPGRSQASGGPPTSDLPGLGPVPGEPAKPKTSAHHATFV

SEQ ID NO: 72313 - protein, 1447 aa, Homo sapiens; identical to SEQ ID NO: 72312
  Payload ID: 14319
  Gene Symbol: RGS12
  Gene Name: regulator of G-protein signaling 12
  Uniprot ID: O14924
  ENSP ID: ENSP00000339381

SEQ ID NO: 72314 - protein, 799 aa, Homo sapiens
  Payload ID: 14319
  Gene Symbol: RGS12
  Gene Name: regulator of G-protein signaling 12
  Uniprot ID: O14924
  ENSP ID: ENSP00000342133
MNLGKELSNETHVSNDQQSATVSDGELTGADLKDCVSNNSLSSNASLPSVQSCRRLRERRVASWAVSFERLLQDPVGVRYFSDFLRKEFSEENILFWQACEYFNHVPAHDKKELSYRAREIFSKFLCSKATTPVNIDSQAQLADDVLRAPHPDMFKEQQLQIFNLMKFDSYTRFLKSPLYQECILAEVEGRALPDSQQVPSSPASKHSLGSDHSSVSTPKKLSGKSKSGRSLNEELGDEDSEKKRKGAFFSWSRTRSTGRSQKKREHGDHADDALHANGGLCRRESQGSVSSAGSLDLSEACRTLAPEKDKATKHCCIHLPDGTSCVVAVKAGFSIKDILSGLCERHGINGAAADLFLVGGDKPLVLHQDSSILESRDLRLEKRTLFRLDLVPINRSVGLKAKPTKPVTEVLRPVVARYGLDLSGLLVRLSGEKEPLDLGAPISSLDGQRVVLEEKDPSRGKASADKQKGVPVKQNTAVNSSSRNHSATGEERTLGKSNSIKIKGENGKNARDPRLSKREESIAKIGKKKYQKINLDEAEEFFELISKAQSNRADDQRGLLRKEDLVLPEFLRLPPGSTELTLPTPAAVAKGFSKRSATGNGRESASQPGEQWEPVQESSDSPSTSPGSASSPPGPPGTTPPGQKSPSGPFCTPQSPVSLAQEGTAQIWKRQSQEVEAGGIQTVEDEHVAELTLMGEGDISSPNSTLLPPPSTPQEVPGPSRPGSGTHGSRDLPVNRIIDVDLVTGSAPGRDGGIAGAQAGPGRSQASGGPPTSDLPGLGPVPGEPAKPKTSAHHATFV

SEQ ID NO: 72315 - protein, 1376 aa, Homo sapiens
  Payload ID: 14319
  Gene Symbol: RGS12
  Gene Name: regulator of G-protein signaling 12
  Uniprot ID: O14924
  ENSP ID: ENSP00000372238
MFRAGEASKRPLPGPSPPRVRSVEVARGRAGYGFTLSGQAPCVLSCVMRGSPADFVGLRAGDQILAVNEINVKKASHEDVVKLIGKCSGVLHMVIAEGVGRFESCSSDEEGGLYEGKGWLKPKLDSKALGINRAERVVEEMQSGGIFNMIFENPSLCASNSEPLKLKQRSLSESAATRFDVGHESINNPNPNMLSKEEISKVIHDDSVFSIGLESHDDFALDASILNVAMIVGYLGSIELPSTSSNLESDSLQAIRGCMRRLRAEQKIHSLVTMKIMHDCVQLSTDKAGVVAEYPAEKLAFSAVCPDDRRFFGLVTMQTNDDGSLAQEEEGALRTSCHVFMVDPDLFNHKIHQGIARRFGFECTADPDTNGCLEFPASSLPVLQFISVLYRDMGELIEGMRARAFLDGDADAHQNNSTSSNSDSGIGNFHQEEKSNRVLVVDLGGSSSRHGPGGSAWDGVGGRGAQPWGAPWTGPFCPDPEGSPPFEAAHQTDRFWDLNKHLGPASPVEVPPASLRSSVPPSKRGTVGAGCGFNQRWLPVHVLREWQCGHTSDQDSYTDSTDGWSSINCGTLPPPMSKIPADRYRVEGSFAQPPLNAPKREWSRKAFGMQSIFGPHRNVRKTKEDKKGSKFGRGTGLTQPSQRTSARRSFGRSKRFSITRSLDDLESATVSDGELTGADLKDCVSNNSLSSNASLPSVQSCRRLRERRVASWAVSFERLLQDPVGVRYFSDFLRKEFSEENILFWQACEYFNHVPAHDKKELSYRAREIFSKFLCSKATTPVNIDSQAQLADDVLRAPHPDMFKEQQLQIFNLMKFDSYTRFLKSPLYQECILAEVEGRALPDSQQVPSSPASKHSLGSDHSSVSTPKKLSGKSKSGRSLNEELGDEDSEKKRKGAFFSWSRTRSTGRSQKKREHGDHADDALHANGGLCRRESQGSVSSAGSLDLSEACRTLAPEKDKATKHCCIHLPDGTSCVVAVKAGFSIKDILSGLCERHGINGAAADLFLVGGDKPLVLHQDSSILESRDLRLEKRTLFRLDLVPINRSVGLKAKPTKPVTEVLRPVVARYGLDLSGLLVRLSGEKEPLDLGAPISSLDGQRVVLEEKDPSRGKASADKQKGVPVKQNTAVNSSSRNHSATGEERTLGKSNSIKIKGENGKNARDPRLSKREESIAKIGKKKYQKINLDEAEEFFELISKAQSNRADDQRGLLRKEDLVLPEFLRLPPGSTELTLPTPAAVAKGFSKRSATGNGRESASQPGEQWEPVQESSDSPSTSPGSASSPPGPPGTTPPGQKSPSGPFCTPQSPVSLAQEGTAQIWKRQSQEVEAGGIQTVEDEHVAELTLMGEGDISSPNSTLLPPPSTPQEVPGPSRPGTSRF

SEQ ID NO: 72316 - protein, 667 aa, Homo sapiens
  Payload ID: 14319
  Gene Symbol: RGS12
  Gene Name: regulator of G-protein signaling 12
  ENSP ID: ENSP00000424251
MFRAGEASKRPLPGPSPPRVRSVEVARGRAGYGFTLSGQAPCVLSCVMRGSPADFVGLRAGDQILAVNEINVKKASHEDVVKLIGKCSGVLHMVIAEGVGRFESCSSDEEGGLYEGKGWLKPKLDSKALGINRAERVVEEMQSGGIFNMIFENPSLCASNSEPLKLKQRSLSESAATRFDVGHESINNPNPNMLSKEEISKVIHDDSVFSIGLESHDDFALDASILNVAMIVGYLGSIELPSTSSNLESDSLQAIRGCMRRLRAEQKIHSLVTMKIMHDCVQLSTDKAGVVAEYPAEKLAFSAVCPDDRRFFGLVTMQTNDDGSLAQEEEGALRTSCHVFMVDPDLFNHKIHQGIARRFGFECTADPDTNGCLEFPASSLPVLQFISVLYRDMGELIEGMRARAFLDGDADAHQNNSTSSNSDSGIGNFHQEEKSNRVLVVDLGGSSSRHGPGGSAWDGVGGRGAQPWGAPWTGPFCPDPEGSPPFEAAHQTDRFWDLNKHLGPASPVEVPPASLRSSVPPSKRGTVGAGCGFNQRWLPVHVLREWQCGHTSDQDSYTDSTDGWSSINCGTLPPPMSKIPADRYRVEGSFAQPPLNAPKREWSRKAFGMQSIFGPHRNVRKTKEDKKGSKFGRGTGLTQPSQRTSARRSFGRSKRFSITRSLDDLES

SEQ ID NO: 72317 - protein, 159 aa, Homo sapiens
  Payload ID: 14320
  Gene Symbol: RGS13
  Gene Name: regulator of G-protein signaling 13
  Uniprot ID: O14921
  ENSP ID: ENSP00000375853
MSRRNCWICKMCRDESKRPPSNLTLEEVLQWAQSFENLMATKYGPVVYAAYLKMEHSDENIQFWMACETYKKIASRWSRISRAKKLYKIYIQPQSPREINIDSSTRETIIRNIQEPTETCFEEAQKIVYMHMERDSYPRFLKSEMYQKLLKTMQSNNSF

SEQ ID NO: 72318 - protein, 159 aa, Homo sapiens; identical to SEQ ID NO: 72317
  Payload ID: 14320
  Gene Symbol: RGS13
  Gene Name: regulator of G-protein signaling 13
  Uniprot ID: O14921
  ENSP ID: ENSP00000442837

SEQ ID NO: 72319 - protein, 566 aa, Homo sapiens
  Payload ID: 14321
  Gene Symbol: RGS14
  Gene Name: regulator of G-protein signaling 14
  Uniprot ID: O43566
  ENSP ID: ENSP00000386229
MPGKPKHLGVPNGRMVLAVSDGELSSTTGPQGQGEGRGSSLSIHSLPSGPSSPFPTEEQPVASWALSFERLLQDPLGLAYFTEFLKKEFSAENVTFWKACERFQQIPASDTQQLAQEARNIYQEFLSSQALSPVNIDRQAWLGEEVLAEPRPDMFRAQQLQIFNLMKFDSYARFVKSPLYRECLLAEAEGRPLREPGSSRLGSPDATRKKPKLKPGKSLPLGVEELGQLPPVEGPGGRPLRKSFRRELGGTANAALRRESQGSLNSSASLDLGFLAFVSSKSESHRKSLGSTEGESESRPGKYCCVYLPDGTASLALARPGLTIRDMLAGICEKRGLSLPDIKVYLVGNEQALVLDQDCTVLADQEVRLENRITFELELTALERVVRISAKPTKRLQEALQPILEKHGLSPLEVVLHRPGEKQPLDLGKLVSSVAAQRLVLDTLPGVKISKARDKSPCRSQGCPPRTQDKATHPPPASPSSLVKVPSSATGKRQTCDIEGLVELLNRVQSSGAHDQRGLLRKEDLVLPEFLQLPAQGPSSEETPPQTKSAAQPIGGSLNSTTDSAL

SEQ ID NO: 72320 - protein, 437 aa, Homo sapiens
  Payload ID: 14321
  Gene Symbol: RGS14
  Gene Name: regulator of G-protein signaling 14
  ENSP ID: ENSP00000422329
  MOD_RES (1)..(1): Any amino acid
XSPVNIDRQAWLGEEVLAEPRPDMFRAQQLQIFNLMKFDSYARFVKSPLYRECLLAEAEGRPLREPGSSRLGSPDATRKKPKLKPGKSLPLGVEELGQLPPVEGPGGRPLRKSFRRELGGTANAALRRESQGSLNSSASLDLGFLAFVSSKSESHRKSLGSTEGESESRPGKYCCVYLPDGTASLALARPGLTIRDMLAGICEKRGLSLPDIKVYLVGNEQKALVLDQDCTVLADQEVRLENRITFELELTALERVVRISAKPTKRLQEALQPILEKHGLSPLEVVLHRPGEKQPLDLGKLVSSVAAQRLVLDTLPGVKISKARDKSPCRSQGCPPRTQDKATHPPPASPSSLVKVPSSATGKRQTCDIEGLVELLNRVQSSGAHDQRGLLRKEDLVLPEFLQLPAQGPSSEETPPQTKSAAQPIGGSLNSTTDSAL

SEQ ID NO: 72321 - protein, 202 aa, Homo sapiens
  Payload ID: 14322
  Gene Symbol: RGS16
  Gene Name: regulator of G-protein signaling 16
  Uniprot ID: O15492
  ENSP ID: ENSP00000356529
MCRTLAAFPTTCLERAKEFKTRLGIFLHKSELGCDTGSTGKFEWGSKHSKENRNFSEDVLGWRESFDLLLSSKNGVAAFHAFLKTEFSEENLEFWLACEEFKKIRSATKLASRAHQIFEEFICSEAPKEVNIDHETHELTRMNLQTATATCFDAAQGKTRTLMEKDSYPRFLKSPAYRDLAAQASAASATLSSCSLDEPSHT

SEQ ID NO: 72322 - protein, 210 aa, Homo sapiens
  Payload ID: 14323
  Gene Symbol: RGS17
  Gene Name: regulator of G-protein signaling 17
  Uniprot ID: Q9UGC6
  ENSP ID: ENSP00000206262
MRKRQQSQNEGTPAVSQAPGNQRPNNTCCFCWCCCCSCSCLTVRNEERGENAGRPTHTTKMESIQVLEECQNPTAEEVLSWSQNFDKMMKAPAGRNLFREFLRTEYSEENLLFWLACEDLKKEQNKKVIEEKARMIYEDYISILSPKEVSLDSRVREVINRNLLDPNPHMYEDAQLQIYTLMHRDSFPRFLNSQIYKSFVESTAGSSSES

SEQ ID NO: 72323 - protein, 210 aa, Homo sapiens; identical to SEQ ID NO: 72322
  Payload ID: 14323
  Gene Symbol: RGS17
  Gene Name: regulator of G-protein signaling 17
  Uniprot ID: Q9UGC6
  ENSP ID: ENSP00000356194

SEQ ID NO: 72324 - protein, 235 aa, Homo sapiens
  Payload ID: 14324
  Gene Symbol: RGS18
  Gene Name: regulator of G-protein signaling 18
  Uniprot ID: Q9NS28
  ENSP ID: ENSP00000356430
METTLLFFSQINMCESKEKTFFKLIHGSGKEETSKEAKIRAKEKRNRLSLLVQKPEFHEDTRSSRSGHLAKETRVSPEEAVKWGESFDKLLSHRDGLEAFTRFLKTEFSEENIEFWIACEDFKKSKGPQQIHLKAKAIYEKFIQTDAPKEVNLDFHTKEVITNSITQPTLHSFDAAQSRVYQLMEQDSYTRFLKSDIYLDLMEGRPQRPTNLRRRSRSFTCNEFQDVQSDVAIWL

SEQ ID NO: 72325 - protein, 217 aa, Homo sapiens
  Payload ID: 14325
  Gene Symbol: RGS19
  Gene Name: regulator of G-protein signaling 19
  Uniprot ID: P49795
  ENSP ID: ENSP00000333194
MPTPHEAEKQITGPEEADRPPSMSSHDTASPAAPSRNPCCLCWCCCCSCSWNQERRRAWQASRESKLQPLPSCEVCATPSPEEVQSWAQSFDKLMHSPAGRSVFRAFLRTEYSEENMLFWLACEELKAEANQHVVDEKARLIYEDYVSILSPKEVSLDSRVREGINKKMQEPSAHTFDDAQLQIYTLMHRDSYPRFLSSPTYRALLLQGPSQSSSEA

SEQ ID NO: 72326 - protein, 217 aa, Homo sapiens; identical to SEQ ID NO: 72325
  Payload ID: 14325
  Gene Symbol: RGS19
  Gene Name: regulator of G-protein signaling 19
  Uniprot ID: P49795
  ENSP ID: ENSP00000378483

SEQ ID NO: 72327 - protein, 211 aa, Homo sapiens
  Payload ID: 14326
  Gene Symbol: RGS2
  Gene Name: regulator of G-protein signaling 2
  Uniprot ID: P41220
  ENSP ID: ENSP00000235382
MQSAMFLAVQHDCRPMDKSAGSGHKSEEKREKMKRTLLKDWKTRLSYFLQNSSTPGKPKTGKKSKQQAFIKPSPEEAQLWSEAFDELLASKYGLAAFRAFLKSEFCEENIEFWLACEDFKKTKSPQKLSSKARKIYTDFIEKEAPKEINIDFQTKTLIAQNIQEATSGCFTTAQKRVYSLMENNSYPRFLESEFYQDLCKKPQITTEPHAT

SEQ ID NO: 72328 - protein, 241 aa, Homo sapiens
  Payload ID: 14327
  Gene Symbol: RGS20
  Gene Name: regulator of G-protein signaling 20
  Uniprot ID: O76081
  ENSP ID: ENSP00000276500
MRTADGGEPAGASSPAGRVDGGLQMGSERMEMRKRQMPAAQDTPGAAPGQPGAGSRGSNACCFCWCCCCSCSCLTVRNQEDQRPTIASHELRADLPTWEESPAPTLEEVNAWAQSFDKLMVTPAGRNAFREFLRTEFSEENMLFWMACEELKKEANKNIIEEKARIIYEDYISILSPKEVSLDSRVREVINRNMVEPSQHIFDDAQLQIYTLMHRDSYPRFMNSAVYKDLLQSLSEKSIEA

SEQ ID NO: 72329 - protein, 388 aa, Homo sapiens
  Payload ID: 14327
  Gene Symbol: RGS20
  Gene Name: regulator of G-protein signaling 20
  Uniprot ID: O76081
  ENSP ID: ENSP00000297313
MPQLSQDNQECLQKHFSRPSIWTQFLPLFRAQRYNTDIHQITENEGDLRAVPDIKSFPPAQLPDSPAAPKLFGLLSSPLSSLARFFSHLLRRPPPEAPRRRLDFSPLLPALPAARLSRGHEELPGRLSLLLGAALALPGRPSGGRPLRPPHPVAKPREEDATAGQSSPMPQMGSERMEMRKRQMPAAQDTPGAAPGQPGAGSRGSNACCFCWCCCCSCSCLTVRNQEDQRPTIASHELRADLPTWEESPAPTLEEVNAWAQSFDKLMVTPAGRNAFREFLRTEFSEENMLFWMACEELKKEANKNIIEEKARIIYEDYISILSPKEVSLDSRVREVINRNMVEPSQHIFDDAQLQIYTLMHRDSYPRFMNSAVYKDLLQSLSEKSIEA

SEQ ID NO: 72330 - protein, 273 aa, Homo sapiens
  Payload ID: 14327
  Gene Symbol: RGS20
  Gene Name: regulator of G-protein signaling 20
  Uniprot ID: O76081
  ENSP ID: ENSP00000344630
MPQLSQDNQECLQKHFSRPSIWTQFLPLFRAQRYNTDIHQITENEGDLRAVPDIKQMGSERMEMRKRQMPAAQDTPGAAPGQPGAGSRGSNACCFCWCCCCSCSCLTVRNQEDQRPTIASHELRADLPTWEESPAPTLEEVNAWAQSFDKLMVTPAGRNAFREFLRTEFSEENMLFWMACEELKKEANKNIIEEKARIIYEDYISILSPKEVSLDSRVREVINRNMVEPSQHIFDDAQLQIYTLMHRDSYPRFMNSAVYKDLLQSLSEKSIEA

SEQ ID NO: 72331 - protein, 58 aa, Homo sapiens
  Payload ID: 14327
  Gene Symbol: RGS20
  Gene Name: regulator of G-protein signaling 20
  ENSP ID: ENSP00000428795
MPQLSQDNQECLQKHFSRPSIWTQFLPLFRAQRYNTDIHQITENEGDLRAVPDIKSHC

SEQ ID NO: 72332 - protein, 70 aa, Homo sapiens
  Payload ID: 14327
  Gene Symbol: RGS20
  Gene Name: regulator of G-protein signaling 20
  ENSP ID: ENSP00000429897
MPQLSQDNQECLQKHFSRPSIWTQFLPLFRAQRYNTDIHQITENEGDLRAVPDIKPCSYSGRSQRLGSVI

SEQ ID NO: 72333 - protein, 122 aa, Homo sapiens
  Payload ID: 14327
  Gene Symbol: RGS20
  Gene Name: regulator of G-protein signaling 20
  ENSP ID: ENSP00000430627
MVTPAGRNAFREFLRTEFSEENMLFWMACEELKKEANKNIIEEKARIIYEDYISILSPKEVSLDSRVREVINRNMVEPSQHIFDDAQLQIYTLMHRDSYPRFMNSAVYKDLLQSLSEKSIEA

SEQ ID NO: 72334 - protein, 152 aa, Homo sapiens
  Payload ID: 14328
  Gene Symbol: RGS21
  Gene Name: regulator of G-protein signaling 21
  Uniprot ID: Q2M5E4
  ENSP ID: ENSP00000428343
MPVKCCFYRSPTAETMTWSENMDTLLANQAGLDAFRIFLKSEFSEENVEFWLACEDFKKTKNADKIASKAKMIYSEFIEADAPKEINIDFGTRDLISKNIAEPTLKCFDEAQKLIYCLMAKDSFPRFLKSEIYKKLVNSQQVPNHKKWLPFL

SEQ ID NO: 72335 - protein, 1264 aa, Homo sapiens
  Payload ID: 14329
  Gene Symbol: RGS22
  Gene Name: regulator of G-protein signaling 22
  Uniprot ID: Q8NE09
  ENSP ID: ENSP00000354109
MPEKRLTAEPPTITEEEFEDSLATDDFLVDYFNEFLSLPTFSEAIRFNADYGVFEVANDAPQFLEKQLKKILQNQQPRNPIYDVVRKGKNEVKPVQMNAPDEDETINVNYNIMCLSREEGIKWIKKERLPAFLESDCYFEYRLAKLVSQVRWSKSGMNFTVGSNFSPWIVKKPPSLPPPATEEDNLVIMKKFYVSLGEASYTQTKDWFALAKQSQQTVSTFSLPCCVPYNKLKSPAISSVSENFIFDDGVHPRTKKDPSKTNKLISEFEEEEGEEEEVSVSLQDTPSQALLRVYLEKKQDVDESLTMHFSTCEEFLSSYIYFILRGAIQQIVGKPVGETPDYINFNNITKVSFDDCFESIHGKNFLSELVQTTKERSEEIEQTSLSSKNESAGPESRADWCISHRTYDIGNRKEFERFKKFIKGTLGERYWWLWMDIERLKVLKDPGRHQRHLEKMKKCYLVSNGDYYLSAEILSKFKLLDGSQWNEEHLRNIQSEVLKPLLLYWAPRFCVTHSASTKYASAELKFWHLRQAKPRKDIDPFPQMATLLPLRPKSCIPQIPEIQKEEFSLSQPPKSPNKSPEVKTATQKPWKRELLYPGSSKDDVIEKGSKYMSESSKVIHLTSFTDISECLKPQLDRRYAYTEEPRVKTVSDVGALGGSDMENLLQSLYVENRAGFFFTKFCEHSGNKLWKNSVYFWFDLQAYHQLFYQETLQPFKVCKQAQYLFATYVAPSATLDIGLQQEKKKEIYMKIQPPFEDLFDTAEEYILLLLLEPWTKMVKSDQIAYKKVELVEETRQLDSTYFRKLQALHKETFSKKAEDTTCEIGTGILSLSNVSKRTEYWDNVPAEYKHFKFSDLLNNKLEFEHFRQFLETHSSSMDLMCWTDIEQFRRITYRDRNQRKAKSIYIKNKYLNKKYFFGPNSPASLYQQNQVMHLSGGWGKILHEQLDAPVLVEIQKHVQNRLENVWLPLFLASEQFAARQKIKVQMKDIAEELLLQKAEKKIGVWKPVESKWISSSCKIIAFRKALLNPVTSRQFQRFVALKGDLLENGLLFWQEVQKYKDLCHSHCDESVIQKKITTIINCFINSSIPPALQIDIPVEQAQKIIEHRKELGPYVFREAQMTIFGVLFKFWPQFCEFRKNLTDENIMSVLERRQEYNKQKKKLAVLEDEKSGKDGIKQYANTSVPAIKTALLSDSFLGLQPYGRQPTWCYSKYIEALEQERILLKIQEELEKKLFAGLQPLTNFKASSSTMSLKKNMSAHSSQK

SEQ ID NO: 72336 - protein, 269 aa, Homo sapiens
  Payload ID: 14329
  Gene Symbol: RGS22
  Gene Name: regulator of G-protein signaling 22
  ENSP ID: ENSP00000427754
MDCGARGVEGAMETWQEDSLATDDFLVDYFNEFLSLPYLFATYVAPSATLDIGLQQEKKKEIYMKIQPPFEDLFDTAEEYILLLLLEPWTKMVKSDQIAYKKVELVEETRQLDSTYFRKLQALHKETFSKKAEDTTCEIGTGILSLSNVSKRTEYWDNVPAEYKHFKFSDLLNNKLEFEHFRQFLETHSSSMDLMCWTDIEQFRRITYRDRNQRKAKSIYIKNKYLNKKYFFGPNSPASLYQQNQVMHLSGGWGKILHEQLDAPVLVEI

SEQ ID NO: 72337 - protein, 504 aa, Homo sapiens
  Payload ID: 14329
  Gene Symbol: RGS22
  Gene Name: regulator of G-protein signaling 22
  Uniprot ID: Q8NE09
  ENSP ID: ENSP00000427798
MPEKRLTAEPPTITEEEFEDSLATDDFLVDYFNEFLSLPTFSEAIRFNADYGVFEVANDAPQFLEKQLKKILQNQQPRNPIYDVVRKGKNEVKPVQMNAPDEDETINVNYNIMCLSREEGIKWIKKERLPAFLESDCYFEYRLAKLVSQVRWSKSGMNFTVGSNFSPWIVKKPPSLPPPATEEDNLVIMKKFYVSLGEASYTQTKDWFALAKQSQQTVSTFSLPCCVPYNKLKSPAISSVSENFIFDDGVHPRTKKDPSKTNKLISEFEEEEGEEEEVSVSLQDTPSQALLRVYLEKKQDVDESLTMHFSTCEEFLSSYIYFILRGAIQQIVGKPVGETPDYINFNNITKVSFDDCFESIHGKNFLSELVQTTKERSEEIEQTSLSSKNESAGPESRADWCISHRTYDIGNRKEFERFKKFIKGTLGERYWWLWMDIERLKVLKDPGRHQRHLEKMKKCYLVSNGDYYLSAEILSKFKLLDGSQWNEEHLRNIQSEVLKPLLLY

SEQ ID NO: 72338 - protein, 82 aa, Homo sapiens
  Payload ID: 14329
  Gene Symbol: RGS22
  Gene Name: regulator of G-protein signaling 22
  ENSP ID: ENSP00000427930
MNAPDEDETINVNYNIMCLSREEGIKWIKKERLPAFLESDCYFEYRLAKLVSQVRWSKSGMNFTVGSNFSPWIVKKPPSLPP

SEQ ID NO: 72339 - protein, 1252 aa, Homo sapiens
  Payload ID: 14329
  Gene Symbol: RGS22
  Gene Name: regulator of G-protein signaling 22
  Uniprot ID: Q8NE09
  ENSP ID: ENSP00000428212
MPEKRLTAEPPTITEEEFEDSLATDDFLVDYFNEFLSLPTFSEAIRFNADYGVFEVANDAPQFLEKQLKKILQNQQPRNPIYDVVRKGKNEVKPVQMNAPDEDETINVNYNIMCLSREEGIKWIKKERLPAFLESDCYFEYRLAKLVSQVRWSKSGMNFTVGSNFSPWIVKKPPSLPPPATEEDNLASYTQTKDWFALAKQSQQTVSTFSLPCCVPYNKLKSPAISSVSENFIFDDGVHPRTKKDPSKTNKLISEFEEEEGEEEEVSVSLQDTPSQALLRVYLEKKQDVDESLTMHFSTCEEFLSSYIYFILRGAIQQIVGKPVGETPDYINFNNITKVSFDDCFESIHGKNFLSELVQTTKERSEEIEQTSLSSKNESAGPESRADWCISHRTYDIGNRKEFERFKKFIKGTLGERYWWLWMDIERLKVLKDPGRHQRHLEKMKKCYLVSNGDYYLSAEILSKFKLLDGSQWNEEHLRNIQSEVLKPLLLYWAPRFCVTHSASTKYASAELKFWHLRQAKPRKDIDPFPQMATLLPLRPKSCIPQIPEIQKEEFSLSQPPKSPNKSPEVKTATQKPWKRELLYPGSSKDDVIEKGSKYMSESSKVIHLTSFTDISECLKPQLDRRYAYTEEPRVKTVSDVGALGGSDMENLLQSLYVENRAGFFFTKFCEHSGNKLWKNSVYFWFDLQAYHQLFYQETLQPFKVCKQAQYLFATYVAPSATLDIGLQQEKKKEIYMKIQPPFEDLFDTAEEYILLLLLEPWTKMVKSDQIAYKKVELVEETRQLDSTYFRKLQALHKETFSKKAEDTTCEIGTGILSLSNVSKRTEYWDNVPAEYKHFKFSDLLNNKLEFEHFRQFLETHSSSMDLMCWTDIEQFRRITYRDRNQRKAKSIYIKNKYLNKKYFFGPNSPASLYQQNQVMHLSGGWGKILHEQLDAPVLVEIQKHVQNRLENVWLPLFLASEQFAARQKIKVQMKDIAEELLLQKAEKKIGVWKPVESKWISSSCKIIAFRKALLNPVTSRQFQRFVALKGDLLENGLLFWQEVQKYKDLCHSHCDESVIQKKITTIINCFINSSIPPALQIDIPVEQAQKIIEHRKELGPYVFREAQMTIFGVLFKFWPQFCEFRKNLTDENIMSVLERRQEYNKQKKKLAVLEDEKSGKDGIKQYANTSVPAIKTALLSDSFLGLQPYGRQPTWCYSKYIEALEQERILLKIQEELEKKLFAGLQPLTNFKASSSTMSLKKNMSAHSSQK

SEQ ID NO: 72340 - protein, 136 aa, Homo sapiens
  Payload ID: 14329
  Gene Symbol: RGS22
  Gene Name: regulator of G-protein signaling 22
  ENSP ID: ENSP00000429198
MILRPPQPCGTEDSLATDDFLVDYFNEFLSLPCLSREEGIKWIKKERLPAFLESDCYFEYRLAKLVSQVRWSKSGMNFTVGSNFSPWIVKKPPSLPPPATEEDNLVIMKKFYVSLGEASYTQTKDWFALAKQSQQT

SEQ ID NO: 72341 - protein, 1083 aa, Homo sapiens
  Payload ID: 14329
  Gene Symbol: RGS22
  Gene Name: regulator of G-protein signaling 22
  ENSP ID: ENSP00000429382
MNAPDEDETINVNYNIMASYTQTKDWFALAKQSQQTVSTFSLPCCVPYNKLKSPAISSVSENFIFDDGVHPRTKKDPSKTNKLISEFEEEEGEEEEVSVSLQDTPSQALLRVYLEKKQDVDESLTMHFSTCEEFLSSYIYFILRGAIQQIVGKPVGETPDYINFNNITKVSFDDCFESIHGKNFLSELVQTTKERSEEIEQTSLSSKNESAGPESRADWCISHRTYDIGNRKEFERFKKFIKGTLGERYWWLWMDIERLKVLKDPGRHQRHLEKMKKCYLVSNGDYYLSAEILSKFKLLDGSQWNEEHLRNIQSEVLKPLLLYWAPRFCVTHSASTKYASAELKFWHLRQAKPRKDIDPFPQMATLLPLRPKSCIPQIPEIQKEEFSLSQPPKSPNKSPEVKTATQKPWKRELLYPGSSKDDVIEKGSKYMSESSKVIHLTSFTDISECLKPQLDRRYAYTEEPRVKTVSDVGALGGSDMENLLQSLYVENRAGFFFTKFCEHSGNKLWKNSVYFWFDLQAYHQLFYQETLQPFKVCKQAQYLFATYVAPSATLDIGLQQEKKKEIYMKIQPPFEDLFDTAEEYILLLLLEPWTKMVKSDQIAYKKVELVEETRQLDSTYFRKLQALHKETFSKKAEDTTCEIGTGILSLSNVSKRTEYWDNVPAEYKHFKFSDLLNNKLEFEHFRQFLETHSSSMDLMCWTDIEQFRRITYRDRNQRKAKSIYIKNKYLNKKYFFGPNSPASLYQQNQVMHLSGGWGKILHEQLDAPVLVEIQKHVQNRLENVWLPLFLASEQFAARQKIKVQMKDIAEELLLQKAEKKIGVWKPVESKWISSSCKIIAFRKALLNPVTSRQFQRFVALKGDLLENGLLFWQEVQKYKDLCHSHCDESVIQKKITTIINCFINSSIPPALQIDIPVEQAQKIIEHRKELGPYVFREAQMTIFGVLFKFWPQFCEFRKNLTDENIMSVLERRQEYNKQKKKLAVLEDEKSGKDGIKQYANTSVPAIKTALLSDSFLGLQPYGRQPTWCYSKYIEALEQERILLKIQEELEKKLFAGLQPLTNFKASSSTMSLKKNMSAHSSQK

SEQ ID NO: 72342 - protein, 111 aa, Homo sapiens
  Payload ID: 14329
  Gene Symbol: RGS22
  Gene Name: regulator of G-protein signaling 22
  ENSP ID: ENSP00000430378
KFWPQFCEFRKNLTDENIMSVLERRQEYNKQKKKLAVLEDEKSGKDGIKQYANTSVPAIKTALLSDSFLGLQPYGRQPTWCYSKYIEALEQERILLKIQEELEKKLFAGIL

SEQ ID NO: 72343 - protein, 88 aa, Homo sapiens
  Payload ID: 14329
  Gene Symbol: RGS22
  Gene Name: regulator of G-protein signaling 22
  ENSP ID: ENSP00000430903
MNAPDEDETINVNYNIMCLSREEGIKWIKKERLPAFLESDCYFEYRLAKLVSQVRWSKSGMNFTVGSNFSPWIVKKPPSLPPPATEED

SEQ ID NO: 72344 - protein, 1251 aa, Homo sapiens [sequence omitted]

SEQ ID NO: 72345 - protein, 1198 aa, Homo sapiens
  Payload ID: 14330
  Gene Symbol: RGS3
  Gene Name: regulator of G-protein signaling 3
  Uniprot ID: P49796
  ENSP ID: ENSP00000259406
MPVIPALWEVEMGRSQGQEIETILANRSHSDSTPLPNFLSGSHRPECCTCRLLTASGAQDSLPFGRRLYSGPWRSCEEVCHVSVLSVLSTSCGLSLSLPIFPGWMEWLSPDIALPRRDEWTQTSPARKRITHAKVQGAGQLRLSIDAQDRVLLLHIIEGKGLISKQPGTCDPYVKISLIPEDSRLRHQKTQTVPDCRDPAFHEHFFFPVQEEDDQKRLLVTVWNRASQSRQSGLIGCMSFGVKSLLTPDKEISGWYYLLGEHLGRTKHLKVARRRLRPLRDPLLRMPGGGDTENGKKLKITIPRGKDGFGFTICCDSPVRVQAVDSGGPAERAGLQQLDTVLQLNERPVEHWKCVELAHEIRSCPSEIILLVWRMVPQVKPGPDGGVLRRASCKSTHDLQSPPNKREKNCTHGVQARPEQRHSCHLVCDSSDGLLLGGWERYTEVAKRGGQHTLPALSRATAPTDPNYIILAPLNPGSQLLRPVYQEDTIPEESGSPSKGKSYTGLGKKSRLMKTVQTMKGHGNYQNCPVVRPHATHSSYGTYVTLAPKVLVFPVFVQPLDLCNPARTLLLSEELLLYEGRNKAAEVTLFAYSDLLLFTKEDEPGRCDVLRNPLYLQSVKLQEGSSEDLKFCVLYLAEKAECLFTLEAHSQEQKKRVCWCLSENIAKQQQLAASPPDSKMFETEADEKREMALEEGKGPGAEDSPPSKEPSPGQELPPGQDLPPNKDSPSGQEPAPSQEPLSSKDSATSEGSPPGPDAPPSKDVPPCQEPPPAQDLSPCQDLPAGQEPLPHQDPLLTKDLPAIQESPTRDLPPCQDLPPSQVSLPAKALTEDTMSSGDLLAATGDPPAAPRPAFVIPEVRLDSTYSQKAGAEQGCSGDEEDAEEAEEVEEGEEGEEDEDEDTSDDNYGERSEAKRSSMIETGQGAEGGLSLRVQNSLRRRTHSEGSLLQEPRGPCFASDTTLHCSDGEGAASTWGMPSPSTLKKELGRNGGSMHHLSLFFTGHRKMSGADTVGDDDEASRKRKSKNLAKDMKNKLGIFRRRNESPGAPPAGKADKMMKSFKPTSEEALKWGESLEKLLVHKYGLAVFQAFLRTEFSEENLEFWLACEDFKKVKSQSKMASKAKKIFAEYIAIQACKEVNLDSYTREHTKDNLQSVTRGCFDLAQKRIFGLMEKDSYPRFLRSDLYLDLINQKKMSPPL

SEQ ID NO: 72346 - protein, 602 aa, Homo sapiens
  Payload ID: 14330
  Gene Symbol: RGS3
  Gene Name: regulator of G-protein signaling 3
  Uniprot ID: P49796
  ENSP ID: ENSP00000312844
MERSLHRVSLGSRRAHPDLSFYLTTFGQLRLSIDAQDRVLLLHIIEGKGLISKQPGTCDPYVKISLIPEDSRLRHQKTQTVPDCRDPAFHEHFFFPVQEEDDQKRLLVTVWNRASQSRQSGLIGCMSFGVKSLLTPDKEISGWYYLLGEHLGRTKHLKVARRRLRPLRDPLLRMPGGGDTENGKKLKITIPRGKDGFGFTICCDSPVRVQAVDSGGPAERAGLQQLDTVLQLNERPVEHWKCVELAHEIRSCPSEIILLVWRMVPQVKPGPDGGVLRRASCKSTHDLQSPPNKREKNCTHGVQARPEQRHSCHLVCDSSDGLLLGGWERYTEVAKRGGQHTLPALSRATAPTDPNYIILAPLNPGSQLLRPVYQEDTIPEESGSPSKGKSYTGLGKKSRLMKTVQTMKGHGNYQNCPVVRPHATHSSYGTYVTLAPKVLVFPVFVQPLDLCNPARTLLLSEELLLYEGRNKAAEVTLFAYSDLLLFTKEDEPGRCDVLRNPLYLQSVKLQEGSSEDLKFCVLYLAEKAECLFTLEAHSQEQKKRVCWCLSENIAKQQQLAASPPDSKKLHPFGSLQQEMGPVNSTNATQDRSFTSPGQTLIG

SEQ ID NO: 72347 - protein, 917 aa, Homo sapiens
  Payload ID: 14330
  Gene Symbol: RGS3
  Gene Name: regulator of G-protein signaling 3
  Uniprot ID: P49796
  ENSP ID: ENSP00000340284
MNRFNGLCKVCSERRYRQITIPRGKDGFGFTICCDSPVRVQAVDSGGPAERAGLQQLDTVLQLNERPVEHWKCVELAHEIRSCPSEIILLVWRMVPQVKPGPDGGVLRRASCKSTHDLQSPPNKREKNCTHGVQARPEQRHSCHLVCDSSDGLLLGGWERYTEVAKRGGQHTLPALSRATAPTDPNYIILAPLNPGSQLLRPVYQEDTIPEESGSPSKGKSYTGLGKKSRLMKTVQTMKGHGNYQNCPVVRPHATHSSYGTYVTLAPKVLVFPVFVQPLDLCNPARTLLLSEELLLYEGRNKAAEVTLFAYSDLLLFTKEDEPGRCDVLRNPLYLQSVKLQEGSSEDLKFCVLYLAEKAECLFTLEAHSQEQKKRVCWCLSENIAKQQQLAASPPDSKMFETEADEKREMALEEGKGPGAEDSPPSKEPSPGQELPPGQDLPPNKDSPSGQEPAPSQEPLSSKDSATSEGSPPGPDAPPSKDVPPCQEPPPAQDLSPCQDLPAGQEPLPHQDPLLTKDLPAIQESPTRDLPPCQDLPPSQVSLPAKALTEDTMSSGDLLAATGDPPAAPRPAFVIPEVRLDSTYSQKAGAEQGCSGDEEDAEEAEEVEEGEEGEEDEDEDTSDDNYGERSEAKRSSMIETGQGAEGGLSLRVQNSLRRRTHSEGSLLQEPRGPCFASDTTLHCSDGEGAASTWGMPSPSTLKKELGRNGGSMHHLSLFFTGHRKMSGADTVGDDDEASRKRKSKNLAKDMKNKLGIFRRRNESPGAPPAGKADKMMKSFKPTSEEALKWGESLEKLLVHKYGLAVFQAFLRTEFSEENLEFWLACEDFKKVKSQSKMASKAKKIFAEYIAIQACKEVNLDSYTREHTKDNLQSVTRGCFDLAQKRIFGLMEKDSYPRFLRSDLYLDLINQKKMSPPL

SEQ ID NO: 72348 - protein, 168 aa, Homo sapiens
  Payload ID: 14330
  Gene Symbol: RGS3
  Gene Name: regulator of G-protein signaling 3
  ENSP ID: ENSP00000343359
MKNKLGIFRRRNESPGAPPAGKADKMMKSFKPTSEEALKWGESLEKLLVHKYGLAVFQAFLRTEFSEENLEFWLACEDFKKVKSQSKMASKAKKIFAEYIAIQACKEVNLDSYTREHTKDNLQSVTRGCFDLAQKRIFGLMEKDSYPRFLRSDLYLDLINQKKMSPPL

SEQ ID NO: 72349 - protein, 519 aa, Homo sapiens
  Payload ID: 14330
  Gene Symbol: RGS3
  Gene Name: regulator of G-protein signaling 3
  Uniprot ID: P49796
  ENSP ID: ENSP00000363249
MFETEADEKREMALEEGKGPGAEDSPPSKEPSPGQELPPGQDLPPNKDSPSGQEPAPSQEPLSSKDSATSEGSPPGPDAPPSKDVPPCQEPPPAQDLSPCQDLPAGQEPLPHQDPLLTKDLPAIQESPTRDLPPCQDLPPSQVSLPAKALTEDTMSSGDLLAATGDPPAAPRPAFVIPEVRLDSTYSQKAGAEQGCSGDEEDAEEAEEVEEGEEGEEDEDEDTSDDNYGERSEAKRSSMIETGQGAEGGLSLRVQNSLRRRTHSEGSLLQEPRGPCFASDTTLHCSDGEGAASTWGMPSPSTLKKELGRNGGSMHHLSLFFTGHRKMSGADTVGDDDEASRKRKSKNLAKDMKNKLGIFRRRNESPGAPPAGKADKMMKSFKPTSEEALKWGESLEKLLVHKYGLAVFQAFLRTEFSEENLEFWLACEDFKKVKSQSKMASKAKKIFAEYIAIQACKEVNLDSYTREHTKDNLQSVTRGCFDLAQKRIFGLMEKDSYPRFLRSDLYLDLINQKKMSPPL

SEQ ID NO: 72350 - protein, 340 aa, Homo sapiens
  Payload ID: 14330
  Gene Symbol: RGS3
  Gene Name: regulator of G-protein signaling 3
  ENSP ID: ENSP00000363251
MVPQVKPGPDGGVLRRASCKSTHDLQSPPNKREKNCTHGVQARPEQRHSCHLVCDSSDGLLLGGWERYTEVAKRGGQHTLPALSRATAPTDPNYIILAPLNPGSQLLRPVYQEDTIPEESGSPSKGKSYTGLGKKSRLMKTVQTMKGHGNYQNCPVVRPHATHSSYGTYVTLAPKVLVFPVFVQPLDLCNPARTLLLSEELLLYEGRNKAAEVTLFAYSDLLLFTKEDEPGRCDVLRNPLYLQSVKLQEGSSEDLKFCVLYLAEKAECLFTLEAHSQEQKKRVCWCLSENIAKQQQLAASPPDSKKLHPFGSLQQEMGPVNSTNATQDRSFTSPGQTLIG

SEQ ID NO: 72351 - protein, 1198 aa, Homo sapiens; identical to SEQ ID NO: 72345
  Payload ID: 14330
  Gene Symbol: RGS3
  Gene Name: regulator of G-protein signaling 3
  Uniprot ID: P49796
  ENSP ID: ENSP00000363255

SEQ ID NO: 72352 - protein, 591 aa, Homo sapiens
  Payload ID: 14330
  Gene Symbol: RGS3
  Gene Name: regulator of G-protein signaling 3
  Uniprot ID: P49796
  ENSP ID: ENSP00000378141
MNRFNGLCKVCSERRYRQITIPRGKDGFGFTICCDSPVRVQAVDSGGPAERAGLQQLDTVLQLNERPVEHWKCVELAHEIRSCPSEIILLVWRMVPQVKPGPDGGVLRRASCKSTHDLQSPPNKREKNCTHGVQARPEQRHSCHLVCDSSDGLLLGGWERYTEVAKRGGQHTLPALSRATAPTDPNYIILAPLNPGSQLLRPVYQEDTIPEESGSPSKGKSYTGLGKKSRLMKTVQTMKGHGNYQNCPVVRPHATHSSYGTYVTLAPKVLVFPVFVQPLDLCNPARTLLLSEELLLYEGRNKAAEVTLFAYSDLLLFTKEDEPGRCDVLRNPLYLQSVKLQEGSSEDLKFCVLYLAEKAECLFTLEAHSQEQKKRVCWCLSENIAKQQQLAASPPDSKMSGADTVGDDDEASRKRKSKNLAKDMKNKLGIFRRRNESPGAPPAGKADKMMKSFKPTSEEALKWGESLEKLLVHKYGLAVFQAFLRTEFSEENLEFWLACEDFKKVKSQSKMASKAKKIFAEYIAIQACKEVNLDSYTREHTKDNLQSVTRGCFDLAQKRIFGLMEKDSYPRFLRSDLYLDLINQKKMSPPL

SEQ ID NO: 72353 - protein, 74 aa, Homo sapiens
  Payload ID: 14330
  Gene Symbol: RGS3
  Gene Name: regulator of G-protein signaling 3
  ENSP ID: ENSP00000417866
MFETEADEKREMALEEGKGPGAEDSPPSKEPSPGQELPPGQDLPPNKDSPSGQEPAPSQEPLSSKDSATSEGSP

SEQ ID NO: 72354 - protein, 247 aa, Homo sapiens
  Payload ID: 14330
  Gene Symbol: RGS3
  Gene Name: regulator of G-protein signaling 3
  ENSP ID: ENSP00000417994
MFETEADEKREMALEEGKGPGAEDSPPSKEPSPGQELPPGQDLPPNKDSPSGQEPAPSQEPLSSKDSATSEGSPPGPDAPPSKDVPPCQGAEGGLSLRVQNSLRRRTHSEGSLLQEPRGPCFASDTTLHCSDGEGAASTWGMPSPSTLKKELGRNGGSMHHLSLFFTGHRKMSGADTVGDDDEASRKRKSKNLAKDMKNKLGIFRRRNESPGAPPAGKADKMMKSFKPTSEEALKWGESLEKLLVHK

SEQ ID NO: 72355 - protein, 214 aa, Homo sapiens
  Payload ID: 14330
  Gene Symbol: RGS3
  Gene Name: regulator of G-protein signaling 3
  ENSP ID: ENSP00000418898
  MOD_RES (1)..(1): Any amino acid
XWLDFLSMSVALTPLDLCNPARTLLLSEELLLYEGRNKAAEVTLFAYSDLLLFTKEDEPGRCDVLRNPLYLQSVKLQEGSSEDLKFCVLYLAEKAECLFTLEAHSQEQKKRVCWCLSENIAKQQQLAASPPDSKMFETEADEKREMALEEGKGPGAEDSPPSKEPSPGQELPPGQDLPPNKDSPSGQEPAPSQEPLSSKDSATSEGSPPGPDAP

SEQ ID NO: 72356 - protein, 519 aa, Homo sapiens; identical to SEQ ID NO: 72349
  Payload ID: 14330
  Gene Symbol: RGS3
  Gene Name: regulator of G-protein signaling 3
  Uniprot ID: P49796
  ENSP ID: ENSP00000420356

SEQ ID NO: 72357 - protein, 311 aa, Homo sapiens
  Payload ID: 14330
  Gene Symbol: RGS3
  Gene Name: regulator of G-protein signaling 3
  Uniprot ID: P49796
  ENSP ID: ENSP00000436168
MVTRRPVTNSWDWLPAGAAPEAVPCRHMPLSRLPLRVGQKEFFFPLPLLVPPISWLLLSESQPRLVPGSPVIRPGFQRACVAAACTVAARCPGRGVGDRSQSGASYRPICGPKVGGPTEMLRGMYLTRNGNLQRRHTMKEAKDMKNKLGIFRRRNESPGAPPAGKADKMMKSFKPTSEEALKWGESLEKLLVHKYGLAVFQAFLRTEFSEENLEFWLACEDFKKVKSQSKMASKAKKIFAEYIAIQACKEVNLDSYTREHTKDNLQSVTRGCFDLAQKRIFGLMEKDSYPRFLRSDLYLDLINQKKMSPPL

SEQ ID NO: 72358 - protein, 192 aa, Homo sapiens
  Payload ID: 14330
  Gene Symbol: RGS3
  Gene Name: regulator of G-protein signaling 3
  ENSP ID: ENSP00000479017
MLRGMYLTRNGNLQRRHTMKEAKDMKNKLGIFRRRNESPGAPPAGKADKMMKSFKPTSEEALKWGESLEKLLVHKYGLAVFQAFLRTEFSEENLEFWLACEDFKKVKSQSKMASKAKKIFAEYIAIQACKEVNLDSYTREHTKDNLQSVTRGCFDLAQKRIFGLMEKDSYPRFLRSDLYLDLINQKKMSPPL

SEQ ID NO: 72359 - protein, 311 aa, Homo sapiens; identical to SEQ ID NO: 72357
  Payload ID: 14330
  Gene Symbol: RGS3
  Gene Name: regulator of G-protein signaling 3
  Uniprot ID: P49796
  ENSP ID: ENSP00000482612

SEQ ID NO: 72360 - protein, 187 aa, Homo sapiens
  Payload ID: 14331
  Gene Symbol: RGS4
  Gene Name: regulator of G-protein signaling 4
  Uniprot ID: P49798
  ENSP ID: ENSP00000356882
MKHRLGFLLQKSDSCEHNSSHNKKDKVVICQRVSQEEVKKWAESLENLISHECGLAAFKAFLKSEYSEENIDFWISCEEYKKIKSPSKLSPKAKKIYNEFISVQATKEVNLDSCTREETSRNMLEPTITCFDEAQKKIFNLMEKDSYRRFLKSRFYLDLVNPSSCGAEKQKGAKSSADCASLVPQCA

SEQ ID NO: 72361 - protein, 93 aa, Homo sapiens
  Payload ID: 14331
  Gene Symbol: RGS4
  Gene Name: regulator of G-protein signaling 4
  Uniprot ID: P49798
  ENSP ID: ENSP00000356884
MCKGLAGLPASCLRSAKDMKHRLGFLLQKSDSCEHNSSHNKKDKVVICQRVSQEEVKKWAESLENLISHECEPGFLHQGRDKPEHARAYNNLL

SEQ ID NO: 72362 - protein, 205 aa, Homo sapiens
  Payload ID: 14331
  Gene Symbol: RGS4
  Gene Name: regulator of G-protein signaling 4
  Uniprot ID: P49798
  ENSP ID: ENSP00000356885
MCKGLAGLPASCLRSAKDMKHRLGFLLQKSDSCEHNSSHNKKDKVVICQRVSQEEVKKWAESLENLISHECGLAAFKAFLKSEYSEENIDFWISCEEYKKIKSPSKLSPKAKKIYNEFISVQATKEVNLDSCTREETSRNMLEPTITCFDEAQKKIFNLMEKDSYRRFLKSRFYLDLVNPSSCGAEKQKGAKSSADCASLVPQCA

SEQ ID NO: 72363 - protein, 302 aa, Homo sapiens
  Payload ID: 14331
  Gene Symbol: RGS4
  Gene Name: regulator of G-protein signaling 4
  Uniprot ID: P49798
  ENSP ID: ENSP00000397181
MYNMMLLIQKRKGIGSQLLRAGEAEGDRGAGTAERSSDWLDGRSWAIKETPTGLAGRRSEDSDNIFTGEEAKYAQSRSHSSSCRISFLLANSKLLNKMCKGLAGLPASCLRSAKDMKHRLGFLLQKSDSCEHNSSHNKKDKVVICQRVSQEEVKKWAESLENLISHECGLAAFKAFLKSEYSEENIDFWISCEEYKKIKSPSKLSPKAKKIYNEFISVQATKEVNLDSCTREETSRNMLEPTITCFDEAQKKIFNLMEKDSYRRFLKSRFYLDLVNPSSCGAEKQKGAKSSADCASLVPQCA

SEQ ID NO: 72364 - protein, 143 aa, Homo sapiens
  Payload ID: 14331
  Gene Symbol: RGS4
  Gene Name: regulator of G-protein signaling 4
  ENSP ID: ENSP00000432194
MKHRLGFLLQKSDSCEHNSSHNKKDKVVICQRVSQEEVKKWAESLENLISHECGLAAFKAFLKSEYSEENIDFWISCEEYKKIKSPSKLSPKAKKIYNEFISVQATKEVNLDSCTREETSRNMLEPTITCFDEAQKKIFNLME

SEQ ID NO: 72365 - protein, 187 aa, Homo sapiens; identical to SEQ ID NO: 72360
  Payload ID: 14331
  Gene Symbol: RGS4
  Gene Name: regulator of G-protein signaling 4
  Uniprot ID: P49798
  ENSP ID: ENSP00000433261

SEQ ID NO: 72366 - protein, 113 aa, Homo sapiens
  Payload ID: 14331
  Gene Symbol: RGS4
  Gene Name: regulator of G-protein signaling 4
  ENSP ID: ENSP00000436106
MCKGLAGLPASCLRSAKDMKHRLGFLLQKSDSCEHNSSHNKKDKVVICQRVSQEEVKKWAESLENLISHECGLAAFKAFLKSEYSEENIDFWISCEEYKKIKSPSKLSPKAKY

SEQ ID NO: 72367 - protein, 181 aa, Homo sapiens
  Payload ID: 14332
  Gene Symbol: RGS5
  Gene Name: regulator of G-protein signaling 5
  Uniprot ID: O15539
  ENSP ID: ENSP00000319308
MCKGLAALPHSCLERAKEIKIKLGILLQKPDSVGDLVIPYNEKPEKPAKTQKTSLDEALQWRDSLDKLLQNNYGLASFKSFLKSEFSEENLEFWIACEDYKKIKSPAKMAEKAKQIYEEFIQTEAPKEVNIDHFTKDITMKNLVEPSLSSFDMAQKRIHALMEKDSLPRFVRSEFYQELIK

SEQ ID NO: 72368 - protein, 201 aa, Homo sapiens
  Payload ID: 14332
  Gene Symbol: RGS5
  Gene Name: regulator of G-protein signaling 5
  ENSP ID: ENSP00000356879
MCARNISQDILILQMHSAHWHINGKYEEKSNLMFWAKEIKIKLGILLQKPDSVGDLVIPYNEKPEKPAKTQKTSLDEALQWRDSLDKLLQNNYGLASFKSFLKSEFSEENLEFWIACEDYKKIKSPAKMAEKAKQIYEEFIQTEAPKEVNIDHFTKDITMKNLVEPSLSSFDMAQKRIHALMEKDSLPRFVRSEFYQELIK

SEQ ID NO: 72369 - protein, 73 aa, Homo sapiens
  Payload ID: 14332
  Gene Symbol: RGS5
  Gene Name: regulator of G-protein signaling 5
  Uniprot ID: O15539
  ENSP ID: ENSP00000432313
MAEKAKQIYEEFIQTEAPKEVNIDHFTKDITMKNLVEPSLSSFDMAQKRIHALMEKDSLPRFVRSEFYQELIK

SEQ ID NO: 72370 - protein, 185 aa, Homo sapiens
  Payload ID: 14332
  Gene Symbol: RGS5
  Gene Name: regulator of G-protein signaling 5
  Uniprot ID: O15539
  ENSP ID: ENSP00000433001
MCKGLAALPHSCLERAKEIKIKLGILLQKPDSVGDLVIPYNEKPEKPAKTQKTSLDEALQWRDSLDKLLQNNYGLASFKSFLKSEFSEENLEFWIACEDYKKIKSPAKMAEKAKQIYEEFIQTEAPKEVGLWVNIDHFTKDITMKNLVEPSLSSFDMAQKRIHALMEKDSLPRFVRSEFYQELIK

SEQ ID NO: 72371 - protein, 71 aa, Homo sapiens
  Payload ID: 14332
  Gene Symbol: RGS5
  Gene Name: regulator of G-protein signaling 5
  ENSP ID: ENSP00000435861
MCKGLAALPHSCLERTSLDEALQWRDSLDKLLQNNYGLASFKSFLKSEFSEENLEFWIACEDYKKIKSPAK

SEQ ID NO: 72372 - protein, 73 aa, Homo sapiens; identical to SEQ ID NO: 72369
  Payload ID: 14332
  Gene Symbol: RGS5
  Gene Name: regulator of G-protein signaling 5
  Uniprot ID: O15539
  ENSP ID: ENSP00000480891

SEQ ID NO: 72373 - protein, 418 aa, Homo sapiens
  Payload ID: 14333
  Gene Symbol: RGS6
  Gene Name: regulator of G-protein signaling 6
  ENSP ID: ENSP00000341199
MQDDKTGGVPIRTVKSFLSKIPSVVTGTDIVQWLMKNLSIEDPVEAIHLGSLIAAQGYIFPISDHVLTMKDDGTFYRFQAPYFWPSNCWEPENTDYAIYLCKRTMQNKARLELADYEAENLARLQRAFARKWEFIFMQAEAQVKIDRKKDKTERKILDSQERAFWDVHRPVPGCVNTTEMDIRKCRRLKNPQKVKKSVYGVTEESQAQSPVHVLSQPIRKTTKEDIRKQITFLNAQIDRHCLKMSKVAESKEPSQQRVKRWGFSFDEILKDQVGRDQFLRFLESEFSSENLRFWLAVQDLKKQPLQDVAKRVEEIWQEFLAPGAPSAINLDSHSYEITSQNVKDGGRYTFEDAQEHIYKLMKSDSYARFLRSNAYQDLLLAKKKPESEQGRRTSLEKFTRSVGKSLAGKRLTGLMQSS

SEQ ID NO: 72374 - protein, 460 aa, Homo sapiens
  Payload ID: 14333
  Gene Symbol: RGS6
  Gene Name: regulator of G-protein signaling 6
  Uniprot ID: P49758
  ENSP ID: ENSP00000347699
MAQGSGDQRAVGVADPEESSPNMIVYCKIEDIITKMQDDKTGGVPIRTVKSFLSKIPSVVTGTDIVQWLMKNLSIEDPVEAIHLGSLIAAQGYIFPISDHVLTMKDDGTFYRFQAPYFWPSNCWEPENTDYAIYLCKRTMQNKARLELADYEAENLARLQRAFARKWEFIFMQAEAQVKIDRKKDKTERKILDSQERAFWDVHRPVPGCVNTTEMDIRKCRRLKNPQKVKKSVYGVTEESQAQSPVHVLSQPIRKTTKEDIRKQITFLNAQIDRHCLKMSKVAESLIAYTEQYVEYDPLITPAEPSNPWISDDVALWDIEMSKEPSQQRVKRWGFSFDEILKDQVGRDQFLRFLESEFSSENLRFWLAVQDLKKQPLQDVAKRVEEIWQEFLAPGAPSAINLDSHSYEITSQNVKDGGRYTFEDAQEHIYKLMKSDSYARFLRSNAYQDLLLAKKKVWLL

SEQ ID NO: 72375 - protein, 437 aa, Homo sapiens
  Payload ID: 14333
  Gene Symbol: RGS6
  Gene Name: regulator of G-protein signaling 6
  ENSP ID: ENSP00000383953
MQDDKTGGVPIRTVKSFLSKIPSVVTGTDIVQWLMKNLSIEDPVEAIHLGSLIAAQGYIFPISDHVLTMKDDGTFYRFQAPYFWPSNCWEPENTDYAIYLCKRTMQNKARLELADYEAENLARLQRAFARKWEFIFMQAEAQVKIDRKKDKTERKILDSQERAFWDVHRPVPGCVNTTEMDIRKCRRLKNPQKVKKSVYGVTEESQAQSPVHVLSQPIRKTTKEDIRKQITFLNAQIDRHCLKMSKVAESLIAYTEQYVEYDPLITPAEPSNPWISDDVALWDIEMSKEPSQQRVKRWGFSFDEILKDQVGRDQFLRFLESEFSSENLRFWLAVQDLKKQPLQDVAKRVEEIWQEFLAPGAPSAINLDSHSYEITSQNVKDGGRYTFEDAQEHIYKLMKSDSYARFLRSNAYQDLLLAKKKGKSLAGKRLTGLMQSS

SEQ ID NO: 72376 - protein, 475 aa, Homo sapiens
  Payload ID: 14333
  Gene Symbol: RGS6
  Gene Name: regulator of G-protein signaling 6
  Uniprot ID: P49758
  ENSP ID: ENSP00000384218
MAQGSGDQRAVGVADPEESSPNMIVYCKIEDIITKMQDDKTGGVPIRTVKSFLSKIPSVVTGTDIVQWLMKNLSIEDPVEAIHLGSLIAAQGYIFPISDHVLTMKDDGTFYRFQAPYFWPSNCWEPENTDYAIYLCKRTMQNKARLELADYEAENLARLQRAFARKWEFIFMQAEAQVKIDRKKDKTERKILDSQERAFWDVHRPVPGCVNTTEMDIRKCRRLKNPQKVKKSVYGVTEESQAQSPVHVLSQPIRKTTKEDIRKQITFLNAQIDRHCLKMSKVAESLIAYTEQYVEYDPLITPAEPSNPWISDDVALWDIEMSKEPSQQRVKRWGFSFDEILKDQVGRDQFLRFLESEFSSENLRFWLAVQDLKKQPLQDVAKRVEEIWQEFLAPGAPSAINLDSHSYEITSQNVKDGGRYTFEDAQEHIYKLMKSDSYARFLRSNAYQDLLLAKKKPESEQGRRTSLEKFTRSVG

SEQ ID NO: 72377 - protein, 477 aa, Homo sapiens
  Payload ID: 14333
  Gene Symbol: RGS6
  Gene Name: regulator of G-protein signaling 6
  Uniprot ID: P49758
  ENSP ID: ENSP00000384612
MAQGSGDQRAVGVADPEESSPNMIVYCKIEDIITKMQDDKTGGVPIRTVKSFLSKIPSVVTGTDIVQWLMKNLSIEDPVEAIHLGSLIAAQGYIFPISDHVLTMKDDGTFYRFQAPYFWPSNCWEPENTDYAIYLCKRTMQNKARLELADYEAENLARLQRAFARKWEFIFMQAEAQVKIDRKKDKTERKILDSQERAFWDVHRPVPGCVNTTEMDIRKCRRLKNPQKVKKSVYGVTEESQAQSPVHVLSQPIRKTTKEDIRKQITFLNAQIDRHCLKMSKVAESLIAYTEQYVEYDPLITPAEPSNPWISDDVALWDIEMSKEPSQQRVKRWGFSFDEILKDQVGRDQFLRFLESEFSSENLRFWLAVQDLKKQPLQDVAKRVEEIWQEFLAPGAPSAINLDSHSYEITSQNVKDGGRYTFEDAQEHIYKLMKSDSYARFLRSNAYQDLLLAKKKPESEQGRRTSLEKFTRSVLLF

SEQ ID NO: 72378 - protein, 480 aa, Homo sapiens
  Payload ID: 14333
  Gene Symbol: RGS6
  Gene Name: regulator of G-protein signaling 6
  Uniprot ID: P49758
  ENSP ID: ENSP00000385243
MAQGSGDQRAVGVADPEESSPNMIVYCKIEDIITKMQDDKTGGVPIRTVKSFLSKIPSVVTGTDIVQWLMKNLSIEDPVEAIHLGSLIAAQGYIFPISDHVLTMKDDGTFYRFQAPYFWPSNCWEPENTDYAIYLCKRTMQNKARLELADYEAENLARLQRAFARKWEFIFMQAEAQVKIDRKKDKTERKILDSQERAFWDVHRPVPGCVNTTEMDIRKCRRLKNPQKVKKSVYGVTEESQAQSPVHVLSQPIRKTTKEDIRKQITFLNAQIDRHCLKMSKVAESLIAYTEQYVEYDPLITPAEPSNPWISDDVALWDIEMSKEPSQQRVKRWGFSFDEILKDQVGRDQFLRFLESEFSSENLRFWLAVQDLKKQPLQDVAKRVEEIWQEFLAPGAPSAINLDSHSYEITSQNVKDGGRYTFEDAQEHIYKLMKSDSYARFLRSNAYQDLLLAKKKPESEQGRRTSLEKFTRSVCLQLLF

SEQ ID NO: 72379 - protein, 539 aa, Homo sapiens
  Payload ID: 14333
  Gene Symbol: RGS6
  Gene Name: regulator of G-protein signaling 6
  ENSP ID: ENSP00000412144
MKNLSIEDPVEAIHLGSLIAAQGYIFPISDHVLTMKDDGTFYRFQAPYFWPSNCWEPENTDYAIYLCKRTMQNKARLELADYEAENLARLQRAFARKWEFIFMQAEAQVKIDRKKDKTERKILDSQERAFWDVHRPVPGCVNTTEMDIRKCRRLKNPQKVKKSVYGVTEESQAQSPVHVLSQPIRKTTKEDIRKQITFLNAQIDRHCLKMSKVAESLIAYTEQYVEYDPLITPAEPSNPWISDDVALWDIEMSKEPSQQRVKRWGFSFDEILKDQVGRDQFLRFLESEFSSENLRFWLAVQDLKKQPLQDVAKRVEEIWQEFLAPGAPSAINLDSHSYEITSQNVKDGGRYTFEDAQEHIYKLMKSDSYARFLRSNAYQDLLLAKKKPESEQGRRTSLEKFTRSVNVQNTRPAGAWSIFMAALPMAVWLRTPRSCHGLSESRLLGLPSLHDGLREGQSLPQSCPGSSSTAAEGARERASNGRSLARRQHCQCHGQGEETQLCLWSRLESSKRSQRASSLRTSKAKKKRQTVKQGPKAWP

SEQ ID NO: 72380 - protein, 465 aa, Homo sapiens
  Payload ID: 14333
  Gene Symbol: RGS6
  Gene Name: regulator of G-protein signaling 6
  Uniprot ID: P49758
  ENSP ID: ENSP00000450858
MAQGSGDQRAVGVADPEESSPNMIVYCKIEDIITKMQDDKTGGVPIRTVKSFLSKIPSVVTGTDIVQWLMKNLSIEDPVEAIHLGSLIAAQGYIFPISDHVLTMKDDGTFYRFQAPYFWPSNCWEPENTDYAIYLCKRTMQNKARLELADYEAENLARLQRAFARKWEFIFMQAEAQVKIDRKKDKTERKILDSQERAFWDVHRPVPGCVNTTEMDIRKCRRLKNPQKVKKSVYGVTEESQAQSPVHVLSQPIRKTTKEDIRKQITFLNAQIDRHCLKMSKVAESLIAYTEQYVEYDPLITPAEPSNPWISDDVALWDIEMSKEPSQQRVKRWGFSFDEILKDQVGRDQFLRFLESEFSSENLRFWLAVQDLKKQPLQDVAKRVEEIWQEFLAPGAPSAINLDSHSYEITSQNVKDGGRYTFEDAQEHIYKLMKSDSYARFLRSNAYQDLLLAKKKKVSKVVELP

SEQ ID NO: 72381 - protein, 472 aa, Homo sapiens
  Payload ID: 14333
  Gene Symbol: RGS6
  Gene Name: regulator of G-protein signaling 6
  Uniprot ID: P49758
  ENSP ID: ENSP00000450936
MAQGSGDQRAVGVADPEESSPNMIVYCKIEDIITKMQDDKTGGVPIRTVKSFLSKIPSVVTGTDIVQWLMKNLSIEDPVEAIHLGSLIAAQGYIFPISDHVLTMKDDGTFYRFQAPYFWPSNCWEPENTDYAIYLCKRTMQNKARLELADYEAENLARLQRAFARKWEFIFMQAEAQVKIDRKKDKTERKILDSQERAFWDVHRPVPGCVNTTEMDIRKCRRLKNPQKVKKSVYGVTEESQAQSPVHVLSQPIRKTTKEDIRKQITFLNAQIDRHCLKMSKVAESLIAYTEQYVEYDPLITPAEPSNPWISDDVALWDIEMSKEPSQQRVKRWGFSFDEILKDQVGRDQFLRFLESEFSSENLRFWLAVQDLKKQPLQDVAKRVEEIWQEFLAPGAPSAINLDSHSYEITSQNVKDGGRYTFEDAQEHIYKLMKSDSYARFLRSNAYQDLLLAKKKGKSLAGKRLTGLMQSS

SEQ ID NO: 72382 - protein, 490 aa, Homo sapiens
  Payload ID: 14333
  Gene Symbol: RGS6
  Gene Name: regulator of G-protein signaling 6
  Uniprot ID: P49758
  ENSP ID: ENSP00000451030
MAQGSGDQRAVGVADPEESSPNMIVYCKIEDIITKMQDDKTGGVPIRTVKSFLSKIPSVVTGTDIVQWLMKNLSIEDPVEAIHLGSLIAAQGYIFPISDHVLTMKDDGTFYRFQAPYFWPSNCWEPENTDYAIYLCKRTMQNKARLELADYEAENLARLQRAFARKWEFIFMQAEAQVKIDRKKDKTERKILDSQERAFWDVHRPVPGCVNTTEMDIRKCRRLKNPQKVKKSVYGVTEESQAQSPVHVLSQPIRKTTKEDIRKQITFLNAQIDRHCLKMSKVAESLIAYTEQYVEYDPLITPAEPSNPWISDDVALWDIEMSKEPSQQRVKRWGFSFDEILKDQVGRDQFLRFLESEFSSENLRFWLAVQDLKKQPLQDVAKRVEEIWQEFLAPGAPSAINLDSHSYEITSQNVKDGGRYTFEDAQEHIYKLMKSDSYARFLRSNAYQDLLLAKKKPESEQGRRTSLEKFTRSVGKSLAGKRLTGLMQSS

SEQ ID NO: 72383 - protein, 490 aa, Homo sapiens; identical to SEQ ID NO: 72382
  Payload ID: 14333
  Gene Symbol: RGS6
  Gene Name: regulator of G-protein signaling 6
  Uniprot ID: P49758
  ENSP ID: ENSP00000451855

SEQ ID NO: 72384 - protein, 346 aa, Homo sapiens
  Payload ID: 14333
  Gene Symbol: RGS6
  Gene Name: regulator of G-protein signaling 6
  Uniprot ID: P49758
  ENSP ID: ENSP00000451912
MQNKARLELADYEAENLARLQRAFARKWEFIFMQAEAQVKIDRKKDKTERKILDSQERAFWDVHRPVPGCVNTTEMDIRKCRRLKNPQKVKKSVYGVTEESQAQSPVHVLSQPIRKTTKEDIRKQITFLNAQIDRHCLKMSKVAESLIAYTEQYVEYDPLITPAEPSNPWISDDVALWDIEMSKEPSQQRVKRWGFSFDEILKDQVGRDQFLRFLESEFSSENLRFWLAVQDLKKQPLQDVAKRVEEIWQEFLAPGAPSAINLDSHSYEITSQNVKDGGRYTFEDAQEHIYKLMKSDSYARFLRSNAYQDLLLAKKKPESEQGRRTSLEKFTRSVLYSNTPLAKRP

SEQ ID NO: 72385 - protein, 472 aa, Homo sapiens; identical to SEQ ID NO: 72381
  Payload ID: 14333
  Gene Symbol: RGS6
  Gene Name: regulator of G-protein signaling 6
  Uniprot ID: P49758
  ENSP ID: ENSP00000452331

SEQ ID NO: 72386 - protein, 455 aa, Homo sapiens
  Payload ID: 14333
  Gene Symbol: RGS6
  Gene Name: regulator of G-protein signaling 6
  ENSP ID: ENSP00000478186
MQDDKTGGVPIRTVKSFLSKIPSVVTGTDIVQWLMKNLSIEDPVEAIHLGSLIAAQGYIFPISDHVLTMKDDGTFYRFQAPYFWPSNCWEPENTDYAIYLCKRTMQNKARLELADYEAENLARLQRAFARKWEFIFMQAEAQVKIDRKKDKTERKILDSQERAFWDVHRPVPGCVNTTEMDIRKCRRLKNPQKVKKSVYGVTEESQAQSPVHVLSQPIRKTTKEDIRKQITFLNAQIDRHCLKMSKVAESLIAYTEQYVEYDPLITPAEPSNPWISDDVALWDIEMSKEPSQQRVKRWGFSFDEILKDQVGRDQFLRFLESEFSSENLRFWLAVQDLKKQPLQDVAKRVEEIWQEFLAPGAPSAINLDSHSYEITSQNVKDGGRYTFEDAQEHIYKLMKSDSYARFLRSNAYQDLLLAKKKPESEQGRRTSLEKFTRSVGKSLAGKRLTGLMQSS

SEQ ID NO: 72387 - protein, 424 aa, Homo sapiens
  Payload ID: 14334
  Gene Symbol: RGS7
  Gene Name: regulator of G-protein signaling 7
  Uniprot ID: P49802
  ENSP ID: ENSP00000341242
MAQGNNYGQTSNGVADESPNMLVYRKMEDVIARMQDEKNGIPIRTVKSFLSKIPSVFSGSDIVQWLIKNLTIEDPAVYLCKRTMQNKARLELADYEAESLARLQRAFARKWEFIFMQAEAQAKVDKKRDKIERKILDSQERAFWDVHRPVPGCVNTTEVDIKKSSRMRNPHKTRKSVYGLQNDIRSHSPTHTPTPETKPPTEDELQQQIKYWQIQLDRHRLKMSKVADSLLSYTEQYLEYDPFLLPPDPSNPWLSDDTTFWELEASKEPSQQRVKRWGFGMDEALKDPVGREQFLKFLESEFSSENLRFWLAVEDLKKRPIKEVPSRVQEIWQEFLAPGAPSAINLDSKSYDKTTQNVKEPGRYTFEDAQEHIYKLMKSDSYPRFIRSSAYQELLQAKKKGRNIPIFPCHKNCTPTLRASTNLL

SEQ ID NO: 72388 - protein, 411 aa, Homo sapiens
  Payload ID: 14334
  Gene Symbol: RGS7
  Gene Name: regulator of G-protein signaling 7
  ENSP ID: ENSP00000355520
MAAHGYFFPISDHVLTLKDDGTFYRFQTPYFWPSNCWEPENTDYAVYLCKRTMQNKARLELADYEAESLARLQRAFARKWEFIFMQAEAQAKVDKKRDKIERKILDSQERAFWDVHRPVPGCVNTTEVDIKKSSRMRNPHKTRKSVYGLQNDIRSHSPTHTPTPETKPPTEDELQQQIKYWQIQLDRHRLKMSKVADSLLSYTEQYLEYDPFLLPPDPSNPWLSDDTTFWELEASKEPSQQRVKRWGFGMDEALKDPVGREQFLKFLESEFSSENLRFWLAVEDLKKRPIKEVPSRVQEIWQEFLAPGAPSAINLDSKSYDKTTQNVKEPGRYTFEDAQEHIYKLMKSDSYPRFIRSSAYQELLQAKKKSGNSMDRRTSFEKFAQNVGRNIPIFPCHKNCTPTLRASTNLL

SEQ ID NO: 72389 - protein, 477 aa, Homo sapiens
  Payload ID: 14334
  Gene Symbol: RGS7
  Gene Name: regulator of G-protein signaling 7
  Uniprot ID: P49802
  ENSP ID: ENSP00000355521
MAQGNNYGQTSNGVADESPNMLVYRKMEDVIARMQDEKNGIPIRTVKSFLSKIPSVFSGSDIVQWLIKNLTIEDPVEALHLGTLMAAHGYFFPISDHVLTLKDDGTFYRFQTPYFWPSNCWEPENTDYAVYLCKRTMQNKARLELADYEAESLARLQRAFARKWEFIFMQAEAQAKVDKKRDKIERKILDSQERAFWDVHRPVPGCVNTTEVDIKKSSRMRNPHKTRKSVYGLQNDIRSHSPTHTPTPETKPPTEDELQQQIKYWQIQLDRHRLKMSKVADSLLSYTEQYLEYDPFLLPPDPSNPWLSDDTTFWELEASKEPSQQRVKRWGFGMDEALKDPVGREQFLKFLESEFSSENLRFWLAVEDLKKRPIKEVPSRVQEIWQEFLAPGAPSAINLDSKSYDKTTQNVKEPGRYTFEDAQEHIYKLMKSDSYPRFIRSSAYQELLQAKKKGRNIPIFPCHKNCTPTLRASTNLL

SEQ ID NO: 72390 - protein, 469 aa, Homo sapiens
  Payload ID: 14334
  Gene Symbol: RGS7
  Gene Name: regulator of G-protein signaling 7
  Uniprot ID: P49802
  ENSP ID: ENSP00000355522
MAQGNNYGQTSNGVADESPNMLVYRKMEDVIARMQDEKNGIPIRTVKSFLSKIPSVFSGSDIVQWLIKNLTIEDPVEALHLGTLMAAHGYFFPISDHVLTLKDDGTFYRFQTPYFWPSNCWEPENTDYAVYLCKRTMQNKARLELADYEAESLARLQRAFARKWEFIFMQAEAQAKVDKKRDKIERKILDSQERAFWDVHRPVPGCVNTTEVDIKKSSRMRNPHKTRKSVYGLQNDIRSHSPTHTPTPETKPPTEDELQQQIKYWQIQLDRHRLKMSKVADSLLSYTEQYLEYDPFLLPPDPSNPWLSDDTTFWELEASKEPSQQRVKRWGFGMDEALKDPVGREQFLKFLESEFSSENLRFWLAVEDLKKRPIKEVPSRVQEIWQEFLAPGAPSAINLDSKSYDKTTQNVKEPGRYTFEDAQEHIYKLMKSDSYPRFIRSSAYQELLQAKKKGKSLTSKRLTSLAQSY

SEQ ID NO: 72391 - protein, 487 aa, Homo sapiens
  Payload ID: 14334
  Gene Symbol: RGS7
  Gene Name: regulator of G-protein signaling 7
  Uniprot ID: P49802
  ENSP ID: ENSP00000355523
MAQGNNYGQTSNGVADESPNMLVYRKMEDVIARMQDEKNGIPIRTVKSFLSKIPSVFSGSDIVQWLIKNLTIEDPVEALHLGTLMAAHGYFFPISDHVLTLKDDGTFYRFQTPYFWPSNCWEPENTDYAVYLCKRTMQNKARLELADYEAESLARLQRAFARKWEFIFMQAEAQAKVDKKRDKIERKILDSQERAFWDVHRPVPGCVNTTEVDIKKSSRMRNPHKTRKSVYGLQNDIRSHSPTHTPTPETKPPTEDELQQQIKYWQIQLDRHRLKMSKVADSLLSYTEQYLEYDPFLLPPDPSNPWLSDDTTFWELEASKEPSQQRVKRWGFGMDEALKDPVGREQFLKFLESEFSSENLRFWLAVEDLKKRPIKEVPSRVQEIWQEFLAPGAPSAINLDSKSYDKTTQNVKEPGRYTFEDAQEHIYKLMKSDSYPRFIRSSAYQELLQAKKKSGNSMDRRTSFEKFAQNVGKSLTSKRLTSLAQSY

SEQ ID NO: 72392 - protein, 398 aa, Homo sapiens
  Payload ID: 14334
  Gene Symbol: RGS7
  Gene Name: regulator of G-protein signaling 7
  ENSP ID: ENSP00000385508
MEDVIARMQDEKNGIPIRTVKSFLSKIPSVFSGSDIVQWLIKNLTIEDPAVYLCKRTMQNKARLELADYEAESLARLQRAFARKWEFIFMQAEAQAKVDKKRDKIERKILDSQERAFWDVHRPVPGCVNTTEVDIKKSSRMRNPHKTRKSVYGLQNDIRSHSPTHTPTPETKPPTEDELQQQIKYWQIQLDRHRLKMSKVADSLLSYTEQYLEYDPFLLPPDPSNPWLSDDTTFWELEASKEPSQQRVKRWGFGMDEALKDPVGREQFLKFLESEFSSENLRFWLAVEDLKKRPIKEVPSRVQEIWQEFLAPGAPSAINLDSKSYDKTTQNVKEPGRYTFEDAQEHIYKLMKSDSYPRFIRSSAYQELLQAKKKGRNIPIFPCHKNCTPTLRASTNLL

SEQ ID NO: 72393 - protein, 393 aa, Homo sapiens
  Payload ID: 14334
  Gene Symbol: RGS7
  Gene Name: regulator of G-protein signaling 7
  ENSP ID: ENSP00000390138
MAAHGYFFPISDHVLTLKDDGTFYRFQTPYFWPSNCWEPENTDYAVYLCKRTMQNKARLELADYEAESLARLQRAFARKWEFIFMQAEAQAKVDKKRDKIERKILDSQERAFWDVHRPVPGCVNTTEVDIKKSSRMRNPHKTRKSVYGLQNDIRSHSPTHTPTPETKPPTEDELQQQIKYWQIQLDRHRLKMSKVADSLLSYTEQYLEYDPFLLPPDPSNPWLSDDTTFWELEASKEPSQQRVKRWGFGMDEALKDPVGREQFLKFLESEFSSENLRFWLAVEDLKKRPIKEVPSRVQEIWQEFLAPGAPSAINLDSKSYDKTTQNVKEPGRYTFEDAQEHIYKLMKSDSYPRFIRSSAYQELLQAKKKGRNIPIFPCHKNCTPTLRASTNLL

SEQ ID NO: 72394 - protein, 326 aa, Homo sapiens
  Payload ID: 14334
  Gene Symbol: RGS7
  Gene Name: regulator of G-protein signaling 7
  ENSP ID: ENSP00000404399
QAEAQAKVDKKRDKIERKILDSQERAFWDVHRPVPGCVNTTEVDIKKSSRMRNPHKTRKSVYGLQNDIRSHSPTHTPTPETKPPTEDELQQQIKYWQIQLDRHRLKMSKVADSLLSYTEQYLEYDPFLLPPDPSNPWLSDDTTFWELEASKEPSQQRVKRWGFGMDEALKDPVGREQFLKFLESEFSSENLRFWLAVEDLKKRPIKEVPSRVQEIWQEFLAPGAPSAINLDSKSYDKTTQNVKEPGRYTFEDAQEHIYKLMKSDSYPRFIRSSAYQELLQAKKKSGNSMDRRTSFEKFAQNVGRNIPIFPCHKNCTPTLRASTNLL

SEQ ID NO: 72395 - protein, 257 aa, Homo sapiens
  Payload ID: 14335
  Gene Symbol: RGS7BP
  Gene Name: regulator of G-protein signaling 7 binding protein
  Uniprot ID: Q6MZT1
  ENSP ID: ENSP00000334851
MSSAPNGRKKRPSRSTRSSIFQISKPPLQSGDWERRGSGSESAHKTQRALDDCKMLVQEFNTQVALYRELVISIGDVSVSCPSLRAEMHKTRTKGCEMARQAHQKLAAISGPEDGEIHPEICRLYIQLQCCLEMYTTEMLKSICLLGSLQFHRKGKEPGGGTKSLDCKIEESAETPALEDSSSSPVDSQQHSWQVSTDIENTERDMREMKNLLSKLRETMPLPLKNQDDSSLLNLTPYPLVRRRKRRFFGLCCLISS

SEQ ID NO: 72396 - protein, 198 aa, Homo sapiens
  Payload ID: 14336
  Gene Symbol: RGS8
  Gene Name: regulator of G-protein signaling 8
  Uniprot ID: P57771
  ENSP ID: ENSP00000258302
MWNTLTRSLSDHPVGKDPQAMRTGQRQNKGMRTRLGCLSHKSDSCSDFTAILPDKPNRALKRLSTEEATRWADSFDVLLSHKYGVAAFRAFLKTEFSEENLEFWLACEEFKKTRSTAKLVSKAHRIFEEFVDVQAPREVNIDFQTREATRKNLQEPSLTCFDQAQGKVHSLMEKDSYPRFLRSKMYLDLLSQSQRRLS

SEQ ID NO: 72397 - protein, 180 aa, Homo sapiens
  Payload ID: 14336
  Gene Symbol: RGS8
  Gene Name: regulator of G-protein signaling 8
  Uniprot ID: P57771
  ENSP ID: ENSP00000356527
MAALLMPRRNKGMRTRLGCLSHKSDSCSDFTAILPDKPNRALKRLSTEEATRWADSFDVLLSHKYGVAAFRAFLKTEFSEENLEFWLACEEFKKTRSTAKLVSKAHRIFEEFVDVQAPREVNIDFQTREATRKNLQEPSLTCFDQAQGKVHSLMEKDSYPRFLRSKMYLDLLSQSQRRLS

SEQ ID NO: 72398 - protein, 180 aa, Homo sapiens; identical to SEQ ID NO: 72397
  Payload ID: 14336
  Gene Symbol: RGS8
  Gene Name: regulator of G-protein signaling 8
  Uniprot ID: P57771
  ENSP ID: ENSP00000356528

SEQ ID NO: 72399 - protein, 180 aa, Homo sapiens; identical to SEQ ID NO: 72397
  Payload ID: 14336
  Gene Symbol: RGS8
  Gene Name: regulator of G-protein signaling 8
  Uniprot ID: P57771
  ENSP ID: ENSP00000426289

SEQ ID NO: 72400 - protein, 57 aa, Homo sapiens
  Payload ID: 14336
  Gene Symbol: RGS8
  Gene Name: regulator of G-protein signaling 8
  ENSP ID: ENSP00000427076
MAALLMPRRNKGMRTRLGCLSHKSDSCSDFTAILPDKPNRALKRLSTEEATRWADSF

SEQ ID NO: 72401 - protein, 674 aa, Homo sapiens
  Payload ID: 14337
  Gene Symbol: RGS9
  Gene Name: regulator of G-protein signaling 9
  Uniprot ID: O75916
  ENSP ID: ENSP00000262406
MTIRHQGQQYRPRMAFLQKIEALVKDMQNPETGVRMQNQRVLVTSVPHAMTGSDVLQWIVQRLWISSLEAQNLGNFIVRYGYIYPLQDPKNLILKPDGSLYRFQTPYFWPTQQWPAEDTDYAIYLAKRNIKKKGILEEYEKENYNFLNQKMNYKWDFVIMQAKEQYRAGKERNKADRYALDCQEKAYWLVHRCPPGMDNVLDYGLDRVTNPNEVKVNQKQTVVAVKKEIMYYQQALMRSTVKSSVSLGGIVKYSEQFSSNDAIMSGCLPSNPWITDDTQFWDLNAKLVEIPTKMRVERWAFNFSELIRDPKGRQSFQYFLKKEFSGENLGFWEACEDLKYGDQSKVKEKAEEIYKLFLAPGARRWINIDGKTMDITVKGLKHPHRYVLDAAQTHIYMLMKKDSYARYLKSPIYKDMLAKAIEPQETTKKSSTLPFMRRHLRSSPSPVILRQLEEEAKAREAANTVDITQPGQHMAPSPHLTVYTGTCMPPSPSSPFSSSCRSPRKPFASPSRFIRRPSTTICPSPIRVALESSSGLEQKGECSGSMAPRGPSVTESSEASLDTSWPRSRPRAPPKARMALSFSRFLRRGCLASPVFARLSPKCPAVSHGRVQPLGDVGQQLPRLKSKRVANFFQIKMDVPTGSGTCLMDSEDAGTGESGDRATEKEVICPWESL

SEQ ID NO: 72402 - protein, 671 aa, Homo sapiens
  Payload ID: 14337
  Gene Symbol: RGS9
  Gene Name: regulator of G-protein signaling 9
  Uniprot ID: O75916
  ENSP ID: ENSP00000396329
MTIRHQGQQYRPRMAFLQKIEALVKDMQNPETGVRMQNQRVLVTSVPHAMTGSDVLQWIVQRLWISSLEAQNLGNFIVRYGYIYPLQDPKNLILKPDGSLYRFQTPYFWPTQQWPAEDTDYAIYLAKRNIKKKGILEEYEKENYNFLNQKMNYKWDFVIMQAKEQYRAGKERNKADRYALDCQEKAYWLVHRCPPGMDNVLDYGLDRVTNPNEVKKQTVVAVKKEIMYYQQALMRSTVKSSVSLGGIVKYSEQFSSNDAIMSGCLPSNPWITDDTQFWDLNAKLVEIPTKMRVERWAFNFSELIRDPKGRQSFQYFLKKEFSGENLGFWEACEDLKYGDQSKVKEKAEEIYKLFLAPGARRWINIDGKTMDITVKGLKHPHRYVLDAAQTHIYMLMKKDSYARYLKSPIYKDMLAKAIEPQETTKKSSTLPFMRRHLRSSPSPVILRQLEEEAKAREAANTVDITQPGQHMAPSPHLTVYTGTCMPPSPSSPFSSSCRSPRKPFASPSRFIRRPSTTICPSPIRVALESSSGLEQKGECSGSMAPRGPSVTESSEASLDTSWPRSRPRAPPKARMALSFSRFLRRGCLASPVFARLSPKCPAVSHGRVQPLGDVGQQLPRLKSKRVANFFQIKMDVPTGSGTCLMDSEDAGTGESGDRATEKEVICPWESL

SEQ ID NO: 72403 - protein, 628 aa, Homo sapiens
  Payload ID: 14337
  Gene Symbol: RGS9
  Gene Name: regulator of G-protein signaling 9
  ENSP ID: ENSP00000405814
MTIRHQGQQYRPRMAFLQKIEALVKDMQNPETGVRMQNQRVLVTSVPHAMTGSDVLQWIVQRLWISSLEAQNLGNFIVRYGYIYPLQDPKNLILKPDGSLYRFQTPYFWPTQQWPAEDTDYAIYLAKRNIKKKGILEEYEKENYNFLNQKMNYKWDFVIMQAKEQYRAGKERNKADRYALDCQEKAYWLVHRCPPGMDNVLDYGLDRVTNPNEVKKQTVVAVKKEIMYYQQALMRSTVKSSVSLGGIVKYSEQFSSNDAIMSGCLPSNPWITDDTQFWDLNAKLVEIPTKMRVERWAFNFSELIRDPKGRQSFQYFLKKEFSGENLGFWEACEDLKYGDQSKVKEKAEEIYKLFLAPGARRWINIDGKTMDITVKGLKHPHRYVLDAAQTHIYMLMKKDSYARYLKSPIYKDMLAKAIEPQETTKKSSTLPFMRRHLRSSPSPVILRQLEEEAKAREAANTVDITQPGQHMAPSPHLTVYTGTCMPPSPSSPFSSSCRSPRKPFASPSRFIRRPSTTICPSPIRVALESSSGLEQKGECSGSMAPRGPSVTESSEASLDTSWPRSRPRAPPKARMALSFSRFLRRGCLASPVFARLSPKCPAVSHGRVQPLGDVGQQLPRLKSKRVAK

SEQ ID NO: 72404 - protein, 494 aa, Homo sapiens
  Payload ID: 14337
  Gene Symbol: RGS9
  Gene Name: regulator of G-protein signaling 9
  ENSP ID: ENSP00000463410
MTIRHQGQQYRPRMAFLQKIEALVKDMQNPETGVRMQNQRVLVTSVPHAMTGSDVLQWIVQRLWISSLEAQNLGNFIVRYGYIYPLQDPKNLILKPDGSLYRFQTPYFWPTQQWPAEDTDYAIYLAKRNIKKKGILEEYEKENYNFLNQKMNYKWDFVIMQAKEQYRAGKERNKADRYALDCQEKAYWLVHRCPPGMDNVLDYGLDRVTNPNEVKVNQKQTVVAVKKEIMYYQQALMRSTVKSSVSLGGIVKYSEQFSSNDAIMSGCLPSNPWITDDTQFWDLNAKLVEIPTKMRVERWAFNFSELIRDPKGRQSFQYFLKKEFSGENLGFWEACEDLKYGDQSKVKEKAEEIYKLFLAPGARRWINIDGKTMDITVKGLKHPHRYVLDAAQTHIYMLMKKDSYARYLKSPIYKDMLAKAIEPQETTKKRQLHPPFYAASPALQPKPCHPETAGRGSQGPRSSQHCGHHPAGPAHGSQPPSDRVHRDLHAPVSF

SEQ ID NO: 72405 - protein, 29 aa, Homo sapiens
  Payload ID: 14338
  Gene Symbol: RGSL1
  Gene Name: regulator of G-protein signaling like 1
  ENSP ID: ENSP00000454954
AQKEICKMLSPWYDEFLDEEDYWFLLFTT

SEQ ID NO: 72406 - protein, 64 aa, Homo sapiens
  Payload ID: 14338
  Gene Symbol: RGSL1
  Gene Name: regulator of G-protein signaling like 1
  ENSP ID: ENSP00000454969
MMRWKKADQWLLQKCIGGVRGMWRFYSYLTGSAGEELVDFWILAENILSIDEMDLEVRDYYLSL

SEQ ID NO: 72407 - protein, 29 aa, Homo sapiens
  Payload ID: 14338
  Gene Symbol: RGSL1
  Gene Name: regulator of G-protein signaling like 1
  ENSP ID: ENSP00000454981
MMRWKKADQWLLQKCIGGVRGMWRFYSYL

SEQ ID NO: 72408 - protein, 154 aa, Homo sapiens
  Payload ID: 14338
  Gene Symbol: RGSL1
  Gene Name: regulator of G-protein signaling like 1
  ENSP ID: ENSP00000456332
MSSAEIIGSTNLIILLEDEVFADFFNTFLSLPVFGQTPFYTVENSQWSLWPEIPCNLIAKYKGLLTWLEKCRLPFFCKTNLCFHYILCQEFISFIKSPEGEARVSLLKSNWWWCWRDSQEDDEIGSTRNLFPHLDNNCTGRICMICSVPGMMSF

SEQ ID NO: 72409 - protein, 984 aa, Homo sapiens
  Payload ID: 14338
  Gene Symbol: RGSL1
  Gene Name: regulator of G-protein signaling like 1
  ENSP ID: ENSP00000457491
MSSAEIIGSTNLIILLEDEVFADFFNTFLSLPVFGQTPFYTVENSQWSLWPEIPCNLIAKYKGLLTWLEKCRLPFFCKTNLCFHYILCQEFISFIKSPEGAKMMRWKKADQWLLQKCIGGVRGMWRFYSYLTGSAGEELVDFWILAENILSIDEMDLEVRDYYLSLLLMLRATHLQEGSRVVTLCNMNIKSLLNLSIWHPNQSTTRREILSHMQKVALFKLQSYWLPNFYTHTKMTMAKEEACHGLMQEYETRLYSVCYTHIGGLPLNMSIKKCHHFQKRYSSRKAKRKMWQLVDPDSWSLEMDLKPDAIGMPLQETCPQEKVVIQMPSLKMASSKETRISSLEKDMHYAKISSMENKAKSHLHMEAPFETKVSTHLRTVIPIVNHSSKMTIQKAIKQSFSLGYIHLALCADACAGNPFRDHLKKLNLKVEIQLLDLWQDLQHFLSVLLNNKKNGNAIFRHLLGDRICELYLNEQIGPCLPLKSQTIQGLKELLPSGDVIPWIPKAQKEICKMLSPWYDEFLDEEDYWFLLFTTQNRFISSRQHKREFIGKEENILLYKRIQQSLELSQALADMKEMDYRQWRKIATEDLKQGGSLQVELTSPVFLTDITKMSFEELCYKNPKMAIQKISDDYKIYCEKAPKIDFKMEIIKETKTVSRSNRKMSLLKRTLVRKPSMRPRNLTEVLLNTQHLEFFREFLKERKAKIPLQFLTAVQKISIETNEKICKSLIENVIKTFFQGQLSPEEMLQCDAPIIKEIASMRHVTTSTLLTLQGHVMKSIEEKWFKDYQDLFPPHHQEVEVQSEVQISSRKPSKIVSTYLQESQKKGWMRMISFIRSFCKYRRFMLNPSKRQEFEDYLHQEMQNSKENFTTAHNTSGRSAPPSTNVRSADQENGEITLVKRRIFGHRIITVNFAINDLYFFSEMEKFNDLVSSAHMLQVNRAYNENDVILMRSKMNIIQKLFLNSDIPPKLRVLFLEGNPLLLTV

SEQ ID NO: 72410 - protein, 1076 aa, Homo sapiens
  Payload ID: 14338
  Gene Symbol: RGSL1
  Gene Name: regulator of G-protein signaling like 1
  Uniprot ID: A5PLK6
  ENSP ID: ENSP00000457748
MSSAEIIGSTNLIILLEDEVFADFFNTFLSLPVFGQTPFYTVENSQWSLWPEIPCNLIAKYKGLLTWLEKCRLPFFCKTNLCFHYILCQEFISFIKSPEGGEELVDFWILAENILSIDEMDLEVRDYYLSLLLMLRATHLQEGSRVVTLCNMNIKSLLNLSIWHPNQSTTRREILSHMQKVALFKLQSYWLPNFYTHTKMTMAKEEACHGLMQEYETRLYSVCYTHIGGLPLNMSIKKCHHFQKRYSSRKAKRKMWQLVDPDSWSLEMDLKPDAIGMPLQETCPQEKVVIQMPSLKMASSKETRISSLEKDMHYAKISSMENKAKSHLHMEAPFETKVSTHLRTVIPIVNHSSKMTIQKAIKQSFSLGYIHLALCADACAGNPFRDHLKKLNLKVEIQLLDLWQDLQHFLSVLLNNKKNGNAIFRHLLGDRICELYLNEQIGPCLPLKSQTIQGLKELLPSGDVIPWIPKAQKEICKMLSPWYDEFLDEEDYWFLLFTTQNRFISSRQHKREFIGKEENILLYKRIQQSLELSQALADMKEMDYRQWRKIATEDLKQGGSLQVELTSPVFLTDITKMSFEELCYKNPKMAIQKISDDYKIYCEKAPKIDFKMEIIKETKTVSRSNRKMSLLKRTLVRKPSMRPRNLTEVLLNTQHLEFFREFLKERKAKIPLQFLTAVQKISIETNEKICKSLIENVIKTFFQGQLSPEEMLQCDAPIIKEIASMRHVTTSTLLTLQGHVMKSIEEKWFKDYQDLFPPHHQEVEVQSEVQISSRKPSKIVSTYLQESQKKGWMRMISFIRSFCKYRRFMLNPSKRQEFEDYLHQEMQNSKENFTTAHNTSGRSAPPSTNVRSADQENGEITLVKRRIFGHRIITVNFAINDLYFFSEMEKFNDLVSSAHMLQVNRAYNENDVILMRSKMNIIQKLFLNSDIPPKLRVNVPEFQKDAILAAITEGYLDRSVFHGAIMSVFPVVMYFWKRFCFWKATRSYLQYRGKKFKDRKSPPKSTDKYPFSSGGDNAILRFTLLRGIEWLQPQREAISSVQNSSSSKLTQPRLVVSAMQLHPVQGQKLSYIKKEK

SEQ ID NO: 72411 - protein, 160 aa, Homo sapiens
  Payload ID: 14338
  Gene Symbol: RGSL1
  Gene Name: regulator of G-protein signaling like 1
  ENSP ID: ENSP00000458086
MSSAEIIGSTNLIILLEDEVFADFFNTFLSLPVFGQTPFYTVENSQWSLWPEIPCNLIAKYKGLLTWLEKCRLPFFCKTNLCFHYILCQEFISFIKSPEGGEELVDFWILAENILSIDEMDLEVRDYYLSLLLMLRATHLQEGSRVVTLCNMNINAQSLV

SEQ ID NO: 72412 - protein, 81 aa, Homo sapiens
  Payload ID: 14338
  Gene Symbol: RGSL1
  Gene Name: regulator of G-protein signaling like 1
  ENSP ID: ENSP00000488942
MQKVALFKLQSYWLPNFYTHTKMTMAKEEACHGLMQEYETRLYSVCYTHIGGLPLNMSIKKCHHFQKRYSSRKAKRKMWQL

SEQ ID NO: 72413 - protein, 46 aa, Homo sapiens
  Payload ID: 14338
  Gene Symbol: RGSL1
  Gene Name: regulator of G-protein signaling like 1
  ENSP ID: ENSP00000489421
MSSAEIIGSTNLIILLEDEVFADFFNTFLSLPLCFAGFWSDTILYC

SEQ ID NO: 72414 - protein, 31 aa, Homo sapiens
  Payload ID: 14338
  Gene Symbol: RGSL1
  Gene Name: regulator of G-protein signaling like 1
  ENSP ID: ENSP00000489498
MMRWKKADQWLLQKCIGGVRGMWRFYSYLTG

SEQ ID NO: 72415 - protein, 166 aa, Homo sapiens
  Payload ID: 14338
  Gene Symbol: RGSL1
  Gene Name: regulator of G-protein signaling like 1
  ENSP ID: ENSP00000489502
MDLEVRDYYLSLLLMLRATHLQEGSRVVTLCNMNIKSLLNLSIWHPNQSTTRREILSHMQKVALFKLQSYWLPNFYTHTKMTMAKEEACHGLMQEYETRLYSVCYTHIGGLPLNMSIKKCHHFQKRYSSRKAKRKMWQLVDPDSWSLEMDLKPDAIGMPLQETCPQ

SEQ ID NO: 72416 - protein, 57 aa, Homo sapiens
  Payload ID: 14338
  Gene Symbol: RGSL1
  Gene Name: regulator of G-protein signaling like 1
  ENSP ID: ENSP00000489508
  MOD_RES (1)..(1): Any amino acid
XRFTLLRGIEWLQPQREAISSVQNSSSSKLTQPRLVVSAMQLHPVQGNLIQPIQTKG

SEQ ID NO: 72417 - protein, 37 aa, Homo sapiens
  Payload ID: 14338
  Gene Symbol: RGSL1
  Gene Name: regulator of G-protein signaling like 1
  ENSP ID: ENSP00000489611
MMRWKKADQWLLQKCIGGVRGMWRFYSYLTGSAGEEL

SEQ ID NO: 72418 - protein, 314 aa, Homo sapiens
  Payload ID: 14339
  Gene Symbol: RMDN1
  Gene Name: regulator of microtubule dynamics 1
  Uniprot ID: Q96DB5
  ENSP ID: ENSP00000385927
MALAARLWRLLPFRRGAAPGSRLPAGTSGSRGHCGPCRFRGFEVMGNPGTFKRGLLLSALSYLGFETYQVISQAAVVHATAKVEEILEQADYLYESGETEKLYQLLTQYKESEDAELLWRLARASRDVAQLSRTSEEEKKLLVYEALEYAKRALEKNESSFASHKWYAICLSDVGDYEGIKAKIANAYIIKEHFEKAIELNPKDATSIHLMGIWCYTFAEMPWYQRRIAKMLFATPPSSTYEKALGYFHRAEQVDPNFYSKNLLLLGKTYLKLHNKKLAAFWLMKAKDYPAHTEEDKQIQTEAAQLLTSFSEKN

SEQ ID NO: 72419 - protein, 284 aa, Homo sapiens
  Payload ID: 14339
  Gene Symbol: RMDN1
  Gene Name: regulator of microtubule dynamics 1
  Uniprot ID: Q96DB5
  ENSP ID: ENSP00000409661
MALAARLWRLLPFRRGAAPGSRLPAGTSGSRGHCGPCRFRGFEVMGNPGTFKRGLLLSALSYLGFETYQVISQAAVVHATAKVEEILEQADYLYESGETEKLYQLLTQYKESEDAELLWRLARASRDVAQLSRTSEEEKKLLVYEALEYAKRALEKNESSFASHKKAIELNPKDATSIHLMGIWCYTFAEMPWYQRRIAKMLFATPPSSTYEKALGYFHRAEQVDPNFYSKNLLLLGKTYLKLHNKKLAAFWLMKAKDYPAHTEEDKQIQTEAAQLLTSFSEKN

SEQ ID NO: 72420 - protein, 130 aa, Homo sapiens
  Payload ID: 14339
  Gene Symbol: RMDN1
  Gene Name: regulator of microtubule dynamics 1
  ENSP ID: ENSP00000427818
  MOD_RES (1)..(1): Any amino acid
XKTYLKLHNKKLAAFWLMKAKDYPAHTEEDKQEPDSPRVTLVRDVSPLRVRPITENKPQESLTFSFPCSPHLIVLVWIPELTAGLRCLFPHVHVYQSLKITRVFIIRIWKRSLFNQADLCLSFVFTMNSE

SEQ ID NO: 72421 - protein, 64 aa, Homo sapiens
  Payload ID: 14339
  Gene Symbol: RMDN1
  Gene Name: regulator of microtubule dynamics 1
  ENSP ID: ENSP00000428166
MGNPGTFKRGLLLSALSYLGFETYQVISQAAVVHATAKESRCVTEGRVWRCDLSSLQPLPPGFK

SEQ ID NO: 72422 - protein, 165 aa, Homo sapiens
  Payload ID: 14339
  Gene Symbol: RMDN1
  Gene Name: regulator of microtubule dynamics 1
  ENSP ID: ENSP00000428360
EEKKLLVYEALEYAKRALEKNESSFASHKWYAICLSDVGDYEGIKAKIANAYIIKEHFEKAIELNPKDATSIHLMGIWCYTFAEMPWYQRRIAKMLFATPPSSTYEKALGYFHRAEQGKTYLKLHNKKLAAFWLMKAKDYPAHTEEDKQIQTEAAQLLTSFSEKN

SEQ ID NO: 72423 - protein, 271 aa, Homo sapiens
  Payload ID: 14339
  Gene Symbol: RMDN1
  Gene Name: regulator of microtubule dynamics 1
  Uniprot ID: Q96DB5
  ENSP ID: ENSP00000428661
MALAARLWRLLPFRRGAAPGSRLPAGTSGSRGHCGPCRFRGFEVMGNPGTFKRGLLLSALSYLGFETYQVISQAAVVHATAKVEEILEQADYLYESGETEKLYQLLTQYKESEDAELLWRLARASRDVAQLSRTSEEEKKLLVYEALEYAKRALEKNESSFASHKKAIELNPKDATSIHLMGIWCYTFAEMPWYQRRIAKMLFATPPSSTYEKALGYFHRAEQGKTYLKLHNKKLAAFWLMKAKDYPAHTEEDKQIQTEAAQLLTSFSEKN

SEQ ID NO: 72424 - protein, 95 aa, Homo sapiens
  Payload ID: 14339
  Gene Symbol: RMDN1
  Gene Name: regulator of microtubule dynamics 1
  ENSP ID: ENSP00000428743
MGNPGTFKRGLLLSALSYLGFETYQVISQAAVVHATAKVEEILEQADYLYESGETEKLYQLLTQYKESEDAELLWRLARASRDVAQLSRTSEEEK

SEQ ID NO: 72425 - protein, 225 aa, Homo sapiens
  Payload ID: 14339
  Gene Symbol: RMDN1
  Gene Name: regulator of microtubule dynamics 1
  ENSP ID: ENSP00000428897
  MOD_RES (1)..(1): Any amino acid
XLLSALSYLGFETYQVISQAAVVHATAKVEEILEQADYLYESGETEKLYQLLTQYKESEDAELLWRLARASRDVAQLSRTSEEEKKLLVYEALEYAKRALEKNESSFASHKWYAICLSDVGDYEGIKAKIANAYIIKEHFEKAIELNPKDATSIHLMGIWCYTFAEMPWYQRRIAKMLFATPPSSTYEKALGYFHRAEQGEEKQKQLKGQEVGLSRDVAFCWMAF

SEQ ID NO: 72426 - protein, 42 aa, Homo sapiens
  Payload ID: 14339
  Gene Symbol: RMDN1
  Gene Name: regulator of microtubule dynamics 1
  ENSP ID: ENSP00000429105
MGNPGTFKRGLLLSALSYLGFETYQVISQAAVVHATAKVRQY

SEQ ID NO: 72427 - protein, 159 aa, Homo sapiens
  Payload ID: 14339
  Gene Symbol: RMDN1
  Gene Name: regulator of microtubule dynamics 1
  ENSP ID: ENSP00000429287
  MOD_RES (1)..(1): Any amino acid
XCYTFAEMPWYQRRIAKMLFATPPSSTYEKALGYFHRAEQVDPNFYSKNLLLLGKTYLKLHNKKLAAFWLMKAKDYPAHTEEDKQEPDSPRVTLVRDVSPLRVRPITENKPQESLTFSFPCSPHLIVLVWIPELTAGLRCLFPHVHVYQRFCVASPSAS

SEQ ID NO: 72428 - protein, 248 aa, Homo sapiens
  Payload ID: 14339
  Gene Symbol: RMDN1
  Gene Name: regulator of microtubule dynamics 1
  ENSP ID: ENSP00000429899
MGNPGTFKRGLLLSALSYLGFETYQVISQAAVVHATAKVEEILEQADYLYESGETEKLYQLLTQYKESEDAELLWRLARASRDVAQLSRTSEEEKKLLVYEALEYAKRALEKNESSFASHKWYAICLSDVGDYEGIKAKIANAYIIKEHFEKAIELNPKDATSIHLMGIWCYTFAEMPWYQRRIAKMLFATPPSSTYEKALGYFHRAEQGKTYLKLHNKKLAAFWLMKAKDYPAHTEEDKQVKRNRSS

SEQ ID NO: 72429 - protein, 108 aa, Homo sapiens
  Payload ID: 14339
  Gene Symbol: RMDN1
  Gene Name: regulator of microtubule dynamics 1
  ENSP ID: ENSP00000430559
MALAARLWRLLPFRRGAAPGSRLPAGTSGSRGHCGPCRFRGFEVMGNPGTFKRGLLLSALSYLGFETYQVISQAAVVHATAKESRCVTEGRVWRCDLSSLQPLPPGFK

SEQ ID NO: 72430 - protein, 107 aa, Homo sapiens
  Payload ID: 14339
  Gene Symbol: RMDN1
  Gene Name: regulator of microtubule dynamics 1
  ENSP ID: ENSP00000430790
  MOD_RES (1)..(1): Any amino acid
XKAIELNPKDATSIHLMGIWCYTFAEMPWYQRRIAKMLFATPPSSTYEKALGYFHRAEQVDPNFYSKNLLLLGKTYLKLHNKKLAAFWLMKAKDYPAHTEEDKQEII

SEQ ID NO: 72431 - protein, 151 aa, Homo sapiens
  Payload ID: 14339
  Gene Symbol: RMDN1
  Gene Name: regulator of microtubule dynamics 1
  ENSP ID: ENSP00000431032
  MOD_RES (1)..(1): Any amino acid
XKNESSFASHKWYAICLSDVGDYEGIKAKIANAYIIKEHFEKAIELNPKDATSIHLMGIWCYTFAEMPWYQRRIAKMLFATPPSSTYEKALGYFHRAEQVDPNFYSKNLLLLGKTYLKLHNKKLAAFWLMKAKDYPAHTEEDKQVKRNRSS

SEQ ID NO: 72432 - protein, 573 aa, Homo sapiens
  Payload ID: 14340
  Gene Symbol: RMDN2
  Gene Name: regulator of microtubule dynamics 2
  ENSP ID: ENSP00000234195
MGKCLSCCKEDQSFQRCSPEDQVSTDAQHRGASSISQPSISLGHKTSYSPVTHKVNAAKASRRLLSVSSPSFSERRYSLFVGFQKRNASPYWQQSRANFDSEEDTGFTDIKSSSDHCGSFISRRRRFSSRKLSIVSYYKSAIFFDPQASGQNVFNLNEIEIFSKTSSNTDAKKHITISAPEYNTKNFKNFETNTTSPAFGNTIDTASYQQSTSSFFSLASDISSPDQQNGIANDIQQRGQLCKDLKDFLHPRPESYSTDHSPIMIPQHPSQSGTFPFLHKAGFSSSYKNSGCFIPPQSELTSGLFEDEDFAVLFQDEDRSSPIEIPKIRYITANTDTEEQSFPVPKAFNTRVEELNLDVLLQKVDHLRMSESGKSESFELLRDHKEKFRDEIEFMWRFARAYGDMYELSTNTQEKKHYANIGKTLSERAINRAPMNGHCHLWYAVLCGYVSEFEGLQNKINYGHLFKEHLDIAIKLLPEEPFLYYLKGRYCYTVSKLSWIEKKMAATLFGKIPSSTVQEALHNFLKAEELCPGYSNPNYMYLAKCYTDLEENQNALKFCNLALLLPTVTKEEL

SEQ ID NO: 72433 - protein, 410 aa, Homo sapiens
  Payload ID: 14340
  Gene Symbol: RMDN2
  Gene Name: regulator of microtubule dynamics 2
  Uniprot ID: Q96LZ7
  ENSP ID: ENSP00000346549
MPYSTNKELILGIMVGTAGISLLLLWYHKVRKPGIAMKLPEFLSLGNTFNSITLQDEIHDDQGTTVIFQERQLQILEKLNELLTNMEELKEEIRFLKEAIPKLEEYIQDELGGKITVHKISPQHRARKRRLPTIQSSATSNSSEEAESEGGYITANTDTEEQSFPVPKAFNTRVEELNLDVLLQKVDHLRMSESGKSESFELLRDHKEKFRDEIEFMWRFARAYGDMYELSTNTQEKKHYANIGKTLSERAINRAPMNGHCHLWYAVLCGYVSEFEGLQNKINYGHLFKEHLDIAIKLLPEEPFLYYLKGRYCYTVSKLSWIEKKMAATLFGKIPSSTVQEALHNFLKAEELCPGYSNPNYMYLAKCYTDLEENQNALKFCNLALLLPTVTKEDKEAQKEMQKIMTSLKR

SEQ ID NO: 72434 - protein, 571 aa, Homo sapiens
  Payload ID: 14340
  Gene Symbol: RMDN2
  Gene Name: regulator of microtubule dynamics 2
  ENSP ID: ENSP00000385049
MGKCLSCCKEDQSFQRCSPEDQVSTDAQHRGASSISQPSISLGHKTSYSPVTHKVNAAKASRRLLSVSSPSFSERRYSLFVGFQKRNASPYWQQSRANFDSEEDTGFTDIKSSSDHCGSFISRRRRFSSRKLSIVSYYKSAIFFDPQASGQNVFNLNEIEIFSKTSSNTDAKKHITISAPEYNTKNFKNFETNTTSPAFGNTIDTASYQQSTSSFFSLASDISSPDQQNGIANDIQQRGQLCKDLKDFLHPRPESYSTDHSPIMIPQHPSQSGTFPFLHKAGFSSSYKNSGCFIPPQSELTSGLFEDEDFAVLFQDEDRSSPIEIPKIRYITANTDTEEQSFPVPKAFNTRVEELNLDVLLQKVDHLRMSESGKSESFELLRDHKEKFRDEIEFMWRFARAYGDMYELSTNTQEKKHYANIGKTLSERAINRAPMNGHCHLWYAVLCGYVSEFEGLQNKINYGHLFKEHLDIAIKLLPEEPFLYYLKGRYCYTVSKLSWIEKKMAATLFGKIPSSTVQEALHNFLKAEELCPGYSNPNYMYLAKCYTDLEENQNALKFCNLALLLPTVTKE

SEQ ID NO: 72435 - protein, 358 aa, Homo sapiens
  Payload ID: 14340
  Gene Symbol: RMDN2
  Gene Name: regulator of microtubule dynamics 2
  ENSP ID: ENSP00000385529
MGKCLSCCKEDQSFQRCSPEDQVSTDAQHRGASSISQPSISLGHKTSYSPVTHKVNAAKASRRLLSVSSPSFSERRYSLFVGFQKRNASPYWQQSRANFDSEEDTGFTDIKSSSDHCGSFISRRRRFSSRKLSIVSYYKSAIFFDPQASGQNVFNLNEIEIFSKTSSNTDAKKHITISAPEYNTKNFKNFETNTTSPAFGNTIDTASYQQSTSSFFSLASDISSPDQQNGIANDIQQRGQLCKDLKDFLHPRPESYSTDHSPIMIPQHPSQSGTFPFLHKAGFSSSYKNSGCFIPPQSELTSGLFEDEDFAVLFQDEDRSSPIEIPKIRSPQTLPSLRRAPQIVFPPVTFIACRIHFS

SEQ ID NO: 72436 - protein, 410 aa, Homo sapiens; identical to SEQ ID NO: 72433
  Payload ID: 14340
  Gene Symbol: RMDN2
  Gene Name: regulator of microtubule dynamics 2
  Uniprot ID: Q96LZ7
  ENSP ID: ENSP00000386004

SEQ ID NO: 72437 - protein, 265 aa, Homo sapiens
  Payload ID: 14340
  Gene Symbol: RMDN2
  Gene Name: regulator of microtubule dynamics 2
  Uniprot ID: Q96LZ7
  ENSP ID: ENSP00000392977
MGKCLRYITANTDTEEQSFPVPKAFNTRVEELNLDVLLQKVDHLRMSESGKSESFELLRDHKEKFRDEIEFMWRFARAYGDMYELSTNTQEKKHYANIGKTLSERAINRAPMNGHCHLWYAVLCGYVSEFEGLQNKINYGHLFKEHLDIAIKLLPEEPFLYYLKGRYCYTVSKLSWIEKKMAATLFGKIPSSTVQEALHNFLKAEELCPGYSNPNYMYLAKCYTDLEENQNALKFCNLALLLPTVTKEDKEAQKEMQKIMTSLKR

SEQ ID NO: 72438 - protein, 175 aa, Homo sapiens
  Payload ID: 14340
  Gene Symbol: RMDN2
  Gene Name: regulator of microtubule dynamics 2
  ENSP ID: ENSP00000393705
MPYSTNKELILGIMVGTAGISLLLLWYHKVRKPGIAMKLPEFLSLGNTFNSITLQDEIHDDQGTTVIFQERQLQILEKLNELLTNMEELKEEIRFLKEAIPKLEEYIQDELGGKITVHKISPQHRARKRRLPTIQSSATSNSSEEAESEGGYITANTDTEEQSFPVPKAFNTRVE

SEQ ID NO: 72439 - protein, 160 aa, Homo sapiens
  Payload ID: 14340
  Gene Symbol: RMDN2
  Gene Name: regulator of microtubule dynamics 2
  ENSP ID: ENSP00000399495
MPYSTNKELILGIMVGTAGISLLLLWYHKVRKPGIAMKLPEFLSLGNTFNSITLQDEIHDDQGTTVIFQERQLQILEKLNELLTNMEELKEEIRFLKEAIPKLEEYIQDELGGKITVHKISPQHRARKRRLPTIQSSATSNSSEEAESEGGAFYGLRMTA

SEQ ID NO: 72440 - protein, 150 aa, Homo sapiens
  Payload ID: 14340
  Gene Symbol: RMDN2
  Gene Name: regulator of microtubule dynamics 2
  ENSP ID: ENSP00000406331
  MOD_RES (1)..(1): Any amino acid
XVLCGYVSEFEGLQNKINYGHLFKEHLDIAIKLLPEEPFLYYLKGRYCYTVSKLSWIEKKMAATLFGKIPSSTVQEALHNFLKAEELCPGYSNPNYMYLAKCYTDLEENQNALKFCNLALLLPTVTKEDKEAQKEMQKIMTSLKRLRKTK

SEQ ID NO: 72441 - protein, 238 aa, Homo sapiens
  Payload ID: 14340
  Gene Symbol: RMDN2
  Gene Name: regulator of microtubule dynamics 2
  ENSP ID: ENSP00000416367
MGKCLRYITANTDTEEQSFPVPKAFNTRVEELNLDVLLQKVDHLRMSESGKSESFELLRDHKEKFRDEIEFMWRFARAYGDMYELSTNTQEKKHYANIGKTLSERAINRAPMNGHCHLWYAVLCGYVSEFEGLQNKINYGHLFKEHLDIAIKLLPEEPFLYYLKGRYCYTVSKLSWIEKKMAATLFGKIPSSTVQEALHNFLKAEELCPGYSNPNYMYLAKCYTDLEENQNALKFCNL

SEQ ID NO: 72442 - protein, 470 aa, Homo sapiens
  Payload ID: 14341
  Gene Symbol: RMDN3
  Gene Name: regulator of microtubule dynamics 3
  Uniprot ID: Q96TC7
  ENSP ID: ENSP00000260385
MSRLGALGGARAGLGLLLGTAAGLGFLCLLYSQRWKRTQRHGRSQSLPNSLDYTQTSDPGRHVMLLRAVPGGAGDASVLPSLPREGQEKVLDRLDFVLTSLVALRREVEELRSSLRGLAGEIVGEVRCHMEENQRVARRRRFPFVRERSDSTGSSSVYFTASSGATFTDAESEGGYTTANAESDNERDSDKESEDGEDEVSCETVKMGRKDSLDLEEEAASGASSALEAGGSSGLEDVLPLLQQADELHRGDEQGKREGFQLLLNNKLVYGSRQDFLWRLARAYSDMCELTEEVSEKKSYALDGKEEAEAALEKGDESADCHLWYAVLCGQLAEHESIQRRIQSGFSFKEHVDKAIALQPENPMAHFLLGRWCYQVSHLSWLEKKTATALLESPLSATVEDALQSFLKAEELQPGFSKAGRVYISKCYRELGKNSEARWWMKLALELPDVTKEDLAIQKDLEELEVILRD

SEQ ID NO: 72443 - protein, 470 aa, Homo sapiens; identical to SEQ ID NO: 72442
  Payload ID: 14341
  Gene Symbol: RMDN3
  Gene Name: regulator of microtubule dynamics 3
  Uniprot ID: Q96TC7
  ENSP ID: ENSP00000342493

SEQ ID NO: 72444 - protein, 287 aa, Homo sapiens
  Payload ID: 14341
  Gene Symbol: RMDN3
  Gene Name: regulator of microtubule dynamics 3
  ENSP ID: ENSP00000453199
MSRLGALGGARAGLGLLLGTAAGLGFLCLLYSQRWKRTQRHGRSQSLPNSLDYTQTSDPGRHVMLLRAVPGGAGDASVLPSLPREGQEKVLDRLDFVLTSLVALRREVEELRSSLRGLAGEIVGEVRCHMEENQRVARRRRFPFVRERSDSTGSSSVYFTASSGATFTDAESEGGYTTANAESDNERDSDKESEDGEDEVSCETVKMGRKDSLDLEEEAASGASSALEAGGSSGLEDVLPLLQQADELHRGDEQGKREGFQLLLNNKLVYGSRQDFLWRLARAYSDM

SEQ ID NO: 72445 - protein, 116 aa, Homo sapiens
  Payload ID: 14341
  Gene Symbol: RMDN3
  Gene Name: regulator of microtubule dynamics 3
  ENSP ID: ENSP00000453357
MSRLGALGGARAGLGLLLGLYADFRSRTPRDAPAGCPRWGWRCLSAAQPSTGRTGEGAGPPGLCADQPCGAAAGGGGAEKQPARACGGDCWGGPMPHGREPESGSAAKVSVCPGEE

SEQ ID NO: 72446 - protein, 306 aa, Homo sapiens
  Payload ID: 14341
  Gene Symbol: RMDN3
  Gene Name: regulator of microtubule dynamics 3
  ENSP ID: ENSP00000453535
  MOD_RES (1)..(1): Any amino acid
XESEDGEDEVSCETVKMGRKDSLDLEEEAASGASSALEAGGSSGLEDVLPLLQQADELHRGDEQGKREGFQLLLNNKLVGVGEGQGPHSPQLRKKGPHPFLSGLQYGSRQDFLWRLARAYSDMCELTEEVSEKKSYALDGKEEAEAALEKGDESADCHLWYAVLCGQLAEHESIQRRIQSGFSFKEHVDKAIALQPENPMAHFLLGRWCYQVSHLSWLEKKTATALLESPLSATVEDALQSFLKAEELQPGFSKAGRVYISKCYRELGKNSEARWWMKLALELPDVTKEDLAIQKDLEELEVILRD

SEQ ID NO: 72447 - protein, 251 aa, Homo sapiens
  Payload ID: 14341
  Gene Symbol: RMDN3
  Gene Name: regulator of microtubule dynamics 3
  ENSP ID: ENSP00000453978
MSRLGALGGARAGLGLLLGTAAGLGFLCLLYSQRWKRTQRHGRSQSLPNSLDYTQTSDPGRHVMLLRAVPGGAGDASVLPSLPREGQEKVLDRLDFVLTSLVALRREVEELRSSLRGLAGEIVGEVRPLMRSSSKRHPMVSRKTSWMGPNGTLRDGACFPDATWKRTREWLGGEGFRLSGRGVTPLAPALSTSRPPREPRSQMLRVKGGKEEAEAALEKGDESADCHLWYAVLCGQLAEHESIQRRIQSGF

SEQ ID NO: 72448 - protein, 996 aa, Homo sapiens
  Payload ID: 14342
  Gene Symbol: RTEL1
  Gene Name: regulator of telomere elongation helicase 1
  Uniprot ID: Q9NZ71
  ENSP ID: ENSP00000322287
MPYNYLLDAKSRRAHNIDLKGTVVIFDEAHNVEKMCEESASFDLTPHDLASGLDVIDQVLEEQTKAAQQGEPHPEFSADSPSPGLNMELEDIAKLKMILLRLEGAIDAVELPGDDSGVTKPGSYIFELFAEAQITFQTKGCILDSLDQIIQHLAGRAGVFTNTAGLQKLADIIQIVFSVDPSEGSPGSPAGLGALQSYKVHIHPDAGHRRTAQRSDAWSTTAARKRGKVLSYWCFSPGHSMHELVRQGVRSLILTSGTLAPVSSFALEMQIPFPVCLENPHIIDKHQIWVGVVPRGPDGAQLSSAFDRRFSEECLSSLGKALGNIARVVPYGLLIFFPSYPVMEKSLEFWRARDLARKMEALKPLFVEPRSKGSFSETISAYYARVAAPGSTGATFLAVCRGKASEGLDFSDTNGRGVIVTGLPYPPRMDPRVVLKMQFLDEMKGQGGAGGQFLSGQEWYRQQASRAVNQAIGRVIRHRQDYGAVFLCDHRFAFADARAQLPSWVRPHVRVYDNFGHVIRDVAQFFRVAERTMPAPAPRATAPSVRGEDAVSEAKSPGPFFSTRKAKSLDLHVPSLKQRSSGSPAAGDPESSLCVEYEQEPVPARQRPRGLLAALEHSEQRAGSPGEEQAHSCSTLSLLSEKRPAEEPRGGRKKIRLVSHPEEPVAGAQTDRAKLFMVAVKQELSQANFATFTQALQDYKGSDDFAALAACLGPLFAEDPKKHNLLQGFYQFVRPHHKQQFEEVCIQLTGRGCGYRPEHSIPRRQRAQPVLDPTGRTAPDPKLTVSTAAAQQLDPQEHLNQGRPHLSPRPPPTGDPGSQPQWGSGVPRAGKQGQHAVSAYLADARRALGSAGCSQLLAALTAYKQDDDLDKVLAVLAALTTAKPEDFPLLHRFSMFVRPHHKQRFSQTCTDLTGRPYPGMEPPGPQEERLAVPPVLTHRAPQPGPSRSEKTGKTQSKISSFLRQRPAGTVGAGGEDAGPSQSSGPPHGPAASEWGL

SEQ ID NO: 72449 - protein, 356 aa, Homo sapiens
  Payload ID: 14342
  Gene Symbol: RTEL1
  Gene Name: regulator of telomere elongation helicase 1
  ENSP ID: ENSP00000349265
MPKIVLNGVTVDFPFQPYKCQQEYMTKVLECLQQKVNGILESPTGTGKTLCLLCTTLAWREHLRDGISARKIAERAQGELFPDRALSSWGNAAAAAGDPIACYTDIPKIIYASRTHSQLTQVINELRNTSYRSLLRPGHVSVMLTSSDRRGSCVSPYSSRCRATLWVLETAPPRPTVLSPTRPKVCVLGSREQLCIHPEVKKQESNHLQIHLCRKKVASRSCHFYNNVEEKSLEQELASPILDIEDLVKSGSKHRVCPYYLSRNLKQQADIIFMPYNYLLDAKSRRAHNIDLKGTVVIFDEAHNVEKMCEESASFDLTPHDLASGLDVIDQVLEEQTKAAQQGEPHPEFSADSPSP

SEQ ID NO: 72450 - protein, 1300 aa, Homo sapiens
  Payload ID: 14342
  Gene Symbol: RTEL1
  Gene Name: regulator of telomere elongation helicase 1
  Uniprot ID: Q9NZ71
  ENSP ID: ENSP00000353332
MPKIVLNGVTVDFPFQPYKCQQEYMTKVLECLQQKVNGILESPTGTGKTLCLLCTTLAWREHLRDGISARKIAERAQGELFPDRALSSWGNAAAAAGDPIACYTDIPKIIYASRTHSQLTQVINELRNTSYRPKVCVLGSREQLCIHPEVKKQESNHLQIHLCRKKVASRSCHFYNNVEEKSLEQELASPILDIEDLVKSGSKHRVCPYYLSRNLKQQADIIFMPYNYLLDAKSRRAHNIDLKGTVVIFDEAHNVEKMCEESASFDLTPHDLASGLDVIDQVLEEQTKAAQQGEPHPEFSADSPSPGLNMELEDIAKLKMILLRLEGAIDAVELPGDDSGVTKPGSYIFELFAEAQITFQTKGCILDSLDQIIQHLAGRAGVFTNTAGLQKLADIIQIVFSVDPSEGSPGSPAGLGALQSYKVHIHPDAGHRRTAQRSDAWSTTAARKRGKVLSYWCFSPGHSMHELVRQGVRSLILTSGTLAPVSSFALEMQIPFPVCLENPHIIDKHQIWVGVVPRGPDGAQLSSAFDRRFSEECLSSLGKALGNIARVVPYGLLIFFPSYPVMEKSLEFWRARDLARKMEALKPLFVEPRSKGSFSETISAYYARVAAPGSTGATFLAVCRGKASEGLDFSDTNGRGVIVTGLPYPPRMDPRVVLKMQFLDEMKGQGGAGGQFLSGQEWYRQQASRAVNQAIGRVIRHRQDYGAVFLCDHRFAFADARAQLPSWVRPHVRVYDNFGHVIRDVAQFFRVAERTMPAPAPRATAPSVRGEDAVSEAKSPGPFFSTRKAKSLDLHVPSLKQRSSGSPAAGDPESSLCVEYEQEPVPARQRPRGLLAALEHSEQRAGSPGEEQAHSCSTLSLLSEKRPAEEPRGGRKKIRLVSHPEEPVAGAQTDRAKLFMVAVKQELSQANFATFTQALQDYKGSDDFAALAACLGPLFAEDPKKHNLLQGFYQFVRPHHKQQFEEVCIQLTGRGCGYRPEHSIPRRQRAQPVLDPTGRTAPDPKLTVSTAAAQQLDPQEHLNQGRPHLSPRPPPTGDPGSQPQWGSGVPRAGKQGQHAVSAYLADARRALGSAGCSQLLAALTAYKQDDDLDKVLAVLAALTTAKPEDFPLLHRFSMFVRPHHKQRFSQTCTDLTGRPYPGMEPPGPQEERLAVPPVLTHRAPQPGPSRSEKTGKTQSKISSFLRQRPAGTVGAGGEDAGPSQSSGPPHGPAASEWGEPHGRDIAGQQATGAPGGPLSAGCVCQGCGAEDVVPFQCPACDFQRCQACWQRHLQASRMCPACHTASRKQSVMQVFWPEPQ

SEQ ID NO: 72451 - protein, 545 aa, Homo sapiens
  Payload ID: 14342
  Gene Symbol: RTEL1
  Gene Name: regulator of telomere elongation helicase 1
  Uniprot ID: Q9NZ71
  ENSP ID: ENSP00000359020
MPAPAPRATAPSVRGEDAVSEAKSPGPFFSTRKAKSLDLHVPSLKQRSSGSPAAGDPESSLCVEYEQEPVPARQRPRGLLAALEHSEQRAGSPGEEQAHSCSTLSLLSEKRPAEEPRGGRKKIRLVSHPEEPVAGAQTDRAKLFMVAVKQELSQANFATFTQALQDYKGSDDFAALAACLGPLFAEDPKKHNLLQGFYQFVRPHHKQQFEEVCIQLTGRGCGYRPEHSIPRRQRAQPVLDPTGRTAPDPKLTVSTAAAQQLDPQEHLNQGRPHLSPRPPPTGDPGSQPQWGSGVPRAGKQGQHAVSAYLADARRALGSAGCSQLLAALTAYKQDDDLDKVLAVLAALTTAKPEDFPLLHRFSMFVRPHHKQRFSQTCTDLTGRPYPGMEPPGPQEERLAVPPVLTHRAPQPGPSRSEKTGKTQSKISSFLRQRPAGTVGAGGEDAGPSQSSGPPHGPAASEWGEPHGRDIAGQQATGAPGGPLSAGCVCQGCGAEDVVPFQCPACDFQRCQACWQRHLQASRMCPACHTASRKQSVMQVFWPEPQ

SEQ ID NO: 72452 - protein, 1219 aa, Homo sapiens
  Payload ID: 14342
  Gene Symbol: RTEL1
  Gene Name: regulator of telomere elongation helicase 1
  Uniprot ID: Q9NZ71
  ENSP ID: ENSP00000359035
MPKIVLNGVTVDFPFQPYKCQQEYMTKVLECLQQKVNGILESPTGTGKTLCLLCTTLAWREHLRDGISARKIAERAQGELFPDRALSSWGNAAAAAGDPIACYTDIPKIIYASRTHSQLTQVINELRNTSYRPKVCVLGSREQLCIHPEVKKQESNHLQIHLCRKKVASRSCHFYNNVEEKSLEQELASPILDIEDLVKSGSKHRVCPYYLSRNLKQQADIIFMPYNYLLDAKSRRAHNIDLKGTVVIFDEAHNVEKMCEESASFDLTPHDLASGLDVIDQVLEEQTKAAQQGEPHPEFSADSPSPGLNMELEDIAKLKMILLRLEGAIDAVELPGDDSGVTKPGSYIFELFAEAQITFQTKGCILDSLDQIIQHLAGRAGVFTNTAGLQKLADIIQIVFSVDPSEGSPGSPAGLGALQSYKVHIHPDAGHRRTAQRSDAWSTTAARKRGKVLSYWCFSPGHSMHELVRQGVRSLILTSGTLAPVSSFALEMQIPFPVCLENPHIIDKHQIWVGVVPRGPDGAQLSSAFDRRFSEECLSSLGKALGNIARVVPYGLLIFFPSYPVMEKSLEFWRARDLARKMEALKPLFVEPRSKGSFSETISAYYARVAAPGSTGATFLAVCRGKASEGLDFSDTNGRGVIVTGLPYPPRMDPRVVLKMQFLDEMKGQGGAGGQFLSGQEWYRQQASRAVNQAIGRVIRHRQDYGAVFLCDHRFAFADARAQLPSWVRPHVRVYDNFGHVIRDVAQFFRVAERTMPAPAPRATAPSVRGEDAVSEAKSPGPFFSTRKAKSLDLHVPSLKQRSSGSPAAGDPESSLCVEYEQEPVPARQRPRGLLAALEHSEQRAGSPGEEQAHSCSTLSLLSEKRPAEEPRGGRKKIRLVSHPEEPVAGAQTDRAKLFMVAVKQELSQANFATFTQALQDYKGSDDFAALAACLGPLFAEDPKKHNLLQGFYQFVRPHHKQQFEEVCIQLTGRGCGYRPEHSIPRRQRAQPVLDPTGRTAPDPKLTVSTAAAQQLDPQEHLNQGRPHLSPRPPPTGDPGSQPQWGSGVPRAGKQGQHAVSAYLADARRALGSAGCSQLLAALTAYKQDDDLDKVLAVLAALTTAKPEDFPLLHRFSMFVRPHHKQRFSQTCTDLTGRPYPGMEPPGPQEERLAVPPVLTHRAPQPGPSRSEKTGKTQSKISSFLRQRPAGTVGAGGEDAGPSQSSGPPHGPAASEWGL

SEQ ID NO: 72453 - protein, 221 aa, Homo sapiens
  Payload ID: 14342
  Gene Symbol: RTEL1
  Gene Name: regulator of telomere elongation helicase 1
  ENSP ID: ENSP00000388063
FFPSYPVMEKSLEFWRARDLARKMEALKPLFVEPRSKGSFSETISAYYARVAAPGSTGATFLAVCRGKFLSGQEWYRQQASRAVNQAIGRVIRHRQDYGAVFLCDHRFAFADARAQLPSWVRPHVRVYDNFGHVIRDVAQFFRVAERTMPAPAPRATAPSVRGEDAVSEAKSPGPFFSTRKAKSLDLHVPSLKQRSSGSPAAGDPESSLCVEYEQEPVPAR

SEQ ID NO: 72454 - protein, 1243 aa, Homo sapiens
  Payload ID: 14342
  Gene Symbol: RTEL1
  Gene Name: regulator of telomere elongation helicase 1
  Uniprot ID: Q9NZ71
  ENSP ID: ENSP00000424307
MPKIVLNGVTVDFPFQPYKCQQEYMTKVLECLQQKVNGILESPTGTGKTLCLLCTTLAWREHLRDGISARKIAERAQGELFPDRALSSWGNAAAAAGDPIACYTDIPKIIYASRTHSQLTQVINELRNTSYRSRCRATLWVLETAPPRPTVLSPTRPKVCVLGSREQLCIHPEVKKQESNHLQIHLCRKKVASRSCHFYNNVEEKSLEQELASPILDIEDLVKSGSKHRVCPYYLSRNLKQQADIIFMPYNYLLDAKSRRAHNIDLKGTVVIFDEAHNVEKMCEESASFDLTPHDLASGLDVIDQVLEEQTKAAQQGEPHPEFSADSPSPGLNMELEDIAKLKMILLRLEGAIDAVELPGDDSGVTKPGSYIFELFAEAQITFQTKGCILDSLDQIIQHLAGRAGVFTNTAGLQKLADIIQIVFSVDPSEGSPGSPAGLGALQSYKVHIHPDAGHRRTAQRSDAWSTTAARKRGKVLSYWCFSPGHSMHELVRQGVRSLILTSGTLAPVSSFALEMQIPFPVCLENPHIIDKHQIWVGVVPRGPDGAQLSSAFDRRFSEECLSSLGKALGNIARVVPYGLLIFFPSYPVMEKSLEFWRARDLARKMEALKPLFVEPRSKGSFSETISAYYARVAAPGSTGATFLAVCRGKASEGLDFSDTNGRGVIVTGLPYPPRMDPRVVLKMQFLDEMKGQGGAGGQFLSGQEWYRQQASRAVNQAIGRVIRHRQDYGAVFLCDHRFAFADARAQLPSWVRPHVRVYDNFGHVIRDVAQFFRVAERTMPAPAPRATAPSVRGEDAVSEAKSPGPFFSTRKAKSLDLHVPSLKQRSSGSPAAGDPESSLCVEYEQEPVPARQRPRGLLAALEHSEQRAGSPGEEQAHSCSTLSLLSEKRPAEEPRGGRKKIRLVSHPEEPVAGAQTDRAKLFMVAVKQELSQANFATFTQALQDYKGSDDFAALAACLGPLFAEDPKKHNLLQGFYQFVRPHHKQQFEEVCIQLTGRGCGYRPEHSIPRRQRAQPVLDPTGRTAPDPKLTVSTAAAQQLDPQEHLNQGRPHLSPRPPPTGDPGSQPQWGSGVPRAGKQGQHAVSAYLADARRALGSAGCSQLLAALTAYKQDDDLDKVLAVLAALTTAKPEDFPLLHRFSMFVRPHHKQRFSQTCTDLTGRPYPGMEPPGPQEERLAVPPVLTHRAPQPGPSRSEKTGKTQSKISSFLRQRPAGTVGAGGEDAGPSQSSGPPHGPAASEWGL

SEQ ID NO: 72455 - protein, 316 aa, Homo sapiens
  Payload ID: 14342
  Gene Symbol: RTEL1
  Gene Name: regulator of telomere elongation helicase 1
  ENSP ID: ENSP00000425576
VFLCDHRFAFADARAQLPSWVRPHVRVYDNFGHVIRDVAQFFRVAERTMPAPAPRATAPSVRGEDAVSEAKSPGPFFSTRKAKSLDLHVPSLKQRSSGSPAAGDPESSLCVEYEQEPVPARQRPRGLLAALEHSEQRAGSPGEEQAHSCSTLSLLSEKRPAEEPRGGRKKIRLVSHPEEPVAGAQTDRAKLFMVAVKQELSQANFATFTQALQDYKGSDDFAALAACLGPLFAEDPKKHNLLQGFYQFVRPHHKQQFEEVCIQLTGRGCGYRPEHSIPRRQRAQPVLDPTGNFPDALDQLCGSTSLHQEERRRIPS

SEQ ID NO: 72456 - protein, 1335 aa, Homo sapiens
  Payload ID: 14343
  Gene Symbol: RPTOR
  Gene Name: regulatory associated protein of MTOR, complex 1
  Uniprot ID: Q8N122
  ENSP ID: ENSP00000307272
MESEMLQSPLLGLGEEDEADLTDWNLPLAFMKKRHCEKIEGSKSLAQSWRMKDRMKTVSVALVLCLNVGVDPPDVVKTTPCARLECWIDPLSMGPQKALETIGANLQKQYENWQPRARYKQSLDPTVDEVKKLCTSLRRNAKEERVLFHYNGHGVPRPTVNGEVWVFNKNYTQYIPLSIYDLQTWMGSPSIFVYDCSNAGLIVKSFKQFALQREQELEVAAINPNHPLAQMPLPPSMKNCIQLAACEATELLPMIPDLPADLFTSCLTTPIKIALRWFCMQKCVSLVPGVTLDLIEKIPGRLNDRRTPLGELNWIFTAITDTIAWNVLPRDLFQKLFRQDLLVASLFRNFLLAERIMRSYNCTPVSSPRLPPTYMHAMWQAWDLAVDICLSQLPTIIEEGTAFRHSPFFAEQLTAFQVWLTMGVENRNPPEQLPIVLQVLLSQVHRLRALDLLGRFLDLGPWAVSLALSVGIFPYVLKLLQSSARELRPLLVFIWAKILAVDSSCQADLVKDNGHKYFLSVLADPYMPAEHRTMTAFILAVIVNSYHTGQEACLQGNLIAICLEQLNDPHPLLRQWVAICLGRIWQNFDSARWCGVRDSAHEKLYSLLSDPIPEVRCAAVFALGTFVGNSAERTDHSTTIDHNVAMMLAQLVSDGSPMVRKELVVALSHLVVQYESNFCTVALQFIEEEKNYALPSPATTEGGSLTPVRDSPCTPRLRSVSSYGNIRAVATARSLNKSLQNLSLTEESGGAVAFSPGNLSTSSSASSTLGSPENEEHILSFETIDKMRRASSYSSLNSLIGVSFNSVYTQIWRVLLHLAADPYPEVSDVAMKVLNSIAYKATVNARPQRVLDTSSLTQSAPASPTNKGVHIHQAGGSPPASSTSSSSLTNDVAKQPVSRDLPSGRPGTTGPAGAQYTPHSHQFPRTRKMFDKGPEQTADDADDAAGHKSFISATVQTGFCDWSARYFAQPVMKIPEEHDLESQIRKEREWRFLRNSRVRRQAQQVIQKGITRLDDQIFLNRNPGVPSVVKFHPFTPCIAVADKDSICFWDWEKGEKLDYFHNGNPRYTRVTAMEYLNGQDCSLLLTATDDGAIRVWKNFADLEKNPEMVTAWQGLSDMLPTTRGAGMVVDWEQETGLLMSSGDVRIVRIWDTDREMKVQDIPTGADSCVTSLSCDSHRSLIVAGLGDGSIRVYDRRMALSECRVMTYREHTAWVVKASLQKRPDGHIVSVSVNGDVRIFDPRMPESVNVLQIVKGLTALDIHPQADLIACGSVNQFTAIYNSSGELINNIKYYDGFMGQRVGAISCLAFHPHWPHLAVGSNDYYISVYSVEKRVR

SEQ ID NO: 72457 - protein, 1177 aa, Homo sapiens
  Payload ID: 14343
  Gene Symbol: RPTOR
  Gene Name: regulatory associated protein of MTOR, complex 1
  Uniprot ID: Q8N122
  ENSP ID: ENSP00000442479
MESEMLQSPLLGLGEEDEADLTDWNLPLAFMKKRHCEKIEGSKSLAQSWRMKDRMKTVSVALVLCLNVGVDPPDVVKTTPCARLECWIDPLSMGPQKALETIGANLQKQYENWQPRARYKQSLDPTVDEVKKLCTSLRRNAKEERVLFHYNGHGVPRPTVNGEVWVFNKNYTQYIPLSIYDLQTWMGSPSIFVYDCSNAGLIVKSFKQFALQREQELEVAAINPNHPLAQMPLPPSMKNCIQLAACEATELLPMIPDLPADLFTSCLTTPIKIALRWFCMQKCVSLVPGVTLDLIEKIPGRLNDRRTPLGELNWIFTAITDTIAWNVLPRDLFQKLFRQDLLVASLFRNFLLAERIMRSYNCTPVSSPRLPPTYMHAMWQAWDLAVDICLSQLPTIIEEGTAFRHSPFFAEQLTAFQVWLTMGVENRNPPEQLPIVLQVLLSQVHRLRALDLLGRFLDLGPWAVSLALSVGIFPYVLKLLQSSARELRPLLVFIWAKILAVDSELVVALSHLVVQYESNFCTVALQFIEEEKNYALPSPATTEGGSLTPVRDSPCTPRLRSVSSYGNIRAVATARSLNKSLQNLSLTEESGGAVAFSPGNLSTSSSASSTLGSPENEEHILSFETIDKMRRASSYSSLNSLIGVSFNSVYTQIWRVLLHLAADPYPEVSDVAMKVLNSIAYKATVNARPQRVLDTSSLTQSAPASPTNKGVHIHQAGGSPPASSTSSSSLTNDVAKQPVSRDLPSGRPGTTGPAGAQYTPHSHQFPRTRKMFDKGPEQTADDADDAAGHKSFISATVQTGFCDWSARYFAQPVMKIPEEHDLESQIRKEREWRFLRNSRVRRQAQQVIQKGITRLDDQIFLNRNPGVPSVVKFHPFTPCIAVADKDSICFWDWEKGEKLDYFHNGNPRYTRVTAMEYLNGQDCSLLLTATDDGAIRVWKNFADLEKNPEMVTAWQGLSDMLPTTRGAGMVVDWEQETGLLMSSGDVRIVRIWDTDREMKVQDIPTGADSCVTSLSCDSHRSLIVAGLGDGSIRVYDRRMALSECRVMTYREHTAWVVKASLQKRPDGHIVSVSVNGDVRIFDPRMPESVNVLQIVKGLTALDIHPQADLIACGSVNQFTAIYNSSGELINNIKYYDGFMGQRVGAISCLAFHPHWPHLAVGSNDYYISVYSVEKRVR

SEQ ID NO: 72458 - protein, 95 aa, Homo sapiens
  Payload ID: 14343
  Gene Symbol: RPTOR
  Gene Name: regulatory associated protein of MTOR, complex 1
  ENSP ID: ENSP00000459701
MESEMLQSPLLGLGEEDEADLTDWNLPLAFMKKRHCEKIEGSKSLAQSWRMKDRMKTVSVALVLCLNVGVDPPDVVKTTPCARLECWIGPVQAEP

SEQ ID NO: 72459 - protein, 379 aa, Homo sapiens
  Payload ID: 14343
  Gene Symbol: RPTOR
  Gene Name: regulatory associated protein of MTOR, complex 1
  Uniprot ID: Q8N122
  ENSP ID: ENSP00000460136
MESEMLQSPLLGLGEEDEADLTDWNLPLAFMKKRHCEKIEGSKSLAQSWRMKDRMKTVSVALVLCLNVGVDPPDVVKTTPCARLECWIDPLSMGPQKALETIGANLQKQYENWQPRARYKQSLDPTVDEVKKLCTSLRRNAKEERVLFHYNGHGVPRPTVNGEVWVFNKNYTQYIPLSIYDLQTWMGSPSIFVYDCSNAGLIVKSFKQFALQREQELEVAAINPNHPLAQMPLPPSMKNCIQLAACEATELLPMIPDLPADLFTSCLTTPIKIALRWFCMQKCVSLVPGVTLDLIEKIPGRLNDRRTPLGELNWIFTAITDTIAWNVLPRDLFQKLFRQDLLVASLFRNFLLAERIMRSYNCTPVSSPRLPPTYMHAMW

SEQ ID NO: 72460 - protein, 235 aa, Homo sapiens
  Payload ID: 14343
  Gene Symbol: RPTOR
  Gene Name: regulatory associated protein of MTOR, complex 1
  ENSP ID: ENSP00000460940
ATVNARPQRVLDTSSLTQSAPASPTNKGVHIHQAGGSPPASSTSSSSLTNDVAKQPVSRDLPSGRPGTTGPAGAQYTPHSHQFPRTRKMFDKGPEQVREPGCLVIWTLRALLLRWGLMASASGCSHHHGMGQDPPCRPGSVGHSLPLQTRVLVLTRAPLCLHSLGALLGVSRSLCLHSLGALLGVSRFSAPGSGFTILGSFHVTKQEHGVTWLCPSWAHSTLRPLGGSCTAEHLF

SEQ ID NO: 72461 - protein, 979 aa, Homo sapiens
  Payload ID: 14344
  Gene Symbol: RFX1
  Gene Name: regulatory factor X, 1 (influences HLA class II expression)
  Uniprot ID: P22670
  ENSP ID: ENSP00000254325
MATQAYTELQAAPPPSQPPQAPPQAQPQPPPPPPPAAPQPPQPPTAAATPQPQYVTELQSPQPQAQPPGGQKQYVTELPAVPAPSQPTGAPTPSPAPQQYIVVTVSEGAMRASETVSEASPGSTASQTGVPTQVVQQVQGTQQRLLVQTSVQAKPGHVSPLQLTNIQVPQQALPTQRLVVQSAAPGSKGGQVSLTVHGTQQVHSPPEQSPVQANSSSSKTAGAPTGTVPQQLQVHGVQQSVPVTQERSVVQATPQAPKPGPVQPLTVQGLQPVHVAQEVQQLQQVPVPHVYSSQVQYVEGGDASYTASAIRSSTYSYPETPLYTQTASTSYYEAAGTATQVSTPATSQAVASSGSMPMYVSGSQVVASSTSTGAGASNSSGGGGSGGGGGGGGGGGGGGSGSTGGGGSGAGTYVIQGGYMLGSASQSYSHTTRASPATVQWLLDNYETAEGVSLPRSTLYCHYLLHCQEQKLEPVNAASFGKLIRSVFMGLRTRRLGTRGNSKYHYYGLRIKASSPLLRLMEDQQHMAMRGQPFSQKQRLKPIQKMEGMTNGVAVGQQPSTGLSDISAQVQQYQQFLDASRSLPDFTELDLQGKVLPEGVGPGDIKAFQVLYREHCEAIVDVMVNLQFTLVETLWKTFWRYNLSQPSEAPPLAVHDEAEKRLPKAILVLLSKFEPVLQWTKHCDNVLYQGLVEILIPDVLRPIPSALTQAIRNFAKSLESWLTHAMVNIPEEMLRVKVAAAGAFAQTLRRYTSLNHLAQAARAVLQNTAQINQMLSDLNRVDFANVQEQASWVCRCEDRVVQRLEQDFKVTLQQQNSLEQWAAWLDGVVSQVLKPYQGSAGFPKAAKLFLLKWSFYSSMVIRDLTLRSAASFGSFHLIRLLYDEYMYYLIEHRVAQAKGETPIAVMGEFANLATSLNPLDPDKDEEEEEEEESEDELPQDISLAAGGESPALGPETLEPPAKLARTDARGLFVQALPSS

SEQ ID NO: 72462 - protein, 158 aa, Homo sapiens
  Payload ID: 14344
  Gene Symbol: RFX1
  Gene Name: regulatory factor X, 1 (influences HLA class II expression)
  ENSP ID: ENSP00000464960
MATQAYTELQAAPPPSQPPQAPPQAQPQPPPPPPPAAPQPPQPPTAAATPQPQYVTELQSPQPQAQPPGGQKQYVTELPAVPAPSQPTGAPTPSPAPQQYIVVTVSEGAMRASETVSEASPGSTASQTGVPTQVVQQVQGTQQMCTAAARHPTTPGLP

SEQ ID NO: 72463 - protein, 723 aa, Homo sapiens
  Payload ID: 14345
  Gene Symbol: RFX2
  Gene Name: regulatory factor X, 2 (influences HLA class II expression)
  Uniprot ID: P48378
  ENSP ID: ENSP00000306335
MQNSEGGADSPASVALRPSAAAPPVPASPQRVLVQAASSNPKGAQMQPISLPRVQQVPQQVQPVQHVYPAQVQYVEGGDAVYTNGAIRTAYTYNPEPQMYAPSSTASYFEAPGGAQVTVAASSPPAVPSHSMVGITMDVGGSPIVSSAGAYLIHGGMDSTRHSLAHTSRSSPATLEMAIENLQKSEGITSHKSGLLNSHLQWLLDNYETAEGVSLPRSSLYNHYLRHCQEHKLDPVNAASFGKLIRSVFMGLRTRRLGTRGNSKYHYYGIRLKPDSPLNRLQEDTQYMAMRQQPMHQKPRYRPAQKTDSLGDSGSHSGLHSTPEQTMAVQSQHHQQYIDVSHVFPEFPAPDLGSFLLQDGVTLHDVKALQLVYRRHCEATVDVVMNLQFHYIEKLWLSFWNSKASSSDGPTSLPASDEDPEGAVLPKDKLISLCQCDPILRWMRSCDHILYQALVEILIPDVLRPVPSTLTQAIRNFAKSLEGWLTNAMSDFPQQVIQTKVGVVSAFAQTLRRYTSLNHLAQAARAVLQNTSQINQMLSDLNRVDFANVQEQASWVCQCEESVVQRLEQDFKLTLQQQSSLDQWASWLDSVVTQVLKQHAGSPSFPKAARQFLLKWSFYSSMVIRDLTLRSAASFGSFHLIRLLYDEYMFYLVEHRVAEATGETPIAVMGEFNDLASLSLTLLDKDDMGDEQRGSEAGPDARSLGEPLVKRERSDPNHSLQGI

SEQ ID NO: 72464 - protein, 723 aa, Homo sapiens; identical to SEQ ID NO: 72463
  Payload ID: 14345
  Gene Symbol: RFX2
  Gene Name: regulatory factor X, 2 (influences HLA class II expression)
  Uniprot ID: P48378
  ENSP ID: ENSP00000352076

SEQ ID NO: 72465 - protein, 142 aa, Homo sapiens
  Payload ID: 14345
  Gene Symbol: RFX2
  Gene Name: regulatory factor X, 2 (influences HLA class II expression)
  ENSP ID: ENSP00000464826
MQNSEGGADSPASVALRPSAAAPPVPASPQRVLVQAASSNPKGAQMQPISLPRVQQVPQQVQPVQHVYPAQVQYVEGGDAVYTNGAIRTAYTYNPEPQMYAPSSTASYFEAPGGAQVTVAASSPPAVPSHSMVGITMDVGGS

SEQ ID NO: 72466 - protein, 33 aa, Homo sapiens
  Payload ID: 14345
  Gene Symbol: RFX2
  Gene Name: regulatory factor X, 2 (influences HLA class II expression)
  ENSP ID: ENSP00000465122
MGLRTRRLGTRGNSKYHYYGIRLKPDSPLNRLQ

SEQ ID NO: 72467 - protein, 99 aa, Homo sapiens
  Payload ID: 14345
  Gene Symbol: RFX2
  Gene Name: regulatory factor X, 2 (influences HLA class II expression)
  ENSP ID: ENSP00000465135
MQNSEGGADSPASVALRPSAAAPPVPASPQRVLVQAASSNPKGAQMQPISLPRVQQVPQQVQPVQHVYPAQVQYVEGGDAVYTNGAIRTAYTYNPEPQM

SEQ ID NO: 72468 - protein, 180 aa, Homo sapiens
  Payload ID: 14345
  Gene Symbol: RFX2
  Gene Name: regulatory factor X, 2 (influences HLA class II expression)
  ENSP ID: ENSP00000466028
  MOD_RES (1)..(1): Any amino acid
XDVSHVFPEFPAPDLGSFLLQDGVTLHDVKALQLVYRRHCEATVDVVMNLQFHYIEKLWLSFWNSKASSSDGPTSLPASDEDPEGAVLPKDKLISLCQCDPILRWMRSCDHILYQALVEILIPDVLRPVPSGRRQCLRPDAAALHVPQPPGAGGPGGAAEHVPDQPDAQRPQPRGLCQRA

SEQ ID NO: 72469 - protein, 98 aa, Homo sapiens
  Payload ID: 14345
  Gene Symbol: RFX2
  Gene Name: regulatory factor X, 2 (influences HLA class II expression)
  ENSP ID: ENSP00000466177
MGLRTRRLGTRYRPAQKTDSLGDSGSHSGLHSTPEQTMAVQSQHHQQYIDVSHVFPEFPAPDLGSFLLQDGVTLHDVKALQLVYRRHCEATVDVVMNL

SEQ ID NO: 72470 - protein, 93 aa, Homo sapiens
  Payload ID: 14345
  Gene Symbol: RFX2
  Gene Name: regulatory factor X, 2 (influences HLA class II expression)
  ENSP ID: ENSP00000466890
MQPISLPRVQQVPQQVQPVQHVYPAQVQYVEGGDAVYTNGAIRTAYTYNPEPQMYAPSSTASYFEAPGGAQVTVAASSPPAVPSHSMVGITMD

SEQ ID NO: 72471 - protein, 698 aa, Homo sapiens
  Payload ID: 14345
  Gene Symbol: RFX2
  Gene Name: regulatory factor X, 2 (influences HLA class II expression)
  Uniprot ID: P48378
  ENSP ID: ENSP00000467166
MQNSEGGADSPASVALRPSAAAPPVPASPQRVLVQAASSNPKGAQMQPISLPRVQQVPQQVQPVQHVYPAQVQYVEGGDAVYTNGAIRTAYTYNPEPQMYAPSSTASYFEAPGGAQVTVAASSPPAVPSHSMVGITMDVGGSPIVSSAGAYLIHGGMDSTRHSLAHTSRSSPATLQWLLDNYETAEGVSLPRSSLYNHYLRHCQEHKLDPVNAASFGKLIRSVFMGLRTRRLGTRGNSKYHYYGIRLKPDSPLNRLQEDTQYMAMRQQPMHQKPRYRPAQKTDSLGDSGSHSGLHSTPEQTMAVQSQHHQQYIDVSHVFPEFPAPDLGSFLLQDGVTLHDVKALQLVYRRHCEATVDVVMNLQFHYIEKLWLSFWNSKASSSDGPTSLPASDEDPEGAVLPKDKLISLCQCDPILRWMRSCDHILYQALVEILIPDVLRPVPSTLTQAIRNFAKSLEGWLTNAMSDFPQQVIQTKVGVVSAFAQTLRRYTSLNHLAQAARAVLQNTSQINQMLSDLNRVDFANVQEQASWVCQCEESVVQRLEQDFKLTLQQQSSLDQWASWLDSVVTQVLKQHAGSPSFPKAARQFLLKWSFYSSMVIRDLTLRSAASFGSFHLIRLLYDEYMFYLVEHRVAEATGETPIAVMGEFNDLASLSLTLLDKDDMGDEQRGSEAGPDARSLGEPLVKRERSDPNHSLQGI

SEQ ID NO: 72472 - protein, 147 aa, Homo sapiens
  Payload ID: 14345
  Gene Symbol: RFX2
  Gene Name: regulatory factor X, 2 (influences HLA class II expression)
  ENSP ID: ENSP00000467736
MAIENLQKSEGITSHKSGLLNSHLQWLLDNYETAEGVSLPRSSLYNHYLRHCQEHKLDPVNAASFGKLIRSVFMGLRTRRLGTRGNSKYHYYGIRLKPDSPLNRLQEDTQYMAMRQQPMHQKPRYRPAQKTDSLGDSGSHSGLHSTP

SEQ ID NO: 72473 - protein, 169 aa, Homo sapiens
  Payload ID: 14345
  Gene Symbol: RFX2
  Gene Name: regulatory factor X, 2 (influences HLA class II expression)
  ENSP ID: ENSP00000467979
MQNSEGGADSPASVALRPSAAAPPVPASPQVQPVQHVYPAQVQYVEGGDAVYTNGAIRTAYTYNPEPQMYAPSSTASYFEAPGGAQVTVAASSPPAVPSHSMVGITMDVGGSPIVSSAGAYLIHGGMDSTRHSLAHTSRSSPATLEMAIENLQKSEGITSHKSGLLNSH

SEQ ID NO: 72474 - protein, 110 aa, Homo sapiens
  Payload ID: 14345
  Gene Symbol: RFX2
  Gene Name: regulatory factor X, 2 (influences HLA class II expression)
  ENSP ID: ENSP00000468036
MQPISLPRVQQVPQQVQPVQHVYPAQVQYVEGGDAVYTNGAIRTAYTYNPEPQMYAPSSTASYFEAPGGAQVTVAASSPPAVPSHSMVGITMDVGGSPIVSSAGAYLIHG

SEQ ID NO: 72475 - protein, 105 aa, Homo sapiens
  Payload ID: 14345
  Gene Symbol: RFX2
  Gene Name: regulatory factor X, 2 (influences HLA class II expression)
  ENSP ID: ENSP00000468561
MQNSEGGADSPASVALRPSAAAPPVPASPQRVLVQAASSNPKGAQMQPISLPRVQQVPQQVQPVQHVYPAQVQYVEGGDAVYTNGAIRTAYTYNPEPQMYAPSST

SEQ ID NO: 72476 - protein, 413 aa, Homo sapiens
  Payload ID: 14346
  Gene Symbol: RFX3
  Gene Name: regulatory factor X, 3 (influences HLA class II expression)
  Uniprot ID: P48380
  ENSP ID: ENSP00000303847
MQTSETGSDTGSTVTLQTSVASQAAVPTQVVQQVPVQQQVQQVQTVQQVQHVYPAQVQYVEGSDTVYTNGAIRTTTYPYTETQMYSQNTGGNYFDTQGSSAQVTTVVSSHSMVGTGGIQMGVTGGQLISSSGGTYLIGNSMENSGHSVTHTTRASPATIEMAIETLQKSDGLSTHRSSLLNSHLQWLLDNYETAEGVSLPRSTLYNHYLRHCQEHKLDPVNAASFGKLIRSIFMGLRTRRLGTRGNSKYHYYGIRVKPDSPLNRLQEDMQYMAMRQQPMQQKQRYKPMQKVDGVADGFTGSGQQTGTSVEQTVIAQSQHHQQFLDASRALPEFGEVEISSLPDGTTFEDIKSLQSLYREHCEAILDVVVNLQFSLIEKLWQTFWRYSPSTPTDGTTITESRSESTSFPIHFHG

SEQ ID NO: 72477 - protein, 707 aa, Homo sapiens
  Payload ID: 14346
  Gene Symbol: RFX3
  Gene Name: regulatory factor X, 3 (influences HLA class II expression)
  Uniprot ID: P48380
  ENSP ID: ENSP00000351574
MQTSETGSDTGSTVTLQTSVASQAAVPTQVVQQVPVQQQVQQVQTVQQVQHVYPAQVQYVEGSDTVYTNGAIRTTTYPYTETQMYSQNTGGNYFDTQGSSAQVTTVVSSHSMVGTGGIQMGVTGGQLISSSGGTYLIGNSMENSGHSVTHTTRASPATIEMAIETLQKSDGLSTHRSSLLNSHLQWLLDNYETAEGVSLPRSTLYNHYLRHCQEHKLDPVNAASFGKLIRSIFMGLRTRRLGTRGNSKYHYYGIRVKPDSPLNRLQEDMQYMAMRQQPMQQKQRYKPMQKVDGVADGFTGSGQQTGTSVEQTVIAQSQHHQQFLDASRALPEFGEVEISSLPDGTTFEDIKSLQSLYREHCEAILDVVVNLQFSLIEKLWQTFWRYSPSTPTDGTTITESSNLSEIESRLPKAKLITLCKHESILKWMCNCDHGMYQALVEILIPDVLRPIPSALTQAIRNFAKSLEGWLSNAMNNIPQRMIQTKVAAVSAFAQTLRRYTSLNHLAQAARAVLQNTSQINQMLSDLNRVDFANVQEQASWVCQCDDNMVQRLETDFKMTLQQQSTLEQWAAWLDNVMMQALKPYEGRPSFPKAARQFLLKWSFYSSMVIRDLTLRSAASFGSFHLIRLLYDEYMFYLVEHRVAQATGETPIAVMGEVREAERAVTHWVIKNKPELHFSLNTLLIKTMVPNQVSLRARRDCGVIARVP

SEQ ID NO: 72478 - protein, 85 aa, Homo sapiens
  Payload ID: 14346
  Gene Symbol: RFX3
  Gene Name: regulatory factor X, 3 (influences HLA class II expression)
  ENSP ID: ENSP00000371414
MQTSETGSDTGSTVTLQTSVASQAAVPTQVVQQVPVQQQVQQVQTVQQVQHVYPAQVQYVEGSDTVYTNGAMSRAPWSMILESSP

SEQ ID NO: 72479 - protein, 749 aa, Homo sapiens
  Payload ID: 14346
  Gene Symbol: RFX3
  Gene Name: regulatory factor X, 3 (influences HLA class II expression)
  Uniprot ID: P48380
  ENSP ID: ENSP00000371434
MQTSETGSDTGSTVTLQTSVASQAAVPTQVVQQVPVQQQVQQVQTVQQVQHVYPAQVQYVEGSDTVYTNGAIRTTTYPYTETQMYSQNTGGNYFDTQGSSAQVTTVVSSHSMVGTGGIQMGVTGGQLISSSGGTYLIGNSMENSGHSVTHTTRASPATIEMAIETLQKSDGLSTHRSSLLNSHLQWLLDNYETAEGVSLPRSTLYNHYLRHCQEHKLDPVNAASFGKLIRSIFMGLRTRRLGTRGNSKYHYYGIRVKPDSPLNRLQEDMQYMAMRQQPMQQKQRYKPMQKVDGVADGFTGSGQQTGTSVEQTVIAQSQHHQQFLDASRALPEFGEVEISSLPDGTTFEDIKSLQSLYREHCEAILDVVVNLQFSLIEKLWQTFWRYSPSTPTDGTTITESSNLSEIESRLPKAKLITLCKHESILKWMCNCDHGMYQALVEILIPDVLRPIPSALTQAIRNFAKSLEGWLSNAMNNIPQRMIQTKVAAVSAFAQTLRRYTSLNHLAQAARAVLQNTSQINQMLSDLNRVDFANVQEQASWVCQCDDNMVQRLETDFKMTLQQQSTLEQWAAWLDNVMMQALKPYEGRPSFPKAARQFLLKWSFYSSMVIRDLTLRSAASFGSFHLIRLLYDEYMFYLVEHRVAQATGETPIAVMGEFGDLNAVSPGNLDKDEGSEVESEMDEELDDSSEPQAKREKTELSQAFPVGCMQPVLETGVQPSLLNPIHSEHIVTSTQTIRQCSATGNTYTAV

SEQ ID NO: 72480 - protein, 138 aa, Homo sapiens
  Payload ID: 14346
  Gene Symbol: RFX3
  Gene Name: regulatory factor X, 3 (influences HLA class II expression)
  ENSP ID: ENSP00000399352
MQTSETGSDTGSTVTLQTSVASQAAVPTQVVQQVPVQQQVQQVQTVQQVQHVYPAQVQYVEGSDTVYTNGAIRTTTYPYTETQMYSQNTGGNYFDTQGSSAQVTTVVSSHSMVGTGGIQMGVTGGQLISSSGGTYLIG

SEQ ID NO: 72481 - protein, 174 aa, Homo sapiens
  Payload ID: 14346
  Gene Symbol: RFX3
  Gene Name: regulatory factor X, 3 (influences HLA class II expression)
  ENSP ID: ENSP00000400026
MCNCDHGMYQALVEILIPDVLRPIPSALTQAIRNFAKSLEGWLSNAMNNIPQRMIQTKVAAVSAFAQTLRRYTSLNHLAQAARAVLQNTSQINQMLSDLNRVDFANVQEQASWVCQCDDNMVQRLETDFKMTLQQQSTLEQWAAWLDNVMMQALKPYEGRPSFPKAARQFLLKW

SEQ ID NO: 72482 - protein, 216 aa, Homo sapiens
  Payload ID: 14346
  Gene Symbol: RFX3
  Gene Name: regulatory factor X, 3 (influences HLA class II expression)
  ENSP ID: ENSP00000405664
MQTSETGSDTGSTVTLQTSVASQAAVPTQVVQQVPVQQQVQQVQTVQQVQHVYPAQVQYVEGSDTVYTNGAIRTTTYPYTETQMYSQNTGGNYFDTQGSSAQVTTVVSSHSMVGTGGIQMGVTGGQLISSSGGTYLIGNSMENSGHSVTHTTRASPATLQWLLDNYETAEGVSLPRSTLYNHYLRHCQEHKLDPVNAASFGKLIRSIFMGLRTRRL

SEQ ID NO: 72483 - protein, 135 aa, Homo sapiens
  Payload ID: 14346
  Gene Symbol: RFX3
  Gene Name: regulatory factor X, 3 (influences HLA class II expression)
  ENSP ID: ENSP00000410988
VQQVQTVQQVQHVYPAQVQYVEGSDTVYTNGAIRTTTYPYTETQMYSQNTGGNYFDTQGSSAQVTTVVSSHSMVGTGGIQMGVTGGQLISSSGGTYLIGNSMENSGHSVTHTTRASPATLFLFSCVPFSLGQLSP

SEQ ID NO: 72484 - protein, 184 aa, Homo sapiens
  Payload ID: 14346
  Gene Symbol: RFX3
  Gene Name: regulatory factor X, 3 (influences HLA class II expression)
  ENSP ID: ENSP00000411756
MQTSETGSDTGSTVTLQTSVASQAAVPTQVVQQVPVQQQVQQVQTVQQVQHVYPAQVQYVEGSDTVYTNGAIRTTTYPYTETQMYSQNTGGNYFDTQGSSAQVTTVVSSHSMVGTGGIQMGVTGGQLISSSGGTYLIGNSMENSGHSVTHTTRASPATIEMAIETLQKSDGLSTHRSSLLNSHV

SEQ ID NO: 72485 - protein, 124 aa, Homo sapiens
  Payload ID: 14346
  Gene Symbol: RFX3
  Gene Name: regulatory factor X, 3 (influences HLA class II expression)
  ENSP ID: ENSP00000415594
EQASWVCQCDDNMVQRLETDFKMTLQQQSTLEQWAAWLDNVMMQALKPYEGRPSFPKAARQFLLKWSFYSSMVIRDLTLRSAASFGSFHLIRLLYDEYMFYLVEHRVAQATGETPIAVMGEVPM

SEQ ID NO: 72486 - protein, 156 aa, Homo sapiens
  Payload ID: 14346
  Gene Symbol: RFX3
  Gene Name: regulatory factor X, 3 (influences HLA class II expression)
  ENSP ID: ENSP00000416189
VQQVQTVQQVQHVYPAQVQYVEGSDTVYTNGAIRTTTYPYTETQMYSQNTGGNYFDTQGSSAQVTTVVSSHSMVGTGGIQMGVTGGQLISSSGGTYLIGNSMENSGHSVTHTTRASPATANSVPEMKLLRQITMNRLFPTLNHKLTEGSGPHFQSI

SEQ ID NO: 72487 - protein, 749 aa, Homo sapiens; identical to SEQ ID NO: 72479
  Payload ID: 14346
  Gene Symbol: RFX3
  Gene Name: regulatory factor X, 3 (influences HLA class II expression)
  Uniprot ID: P48380
  ENSP ID: ENSP00000482598

SEQ ID NO: 72488 - protein, 641 aa, Homo sapiens
  Payload ID: 14347
  Gene Symbol: RFX4
  Gene Name: regulatory factor X, 4 (influences HLA class II expression)
  Uniprot ID: Q33E94
  ENSP ID: ENSP00000229387
MNWAAFGGSEFFIPEGIQIDSRCPLSRNITEWYHYYGIAVKESSQYYDVMYSKKGAAWVSETGKKEVSKQTVAYSPRSKLGTLLPEFPNVKDLNLPASLPEEKVSTFIMMYRTHCQRILDTVIRANFDEVQSFLLHFWQGMPPHMLPVLGSSTVVNIVGVCDSILYKAISGVLMPTVLQALPDSLTQVIRKFAKQLDEWLKVALHDLPENLRNIKFELSRRFSQILRRQTSLNHLCQASRTVIHSADITFQMLEDWRNVDLNSITKQTLYTMEDSRDEHRKLITQLYQEFDHLLEEQSPIESYIEWLDTMVDRCVVKVAAKRQGSLKKVAQQFLLMWSCFGTRVIRDMTLHSAPSFGSFHLIHLMFDDYVLYLLESLHCQERANELMRAMKGEGSTAEVREEIILTEAAAPTPSPVPSFSPAKSATSVEVPPPSSPVSNPSPEYTGLSTTGAMQSYTWSLTYTVTTAAGSPAENSQQLPCMRNTHVPSSSVTHRIPVYPHREEHGYTGSYNYGSYGNQHPHPMQSQYPALPHDTAISGPLHYAPYHRSSAQYPFNSPTSRMEPCLMSSTPRLHPTPVTPRWPEVPSANTCYTSPSVHSARYGNSSDMYTPLTTRRNSEYEHMQHFPGFAYINGEASTGWAK

SEQ ID NO: 72489 - protein, 744 aa, Homo sapiens
  Payload ID: 14347
  Gene Symbol: RFX4
  Gene Name: regulatory factor X, 4 (influences HLA class II expression)
  Uniprot ID: Q33E94
  ENSP ID: ENSP00000350552
MIKRRAHPGAGGDRTRPRRRRSTESWIERCLNESENKRYSSHTSLGNVSNDENEEKENNRASKPHSTPATLQWLEENYEIAEGVCIPRSALYMHYLDFCEKNDTQPVNAASFGKIIRQQFPQLTTRRLGTRGQSKYHYYGIAVKESSQYYDVMYSKKGAAWVSETGKKEVSKQTVAYSPRSKLGTLLPEFPNVKDLNLPASLPEEKVSTFIMMYRTHCQRILDTVIRANFDEVQSFLLHFWQGMPPHMLPVLGSSTVVNIVGVCDSILYKAISGVLMPTVLQALPDSLTQVIRKFAKQLDEWLKVALHDLPENLRNIKFELSRRFSQILRRQTSLNHLCQASRTVIHSADITFQMLEDWRNVDLNSITKQTLYTMEDSRDEHRKLITQLYQEFDHLLEEQSPIESYIEWLDTMVDRCVVKVAAKRQGSLKKVAQQFLLMWSCFGTRVIRDMTLHSAPSFGSFHLIHLMFDDYVLYLLESLHCQERANELMRAMKGEGSTAEVREEIILTEAAAPTPSPVPSFSPAKSATSVEVPPPSSPVSNPSPEYTGLSTTGAMQSYTWSLTYTVTTAAGSPAENSQQLPCMRNTHVPSSSVTHRIPVYPHREEHGYTGSYNYGSYGNQHPHPMQSQYPALPHDTAISGPLHYAPYHRSSAQYPFNSPTSRMEPCLMSSTPRLHPTPVTPRWPEVPSANTCYTSPSVHSARYGNSSDMYTPLTTRRNSEYEHMQHFPGFAYINGEASTGWAK

SEQ ID NO: 72490 - protein, 735 aa, Homo sapiens
  Payload ID: 14347
  Gene Symbol: RFX4
  Gene Name: regulatory factor X, 4 (influences HLA class II expression)
  Uniprot ID: Q33E94
  ENSP ID: ENSP00000376585
MHCGLLEEPDMDSTESWIERCLNESENKRYSSHTSLGNVSNDENEEKENNRASKPHSTPATLQWLEENYEIAEGVCIPRSALYMHYLDFCEKNDTQPVNAASFGKIIRQQFPQLTTRRLGTRGQSKYHYYGIAVKESSQYYDVMYSKKGAAWVSETGKKEVSKQTVAYSPRSKLGTLLPEFPNVKDLNLPASLPEEKVSTFIMMYRTHCQRILDTVIRANFDEVQSFLLHFWQGMPPHMLPVLGSSTVVNIVGVCDSILYKAISGVLMPTVLQALPDSLTQVIRKFAKQLDEWLKVALHDLPENLRNIKFELSRRFSQILRRQTSLNHLCQASRTVIHSADITFQMLEDWRNVDLNSITKQTLYTMEDSRDEHRKLITQLYQEFDHLLEEQSPIESYIEWLDTMVDRCVVKVAAKRQGSLKKVAQQFLLMWSCFGTRVIRDMTLHSAPSFGSFHLIHLMFDDYVLYLLESLHCQERANELMRAMKGEGSTAEVREEIILTEAAAPTPSPVPSFSPAKSATSVEVPPPSSPVSNPSPEYTGLSTTGAMQSYTWSLTYTVTTAAGSPAENSQQLPCMRNTHVPSSSVTHRIPVYPHREEHGYTGSYNYGSYGNQHPHPMQSQYPALPHDTAISGPLHYAPYHRSSAQYPFNSPTSRMEPCLMSSTPRLHPTPVTPRWPEVPSANTCYTSPSVHSARYGNSSDMYTPLTTRRNSEYEHMQHFPGFAYINGEASTGWAK

SEQ ID NO: 72491 - protein, 247 aa, Homo sapiens
  Payload ID: 14347
  Gene Symbol: RFX4
  Gene Name: regulatory factor X, 4 (influences HLA class II expression)
  ENSP ID: ENSP00000444163
MIKRRAHPGAGGDRTRPRRRRSTESWIERCLNESENKRYSSHTSLGNVSNDENEEKENNRASKPHSTPATLQWLEENYEIAEGVCIPRSALYMHYLDFCEKNDTQPVNAASFGKIIRQQFPQLTTRRLGTRGQSKYHYYGIAVKESSQYYDVMYSKKGAAWVSETGKKEVSKQTVAYSPRSKLGTLLPEFPNVKDLNLPASLPEEKVSTFIMMYRTHCQRILDTVIRANFDEECRPTCCLCWAPPRW

SEQ ID NO: 72492 - protein, 77 aa, Homo sapiens
  Payload ID: 14347
  Gene Symbol: RFX4
  Gene Name: regulatory factor X, 4 (influences HLA class II expression)
  ENSP ID: ENSP00000447423
MHCGLLEEPDMDSTDEEKENNRASKPHSTPATLQWLEENYEIAEGVCIPRSALYMHYLDFCEKNDTQPVNAASFGKQ

SEQ ID NO: 72493 - protein, 59 aa, Homo sapiens
  Payload ID: 14347
  Gene Symbol: RFX4
  Gene Name: regulatory factor X, 4 (influences HLA class II expression)
  ENSP ID: ENSP00000447735
MHYLDFCEKNDTQPVNAASFGKIIRQQFPQLTTRRLGTRGQSKYHYYGIAVKESSQYYD

SEQ ID NO: 72494 - protein, 256 aa, Homo sapiens
  Payload ID: 14347
  Gene Symbol: RFX4
  Gene Name: regulatory factor X, 4 (influences HLA class II expression)
  ENSP ID: ENSP00000448694
MTSATDGERLEENYEIAEGVCIPRSALYMHYLDFCEKNDTQPVNAASFGKIIRQQFPQLTTRRLGTRGQSKYHYYGIAVKESSQYYDVMYSKKGAAWVSETGKKEVSKQTVAYSPRSKLGTLLPEFPNVKDLNLPASLPEEKVSTFIMMYRTHCQRILDTVIRANFDEVQSFLLHFWQGMPPHMLPVLGSSTVVNIVGVCDSILYKAISGVLMPTVLQALPDSLTQVIRKFAKQLDEWLKVALHDLPENLRNIKFE

SEQ ID NO: 72495 - protein, 39 aa, Homo sapiens
  Payload ID: 14347
  Gene Symbol: RFX4
  Gene Name: regulatory factor X, 4 (influences HLA class II expression)
  ENSP ID: ENSP00000449732
MNWAAFGGSEFFIPEGIQIDSRCPLSRNITECERKLPIL

SEQ ID NO: 72496 - protein, 145 aa, Homo sapiens
  Payload ID: 14347
  Gene Symbol: RFX4
  Gene Name: regulatory factor X, 4 (influences HLA class II expression)
  ENSP ID: ENSP00000473326
MPPHMLPVLGSSTVVNIVGVCDSILYKAISGVLMPTVLQALPDSLTQVIRKFAKQLDEWLKVALHDLPENLRNIKFELSRRFSQILRRQTSLNHLCQASRTVIHSADITFQMLEDWRNVDLNSITKQTLYTMEDSRDEHRKLITQ

SEQ ID NO: 72497 - protein, 616 aa, Homo sapiens
  Payload ID: 14348
  Gene Symbol: RFX5
  Gene Name: regulatory factor X, 5 (influences HLA class II expression)
  Uniprot ID: P48382
  ENSP ID: ENSP00000290524
MAEDEPDAKSPKTGGRAPPGGAEAGEPTTLLQRLRGTISKAVQNKVEGILQDVQKFSDNDKLYLYLQLPSGPTTGDKSSEPSTLSNEEYMYAYRWIRNHLEEHTDTCLPKQSVYDAYRKYCESLACCRPLSTANFGKIIREIFPDIKARRLGGRGQSKYCYSGIRRKTLVSMPPLPGLDLKGSESPEMGPEVTPAPRDELVEAACALTCDWAERILKRSFSSIVEVARFLLQQHLISARSAHAHVLKAMGLAEEDEHAPRERSSKPKNGLENPEGGAHKKPERLAQPPKDLEARTGAGPLARGERKKSVVESSAPGANNLQVNALVARLPLLLPRAPRSLIPPIPVSPPILAPRLSSGALKVATLPLSSRAGAPPAAVPIINMILPTVPALPGPGPGPGRAPPGGLTQPRGTENREVGIGGDQGPHDKGVKRTAEVPVSEASGQAPPAKAAKQDIEDTASDAKRKRGRPRKKSGGSGERNSTPLKSAAAMESAQSSRLPWETWGSGGEGNSAGGAERPGPMGEAEKGAVLAQGQGDGTVSKGGRGPGSQHTKEAEDKIPLVPSKVSVIKGSRSQKEAFPLAKGEVDTAPQGNKDLKEHVLQSSLSQEHKDPKATPP

SEQ ID NO: 72498 - protein, 616 aa, Homo sapiens; identical to SEQ ID NO: 72497
  Payload ID: 14348
  Gene Symbol: RFX5
  Gene Name: regulatory factor X, 5 (influences HLA class II expression)
  Uniprot ID: P48382
  ENSP ID: ENSP00000357864

SEQ ID NO: 72499 - protein, 596 aa, Homo sapiens
  Payload ID: 14348
  Gene Symbol: RFX5
  Gene Name: regulatory factor X, 5 (influences HLA class II expression)
  ENSP ID: ENSP00000376502
MAEDEPDAKSPKTGGRAPPGGAEAGEPTTLLQRLRGTISKAVQNKVEGILQDVQKFSDNDKLYLYLQLPSGPTTGDKSSEPSTLSNEEYMYAYRWIRNHLEEHTDTCLPKQSVYDAYRKYCESLACCRPLSTANFGKIIREIFPDIKARRLGGRGQSKYCYSGIRRKTLVSMPPLPGLDLKGSESPEMGPEVTPAPRDELVEAACALTCDWAERILKRSFSSIVEVARFLLQQHLISARSAHAHVLKAMGLAEEDEHAPRERSSKPKNGLENPEGGAHKKPERLAQPPKDLEARTGAGPLARGERKKSVVESSAPGANNLQVNALVARLPLLLPRAPRSLIPPIPVSPPILAPRLSSGALKVATLPLSSRAGAPPAAVPIINMILPTVPALPGPGPGPGRAPPGGLTQPRGTENREVGIGGDQGPHDKGVKRTAEVPVSEASGQAPPAKAAKQDIEDTASDAKRKRGRPRKKSGGSGERNSTPLKSAAAMESAQSSRLPWETWGSGGEGNSAGGAERPGPMGEAEKGAVLAQGQGDGTVSKGGRGPGSQHTKEAEDKIPLVPSKVSVIKGSRSQKEAFPLAKGEVDTAPQGNKDLK

SEQ ID NO: 72500 - protein, 123 aa, Homo sapiens
  Payload ID: 14348
  Gene Symbol: RFX5
  Gene Name: regulatory factor X, 5 (influences HLA class II expression)
  ENSP ID: ENSP00000387618
MAEDEPDAKSPKTGGRAPPGGAEAGEPTTLLQRLRGTISKAVQNKVEGILQDVQKFSDNDKLYLYLQLPSGPTTGDKSSEPSTLSNEEYMYAYRWIRNHLEEHTDTCLPKQSVYDAYRKYCES

SEQ ID NO: 72501 - protein, 616 aa, Homo sapiens; identical to SEQ ID NO: 72497
  Payload ID: 14348
  Gene Symbol: RFX5
  Gene Name: regulatory factor X, 5 (influences HLA class II expression)
  Uniprot ID: P48382
  ENSP ID: ENSP00000389130

SEQ ID NO: 72502 - protein, 96 aa, Homo sapiens
  Payload ID: 14348
  Gene Symbol: RFX5
  Gene Name: regulatory factor X, 5 (influences HLA class II expression)
  ENSP ID: ENSP00000390720
MAEDEPDAKSPKTGGRAPPGGAEAGEPTTLLQRLRGTISKAVQNKVEGILQDVQKFSDNDKLYLYLQLPSGPTTGDKSSEPSTLSNEEYMYAYRWI

SEQ ID NO: 72503 - protein, 235 aa, Homo sapiens
  Payload ID: 14348
  Gene Symbol: RFX5
  Gene Name: regulatory factor X, 5 (influences HLA class II expression)
  ENSP ID: ENSP00000390769
PKQSVYDAYRKYCESLACCRPLSTANFGKIIREIFPDIKARRLGGRGQSKYCYSGIRRKTLVSMPPLPGLDLKGSESPEMGPEVTPAPRDELVEAACALTCDWAERILKRSFSSIVEVARFLLQQHLISARSAHAHVLKAMGLAEEDEHAPRERSSKPKNGLENPEGGAHKKPERLAQPPKDLEARTGAGPLARGERKKSVVESSAPGANNLQEVHSPLYRQLSHPVYLVPGCCL

SEQ ID NO: 72504 - protein, 117 aa, Homo sapiens
  Payload ID: 14348
  Gene Symbol: RFX5
  Gene Name: regulatory factor X, 5 (influences HLA class II expression)
  ENSP ID: ENSP00000396810
MAEDEPDAKSPKTGGRAPPGGAEAGEPTTLLQRLRGTISKAVQNKVEGILQDVQKFSDNDKLYLYLQLPSGPTTGDKSSEPSTLSNEEYMYAYRWIRNHLEEHTDTCLPKQSVYDAY

SEQ ID NO: 72505 - protein, 184 aa, Homo sapiens
  Payload ID: 14348
  Gene Symbol: RFX5
  Gene Name: regulatory factor X, 5 (influences HLA class II expression)
  ENSP ID: ENSP00000398666
MAEDEPDAKSPKTGGRAPPGGAEAGEPTTLLQRLRGTISKAVQNKVEGILQDVQKFSDNDKLYLYLQLPSGPTTGDKSSEPSTLSNEEYMYAYRWIRNHLEEHTDTCLPKQSVYDAYRKYCESLACCRPLSTANFGKIIREIFPDIKARRLGGRGQSKYCYSGIRRKTLVSMPPLPGLDLKGSE

SEQ ID NO: 72506 - protein, 229 aa, Homo sapiens
  Payload ID: 14348
  Gene Symbol: RFX5
  Gene Name: regulatory factor X, 5 (influences HLA class II expression)
  ENSP ID: ENSP00000399095
MAEDEPDAKSPKTGGRAPPGGAEAGEPTTLLQRLRGTISKAVQNKVEGILQDVQKFSDNDKLYLYLQLPSGPTTGDKSSEPSTLSNEEYMYAYRWIRNHLEEHTDTCLPKQSVYDAYRKYCESLACCRPLSTANFGKIIREIFPDIKARRLGGRGQSKYCYSGIRRKTLVSMPPLPGLDLKGSESPEMGPEVTPAPRDELVEAACALTCDWAERILKRSFSSIVEVARF

SEQ ID NO: 72507 - protein, 44 aa, Homo sapiens
  Payload ID: 14348
  Gene Symbol: RFX5
  Gene Name: regulatory factor X, 5 (influences HLA class II expression)
  ENSP ID: ENSP00000399372
MAEDEPDAKSPKTGGRAPPGGAEAGEPTTLLQRLRGTISPCRTK

SEQ ID NO: 72508 - protein, 50 aa, Homo sapiens
  Payload ID: 14348
  Gene Symbol: RFX5
  Gene Name: regulatory factor X, 5 (influences HLA class II expression)
  ENSP ID: ENSP00000405067
MAEDEPDAKSPKTGGRAPPGGAEAGEPTTLLQRLRGTISKAVQNKVEGIL

SEQ ID NO: 72509 - protein, 165 aa, Homo sapiens
  Payload ID: 14348
  Gene Symbol: RFX5
  Gene Name: regulatory factor X, 5 (influences HLA class II expression)
  ENSP ID: ENSP00000409187
MAEDEPDAKSPKTGGRAPPGGAEAGEPTTLLQRLRGTISKAVQNKVEGILQDVQKFSDNDKLYLYLQLPSGPTTGDKSSEPSTLSNEEYMYAYRWIRNHLEEHTDTCLPKQSVYDAYRKYCESLACCRPLSTANFGKIIREIFPDIKARRLGGRGQSKYCYSGIR

SEQ ID NO: 72510 - protein, 50 aa, Homo sapiens; identical to SEQ ID NO: 72508
  Payload ID: 14348
  Gene Symbol: RFX5
  Gene Name: regulatory factor X, 5 (influences HLA class II expression)
  ENSP ID: ENSP00000412900

SEQ ID NO: 72511 - protein, 105 aa, Homo sapiens
  Payload ID: 14348
  Gene Symbol: RFX5
  Gene Name: regulatory factor X, 5 (influences HLA class II expression)
  ENSP ID: ENSP00000413153
MAEDEPDAKSPKTGGRAPPGGAEAGEPTTLLQRLRGTISKAVQNKVEGILQDVQKFSDNDKLYLYLQLPSGPTTGDKSSEPSTLSNEEYMYAYRWIRNHLEEHTD

SEQ ID NO: 72512 - protein, 42 aa, Homo sapiens
  Payload ID: 14348
  Gene Symbol: RFX5
  Gene Name: regulatory factor X, 5 (influences HLA class II expression)
  ENSP ID: ENSP00000415012
MAEDEPDAKSPKTGGRAPPGGAEAGEPTTLLQRLRARPCRTK

SEQ ID NO: 72513 - protein, 928 aa, Homo sapiens
  Payload ID: 14349
  Gene Symbol: RFX6
  Gene Name: regulatory factor X, 6
  Uniprot ID: Q8HWS3
  ENSP ID: ENSP00000332208
MAKVPELEDTFLQAQPAPQLSPGIQEDCCVQLLGKGLLVYPEETVYLAAEGQPGGEQGGGEKGEDPELPGAVKSEMHLNNGNFSSEEEDADNHDSKTKAADQYLSQKKTITQIVKDKKKQTQLTLQWLEENYIVCEGVCLPRCILYAHYLDFCRKEKLEPACAATFGKTIRQKFPLLTTRRLGTRGHSKYHYYGIGIKESSAYYHSVYSGKGLTRFSGSKLKNEGGFTRKYSLSSKTGTLLPEFPSAQHLVYQGCISKDKVDTLIMMYKTHCQCILDNAINGNFEEIQHFLLHFWQGMPDHLLPLLENPVIIDIFCVCDSILYKVLTDVLIPATMQEMPESLLADIRNFAKNWEQWVVSSLENLPEALTDKKIPIVRRFVSSLKRQTSFLHLAQIARPALFDQHVVNSMVSDIERVDLNSIGSQALLTISGSTDTESGIYTEHDSITVFQELKDLLKKNATVEAFIEWLDTVVEQRVIKTSKQNGRSLKKRAQDFLLKWSFFGARVMHNLTLNNASSFGSFHLIRMLLDEYILLAMETQFNNDKEQELQNLLDKYMKNSDASKAAFTASPSSCFLANRNKGSMVSSDAVKNESHVETTYLPLPSSQPGGLGPALHQFPAGNTDNMPLTGQMELSQIAGHLMTPPISPAMASRGSVINQGPMAGRPPSVGPVLSAPSHCSTYPEPIYPTLPQANHDFYSTSSNYQTVFRAQPHSTSGLYPHHTEHGRCMAWTEQQLSRDFFSGSCAGSPYNSRPPSSYGPSLQAQDSHNMQFLNTGSFNFLSNTGAASCQGATLPPNSPNGYYGSNINYPESHRLGSMVNQHVSVISSIRSLPPYSDIHDPLNILDDSGRKQTSSFYTDTSSPVACRTPVLASSLQTPIPSSSSQCMYGTSNQYPAQETLDSHGTSSREMVSSLPPINTVFMGTAAGGT

SEQ ID NO: 72514 - protein, 1363 aa, Homo sapiens
  Payload ID: 14350
  Gene Symbol: RFX7
  Gene Name: regulatory factor X, 7
  Uniprot ID: Q2KHR2
  ENSP ID: ENSP00000453281
MSSSRAQQMHAFSWIRNTLEEHPETSLPKQEVYDEYKSYCDNLGYHPLSAADFGKIMKNVFPNMKARRLGTRGKSKYCYSGLRKKAFVHMPTLPNLDFHKTGDGLEGAEPSGQLQNIDEEVISSACRLVCEWAQKVLSQPFDTVLELARFLVKSHYIGTKSMAALTVMAAAPAGMKGITQPSAFIPTAESNSFQPQVKTLPSPIDAKQQLQRKIQKKQQEQKLQSPLPGESAAKKSESATSNGVTNLPNGNPSILSPQPIGIVVAAVPSPIPVQRTRQLVTSPSPMSSSDGKVLPLNVQVVTQHMQSVKQAPKTPQNVPASPGGDRSARHRYPQILPKPANTSALTIRSPTTVLFTSSPIKTAVVPASHMSSLNVVKMTTISLTPSNSNTPLKHSASVSSATGTTEESRSVPQIKNGSVVSLQSPGSRSSSAGGTSAVEVKVEPETSSDEHPVQCQENSDEAKAPQTPSALLGQKSNTDGALQKPSNEGVIEIKATKVCDQRTKCKSRCNEMLPGTSTGNNQSTITLSVASQNLTFTSSSSPPNGDSINKDPKLCTKSPRKRLSSTLQETQVPPVKKPIVEQLSAATIEGQKQGSVKKDQKVPHSGKTEGSTAGAQIPSKVSVNVSSHIGANQPLNSSALVISDSALEQQTTPSSSPDIKVKLEGSVFLLDSDSKSVGSFNPNGWQQITKDSEFISASCEQQQDISVMTIPEHSDINDLEKSVWELEGMPQDTYSQQLHSQIQESSLNQIQAHSSDQLPLQSELKEFEPSVSQTNESYFPFDDELTQDSIVEELVLMEQQMSMNNSHSYGNCLGMTLQSQSVTPGAPMSSHTSSTHFYHPIHSNGTPIHTPTPTPTPTPTPTPTPTPTSEMIAGSQSLSRESPCSRLAQTTPVDSALGSSRHTPIGTPHSNCSSSVPPSPVECRNPFAFTPISSSMAYHDASIVSSSPVKPMQRPMATHPDKTKLEWMNNGYSGVGNSSVSGHGILPSYQELVEDRFRKPHAFAVPGQSYQSQSRHHDTHFGRLTPVSPVQHQGATVNNTNKQEGFAVPAPLDNKGTNSSASSNFRCRSVSPAVHRQRNLSGSTLYPVSNIPRSNVTPFGSPVTPEVHVFTNVHTDACANNIAQRSQSVPLTVMMQTAFPNALQKQANSKKITNVLLSKLDSDNDDAVRGLGMNNLPSNYTARMNLTQILEPSTVFPSANPQNMIDSSTSVYEFQTPSYLTKSNSTGQINFSPGDNQAQSEIGEQQLDFNSTVKDLLSGDSLQTNQQLVGQGASDLTNTASDFSSDIRLSSELSGSINDLNTLDPNLLFDPGRQQGQDDEATLEELKNDPLFQQICSESMNSMTSSGFEWIESKDHPTVEMLG

SEQ ID NO: 72515 - protein, 1276 aa, Homo sapiens
  Payload ID: 14350
  Gene Symbol: RFX7
  Gene Name: regulatory factor X, 7
  ENSP ID: ENSP00000453376
MSSSRAQQMHAFSWIRNTLEEHPETSLPKQEVYDEYKSYCDNLGYHPLSAADFGKIMKNVFPNMKARRLGTRGKSKYCYSGLRKKAFVHMPTLPNLDFHKTGDGLEGAEPSGQLQNIDEEVISSACRLVCEWAQKVLSQPFDTVLELARFLVKSHYIGTKSMAALTVMAAAPAGMKGITQPSAFIPTAESNSFQPQVKTLPSPIDAKQQLQRKIQKKQQEQKLQSPLPGESAAKKSESATSNGVTNLPNGNPSILSPQPIGIVVAAVPSPIPVQRTRQLVTSPSPMSSSDGKVLPLNVQVVTQHMQSVKQAPKTPQNVPASPGGDRSARHRYPQILPKPANTSALTIRSPTTVLFTSSPIKTAVVPASHMSSLNVVKMTTISLTPSNSNTPLKHSASVSSATGTTEESRSVPQIKNGSVVSLQSPGSRSSSAGGTSAVEVKVEPETSSDEHPVQCQENSDEAKAPQTPSALLGQKSNTDGALQKPSNEGVIEIKATKVCDQRTKCKSRCNEMLPGTSTGNNQSTITLSVASQNLTFTSSSSPPNGDSINKDPKLCTKSPRKRLSSTLQETQVPPVKKPIVEQLSAATIEGQKQGSVKKDQKVPHSGKTEGSTAGAQIPSKVSVNVSSHIGANQPLNSSALVISDSALEQQTTPSSSPDIKVKLEGSVFLLDSDSKSVGSFNPNGWQQITKDSEFISASCEQQQDISVMTIPEHSDINDLEKSVWELEGMPQDTYSQQLHSQIQESSLNQIQAHSSDQLPLQSELKEFEPSVSQTNESYFPFDDELTQDSIVEELVLMEQQMSMNNSHSYGNCLGMTLQSQSVTPGAPMSSHTSSTHFYHPIHSNGTPIHTPTPTPTPTPTPTPTPTPTSEMIAGSQSLSRESPCSRLAQTTPVDSALGSSRHTPIGTPHSNCSSSVPPSPVECRNPFAFTPISSSMAYHDASIVSSSPVKPMQRPMATHPDKTKLEWMNNGYSGVGNSSVSGHGILPSYQELVEDRFRKPHAFAVPGQSYQSQSRHHDTHFGRLTPVSPVQHQGATVNNTNKQEGFAVPAPLDNKGTNSSASSNFRCRSVSPAVHRQRNLSGSTLYPVSNIPRSNVTPFGSPVTPEVHVFTNVHTDACANNIAQRSQSVPLTVMMQTAFPNALQKQANSKKITNVLLSKLDSDNDDAVRGLGMNNLPSNYTARMNLTQILEPSTVFPSANPQNMIDSSTSVYEFQTPSYLTKSNSTGQINFSPGDNQAQSEIGEQQLDFNSTVKDLLSGDSLQTNQQLKYPDVLGE

SEQ ID NO: 72516 - protein, 76 aa, Homo sapiens
  Payload ID: 14350
  Gene Symbol: RFX7
  Gene Name: regulatory factor X, 7
  ENSP ID: ENSP00000453611
MSSSRAQQMHAFSWIRNTLEEHPETSLPKQEVYDEYKSYCDNLGYHPLSAADFGKIMKNVFPNMKARRLGTRGKSK

SEQ ID NO: 72517 - protein, 260 aa, Homo sapiens
  Payload ID: 14351
  Gene Symbol: RFXANK
  Gene Name: regulatory factor X-associated ankyrin-containing protein
  Uniprot ID: O14593
  ENSP ID: ENSP00000305071
MELTQPAEDLIQTQQTPASELGDPEDPGEEAADGSDTVVLSLFPCTPEPVNPEPDASVSSPQAGSSLKHSTTLTNRQRGNEVSALPATLDSLSIHQLAAQGELDQLKEHLRKGDNLVNKPDERGFTPLIWASAFGEIETVRFLLEWGADPHILAKERESALSLASTGGYTDIVGLLLERDVDINIYDWNGGTPLLYAVRGNHVKCVEALLARGADLTTEADSGYTPMDLAVALGYRKVQQVIENHILKLFQSNLVPADPE

SEQ ID NO: 72518 - protein, 237 aa, Homo sapiens
  Payload ID: 14351
  Gene Symbol: RFXANK
  Gene Name: regulatory factor X-associated ankyrin-containing protein
  ENSP ID: ENSP00000376138
MELTQPAEDLIQTQQTPASELGDPEDPGEEAADGSDTVVLSLFPCTPEPVNPEPDASVSSPQGSSLKHSTTLTNRQRGNEVSALPATLDCDNLVNKPDERGFTPLIWASAFGEIETVRFLLEWGADPHILAKERESALSLASTGGYTDIVGLLLERDVDINIYDWNGGTPLLYAVRGNHVKCVEALLARGADLTTEADSGYTPMDLAVALGYRKVQQVIENHILKLFQSNLVPADPE

SEQ ID NO: 72519 - protein, 260 aa, Homo sapiens; identical to SEQ ID NO: 72517
  Payload ID: 14351
  Gene Symbol: RFXANK
  Gene Name: regulatory factor X-associated ankyrin-containing protein
  Uniprot ID: O14593
  ENSP ID: ENSP00000384572

SEQ ID NO: 72520 - protein, 83 aa, Homo sapiens
  Payload ID: 14351
  Gene Symbol: RFXANK
  Gene Name: regulatory factor X-associated ankyrin-containing protein
  ENSP ID: ENSP00000393159
MELTQPAEDLIQTQQTPASELGDPEDPGEEAADGSDTVVLSLFPCTPEPVNPEPDASVSSPQAGSSLKHSTTLTNRQRGNEVS

SEQ ID NO: 72521 - protein, 238 aa, Homo sapiens
  Payload ID: 14351
  Gene Symbol: RFXANK
  Gene Name: regulatory factor X-associated ankyrin-containing protein
  Uniprot ID: O14593
  ENSP ID: ENSP00000409138
MELTQPAEDLIQTQQTPASELGDPEDPGEEAADGSDTVVLSLFPCTPEPVNPEPDASVSSPQAGSSLKHSTTLTNRQRGNEVSALPATLDCDNLVNKPDERGFTPLIWASAFGEIETVRFLLEWGADPHILAKERESALSLASTGGYTDIVGLLLERDVDINIYDWNGGTPLLYAVRGNHVKCVEALLARGADLTTEADSGYTPMDLAVALGYRKVQQVIENHILKLFQSNLVPADPE

SEQ ID NO: 72522 - protein, 41 aa, Homo sapiens
  Payload ID: 14351
  Gene Symbol: RFXANK
  Gene Name: regulatory factor X-associated ankyrin-containing protein
  ENSP ID: ENSP00000440321
PEALTSPPKPTLATPRWTLPWPWDTGKMEFRSCCPGWSAMA

SEQ ID NO: 72523 - protein, 188 aa, Homo sapiens
  Payload ID: 14351
  Gene Symbol: RFXANK
  Gene Name: regulatory factor X-associated ankyrin-containing protein
  ENSP ID: ENSP00000440325
MELTQPAEDLIQTQQTPASELGDPEDPGEEAADGSDTVVLSLFPCTPEPVNPEPDASVSSPQAGSSLKHSTTLTNRQRGNEVSALPATLDCDNLVNKPDERGFTPLIWASAFGEIETVRFLLEWGADPHILAKERESALSLASTGGYTDIVGLLLERDVDINIYDWNGGTPLLYAVRGNHVKCVEALL

SEQ ID NO: 72524 - protein, 47 aa, Homo sapiens
  Payload ID: 14351
  Gene Symbol: RFXANK
  Gene Name: regulatory factor X-associated ankyrin-containing protein
  ENSP ID: ENSP00000441042
PEALTSPPKPTLATPRWTLPWPWDTGKVIENHILKLFQSNLVPADPE

SEQ ID NO: 72525 - protein, 182 aa, Homo sapiens
  Payload ID: 14351
  Gene Symbol: RFXANK
  Gene Name: regulatory factor X-associated ankyrin-containing protein
  ENSP ID: ENSP00000444280
DTVVLSLFPCTPEPVNPEPDASVSSPQAGSSLKHSTTLTNRQRGNEVSALPATLDCDNLVNKPDERGFTPLIWASAFGEIETVRFLLEWGADPHILAKERESALSLASTGGYTDIVGLLLERDVDINIYDWNGGTPLLYAVRGNHVKCVEALLETLQPRSSVETKIAEPEALTSPPKPTLAT

SEQ ID NO: 72526 - protein, 145 aa, Homo sapiens
  Payload ID: 14351
  Gene Symbol: RFXANK
  Gene Name: regulatory factor X-associated ankyrin-containing protein
  ENSP ID: ENSP00000466913
MELTQPAEDLIQTQQTPASELGDPEDPGEEAADGSDTVVLSLFPCTPEPVNPEPDASVSSPQGSSLKHSTTLTNRQRGNEVSALPATLDSLSIHQLAAQGELDQLKEHLRKGDNLVNKPDERGFTPLIWASAFGEIETVRFLLEW

SEQ ID NO: 72527 - protein, 272 aa, Homo sapiens
  Payload ID: 14352
  Gene Symbol: RFXAP
  Gene Name: regulatory factor X-associated protein
  Uniprot ID: O00287
  ENSP ID: ENSP00000255476
MEAQGVAEGAGPGAASGVPHPAALAPAAAPTLAPASVAAAASQFTLLVMQPCAGQDEAAAPGGSVGAGKPVRYLCEGAGDGEEEAGEDEADLLDTSDPPGGGESAASLEDLEDEETHSGGEGSSGGARRRGSGGGSMSKTCTYEGCSETTSQVAKQRKPWMCKKHRNKMYKDKYKKKKSDQALNCGGTASTGSAGNVKLEESADNILSIVKQRTGSFGDRPARPTLLEQVLNQKRLSLLRSPEVVQFLQKQQQLLNQQVLEQRQQQFPGTSM

SEQ ID NO: 72528 - protein, 617 aa, Homo sapiens
  Payload ID: 14353
  Gene Symbol: RSC1A1
  Gene Name: regulatory solute carrier protein, family 1, member 1
  Uniprot ID: Q92681
  ENSP ID: ENSP00000341963
MSSLPTSDGFNHPARSSGQSPDVGNPMSLARSVSASVCPIKPSDSDRIEPKAVKALKASAEFQLNSEKKEHLSLQDLSDHASSADHAPTDQSPAMPMQNSSEEITVAGNLEKSAERSTQGLKFHLHTRQEASLSVTSTRMHEPQMFLGEKDWHPENQNLSQVSDPQQHEEPGNEQYEVAQQKASHDQEYLCNIGDLELPEERQQNQHKIVDLEATMKGNGLPQNVDPPSAKKSIPSSECSGCSNSETFMEIDTAQQSLVTLLNSTGRQNANVKNIGALDLTLDNPLMEVETSKCNPSSEILNDSISTQDLQPPETNVEIPGTNKEYGHYSSPSLCGSCQPSVESAEESCPSITAALKELHELLVVSSKPASENTSEEVICQSETIAEGQTSIKDLSERWTQNEHLTQNEQCPQVSFHQAISVSVETEKLTGTSSDTGREAVENVNFRSLGDGLSTDKEGVPKSRESINKNRSVTVTSAKTSNQLHCTLGVEISPKLLAGEEDALNQTSEQTKSLSSNFILVKDLGQGIQNSVTDRPETRENVCPDASRPLLEYEPPTSHPSSSPAILPPLIFPATDIDRILRAGFTLQEALGALHRVGGNADLALLVLLAKNIVVPT

SEQ ID NO: 72529 - protein, 92 aa, Homo sapiens
  Payload ID: 14354
  Gene Symbol: RIIAD1
  Gene Name: regulatory subunit of type II PKA R-subunit (RIIa) domain containing 1
  Uniprot ID: A6NNX1
  ENSP ID: ENSP00000419249
METLPGLLQRPDPGALSAAQLEQLRKFKIQTRIANEKYLRTHKEVEWLISGFFREIFLKRPDNILEFAADYFTDPRLPNKIHMQLIKDKKAA

SEQ ID NO: 72530 - protein, 102 aa, Homo sapiens
  Payload ID: 14354
  Gene Symbol: RIIAD1
  Gene Name: regulatory subunit of type II PKA R-subunit (RIIa) domain containing 1
  ENSP ID: ENSP00000420280
MLSVRRVSEDICSRIYESAQRIDSITFLPSSGFHLKWKIQTRIANEKYLRTHKEVEWLISGFFREIFLKRPDNILEFAADYFTDPRLPNKIHMQLIKDKKAA

SEQ ID NO: 72531 - protein, 218 aa, Homo sapiens
  Payload ID: 14355
  Gene Symbol: RRAS
  Gene Name: related RAS viral (r-ras) oncogene homolog
  Uniprot ID: P10301
  ENSP ID: ENSP00000246792
MSSGAASGTGRGRPRGGGPGPGDPPPSETHKLVVVGGGGVGKSALTIQFIQSYFVSDYDPTIEDSYTKICSVDGIPARLDILDTAGQEEFGAMREQYMRAGHGFLLVFAINDRQSFNEVGKLFTQILRVKDRDDFPVVLVGNKADLESQRQVPRSEASAFGASHHVAYFEASAKLRLNVDEAFEQLVRAVRKYQEQELPPSPPSAPRKKGGGCPCVLL

SEQ ID NO: 72532 - protein, 204 aa, Homo sapiens
  Payload ID: 14356
  Gene Symbol: RRAS2
  Gene Name: related RAS viral (r-ras) oncogene homolog 2
  Uniprot ID: P62070
  ENSP ID: ENSP00000256196
MAAAGWRDGSGQEKYRLVVVGGGGVGKSALTIQFIQSYFVTDYDPTIEDSYTKQCVIDDRAARLDILDTAGQEEFGAMREQYMRTGEGFLLVFSVTDRGSFEEIYKFQRQILRVKDRDEFPMILIGNKADLDHQRQVTQEEGQQLARQLKVTYMEASAKIRMNVDQAFHELVRVIRKFQEQECPPSPEPTRKEKDKKGCHCVIF

SEQ ID NO: 72533 - protein, 127 aa, Homo sapiens
  Payload ID: 14356
  Gene Symbol: RRAS2
  Gene Name: related RAS viral (r-ras) oncogene homolog 2
  Uniprot ID: P62070
  ENSP ID: ENSP00000403282
MREQYMRTGEGFLLVFSVTDRGSFEEIYKFQRQILRVKDRDEFPMILIGNKADLDHQRQVTQEEGQQLARQLKVTYMEASAKIRMNVDQAFHELVRVIRKFQEQECPPSPEPTRKEKDKKGCHCVIF

SEQ ID NO: 72534 - protein, 127 aa, Homo sapiens; identical to SEQ ID NO: 72533
  Payload ID: 14356
  Gene Symbol: RRAS2
  Gene Name: related RAS viral (r-ras) oncogene homolog 2
  Uniprot ID: P62070
  ENSP ID: ENSP00000431954

SEQ ID NO: 72535 - protein, 69 aa, Homo sapiens
  Payload ID: 14356
  Gene Symbol: RRAS2
  Gene Name: related RAS viral (r-ras) oncogene homolog 2
  ENSP ID: ENSP00000432559
MREQYMRTGEGFLLVFSVTDRGSFEEIYKFQRQILRVKDRDEFPMILIGNKADLDHQRQVTQEEGQQLA

SEQ ID NO: 72536 - protein, 127 aa, Homo sapiens; identical to SEQ ID NO: 72533
  Payload ID: 14356
  Gene Symbol: RRAS2
  Gene Name: related RAS viral (r-ras) oncogene homolog 2
  Uniprot ID: P62070
  ENSP ID: ENSP00000433230

SEQ ID NO: 72537 - protein, 127 aa, Homo sapiens; identical to SEQ ID NO: 72533
  Payload ID: 14356
  Gene Symbol: RRAS2
  Gene Name: related RAS viral (r-ras) oncogene homolog 2
  Uniprot ID: P62070
  ENSP ID: ENSP00000434104

SEQ ID NO: 72538 - protein, 166 aa, Homo sapiens
  Payload ID: 14356
  Gene Symbol: RRAS2
  Gene Name: related RAS viral (r-ras) oncogene homolog 2
  ENSP ID: ENSP00000435453
MQESSIILQMFCFLSRESYFVTDYDPTIEDSYTKQCVIDDRAARLDILDTAGQEEFGAMREQYMRTGEGFLLVFSVTDRGSFEEIYKFQRQILRVKDRDEFPMILIGNKADLDHQRQVTQEEGQQLARQLKVTYMEASAKIRMNVDQAFHELVRVIRKFQEQECPP

SEQ ID NO: 72539 - protein, 47 aa, Homo sapiens
  Payload ID: 14356
  Gene Symbol: RRAS2
  Gene Name: related RAS viral (r-ras) oncogene homolog 2
  ENSP ID: ENSP00000436190
MAAAGWRDGSGQEKYRLVVVGGGGVGKSALTIQFIQNHLLKKYLHCE

SEQ ID NO: 72540 - protein, 52 aa, Homo sapiens
  Payload ID: 14356
  Gene Symbol: RRAS2
  Gene Name: related RAS viral (r-ras) oncogene homolog 2
  ENSP ID: ENSP00000436887
MAAAGWRDGSGQEKYRLVVVGGGGVGKSALTIQFIQVFRNSWVPSFIHVFQI

SEQ ID NO: 72541 - protein, 127 aa, Homo sapiens; identical to SEQ ID NO: 72533
  Payload ID: 14356
  Gene Symbol: RRAS2
  Gene Name: related RAS viral (r-ras) oncogene homolog 2
  Uniprot ID: P62070
  ENSP ID: ENSP00000437083

SEQ ID NO: 72542 - protein, 169 aa, Homo sapiens
  Payload ID: 14356
  Gene Symbol: RRAS2
  Gene Name: related RAS viral (r-ras) oncogene homolog 2
  Uniprot ID: P62070
  ENSP ID: ENSP00000437547
MSYFVTDYDPTIEDSYTKQCVIDDRAARLDILDTAGQEEFGAMREQYMRTGEGFLLVFSVTDRGSFEEIYKFQRQILRVKDRDEFPMILIGNKADLDHQRQVTQEEGQQLARQLKVTYMEASAKIRMNVDQAFHELVRVIRKFQEQECPPSPEPTRKEKDKKGCHCVIF

SEQ ID NO: 72543 - protein, 203 aa, Homo sapiens
  Payload ID: 14356
  Gene Symbol: RRAS2
  Gene Name: related RAS viral (r-ras) oncogene homolog 2
  ENSP ID: ENSP00000441722
MAAAAGGRLRQEKYRLVVVGGGGVGKSALTIQFIQSYFVTDYDPTIEDSYTKQCVIDDRAARLDILDTAGQEEFGAMREQYMRTGEGFLLVFSVTDRGSFEEIYKFQRQILRVKDRDEFPMILIGNKADLDHQRQVTQEEGQQLARQLKVTYMEASAKIRMNVDQAFHELVRVIRKFQEQECPPSPEPTRKEKDKKGCHCVIF

SEQ ID NO: 72544 - protein, 185 aa, Homo sapiens
  Payload ID: 14357
  Gene Symbol: RLN1
  Gene Name: relaxin 1
  Uniprot ID: P04808
  ENSP ID: ENSP00000223862
MPRLFLFHLLEFCLLLNQFSRAVAAKWKDDVIKLCGRELVRAQIAICGMSTWSKRSLSQEDAPQTPRPVAEIVPSFINKDTETIIIMLEFIANLPPELKAALSERQPSLPELQQYVPALKDSNLSFEEFKKLIRNRQSEAADSNPSELKYLGLDTHSQKKRRPYVALFEKCCLIGCTKRSLAKYC

SEQ ID NO: 72545 - protein, 185 aa, Homo sapiens
  Payload ID: 14358
  Gene Symbol: RLN2
  Gene Name: relaxin 2
  Uniprot ID: P04090
  ENSP ID: ENSP00000371040
MPRLFFFHLLGVCLLLNQFSRAVADSWMEEVIKLCGRELVRAQIAICGMSTWSKRSLSQEDAPQTPRPVAEIVPSFINKDTETINMMSEFVANLPQELKLTLSEMQPALPQLQQHVPVLKDSSLLFEEFKKLIRNRQSEAADSSPSELKYLGLDTHSRKKRQLYSALANKCCHVGCTKRSLARFC

SEQ ID NO: 72546 - protein, 68 aa, Homo sapiens
  Payload ID: 14358
  Gene Symbol: RLN2
  Gene Name: relaxin 2
  ENSP ID: ENSP00000399616
  MOD_RES (1)..(1): Any amino acid
XTWSKRSLSQEDAPQTPRPVAGDFIQTVSLGISPDGGKALRTGSCFTREFLGALSKLCHPSSTKIQKP

SEQ ID NO: 72547 - protein, 142 aa, Homo sapiens
  Payload ID: 14359
  Gene Symbol: RLN3
  Gene Name: relaxin 3
  Uniprot ID: Q8WXF3
  ENSP ID: ENSP00000397415
MARYMLLLLLAVWVLTGELWPGAEARAAPYGVRLCGREFIRAVIFTCGGSRWRRSDILAHEAMGDTFPDADADEDSLAGELDEAMGSSEWLALTKSPQAFYRGRPSWQGTPGVLRGSRDVLAGLSSSCCKWGCSKSEISSLC

SEQ ID NO: 72548 - protein, 109 aa, Homo sapiens
  Payload ID: 14359
  Gene Symbol: RLN3
  Gene Name: relaxin 3
  ENSP ID: ENSP00000467130
MARYMLLLLLAVWVLTGELWPGAEARAAPYGVRLCGREFIRAVIFTCGGSRWRRSDILAHEAMEKNIEAPRSKFTCSRLEKLDSCSVSPAPKCTRSSINKERYLPGCRC

SEQ ID NO: 72549 - protein, 757 aa, Homo sapiens
  Payload ID: 14360
  Gene Symbol: RXFP1
  Gene Name: relaxin/insulin-like family peptide receptor 1
  Uniprot ID: Q9HBX9
  ENSP ID: ENSP00000303248
MTSGSVFFYILIFGKYFSHGGGQDVKCSLGYFPCGNITKCLPQLLHCNGVDDCGNQADEDNCGDNNGWSLQFDKYFASYYKMTSQYPFEAETPECLVGSVPVQCLCQGLELDCDETNLRAVPSVSSNVTAMSLQWNLIRKLPPDCFKNYHDLQKLYLQNNKITSISIYAFRGLNSLTKLYLSHNRITFLKPGVFEDLHRLEWLIIEDNHLSRISPPTFYGLNSLILLVLMNNVLTRLPDKPLCQHMPRLHWLDLEGNHIHNLRNLTFISCSNLTVLVMRKNKINHLNENTFAPLQKLDELDLGSNKIENLPPLIFKDLKELSQLNLSYNPIQKIQANQFDYLVKLKSLSLEGIEISNIQQRMFRPLMNLSHIYFKKFQYCGYAPHVRSCKPNTDGISSLENLLASIIQRVFVWVVSAVTCFGNIFVICMRPYIRSENKLYAMSIISLCCADCLMGIYLFVIGGFDLKFRGEYNKHAQLWMESTHCQLVGSLAILSTEVSVLLLTFLTLEKYICIVYPFRCVRPGKCRTITVLILIWITGFIVAFIPLSNKEFFKNYYGTNGVCFPLHSEDTESIGAQIYSVAIFLGINLAAFIIIVFSYGSMFYSVHQSAITATEIRNQVKKEMILAKRFFFIVFTDALCWIPIFVVKFLSLLQVEIPGTITSWVVIFILPINSALNPILYTLTTRPFKEMIHRFWYNYRQRKSMDSKGQKTYAPSFIWVEMWPLQEMPPELMKPDLFTYPCEMSLISQSTRLNSYS

SEQ ID NO: 72550 - protein, 709 aa, Homo sapiens
  Payload ID: 14360
  Gene Symbol: RXFP1
  Gene Name: relaxin/insulin-like family peptide receptor 1
  Uniprot ID: Q9HBX9
  ENSP ID: ENSP00000345889
MTSGSVFFYILIFGKYFSHGGGQDVKCSLGYFPCGNITKCLPQLLHCNGVDDCGNQADEDNCGDNNGWSLQFDKYFASYYKMTSQYPFEAETPECLVGSVPVQCLCQGLELDCDETNLRAVPSVSSNVTAMSLQWNLIRKLPPDCFKNYHDLQKLYLQNNKITSISIYAFRGLNSLTKLYLSHNRITFLKPGVFEDLHRLEWLIIEDNHLSRISPPTFYGLNSLILLVLMNNVLTRLPDKPLCQHMPRLHWLDLEGNHIHNLRNLTFISCSNLTVLVMRKNKINHLNENTFAPLQKLDEFSLEGIEISNIQQRMFRPLMNLSHIYFKKFQYCGYAPHVRSCKPNTDGISSLENLLASIIQRVFVWVVSAVTCFGNIFVICMRPYIRSENKLYAMSIISLCCADCLMGIYLFVIGGFDLKFRGEYNKHAQLWMESTHCQLVGSLAILSTEVSVLLLTFLTLEKYICIVYPFRCVRPGKCRTITVLILIWITGFIVAFIPLSNKEFFKNYYGTNGVCFPLHSEDTESIGAQIYSVAIFLGINLAAFIIIVFSYGSMFYSVHQSAITATEIRNQVKKEMILAKRFFFIVFTDALCWIPIFVVKFLSLLQVEIPGTITSWVVIFILPINSALNPILYTLTTRPFKEMIHRFWYNYRQRKSMDSKGQKTYAPSFIWVEMWPLQEMPPELMKPDLFTYPCEMSLISQSTRLNSYS

SEQ ID NO: 72551 - protein, 784 aa, Homo sapiens
  Payload ID: 14360
  Gene Symbol: RXFP1
  Gene Name: relaxin/insulin-like family peptide receptor 1
  ENSP ID: ENSP00000405841
MTSGSVFFYILIFGKYFSHGGGQDVKCSLGYFPCGNITKCLPQLLHCNGVDDCGNQADEDNCGDNNGWSLQFDKYFASYYKMTSQYPFEAETPECSFHFFLFITLLFLVPHCHHALPLPLDSVVGSVPVQCLCQGLELDCDETNLRAVPSVSSNVTAMSLQWNLIRKLPPDCFKNYHDLQKLYLQNNKITSISIYAFRGLNSLTKLYLSHNRITFLKPGVFEDLHRLEWLIIEDNHLSRISPPTFYGLNSLILLVLMNNVLTRLPDKPLCQHMPRLHWLDLEGNHIHNLRNLTFISCSNLTVLVMRKNKINHLNENTFAPLQKLDELDLGSNKIENLPPLIFKDLKELSQLNLSYNPIQKIQANQFDYLVKLKSLSLEGIEISNIQQRMFRPLMNLSHIYFKKFQYCGYAPHVRSCKPNTDGISSLENLLASIIQRVFVWVVSAVTCFGNIFVICMRPYIRSENKLYAMSIISLCCADCLMGIYLFVIGGFDLKFRGEYNKHAQLWMESTHCQLVGSLAILSTEVSVLLLTFLTLEKYICIVYPFRCVRPGKCRTITVLILIWITGFIVAFIPLSNKEFFKNYYGTNGVCFPLHSEDTESIGAQIYSVAIFLGINLAAFIIIVFSYGSMFYSVHQSAITATEIRNQVKKEMILAKRFFFIVFTDALCWIPIFVVKFLSLLQVEIPGTITSWVVIFILPINSALNPILYTLTTRPFKEMIHRFWYNYRQRKSMDSKGQKTYAPSFIWVEMWPLQEMPPELMKPDLFTYPCEMSLISQSTRLNSYS

SEQ ID NO: 72552 - protein, 601 aa, Homo sapiens
  Payload ID: 14360
  Gene Symbol: RXFP1
  Gene Name: relaxin/insulin-like family peptide receptor 1
  ENSP ID: ENSP00000414885
MVTCTQNMKAALKSLLYHSRNLGYLQNNKITSISIYAFRGLNSLTKLYLSHNRITFLKPGVFEDLHRLEWLIIEDNHLSRISPPTFYGLNSLILLVLMNNVLTRLPDKPLCQHMPRLHWLVMRKNKINHLNENTFAPLQKLDELDLGSNKIENLPPLIFKDLKELSQLNLSYNPIQKIQANQFDYLVKLKSLSLEGIEISNIQQRMFRPLMNLSHIYFKKFQYCGYAPHVRSCKPNTDGISSLENLLASIIQRVFVWVVSAVTCFGNIFVICMRPYIRSENKLYAMSIISLCCADCLMGIYLFVIGGFDLKFRGEYNKHAQLWMESTHCQLVGSLAILSTEVSVLLLTFLTLEKYICIVYPFRCVRPGKCRTITVLILIWITGFIVAFIPLSNKEFFKNYYGTNGVCFPLHSEDTESIGAQIYSVAIFLGINLAAFIIIVFSYGSMFYSVHQSAITATEIRNQVKKEMILAKRFFFIVFTDALCWIPIFVVKFLSLLQVEIPGTITSWVVIFILPINSALNPILYTLTTRPFKEMIHRFWYNYRQRKSMDSKGQKTYAPSFIWVEMWPLQEMPPELMKPDLFTYPCEMSLISQSTRLNSYS

SEQ ID NO: 72553 - protein, 724 aa, Homo sapiens
  Payload ID: 14360
  Gene Symbol: RXFP1
  Gene Name: relaxin/insulin-like family peptide receptor 1
  Uniprot ID: Q9HBX9
  ENSP ID: ENSP00000420712
MTSGSVFFYILIFGKYFSHGGGQDVKCSLGYFPCGNITKCLPQLLHCNGVDDCGNQADEDNCVVGSVPVQCLCQGLELDCDETNLRAVPSVSSNVTAMSLQWNLIRKLPPDCFKNYHDLQKLYLQNNKITSISIYAFRGLNSLTKLYLSHNRITFLKPGVFEDLHRLEWLIIEDNHLSRISPPTFYGLNSLILLVLMNNVLTRLPDKPLCQHMPRLHWLDLEGNHIHNLRNLTFISCSNLTVLVMRKNKINHLNENTFAPLQKLDELDLGSNKIENLPPLIFKDLKELSQLNLSYNPIQKIQANQFDYLVKLKSLSLEGIEISNIQQRMFRPLMNLSHIYFKKFQYCGYAPHVRSCKPNTDGISSLENLLASIIQRVFVWVVSAVTCFGNIFVICMRPYIRSENKLYAMSIISLCCADCLMGIYLFVIGGFDLKFRGEYNKHAQLWMESTHCQLVGSLAILSTEVSVLLLTFLTLEKYICIVYPFRCVRPGKCRTITVLILIWITGFIVAFIPLSNKEFFKNYYGTNGVCFPLHSEDTESIGAQIYSVAIFLGINLAAFIIIVFSYGSMFYSVHQSAITATEIRNQVKKEMILAKRFFFIVFTDALCWIPIFVVKFLSLLQVEIPGTITSWVVIFILPINSALNPILYTLTTRPFKEMIHRFWYNYRQRKSMDSKGQKTYAPSFIWVEMWPLQEMPPELMKPDLFTYPCEMSLISQSTRLNSYS

SEQ ID NO: 72554 - protein, 676 aa, Homo sapiens
  Payload ID: 14360
  Gene Symbol: RXFP1
  Gene Name: relaxin/insulin-like family peptide receptor 1
  ENSP ID: ENSP00000423306
MTSQYPFEAETPECLVGSVPVQCLCQGLELDCDETNLRAVPSVSSNVTAMSLQWNLIRKLPPDCFKNYHDLQKLYLQNNKITSISIYAFRGLNSLTKLYLSHNRITFLKPGVFEDLHRLEWLIIEDNHLSRISPPTFYGLNSLILLVLMNNVLTRLPDKPLCQHMPRLHWLDLEGNHIHNLRNLTFISCSNLTVLVMRKNKINHLNENTFAPLQKLDELDLGSNKIENLPPLIFKDLKELSQLNLSYNPIQKIQANQFDYLVKLKSLSLEGIEISNIQQRMFRPLMNLSHIYFKKFQYCGYAPHVRSCKPNTDGISSLENLLASIIQRVFVWVVSAVTCFGNIFVICMRPYIRSENKLYAMSIISLCCADCLMGIYLFVIGGFDLKFRGEYNKHAQLWMESTHCQLVGSLAILSTEVSVLLLTFLTLEKYICIVYPFRCVRPGKCRTITVLILIWITGFIVAFIPLSNKEFFKNYYGTNGVCFPLHSEDTESIGAQIYSVAIFLGINLAAFIIIVFSYGSMFYSVHQSAITATEIRNQVKKEMILAKRFFFIVFTDALCWIPIFVVKFLSLLQVEIPGTITSWVVIFILPINSALNPILYTLTTRPFKEMIHRFWYNYRQRKSMDSKGQKTYAPSFIWVEMWPLQEMPPELMKPDLFTYPCEMSLISQSTRLNSYS

SEQ ID NO: 72555 - protein, 157 aa, Homo sapiens
  Payload ID: 14360
  Gene Symbol: RXFP1
  Gene Name: relaxin/insulin-like family peptide receptor 1
  ENSP ID: ENSP00000432036
MTSGSVFFYILIFGKYFSHGGGQDVKCSLGYFPCGNITKCLPQLLHCNGVDDCGNQADEDNCGDNNGWSLQFDKYFASYYKMTSQYPFEAETPECLVGSVPVQCLCQGLELDCDETNLRAVPSVSSNVTAMSLQWNLIRKLPPDCFKNYHDLQKLTL

SEQ ID NO: 72556 - protein, 189 aa, Homo sapiens
  Payload ID: 14360
  Gene Symbol: RXFP1
  Gene Name: relaxin/insulin-like family peptide receptor 1
  Uniprot ID: Q9HBX9
  ENSP ID: ENSP00000434475
MTSGSVFFYILIFGKYFSHGGGQDVKCSLGYFPCGNITKCLPQLLHCNGVDDCGNQADEDNCGDNNGWSLQFDKYFASYYKMTSQYPFEAETPECLVGSVPVQCLCQGLELDCDETNLRAVPSVSSNVTAMSLQWNLIRKLPPDCFKNYHDLQKLYLQNNKITSISIYAFRGLNSLTKLSRAVKDGSEK

SEQ ID NO: 72557 - protein, 626 aa, Homo sapiens
  Payload ID: 14360
  Gene Symbol: RXFP1
  Gene Name: relaxin/insulin-like family peptide receptor 1
  ENSP ID: ENSP00000480522
MSLQWNLIRKLPPDCFKNYHDLQKLYLQNNKITSISIYAFRGLNSLTKLYLSHNRITFLKPGVFEDLHRLEWLIIEDNHLSRISPPTFYGLNSLILLVLMNNVLTRLPDKPLCQHMPRLHWLDLEGNHIHNLRNLTFISCSNLTVLVMRKNKINHLNENTFAPLQKLDELDLGSNKIENLPPLIFKDLKELSQLNLSYNPIQKIQANQFDYLVKLKSLLEGIEISNIQQRMFRPLMNLSHIYFKKFQYCGYAPHVRSCKPNTDGISSLENLLASIIQRVFVWVVSAVTCFGNIFVICMRPYIRSENKLYAMSIISLCCADCLMGIYLFVIGGFDLKFRGEYNKHAQLWMESTHCQLVGSLAILSTEVSVLLLTFLTLEKYICIVYPFRCVRPGKCRTITVLILIWITGFIVAFIPLSNKEFFKNYYGTNGVCFPLHSEDTESIGAQIYSVAIFLGINLAAFIIIVFSYGSMFYSVHQSAITATEIRNQVKKEMILAKRFFFIVFTDALCWIPIFVVKFLSLLQVEIPGTITSWVVIFILPINSALNPILYTLTTRPFKEMIHRFWYNYRQRKSMDSKGQKTYAPSFIWVEMWPLQEMPPELMKPDLFTYPCEMSLISQSTRLNSYS

SEQ ID NO: 72558 - protein, 754 aa, Homo sapiens
  Payload ID: 14361
  Gene Symbol: RXFP2
  Gene Name: relaxin/insulin-like family peptide receptor 2
  Uniprot ID: Q8WXD0
  ENSP ID: ENSP00000298386
MIVFLVFKHLFSLRLITMFFLLHFIVLINVKDFALTQGSMITPSCQKGYFPCGNLTKCLPRAFHCDGKDDCGNGADEENCGDTSGWATIFGTVHGNANSVALTQECFLKQYPQCCDCKETELECVNGDLKSVPMISNNVTLLSLKKNKIHSLPDKVFIKYTKLKKIFLQHNCIRHISRKAFFGLCNLQILYLNHNCITTLRPGIFKDLHQLTWLILDDNPITRISQRLFTGLNSLFFLSMVNNYLEALPKQMCAQMPQLNWVDLEGNRIKYLTNSTFLSCDSLTVLFLPRNQIGFVPEKTFSSLKNLGELDLSSNTITELSPHLFKDLKLLQKLNLSSNPLMYLHKNQFESLKQLQSLDLERIEIPNINTRMFQPMKNLSHIYFKNFRYCSYAPHVRICMPLTDGISSFEDLLANNILRIFVWVIAFITCFGNLFVIGMRSFIKAENTTHAMSIKILCCADCLMGVYLFFVGIFDIKYRGQYQKYALLWMESVQCRLMGFLAMLSTEVSVLLLTYLTLEKFLVIVFPFSNIRPGKRQTSVILICIWMAGFLIAVIPFWNKDYFGNFYGKNGVCFPLYYDQTEDIGSKGYSLGIFLGVNLLAFLIIVFSYITMFCSIQKTALQTTEVRNCFGREVAVANRFFFIVFSDAICWIPVFVVKILSLFRVEIPDTMTSWIVIFFLPVNSALNPILYTLTTNFFKDKLKQLLHKHQRKSIFKIKKKSLSTSIVWIEDSSSLKLGVLNKITLGDSIMKPVS

SEQ ID NO: 72559 - protein, 730 aa, Homo sapiens
  Payload ID: 14361
  Gene Symbol: RXFP2
  Gene Name: relaxin/insulin-like family peptide receptor 2
  Uniprot ID: Q8WXD0
  ENSP ID: ENSP00000369670
MIVFLVFKHLFSLRLITMFFLLHFIVLINVKDFALTQGSMITPSCQKGYFPCGNLTKCLPRAFHCDGKDDCGNGADEENCGDTSGWATIFGTVHGNANSVALTQECFLKQYPQCCDCKETELECVNGDLKSVPMISNNVTLLSLKKNKIHSLPDKVFIKYTKLKKIFLQHNCIRHISRKAFFGLCNLQILYLNHNCITTLRPGIFKDLHQLTWLILDDNPITRISQRLFTGLNSLFFLSMVNNYLEALPKQMCAQMPQLNWVDLEGNRIKYLTNSTFLSCDSLTVLDLSSNTITELSPHLFKDLKLLQKLNLSSNPLMYLHKNQFESLKQLQSLDLERIEIPNINTRMFQPMKNLSHIYFKNFRYCSYAPHVRICMPLTDGISSFEDLLANNILRIFVWVIAFITCFGNLFVIGMRSFIKAENTTHAMSIKILCCADCLMGVYLFFVGIFDIKYRGQYQKYALLWMESVQCRLMGFLAMLSTEVSVLLLTYLTLEKFLVIVFPFSNIRPGKRQTSVILICIWMAGFLIAVIPFWNKDYFGNFYGKNGVCFPLYYDQTEDIGSKGYSLGIFLGVNLLAFLIIVFSYITMFCSIQKTALQTTEVRNCFGREVAVANRFFFIVFSDAICWIPVFVVKILSLFRVEIPDTMTSWIVIFFLPVNSALNPILYTLTTNFFKDKLKQLLHKHQRKSIFKIKKKSLSTSIVWIEDSSSLKLGVLNKITLGDSIMKPVS

SEQ ID NO: 72560 - protein, 469 aa, Homo sapiens
  Payload ID: 14362
  Gene Symbol: RXFP3
  Gene Name: relaxin/insulin-like family peptide receptor 3
  Uniprot ID: Q9NSD7
  ENSP ID: ENSP00000328708
MQMADAATIATMNKAAGGDKLAELFSLVPDLLEAANTSGNASLQLPDLWWELGLELPDGAPPGHPPGSGGAESADTEARVRILISVVYWVVCALGLAGNLLVLYLMKSMQGWRKSSINLFVTNLALTDFQFVLTLPFWAVENALDFKWPFGKAMCKIVSMVTSMNMYASVFFLTAMSVTRYHSVASALKSHRTRGHGRGDCCGRSLGDSCCFSAKALCVWIWALAALASLPSAIFSTTVKVMGEELCLVRFPDKLLGRDRQFWLGLYHSQKVLLGFVLPLGIIILCYLLLVRFIADRRAAGTKGGAAVAGGRPTGASARRLSKVTKSVTIVVLSFFLCWLPNQALTTWSILIKFNAVPFSQEYFLCQVYAFPVSVCLAHSNSCLNPVLYCLVRREFRKALKSLLWRIASPSITSMRPFTATTKPEHEDQGLQAPAPPHAAAEPDLLYYPPGVVVYSGGRYDLLPSSSAY

SEQ ID NO: 72561 - protein, 469 aa, Homo sapiens; identical to SEQ ID NO: 72560
  Payload ID: 14362
  Gene Symbol: RXFP3
  Gene Name: relaxin/insulin-like family peptide receptor 3
  Uniprot ID: Q9NSD7
  ENSP ID: ENSP00000480733

SEQ ID NO: 72562 - protein, 374 aa, Homo sapiens
  Payload ID: 14363
  Gene Symbol: RXFP4
  Gene Name: relaxin/insulin-like family peptide receptor 4
  Uniprot ID: Q8TDU9
  ENSP ID: ENSP00000357301
MPTLNTSASPPTFFWANASGGSVLSADDAPMPVKFLALRLMVALAYGLVGAIGLLGNLAVLWVLSNCARRAPGPPSDTFVFNLALADLGLALTLPFWAAESALDFHWPFGGALCKMVLTATVLNVYASIFLITALSVARYWVVAMAAGPGTHLSLFWARIATLAVWAAAALVTVPTAVFGVEGEVCGVRLCLLRFPSRYWLGAYQLQRVVLAFMVPLGVITTSYLLLLAFLQRRQRRRQDSRVVARSVRILVASFFLCWFPNHVVTLWGVLVKFDLVPWNSTFYTIQTYVFPVTTCLAHSNSCLNPVLYCLLRREPRQALAGTFRDLRLRLWPQGGGWVQQVALKQVGRRWVASNPRESRPSTLLTNLDRGTPG

SEQ ID NO: 72563 - protein, 430 aa, Homo sapiens
  Payload ID: 14364
  Gene Symbol: RELT
  Gene Name: RELT tumor necrosis factor receptor
  Uniprot ID: Q969Z4
  ENSP ID: ENSP00000064780
MKPSLLCRPLSCFLMLLPWPLATLTSTTLWQCPPGEEPDLDPGQGTLCRPCPPGTFSAAWGSSPCQPHARCSLWRRLEAQVGMATRDTLCGDCWPGWFGPWGVPRVPCQPCSWAPLGTHGCDEWGRRARRGVEVAAGASSGGETRQPGNGTRAGGPEETAAQYAVIAIVPVFCLMGLLGILVCNLLKRKGYHCTAHKEVGPGPGGGGSGINPAYRTEDANEDTIGVLVRLITEKKENAAALEELLKEYHSKQLVQTSHRPVSKLPPAPPNVPHICPHRHHLHTVQGLASLSGPCCSRCSQKKWPEVLLSPEAVAATTPVPSLLPNPTRVPKAGAKAGRQGEITILSVGRFRVARIPEQRTSSMVSEVKTITEAGPSWGDLPDSPQPGLPPEQQALLGSGGSRTKWLKPPAENKAEENRYVVRLSESNLVI

SEQ ID NO: 72564 - protein, 430 aa, Homo sapiens; identical to SEQ ID NO: 72563
  Payload ID: 14364
  Gene Symbol: RELT
  Gene Name: RELT tumor necrosis factor receptor
  Uniprot ID: Q969Z4
  ENSP ID: ENSP00000377207

SEQ ID NO: 72565 - protein, 101 aa, Homo sapiens
  Payload ID: 14364
  Gene Symbol: RELT
  Gene Name: RELT tumor necrosis factor receptor
  ENSP ID: ENSP00000439352
MKPSLLCRPLSCFLMLLPWPLATLTSTTLWQCPPGEEPDLDPGQGTLCRPCPPGTFSAAWGSSPCQPHARCSLWRRLEAQVGMATRDTLCGDCWPGWFGPW

SEQ ID NO: 72566 - protein, 103 aa, Homo sapiens
  Payload ID: 14364
  Gene Symbol: RELT
  Gene Name: RELT tumor necrosis factor receptor
  ENSP ID: ENSP00000440562
MKPSLLCRPLSCFLMLLPWPLATLTSTTLWQCPPGEEPDLDPGQGTLCRPCPPGTFSAAWGSSPCQPHARCSLWRRLEAQVGMATRDTLCGDCWPGNQPCLPD

SEQ ID NO: 72567 - protein, 271 aa, Homo sapiens
  Payload ID: 14365
  Gene Symbol: RELL1
  Gene Name: RELT-like 1
  Uniprot ID: Q8IUW5
  ENSP ID: ENSP00000313385
MAPRALPGSAVLAAAVFVGGAVSSPLVAPDNGSSRTLHSRTETTPSPSNDTGNGHPEYIAYALVPVFFIMGLFGVLICHLLKKKGYRCTTEAEQDIEEEKVEKIELNDSVNENSDTVGQIVHYIMKNEANADVLKAMVADNSLYDPESPVTPSTPGSPPVSPGPLSPGGTPGKHVCGHHLHTVGGVVERDVCHRCRHKRWHFIKPTNKSRESRPRRQGEVTVLSVGRFRVTKVEHKSNQKERRSLMSVSGAETVNGEVPATPVKRERSGTE

SEQ ID NO: 72568 - protein, 271 aa, Homo sapiens; identical to SEQ ID NO: 72567
  Payload ID: 14365
  Gene Symbol: RELL1
  Gene Name: RELT-like 1
  Uniprot ID: Q8IUW5
  ENSP ID: ENSP00000398778

SEQ ID NO: 72569 - protein, 247 aa, Homo sapiens
  Payload ID: 14365
  Gene Symbol: RELL1
  Gene Name: RELT-like 1
  ENSP ID: ENSP00000424031
MNPGACWYIYILQKGLTQQGGEAVGCISCPALKRIYLFMFVKTVGIWQMGYNGSSRTLHSRTETTPSPSNDTGNGHPEYIAYALVPVFFIMGLFGVLICHLLKKKGYRCTTEAEQDIEEEKVEKIELNDSVNENSDTVGQIVHYIMKNEANADVLKAMVADNSLYDPESPVTPSTPGSPPVSPGPLSPGGTPGKHVCGHHLHTVGGVVERDVCHRCRHKRWHFIKPTNKSRESRPRRQGEVTVLSVG

SEQ ID NO: 72570 - protein, 303 aa, Homo sapiens
  Payload ID: 14366
  Gene Symbol: RELL2
  Gene Name: RELT-like 2
  Uniprot ID: Q8NC24
  ENSP ID: ENSP00000297164
MSEPQPDLEPPQHGLYMLFLLVLVFFLMGLVGFMICHVLKKKGYRCRTSRGSEPDDAQLQPPEDDDMNEDTVERIVRCIIQNEANAEALKEMLGDSEGEGTVQLSSVDATSSLQDGAPSHHHTVHLGSAAPCLHCSRSKRPPLVRQGRSKEGKSRPRTGETTVFSVGRFRVTHIEKRYGLHEHRDGSPTDRSWGSGGGQDPGGGQGSGGGQPKAGMPAMERLPPERPQPQVLASPPVQNGGLRDSSLTPRALEGNPRASAEPTLRAGGRGPSPGLPTQEANGQPSKPDTSDHQVSLPQGAGSM

SEQ ID NO: 72571 - protein, 303 aa, Homo sapiens; identical to SEQ ID NO: 72570
  Payload ID: 14366
  Gene Symbol: RELL2
  Gene Name: RELT-like 2
  Uniprot ID: Q8NC24
  ENSP ID: ENSP00000409443

SEQ ID NO: 72572 - protein, 237 aa, Homo sapiens
  Payload ID: 14366
  Gene Symbol: RELL2
  Gene Name: RELT-like 2
  ENSP ID: ENSP00000427992
MNEDTVERIVRCIIQNEANAEALKEMLGDSEGEGTVQLSSVDATSSLQDGAPSHHHTVHLGSAAPCLHCSRSKRPPLVRQGRSKEGKSRPRTGETTVFSVGRFRVTHIEKRYGLHEHRDGSPTDRSWGSGGGQDPGGGQGSGGGQPKAGMPAMERLPPERPQPQVLASPPVQNGGLRDSSLTPRALEGNPRASAEPTLRAGGRGPSPGLPTQEANGQPSKPDTSDHQVSLPQGAGSM

SEQ ID NO: 72573 - protein, 232 aa, Homo sapiens
  Payload ID: 14366
  Gene Symbol: RELL2
  Gene Name: RELT-like 2
  ENSP ID: ENSP00000430948
MNEDTVERIVRCIIQNEANAEALKEMLGDSEGEGTVQLSSVDATSSLQDGAPSHHHTVHLGSAAPCLHCSRSKRPPLVRQGRSKEGKSRPRTGETTVFSVGRFRVTHIEKRYGLHEHRDGSPTDRSWGSGGGQDPGGGQGSGGGQPKAGMPAMERLPPERPQPQVLASPPVQNGGLRDSSLTPRALEGNPRASAEPTLRAGGRGPSPGLPTQEANGQPSKPDTSDHQSPSLC

SEQ ID NO: 72574 - protein, 258 aa, Homo sapiens
  Payload ID: 14367
  Gene Symbol: RSG1
  Gene Name: REM2 and RAB-like small GTPase 1
  Uniprot ID: Q9BU20
  ENSP ID: ENSP00000364749
MARPPVPGSVVVPNWHESAEGKEYLACILRKNRRRVFGLLERPVLLPPVSIDTASYKIFVSGKSGVGKTALVAKLAGLEVPVVHHETTGIQTTVVFWPAKLQASSRVVMFRFEFWDCGESALKKFDHMLLACMENTDAFLFLFSFTDRASFEDLPGQLARIAGEAPGVVRMVIGSKFDQYMHTDVPERDLTAFRQAWELPLLRVKSVPGRRLADGRTLDGRAGLADVAHILNGLAEQLWHQDQVAAGLLPNPPESAPE

SEQ ID NO: 72575 - protein, 112 aa, Homo sapiens
  Payload ID: 14367
  Gene Symbol: RSG1
  Gene Name: REM2 and RAB-like small GTPase 1
  ENSP ID: ENSP00000406390
  MOD_RES (1)..(1): Any amino acid
XCARTAGGCLGCLSGQCCCRLCPLTLPATRSLCPGRVVWARRRWWPSWLAWRCLWCTTRPPACMENTDAFLFLFSFTDRASFEDLPGQLARIAGEAPGVVRMVIGSKFDQYM

SEQ ID NO: 72576 - protein, 1441 aa, Homo sapiens
  Payload ID: 14368
  Gene Symbol: RSF1
  Gene Name: remodeling and spacing factor 1
  Uniprot ID: Q96T23
  ENSP ID: ENSP00000311513
MATAAAAAAVMAPPGCPGSCPNFAVVCSFLERYGPLLDLPELPFPELERVLQAPPPDVGNGEVPKELVELHLKLMRKIGKSVTADRWEKYLIKICQEFNSTWAWEMEKKGYLEMSVECKLALLKYLCECQFDDNLKFKNIINEEDADTMRLQPIGRDKDGLMYWYQLDQDHNVRMYIEEQDDQDGSSWKCIVRNRNELAETLALLKAQIDPVLLKNSSQQDNSSRESPSLEDEETKKEEETPKQEEQKESEKMKSEEQPMDLENRSTANVLEETTVKKEKEDEKELVKLPVIVKLEKPLPENEEKKIIKEESDSFKENVKPIKVEVKECRADPKDTKSSMEKPVAQEPERIEFGGNIKSSHEITEKSTEETEKLKNDQQAKIPLKKREIKLSDDFDSPVKGPLCKSVTPTKEFLKDEIKQEEETCKRISTITALGHEGKQLVNGEVSDERVAPNFKTEPIETKFYETKEESYSPSKDRNIITEGNGTESLNSVITSMKTGELEKETAPLRKDADSSISVLEIHSQKAQIEEPDPPEMETSLDSSEMAKDLSSKTALSSTESCTMKGEEKSPKTKKDKRPPILECLEKLEKSKKTFLDKDAQRLSPIPEEVPKSTLESEKPGSPEAAETSPPSNIIDHCEKLASEKEVVECQSTSTVGGQSVKKVDLETLKEDSEFTKVEMDNLDNAQTSGIEEPSETKGSMQKSKFKYKLVPEEETTASENTEITSERQKEGIKLTIRISSRKKKPDSPPKVLEPENKQEKTEKEEEKTNVGRTLRRSPRISRPTAKVAEIRDQKADKKRGEGEDEVEEESTALQKTDKKEILKKSEKDTNSKVSKVKPKGKVRWTGSRTRGRWKYSSNDESEGSGSEKSSAASEEEEEKESEEAILADDDEPCKKCGLPNHPELILLCDSCDSGYHTACLRPPLMIIPDGEWFCPPCQHKLLCEKLEEQLQDLDVALKKKERAERRKERLVYVGISIENIIPPQEPDFSEDQEEKKKDSKKSKANLLERRSTRTRKCISYRFDEFDEAIDEAIEDDIKEADGGGVGRGKDISTITGHRGKDISTILDEERKENKRPQRAAAARRKKRRRLNDLDSDSNLDEEESEDEFKISDGSQDEFVVSDENPDESEEDPPSNDDSDTDFCSRRLRRHPSRPMRQSRRLRRKTPKKKYSDDDEEEESEENSRDSESDFSDDFSDDFVETRRRRSRRNQKRQINYKEDSESDGSQKSLRRGKEIRRVHKRRLSSSESEESYLSKNSEDDELAKESKRSVRKRGRSTDEYSEADEEEEEEEGKPSRKRLHRIETDEEESCDNAHGDANQPARDSQPRVLPSEQESTKKPYRIESDEEEDFENVGKVGSPLDYSLVDLPSTNGQSPGKAIENLIGKPTEKSQTPKDNSTASASLASNGTSGGQEAGAPEEEEDELLRVTDLVDYVCNSEQL

SEQ ID NO: 72577 - protein, 202 aa, Homo sapiens
  Payload ID: 14368
  Gene Symbol: RSF1
  Gene Name: remodeling and spacing factor 1
  ENSP ID: ENSP00000408844
  MOD_RES (1)..(1): Any amino acid
XAAAAAAVMAPPGCPGSCPNFAVVCSFLERYGPLLDLPELPFPELERVLQAPPPDVGNGEVPKELVELHLKLMRKIGKSVTADRWEKYLIKYLCECQFDDNLKFKNIINEEDADTMRLQPIGRDKDGLMYWYQLDQDHNVRMYIEEQDDQDGSSWKCIVRNRNELAETLALLKAQIDPVLLKNSSQQDNSSRESPSLEDEET

SEQ ID NO: 72578 - protein, 803 aa, Homo sapiens
  Payload ID: 14368
  Gene Symbol: RSF1
  Gene Name: remodeling and spacing factor 1
  ENSP ID: ENSP00000432022
ETLALLKAQIDPVLLKNSSQQDNSSRESPSLEDEETKKEEETPKQEEQKESEKMKSEEQPMDLENRSTANVLEETTVKKEKEDEKELVKLPVIVKLEKPLPENEEKKIIKEESDSFKENVKPIKVEVKECRADPKDTKSSMEKPVAQEPERIEFGGNIKSSHEITEKSTEETEKLKNDQQAKIPLKKREIKLSDDFDSPVKGPLCKSVTPTKEFLKDEIKQEEETCKRISTITALGHEGKQLVNGEVSDERVAPNFKTEPIETKFYETKEESYSPSKDRNIITEGNGTESLNSVITSMKTGELEKETAPLRKDADSSISVLEIHSQKAQIEEPDPPEMETSLDSSEMAKDLSSKTALSSTESCTMKGEEKSPKTKKDKRPPILECLEKLEKSKKTFLDKDAQRLSPIPEEVPKSTLESEKPGSPEAAETSPPSNIIDHCEKLASEKEVVECQSTSTVGGQSVKKVDLETLKEDSEFTKVEMDNLDNAQTSGIEEPSETKGSMQKSKFKYKLVPEEETTASENTEITSERQKEGIKLTIRISSRKKKPDSPPKVLEPENKQEKTEKEEEKTNVGRTLRRSPRISRPTAKVAEIRDQKADKKRGEGEDEVEEESTALQKTDKKEILKKSEKDTNSKVSKVKPKGKVRWTGSRTRGRWKYSSNDESEGSGSEKSSAASEEEEEKESEEAILADDDEPCKKCGLPNHPELILLCDSCDSGYHTACLRPPLMIIPDGEWFCPPCQHKLLCEKLEEQLQDLDVALKKKERAERRKERLVYVGISIENIIPPQEPDFSEDQEEKKKDSKK

SEQ ID NO: 72579 - protein, 276 aa, Homo sapiens
  Payload ID: 14368
  Gene Symbol: RSF1
  Gene Name: remodeling and spacing factor 1
  ENSP ID: ENSP00000433603
EPCKKCGLPNHPELILLCDSCDSGYHTACLRPPLMIIPDGEWFCPPCQHKLLCEKLEEQLQDLDVALKKKERAERRKERLVYVGISIENIIPPQEPDFSEDQEEKKKDSKKSKANLLERRSTRTRKCISYRFDEFDEAIDEAIEDDIKEADGGGVGRGKDISTITGHRGKDISTILDEERKENKRPQRAAAARRKKRRRLNDLDSDSNLDEEESEDEFKISDGSQDEFVVSDENPDESEEDPPSNDDSDTDFCSRRLRRHPSRPMRQSRRLRRKTP

SEQ ID NO: 72580 - protein, 1189 aa, Homo sapiens
  Payload ID: 14368
  Gene Symbol: RSF1
  Gene Name: remodeling and spacing factor 1
  Uniprot ID: Q96T23
  ENSP ID: ENSP00000434509
MKSEEQPMDLENRSTANVLEETTVKKEKEDEKELVKLPVIVKLEKPLPENEEKKIIKEESDSFKENVKPIKVEVKECRADPKDTKSSMEKPVAQEPERIEFGGNIKSSHEITEKSTEETEKLKNDQQAKIPLKKREIKLSDDFDSPVKGPLCKSVTPTKEFLKDEIKQEEETCKRISTITALGHEGKQLVNGEVSDERVAPNFKTEPIETKFYETKEESYSPSKDRNIITEGNGTESLNSVITSMKTGELEKETAPLRKDADSSISVLEIHSQKAQIEEPDPPEMETSLDSSEMAKDLSSKTALSSTESCTMKGEEKSPKTKKDKRPPILECLEKLEKSKKTFLDKDAQRLSPIPEEVPKSTLESEKPGSPEAAETSPPSNIIDHCEKLASEKEVVECQSTSTVGGQSVKKVDLETLKEDSEFTKVEMDNLDNAQTSGIEEPSETKGSMQKSKFKYKLVPEEETTASENTEITSERQKEGIKLTIRISSRKKKPDSPPKVLEPENKQEKTEKEEEKTNVGRTLRRSPRISRPTAKVAEIRDQKADKKRGEGEDEVEEESTALQKTDKKEILKKSEKDTNSKVSKVKPKGKVRWTGSRTRGRWKYSSNDESEGSGSEKSSAASEEEEEKESEEAILADDDEPCKKCGLPNHPELILLCDSCDSGYHTACLRPPLMIIPDGEWFCPPCQHKLLCEKLEEQLQDLDVALKKKERAERRKERLVYVGISIENIIPPQEPDFSEDQEEKKKDSKKSKANLLERRSTRTRKCISYRFDEFDEAIDEAIEDDIKEADGGGVGRGKDISTITGHRGKDISTILDEERKENKRPQRAAAARRKKRRRLNDLDSDSNLDEEESEDEFKISDGSQDEFVVSDENPDESEEDPPSNDDSDTDFCSRRLRRHPSRPMRQSRRLRRKTPKKKYSDDDEEEESEENSRDSESDFSDDFSDDFVETRRRRSRRNQKRQINYKEDSESDGSQKSLRRGKEIRRVHKRRLSSSESEESYLSKNSEDDELAKESKRSVRKRGRSTDEYSEADEEEEEEEGKPSRKRLHRIETDEEESCDNAHGDANQPARDSQPRVLPSEQESTKKPYRIESDEEEDFENVGKVGSPLDYSLVDLPSTNGQSPGKAIENLIGKPTEKSQTPKDNSTASASLASNGTSGGQEAGAPEEEEDELLRVTDLVDYVCNSEQL

SEQ ID NO: 72581 - protein, 702 aa, Homo sapiens
  Payload ID: 14368
  Gene Symbol: RSF1
  Gene Name: remodeling and spacing factor 1
  ENSP ID: ENSP00000436408
ATAAAAAAVMAPPGCPGSCPNFAVVCSFLERYGPLLDLPELPFPELERVLQAPPPDVGNGEVPKELVELHLKLMRKIGKSVTADRWEKYLIKICQEFNSTWAWEMEKKGYLEMSVECKLALLKYLCECQFDDNLKFKNIINEEDADTMRLQPIGRDKDGLMYWYQLDQDHNVRMYIEEQDDQDGSSWKCIVRNRNELAETLALLKAQIDPVLLKNSSQQDNSSRESPSLEDEETKKEEETPKQEEQKESEKMKSEEQPMDLENRSTANVLEETTVKKEKEDEKELVKLPVIVKLEKPLPENEEKKIIKEESDSFKENVKPIKVEVKECRADPKDTKSSMEKPVAQEPERIEFGGNIKSSHEITEKSTEETEKLKNDQQAKIPLKKREIKLSDDFDSPVKGPLCKSVTPTKEFLKDEIKQEEETCKRISTITALGHEGKQLVNGEVSDERVAPNFKTEPIETKFYETKEESYSPSKDRNIITEGNGTESLNSVITSMKTGELEKETAPLRKDADSSISVLEIHSQKAQIEEPDPPEMETSLDSSEMAKDLSSKTALSSTESCTMKGEEKSPKTKKDKRPPILECLEKLEKSKKTFLDKDAQRLSPIPEEVPKSTLESEKPGSPEAAETSPPSNIIDHCEKLASEKEVVECQSTSTVGGQSVKKVDLETLKEDSEFTKVEMDNLDNAQTSGIEEPSETKGSMQK

SEQ ID NO: 72582 - protein, 165 aa, Homo sapiens
  Payload ID: 14368
  Gene Symbol: RSF1
  Gene Name: remodeling and spacing factor 1
  ENSP ID: ENSP00000436728
  MOD_RES (1)..(1): Any amino acid
XKPDSPPKVLEPENKQEKTEKEEEKTNVGRTLRRSPRISRPTAKVAEIRDQKADKKRGEGEDEVEEESTALQKTDKKEILKKSEKDTNSKVKPKGKVRWTGSRTRGRWKYSSNDESEGSGSEKSSAASEEEEEKESEEAILADDDEPCKKCGLPNHPELILLCDS

SEQ ID NO: 72583 - protein, 342 aa, Homo sapiens
  Payload ID: 14369
  Gene Symbol: RNLS
  Gene Name: renalase, FAD-dependent amine oxidase
  Uniprot ID: Q5VYX0
  ENSP ID: ENSP00000332530
MAQVLIVGAGMTGSLCAALLRRQTSGPLYLAVWDKAEDSGGRMTTACSPHNPQCTADLGAQYITCTPHYAKKHQRFYDELLAYGVLRPLSSPIEGMVMKEGDCNFVAPQGISSIIKHYLKESGAEVYFRHRVTQINLRDDKWEVSKQTGSPEQFDLIVLTMPVPEILQLQGDITTLISECQRQQLEAVSYSSRYALGLFYEAGTKIDVPWAGQYITSNPCIRFVSIDNKKRNIESSEIGPSLVIHTTVPFGVTYLEHSIEDVQELVFQQLENILPGLPQPIATKCQKWRHSQVTNAAANCPGQMTLHHKPFLACGGDGFTQSNFDGCITSALCVLEALKNYI

SEQ ID NO: 72584 - protein, 315 aa, Homo sapiens
  Payload ID: 14369
  Gene Symbol: RNLS
  Gene Name: renalase, FAD-dependent amine oxidase
  Uniprot ID: Q5VYX0
  ENSP ID: ENSP00000361015
MAQVLIVGAGMTGSLCAALLRRQTSGPLYLAVWDKAEDSGGRMTTACSPHNPQCTADLGAQYITCTPHYAKKHQRFYDELLAYGVLRPLSSPIEGMVMKEGDCNFVAPQGISSIIKHYLKESGAEVYFRHRVTQINLRDDKWEVSKQTGSPEQFDLIVLTMPVPEILQLQGDITTLISECQRQQLEAVSYSSRYALGLFYEAGTKIDVPWAGQYITSNPCIRFVSIDNKKRNIESSEIGPSLVIHTTVPFGVTYLEHSIEDVQELVFQQLENILPGLPQPIATKCQKWRHSQVPSAGVILGCAKSPWMMAIGFPI

SEQ ID NO: 72585 - protein, 175 aa, Homo sapiens
  Payload ID: 14369
  Gene Symbol: RNLS
  Gene Name: renalase, FAD-dependent amine oxidase
  ENSP ID: ENSP00000387577
MAQVLIVGAGMTGSLCAALLRRQTSGPLYLAVWDKAEDSGGRMTTACSPHNPQCTADLGAQYITCTPHYAKKHQRFYDELLAYGVLRPLSSPIEGMVMKEGDCNFVAPQGISSIIKHYLKESGAEVYFRHRVTQINLRDDKWEVSKQTGSPEQFDLIVLTMPVPEILQLQGDITT

SEQ ID NO: 72586 - protein, 406 aa, Homo sapiens
  Payload ID: 14370
  Gene Symbol: REN
  Gene Name: renin
  Uniprot ID: P00797
  ENSP ID: ENSP00000272190
MDGWRRMPRWGLLLLLWGSCTFGLPTDTTTFKRIFLKRMPSIRESLKERGVDMARLGPEWSQPMKRLTLGNTTSSVILTNYMDTQYYGEIGIGTPPQTFKVVFDTGSSNVWVPSSKCSRLYTACVYHKLFDASDSSSYKHNGTELTLRYSTGTVSGFLSQDIITVGGITVTQMFGEVTEMPALPFMLAEFDGVVGMGFIEQAIGRVTPIFDNIISQGVLKEDVFSFYYNRDSENSQSLGGQIVLGGSDPQHYEGNFHYINLIKTGVWQIQMKGVSVGSSTLLCEDGCLALVDTGASYISGSTSSIEKLMEALGAKKRLFDYVVKCNEGPTLPDISFHLGGKEYTLTSADYVFQESYSSKKLCTLAIHAMDIPPPTGPTWALGATFIRKFYTEFDRRNNRIGFALAR

SEQ ID NO: 72587 - protein, 413 aa, Homo sapiens
  Payload ID: 14371
  Gene Symbol: RENBP
  Gene Name: renin binding protein
  ENSP ID: ENSP00000359014
MSKGLPARQDMEKERETLQAWKERVGQELDRVVAFWMEHSHDQEHGGFFTCLGREGRVWMYCRLYRTFERFRHAQLLDAAKAGGEFLLRYARVAPPGKKCAFVLTRDGRPVKVQRTIFSECFYTMAMNELWRATGEVRYQTEAVEMMDQIVHWVQEDASGLGRPQLQGAPAAEPMAVPMMLLNLVEQLGEADEELAGKYAELGDWCARRILQHVQRDGQAVLENVSEGGKELPGCLGRQQNPGHTLEAGWFLLRHCIRKGDPELRAHVIDKFLLLPFHSGWDPDHGGLFYFQDADNFCPTQLEWAMKLWWPHSEAMIAFLMGYSDSGDPVLLRLFYQVAEYTFRQFRDPEYGEWFGYLSREGKVALSIKGGPFKGCFHVPRCLAMCEEMLGALLSRPAPAPSPAPTPACRGAE

SEQ ID NO: 72588 - protein, 427 aa, Homo sapiens
  Payload ID: 14371
  Gene Symbol: RENBP
  Gene Name: renin binding protein
  Uniprot ID: P51606
  ENSP ID: ENSP00000377303
MSKGLPARQDMEKERETLQAWKERVGQELDRVVAFWMEHSHDQEHGGFFTCLGREGRVYDDLKYVWLQGRQVWMYCRLYRTFERFRHAQLLDAAKAGGEFLLRYARVAPPGKKCAFVLTRDGRPVKVQRTIFSECFYTMAMNELWRATGEVRYQTEAVEMMDQIVHWVQEDASGLGRPQLQGAPAAEPMAVPMMLLNLVEQLGEADEELAGKYAELGDWCARRILQHVQRDGQAVLENVSEGGKELPGCLGRQQNPGHTLEAGWFLLRHCIRKGDPELRAHVIDKFLLLPFHSGWDPDHGGLFYFQDADNFCPTQLEWAMKLWWPHSEAMIAFLMGYSDSGDPVLLRLFYQVAEYTFRQFRDPEYGEWFGYLSREGKVALSIKGGPFKGCFHVPRCLAMCEEMLGALLSRPAPAPSPAPTPACRGAE

SEQ ID NO: 72589 - protein, 60 aa, Homo sapiens
  Payload ID: 14371
  Gene Symbol: RENBP
  Gene Name: renin binding protein
  ENSP ID: ENSP00000394220
MSKGLPARQARHGERARDSAGLEGARGAGAGPRGGFLDGALPRPGARGLLHVPWPRGAGV

SEQ ID NO: 72590 - protein, 159 aa, Homo sapiens
  Payload ID: 14371
  Gene Symbol: RENBP
  Gene Name: renin binding protein
  ENSP ID: ENSP00000399278
TFERFRHAQLLDAAKAGGEFLLRYARVAPPGKKCAFVLTRDGRPVKVQRTIFSECFYTMAMNELWRATGEVRYQEDASGLGRPQLQGAPAAEPMAVPMMLLNLVEQLGEADEELAGKYAELGDWCARRILQHVQATRWKPAGFCSVIAFGKATPNFEPT

SEQ ID NO: 72591 - protein, 116 aa, Homo sapiens
  Payload ID: 14371
  Gene Symbol: RENBP
  Gene Name: renin binding protein
  ENSP ID: ENSP00000405759
  MOD_RES (1)..(1): Any amino acid
XGRQQNPGHTLEAGWFLLRHCIRKGDPELRAHVIDKFLLLPFHSGWDPDHGGLFYFQDADNFCPTQLEWAMKLWWPHSEAMIAFLMGYSDSGDPVLLRLFYQVAEYTFRQGLYRPG

SEQ ID NO: 72592 - protein, 125 aa, Homo sapiens
  Payload ID: 14371
  Gene Symbol: RENBP
  Gene Name: renin binding protein
  ENSP ID: ENSP00000409034
LWWPHSEAMIAFLMGYSDSGDPVLLRLFYQVAEYTFRQAGAQWRDLSSLQPPPPVFKLFSRLSLPSILLGLQFRDPEYGEWFGYLSREGKVALSIKGGPFKGCFHVPRCLAMCEEMLGALLSRPA

SEQ ID NO: 72593 - protein, 784 aa, Homo sapiens
  Payload ID: 14372
  Gene Symbol: RPTN
  Gene Name: repetin
  Uniprot ID: Q6XPR3
  ENSP ID: ENSP00000317895
MAQLLNSILSVIDVFHKYAKGNGDCALLCKEELKQLLLAEFGDILQRPNDPETVETILNLLDQDRDGHIDFHEYLLLVFQLVQACYHKLDNKSHGGRTSQQERGQEGAQDCKFPGNTGRQHRQRHEEERQNSHHSQPERQDGDSHHGQPERQDRDSHHGQSEKQDRDSHHSQPERQDRDSHHNQSERQDKDFSFDQSERQSQDSSSGKKVSHKSTSGQAKWQGHIFALNRCEKPIQDSHYGQSERHTQQSETLGQASHFNQTNQQKSGSYCGQSERLGQELGCGQTDRQGQSSHYGQTDRQDQSYHYGQTDRQGQSSHYSQTDRQGQSSHYSQPDRQGQSSHYGQMDRKGQCYHYDQTNRQGQGSHYSQPNRQGQSSHYGQPDTQDQSSHYGQTDRQDQSSHYGQTERQGQSSHYSQMDRQGQGSHYGQTDRQGQSSHYGQPDRQGQNSHYGQTDRQGQSSHYGQTDRQGQSSHYSQPDKQGQSSHYGKIDRQDQSYHYGQPDGQGQSSHYGQTDRQGQSFHYGQPDRQGQSSHYSQMDRQGQSSHYGQTDRQGQSSHYGQTDRQGQSYHYGQTDRQGQSSHYIQSQTGEIQGQNKYFQGTEGTRKASYVEQSGRSGRLSQQTPGQEGYQNQGQGFQSRDSQQNGHQVWEPEEDSQHHQHKLLAQIQQERPLCHKGRDWQSCSSEQGHRQAQTRQSHGEGLSHWAEEEQGHQTWDRHSHESQEGPCGTQDRRTHKDEQNHQRRDRQTHEHEQSHQRRDRQTHEDKQNRQRRDRQTHEDEQNHQR

SEQ ID NO: 72594 - protein, 1147 aa, Homo sapiens
  Payload ID: 14373
  Gene Symbol: RFC1
  Gene Name: replication factor C (activator 1) 1, 145kDa
  Uniprot ID: P35251
  ENSP ID: ENSP00000261424
MDIRKFFGVIPSGKKLVSETVKKNEKTKSDEETLKAKKGIKEIKVNSSRKEDDFKQKQPSKKKRIIYDSDSESEETLQVKNAKKPPEKLPVSSKPGKISRQDPVTYISETDEEDDFMCKKAASKSKENGRSTNSHLGTSNMKKNEENTKTKNKPLSPIKLTPTSVLDYFGTGSVQRSNKKMVASKRKELSQNTDESGLNDEAIAKQLQLDEDAELERQLHEDEEFARTLAMLDEEPKTKKARKDTEAGETFSSVQANLSKAEKHKYPHKVKTAQVSDERKSYSPRKQSKYESSKESQQHSKSSADKIGEVSSPKASSKLAIMKRKEESSYKEIEPVASKRKENAIKLKGETKTPKKTKSSPAKKESVSPEDSEKKRTNYQAYRSYLNREGPKALGSKEIPKGAENCLEGLIFVITGVLESIERDEAKSLIERYGGKVTGNVSKKTNYLVMGRDSGQSKSDKAAALGTKIIDEDGLLNLIRTMPGKKSKYEIAVETEMKKESKLERTPQKNVQGKRKISPSKKESESKKSRPTSKRDSLAKTIKKETDVFWKSLDFKEQVAEETSGDSKARNLADDSSENKVENLLWVDKYKPTSLKTIIGQQGDQSCANKLLRWLRNWQKSSSEDKKHAKFGKFSGKDDGSSFKAALLSGPPGVGKTTTASLVCQELGYSYVELNASDTRSKSSLKAIVAESLNNTSIKGFYSNGAASSVSTKHALIMDEVDGMAGNEDRGGIQELIGLIKHTKIPIICMCNDRNHPKIRSLVHYCFDLRFQRPRVEQIKGAMMSIAFKEGLKIPPPAMNEIILGANQDIRQVLHNLSMWCARSKALTYDQAKADSHRAKKDIKMGPFDVARKVFAAGEETAHMSLVDKSDLFFHDYSIAPLFVQENYIHVKPVAAGGDMKKHLMLLSRAADSICDGDLVDSQIRSKQNWSLLPAQAIYASVLPGELMRGYMTQFPTFPSWLGKHSSTGKHDRIVQDLALHMSLRTYSSKRTVNMDYLSLLRDALVQPLTSQGVDGVQDVVALMDTYYLMKEDFENIMEISSWGGKPSPFSKLDPKVKAAFTRAYNKEAHLTPYSLQAIKASRHSTSPSLDSEYNEELNEDDSQSDEKDQDAIETDAMIKKKTKSSKPSKPEKDKEPRKGKGKSSKK

SEQ ID NO: 72595 - protein, 1148 aa, Homo sapiens
  Payload ID: 14373
  Gene Symbol: RFC1
  Gene Name: replication factor C (activator 1) 1, 145kDa
  Uniprot ID: P35251
  ENSP ID: ENSP00000371321
MDIRKFFGVIPSGKKLVSETVKKNEKTKSDEETLKAKKGIKEIKVNSSRKEDDFKQKQPSKKKRIIYDSDSESEETLQVKNAKKPPEKLPVSSKPGKISRQDPVTYISETDEEDDFMCKKAASKSKENGRSTNSHLGTSNMKKNEENTKTKNKPLSPIKLTPTSVLDYFGTGSVQRSNKKMVASKRKELSQNTDESGLNDEAIAKQLQLDEDAELERQLHEDEEFARTLAMLDEEPKTKKARKDTEAGETFSSVQANLSKAEKHKYPHKVKTAQVSDERKSYSPRKQSKYESSKESQQHSKSSADKIGEVSSPKASSKLAIMKRKEESSYKEIEPVASKRKENAIKLKGETKTPKKTKSSPAKKESVSPEDSEKKRTNYQAYRSYLNREGPKALGSKEIPKGAENCLEGLIFVITGVLESIERDEAKSLIERYGGKVTGNVSKKTNYLVMGRDSGQSKSDKAAALGTKIIDEDGLLNLIRTMPGKKSKYEIAVETEMKKESKLERTPQKNVQGKRKISPSKKESESKKSRPTSKRDSLAKTIKKETDVFWKSLDFKEQVAEETSGDSKARNLADDSSENKVENLLWVDKYKPTSLKTIIGQQGDQSCANKLLRWLRNWQKSSSEDKKHAAKFGKFSGKDDGSSFKAALLSGPPGVGKTTTASLVCQELGYSYVELNASDTRSKSSLKAIVAESLNNTSIKGFYSNGAASSVSTKHALIMDEVDGMAGNEDRGGIQELIGLIKHTKIPIICMCNDRNHPKIRSLVHYCFDLRFQRPRVEQIKGAMMSIAFKEGLKIPPPAMNEIILGANQDIRQVLHNLSMWCARSKALTYDQAKADSHRAKKDIKMGPFDVARKVFAAGEETAHMSLVDKSDLFFHDYSIAPLFVQENYIHVKPVAAGGDMKKHLMLLSRAADSICDGDLVDSQIRSKQNWSLLPAQAIYASVLPGELMRGYMTQFPTFPSWLGKHSSTGKHDRIVQDLALHMSLRTYSSKRTVNMDYLSLLRDALVQPLTSQGVDGVQDVVALMDTYYLMKEDFENIMEISSWGGKPSPFSKLDPKVKAAFTRAYNKEAHLTPYSLQAIKASRHSTSPSLDSEYNEELNEDDSQSDEKDQDAIETDAMIKKKTKSSKPSKPEKDKEPRKGKGKSSKK

SEQ ID NO: 72596 - protein, 187 aa, Homo sapiens
  Payload ID: 14373
  Gene Symbol: RFC1
  Gene Name: replication factor C (activator 1) 1, 145kDa
  ENSP ID: ENSP00000422129
PEDSEKKRTNYQAYRSYLNREGPKALGSKEIPKGAENCLEGLIFVITGVLESIERDEAKSLIERYGGKVTGNVSKKTNYLVMGRDSGQSKSDKAAALGTKIIDEDGLLNLIRTMPGKKSKYEIAVETEELGYSYVELNASDTRSKSSLKAIVAESLNNTSIKGFYSNGAASSVSTKHALIMDEVDGM

SEQ ID NO: 72597 - protein, 130 aa, Homo sapiens
  Payload ID: 14373
  Gene Symbol: RFC1
  Gene Name: replication factor C (activator 1) 1, 145kDa
  ENSP ID: ENSP00000422475
MDIRKFFGVIPSGKKLVSETVKKNEKTKSDEETLKAKKGIKEIKVNSSRKEDDFKQKQPSKKKRIIYDSDSESEETLQVKNAKKPPEKLPVSSKPGKISRQDPVTYISETEETITGIIRDAVRERARPSA

SEQ ID NO: 72598 - protein, 132 aa, Homo sapiens
  Payload ID: 14373
  Gene Symbol: RFC1
  Gene Name: replication factor C (activator 1) 1, 145kDa
  ENSP ID: ENSP00000422740
MDIRKFFGVIPSGKKLVNSSRKEDDFKQKQPSKKKRIIYDSDSESEETLQVKNAKKPPEKLPVSSKPGKISRQDPVTYISETDEEDDFMCKKAASKSKENGRSTNSHLGTSNMKKNEENTKTKNKPLSPIKL

SEQ ID NO: 72599 - protein, 101 aa, Homo sapiens
  Payload ID: 14373
  Gene Symbol: RFC1
  Gene Name: replication factor C (activator 1) 1, 145kDa
  ENSP ID: ENSP00000424713
  MOD_RES (1)..(1): Any amino acid
XMDTYYLMKEDFENIMEISSWGGKPSPFSKLDPKVKAAFTRAYNKEAHLTPYSLQAIKASRHSTSPSLDSEYNEELNEDDSQSDEKDQDAIETDAMIKVVF

SEQ ID NO: 72600 - protein, 354 aa, Homo sapiens
  Payload ID: 14374
  Gene Symbol: RFC2
  Gene Name: replication factor C (activator 1) 2, 40kDa
  Uniprot ID: P35250
  ENSP ID: ENSP00000055077
MEVEAVCGGAGEVEAQDSDPAPAFSKAPGSAGHYELPWVEKYRPVKLNEIVGNEDTVSRLEVFAREGNVPNIIIAGPPGTGKTTSILCLARALLGPALKDAMLELNASNDRGIDVVRNKIKMFAQQKVTLPKGRHKIIILDEADSMTDGAQQALRRTMEIYSKTTRFALACNASDKIIEPIQSRCAVLRYTKLTDAQILTRLMNVIEKERVPYTDDGLEAIIFTAQGDMRQALNNLQSTFSGFGFINSENVFKVCDEPHPLLVKEMIQHCVNANIDEAYKILAHLWHLGYSPEDIIGNIFRVCKTFQMAEYLKLEFIKEIGYTHMKIAEGVNSLLQMAGLLARLCQKTMAPVAS

SEQ ID NO: 72601 - protein, 320 aa, Homo sapiens
  Payload ID: 14374
  Gene Symbol: RFC2
  Gene Name: replication factor C (activator 1) 2, 40kDa
  Uniprot ID: P35250
  ENSP ID: ENSP00000275627
MEVEAVCGGAGEVEAQDSDPAPAFSKAPGSAGHYELPWVEKYRPVKLNEIVGNEDTVSRLEVFAREGNVPNIIIAGPPGTGKTTSILCLARALLGPALKDAMLELNASNDSMTDGAQQALRRTMEIYSKTTRFALACNASDKIIEPIQSRCAVLRYTKLTDAQILTRLMNVIEKERVPYTDDGLEAIIFTAQGDMRQALNNLQSTFSGFGFINSENVFKVCDEPHPLLVKEMIQHCVNANIDEAYKILAHLWHLGYSPEDIIGNIFRVCKTFQMAEYLKLEFIKEIGYTHMKIAEGVNSLLQMAGLLARLCQKTMAPVAS

SEQ ID NO: 72602 - protein, 77 aa, Homo sapiens
  Payload ID: 14374
  Gene Symbol: RFC2
  Gene Name: replication factor C (activator 1) 2, 40kDa
  ENSP ID: ENSP00000418899
MEVEAVCGGAGEVEAQDSDPAPAFSKAPGSAGHYELPWVEKYRPVKLNEIVGNEDTVSRLEVFAREGNVPNIIIAGH

SEQ ID NO: 72603 - protein, 120 aa, Homo sapiens
  Payload ID: 14374
  Gene Symbol: RFC2
  Gene Name: replication factor C (activator 1) 2, 40kDa
  ENSP ID: ENSP00000419320
  MOD_RES (1)..(1): Any amino acid
XERVPYTDDGLEAIIFTAQGDMRQALNNLQSTFSGFGFINSENVFKVCDEPHPLLVKEMIQHCVNANIDEAYKVGLLPPVLAEEPLTSWAEESGSPSDSCSLVASGLLTRRYHWQHLSSV

SEQ ID NO: 72604 - protein, 87 aa, Homo sapiens
  Payload ID: 14374
  Gene Symbol: RFC2
  Gene Name: replication factor C (activator 1) 2, 40kDa
  ENSP ID: ENSP00000419341
  MOD_RES (1)..(1): Any amino acid
XCGGAGEVEAQDSDPAPAFSKAPGSAGHYELPWVEKYRPVKLNEIVGNEDTVSRLEVFAREGNVPNIIIAHDRRSPASLEENHGNLL

SEQ ID NO: 72605 - protein, 101 aa, Homo sapiens
  Payload ID: 14374
  Gene Symbol: RFC2
  Gene Name: replication factor C (activator 1) 2, 40kDa
  ENSP ID: ENSP00000419827
ARMEVEAVCGGAGEVEAQDSDPAPAFSKAPGSAGHYELPWVEKYRPVKLNEIVGNEDTVSRLEVFAREGNVPNIIIAGSEVTEMQTAVNITQELPEVLLVV

SEQ ID NO: 72606 - protein, 52 aa, Homo sapiens
  Payload ID: 14374
  Gene Symbol: RFC2
  Gene Name: replication factor C (activator 1) 2, 40kDa
  ENSP ID: ENSP00000420392
  MOD_RES (1)..(1): Any amino acid
XDSDPAPAFSKAPGSAGHYELPWVEKYRPVKLNEIVGNEDTVSRLESSRSKF

SEQ ID NO: 72607 - protein, 198 aa, Homo sapiens
  Payload ID: 14374
  Gene Symbol: RFC2
  Gene Name: replication factor C (activator 1) 2, 40kDa
  ENSP ID: ENSP00000420404
  MOD_RES (1)..(1): Any amino acid
XMTDGAQQALRRTMEIYSKTTRFALACNASDKIIEPIQSRCAVLRYTKLTDAQILTRLMNVIEKERVPYTDDGLEAIIFTAQGDMRQALNNLQSTFSGFGFINSENVFKVCDEPHPLLVKEMIQHCVNANIDEAYKILAHLWHLGYSPEDIIGNIFRVCKTFQMAEYLKLEFIKELPNGFPKWLQHVHSHQHSGGSST

SEQ ID NO: 72608 - protein, 75 aa, Homo sapiens
  Payload ID: 14374
  Gene Symbol: RFC2
  Gene Name: replication factor C (activator 1) 2, 40kDa
  ENSP ID: ENSP00000420513
  MOD_RES (1)..(1): Any amino acid
XKAPGSAGHYELPWVEKYRPVKLNEIVGNEDTVSRLEVFAREGNVPNIIIAGSEVTEMQTAVNITQELPEVLLVV

SEQ ID NO: 72609 - protein, 37 aa, Homo sapiens
  Payload ID: 14374
  Gene Symbol: RFC2
  Gene Name: replication factor C (activator 1) 2, 40kDa
  ENSP ID: ENSP00000420563
MEVEAVCGGAGEVEAQDSDPAPAFSKAPGSAGHYELP

SEQ ID NO: 72610 - protein, 28 aa, Homo sapiens
  Payload ID: 14374
  Gene Symbol: RFC2
  Gene Name: replication factor C (activator 1) 2, 40kDa
  ENSP ID: ENSP00000420731
EKYRPVKLNEIVGNEDTVSRLESSRSKF

SEQ ID NO: 72611 - protein, 251 aa, Homo sapiens
  Payload ID: 14374
  Gene Symbol: RFC2
  Gene Name: replication factor C (activator 1) 2, 40kDa
  ENSP ID: ENSP00000479768
MCPTSSLRGIDVVRNKIKMFAQQKVTLPKGRHKIIILDEADSMTDGAQQALRRTMEIYSKTTRFALACNASDKIIEPIQSRCAVLRYTKLTDAQILTRLMNVIEKERVPYTDDGLEAIIFTAQGDMRQALNNLQSTFSGFGFINSENVFKVCDEPHPLLVKEMIQHCVNANIDEAYKILAHLWHLGYSPEDIIGNIFRVCKTFQMAEYLKLEFIKEIGYTHMKIAEGVNSLLQMAGLLARLCQKTMAPVAS

SEQ ID NO: 72612 - protein, 356 aa, Homo sapiens
  Payload ID: 14375
  Gene Symbol: RFC3
  Gene Name: replication factor C (activator 1) 3, 38kDa
  Uniprot ID: P40938
  ENSP ID: ENSP00000369411
MSLWVDKYRPCSLGRLDYHKEQAAQLRNLVQCGDFPHLLVYGPSGAGKKTRIMCILRELYGVGVEKLRIEHQTITTPSKKKIEISTIASNYHLEVNPSDAGNSDRVVIQEMLKTVAQSQQLETNSQRDFKVVLLTEVDKLTKDAQHALRRTMEKYMSTCRLILCCNSTSKVIPPIRSRCLAVRVPAPSIEDICHVLSTVCKKEGLNLPSQLAHRLAEKSCRNLRKALLMCEACRVQQYPFTADQEIPETDWEVYLRETANAIVSQQTPQRLLEVRGRLYELLTHCIPPEIIMKGLLSELLHNCDGQLKGEVAQMAAYYEHRLQLGSKAIYHLEAFVAKFMALYKKFMEDGLEGMMF

SEQ ID NO: 72613 - protein, 305 aa, Homo sapiens
  Payload ID: 14375
  Gene Symbol: RFC3
  Gene Name: replication factor C (activator 1) 3, 38kDa
  Uniprot ID: P40938
  ENSP ID: ENSP00000401001
MSLWVDKYRPCSLGRLDYHKEQAAQLRNLVQCGDFPHLLVYGPSGAGKKTRIMCILRELYGVGVEKLRIEHQTITTPSKKKIEISTIASNYHLEVNPSDAGNSDRVVIQEMLKTVAQSQQLETNSQRDFKVVLLTEVDKLTKDAQHALRRTMEKYMSTCRLILCCNSTSKVIPPIRSRCLAVRVPAPSIEDICHVLSTVCKKEGLNLPSQLAHRLAEKSCRNLRKALLMCEACRVQQYPFTADQEIPETDWEVYLRETANAIVSQQTPQRLLEVRGRLYELLTHCIPPEIIMKACKEESRSCDIF

SEQ ID NO: 72614 - protein, 103 aa, Homo sapiens
  Payload ID: 14375
  Gene Symbol: RFC3
  Gene Name: replication factor C (activator 1) 3, 38kDa
  ENSP ID: ENSP00000484747
EGLNLPSQLAHRLAEKSCRNLRKALLMCEACRVQQYPFTADQEIPETDWEVYLRETANAIVSQQTPQRLLEVRGRLYELLTHCIPPEIIMKACKEESRSCDIF

SEQ ID NO: 72615 - protein, 363 aa, Homo sapiens
  Payload ID: 14376
  Gene Symbol: RFC4
  Gene Name: replication factor C (activator 1) 4, 37kDa
  Uniprot ID: P35249
  ENSP ID: ENSP00000296273
MQAFLKGTSISTKPPLTKDRGVAASAGSSGENKKAKPVPWVEKYRPKCVDEVAFQEEVVAVLKKSLEGADLPNLLFYGPPGTGKTSTILAAARELFGPELFRLRVLELNASDERGIQVVREKVKNFAQLTVSGSRSDGKPCPPFKIVILDEADSMTSAAQAALRRTMEKESKTTRFCLICNYVSRIIEPLTSRCSKFRFKPLSDKIQQQRLLDIAKKENVKISDEGIAYLVKVSEGDLRKAITFLQSATRLTGGKEITEKVITDIAGVIPAEKIDGVFAACQSGSFDKLEAVVKDLIDEGHAATQLVNQLHDVVVENNLSDKQKSIITEKLAEVDKCLADGADEHLQLISLCATVMQQLSQNC

SEQ ID NO: 72616 - protein, 363 aa, Homo sapiens; identical to SEQ ID NO: 72615
  Payload ID: 14376
  Gene Symbol: RFC4
  Gene Name: replication factor C (activator 1) 4, 37kDa
  Uniprot ID: P35249
  ENSP ID: ENSP00000376272

SEQ ID NO: 72617 - protein, 97 aa, Homo sapiens
  Payload ID: 14376
  Gene Symbol: RFC4
  Gene Name: replication factor C (activator 1) 4, 37kDa
  ENSP ID: ENSP00000394870
MQAFLKGTSISTKPPLTKDRGVAASAGSSGENKKAKPVPWVEKYRPKCVDEVAFQEEVVAVLKKSLEGADLPNLLFYGPPGTGKTSTILAAARELFG

SEQ ID NO: 72618 - protein, 43 aa, Homo sapiens
  Payload ID: 14376
  Gene Symbol: RFC4
  Gene Name: replication factor C (activator 1) 4, 37kDa
  ENSP ID: ENSP00000399314
MQAFLKGTSISTKPPLTKDRGVAASAGSSGENKKAKPVPWVEK

SEQ ID NO: 72619 - protein, 336 aa, Homo sapiens
  Payload ID: 14376
  Gene Symbol: RFC4
  Gene Name: replication factor C (activator 1) 4, 37kDa
  ENSP ID: ENSP00000399769
MQAFLKGTSISTKPPLTKDRGVAASAGSSGENKKAKPVPWVEKYRPKCVDEVAFQEEVVAVLKKSLEGADLPNLLFYGPPGTGKTSTILAAARELFGPELFRLRVLELNASDERGIQVVREKVKNFAQLTVSGSRSDGKPCPPFKIVILDEADSMTSAAQAALRRTMEKESKTTRFCLICNYVSRIIEPLTSRCSKFRFKPLSDKIQQQRLLDIAKKENVKISDEGIAYLVKVSEGDLRKAITFLQSATRLTGGKEITEKVITDIAGDLIDEGHAATQLVNQLHDVVVENNLSDKQKSIITEKLAEVDKCLADGADEHLQLISLCATVMQQLSQNC

SEQ ID NO: 72620 - protein, 111 aa, Homo sapiens
  Payload ID: 14376
  Gene Symbol: RFC4
  Gene Name: replication factor C (activator 1) 4, 37kDa
  ENSP ID: ENSP00000401429
GIAYLVKVSEGDLRKAITFLQSATRLTGGKEITEKVITDIAGVIPAEKIDGVFAACQSGSFDKLEAVVKDLIDEGHAATQLVNQLHDVVVENNLSDKQKSIITEKLALTNA

SEQ ID NO: 72621 - protein, 123 aa, Homo sapiens
  Payload ID: 14376
  Gene Symbol: RFC4
  Gene Name: replication factor C (activator 1) 4, 37kDa
  ENSP ID: ENSP00000407982
MQAFLKGTSISTKPPLTKDRGVAASAGSSGENKKAKPVPWVEKYRPKCVDEVAFQEEVVAVLKKSLEGADLPNLLFYGPPGTGKTSTILAAARELFGPELFRLRVLELNASDERGIQVVREKV

SEQ ID NO: 72622 - protein, 214 aa, Homo sapiens
  Payload ID: 14376
  Gene Symbol: RFC4
  Gene Name: replication factor C (activator 1) 4, 37kDa
  ENSP ID: ENSP00000411300
MQAFLKGTSISTKPPLTKDRGVAASAGSSGENKKAKPVPWVEKYRPKCVDEVAFQEEVVAVLKKSLEGADLPNLLFYGPPGTGKTSTILAAARELFGPELFRLRVLELNASDERGIQVVREKVKNFAQLTVSGSRSDGKPCPPFKIVILDEADSMTSAAQAALRRTMEKESKTTRFCLICNYVSRIIEPLTSRCSKFRFKPLSDKIQQQRLLDI
